United States Patent Application Publication US 2025/0327063 A1 - sequence listing, part 2

SEQ ID NO: 12382 - DNA, 120 bp, synthetic construct
  misc_feature 1..120: note = Artificially Synthesized Probe
  source 1..120: mol_type = other DNA
tcactccaaataacaacaaaaaacagttctccagctaccctctggagagctggaaatgaaacctagaaagaccgcagggacccctcagcacctagaatgcagcacatatgggaacctatg

SEQ ID NO: 12383 - DNA, 120 bp, synthetic construct
  misc_feature 1..120: note = Artificially Synthesized Probe
  source 1..120: mol_type = other DNA
aacaacaacaacaacaacaagaggtgagcaaggctcatgtggtgacccagtccgcccccaccaaaagcacccggctacttcccagacccccttctctgtagaggaccaggtcatctctct

SEQ ID NO: 12384 - DNA, 120 bp, synthetic construct
  misc_feature 1..120: note = Artificially Synthesized Probe
  source 1..120: mol_type = other DNA
ccctgtgtccatgtgttctcattgttcaactcccatttatgagtgagaacatgtggtgtttggttttctgatcttgtgatagtttggtgagaatgatggtttccagcttcatccatgtcc

SEQ ID NO: 12385 - DNA, 120 bp, synthetic construct
  misc_feature 1..120: note = Artificially Synthesized Probe
  source 1..120: mol_type = other DNA
ataacctactacacacttcggctgtaggtgtttagtaggttatatactactaataggtgtgttaatatgtaaccactaataggctatacctatacaaatagatgtagctggccaggtgcg

SEQ ID NO: 12386 - DNA, 120 bp, synthetic construct
  misc_feature 1..120: note = Artificially Synthesized Probe
  source 1..120: mol_type = other DNA
gtcatatatgtggtccatcgttgatggtcattgctgtgcagtgcatgactgtaccatgtagaccaggtggctgaaacaacaaatatattctcacagttctgaaagtgagaagttcaaggt

SEQ ID NO: 12387 - DNA, 120 bp, synthetic construct
  misc_feature 1..120: note = Artificially Synthesized Probe
  source 1..120: mol_type = other DNA
aaaaaaaaaaaaaattgtgtgagggacacagacatgaagtccataacaaccagtatccatccccctgtggaatgaggccttcaggaagatcctgtctctctgtgtcattgtgtctccggt

SEQ ID NO: 12388 - DNA, 120 bp, synthetic construct
  misc_feature 1..120: note = Artificially Synthesized Probe
  source 1..120: mol_type = other DNA
acactccctgcactgcacacacttccctgtatgtgtggactcctcagtacagagcaaaaagattgtcctgtgaaaaaggaatgaaacattgattacaggtgagccaccgtgcctgtcatc

SEQ ID NO: 12389 - DNA, 120 bp, synthetic construct
  misc_feature 1..120: note = Artificially Synthesized Probe
  source 1..120: mol_type = other DNA
gtttcaaaaaaaaaacaaacaaacttgagcaccacacacaacctcagacacagagataaagagtgaaatgttggaatgggccttggctatacacctctgtatttttcaggtcttatctgg

SEQ ID NO: 12390 - DNA, 120 bp, synthetic construct
  misc_feature 1..120: note = Artificially Synthesized Probe
  source 1..120: mol_type = other DNA
taatattaaaaggttaaaaaataaagtttatttagacaacagataaaatgatgtttttgcaaattatgtcacaatctggaaaatattaattaaataaaccgagtctgggcatgatggttc

SEQ ID NO: 12391 - DNA, 120 bp, synthetic construct
  misc_feature 1..120: note = Artificially Synthesized Probe
  source 1..120: mol_type = other DNA
tataaaagcacagtgtaaaatgagaggaaaaaaaagaaaaagaaattccaccctcctgatctgaaacctgcttttgatttccttgcaggcttttggaaatgccaagacagcccacaacaa

SEQ ID NO: 12392 - DNA, 120 bp, synthetic construct
  misc_feature 1..120: note = Artificially Synthesized Probe
  source 1..120: mol_type = other DNA
gtggatggatgcattcatgagtggatctacccatacactcatgaatccatccatcacaggtggatgggtagattcatgggtaggtgaatgaataaatgggtagattcatataatgaatgg

SEQ ID NO: 12393 - DNA, 120 bp, synthetic construct
  misc_feature 1..120: note = Artificially Synthesized Probe
  source 1..120: mol_type = other DNA
ggattttgtctgtctgaacctgactgatgatcatttcaactgatggttcatattcaagatacaaacaggcatattgttctcctgaaccttccgcctctagcttcatttctttttcccagt

SEQ ID NO: 12394 - DNA, 120 bp, synthetic construct
  misc_feature 1..120: note = Artificially Synthesized Probe
  source 1..120: mol_type = other DNA
tatctttggttttctttttcttcccgtgggtccatcttttgcacgatcctatctgccacattgcagagattttgacccacaggaagcattcagggtaccttgttgggaagatgacacaga

SEQ ID NO: 12395 - DNA, 120 bp, synthetic construct
  misc_feature 1..120: note = Artificially Synthesized Probe
  source 1..120: mol_type = other DNA
ctttttccagataaagtcatatccccaggttccaggagacataacttccagggcccaccattggaccagacaccagaagggctggcctggcccagcccatagctaaatggtttagcctcc

SEQ ID NO: 12396 - DNA, 120 bp, synthetic construct
  misc_feature 1..120: note = Artificially Synthesized Probe
  source 1..120: mol_type = other DNA
aacatgagtttcctcctagaaacggacacagcctccctccccaggaatgcaggaaggtgctgaaactggttactagcccggcaaaggaatagaaggaaacatttttttctcctatttgaa

SEQ ID NO: 12397 - DNA, 120 bp, synthetic construct
  misc_feature 1..120: note = Artificially Synthesized Probe
  source 1..120: mol_type = other DNA
cccagtatggaagaggagtccctgagaaatacatcaaatgatgcctagaacatatttttcctcgaaaaaacattcactgccactacttttagcattgagagatatttggggctgcagaga

SEQ ID NO: 12398 - DNA, 120 bp, synthetic construct
  misc_feature 1..120: note = Artificially Synthesized Probe
  source 1..120: mol_type = other DNA
taatcccagctactcaggaggctgaggcaggagaatcgcttgaactcaggaggtggaggttgcagtgagtagaaatcacgtcattgcactccagcctgggcaacagagtaagactccatc

SEQ ID NO: 12399 - DNA, 120 bp, synthetic construct
  misc_feature 1..120: note = Artificially Synthesized Probe
  source 1..120: mol_type = other DNA
tgtcctcatacctcccaagccacctttgtgtgcctccctggaggttttatccccagtatgtgctcagatgtctgcacaaaatatacttagattggaaacatttctcaagcatggtagcac

SEQ ID NO: 12400 - DNA, 120 bp, synthetic construct
  misc_feature 1..120: note = Artificially Synthesized Probe
  source 1..120: mol_type = other DNA
aaaaacaactattttcctcccaattttgacctgtaggaactaccatgtgttttattatttgttacttggggtcagcgaggaagagcgccaagaatttcagctcaagcagcctgaagatta

SEQ ID NO: 12401 - DNA, 120 bp, synthetic construct
  misc_feature 1..120: note = Artificially Synthesized Probe
  source 1..120: mol_type = other DNA
gagttcaaggctgtaagtgagctaggattgtaccgcttcatttcagctcgggcaacagagtaagatcctgtctctaaaaatcaaagaagttaaggtagtgaattttatattatgcttatg

SEQ ID NO: 12402 - DNA, 120 bp, synthetic construct
  misc_feature 1..120: note = Artificially Synthesized Probe
  source 1..120: mol_type = other DNA
ctcaaaaaaaaaaaaaaaagatggcacctctgaatagccagtggactccatcctggacaacatagccagtgactggccagacacaagtaccatcccatcaagttcacagacagcattaga

SEQ ID NO: 12403 - DNA, 120 bp, synthetic construct
  misc_feature 1..120: note = Artificially Synthesized Probe
  source 1..120: mol_type = other DNA
ttagacatttttcaaatttcatgcgttccgaccagaatttgctggttttatggattcagcccggttccctgggaagtatctgctgtcttaggaacgtagaaactacccaaatatgagtgc

SEQ ID NO: 12404 - DNA, 120 bp, synthetic construct
  misc_feature 1..120: note = Artificially Synthesized Probe
  source 1..120: mol_type = other DNA
accccagtcttttgttttttaatccatttatgctttgcgttccattattggtacaggagccccagcttctgttgagttcttggggatatgtgagcatctgctgggatatttagagaaagc

SEQ ID NO: 12405 - DNA, 120 bp, synthetic construct
  misc_feature 1..120: note = Artificially Synthesized Probe
  source 1..120: mol_type = other DNA
tcagtgataccaggacatgcctgataagtcctccatctcccttttccttctccctctccttgacctccaaacaggtgaagcgagaaatcttggtggaggttctgaccaaaagaaaaacgg

SEQ ID NO: 12406 - DNA, 120 bp, synthetic construct
  misc_feature 1..120: note = Artificially Synthesized Probe
  source 1..120: mol_type = other DNA
tttgccccagcctggatgttttctctgtgctgtatttctcttgcatttttacatctcaagagcaggatcacttgcagcttgtttaacaataggaaagtacctaatcacggcagggatttt

SEQ ID NO: 12407 - DNA, 120 bp, synthetic construct
  misc_feature 1..120: note = Artificially Synthesized Probe
  source 1..120: mol_type = other DNA
attttggttgctctgaggagcgtatggaaaggcttcagcggccgttccagaggctactgggtctgttaacgcctcagtgtgcaggcacatcctccaggacagggtgaaatatgggtgttg

SEQ ID NO: 12408 - DNA, 120 bp, synthetic construct
  misc_feature 1..120: note = Artificially Synthesized Probe
  source 1..120: mol_type = other DNA
gactccatggccaagtctctgtacagcgccctgttcgactggattgtgctgcggatcaaccacgcactcctcaacaagaaggacgtggaagaggcagtctcggtgagtgcccccatttgc

SEQ ID NO: 12409 - DNA, 120 bp, synthetic construct
  misc_feature 1..120: note = Artificially Synthesized Probe
  source 1..120: mol_type = other DNA
atgagcagctgcagtattacttcaaccagcacatcttcaagctggagcaggtgcggaaagggcttttttgtcaattttttgaacttggtaaatcagacatcacgtgaaatttaccatctt

SEQ ID NO: 12410 - DNA, 120 bp, synthetic construct
  misc_feature 1..120: note = Artificially Synthesized Probe
  source 1..120: mol_type = other DNA
tcaggaatgttttgagccacagttcatgtgggggcttctgtgtccaaacagaaaatctttttgttagttgagaaacagggttgccttttaaggatttgcttagctcaaggacattgataa

SEQ ID NO: 12411 - DNA, 120 bp, synthetic construct
  misc_feature 1..120: note = Artificially Synthesized Probe
  source 1..120: mol_type = other DNA
ttcctattaagctttttggcagtgaagcattgggagtgtagctggtcagaattaagttgtgcaggaagggtgtgacatacacactaaattgtgaagacttagcacatgagaaaaaagaac

SEQ ID NO: 12412 - DNA, 120 bp, synthetic construct
  misc_feature 1..120: note = Artificially Synthesized Probe
  source 1..120: mol_type = other DNA
aataaagctttattggcacatagcctttggtttgcattatcatctgtggctgttttcacatcacgactgttagttgcaacagacattgtctggttcataaggtgctatctggcccattac

SEQ ID NO: 12413 - DNA, 120 bp, synthetic construct
  misc_feature 1..120: note = Artificially Synthesized Probe
  source 1..120: mol_type = other DNA
cttgggagcagaagtgtctcaggtttgggatttttttcagatttttcaatatttatattatacttactggttgaacatcccaaatctgaaaatccaaaatctgaaatgcttcaatgagcg

SEQ ID NO: 12414 - DNA, 120 bp, synthetic construct
  misc_feature 1..120: note = Artificially Synthesized Probe
  source 1..120: mol_type = other DNA
caatatatgttatgtagatattacatatctgggagataagaaacttaccgaccccgcgccacccctgcaggaggaatatcagggcgaggggatcacgtggcacaacatcggctacacaga

SEQ ID NO: 12415 - DNA, 120 bp, synthetic construct
  misc_feature 1..120: note = Artificially Synthesized Probe
  source 1..120: mol_type = other DNA
aggtcaataaggcacctcattctgggtcacccagttgtagtcactgaaatcacgtgacacataccgaactactttcctgtggctcctctaaggaaccgctacaagccaggtgggctcttg

SEQ ID NO: 12416 - DNA, 120 bp, synthetic construct
  misc_feature 1..120: note = Artificially Synthesized Probe
  source 1..120: mol_type = other DNA
aaggtcacattcaaaagttggtggtatggggttaagatatggacatattgtcttatcagcagctctatcagacccatcccttgccaatgacatctccaaggggctggccagagactcaaa

SEQ ID NO: 12417 - DNA, 120 bp, synthetic construct
  misc_feature 1..120: note = Artificially Synthesized Probe
  source 1..120: mol_type = other DNA
aaatactgtgctaaaatattacctatctcaatgactgagggttttgggggacactcaaggcagatgccttacactccataccctctttacagtcctggaaatgatatgtttcatagctat

SEQ ID NO: 12418 - DNA, 120 bp, synthetic construct
  misc_feature 1..120: note = Artificially Synthesized Probe
  source 1..120: mol_type = other DNA
aaagaaacaaatatttttctgttttaaaaatcctgaagccttgagagcgtcacttcaccctcagcctccttgtaccaggctgcagctatgccagctgacgcagagagcagagtcccagcc

SEQ ID NO: 12419 - DNA, 120 bp, synthetic construct
  misc_feature 1..120: note = Artificially Synthesized Probe
  source 1..120: mol_type = other DNA
tttagtacattcattatgttgtgcaaacgccacctgtctacctgaagtgttcctgtcaccctgaacagaaactcgacctgcgtgtgtaatttaacctcagggcatgctatcagcaactcc

SEQ ID NO: 12420 - DNA, 120 bp, synthetic construct
  misc_feature 1..120: note = Artificially Synthesized Probe
  source 1..120: mol_type = other DNA
aaggaggaaggataaagctttcctgagaaataggaaatagtgctctgttttggggatccaaaacttcacagttacccacccaactttgccccaaacttgagtgatgagctgctttttttt

SEQ ID NO: 12421 - DNA, 120 bp, synthetic construct
  misc_feature 1..120: note = Artificially Synthesized Probe
  source 1..120: mol_type = other DNA
gtagtcctagcactttaggaggccaagacagctctcttgaggccagctatttgagaccagcctgggccacatagtgagaccccatctctccagaaaagttgaaacttagtcatgtgtgtc

SEQ ID NO: 12422 - DNA, 120 bp, synthetic construct
  misc_feature 1..120: note = Artificially Synthesized Probe
  source 1..120: mol_type = other DNA
gcaccccttcggaaaaactttaccggtgagcaagaccctgatttgcccaaactgaaatcattaggtggcagcagcattgtttcaaacaacttagggaatgctacattctttttttttttt

SEQ ID NO: 12423 - DNA, 120 bp, synthetic construct
  misc_feature 1..120: note = Artificially Synthesized Probe
  source 1..120: mol_type = other DNA
cctggagtggcccaaaagtagttctgccaagttacttcattcacagtcagaaacacatacactttgatattgcacatgagatgacacggggtcttttgtggaccctagcaatgaccaagg

SEQ ID NO: 12424 - DNA, 120 bp, synthetic construct
  misc_feature 1..120: note = Artificially Synthesized Probe
  source 1..120: mol_type = other DNA
gtttatacagattctccctttcagctgctcaatgctagatttctcatttgacggctctgaggagttcgatattaacgcttttgaggacatcattgctttctatgaaagcaagaagtaagt

SEQ ID NO: 12425 - DNA, 120 bp, synthetic construct
  misc_feature 1..120: note = Artificially Synthesized Probe
  source 1..120: mol_type = other DNA
agaactgctgtgttcaaactgtggctcttgtattcaaattaattcctccaaaggccttaatgaagccaacaaggagattgacatctggccacaaaatcatggagagagactaatttgctc

SEQ ID NO: 12426 - DNA, 120 bp, synthetic construct
  misc_feature 1..120: note = Artificially Synthesized Probe
  source 1..120: mol_type = other DNA
taaataaataaataaatatccccaaaggctcttaaatatgagaactttttcagtgatccaaatgaaaaggatcgaataaagtggaatgaccagatggaaataattttttttttttttttt

SEQ ID NO: 12427 - DNA, 120 bp, synthetic construct
  misc_feature 1..120: note = Artificially Synthesized Probe
  source 1..120: mol_type = other DNA
cagtcttcctaatttgcatcggccactaaaaccacagtgctgtctcatggcccacccccagccatcactaaatgccaatcaataacacccctggcctctgtctgcactgtggcccaggca

SEQ ID NO: 12428 - DNA, 120 bp, synthetic construct
  misc_feature 1..120: note = Artificially Synthesized Probe
  source 1..120: mol_type = other DNA
gacctcaggtgatccgtctgtcttggcctcccaaagtgctgggattacaggcatgattcaccgcccttttttttttttttcttttttaagagatgggggtttcattctgttgcccaggct

SEQ ID NO: 12429 - DNA, 120 bp, synthetic construct
  misc_feature 1..120: note = Artificially Synthesized Probe
  source 1..120: mol_type = other DNA
gattcaggtgaaactgaatgcaaccacggatggctaggcatctcacagatctacaagttaccatctccttagccggtcttcaaaaggcaccaggccttttgaataaataaatatatttac

SEQ ID NO: 12430 - DNA, 120 bp, synthetic construct
  misc_feature 1..120: note = Artificially Synthesized Probe
  source 1..120: mol_type = other DNA
taacccgccaggcgtggcttgctgaactaacccaaatcccgacactgtgttccttttgttcacaaaaccatttttaatattttgacaggaaaagtaaaggtatcaaacaaaagcagatca

SEQ ID NO: 12431 - DNA, 120 bp, synthetic construct
  misc_feature 1..120: note = Artificially Synthesized Probe
  source 1..120: mol_type = other DNA
catgtgtctgtcctagaacctactggactccaagtccctgaaactcatcatcagcatgactctgcacgaccgcaccaccaagtccctactgcacctgcacaagaagaaaaagccaccaag

SEQ ID NO: 12432 - DNA, 120 bp, synthetic construct
  misc_feature 1..120: note = Artificially Synthesized Probe
  source 1..120: mol_type = other DNA
aatgctttctctttcccttaacagacatcccttaacaagctcttggaggcactggggaaggcggagcccttctttatccgctgcatccgttccaatgctgaaaaggtgagtttctctaag

SEQ ID NO: 12433 - DNA, 120 bp, synthetic construct
  misc_feature 1..120: note = Artificially Synthesized Probe
  source 1..120: mol_type = other DNA
gcaccgtttgtctttatagcaacaccatgccttatcccttactgcccaccagagtgaagtccagacccctaagctccaggcttaaagcccactgaggcagctgcatttccagcctcttct

SEQ ID NO: 12434 - DNA, 120 bp, synthetic construct
  misc_feature 1..120: note = Artificially Synthesized Probe
  source 1..120: mol_type = other DNA
acagcgccaagtacacgttccaggtaggccacaagcacatatacctggacacacctgttccgtggcaaaggcaatcaccctcttccaaagagagctccttgctggagtgtaaactcagca

SEQ ID NO: 12435 - DNA, 120 bp, synthetic construct
  misc_feature 1..120: note = Artificially Synthesized Probe
  source 1..120: mol_type = other DNA
tacaaaaaaaaaaaaaaaaaattagccaggcatggtggggcacacctgtaacctcagctacttgggaggctgaggcaggagaattgcttgaacccgggagatggaggttgcaataagccg

SEQ ID NO: 12436 - DNA, 120 bp, synthetic construct
  misc_feature 1..120: note = Artificially Synthesized Probe
  source 1..120: mol_type = other DNA
tcctagactgtaagccccattgcaagggtgactgtggttcccagccacctcgaccatctaaaagatctaggaccttgtatctgcagtggtctttcttaagattacagactgttggctggg

SEQ ID NO: 12437 - DNA, 120 bp, synthetic construct
  misc_feature 1..120: note = Artificially Synthesized Probe
  source 1..120: mol_type = other DNA
gaaagcctgaaattttagatttgtcattaccattcctgtcaaacccagcttcaccttaaccagggtcaccagatctctgtctcctcatcgctggccagaacactcacctagattttcctt

SEQ ID NO: 12438 - DNA, 120 bp, synthetic construct
  misc_feature 1..120: note = Artificially Synthesized Probe
  source 1..120: mol_type = other DNA
acagagtcttgctctgttgcccagacaggtggtgtgatctcagctcactgcaacctccgtctcccaggttcaactggttctcctgcctcagcctccaagcagctgggattacaggtgccc

SEQ ID NO: 12439 - DNA, 120 bp, synthetic construct
  misc_feature 1..120: note = Artificially Synthesized Probe
  source 1..120: mol_type = other DNA
ctcctcggaatattccagaagccaaaaaggtcactcaccaaattgctgcccgtgatataccatctggcctgtggcactaaggggatgtcattctggacacagggaaaggctggtgggaaa

SEQ ID NO: 12440 - DNA, 120 bp, synthetic construct
  misc_feature 1..120: note = Artificially Synthesized Probe
  source 1..120: mol_type = other DNA
ataaaataaaagcaaaacaaaaagcctcctagaaaaagacccaagggaaagcccacagtggaccccaaaggagtttgaggcttcttaatagaacccacccaccacagccccaacaagggt

SEQ ID NO: 12441 - DNA, 120 bp, synthetic construct
  misc_feature 1..120: note = Artificially Synthesized Probe
  source 1..120: mol_type = other DNA
gtgagtctcctggaagacaaaaaggagagcagagaagatgaaacccttctagtcgtagagacggaggctgagaacacatctcaaaagcagcccacagagcaaccccaggccatggcagtt

SEQ ID NO: 12442 - DNA, 120 bp, synthetic construct
  misc_feature 1..120: note = Artificially Synthesized Probe
  source 1..120: mol_type = other DNA
gaaaatgatagaggtgatgaatggaagacagatatagatgatggatggatggaagatacacatgatggatgaagggatggatagatagaagacaggtagtaatgatggatagaggcatgg

SEQ ID NO: 12443 - DNA, 120 bp, synthetic construct
  misc_feature 1..120: note = Artificially Synthesized Probe
  source 1..120: mol_type = other DNA
aaaaaaaaaaaaaagtagagattatggatagaaggaagatagatgccgacgatagatggatggaaggaagataggtaggtagagacaatgaatggagggatggaagataggtagagatga

SEQ ID NO: 12444 - DNA, 120 bp, synthetic construct
  misc_feature 1..120: note = Artificially Synthesized Probe
  source 1..120: mol_type = other DNA
gggcagaactgcccaagtgagaacccaagaaccactaagacaagaaaatgccactgactcactctagtcagtaaaagccatgtttctgtgatctcgcagggagaggcgcacctccttctc

SEQ ID NO: 12445 - DNA, 120 bp, synthetic construct
  misc_feature 1..120: note = Artificially Synthesized Probe
  source 1..120: mol_type = other DNA
tgtggctccatcactctaatctctgtctctatcggcacttggccttcccctcagtgtctgtgtcttctgtcttctgtcccttaaaaggacacgtggctgaatggatgcagtaggtcacgc

SEQ ID NO: 12446 - DNA, 120 bp, synthetic construct
  misc_feature 1..120: note = Artificially Synthesized Probe
  source 1..120: mol_type = other DNA
ctcacgtccattttcatttcagacttaaaagaagccacgtactttctcctgcagatccacgtttaagaggctttttctgcataaaaccaaggataaaaaatacagcctggagggcgcaga

SEQ ID NO: 12447 - DNA, 120 bp, synthetic construct
  misc_feature 1..120: note = Artificially Synthesized Probe
  source 1..120: mol_type = other DNA
tggctcaaaaaaaataataatgcatatttggtctcaaagcaaagattgatgaagcactgtgtgcaacagaagtggaggcgaacaagctgtggctgccctcaggagggttataccccgtgg

SEQ ID NO: 12448 - DNA, 120 bp, synthetic construct
  misc_feature 1..120: note = Artificially Synthesized Probe
  source 1..120: mol_type = other DNA
tcagttcctctccccttccagataaatgacctccgttcccagaagacgcccattgagagcttgtttatcgaagccaccgagaagttcaggagcaacatcaaaacgatgtactctgtcccg

SEQ ID NO: 12449 - DNA, 120 bp, synthetic construct
  misc_feature 1..120: note = Artificially Synthesized Probe
  source 1..120: mol_type = other DNA
agagcaaagctcagaagaagaagcggaagcaggagcgtgctgtgagtaggctgcacatagatgagagtccgagcaggcgaacattggcaggagcatgcacgtgtgtgtcagtgtcaatgt

SEQ ID NO: 12450 - DNA, 120 bp, synthetic construct
  misc_feature 1..120: note = Artificially Synthesized Probe
  source 1..120: mol_type = other DNA
cctctcctacatgtgtttttctgccagaaccatttgggccagggtcttttcagcccagaaggcagccccaccaccccacatctgtccaacagtcagttgtcatggtcctgagataaggat

SEQ ID NO: 12451 - DNA, 120 bp, synthetic construct
  misc_feature 1..120: note = Artificially Synthesized Probe
  source 1..120: mol_type = other DNA
tgtggacctcctagtgtgcaagatgacctgccacaagaagtgcgtgcacaagattcagagccactgctcctacacctacgggaggaaggtgagtgtacgaggcctggaactttctacaat

SEQ ID NO: 12452 - DNA, 120 bp, synthetic construct
  misc_feature 1..120: note = Artificially Synthesized Probe
  source 1..120: mol_type = other DNA
cagggcgagccaggcgttgagcctggccacttcggcgtgtgcgtagacagcctgaccagcgacaaggcctcggtgcccatcgtgctggagaagctcctggaacacgtggagatgcacggc

SEQ ID NO: 12453 - DNA, 120 bp, synthetic construct
  misc_feature 1..120: note = Artificially Synthesized Probe
  source 1..120: mol_type = other DNA
ttgaggtacctctctgtgctgcggaagcatctcccagtgctgggctgtggcactgctttcccaacagccaccccagggctcagaagttcagtctcggggctccctggtacctccctccct

SEQ ID NO: 12454 - DNA, 120 bp, synthetic construct
  misc_feature 1..120: note = Artificially Synthesized Probe
  source 1..120: mol_type = other DNA
tgagctgagatcatgccattgcactccagcctgggcaacaaaagcgaaactctatctcaaaaaaaaaaaacaaaatacaaaaattagccaggcctggtggcatgtgcctataatgccagc

SEQ ID NO: 12455 - DNA, 120 bp, synthetic construct
  misc_feature 1..120: note = Artificially Synthesized Probe
  source 1..120: mol_type = other DNA
gccaccgcttccagcctaaaacagaacttttaacaaaggctggatgataggtgaatggtagtggattcctctctctgctacaaagcgtcctgtcacgggaggataaggaacaagcagcag

SEQ ID NO: 12456 - DNA, 120 bp, synthetic construct
  misc_feature 1..120: note = Artificially Synthesized Probe
  source 1..120: mol_type = other DNA
agcagatgaggaaatacaaagtgaagatggaggagatcagccaactggaggctgcagagagtatcgccttccgcaggctttcgctcctgcgacaaaatgctgtgagtaccggtgatcgtg

SEQ ID NO: 12457 - DNA, 120 bp, synthetic construct
  misc_feature 1..120: note = Artificially Synthesized Probe
  source 1..120: mol_type = other DNA
tccctcagtccttcatgtttagggcaagctggagtgcaggttccatccctggtggtccgcttgacctcgccaggtttggtcctgtcatccctaacactgggcaaacaacacttttttttt

SEQ ID NO: 12458 - DNA, 120 bp, synthetic construct
  misc_feature 1..120: note = Artificially Synthesized Probe
  source 1..120: mol_type = other DNA
ctccccaccgtggccgcccctccacgacgaaggccgtcgtccttcgtaacggtcagagtgaagaccccccggcggacccccatcatgcccacggccaacatcaagctcccaccaggcctg

SEQ ID NO: 12459 - DNA, 120 bp, synthetic construct
  misc_feature 1..120: note = Artificially Synthesized Probe
  source 1..120: mol_type = other DNA
ctttaaactgtaacagccttaatggaagaccaaatggttttttatatgtgtatgtacaaagttttctattaacgctgcccgtctcccttataacctggacgtgagctgtcagagcagaag

SEQ ID NO: 12460 - DNA, 120 bp, synthetic construct
  misc_feature 1..120: note = Artificially Synthesized Probe
  source 1..120: mol_type = other DNA
acagttgggaggggcatggctgggatttagactctgccctgccagcctctagaggcccctttgatgggccctgggtttggtctccattgtttgttgtgggtttttttcttgaaacacggt

SEQ ID NO: 12461 - DNA, 120 bp, synthetic construct
  misc_feature 1..120: note = Artificially Synthesized Probe
  source 1..120: mol_type = other DNA
ttaaatcaccatttttccttgaaaagggacacttgatctgatgtaattgtggtgatgtcttatgaacgcaacatatcctctatcagtcttctgtgcaagtctatgctatattagagacag

SEQ ID NO: 12462 - DNA, 120 bp, synthetic construct
  misc_feature 1..120: note = Artificially Synthesized Probe
  source 1..120: mol_type = other DNA
agagacaaatataatccttcaaggttgattttcatggcaaatgtttcatctgagaaaaaatgaggatgtactgtaggaaggcaggaggcccactacagagctaagtaggaggaatggcac

SEQ ID NO: 12463 - DNA, 120 bp, synthetic construct
  misc_feature 1..120: note = Artificially Synthesized Probe
  source 1..120: mol_type = other DNA
gcaaatattgtaacaattattttctccttttgaaggaacaatattcttcaagagaaggtcactctaccaaagccaggagcacagtattctcaggatctcaacaaggaagagcagaccaag

SEQ ID NO: 12464 - DNA, 120 bp, synthetic construct
  misc_feature 1..120: note = Artificially Synthesized Probe
  source 1..120: mol_type = other DNA
acataccaaagaacaatgaacttttcctttagttctaagctaagctcctcatgctgtaaatttaattcctctggttctgggcttggctaagatgaacacctgtctgctcttcttcagata

SEQ ID NO: 12465 - DNA, 120 bp, synthetic construct
  misc_feature 1..120: note = Artificially Synthesized Probe
  source 1..120: mol_type = other DNA
taagaaataaagcctaggaggtccccaaaccagagatcaaagatccactttagctgttccattttcagcaaccacagataactctttaatcttcccatagctacttgatacccatttcgt

SEQ ID NO: 12466 - DNA, 120 bp, synthetic construct
  misc_feature 1..120: note = Artificially Synthesized Probe
  source 1..120: mol_type = other DNA
tcaagtcgtaacacttaatccacctaaactgggaataatgagagtattcagtgaacaaagtgactgaggttacatatacatcagtgattctcaggattggttttgataatccttcaggac

SEQ ID NO: 12467 - DNA, 120 bp, synthetic construct
  misc_feature 1..120: note = Artificially Synthesized Probe
  source 1..120: mol_type = other DNA
ataaagcactgtgatacatttaagctacctaacagatctaaaaatacaggactctctaaataccaccctatcctctatcagaatcaacaagggaaatacgggaggggcaaggacatcata

SEQ ID NO: 12468 - DNA, 120 bp, synthetic construct
  misc_feature 1..120: note = Artificially Synthesized Probe
  source 1..120: mol_type = other DNA
ttactcataagattggaagagctctcaagctgccactaactagacttactctcacattccttagggaatatcttcaaggaaggacatcctccttatgtctaatctaaattcttcctcctg

SEQ ID NO: 12469 - DNA, 120 bp, synthetic construct
  misc_feature 1..120: note = Artificially Synthesized Probe
  source 1..120: mol_type = other DNA
ttctagctcacagatctaggtccatatatcaacaaggaataagattatctaaaaagaaggaatatttgggccctattccatttctctctgcatgaaatcacctcttggtttacagtagta

SEQ ID NO: 12470 - DNA, 120 bp, synthetic construct
  misc_feature 1..120: note = Artificially Synthesized Probe
  source 1..120: mol_type = other DNA
atgcagctgctgtgtttcaagctcaggatgacagtggtgcacaagactcgcaggtaagttaaaatgctctaagtggagtatttttattctgtgcgatttttaaatgtctgcttttctaaa

SEQ ID NO: 12471 - DNA, 120 bp, synthetic construct
  misc_feature 1..120: note = Artificially Synthesized Probe
  source 1..120: mol_type = other DNA
tttctgaaaaccaaaaaaaacccctcatgagtaattgttctaagattaacaaatgtatcctttccaagaagggtttaactttatggtggcacatcccacaggtttgcacctgatcgattt

SEQ ID NO: 12472 - DNA, 120 bp, synthetic construct
  misc_feature 1..120: note = Artificially Synthesized Probe
  source 1..120: mol_type = other DNA
tgaattcgttcattcaactaatttacatggagaacctacttgtatgttgggctctgcacttggtatggaagattatagcaaaaatgagacacaaactcatcactattaggggaattactc

SEQ ID NO: 12473 - DNA, 120 bp, synthetic construct
  misc_feature 1..120: note = Artificially Synthesized Probe
  source 1..120: mol_type = other DNA
tttttcaaagccttacacatacctttcgtggagtccatcaggattttgtgccacgagctaaaaagagaagaattttccagtctaatatgtgtttactgctgttggtgccacttttgagca

SEQ ID NO: 12474 - DNA, 120 bp, synthetic construct
  misc_feature 1..120: note = Artificially Synthesized Probe
  source 1..120: mol_type = other DNA
aatagtcatcaaatatgccacaggtaaatacagccctaaggcctctcttcattgttattacactatcagatcaaacagtagattctgtggtttcaaatttgatggctaggctggacgcag

SEQ ID NO: 12475 - DNA, 120 bp, synthetic construct
  misc_feature 1..120: note = Artificially Synthesized Probe
  source 1..120: mol_type = other DNA
gaaattttacccaccacgtttcattcaagtgccagagaacatgtcgattgatgaaggaagattctgcagaatggacttcaaagtaagagaagggttcaaaagtactgggggaaaattaac

SEQ ID NO: 12476 - DNA, 120 bp, synthetic construct
  misc_feature 1..120: note = Artificially Synthesized Probe
  source 1..120: mol_type = other DNA
ccactcagatacgggaactgtttaaattcatatatggacaaataggtttcagtgatgcaatactttaaaattctgccatctccttgtgtttttctttctaggtgagtggactgccagctc

SEQ ID NO: 12477 - DNA, 120 bp, synthetic construct
  misc_feature 1..120: note = Artificially Synthesized Probe
  source 1..120: mol_type = other DNA
ccaaaacaggcctacttgctttagaaaacaggtatggctacatttatgtctcaaatctgtcttaagtagagcagttcttataaaactggtgtctggtttttaaattttacactttaagtg

SEQ ID NO: 12478 - DNA, 120 bp, synthetic construct
  misc_feature 1..120: note = Artificially Synthesized Probe
  source 1..120: mol_type = other DNA
agaaactaaacaaaattttaccaatttggcatggctcatggagccaataggtaatttgaacccaagctgtctgatactctttccatcactcatgctgcctccctgtagatgagatgataa

SEQ ID NO: 12479 - DNA, 120 bp, synthetic construct
  misc_feature 1..120: note = Artificially Synthesized Probe
  source 1..120: mol_type = other DNA
agttttagagggagattcagtgaaactagaatgccagatctcggctatacctccaccaaagcttttctggaaaagaaataatgaaatggtacaattcaacactgaccgaataaggtagga

SEQ ID NO: 12480 - DNA, 120 bp, synthetic construct
  misc_feature 1..120: note = Artificially Synthesized Probe
  source 1..120: mol_type = other DNA
tacgggttcgaccaacattcagcaaatatttagcacttaatgggaaaggtttgaatgtaaaacaagcttttaacccagaaggagaatttcagcgtttggcagctcaatctggactctatg

SEQ ID NO: 12481 - DNA, 120 bp, synthetic construct
  misc_feature 1..120: note = Artificially Synthesized Probe
  source 1..120: mol_type = other DNA
ctgctttgcgaggtgtgactgcagcgcagccaggaaacaaatccagggacagcttgttcttcctgcggtgtcggtgttggtggtggcttaaaaattgcccacagactgggctcatgcctg

SEQ ID NO: 12482 - DNA, 120 bp, synthetic construct
  misc_feature 1..120: note = Artificially Synthesized Probe
  source 1..120: mol_type = other DNA
agtgaaatagtagaagttgtcttaagcggctaagttttggagaaatttgttattcagcaacagatatctaatacaatgttgtcagggaggataagtggatggagatggccgtggcgtgtt

SEQ ID NO: 12483 - DNA, 120 bp, synthetic construct
  misc_feature 1..120: note = Artificially Synthesized Probe
  source 1..120: mol_type = other DNA
ggagagactatgtaacgtggcccaggtcaagatcacagttcaggttccctcccctcccgaccactgtcattagggatcctgagtcccagagccttccaaggggcttgtccatctgtctgt

SEQ ID NO: 12484 - DNA, 120 bp, synthetic construct
  misc_feature 1..120: note = Artificially Synthesized Probe
  source 1..120: mol_type = other DNA
gcaatatgctgcggaagttcttccggaagttgtcatctagaaaggcgtagaggaaggggttcaggcacgagttggcgtagctgaggctggtgatgacgtaggacatactgatgaccagtg

SEQ ID NO: 12485 - DNA, 120 bp, synthetic construct
  misc_feature 1..120: note = Artificially Synthesized Probe
  source 1..120: mol_type = other DNA
gtgccttggagttgggtatctggttgggggcctccttgggctggattctaggaaagaaaaacaaccagagactttgagatccggccgtctgttagggcacagccactccaggttctctgg

SEQ ID NO: 12486 - DNA, 120 bp, synthetic construct
  misc_feature 1..120: note = Artificially Synthesized Probe
  source 1..120: mol_type = other DNA
aagcagaacttgttggccataggcaacccaccttctttttttgtcttttgctaaaagaggaactcagcctaggcaagctgtgaaaggctgcagagaagacgttctcacgctgacacgtaa

SEQ ID NO: 12487 - DNA, 120 bp, synthetic construct
  misc_feature 1..120: note = Artificially Synthesized Probe
  source 1..120: mol_type = other DNA
gggcttgtagccacagtttgtcacataagtggagcttgacgcccacaaggtcaggggatggtgattagcagccgtgaggagagggtgcattggggctgaattttgtgatttggggtgttc

SEQ ID NO: 12488 - DNA, 120 bp, synthetic construct
  misc_feature 1..120: note = Artificially Synthesized Probe
  source 1..120: mol_type = other DNA
ttcttcagagcagggtgttccaggagggtcttcccttaagcctcagtagtggggagcccagtgtcagaggcatccctcagagcacagaatcttcccatgcaaagatcccactgtgtgtct

SEQ ID NO: 12489 - DNA, 120 bp, synthetic construct
  misc_feature 1..120: note = Artificially Synthesized Probe
  source 1..120: mol_type = other DNA
acacctgtccctcagtccgtgctgcgacttggatcttcacacgggcatgcatatgtgtagcaggcatacagacccagagattcatacagactccagtgtgcttgttgaccatctcatctc

SEQ ID NO: 12490 - DNA, 120 bp, synthetic construct
  misc_feature 1..120: note = Artificially Synthesized Probe
  source 1..120: mol_type = other DNA
gagataagtaattcagggccagtttccctcagagtgggaggtgaattctccagggaagctgggagaaaacacactttatttataaaactgggaaggggccatttctcatttaaattcagg

SEQ ID NO: 12491 - DNA, 120 bp, synthetic construct
  misc_feature 1..120: note = Artificially Synthesized Probe
  source 1..120: mol_type = other DNA
gttgcttaaatcaattatcaaagcgcttgcagcctcctgctcactcacaaagacccgaatccaagcacaggacagcaggcccccaggacagtcttccccagtggtgactgctccctgttc

SEQ ID NO: 12492 - DNA, 120 bp, synthetic construct
  misc_feature 1..120: note = Artificially Synthesized Probe
  source 1..120: mol_type = other DNA
acacacaagcacacagatgccagcacgtacacacctgccctcccacacatggtcacacgcttacactccattgttgcatgaccttctccagatcagcacctgccatgtcctgcctgccag

SEQ ID NO: 12493 - DNA, 120 bp, synthetic construct
  misc_feature 1..120: note = Artificially Synthesized Probe
  source 1..120: mol_type = other DNA
agtctgtgatggttttttttttgtcagaggaactgagctagaaagagctgtgaatgatggttcagctctgagaagcagataaacctttataagtcagaaggggcctcagtttctccattt

SEQ ID NO: 12494 - DNA, 120 bp, synthetic construct
  misc_feature 1..120: note = Artificially Synthesized Probe
  source 1..120: mol_type = other DNA
agcaggtttttaaagtcttgaggttgtcatagcaactgcatccctgctgaggttctgaggttcggtggctgtgcagacgtccatgtgctggagctgggcatgtacaaaagccacgtggtg

SEQ ID NO: 12495 - DNA, 120 bp, synthetic construct
  misc_feature 1..120: note = Artificially Synthesized Probe
  source 1..120: mol_type = other DNA
gtcccctctgcaggaagggtgaccaacagtctggattggcccaggactgtccaggttttagcactgaatgccccacatcccaggaaatctcttggtcctggacacactgtttatcagtag

SEQ ID NO: 12496 - DNA, 120 bp, synthetic construct
  misc_feature 1..120: note = Artificially Synthesized Probe
  source 1..120: mol_type = other DNA
ccctgatgtgggggggtctctgggcaaagctgtgcggggcatgagggcaccgtgatgggggggtgtctgggcaaagctgtgcggggcatgagggcaccctgatgtggggggggtgtctgg

SEQ ID NO: 12497 - DNA, 120 bp, synthetic construct
  misc_feature 1..120: note = Artificially Synthesized Probe
  source 1..120: mol_type = other DNA
gggcaccctgatgttggggggggtgtctgggcaaagctgcgcggggcatgagggcaccctgatgttgggggggggtgtctgggcaaagctgcgcgggtcatgagggcaccctgatatggt

SEQ ID NO: 12498 - DNA, 120 bp, synthetic construct
  misc_feature 1..120: note = Artificially Synthesized Probe
  source 1..120: mol_type = other DNA
tccaaactgtgctcataggtatgtggcctggggactgttgccgtggaaccgggtaaagagccctgtggacctgtgctcccaactcaggccagtcaagggtgccactgtggcctagatagt

SEQ ID NO: 12499 - DNA, 120 bp, synthetic construct
  misc_feature 1..120: note = Artificially Synthesized Probe
  source 1..120: mol_type = other DNA
ataagcagcaggaaacagactaagacaaggggcaagccagcctctgcccacaaggagctccattctggtgtggagagacccaaacacacaactatgctctttgtcttgctagagacttgt

SEQ ID NO: 12500 - DNA, 120 bp, synthetic construct
  misc_feature 1..120: note = Artificially Synthesized Probe
  source 1..120: mol_type = other DNA
taaatttcaacatgaggttcggggacaaacgtccaaactatagcaggtatttctgaagaacacccaggtgtttcaaagctggggtgaagccgtgggttaacactgtttttcagacatggc

SEQ ID NO: 12501 - DNA, 120 bp, synthetic construct
  misc_feature 1..120: note = Artificially Synthesized Probe
  source 1..120: mol_type = other DNA
ataatattttaaaaaaagacagtgtggtatttgcatcaagatagacagatcaatagaacaaattagagataccagaaatagacccacaaatatgagcaagtgattttcaacaaagctgca

SEQ ID NO: 12502 - DNA, 120 bp, synthetic construct
  misc_feature 1..120: note = Artificially Synthesized Probe
  source 1..120: mol_type = other DNA
acggttttgagaggtcctgagaaagcctggagaacatggtttcgagaggttctgggaaagcctggagaacacagtttcaagtttcctgagaaagcctggagaacagtttcgagaggtcct

SEQ ID NO: 12503 - DNA, 120 bp, synthetic construct
  misc_feature 1..120: note = Artificially Synthesized Probe
  source 1..120: mol_type = other DNA
atggccagggattcagtttttaaggttttctggggttcccttggccaagagggggtctgttgagttggtgggggccttaggatttcattttttttttttttgaaacagagtctccctcta

SEQ ID NO: 12504 - DNA, 120 bp, synthetic construct
  misc_feature 1..120: note = Artificially Synthesized Probe
  source 1..120: mol_type = other DNA
ataccacaccgtcttgattaccacagctgtatactcaaatactactgtcctgattactacagctttatactcaaataccacaccgtcttgattaccacagctgtatactcaaatactaca

SEQ ID NO: 12505 - DNA, 120 bp, synthetic construct
  misc_feature 1..120: note = Artificially Synthesized Probe
  source 1..120: mol_type = other DNA
ttactatagctttatactcaaataccacactgtcttgattaccacagctttatacgcaaataccacactgtcttgattactatagctttatactcaaataccacactgtcttgattacta

SEQ ID NO: 12506 - DNA, 120 bp, synthetic construct
  misc_feature 1..120: note = Artificially Synthesized Probe
  source 1..120: mol_type = other DNA
agtttgggtagaatcggcatatggagttttctgatgcatgaacacagcataactcctatttacatctttaatttctctcagcagttttacggtttttaatgtatggcttctgtcagttgt

SEQ ID NO: 12507 - DNA, 120 bp, synthetic construct
  misc_feature 1..120: note = Artificially Synthesized Probe
  source 1..120: mol_type = other DNA
caatgttgagtagaattgaacatccttgcctccgtcttgctctgaggagagacatggattaagatttaacttgggtttttcatatcaggctgacacattctcctattcctagtttgctga

SEQ ID NO: 12508 - DNA, 120 bp, synthetic construct
  misc_feature 1..120: note = Artificially Synthesized Probe
  source 1..120: mol_type = other DNA
cagaaaactgatagtaacgcaaacaattcttgttctagaactgcaaaggagttttgtccagaggaatgaagtagatgagtgttttgtggatgtctatttcacaccctggattgtcgatcg

SEQ ID NO: 12509 - DNA, 120 bp, synthetic construct
  misc_feature 1..120: note = Artificially Synthesized Probe
  source 1..120: mol_type = other DNA
aatgggaggcttctttaaaaagcctaattctggaaaaggttaaagcacacattttgaagacgaaactatgaccctcaggccagaggttttatttaacttgtgttggttttaacccctggg

SEQ ID NO: 12510 - DNA, 120 bp, synthetic construct
  misc_feature 1..120: note = Artificially Synthesized Probe
  source 1..120: mol_type = other DNA
cacactggtactgtgctgctctgtgtttagctgggcatgtgctctgggctgggcatgagacaaaatgaggatagctgctgggctgtggatagttgttcacaggggtgcaggctgttgtag

SEQ ID NO: 12511 - DNA, 120 bp, synthetic construct
  misc_feature 1..120: note = Artificially Synthesized Probe
  source 1..120: mol_type = other DNA
tccaccctcatgtcctatagagaccccctcactgtccgccctcatgtcctatgagaccccctcactgtccaccctcatgtcctatagagaccccctcactgtccaccctcatggcctgta

SEQ ID NO: 12512 - DNA, 120 bp, synthetic construct
  misc_feature 1..120: note = Artificially Synthesized Probe
  source 1..120: mol_type = other DNA
tctgcatttgctccttgggttcccggaacttgagcttgggtcttggtccacagcagctttgggaagggccctcggctgctttttgcttcagcagctggggagcagttaactttcagaccc

SEQ ID NO: 12513 - DNA, 120 bp, synthetic construct
  misc_feature 1..120: note = Artificially Synthesized Probe
  source 1..120: mol_type = other DNA
agtgtgcccttccccacagcacttcaggatcactctgggaccatcctaggattaggaattttaaaacgtttaaaaaaaattattttcctttttttgggggaaattggttatacatccaga

SEQ ID NO: 12514 - DNA, 120 bp, synthetic construct
  misc_feature 1..120: note = Artificially Synthesized Probe
  source 1..120: mol_type = other DNA
ctcagttttgtgcgtcacaaacacacacgctacctcagttttgtgtgttacaaacacacacgctccctcagtttcgtgcatcccaaacatgctccctcagttatgtgcgtcacaaacacg

SEQ ID NO: 12515 - DNA, 120 bp, synthetic construct
  misc_feature 1..120: note = Artificially Synthesized Probe
  source 1..120: mol_type = other DNA
ctccacagagcttgtaccacggaggtggtggcagtgtcttgctgcccatgccttcctaatgtgtgtgttgtgaagtctctcgttctttctttttaaaaatttattatctttaatttttta

SEQ ID NO: 12516 - DNA, 120 bp, synthetic construct
  misc_feature 1..120: note = Artificially Synthesized Probe
  source 1..120: mol_type = other DNA
gattgattggtgtcagttagcatccatggaggagacagatgtcaccctcaacttgggaaatttgaggagagatgaataaagggactaagatgtggttggcatgtagagaaaccactaagg

SEQ ID NO: 12517 - DNA, 120 bp, synthetic construct
  misc_feature 1..120: note = Artificially Synthesized Probe
  source 1..120: mol_type = other DNA
agtctaaaacattgcagattttcctgaggtcaacttaaacacttaaaaaaaaaagccaaattcttaaaacaattgtttttggtgtcctgctttgatggttccctaaacacttgctctgac

SEQ ID NO: 12518 - DNA, 120 bp, synthetic construct
  misc_feature 1..120: note = Artificially Synthesized Probe
  source 1..120: mol_type = other DNA
aggtgaaggggtttccaggactctccgttttaaaaccagcacaatctgggccaactgggacacactggtcaccttgctaatgtgtccctgttcctgagggggaaagcggataggcagttg

SEQ ID NO: 12519 - DNA, 120 bp, synthetic construct
  misc_feature 1..120: note = Artificially Synthesized Probe
  source 1..120: mol_type = other DNA
ttccctctttccttcacggagtcctgctctttggacttaacacactcaggagtctgttgttaaaaaacaaaccaaaggctctcttagcctcgaccccatcacagccaagttctggagagc

SEQ ID NO: 12520 - DNA, 120 bp, synthetic construct
  misc_feature 1..120: note = Artificially Synthesized Probe
  source 1..120: mol_type = other DNA
ctgggagcaggtgcaaagggttatagctgaaggaaggagaggagccatagctgattattcattgacggtaatgctacacagggattaaaatcagtcaacttgaataaaccttaagaataa

SEQ ID NO: 12521 - DNA, 120 bp, synthetic construct
  misc_feature 1..120: note = Artificially Synthesized Probe
  source 1..120: mol_type = other DNA
atagagcactaaaggctggctcactcgcggagagctgtttcctgtggctcaacaagtttataataaacacagttaaacttttatttatggcacagctgctaattgcaccataaacacttt

SEQ ID NO: 12522 - DNA, 120 bp, synthetic construct
  misc_feature 1..120: note = Artificially Synthesized Probe
  source 1..120: mol_type = other DNA
acgtgtgaatggtgtctgcatgtacacacatgcacaaaagtatgtatgtgtaaacgtgtgcatatgtgaatgacatgtatatgctcatgcagatacgctaatgtgtatgtacatgcgtgc

SEQ ID NO: 12523 - DNA, 120 bp, synthetic construct
  misc_feature 1..120: note = Artificially Synthesized Probe
  source 1..120: mol_type = other DNA
atgtaagtaatgcatgtgtgtgtgcatgtgttcaagtgatttgtgtgtgcatatgctacacatgtgtgctttcatgaacatatgtgtgtgagtggtgagattaagtgtatgtgcacagag

SEQ ID NO: 12524 - DNA, 120 bp, synthetic construct
  misc_feature 1..120: note = Artificially Synthesized Probe
  source 1..120: mol_type = other DNA
ccagcatttttggacagttggcatgcatgttggaggagagtacttgagaaggaaataatgggctgggtgctaatagaggatttggaggctcacacactaaatggggaaggactcattcat

SEQ ID NO: 12525 - DNA, 120 bp, synthetic construct
  misc_feature 1..120: note = Artificially Synthesized Probe
  source 1..120: mol_type = other DNA
gacaacgccctccccagcccctcaagactctgttttcagtcagttcaattagtacaactttaaagcaattagggagaattagtggccaggctgctgcaggcagatgctgaatacactcat

SEQ ID NO: 12526 - DNA, 120 bp, synthetic construct
  misc_feature 1..120: note = Artificially Synthesized Probe
  source 1..120: mol_type = other DNA
gatgatgacatgtacttgtgcaattccagcttcaacaagggtcaccagaacagctctgagcaattccagcttcaacaagggtcaccagaattgctctgtgcaatcccagcttcaacaagg

SEQ ID NO: 12527 - DNA, 120 bp, synthetic construct
  misc_feature 1..120: note = Artificially Synthesized Probe
  source 1..120: mol_type = other DNA
ctgttcccattacaggtattcacttcttgatgaagcaatttcctatataatggccccacatggcaggctaaatgtggaaaaccaccaaatagaggcagaaatataaagacactttggatc

SEQ ID NO: 12528 - DNA, 120 bp, synthetic construct
  misc_feature 1..120: note = Artificially Synthesized Probe
  source 1..120: mol_type = other DNA
gtgcattcatagatgtgcatgcacacatacaggcatgtacatttgtacacagacatgcacacagaaatgtgcatgcataggcccacacagcagacaggcacatgcacacaggtgtgtaca

SEQ ID NO: 12529 - DNA, 120 bp, synthetic construct
  misc_feature 1..120: note = Artificially Synthesized Probe
  source 1..120: mol_type = other DNA
gaagacaagaggatgtgaactgctctctggaggcagaagacgtgggttcaaatcttggctcttctctgggcctcaggtttctggtctgtagactaggatattggagttttactcacgtta

SEQ ID NO: 12530 - DNA, 120 bp, synthetic construct
  misc_feature 1..120: note = Artificially Synthesized Probe
  source 1..120: mol_type = other DNA
gaaacagaggtggcaattccaacctaaaagcacaaattacagacaagtctccctcctgcaggtttccatttgcatctggcttttgtgtggcactagaagagatcagctttttgcaagcat

SEQ ID NO: 12531 - DNA, 120 bp, synthetic construct
  misc_feature 1..120: note = Artificially Synthesized Probe
  source 1..120: mol_type = other DNA
gtcctagtttttatattattagtagatacagggtttcaccatgtttgccaggatggtcttgaactcctgaccttgtgatccgcccgccttggcctcccaaagtgctgcgattacaggcgt

SEQ ID NO: 12532 - DNA, 120 bp, synthetic construct
  misc_feature 1..120: note = Artificially Synthesized Probe
  source 1..120: mol_type = other DNA
tatgtggtgtgtgtgtgtttgtgtgtgtctgtgtgtgtgtgtggtgtctatatggtgtgtatgtctgtgtgtgtgcctgcatgtgtggggtgtgtgtgtggggtctgttgtgtgtatgtg

SEQ ID NO: 12533 - DNA, 120 bp, synthetic construct
  misc_feature 1..120: note = Artificially Synthesized Probe
  source 1..120: mol_type = other DNA
acccatagcttgagtggcagtggggacatccaacctggcttcctcagtggggtttggccatggaggtgctcagggtgtgcttgttggaatgatgggggatctcgctctgggatctgtctc

SEQ ID NO: 12534 - DNA, 120 bp, synthetic construct
  misc_feature 1..120: note = Artificially Synthesized Probe
  source 1..120: mol_type = other DNA
tggccattgcctctgtttctttggcctttgtctccagctcgtatctctcctactggttcagctgctttttgcctttggctatcgttctgtgctggtaggaccaggacatcagggggtttc

SEQ ID NO: 12535 - DNA, 120 bp, synthetic construct
  misc_feature 1..120: note = Artificially Synthesized Probe
  source 1..120: mol_type = other DNA
ttcataggtgcccctgtattgggtgccctactaaagcagaaaccagtgccagcctagacagcgatgaccagcagcctgtgacctctggagcccgggatgtgtccggacatatcacgtcag

SEQ ID NO: 12536 - DNA, 120 bp, synthetic construct
  misc_feature 1..120: note = Artificially Synthesized Probe
  source 1..120: mol_type = other DNA
ttaccaggctggttggttctaccgaaaggcagcagcacaagcttttcctggatttctcaccattgttcctttaaataatcagtcttaattaactccatccgaagaacatattttccccaa

SEQ ID NO: 12537 - DNA, 120 bp, synthetic construct
  misc_feature 1..120: note = Artificially Synthesized Probe
  source 1..120: mol_type = other DNA
ctctgagcaccttcacccctcgatgttctctcctctaaacaagatgactcaccatttatttccagcctaatctctgcccccagcctcagcctccatactgtcacccttgttgacggtgtc

SEQ ID NO: 12538 - DNA, 120 bp, synthetic construct
  misc_feature 1..120: note = Artificially Synthesized Probe
  source 1..120: mol_type = other DNA
ttcatcgtttcaaagggcccctgtgggcagtgaaaggtcgtgggcccagttcgagggactaggaatcattctggaagaggcctctgcagtgcccaccttcactcccatccacacaccctg

SEQ ID NO: 12539 - DNA, 120 bp, synthetic construct
  misc_feature 1..120: note = Artificially Synthesized Probe
  source 1..120: mol_type = other DNA
tttgtgattatctgctccctggtcttgattggctggatgcagtggggtctccccagggccctgggacacaagtttgtgcagcaactttttccagcatgaagtgacgtgtgttcccagaga

SEQ ID NO: 12540 - DNA, 120 bp, synthetic construct
  misc_feature 1..120: note = Artificially Synthesized Probe
  source 1..120: mol_type = other DNA
tggagtctgaggacccgccagtcagacaggagttatttcctggtggatctttccaaacatattattaaaaagtcacatgtgactttcccacagacttttatgaaataaaacccaaaggaa

SEQ ID NO: 12541 - DNA, 120 bp, synthetic construct
  misc_feature 1..120: note = Artificially Synthesized Probe
  source 1..120: mol_type = other DNA
acagcatgtccagaggagacagaaacggcttttcaggagtgctctcagctgaatgtgtccttttatactaatggatataagtttatgacagaaattaaaaatggtaggcagtcattgtgg

SEQ ID NO: 12542 - DNA, 120 bp, synthetic construct
  misc_feature 1..120: note = Artificially Synthesized Probe
  source 1..120: mol_type = other DNA
gctctggttgcaataaacttagtctttttgtgggggggttcccatgcccaggaatccctgagttctctttgggaaggtttttattattgtaaaaattaaagtgaaaagggaaagtgtgag

SEQ ID NO: 12543 - DNA, 120 bp, synthetic construct
  misc_feature 1..120: note = Artificially Synthesized Probe
  source 1..120: mol_type = other DNA
ccatgtaaatttcatgattgctttccgtgatgtcattttgaaagaggacagacaatagctgtggggaaaggtaagtcaacgttacgttctttctgacaaaggcagatacccaacgcttgg

SEQ ID NO: 12544 - DNA, 120 bp, synthetic construct
  misc_feature 1..120: note = Artificially Synthesized Probe
  source 1..120: mol_type = other DNA
tgattataattatccttttgggagaggtcggtggagaattttgcccttgcagtttttttttttcttttaaatcacagaaaactgaggacacctctaacgccagtggctgagtgcacaaaa

SEQ ID NO: 12545 - DNA, 120 bp, synthetic construct
  misc_feature 1..120: note = Artificially Synthesized Probe
  source 1..120: mol_type = other DNA
ttttgtgaccctcagccattgcccacagatctggaggtagcctcagttgttcagagctaatgctctggcccctcttggaagattctggcaaaggcagtggtcacctactcccttgaatgc

SEQ ID NO: 12546 - DNA, 120 bp, synthetic construct
  misc_feature 1..120: note = Artificially Synthesized Probe
  source 1..120: mol_type = other DNA
tagatcctccccctctgcattttccgtgtgaactccctcatgaataaaccagaagttagttgtctacagatgtaattttaacaggaatgttgtggtgtgagtttacaggaaaatggtctt

SEQ ID NO: 12547 - DNA, 120 bp, synthetic construct
  misc_feature 1..120: note = Artificially Synthesized Probe
  source 1..120: mol_type = other DNA
tttattttacaatttgcacttaaaaatgcaatgttattttaatcgggaacgaaagtaactcagcgtgctttaatctgccctggctgagtacatctgccttggccaggattggagtccagg

SEQ ID NO: 12548 - DNA, 120 bp, synthetic construct
  misc_feature 1..120: note = Artificially Synthesized Probe
  source 1..120: mol_type = other DNA
tgaaattgggacgacttactatggttaacattattttcattgagactgggccttaatcttcgaatggaacaaaaaatctgacttaggtcgtaaggggcagagaaacacgtttgacgctgt

SEQ ID NO: 12549 - DNA, 120 bp, synthetic construct
  misc_feature 1..120: note = Artificially Synthesized Probe
  source 1..120: mol_type = other DNA
aggtacctcttacagtcatttttttttaagtggtctgattttgttttggctggcttatttagagttttgtgcttcctcattttatttccacgaaggctgtgcccaaccttagcctcggtg

SEQ ID NO: 12550 - DNA, 120 bp, synthetic construct
  misc_feature 1..120: note = Artificially Synthesized Probe
  source 1..120: mol_type = other DNA
caaaccctaaccccctacacctctggcatctggaggaacccaaacccacttcaatataagagttagagtccaattcctcttcctggagagccctctgatggccttgggaccctggacctg

SEQ ID NO: 12551 - DNA, 120 bp, synthetic construct
  misc_feature 1..120: note = Artificially Synthesized Probe
  source 1..120: mol_type = other DNA
tttgtcttcaaggcctcagtaaaatgtggttttaaggcagaaggagatggccatttcctttctttttgggctggaaagctgaacggttctaagaaaaatttctgggaccaaggaacgaaa

SEQ ID NO: 12552 - DNA, 120 bp, synthetic construct
  misc_feature 1..120: note = Artificially Synthesized Probe
  source 1..120: mol_type = other DNA
tctttccttgtagttgtgtccatttcccctccctgacttctcctcctgcagcatccttccctgtagttgtgtccatttcccctccctggcttctcctgcagcatctttccctgtagttgt

SEQ ID NO: 12553 - DNA, 120 bp, synthetic construct
  misc_feature 1..120: note = Artificially Synthesized Probe
  source 1..120: mol_type = other DNA
catctttcctagttgtgtccatttcccctccctggcttctcctgtagcatctttcctagttgtgtccatttcccctccctggcttctcctgcagcatctttccctgtagttgtgtccatt

SEQ ID NO: 12554 - DNA, 120 bp, synthetic construct
  misc_feature 1..120: note = Artificially Synthesized Probe
  source 1..120: mol_type = other DNA
agcatctttcctagttgtgtccatttcccctccctggcttctcctgtagcatctttcctagttgtgtccatttcccctccctggcttctcctgcagcatctttccctgtagttgtgtcca

SEQ ID NO: 12555 - DNA, 120 bp, synthetic construct
  misc_feature 1..120: note = Artificially Synthesized Probe
  source 1..120: mol_type = other DNA
ggccgcctggagagcccgtcctgtgatttggtttggaaagtcattattactgcagagcagtttagctgttgtttttacagcgttggtaaggttaaaagaaataatgataataatataaga

SEQ ID NO: 12556 - DNA, 120 bp, synthetic construct
  misc_feature 1..120: note = Artificially Synthesized Probe
  source 1..120: mol_type = other DNA
agggcatgggttccaccttcttcatggaaatttccaagcttgtcagactttctcaggtgcctggtcccctgggctttccaggatgcccccaggaacaaagccagccatccctgagagaaa

SEQ ID NO: 12557 - DNA, 120 bp, synthetic construct
  misc_feature 1..120: note = Artificially Synthesized Probe
  source 1..120: mol_type = other DNA
acgtgctgtgcgtggtcctggtgtctcgttcgtctgaagtcgtttttagcactcctcgcctttcgtgaccttgtgcttttggaagagcgctgagccgttattcagtgggatacccttcaa

SEQ ID NO: 12558 - DNA, 120 bp, synthetic construct
  misc_feature 1..120: note = Artificially Synthesized Probe
  source 1..120: mol_type = other DNA
ttgaaactatggaaatatctccatcctcaacaaaccatcacttaactttgatggatatctctatagactcgttgtttcctgttttaccccatgggctgaaagccttctttggatgctcag

SEQ ID NO: 12559 - DNA, 120 bp, synthetic construct
  misc_feature 1..120: note = Artificially Synthesized Probe
  source 1..120: mol_type = other DNA
ttgagcgttatctttctttatcttcagtgtttcgctggtggaccaaacagtttaccagtgttatgtctcatacaagattttgtggtttgtttttcttgtagacagtgatcaccacccctg

SEQ ID NO: 12560 - DNA, 120 bp, synthetic construct
  misc_feature 1..120: note = Artificially Synthesized Probe
  source 1..120: mol_type = other DNA
gactctatctcccaagtcttctgttgaatttttcattttggttttacaatttatttccaagttggggaggatggacacaatggtattaagccttcccaaacaagtcctcctgtcactgtc

SEQ ID NO: 12561 - DNA, 120 bp, synthetic construct
  misc_feature 1..120: note = Artificially Synthesized Probe
  source 1..120: mol_type = other DNA
ctgccctaggcaagagtccccagagtgtctcactgaccatccacatgccactgtttaaaaacagcgttattggaatgtaatgtgcacatcacagaattcacctattaaaaatatacaatt

SEQ ID NO: 12562 - DNA, 120 bp, synthetic construct
  misc_feature 1..120: note = Artificially Synthesized Probe
  source 1..120: mol_type = other DNA
agtcctctgctcattctaaaattgggttatttgtcttattatgagttatgagagttcttttttccaaatacaagctctttatcagatttacgatttgcaaatattttctcccagtctttg

SEQ ID NO: 12563 - DNA, 120 bp, synthetic construct
  misc_feature 1..120: note = Artificially Synthesized Probe
  source 1..120: mol_type = other DNA
tttagaatgagtttgtcagtttttgcaaacagaacaaaacaacacagccagagaggtcagaaatggtcagattctggtgagatttagaaaataacattggcaggatttggggccaaggat

SEQ ID NO: 12564 - DNA, 120 bp, synthetic construct
  misc_feature 1..120: note = Artificially Synthesized Probe
  source 1..120: mol_type = other DNA
agttaccagagatgcaaaacctagtgaagactgaaaacatgtggctttccacacttaccacctggcctctcactcagtcttcctgttattttgttcttgttttcagagtggggaggtttt

SEQ ID NO: 12565 - DNA, 120 bp, synthetic construct
  misc_feature 1..120: note = Artificially Synthesized Probe
  source 1..120: mol_type = other DNA
ttcagattaactcactagaaactcaataacccaagagaacaggctcgtctggatgaaaacctccacttcacttcagattcctgacaagaaaggccatggtgatgacaacagcactgacgt

SEQ ID NO: 12566 - DNA, 120 bp, synthetic construct
  misc_feature 1..120: note = Artificially Synthesized Probe
  source 1..120: mol_type = other DNA
cagtaggggaccaagagggccacaggagaagaactggcataccttactgggcttctagtagtgatagccgtttgctgccaagacatttcctaggagagggaggctatcatgtcaaggttg

SEQ ID NO: 12567 - DNA, 120 bp, synthetic construct
  misc_feature 1..120: note = Artificially Synthesized Probe
  source 1..120: mol_type = other DNA
gttgtcttgcatatatacatatgtaatggtaacaaggaattctgcttgagccttgccaatcagcccagtgagcaggtttctgcagcatcttgtctcctgggatagatactcagaaagtga

SEQ ID NO: 12568 - DNA, 120 bp, synthetic construct
  misc_feature 1..120: note = Artificially Synthesized Probe
  source 1..120: mol_type = other DNA
tttcaaatgcatatgtactgtgcattcttttgaggggcagaaggatctggttgtaatgcgaataattactcattagtcagctcattttcaaagttggaggggtgacatgccaagttttct

SEQ ID NO: 12569 - DNA, 120 bp, synthetic construct
  misc_feature 1..120: note = Artificially Synthesized Probe
  source 1..120: mol_type = other DNA
gcaagcaagcaaacaaaaaaaacccaccaaaatgaaaatgtgaccccagagtctcacttccttgctttgaggtgtgaccacgtctgggctctgtgataggcctgagcaactgttctctat

SEQ ID NO: 12570 - DNA, 120 bp, synthetic construct
  misc_feature 1..120: note = Artificially Synthesized Probe
  source 1..120: mol_type = other DNA
ctatgcagttgtagtgggaacttcatttgggggtgcttgtgttttactctcaaaacccaacctttttcttttgaatctggtggcgagaatgtacattttaatgggtctgttatagacaac

SEQ ID NO: 12571 - DNA, 120 bp, synthetic construct
  misc_feature 1..120: note = Artificially Synthesized Probe
  source 1..120: mol_type = other DNA
tgggtgggtataaattccatttatgctggagtttttaacagacggttgcagatatggctgcttcatcagggtatccattatgtagctctaatttttgatttgggaatgaagtgagccagt

SEQ ID NO: 12572 - DNA, 120 bp, synthetic construct
  misc_feature 1..120: note = Artificially Synthesized Probe
  source 1..120: mol_type = other DNA
gtgctcttcctcttcttctaggtctctgggaggaaaaccattatgcaagaggctcaaccgtcccaccgagacactataacctatgtaattttatggatttttaaagaatagttgtaagtc

SEQ ID NO: 12573 - DNA, 120 bp, synthetic construct
  misc_feature 1..120: note = Artificially Synthesized Probe
  source 1..120: mol_type = other DNA
ttcatggaaaatctccaaccctgatatctttggaagctgagtctaccatttccccttagaggttagacacgagtggtttgttactggctatgtgtctgggttcttttcattttttatttt

SEQ ID NO: 12574 - DNA, 120 bp, synthetic construct
  misc_feature 1..120: note = Artificially Synthesized Probe
  source 1..120: mol_type = other DNA
gtatttgcatttatgaattattctcctccccacagttttcatggttttcctatcgaaggcagaactattgaaatattaattagagcctcaagacatgctcgcagtggcagaatgaagctg

SEQ ID NO: 12575 - DNA, 120 bp, synthetic construct
  misc_feature 1..120: note = Artificially Synthesized Probe
  source 1..120: mol_type = other DNA
cggtagttcagtttttttccctttaaaaatcaaagctacacgctcctaagagaacttctcgcttattgaccagtcaatgcagataaattgcaaatggtaaaaaggtgctcagcagaagga

SEQ ID NO: 12576 - DNA, 120 bp, synthetic construct
  misc_feature 1..120: note = Artificially Synthesized Probe
  source 1..120: mol_type = other DNA
gttttgcatagcatggagtgtgtaggatttacttgcctgcccagatttgtcatgagtgacacaggacaaggatgctgtgtgtgaccctcaccactgccccacatgtcctttctgtgattg

SEQ ID NO: 12577 - DNA, 120 bp, synthetic construct
  misc_feature 1..120: note = Artificially Synthesized Probe
  source 1..120: mol_type = other DNA
caaagcttgagccagaaaatggccagacattcctgatggctctgtactccagaggcactggctgggttttcttgttaacgtcgtggttttttgcttgcagatgagcttagaaaatgaaga

SEQ ID NO: 12578 - DNA, 120 bp, synthetic construct
  misc_feature 1..120: note = Artificially Synthesized Probe
  source 1..120: mol_type = other DNA
gatttgcctccactcgtccttggcaaacctctcggctgtttaacttagtttatgctgttagggcaatgagcctttaaaatcacaattcccacatgttttccctgtttctgtctttttccc

SEQ ID NO: 12579 - DNA, 120 bp, synthetic construct
  misc_feature 1..120: note = Artificially Synthesized Probe
  source 1..120: mol_type = other DNA
ggatacagattctcagggcagggaccatcttactgttcagcatacaattgaagagtggatggcttctgccaatcaggaaaatgagaggactgcaaagttcactttgtaaaccttttgcag

SEQ ID NO: 12580 - DNA, 120 bp, synthetic construct
  misc_feature 1..120: note = Artificially Synthesized Probe
  source 1..120: mol_type = other DNA
aacatgcaatgtgatgcttagagtaaaataggacaaagattatgttccaaggaatcaaatacattctgcacggaaggtaccattcattcctgtattctcaaacatctgttggccacacgc

SEQ ID NO: 12581 - DNA, 120 bp, synthetic construct
  misc_feature 1..120: note = Artificially Synthesized Probe
  source 1..120: mol_type = other DNA
gtttgatggtttttcctttcaccccatcgggagaactgatgacgtttcagcttgtatttttgcctgggtccatctgttgtcacatggcctcagactggctctgccagaggcgaagactag

SEQ ID NO: 12582 - DNA, 120 bp, synthetic construct
  misc_feature 1..120: note = Artificially Synthesized Probe
  source 1..120: mol_type = other DNA
tcggctaattgggaccttagcttcaaatccccattaacaaggagcttttttgtgaaaagtcccaaagctagttctccaaagagtgaaagcaagtgtgggcctggattttagaagagacta

SEQ ID NO: 12583 - DNA, 120 bp, synthetic construct
  misc_feature 1..120: note = Artificially Synthesized Probe
  source 1..120: mol_type = other DNA
ggagcggtctgggagactctggcgctagaagtcttgctcttatgtatacacagtctttaattgaacactcgtaaaactgtaatgagccatttatttatttgaatggggcgagttattaat

SEQ ID NO: 12584 - DNA, 120 bp, synthetic construct
  misc_feature 1..120: note = Artificially Synthesized Probe
  source 1..120: mol_type = other DNA
aaagcccttcctgagaacaaggcatgtcttgtcccaacatgtgctgggcttcctgggagagaggtctgcccatggtgtttatggggcctgtggtgtgtttgtgtgtgaacactgtgtgcg

SEQ ID NO: 12585 - DNA, 120 bp, synthetic construct
  misc_feature 1..120: note = Artificially Synthesized Probe
  source 1..120: mol_type = other DNA
atcaacatagtcctagatcccaggtagaaaagacacacattttcctgctttcttatcaagaagggcgtctggggttcagctgtcaacctgggcttggactttcccctccgaagtaggtgg

SEQ ID NO: 12586 - DNA, 120 bp, synthetic construct
  misc_feature 1..120: note = Artificially Synthesized Probe
  source 1..120: mol_type = other DNA
attcttagtttaaaaaatacatcagtggcccatgacctgcctcctaaaatatattcaccgtgatttctggattcaggcagaagggttgacagaaaggtccataccaaatccccacttctg

SEQ ID NO: 12587 - DNA, 120 bp, synthetic construct
  misc_feature 1..120: note = Artificially Synthesized Probe
  source 1..120: mol_type = other DNA
cagacaaaaggacaaatacatgacacagactgtggtcagatactgagcaaatgggttcccacactgctttacatagagcgatctggagcgagacacagcggagacgtgtgagaaagaacc

SEQ ID NO: 12588 - DNA, 120 bp, synthetic construct
  misc_feature 1..120: note = Artificially Synthesized Probe
  source 1..120: mol_type = other DNA
agagacagacctgagtgagacataattcaaggggcatgataggcaggtcagtggagacacgagggacatgttttccgggaacaccaggcatatgagacaagctcaggggaaagatgctaa

SEQ ID NO: 12589 - DNA, 120 bp, synthetic construct
  misc_feature 1..120: note = Artificially Synthesized Probe
  source 1..120: mol_type = other DNA
agaggtcgataactgagatttgggtttacatttctgcccaggcatagattagtcatgcagccttggataagttactcaactcctttgtcttcctcgttttgtcaaatcccaaggatatct

SEQ ID NO: 12590 - DNA, 120 bp, synthetic construct
  misc_feature 1..120: note = Artificially Synthesized Probe
  source 1..120: mol_type = other DNA
agctgggaagggagaggtcttcttgcagcaacctctgtgccctgaaagcttaggaagcaaatacttgttcttatgtttaggctagaagcagtaattgtgaaaattaaatttaaaggagca

SEQ ID NO: 12591 - DNA, 120 bp, synthetic construct
  misc_feature 1..120: note = Artificially Synthesized Probe
  source 1..120: mol_type = other DNA
agagaggtacaacaaccatgtgagagccaggtgaatactttgtgtcctacccacattcagaaaacctctgcacactggctcttgctcctgagtgggaagggcagacatgaacagtaacct

SEQ ID NO: 12592 - DNA, 120 bp, synthetic construct
  misc_feature 1..120: note = Artificially Synthesized Probe
  source 1..120: mol_type = other DNA
ctttgtgtgtccttggcatagaatgttccaaaacagaaactgactgggcagcttgtactgtgagggctcaagaacagagccagagagaaaacccctgtcctgcagaatgacagggttatt

SEQ ID NO: 12593 - DNA, 120 bp, synthetic construct
  misc_feature 1..120: note = Artificially Synthesized Probe
  source 1..120: mol_type = other DNA
tgcaagtccatgtgtgtgtgcatgtgtaaatttggctctaatcaataaggatctttcagaatgtgtcccattagtgtcccctccttccatgtggctctaagaagtaagtgccacaaataa

SEQ ID NO: 12594 - DNA, 120 bp, synthetic construct
  misc_feature 1..120: note = Artificially Synthesized Probe
  source 1..120: mol_type = other DNA
gtgtgaggacgggctttgcaaagcttcgttggcattgtggacaataagtgtacagattctgactgaagccttggtcaaggaagccatcaacggtggtaccaatgttaagcttattattat

SEQ ID NO: 12595 - DNA, 120 bp, synthetic construct
  misc_feature 1..120: note = Artificially Synthesized Probe
  source 1..120: mol_type = other DNA
ttctatgccagtttcttcgtgccatcttttgtgcatgtaaaatcctgaagtattccaagagcattagtggcagtgaactgaatgcttgcagtagctttttcgtggctgttgctgaccctt

SEQ ID NO: 12596 - DNA, 120 bp, synthetic construct
  misc_feature 1..120: note = Artificially Synthesized Probe
  source 1..120: mol_type = other DNA
ttcctacaaatctttaagaacaatcctttctgtcttgtcttgtcacttactgccctaatttgtggaataagcccattagccctggaagtgcatgcgaaatggaaaagcattcagtgtaca

SEQ ID NO: 12597 - DNA, 120 bp, synthetic construct
  misc_feature 1..120: note = Artificially Synthesized Probe
  source 1..120: mol_type = other DNA
tcagtttctgatagacaagttatttttgtttgaaatatcagggctgctggaatgtcttggaggcttttactccttttgcccaaattttcactgagccagaaacaagattgtctcctcagt

SEQ ID NO: 12598 - DNA, 120 bp, synthetic construct
  misc_feature 1..120: note = Artificially Synthesized Probe
  source 1..120: mol_type = other DNA
tgttctggactctgtacgtttgattcaaatggaccagaaggcacacatgggaagggatggaatcgctaacagatctcacctttgccattgcagtctgtggatatcgaggtagacgaaaat

SEQ ID NO: 12599 - DNA, 120 bp, synthetic construct
  misc_feature 1..120: note = Artificially Synthesized Probe
  source 1..120: mol_type = other DNA
gatccttccctttttagttccttaaaacatgtgaaagaagaatcctccgaggccacagccggttctgggctttttcccaaggaggtgtgtgtcctgaagagcaaagtccagctgtgaggg

SEQ ID NO: 12600 - DNA, 120 bp, synthetic construct
  misc_feature 1..120: note = Artificially Synthesized Probe
  source 1..120: mol_type = other DNA
tgttgtaatttgtatgttattaccctcgttgtgccatctcatcttcatggcatttcggtaacacttatttagtgcctactgtctattgagtgccatccctggctctgaagggaactgtat

SEQ ID NO: 12601 - DNA, 120 bp, synthetic construct
  misc_feature 1..120: note = Artificially Synthesized Probe
  source 1..120: mol_type = other DNA
tctgcctaaatattcgtgggcacatacacgtgcacacacagcacatgtgcgtcagaggcatcctaactttaagctcaactttaatttggttactttttcttcttgagttaagttgtgtgg

SEQ ID NO: 12602 - DNA, 120 bp, synthetic construct
  misc_feature 1..120: note = Artificially Synthesized Probe
  source 1..120: mol_type = other DNA
tctttggcttaccccaatatcccatctcttctctttcagcctctctggttgccctcttgctgacaagagcctcagaaacctcatggctgcccactctgctgacctcaagtatgtttgcgc

SEQ ID NO: 12603 - DNA, 120 bp, synthetic construct
  misc_feature 1..120: note = Artificially Synthesized Probe
  source 1..120: mol_type = other DNA
tcttctcttgccatctttcttgcattcctttttccttttccaattctgctttcttttccgtgattagtctccatggtttttcccatttgggcctgaataatttaagaggagaaatgtggc

SEQ ID NO: 12604 - DNA, 120 bp, synthetic construct
  misc_feature 1..120: note = Artificially Synthesized Probe
  source 1..120: mol_type = other DNA
aacgaggttcctttcatgacttccctgtccgcacctggctgcagcgacagtcagatgatgtgtgttctgtgttttaagtgaatcccaagggcgttcactcttccctcccatgtgtctgat

SEQ ID NO: 12605 - DNA, 120 bp, synthetic construct
  misc_feature 1..120: note = Artificially Synthesized Probe
  source 1..120: mol_type = other DNA
aggtcacctcctcccactctctaacatcagcaggaactcacatattttttcctcagtggacattcggaagaaaataacatccgtgcttgtaatattaaagtggaattttgtaccacctta

SEQ ID NO: 12606 - DNA, 120 bp, synthetic construct
  misc_feature 1..120: note = Artificially Synthesized Probe
  source 1..120: mol_type = other DNA
gattagaagacactaatgttgctgacagctagagtccattcccatctctttaatctgaattgttgccatttccagaacctgattaagttgtcctctgcagtaagataaaaagacaagggg

SEQ ID NO: 12607 - DNA, 120 bp, synthetic construct
  misc_feature 1..120: note = Artificially Synthesized Probe
  source 1..120: mol_type = other DNA
ggtagattgagagagccaggaggatctaaactgggagccagacactgttgggtgaaggaaagaggacatcttgggccttaagtgacccaagtccttgaggagaaaagattctcctctatt

SEQ ID NO: 12608 - DNA, 120 bp, synthetic construct
  misc_feature 1..120: note = Artificially Synthesized Probe
  source 1..120: mol_type = other DNA
ttttacagggttccttcccagccataaactttaactgcacttgtaattgcctagcatatttaaacagatgcatatcaaagcagaaactggaatggatgtgtcaggtcatgctgagggatg

SEQ ID NO: 12609 - DNA, 120 bp, synthetic construct
  misc_feature 1..120: note = Artificially Synthesized Probe
  source 1..120: mol_type = other DNA
gatgaggtgacctcggactggctcagggaatgtcctaaaagtttctgagggccaggtgggtgggatgagtaacaaagggaaaagaaccaagagaggggcctgtggagagagagaaagcag

SEQ ID NO: 12610 - DNA, 120 bp, synthetic construct
  misc_feature 1..120: note = Artificially Synthesized Probe
  source 1..120: mol_type = other DNA
tttgtctctgacccacactgagcccaaggcatttgccaatctgaatttatgttattttcataagggcctctatccctctcctggaacacccagaacgaaggaaaggaaaacaccatttaa

SEQ ID NO: 12611 - DNA, 120 bp, synthetic construct
  misc_feature 1..120: note = Artificially Synthesized Probe
  source 1..120: mol_type = other DNA
ctgacacttacgttctcttaacaggctgacaacttctcaggaaaagtttgtctcctacaccttatgccctgtccctcccattcataccttctcaggaaaagtttgtctcctacaccttat

SEQ ID NO: 12612 - DNA, 120 bp, synthetic construct
  misc_feature 1..120: note = Artificially Synthesized Probe
  source 1..120: mol_type = other DNA
agagagagcagagaaaaaaaggacaactaccccttatccttgtagagtgcattttgggcagagtaggtgggacagcctgtaaacaaataaatacgtaaattacttagtatggtgaatggt

SEQ ID NO: 12613 - DNA, 120 bp, synthetic construct
  misc_feature 1..120: note = Artificially Synthesized Probe
  source 1..120: mol_type = other DNA
ctctgccctgcctagatgtagcttctttttccccatagaacacagtttggccatagggaggccctccaggtcatctaggtgaggtggaacatgccttctgttaacccgtaatgtgtgacc

SEQ ID NO: 12614 - DNA, 120 bp, synthetic construct
  misc_feature 1..120: note = Artificially Synthesized Probe
  source 1..120: mol_type = other DNA
tcatggtgtgtgacccggggctggccatggtgggtgaccccgagctggctgtggtgggtgaccctgggctggccgtggtgggtgaccctgggatggccgtggtgggtgacactgggctgg

SEQ ID NO: 12615 - DNA, 120 bp, synthetic construct
  misc_feature 1..120: note = Artificially Synthesized Probe
  source 1..120: mol_type = other DNA
ggtgaatgatatgtggcctctgcttccagtttgtcaggctgtcccagagcaacctttgctggaaagaagggaaaactgtcaggggatgaggtcctcagtccaaagttcaagactagcgac

SEQ ID NO: 12616 - DNA, 120 bp, synthetic construct
  misc_feature 1..120: note = Artificially Synthesized Probe
  source 1..120: mol_type = other DNA
ttgtcccgccagggctgtggtctcattagtgttaataacactattaataatactagtcccattaagattagcagcactgtttctcttactctcattagaatgagtagtcctgtcaagacc

SEQ ID NO: 12617 - DNA, 120 bp, synthetic construct
  misc_feature 1..120: note = Artificially Synthesized Probe
  source 1..120: mol_type = other DNA
cagtgtcagtgtcgttggggtagcacctctgatttctttttatttgccaaaaccaatctttttaaagacagattattaccttttactagcatccctttggaaggactcagaaacccctgt

SEQ ID NO: 12618 - DNA, 120 bp, synthetic construct
  misc_feature 1..120: note = Artificially Synthesized Probe
  source 1..120: mol_type = other DNA
gaagacccaaaggcagtctgacactccacgggggggtgcagtgatttccatcttacagatagaagcaggaaacatggtgaagctaagaccacagcaggtggagtctgagattgagacagg

SEQ ID NO: 12619 - DNA, 120 bp, synthetic construct
  misc_feature 1..120: note = Artificially Synthesized Probe
  source 1..120: mol_type = other DNA
taggggcactgaagaattacaaagtgatttatttttgttttctgaaagaaatctgaagagcagctcaaagtctccagtggaagctcatggacaaggttctcagggaagttttggagtttg

SEQ ID NO: 12620 - DNA, 120 bp, synthetic construct
  misc_feature 1..120: note = Artificially Synthesized Probe
  source 1..120: mol_type = other DNA
tttctttttccattttgggttccttttgtttcaggcacggataacagcaaatggaattctgtatttattattatttaagtgtagcgcagatgtgtgtgcttgggcgtgtttctcgtgtcg

SEQ ID NO: 12621 - DNA, 120 bp, synthetic construct
  misc_feature 1..120: note = Artificially Synthesized Probe
  source 1..120: mol_type = other DNA
caagacaaaataaagtcactcataattggtcagggcagagggagtcaaggaacaaaggcttgaacacttaccataatcgcatttacaatatcattactgttgttcttcagggctcggact

SEQ ID NO: 12622 - DNA, 120 bp, synthetic construct
  misc_feature 1..120: note = Artificially Synthesized Probe
  source 1..120: mol_type = other DNA
gtttggacatagcctaaagaagagaaaatagtatcaggttttcaacctctttagaagcagcctaaagaagcaaggaacataatacaacatccaaagcaaagcctttccccaggctgagaa

SEQ ID NO: 12623 - DNA, 120 bp, synthetic construct
  misc_feature 1..120: note = Artificially Synthesized Probe
  source 1..120: mol_type = other DNA
gattcatcactgtcagattctgttccagaccctaagatgagaaacaacttttactgctttatagtagaaattataagagaaggtacttcaccacagcctgccctggactagaggtgaatg

SEQ ID NO: 12624 - DNA, 120 bp, synthetic construct
  misc_feature 1..120: note = Artificially Synthesized Probe
  source 1..120: mol_type = other DNA
tggcatggcaggctcagggtagtccgggccacattacacaaaaatgatacacaatgtactatgtatctatctgaagtaatgaaaaccaagatttggtttcatattcctagaacttttgca

SEQ ID NO: 12625 - DNA, 120 bp, synthetic construct
  misc_feature 1..120: note = Artificially Synthesized Probe
  source 1..120: mol_type = other DNA
aaaggggtcctttagaaccattcttagctgagggatctgggcatataggaggtgaagtagcagaactctttttggtctgtggacctttccgagtgggagctgtgatgattggcgtgcttt

SEQ ID NO: 12626 - DNA, 120 bp, synthetic construct
  misc_feature 1..120: note = Artificially Synthesized Probe
  source 1..120: mol_type = other DNA
acctgggcttccttttggggagggaggagttgcagctggaggagtgggggcccctttggggggtgaggtagctgggcctccttttggagagggaggagttacaactgcgggattgggggc

SEQ ID NO: 12627 - DNA, 120 bp, synthetic construct
  misc_feature 1..120: note = Artificially Synthesized Probe
  source 1..120: mol_type = other DNA
aggaagaagtcatggatagagcaggagcctgtttgggtgctggagtagctggaccctctttggggaagggcagattcaccactgaaggagtgggggtctctttggggggtagtgttactc

SEQ ID NO: 12628 - DNA, 120 bp, synthetic construct
  misc_feature 1..120: note = Artificially Synthesized Probe
  source 1..120: mol_type = other DNA
caattttctgaagctgtaggaaccaagggtaaagtagtaagagtaccttccttaactgggtggtttttaggagctaaagagacagttccttctagaaaagggctggctgtagttgtataa

SEQ ID NO: 12629 - DNA, 120 bp, synthetic construct
  misc_feature 1..120: note = Artificially Synthesized Probe
  source 1..120: mol_type = other DNA
acagaagaaacgggcatttgggccactaaaggataatgataagtggcattaggagagcttttgagaatgagagaggttgtaggagataatgaaaaagaggtagctacatttaaggagcca

SEQ ID NO: 12630 - DNA, 120 bp, synthetic construct
  misc_feature 1..120: note = Artificially Synthesized Probe
  source 1..120: mol_type = other DNA
tagataaaggtgacaggcaacaacaaccttccccaaacatttttcagtggtcaagtgagaagacattcccctcctaatttctcacacttccccaagttctaccaaagtaaaccaactatt

SEQ ID NO: 12631 - DNA, 120 bp, synthetic construct
  misc_feature 1..120: note = Artificially Synthesized Probe
  source 1..120: mol_type = other DNA
tccaagatgaattagacatgaattagacctccaggcagagagcttactcacaagggtagggactgtattatgaaactgtaacctaacttgttaaaccagattgtggtgctattttggaag

SEQ ID NO: 12632 - DNA, 120 bp, synthetic construct
  misc_feature 1..120: note = Artificially Synthesized Probe
  source 1..120: mol_type = other DNA
gagaacagtactttattttttcccttccttaagccccttgtacttcaagaatttcatattgtttatactccagcttagagccccctattgtccttcctagcagctgtattaatcccttca

SEQ ID NO: 12633 - DNA, 120 bp, synthetic construct
  misc_feature 1..120: note = Artificially Synthesized Probe
  source 1..120: mol_type = other DNA
ccaggatagtaattttacggtctatcctccttggtaaagctgcaaccccatcctcctaaaaagtgtatttccccttggtcattttgcccaccaaatggctttagggttaattttaattaa

SEQ ID NO: 12634 - DNA, 120 bp, synthetic construct
  misc_feature 1..120: note = Artificially Synthesized Probe
  source 1..120: mol_type = other DNA
tattaagtcgacctcgcgatttctcaaatagtgcaggaagaagacattaaatagcgaatgctagagactgcattcacaacattggagggtggaagtgacttaggctaaccagttattttt

SEQ ID NO: 12635 - DNA, 120 bp, synthetic construct
  misc_feature 1..120: note = Artificially Synthesized Probe
  source 1..120: mol_type = other DNA
tggttggtccatcctcacactgcccttgaataaactctttaaatagattccggcccttttgattgttttaggttcacgacaatttagccgatgttgaaattataaagctgcagattctcc

SEQ ID NO: 12636 - DNA, 120 bp, synthetic construct
  misc_feature 1..120: note = Artificially Synthesized Probe
  source 1..120: mol_type = other DNA
attctaggtgtctgggaccccaccttaaaccatgctttgtacaactgtatttttgaaaagtagaatgtaaaatcagtgttgtgttaatgaaaagcctcccatatcttcccacagccctac

SEQ ID NO: 12637 - DNA, 120 bp, synthetic construct
  misc_feature 1..120: note = Artificially Synthesized Probe
  source 1..120: mol_type = other DNA
ccttcagaaggaccagaaatagccaatttccttagacaaaagtacatattcacaatttttctttcttccccagcaagcccacttactttttcctctctctgtagtaatgactagccaagg

SEQ ID NO: 12638 - DNA, 120 bp, synthetic construct
  misc_feature 1..120: note = Artificially Synthesized Probe
  source 1..120: mol_type = other DNA
agtaattttgtattcaggagttttaatcgacccactgtttctagaacctgaagacttaataacctatagtacacataagctcaaataatgaagagtttttgggccaggtgaggtggctca

SEQ ID NO: 12639 - DNA, 120 bp, synthetic construct
  misc_feature 1..120: note = Artificially Synthesized Probe
  source 1..120: mol_type = other DNA
cagcctgacagcttgcttctcaatgtttctcggaagacagaatataaactagaatgactgttttgtttagattagttgtaaaacagggcaagagaaatcggacatattagaacccatctc

SEQ ID NO: 12640 - DNA, 120 bp, synthetic construct
  misc_feature 1..120: note = Artificially Synthesized Probe
  source 1..120: mol_type = other DNA
gtgcctggccctctagatataattaaatgtctaaaacttaaggacaaaaccatcattcacccaaacatatgacgtatcaagtgagctgagatgacagtcctattactgctcacttacctc

SEQ ID NO: 12641 - DNA, 120 bp, synthetic construct
  misc_feature 1..120: note = Artificially Synthesized Probe
  source 1..120: mol_type = other DNA
gcaggcacgaaagtaaaacaaaaaacagtacagaatgggagagactgaaaagtaagaatggcttccaggcccacttcctagaggtacgcactattaacatttttagatataaacttccag

SEQ ID NO: 12642 - DNA, 120 bp, synthetic construct
  misc_feature 1..120: note = Artificially Synthesized Probe
  source 1..120: mol_type = other DNA
gaaaacaggttctacaaggattaaggaacatctcttggcccacagaagattcatgtggatcctgtgttaaacccgtttcatccatgtatgaaagtgattcaaccgttaagttagccattt

SEQ ID NO: 12643 - DNA, 120 bp, synthetic construct
  misc_feature 1..120: note = Artificially Synthesized Probe
  source 1..120: mol_type = other DNA
tggctacaagaacaaaacattcatgaaaatagaatcataaggacttccatttcaataatggtagacaaggttatttgaaccagcctcctctcccaccactactgctagtaggaagtactc

SEQ ID NO: 12644 - DNA, 120 bp, synthetic construct
  misc_feature 1..120: note = Artificially Synthesized Probe
  source 1..120: mol_type = other DNA
aacaaaaaaaaaaaatccagactaaattacaagggacttcaaagagtgtagcaattatgtcttccccttttatagagaagggggtgtgacattcctaaagccatgtcatccgactgtcca

SEQ ID NO: 12645 - DNA, 120 bp, synthetic construct
  misc_feature 1..120: note = Artificially Synthesized Probe
  source 1..120: mol_type = other DNA
tgtgtctgaatgctgtctcctacaggtaaagtttaagcattactgactataggcaaacaatggcctctcagctgtccatcagaagaagctacagaaaagtaagttttctttattcagtca

SEQ ID NO: 12646 - DNA, 120 bp, synthetic construct
  misc_feature 1..120: note = Artificially Synthesized Probe
  source 1..120: mol_type = other DNA
ctttttttcccccaagttcttcaaatatatctggttctctttaactccaggctatgacacaagtgattacctctgtttgaaatgatgtctcaattcctcctctaccaactatgcctgggc

SEQ ID NO: 12647 - DNA, 120 bp, synthetic construct
  misc_feature 1..120: note = Artificially Synthesized Probe
  source 1..120: mol_type = other DNA
agtccaccactcttagaaccttccttttcacttcgactccttcctagcatggcacacgatagatcatttgatcattagaaaggtaacttctgaggcctcacacatggaaatatattgaat

SEQ ID NO: 12648 - DNA, 120 bp, synthetic construct
  misc_feature 1..120: note = Artificially Synthesized Probe
  source 1..120: mol_type = other DNA
agaggaggatcctggcaatctttatgtacgcttatgtttgagaagcactttgaatagcacagctctacagtccctatctccactgcctccctttattttttttttttcctgttagaatgt

SEQ ID NO: 12649 - DNA, 120 bp, synthetic construct
  misc_feature 1..120: note = Artificially Synthesized Probe
  source 1..120: mol_type = other DNA
ggaaattgctggccttcaagatttaatatcttcagagaaataaaatttggcaaactggcaactatgaaagggaaaataaaaatttagttatgtcagctacatctctcacagcaaagtgta

SEQ ID NO: 12650 - DNA, 120 bp, synthetic construct
  misc_feature 1..120: note = Artificially Synthesized Probe
  source 1..120: mol_type = other DNA
ggcttgggttcaggttctgcaactagcaagtaatgtgaattttgacacattattgaccctctctgggtaacagttttctcttctataaaatacaagcattgactcagtagcatcaccttc

SEQ ID NO: 12651 - DNA, 120 bp, synthetic construct
  misc_feature 1..120: note = Artificially Synthesized Probe
  source 1..120: mol_type = other DNA
actgtgcctggccaacaatgaagcttttgcatgcaagtctttatgtcaattccatagagttgtatatttcttcaatctttagtgttcagtgtttactaagttaaggaatgatggtgccta

SEQ ID NO: 12652 - DNA, 120 bp, synthetic construct
  misc_feature 1..120: note = Artificially Synthesized Probe
  source 1..120: mol_type = other DNA
tcctagtgtgtagtaaaggctcaataattacaaacagcactctgctttcttaatgagaaagagtgctattcctcacaatttaccatggatacaggctacacccttagaaccacaggcact

SEQ ID NO: 12653 - DNA, 120 bp, synthetic construct
  misc_feature 1..120: note = Artificially Synthesized Probe
  source 1..120: mol_type = other DNA
ttcttttttttttttaaagaatacatatatgaagatattgctttttgcagcttatgcactgtatgggaagccctgtgctactcttcagactcacaaaaagaaatacagcatctcggctag

SEQ ID NO: 12654 - DNA, 120 bp, synthetic construct
  misc_feature 1..120: note = Artificially Synthesized Probe
  source 1..120: mol_type = other DNA
cgggagcttgtaatcccagctacttgggaggctgaggcaagagaatggcgtgaacccaggaggcagagcttgcagtgagccgagattgcgccactgcactccagcctgggggacagagcg

SEQ ID NO: 12655 - DNA, 120 bp, synthetic construct
  misc_feature 1..120: note = Artificially Synthesized Probe
  source 1..120: mol_type = other DNA
agctataaaaaggatgaagttccttttcaaagttgatacataataattgtacatatttatggagtacatgtgaaggaatgaaattccaatataggctacaacatgatgtaccttgaacag

SEQ ID NO: 12656 - DNA, 120 bp, synthetic construct
  misc_feature 1..120: note = Artificially Synthesized Probe
  source 1..120: mol_type = other DNA
tgtcaacccacacattccaaaaaagttcagtgcacctcaagcaagatacatacaaagcaaagcacacctaggcatataacagtcaaactgcttaagaccaaagcaatactagcaacaatt

SEQ ID NO: 12657 - DNA, 120 bp, synthetic construct
  misc_feature 1..120: note = Artificially Synthesized Probe
  source 1..120: mol_type = other DNA
aagtcagtgttctcccttgaaggaattgcaaaacaaatggagaacacgcagcaacagtgttgctttgataagcagttttcagggcaagaaccagtaaatgttctgaaaccattgaaaagt

SEQ ID NO: 12658 - DNA, 120 bp, synthetic construct
  misc_feature 1..120: note = Artificially Synthesized Probe
  source 1..120: mol_type = other DNA
ggccctgtttgtacggacagcaatcaataggcaggtccgggataagtggtttttttgaatcagttttcctatgacttgagggattgaacatatttctttgtagtcatctaaaaggaataa

SEQ ID NO: 12659 - DNA, 120 bp, synthetic construct
  misc_feature 1..120: note = Artificially Synthesized Probe
  source 1..120: mol_type = other DNA
ggagaagccacaagaatcttgacttttgctcatacacgacactgttgcaatgctgctcctctttggaagctctttggacaattataaatactcttttttttgcaactgccctgtatacaa

SEQ ID NO: 12660 - DNA, 120 bp, synthetic construct
  misc_feature 1..120: note = Artificially Synthesized Probe
  source 1..120: mol_type = other DNA
aggtggtatatgtgtgcattaaattagtagtggcttatatcccagagaactaggtaggatttctcagcttaaagtggtcagcctattacctgggtttatgattttgttgggcacttgctt

SEQ ID NO: 12661 - DNA, 120 bp, synthetic construct
  misc_feature 1..120: note = Artificially Synthesized Probe
  source 1..120: mol_type = other DNA
cttaggttgtggctctctgcaagagaaatgtaaatggtttataaagtaacggtaaaggatatcaagggaatttggtggaatgagtgcgtatatgacactcctccatgcaaccaacaaaaa

SEQ ID NO: 12662 - DNA, 120 bp, synthetic construct
  misc_feature 1..120: note = Artificially Synthesized Probe
  source 1..120: mol_type = other DNA
gaaaccctccgtcagtatcaaaagaaaagaatggccacaaacatactctctaaaaactacttgccaatctcgtgaaactaggacgcaaataccctctaaactcaggtttgatgtatgctt

SEQ ID NO: 12663 - DNA, 120 bp, synthetic construct
  misc_feature 1..120: note = Artificially Synthesized Probe
  source 1..120: mol_type = other DNA
ccagaaatagaagcatagcttcaggaaaacaacaagtagaacttttaacgtttctgtccaaagtcagccatgtagaggtaaataaaaacaaacccatagggaaggggtgaagtggcttac

SEQ ID NO: 12664 - DNA, 120 bp, synthetic construct
  misc_feature 1..120: note = Artificially Synthesized Probe
  source 1..120: mol_type = other DNA
aaataggtttaaatccaaccatattcataattgcattaaatttaaacgttctaaacattccaattagaaagcagttattgtcagactcttaaaaagcaagacctggccaggcgtggtggc

SEQ ID NO: 12665 - DNA, 120 bp, synthetic construct
  misc_feature 1..120: note = Artificially Synthesized Probe
  source 1..120: mol_type = other DNA
gtgagaccccgttacccacaaaaaggaaaaggaaaaaacaagaattgactttaaatatagtcacagatagattaaaaagaaaataatctaaaagatgtaacatgaaaaaactaataaagg

SEQ ID NO: 12666 - DNA, 120 bp, synthetic construct
  misc_feature 1..120: note = Artificially Synthesized Probe
  source 1..120: mol_type = other DNA
tcagtgcaaccacttgggaaaaagctttgcattatctagtggagttgaacacccgcaaagttctatgactctgcaattctttactttgttatgtatcctagagaaacacacatgagcact

SEQ ID NO: 12667 - DNA, 120 bp, synthetic construct
  misc_feature 1..120: note = Artificially Synthesized Probe
  source 1..120: mol_type = other DNA
gcgtgagtcactgcacccggccgcaggggtcttttaaggcattgataatgtccaatttcttgactttactaggaggttcataggttgctttttattcattctttaaagcatacataaaaa

SEQ ID NO: 12668 - DNA, 120 bp, synthetic construct
  misc_feature 1..120: note = Artificially Synthesized Probe
  source 1..120: mol_type = other DNA
tttctgaaagcttccagcacaggaaaaaaaaaaattttgtttgcagtaaaaggattgacaagcagaaaggcatggaacttctcgacagcacattaggaaccagtagaaatgtagcagtgc

SEQ ID NO: 12669 - DNA, 120 bp, synthetic construct
  misc_feature 1..120: note = Artificially Synthesized Probe
  source 1..120: mol_type = other DNA
aaaaatgatgactctttcaagaaatgaaaatgatgagatatctggtaggtctgaatgacttaagaggagatttaaacatttgggataagttgaagatgagctggtgttcgtcttcattta

SEQ ID NO: 12670 - DNA, 120 bp, synthetic construct
  misc_feature 1..120: note = Artificially Synthesized Probe
  source 1..120: mol_type = other DNA
gaattactatacagctagcaatatcgttgttaggtatatgccccagagacttgaatacagttacatgctccatcagatacctgtacccaaatgttcctatcggtattactcatggtagcc

SEQ ID NO: 12671 - DNA, 120 bp, synthetic construct
  misc_feature 1..120: note = Artificially Synthesized Probe
  source 1..120: mol_type = other DNA
gcttcagctccacatagcatttgtatagtcatgataatgtaaacatgtaatgtgaatatatgaatctagccaaaactatgccataactataaagaggggaaggctagtacaggaaggggg

SEQ ID NO: 12672 - DNA, 120 bp, synthetic construct
  misc_feature 1..120: note = Artificially Synthesized Probe
  source 1..120: mol_type = other DNA
cagataataaccaccagacctgtaatagtgaaagcctattcagtctccagttgggttttgtgacagtcagaagttggttaccagtgaggcaattttctatataagactctgtccaccaat

SEQ ID NO: 12673 - DNA, 120 bp, synthetic construct
  misc_feature 1..120: note = Artificially Synthesized Probe
  source 1..120: mol_type = other DNA
aactacttgatctctcagttaaagatctgcattaacctccactgtaacttatgcatgtgttcggtttgagcaagaccagcaaggtacctaggaacctttccctgatcatcttgtatttca

SEQ ID NO: 12674 - DNA, 120 bp, synthetic construct
  misc_feature 1..120: note = Artificially Synthesized Probe
  source 1..120: mol_type = other DNA
attgttagtccagaccttaaggtttcaaatttgaaggtttaccacctaagggaggaatagaaaactgggagaggatttatgatgcaggaaagaaaagagatgtatgccaggtgcagtggc

SEQ ID NO: 12675 - DNA, 120 bp, synthetic construct
  misc_feature 1..120: note = Artificially Synthesized Probe
  source 1..120: mol_type = other DNA
atgtttgagtttttacctgatgccataggtaattctctctggacccaggaattcacaaaatgttctccctgagggaaattaaaattcaagttgttgattatctgactttttttttttttt

SEQ ID NO: 12676 - DNA, 120 bp, synthetic construct
  misc_feature 1..120: note = Artificially Synthesized Probe
  source 1..120: mol_type = other DNA
gaagccttctcagggtcactgtttccggaaactgaccttgaaaacagacctgcatttaaatatcacagatgtactttgacgaatgaggaagtaagagacatagaatggtaactaaattca

SEQ ID NO: 12677 - DNA, 120 bp, synthetic construct
  misc_feature 1..120: note = Artificially Synthesized Probe
  source 1..120: mol_type = other DNA
tataggatggagcttttgttttttggaattaagcagtggtgactaaatctagtcgctagggttatatgaaagctactggcagtaaagagaactatatttaaaataataggccagacgcag

SEQ ID NO: 12678 - DNA, 120 bp, synthetic construct
  misc_feature 1..120: note = Artificially Synthesized Probe
  source 1..120: mol_type = other DNA
aaaaataaaaataaaaatccctccaattcaaatttaagttttctttctatggtgctgtagcaaagaatgggctgggaacccaaaggctggagcattagtacccgctcttccaccagtggg

SEQ ID NO: 12679 - DNA, 120 bp, synthetic construct
  misc_feature 1..120: note = Artificially Synthesized Probe
  source 1..120: mol_type = other DNA
atccatatactttgtttctcatccttacaaccaccagacaagctgtacattattatctgctgtggaagtcgcagataccaagatgaaatcacttttatcagacccacacaaaatagggct

SEQ ID NO: 12680 - DNA, 120 bp, synthetic construct
  misc_feature 1..120: note = Artificially Synthesized Probe
  source 1..120: mol_type = other DNA
aatttgacatatttggggatatctgtctctaatttttttgttgttgttgacactgcattttacatatgagattcagacaaggtcagtcacctgcctagggtctggtagtcaggtagcagc

SEQ ID NO: 12681 - DNA, 120 bp, synthetic construct
  misc_feature 1..120: note = Artificially Synthesized Probe
  source 1..120: mol_type = other DNA
tcaagtgatttgcccgccttggcctcccaaagtgctgggatcacaggtgtgagccactgtgcccagccttttttttttttttttttttttttgagatggagtctcgctgtgttgaccagg

SEQ ID NO: 12682 - DNA, 120 bp, synthetic construct
  misc_feature 1..120: note = Artificially Synthesized Probe
  source 1..120: mol_type = other DNA
cctggaaatgcagaaggtagaggaacatgttagactatgccagaggaacacattctgccaaatctagagtagagggaattttacaggacagattacatggcttctttaacaaataagtga

SEQ ID NO: 12683 - DNA, 120 bp, synthetic construct
  misc_feature 1..120: note = Artificially Synthesized Probe
  source 1..120: mol_type = other DNA
ccttttctaagccaggaactaaagaccactgcagtaataaaaactctttctgaggtttaaaaatacagtgttttcatttggtatatatttagcagtacatgaaaccatttgtaataatgt

SEQ ID NO: 12684 - DNA, 120 bp, synthetic construct
  misc_feature 1..120: note = Artificially Synthesized Probe
  source 1..120: mol_type = other DNA
aggcctttcctgcttgaataaatcctggagtggtccaattttgaatagggaaagatcaaaactgaaggtgctactccagaaaggtggctcttttgtctttcattttgtcttttaaagaac

SEQ ID NO: 12685 - DNA, 120 bp, synthetic construct
  misc_feature 1..120: note = Artificially Synthesized Probe
  source 1..120: mol_type = other DNA
agtaggtacagtactcagtaaatgatcgttgttattgttagaactctgatttatatatcataacccctatggcggggctaggacaaacaaacaaaaccctccaatactgcagcaatgaga

SEQ ID NO: 12686 - DNA, 120 bp, synthetic construct
  misc_feature 1..120: note = Artificially Synthesized Probe
  source 1..120: mol_type = other DNA
ctgctgggtggccattttctgaaaaggaaaataaagcaggttgatcccttatagtaagatttttcttagaagagcatttcccactgtttccgaagaaaccaggaattaaaggaatgcctg

SEQ ID NO: 12687 - DNA, 120 bp, synthetic construct
  misc_feature 1..120: note = Artificially Synthesized Probe
  source 1..120: mol_type = other DNA
ggccccaaagtaatctcttcgaagttcccaaaaagtctcccatttgttcatttttcaaagccccatgtaaattagctccccattccctcttaacttcgagaataagggttgataaaattc

SEQ ID NO: 12688 - DNA, 120 bp, synthetic construct
  misc_feature 1..120: note = Artificially Synthesized Probe
  source 1..120: mol_type = other DNA
aaatgtcctgtgggagcagcttaaatgtgcattggtggcctttccacacaaatgcaaattgattatgattttctcctgaaataggaatcaaaaagaaagtaagtggccaagtgtggaggc

SEQ ID NO: 12689 - DNA, 120 bp, synthetic construct
  misc_feature 1..120: note = Artificially Synthesized Probe
  source 1..120: mol_type = other DNA
tgcagtgagccgagatcgcaccactgcactccagcctaggcgacaagagtgaaactccatctcaaaaaaagagaaagaaatataattcacacatcataaaattcacccatttaaaatgaa

SEQ ID NO: 12690 - DNA, 120 bp, synthetic construct
  misc_feature 1..120: note = Artificially Synthesized Probe
  source 1..120: mol_type = other DNA
tcatactaaactaagttaattgctgtttaattttttattagcaggtataacaatacattatgcaccatggtccaacaatgacaataaagtttttcaccactccgggcattttatccacac

SEQ ID NO: 12691 - DNA, 120 bp, synthetic construct
  misc_feature 1..120: note = Artificially Synthesized Probe
  source 1..120: mol_type = other DNA
aatgatattaatctgttcatcattcagcacaatttggagcaaaggaactagtaagtcttcaacaggctttcacttcatcctgctcccccagtagtagggtcatacaaaaagtctacgaag

SEQ ID NO: 12692 - DNA, 120 bp, synthetic construct
  misc_feature 1..120: note = Artificially Synthesized Probe
  source 1..120: mol_type = other DNA
tctgtgtctggatttctttttaaatctatttagcgatttcctcttgctctgcatcaaccaccttcaagttccattgtcatccctttcttcccattgagagttgtagcacttcagcaaatt

SEQ ID NO: 12693 - DNA, 120 bp, synthetic construct
  misc_feature 1..120: note = Artificially Synthesized Probe
  source 1..120: mol_type = other DNA
ctcttcatcaattacacaggtttggatcattgaaaagacttagaagactccgcatagtatcctcacataaggctttaataaaggtaaaggatagatacaaaaaaaaaaaaaacccaacaa

SEQ ID NO: 12694 - DNA, 120 bp, synthetic construct
  misc_feature 1..120: note = Artificially Synthesized Probe
  source 1..120: mol_type = other DNA
aaatcgcgcagtcagagactttaccagtaaatgctctaaggtcttgagtcaacaggatttaatcaggacccaaaaggagtaatgaaacctacagagtctcacaccagaagtattttattc

SEQ ID NO: 12695 - DNA, 120 bp, synthetic construct
  misc_feature 1..120: note = Artificially Synthesized Probe
  source 1..120: mol_type = other DNA
ccaccgcacccagctgtcctctcctttatattccggttctccaatctagtttaaaatttcagcaattataatttcccacagctctttcttttctctgtgccttattttcatagtgtcaat

SEQ ID NO: 12696 - DNA, 120 bp, synthetic construct
  misc_feature 1..120: note = Artificially Synthesized Probe
  source 1..120: mol_type = other DNA
ccatagggcagatagtctctcataggagactccatattcaggaagcggtttccttgagctgcttccttcctgactactagtccatatagtttctactttccaagaatgtgttaaaatatt

SEQ ID NO: 12697 - DNA, 120 bp, synthetic construct
  misc_feature 1..120: note = Artificially Synthesized Probe
  source 1..120: mol_type = other DNA
gtctttgttcttgcctaacaagattacttccctgaactgtaaaactccctcagtactgcatacagagagaggttaggagacatggtggtcgtggataggaaatgagggaattatgatagg

SEQ ID NO: 12698 - DNA, 120 bp, synthetic construct
  misc_feature 1..120: note = Artificially Synthesized Probe
  source 1..120: mol_type = other DNA
tatgtggttggggttaaccaaaccgaaagctctccaaacctgtggtttattttttaatggaggtgccatcacttaggcatgattggttaaatcactggcaactggtggttaatcaatctc

SEQ ID NO: 12699 - DNA, 120 bp, synthetic construct
  misc_feature 1..120: note = Artificially Synthesized Probe
  source 1..120: mol_type = other DNA
ggcagagccgcagtagtggctccacctgggctggcctcacggtgcagggctcctgggcccctggaggccacaccctcagctcctgcccagcctgtggcactggctcttctgctaactgca

SEQ ID NO: 12700 - DNA, 120 bp, synthetic construct
  misc_feature 1..120: note = Artificially Synthesized Probe
  source 1..120: mol_type = other DNA
tcaaggacacctgtgctcaccttctgcttgggagctcctagggagccccaccacttacttccctgccacggcctgcagtatcaccgctgaaacttcagcagagtacctcactgtccttcc

SEQ ID NO: 12701 - DNA, 120 bp, synthetic construct
  misc_feature 1..120: note = Artificially Synthesized Probe
  source 1..120: mol_type = other DNA
caacatctgtggaacagagtcggtgaagaatgggggccaggaatgcaggatgaggcctgggagcagccagggacaccctagtttgagagcaaaggtaatgcagcccgtgccagcttcctg

SEQ ID NO: 12702 - DNA, 120 bp, synthetic construct
  misc_feature 1..120: note = Artificially Synthesized Probe
  source 1..120: mol_type = other DNA
caggcggaaggcgcgcaggaagcgcacacagtcgcgcaagccggcggccaaggcgaaggcgccgccgaacgggcagcggcggaagaagagctcgaactcggcggcgtcccgcgcccggcc

SEQ ID NO: 12703 - DNA, 120 bp, synthetic construct
  misc_feature 1..120: note = Artificially Synthesized Probe
  source 1..120: mol_type = other DNA
taaccctcttgtcttggtatgactgattagataataggtaggcacctgcctagttagtgctcttttttgagaatttggaatgaggtctaagaaacaatatctcctctttgctgggctctt

SEQ ID NO: 12704 - DNA, 120 bp, synthetic construct
  misc_feature 1..120: note = Artificially Synthesized Probe
  source 1..120: mol_type = other DNA
tttgagaatagcaaagtcagacatgtcaaaaaaatacattcaagaaatcataagaagcaacattaaacagcaaaaatagtcttgagaaccaaagtaaaactcacagtctgggccaggcat

SEQ ID NO: 12705 - DNA, 120 bp, synthetic construct
  misc_feature 1..120: note = Artificially Synthesized Probe
  source 1..120: mol_type = other DNA
ctccccatttttgaagtagaaaagctgaagtgtcaaggaaaggccgttttttaatctttgtgattgtttttaacatagtggcaacaatctgaaatgttctgctcatggtcagccatgagc

SEQ ID NO: 12706 - DNA, 120 bp, synthetic construct
  misc_feature 1..120: note = Artificially Synthesized Probe
  source 1..120: mol_type = other DNA
tggcaggcctttgaattataaactcaaaggtaatagtgatgtcacaagggagatatgcatacagagatagtgatcgcttctctaatttgaaaaggagttcttcaagtctagaaagttgtt

SEQ ID NO: 12707 - DNA, 120 bp, synthetic construct
  misc_feature 1..120: note = Artificially Synthesized Probe
  source 1..120: mol_type = other DNA
tggtatcattgaggctgggtgttctgacattaaagccaccagtaactgtagcacatcatgaatattttcatcctgcataaatcaccaatattgatttaaattttactctaaagattggct

SEQ ID NO: 12708 - DNA, 120 bp, synthetic construct
  misc_feature 1..120: note = Artificially Synthesized Probe
  source 1..120: mol_type = other DNA
gttccttgtccatttctgtcacatcccttaatagggaagatttcagagagcatttaaccagaagttagttaagttcaataaagttaatattaagatgtgcagaattttggaagcaattca

SEQ ID NO: 12709 - DNA, 120 bp, synthetic construct
  misc_feature 1..120: note = Artificially Synthesized Probe
  source 1..120: mol_type = other DNA
ataaaatgaacacctgtataaacagttctttgaccaagaaattgaacactgacagtagcctgacagggaaacctgtcaactattggtgtgctggtaaaagaattatctgcagagtggagg

SEQ ID NO: 12710 - DNA, 120 bp, synthetic construct
  misc_feature 1..120: note = Artificially Synthesized Probe
  source 1..120: mol_type = other DNA
gggatggagtgatttctatgacggggaatagaaaagagatgtggccacgcatgagaatattcaggctcattggtaatgttctgtgtcttaggcttactgatgtttaaatagggttcattt

SEQ ID NO: 12711 - DNA, 120 bp, synthetic construct
  misc_feature 1..120: note = Artificially Synthesized Probe
  source 1..120: mol_type = other DNA
gaaacaactggggctgaagagacaacaaggaccattcagagtcaaatctgagggtatgattagagatgactagcaatgttaaagctgagaaggttatggcatgtgtatcaaaatattggt

SEQ ID NO: 12712 - DNA, 120 bp, synthetic construct
  misc_feature 1..120: note = Artificially Synthesized Probe
  source 1..120: mol_type = other DNA
gtgcaacagagaccttatggctccgtaagcctaaaacactacctggccctttgcaaagaaagtatgccaactgttgatataacacattgaatacatgagtccatactgatataaaagatg

SEQ ID NO: 12713 - DNA, 120 bp, synthetic construct
  misc_feature 1..120: note = Artificially Synthesized Probe
  source 1..120: mol_type = other DNA
tagactagagaaaactctatcatagagtagcatttaagaatgagatctctgagtcagatagatatgatccaaattttggtgctggttggtttgcaccaactttcagtttcctaatcttta

SEQ ID NO: 12714 - DNA, 120 bp, synthetic construct
  misc_feature 1..120: note = Artificially Synthesized Probe
  source 1..120: mol_type = other DNA
agccctaaacttctttaccacaaacaattctcaatatgtcagtttgctacataagaaagaaaacatttcagtgatttcatagtcatgtacacggctcacactttaacagtactcagaata

SEQ ID NO: 12715 - DNA, 120 bp, synthetic construct
  misc_feature 1..120: note = Artificially Synthesized Probe
  source 1..120: mol_type = other DNA
ctaaagctcttaaagtatatttcagtagctttcagtgtataaatttcttcatagcaacagaacatcagtcagctaaagcctatctgaaaacctatacatttttgtcatatatcctaaaag

SEQ ID NO: 12716 - DNA, 120 bp, synthetic construct
  misc_feature 1..120: note = Artificially Synthesized Probe
  source 1..120: mol_type = other DNA
aactcatacctttgcaggtgtatgtatccagatggctgggttaataaacaaaatatgatcacaaagctgcttcagcaaaggtactccatgagataaaccatcaaggtattttgcaaaaga

SEQ ID NO: 12717 - DNA, 120 bp, synthetic construct
  misc_feature 1..120: note = Artificially Synthesized Probe
  source 1..120: mol_type = other DNA
atctcatacagtagccagaagccctatgtggcaactgagctgctggaatgttgcaattgaaagtgagatgtgttgtgagtatgaaaacactgggtttttccagctcagaatatttttaaa

SEQ ID NO: 12718 - DNA, 120 bp, synthetic construct
  misc_feature 1..120: note = Artificially Synthesized Probe
  source 1..120: mol_type = other DNA
ttgctcactgtcagtcaaatacgctccctggcactgtcaaaaaagcagctaacaaaattgaagtaaaaactctgtctcacagaacatattctaagagatgataaggcaggaacacagagt

SEQ ID NO: 12719 - DNA, 120 bp, synthetic construct
  misc_feature 1..120: note = Artificially Synthesized Probe
  source 1..120: mol_type = other DNA
catgatattaaaaggtatactaaaagcatcacaaggccttccacattacttaaaaaaaaatgggggggcctgctgttttcacataacaattaatgctgttgggtggcagattttcattct

SEQ ID NO: 12720 - DNA, 120 bp, synthetic construct
  misc_feature 1..120: note = Artificially Synthesized Probe
  source 1..120: mol_type = other DNA
atcaaattggagagaagaatcttgctcagtaattgacagaaaggagcttgctttcttcacctggatgtgaaggtctatagcactaattctctctggcagccttgtgacctcaaacagtat

SEQ ID NO: 12721 - DNA, 120 bp, synthetic construct
  misc_feature 1..120: note = Artificially Synthesized Probe
  source 1..120: mol_type = other DNA
gcattcctctgagaaaggtaaaaaagttactgtttcttaggtaatcagacaagcatgcaaggacatttcatatactcaattcaacaactatttactgagcccagcactgtgctaggtgct

SEQ ID NO: 12722 - DNA, 120 bp, synthetic construct
  misc_feature 1..120: note = Artificially Synthesized Probe
  source 1..120: mol_type = other DNA
accatggcaaaacacaatgcaagaaagcatttcaagaaggaaagactgttcaaccgaaatattcacaggtcgaataagataaggactgagaaataatcacaggacagactgtgaaggcca

SEQ ID NO: 12723 - DNA, 120 bp, synthetic construct
  misc_feature 1..120: note = Artificially Synthesized Probe
  source 1..120: mol_type = other DNA
gtggaagttgataagctgacatatatggaaatgcaaagactcagaaatggccaaggcaatcgtcaagaacaacagtaaagctagatgacatactcttaaatatcaggctgcactaaaaag

SEQ ID NO: 12724 - DNA, 120 bp, synthetic construct
  misc_feature 1..120: note = Artificially Synthesized Probe
  source 1..120: mol_type = other DNA
aagctaagttttaagtaaaagaatgtttaatttaggattttctgatacattctcaagtaaacaaatgaaagcacatttaaaggggtaagtcctcacagaaatcctgtcacacacagtaat

SEQ ID NO: 12725 - DNA, 120 bp, synthetic construct
  misc_feature 1..120: note = Artificially Synthesized Probe
  source 1..120: mol_type = other DNA
cgcttattcatgaaatctcactaatttttaaaggaaatcacatgatacaactaaactcttgtgagatcataatcagaaattcagcactcataaaagcacagctgtgactaaagcaaaaga

SEQ ID NO: 12726 - DNA, 120 bp, synthetic construct
  misc_feature 1..120: note = Artificially Synthesized Probe
  source 1..120: mol_type = other DNA
ataattagtgattgtcagctgtccaactgtgaggctacacaataaaaccatcaacacatcacctaccgtttcaagtaattagccaataactaaaaagccttttccacccagcacctgttc

SEQ ID NO: 12727 - DNA, 120 bp, synthetic construct
  misc_feature 1..120: note = Artificially Synthesized Probe
  source 1..120: mol_type = other DNA
attacacagtatataaacaaatacataaaggcagacaaagaggcgtcaaagatttagcacttggtatgtctttggaatgaatgaagaaacaaaatagaaagactgcattgaattaagctt

SEQ ID NO: 12728 - DNA, 120 bp, synthetic construct
  misc_feature 1..120: note = Artificially Synthesized Probe
  source 1..120: mol_type = other DNA
agaattcttacatacaccaaagttagtgattgagggaaaatggattcctaaacatgagcactgccaaaaagaaagactagaaatgcctcacagtggtccttatgatccatgaaaaaaggc

SEQ ID NO: 12729 - DNA, 120 bp, synthetic construct
  misc_feature 1..120: note = Artificially Synthesized Probe
  source 1..120: mol_type = other DNA
cagttcatctgcagaggatctaaatatatactccaggataaaccaaaaagcaagtactggtgtcagccaaaactaatacaacatagaacactctcttgaaaactatatcaatacctagga

SEQ ID NO: 12730 - DNA, 120 bp, synthetic construct
  misc_feature 1..120: note = Artificially Synthesized Probe
  source 1..120: mol_type = other DNA
acgtaaaaagtaaagattccccccctaaaatccaatacctcctccacttttaaaagaatgttgcaaagtaatcaagtagattaagtttcaaatcggatttacggttatcagtaaggggga

SEQ ID NO: 12731 - DNA, 120 bp, synthetic construct
  misc_feature 1..120: note = Artificially Synthesized Probe
  source 1..120: mol_type = other DNA
caaatgtccattagttaattatattctctacaccttaaaagttccgctgtagccctctaccccccttcactcacagagagtgactttagcaagataattttgactatgtgtgaactactc

SEQ ID NO: 12732 - DNA, 120 bp, synthetic construct
  misc_feature 1..120: note = Artificially Synthesized Probe
  source 1..120: mol_type = other DNA
ttctgactttaggtactctacactgtgtgttaggatattaaggatacactacgtcacatgagctgtgcacgtatgatgaccgggttactgctcattatcactgttgttaaaaagaatgac

SEQ ID NO: 12733 - DNA, 120 bp, synthetic construct
  misc_feature 1..120: note = Artificially Synthesized Probe
  source 1..120: mol_type = other DNA
cagctctaagtagtttgagacttcacaattcccagtgtgatttaaacagaacccttatatgttcccctagccaggtgtaccgcacatttaaaactaactcatatacgtgcatgctgttat

SEQ ID NO: 12734 - DNA, 120 bp, synthetic construct
  misc_feature 1..120: note = Artificially Synthesized Probe
  source 1..120: mol_type = other DNA
tccactgggtcccctaatcccataggaaggccagggaggaactacatttaggaaattgaagcttgtatggaacatttagtcctatgtgccaagacctttctcttttttgttatttttttg

SEQ ID NO: 12735 - DNA, 120 bp, synthetic construct
  misc_feature 1..120: note = Artificially Synthesized Probe
  source 1..120: mol_type = other DNA
gtcaaaacggtaccagtcactccaatagtctttcactcaccttcatccacacctctctttctggggatattttctgaattatttgagagtgagttgaagacgtgtttctttacctctaaa

SEQ ID NO: 12736 - DNA, 120 bp, synthetic construct
  misc_feature 1..120: note = Artificially Synthesized Probe
  source 1..120: mol_type = other DNA
aggcgtgagccaccgtgccagcggattctggatcggtcttaatcagtctttgtcttttgcaactttgatgttttgcagagagcagaccagttaccttgtagaatgtcccttagtttgggt

SEQ ID NO: 12737 - DNA, 120 bp, synthetic construct
  misc_feature 1..120: note = Artificially Synthesized Probe
  source 1..120: mol_type = other DNA
agctccaccctttgggaaggaccttagcccaggtgatggggaaactgcagaacccagaatcccctcccagaccacagttaaaggggatttatttatttatataaatttttgtgacagggt

SEQ ID NO: 12738 - DNA, 120 bp, synthetic construct
  misc_feature 1..120: note = Artificially Synthesized Probe
  source 1..120: mol_type = other DNA
ctagaatggaaccattcttgtcgcttttgaaaaacaaagccaagttctagatcccaaataaatgcacctgctggtgaacattctccttgtggttctcgtccctatgttagttattttcct

SEQ ID NO: 12739 - DNA, 120 bp, synthetic construct
  misc_feature 1..120: note = Artificially Synthesized Probe
  source 1..120: mol_type = other DNA
gttgtaaactacaaatattccttcacgtcttcttgtctttttaatgtttagaaaaccttaaaagaaatgttccctattgaggcaggggcgatcaatccagagaacaggatcatcccccac

SEQ ID NO: 12740 - DNA, 120 bp, synthetic construct
  misc_feature 1..120: note = Artificially Synthesized Probe
  source 1..120: mol_type = other DNA
aaaagaaaagaagaaagaagatggcctgggagcccgcaagagcattttccaggcttagggcatcctttgggtctgcagaaggctatgcagtgtcctcctcatgtccctcccttgggctgc

SEQ ID NO: 12741 - DNA, 120 bp, synthetic construct
  misc_feature 1..120: note = Artificially Synthesized Probe
  source 1..120: mol_type = other DNA
gggagtgtttgcggctgaatgaatgaacaggttttggagggcagtgtggccttcagaggcgatgcagggctgtggcagtttctaatacttattgcacagtcactgctaataacaataata

SEQ ID NO: 12742 - DNA, 120 bp, synthetic construct
  misc_feature 1..120: note = Artificially Synthesized Probe
  source 1..120: mol_type = other DNA
tcagaaatgcacactcaggtcccacagtggacctactgaacaggataggcattttagcaaaatcccaggtattcgggtgcaccttaaagttaggaaaaggtcaggcactgtggctcatgc

SEQ ID NO: 12743 - DNA, 120 bp, synthetic construct
  misc_feature 1..120: note = Artificially Synthesized Probe
  source 1..120: mol_type = other DNA
ttcattatgaagtgggctcagagctgtgattctgtgagcatgtgtgcatgcatgcatgtgacctcattgtccagtgtggtgaaggtgacatttccaaatctgagcattggacatcagtgt

SEQ ID NO: 12744 - DNA, 120 bp, synthetic construct
  misc_feature 1..120: note = Artificially Synthesized Probe
  source 1..120: mol_type = other DNA
aagtgggggcatcatcactgaccagaaagggaaaactggcagtgccagggctggatggggcctgcattgagcttgaaaaaaactataatagaattggttaccattttattttattattta

SEQ ID NO: 12745 - DNA, 120 bp, synthetic construct
  misc_feature 1..120: note = Artificially Synthesized Probe
  source 1..120: mol_type = other DNA
atgctccacccacctactcatggctgatctcttgtcatagtgaagtgtctggacagaccttcatcgttatgggatctctggtccccagagtgggtggcaatgaatgggagtggacaagct

SEQ ID NO: 12746 - DNA, 120 bp, synthetic construct
  misc_feature 1..120: note = Artificially Synthesized Probe
  source 1..120: mol_type = other DNA
aagattactttctttttatcattcctttatcttttaaagctttcttgcagtcaggtgcagtgtctcatgcctgtaatcccaacactttgggaagctgaggtgggaggatcactcaaggct

SEQ ID NO: 12747 - DNA, 120 bp, synthetic construct
  misc_feature 1..120: note = Artificially Synthesized Probe
  source 1..120: mol_type = other DNA
ttttagacacacactctgttaacccccatcctgtgtctctgataatcttcttgtgatcctcccaccagccaagaattgggttttatgtgaaccttgtattatgcaaagttttcttttgtt

SEQ ID NO: 12748 - DNA, 120 bp, synthetic construct
  misc_feature 1..120: note = Artificially Synthesized Probe
  source 1..120: mol_type = other DNA
aggtaggcaaaggttcgtaggagacagaaggcagttaacataaaagaaaaattggcaaatataatccgccaatgtcttcttttttctttacttttttcgggaggtagagataggggtctt

SEQ ID NO: 12749 - DNA, 120 bp, synthetic construct
  misc_feature 1..120: note = Artificially Synthesized Probe
  source 1..120: mol_type = other DNA
cagaggtagggccagagtagcggggcgggaccagagggcggaatcagagggagaggcggggactggaggcggggtcagaggaggagccagcgctagggggcggagcgatccctaagaggc

SEQ ID NO: 12750 - DNA, 120 bp, synthetic construct
  misc_feature 1..120: note = Artificially Synthesized Probe
  source 1..120: mol_type = other DNA
actccgcctcttagggatcgctccgccccctagcgctggctcctcctctgcccccgcctccagtccccgcctctccctctgattccgccctctggtcccgccccgctactctggccctgc

SEQ ID NO: 12751 - DNA, 120 bp, synthetic construct
  misc_feature 1..120: note = Artificially Synthesized Probe
  source 1..120: mol_type = other DNA
cagtttcctggtctgtgcaactgagacccttccagcaatccttccacagtctaggcaggggtggaggttagcagatccaggtcaccgcaggggacaggtatttgctataagacattggca

SEQ ID NO: 12752 - DNA, 120 bp, synthetic construct
  misc_feature 1..120: note = Artificially Synthesized Probe
  source 1..120: mol_type = other DNA
aaaaacaaaagaaaactttgcataatacaaggttcacataaaacccaattcttggctggtgggaggatcacaagaagattatcagagacacaggatgggggttaacagagtgtgtgtcta

SEQ ID NO: 12753 - DNA, 120 bp, synthetic construct
  misc_feature 1..120: note = Artificially Synthesized Probe
  source 1..120: mol_type = other DNA
gatcctcccacctcagcttcccaaagtgttgggattacaggcatgagacactgcacctgactgcaagaaagctttaaaagataaaggaatgataaaaagaaagtaatctttttttttttt

SEQ ID NO: 12754 - DNA, 120 bp, synthetic construct
  misc_feature 1..120: note = Artificially Synthesized Probe
  source 1..120: mol_type = other DNA
ccctacacccaggtgagcttgtccactcccattcattgccacccactctggggaccagagatcccataacgatgaaggtctgtccagacacttcactatgacaagagatcagccatgagt

SEQ ID NO: 12755 - DNA, 120 bp, synthetic construct
  misc_feature 1..120: note = Artificially Synthesized Probe
  source 1..120: mol_type = other DNA
aaataataaaataaaatggtaaccaattctattatagtttttttcaagctcaatgcaggccccatccagccctggcactgccagttttccctttctggtcagtgatgatgcccccacttc

SEQ ID NO: 12756 - DNA, 120 bp, synthetic construct
  misc_feature 1..120: note = Artificially Synthesized Probe
  source 1..120: mol_type = other DNA
tgcatttcctgggcgcatagcgttctccaggcttcggcctcacacttcaaacatgtccttgttctcatctgatgaagttagtgagcctttcccaactttattttcttttttggagacaga

SEQ ID NO: 12757 - DNA, 120 bp, synthetic construct
  misc_feature 1..120: note = Artificially Synthesized Probe
  source 1..120: mol_type = other DNA
gaccttttcctaactttaaggtgcacccgaatacctgggattttgctaaaatgcctatcctgttcagtaggtccactgtgggacctgagtgtgcatttctgaccagcccttcatccaacc

SEQ ID NO: 12758 - DNA, 120 bp, synthetic construct
  misc_feature 1..120: note = Artificially Synthesized Probe
  source 1..120: mol_type = other DNA
tattattattattgttattagcagcgactgtgcaataagtattagaaactgccacagccctgcatcgcctctgaaggccacgctgccctccaaaacctgttcattcattcagccgcaaac

SEQ ID NO: 12759 - DNA, 120 bp, synthetic construct
  misc_feature 1..120: note = Artificially Synthesized Probe
  source 1..120: mol_type = other DNA
ctgatgataactgcccttccttgggccaggggacaccttcaagcgtcaataagtgctggccggagcaatgctgcttgtctctgtcttggcagcctgggtgccttgacaaggggtaacgtc

SEQ ID NO: 12760 - DNA, 120 bp, synthetic construct
  misc_feature 1..120: note = Artificially Synthesized Probe
  source 1..120: mol_type = other DNA
gtgggggatgatcctgttctctggattgatcgcccctgcctcaatagggaacatttcttttaaggttttctaaacattaaaaagacaagaagacgtgaaggaatatttgtagtttacaac

SEQ ID NO: 12761 - DNA, 120 bp, synthetic construct
  misc_feature 1..120: note = Artificially Synthesized Probe
  source 1..120: mol_type = other DNA
ataactaacatagggacgagaaccacaaggagaatgttcaccagcaggtgcatttatttgggatctagaacttggctttgtttttcaaaagcgacaagaatggttccattctaggaaggt

SEQ ID NO: 12762 - DNA, 120 bp, synthetic construct
  misc_feature 1..120: note = Artificially Synthesized Probe
  source 1..120: mol_type = other DNA
cctgtcacaaaaatttatataaataaataaatcccctttaactgtggtctgggaggggattctgggttctgcagtttccccatcacctgggctaaggtccttcccaaagggtggagctgg

SEQ ID NO: 12763 - DNA, 120 bp, synthetic construct
  misc_feature 1..120: note = Artificially Synthesized Probe
  source 1..120: mol_type = other DNA
acccaaactaagggacattctacaaggtaactggtctgctctctgcaaaacatcaaagttgcaaaagacaaagactgattaagaccgatccagaatccgctggcacggtggctcacgcct

SEQ ID NO: 12764 - DNA, 120 bp, synthetic construct
  misc_feature 1..120: note = Artificially Synthesized Probe
  source 1..120: mol_type = other DNA
aaatatccccagaaagagaggtgtggatgaaggtgagtgaaagactattggagtgactggtaccgttttgacacccagtagcctttctgtaaatttgaaatttcaaaactgaaagttaca

SEQ ID NO: 12765 - DNA, 120 bp, synthetic construct
  misc_feature 1..120: note = Artificially Synthesized Probe
  source 1..120: mol_type = other DNA
aaaataacaaaaaagagaaaggtcttggcacataggactaaatgttccatacaagcttcaatttcctaaatgtagttcctccctggccttcctatgggattaggggacccagtggacttg

SEQ ID NO: 12766 - DNA, 120 bp, synthetic construct
  misc_feature 1..120: note = Artificially Synthesized Probe
  source 1..120: mol_type = other DNA
gagagtagatttggcatctggagaatggagaagaaaacacttgagactcatgaggagttagtggtggggcagatttattggggtcttttgaagaggactagggacatctgggctctggaa

SEQ ID NO: 12767 - DNA, 120 bp, synthetic construct
  misc_feature 1..120: note = Artificially Synthesized Probe
  source 1..120: mol_type = other DNA
gagtagaacatcccagctttctccaggcatagggtgcatgggaatagatactttgggtgcctcattaaacccttccctcttaaccaatctgatttcttaacattgcttattaaatcattt

SEQ ID NO: 12768 - DNA, 120 bp, synthetic construct
  misc_feature 1..120: note = Artificially Synthesized Probe
  source 1..120: mol_type = other DNA
accctctgccatcattctccagccagttcagtagtaacttgtctagctgaaatgtaaaccatcatggtgaaattaagctcattaatgaatgcagctgcctagttaactaatatcactcat

SEQ ID NO: 12769 - DNA, 120 bp, synthetic construct
  misc_feature 1..120: note = Artificially Synthesized Probe
  source 1..120: mol_type = other DNA
gaggctgagacaggagaatcatttttacccaggaggtggaggctgcagtgagctgagataccgccactgtactctagactggacaacagaatgaaactgtctcaaaaaaaaagtttcacc

SEQ ID NO: 12770 - DNA, 120 bp, synthetic construct
  misc_feature 1..120: note = Artificially Synthesized Probe
  source 1..120: mol_type = other DNA
aaaaaaagtttcaccaagaaatttatcatagatttacttggatctctcaaactaaaaagcctcacagtgggtgacacagagagactgtgaattgggggagtccactgagtgtcacctttg

SEQ ID NO: 12771 - DNA, 120 bp, synthetic construct
  misc_feature 1..120: note = Artificially Synthesized Probe
  source 1..120: mol_type = other DNA
cagatggcctccttccttcctgtttactgacatgcaaggctctgagaaaaataattcaatccaatttacagcaaacaccacatttcaagaaaagggaaagaacaggtgatgtgtatacca

SEQ ID NO: 12772 - DNA, 120 bp, synthetic construct
  misc_feature 1..120: note = Artificially Synthesized Probe
  source 1..120: mol_type = other DNA
ctgcctcttccagctgtaaactggcattcagatgaagtggtaacttctagggatgaggttcaagaagagttcaaactttcctccctatatctttttttatggttataaaatgcaagtccc

SEQ ID NO: 12773 - DNA, 120 bp, synthetic construct
  misc_feature 1..120: note = Artificially Synthesized Probe
  source 1..120: mol_type = other DNA
tcaagagtttgaacaacctgggttcaaatcccagcttttgttagctatatgatcccgtgtaagttaactttcttgtgcctgagtgtattttttaaaaaattattttatgggctgggcgcg

SEQ ID NO: 12774 - DNA, 120 bp, synthetic construct
  misc_feature 1..120: note = Artificially Synthesized Probe
  source 1..120: mol_type = other DNA
ttttttattaatgctcaggctgttctaagttctcaacactattacttattccccttccttgatttgattcctcagctggagtcctgatgatggataccataaaacccgtgtggcacaggt

SEQ ID NO: 12775 - DNA, 120 bp, synthetic construct
  misc_feature 1..120: note = Artificially Synthesized Probe
  source 1..120: mol_type = other DNA
tggagcagacacagttctcatatgtcaaagaaccgggttctgcttggaagctgctgctaaggaaagccctataaataacaaaaataacaacaaaaacaacggcagcagctaatatttaat

SEQ ID NO: 12776 - DNA, 120 bp, synthetic construct
  misc_feature 1..120: note = Artificially Synthesized Probe
  source 1..120: mol_type = other DNA
tgtcacaaacaaaaaaatccaacgggcatctataattacactctgcaactctagactttgggttctgggtacaacagtggctcggcctgggccctgggcacatcacttcacctctcggtg

SEQ ID NO: 12777 - DNA, 120 bp, synthetic construct
  misc_feature 1..120: note = Artificially Synthesized Probe
  source 1..120: mol_type = other DNA
ctgggttttaatgctatcagcccttagcaaatactactaattctcccatagcatactgtaagaggaaatacaagactgcttttctttcctcattcaacttcctcccctctcctcattagg

SEQ ID NO: 12778 - DNA, 120 bp, synthetic construct
  misc_feature 1..120: note = Artificially Synthesized Probe
  source 1..120: mol_type = other DNA
tctccccagagttccgattcattaaaaatgatacagttctgagtgaaaaatacaggaatatgttaccttatcaagcggaagctcatgctgaacatcccggattcttcctcgattagagaa

SEQ ID NO: 12779 - DNA, 120 bp, synthetic construct
  misc_feature 1..120: note = Artificially Synthesized Probe
  source 1..120: mol_type = other DNA
acagaagctctccaggatatattcctaaattttaaaaacacaaaaaacaggtacagagtatgctaattttatttatattttgagtttaacaaaggaagaaaatggctgggcctggttgtg

SEQ ID NO: 12780 - DNA, 120 bp, synthetic construct
  misc_feature 1..120: note = Artificially Synthesized Probe
  source 1..120: mol_type = other DNA
caatagttcagtgaaaatactgtatatatgttataaaacaccactggaagggaaaagtgtgactagaaaagtgtagaagatacatattaaaaatagtatttttgtgccaggcgcggtggc

SEQ ID NO: 12781 - DNA, 120 bp, synthetic construct
  misc_feature 1..120: note = Artificially Synthesized Probe
  source 1..120: mol_type = other DNA
tagtgataagttctatgaagaaagttataggatggtggtgttgaaataactggattagagggtccaactttagttacaggaatcaggaaaggcctctctgaggcaacttttgagccgaga

SEQ ID NO: 12782 - DNA, 120 bp, synthetic construct
  misc_feature 1..120: note = Artificially Synthesized Probe
  source 1..120: mol_type = other DNA
cgagaacagactaatacagcttacatgcttaggaggtacatttacatgcttacaagcatgtaaatgatgtcatctgaactatgcttcagaaagataactctggctgctgtggagccagga

SEQ ID NO: 12783 - DNA, 120 bp, synthetic construct
  misc_feature 1..120: note = Artificially Synthesized Probe
  source 1..120: mol_type = other DNA
tacaggcacctgccaccaagcccggctaattttttttgtatttttttagtagagacggggtttcactgtgttagccagaatggtctccatcatctcctgacctcgtgatccacccgcctc

SEQ ID NO: 12784 - DNA, 120 bp, synthetic construct
  misc_feature 1..120: note = Artificially Synthesized Probe
  source 1..120: mol_type = other DNA
acatgaaatggcagaaacttctaaaaaacaaacaaaccccatctatttggacacagagcagagatgtgcctgtgacttagcatggacctggccacatccatatcaaaaatattcactagt

SEQ ID NO: 12785 - DNA, 120 bp, synthetic construct
  misc_feature 1..120: note = Artificially Synthesized Probe
  source 1..120: mol_type = other DNA
ctgacatagttatatgtttctaaggtaatgttcaacacacaactggcccaggacagtgtttacatggggtaggcactcacctgtgttcaatgaatggaaatgaatgtatttcctttacct

SEQ ID NO: 12786 - DNA, 120 bp, synthetic construct
  misc_feature 1..120: note = Artificially Synthesized Probe
  source 1..120: mol_type = other DNA
cttccacttcacacttgtgccaatagttacttatccccagacacaggtgaggtgccaaatataacatgccaggtgttttcatttacagaaacaaaagctatcttctatagtttatgctac

SEQ ID NO: 12787 - DNA, 120 bp, synthetic construct
  misc_feature 1..120: note = Artificially Synthesized Probe
  source 1..120: mol_type = other DNA
ttcctgggctagcaagggccaccaagaagcttcagcaaatagcccaattctacctataacagaagagacattgaagaattatcagcatagcaatgaatgcatcacaatttcaaattcaac

SEQ ID NO: 12788 - DNA, 120 bp, synthetic construct
  misc_feature 1..120: note = Artificially Synthesized Probe
  source 1..120: mol_type = other DNA
aacactttgggaggccgaggcggatggatcacctgaggtaaggagttcgagaccagccttgacaacatggtgaaaccccatctctactaaaaataatccaggcgtggtggcagacgcctg

SEQ ID NO: 12789 - DNA, 120 bp, synthetic construct
  misc_feature 1..120: note = Artificially Synthesized Probe
  source 1..120: mol_type = other DNA
cctaaccaacatggtgaaacccctacagaaaatacaaacaattagccaggtgtggtggcccatgcctgtaatcccagctacttgggaggcctaggcataagaatcgcttgaacccaggag

SEQ ID NO: 12790 - DNA, 120 bp, synthetic construct
  misc_feature 1..120: note = Artificially Synthesized Probe
  source 1..120: mol_type = other DNA
gaggccagcctgaccaacatgaagaaaccccatctctactaaaaatacaaaattagcccggtgtggtggcgcacaactgtagtcccagctacttgggaggctaaggcaggagaatagctt

SEQ ID NO: 12791 - DNA, 120 bp, synthetic construct
  misc_feature 1..120: note = Artificially Synthesized Probe
  source 1..120: mol_type = other DNA
accatgcccagcctactcctaacactttcatatcaccctgatatatattatctcatgccatccacacacaaatcctatgaaacaagtcagatacgtatttcctttctgtaggatacagac

SEQ ID NO: 12792 - DNA, 120 bp, synthetic construct
  misc_feature 1..120: note = Artificially Synthesized Probe
  source 1..120: mol_type = other DNA
ccttaccatgtgccagaaactgctctaagtgtttcactgacggctcacaacaatcctgagagaggtactattattatttcaattatagagacgaagaaactgacgttccaaggctaattt

SEQ ID NO: 12793 - DNA, 120 bp, synthetic construct
  misc_feature 1..120: note = Artificially Synthesized Probe
  source 1..120: mol_type = other DNA
ctgcgtctttcaaatagaacccagttattgctaacgcgcctgtatcccttccttccttatctgtcgcctcggtccccacaagaactgcctgaggcctcaaaaggccgattctgctggaat

SEQ ID NO: 12794 - DNA, 120 bp, synthetic construct
  misc_feature 1..120: note = Artificially Synthesized Probe
  source 1..120: mol_type = other DNA
gggaatttagtgcttagtgtgaatttgagagcatatagttccgtaacacctttgttctctaaggttccgaaggagctcactaaatacactagccctttccatgttttctccttcactagt

SEQ ID NO: 12795 - DNA, 120 bp, synthetic construct
  misc_feature 1..120: note = Artificially Synthesized Probe
  source 1..120: mol_type = other DNA
gtgccaggctgtttgcttaagtataggaagccccatatgtatttattaccagtggagaaaggaaggctggaagaaagaaaaaaatattcaaatagaaaggaaggacatgacaatgccagg

SEQ ID NO: 12796 - DNA, 120 bp, synthetic construct
  misc_feature 1..120: note = Artificially Synthesized Probe
  source 1..120: mol_type = other DNA
aattagacatggagacaacaggggaccatctatctatttgtggacataaggctgacaaatgccataaatgataatatgacaaagggaacaaagtgagggaaactaagagcaggcaactac

SEQ ID NO: 12797 - DNA, 120 bp, synthetic construct
  misc_feature 1..120: note = Artificially Synthesized Probe
  source 1..120: mol_type = other DNA
tacaaaaaagctagctattattgctgaactataggacagtgttcaacaggtacacagtccaatagagggcatgtcatcaaacaaataactgcagcacagttagaaactatagcagaggga

SEQ ID NO: 12798 - DNA, 120 bp, synthetic construct
  misc_feature 1..120: note = Artificially Synthesized Probe
  source 1..120: mol_type = other DNA
ttgatttgggtgggattgactctaaatccatccttaagggttgtactaactggttttatccaatcagcatatctcacctctccggccccagggattggctcagaagttgacaattaactc

SEQ ID NO: 12799 - DNA, 120 bp, synthetic construct
  misc_feature 1..120: note = Artificially Synthesized Probe
  source 1..120: mol_type = other DNA
tgctgctgaatcaggcattccctgaggccagacctgcttctggacttttcagtcacgtgagccaagattatgttgtttaaactagcttgtgttgagttttctgttacttgtagccaaagg

SEQ ID NO: 12800 - DNA, 120 bp, synthetic construct
  misc_feature 1..120: note = Artificially Synthesized Probe
  source 1..120: mol_type = other DNA
gagttcattcgaaatgttttctaaaccctttccagcttattttctttcttgaaatccctgatttgtgaatcacttctaccatctctccatacccactgtggatgctgctcagttctcttg

SEQ ID NO: 12801 - DNA, 120 bp, synthetic construct
  misc_feature 1..120: note = Artificially Synthesized Probe
  source 1..120: mol_type = other DNA
tgcagactaaccttttaaataacatactcttgttccggaaggcagttagccgttcatcactctttctgtctaaataacatccaatgacaaatcccatagggacaagaacatgaacccagt

SEQ ID NO: 12802 - DNA, 120 bp, synthetic construct
  misc_feature 1..120: note = Artificially Synthesized Probe
  source 1..120: mol_type = other DNA
ttactactagcttcaatagtgatgtgatacgatacagagcagagaaacagagatggtatgtaaaaaaattctacctgcaacagctgattgtttgcaccctcctcatgttgttttggaact

SEQ ID NO: 12803 - DNA, 120 bp, synthetic construct
  misc_feature 1..120: note = Artificially Synthesized Probe
  source 1..120: mol_type = other DNA
tggagttcaaattcagcttcactctacagctctggctgctattatagcccatgcctaagaaaccccttcctgaattgatgtttatggtacttaaaagcttttaaatgctgagtttccaga

SEQ ID NO: 12804 - DNA, 120 bp, synthetic construct
  misc_feature 1..120: note = Artificially Synthesized Probe
  source 1..120: mol_type = other DNA
aagaagacatatgacaacatcctagaaagacaatacattattgccaacaaaagtgcttagcactaagctgtgctaggactatgtagactgaatttctgcctctcctcttacactggcatg

SEQ ID NO: 12805 - DNA, 120 bp, synthetic construct
  misc_feature 1..120: note = Artificially Synthesized Probe
  source 1..120: mol_type = other DNA
tgtctcaaaaataaaaaagcaaagtaaaagggtaagcacatcatttaggcgcaacggtgtcggctcaagaggatttgcgatttggaagagagcgaggttagcgagaagacagaaggctgg

SEQ ID NO: 12806 - DNA, 120 bp, synthetic construct
  misc_feature 1..120: note = Artificially Synthesized Probe
  source 1..120: mol_type = other DNA
tactgaatctttgcacttagacaagccacagatgccttaaaatctccgaactgtagtgatattttcaacccaaactatggttagtttccagtgttcatcccaagatccccaaaagcctct

SEQ ID NO: 12807 - DNA, 120 bp, synthetic construct
  misc_feature 1..120: note = Artificially Synthesized Probe
  source 1..120: mol_type = other DNA
ccgcgcccagccacttgttaacatttaaatcattgagatcaccttgacttcagcattattcttaaggccatattttattagcgccactctgaatttgatctttggcccaggttatgactt

SEQ ID NO: 12808 - DNA, 120 bp, synthetic construct
  misc_feature 1..120: note = Artificially Synthesized Probe
  source 1..120: mol_type = other DNA
gcctcccaaagtgctgggattacaggcgtgatccatgatccatgttagtcaggctggtctcaaactcctgacctcaggtgatctgcccgcctcggcctcccaaagtgttgggattacagg

SEQ ID NO: 12809 - DNA, 120 bp, synthetic construct
  misc_feature 1..120: note = Artificially Synthesized Probe
  source 1..120: mol_type = other DNA
agttaaaaaaaaaattgtgtaaaaacaaaaatggacaaagacccattaatttcatggtggttgtagtgggttgaaaggtggccccctaaaatgtatgtccacccctggaaactggggatg

SEQ ID NO: 12810 - DNA, 120 bp, synthetic construct
  misc_feature 1..120: note = Artificially Synthesized Probe
  source 1..120: mol_type = other DNA
ataatctggcttctgtcactgaatattaggtttccaaggttcatggatattgtagcatgtatcagtacttcactgcttttcatggccgaataatattccactgaatgcatatatcacata

SEQ ID NO: 12811 - DNA, 120 bp, synthetic construct
  misc_feature 1..120: note = Artificially Synthesized Probe
  source 1..120: mol_type = other DNA
ttctactgtcaaattgtctctccatgaataaataccacacagacctaatcaccctagcagcgtattaagatgtaataacttctagggcaagtcttcacccttttttcctcacattttccc

SEQ ID NO: 12812 - DNA, 120 bp, synthetic construct
  misc_feature 1..120: note = Artificially Synthesized Probe
  source 1..120: mol_type = other DNA
accgtgcccagcctagattttttttaagaacattcacgtttacaatatttaggagcaccttttcctcttgatttattaatgtcttacaataaaatattatcatcttattcagaaagcgta

SEQ ID NO: 12813 - DNA, 120 bp, synthetic construct
  misc_feature 1..120: note = Artificially Synthesized Probe
  source 1..120: mol_type = other DNA
atttctttttaatgctaatggtatcatgtgtggtctgtaagtgtctatatgtgtagttttagtaagtcttaactttttataaaccagcagcctcctggccggggatagccaatagcccca

SEQ ID NO: 12814 - DNA, 120 bp, synthetic construct
  misc_feature 1..120: note = Artificially Synthesized Probe
  source 1..120: mol_type = other DNA
tttaggtagtaaatgataaaattagtatctacatatattttatgcattcatgacataccattttcttaatttttcagtatttctaggctatgtggttcatcctagttttgacaaattatt

SEQ ID NO: 12815 - DNA, 120 bp, synthetic construct
  misc_feature 1..120: note = Artificially Synthesized Probe
  source 1..120: mol_type = other DNA
tgaaacacaggaagtatatgtgttttttaacttcaaacttaagtaagaataggccttgagacatttttccccactcaaaacccaggctggctctacacatttccttgctagcagattgct

SEQ ID NO: 12816 - DNA, 120 bp, synthetic construct
  misc_feature 1..120: note = Artificially Synthesized Probe
  source 1..120: mol_type = other DNA
taccagaatacagagctgaggcatgcatgcgaatggtgtgatatttgagtatttttattttcctctttggcccaaacaccttggagttaaatgttcagagtatggatccaagtgatcctg

SEQ ID NO: 12817 - DNA, 120 bp, synthetic construct
  misc_feature 1..120: note = Artificially Synthesized Probe
  source 1..120: mol_type = other DNA
ataatgtatttggcctctgctttttttattttaatgcagcaccttatatttgcttcttgcacttggccctgtcctttctctttggccaaacacagtttaggccacagttacctcccaacc

SEQ ID NO: 12818 - DNA, 120 bp, synthetic construct
  misc_feature 1..120: note = Artificially Synthesized Probe
  source 1..120: mol_type = other DNA
aaatcttttggcatttttttttctccctttagggacaaaggatcccttctcatgattatcctaagatctaaggttattctttttgcctcccagggtggatggtggcagatgcccttgcat

SEQ ID NO: 12819 - DNA, 120 bp, synthetic construct
  misc_feature 1..120: note = Artificially Synthesized Probe
  source 1..120: mol_type = other DNA
gaaggcagagaagaggcagagaaagaagctaataactaattacaccgactccacaattacgactaacgttggggacgaactctttgctaaataaacatttaggtgaaacaaagcttccat

SEQ ID NO: 12820 - DNA, 120 bp, synthetic construct
  misc_feature 1..120: note = Artificially Synthesized Probe
  source 1..120: mol_type = other DNA
aaatgagggaactttcagggacctggttaacttggtaacttactgacagccgttgagaagccagctgacatgacctgacctgtgaaaaggagaagaagggctttcttttcggcaaataaa

SEQ ID NO: 12821 - DNA, 120 bp, synthetic construct
  misc_feature 1..120: note = Artificially Synthesized Probe
  source 1..120: mol_type = other DNA
cgttttcatgtttatatgtgcacatacaggcacctctgttctgtatccagcatctagaacattgtactgtctagcacttaataggccttagtgagtatatgctgagtgagttggcataat

SEQ ID NO: 12822 - DNA, 120 bp, synthetic construct
  misc_feature 1..120: note = Artificially Synthesized Probe
  source 1..120: mol_type = other DNA
actgtaataaccattagaagtataccatgtgaatgttttgcacttacatgtagtggtaatatgtaatattcatatgcacggtacctacatgcacacaatcccagcactttggttgttttt

SEQ ID NO: 12823 - DNA, 120 bp, synthetic construct
  misc_feature 1..120: note = Artificially Synthesized Probe
  source 1..120: mol_type = other DNA
ttctttgtctgcggaatcagggaagagtgaaaagggtcagccacagaattccaagaagcaaagtccaccaaaaagtaagattttgatggtagtcataagggaaagagaatgcaaaaagaa

SEQ ID NO: 12824 - DNA, 120 bp, synthetic construct
  misc_feature 1..120: note = Artificially Synthesized Probe
  source 1..120: mol_type = other DNA
tttagattcttttgttttcttcctccttggtctgtgcacagaacactggtaagtttttaaatatttgtatttatacaaagagagtgccagcccctgactgcctctcacagtgtgtggact

SEQ ID NO: 12825 - DNA, 120 bp, synthetic construct
  misc_feature 1..120: note = Artificially Synthesized Probe
  source 1..120: mol_type = other DNA
catcatagacttatgaatttggattaaatggattttaaaatatcatggcagagccaaagagccccctttttagatacatgcgtctgtgtgtgagtggaaacggagtgcttcattctgtgg

SEQ ID NO: 12826 - DNA, 120 bp, synthetic construct
  misc_feature 1..120: note = Artificially Synthesized Probe
  source 1..120: mol_type = other DNA
cctggccatgtatctcataatttttaaaagaattcctgtacaggctgggcgtgggggttcacgcctataatcccagaactttgggaagctgaggcgggaggatcagttgagttcagcagt

SEQ ID NO: 12827 - DNA, 120 bp, synthetic construct
  misc_feature 1..120: note = Artificially Synthesized Probe
  source 1..120: mol_type = other DNA
ctctctagcttgctgtttccttgaatccagtacccaggcctaattttgcaacagtcagtaataaattgttgactgagtaatttctgtgtagctttttgaagagtatgtccagaagccaca

SEQ ID NO: 12828 - DNA, 120 bp, synthetic construct
  misc_feature 1..120: note = Artificially Synthesized Probe
  source 1..120: mol_type = other DNA
gttctaagcactcttcccatatctcatcttccccagtcctcaacaacccagggagtagatgctactgctatccccatgtcatagacaaggaagttgaggtctggagggactgacctgcct

SEQ ID NO: 12829 - DNA, 120 bp, synthetic construct
  misc_feature 1..120: note = Artificially Synthesized Probe
  source 1..120: mol_type = other DNA
tttgttcatgttcagtactaaagcagatgattttctgaacattttccatcctcagttggttgcttggtgggtttctatgggacctgtcttaggatgattgcattgaagatactgtcagta

SEQ ID NO: 12830 - DNA, 120 bp, synthetic construct
  misc_feature 1..120: note = Artificially Synthesized Probe
  source 1..120: mol_type = other DNA
ttgcagaaaacatttagattaaatgaaatagataaagaaagccaaaagccatttgaagttaaaggacccttacctgtccacacaaaatcagggttgtctgcgccaccgaagggcagccca

SEQ ID NO: 12831 - DNA, 120 bp, synthetic construct
  misc_feature 1..120: note = Artificially Synthesized Probe
  source 1..120: mol_type = other DNA
tcttcactatttcttaaccggtataatttttgaaaactggcagcttaacattgtcaccactgacttttgaaggtgtccaagtgttcattgatgaccttgtggggcatctcgctaagtgaa

SEQ ID NO: 12832 - DNA, 120 bp, synthetic construct
  misc_feature 1..120: note = Artificially Synthesized Probe
  source 1..120: mol_type = other DNA
gtgagccactgcgcccagctatgttaccattttcttgagcacgaaacttgataagatgcaatgcgctttaggtgggtcgtggcaaacatgaaaaggcaagcttccgttttagaatccatg

SEQ ID NO: 12833 - DNA, 120 bp, synthetic construct
  misc_feature 1..120: note = Artificially Synthesized Probe
  source 1..120: mol_type = other DNA
ttgaaggtgtccctacaccacaccgaagatactcaccttgtggagattggaaggatgccagctctttaaatgagacatcgtttttgcttaacgtaacttaaaaatgaaaaacagagcttt

SEQ ID NO: 12834 - DNA, 120 bp, synthetic construct
  misc_feature 1..120: note = Artificially Synthesized Probe
  source 1..120: mol_type = other DNA
tctctaagttacctgaaagtcctgctataattgttctaggcattttcaaacttttgagaagcctagaagtatacaaactaagatgttaagacacgttgtatggcctggcatggtggctca

SEQ ID NO: 12835 - DNA, 120 bp, synthetic construct
  misc_feature 1..120: note = Artificially Synthesized Probe
  source 1..120: mol_type = other DNA
gccctcggtgtgaagatgaaccttccaccgtcttcactgcatcctggagtgcaaaaataaaatccactcaagagtcacaaggcccgctgtgcataatcggtttcacttttaccttttttt

SEQ ID NO: 12836 - DNA, 120 bp, synthetic construct
  misc_feature 1..120: note = Artificially Synthesized Probe
  source 1..120: mol_type = other DNA
ctctaaggttatgaatcactgggcaaatccatataattagagaattttaagtgctttagagcggtgtgattctactgtgctcagcctagtcaatttcgcattaaactgattatcagctga

SEQ ID NO: 12837 - DNA, 120 bp, synthetic construct
  misc_feature 1..120: note = Artificially Synthesized Probe
  source 1..120: mol_type = other DNA
gatattttatataaacttgaggacattttcattggtgagattcggaagaggtgaagtttcttgcagtacagggacgaagtaggaagaggtgaagtttcgtgcagtacagggacggagtag

SEQ ID NO: 12838 - DNA, 120 bp, synthetic construct
  misc_feature 1..120: note = Artificially Synthesized Probe
  source 1..120: mol_type = other DNA
gtggtaggtgtaaccattttaatgtacctacaacttttctatcctgctatttgcattttttggtttttcatttaatagttctcaagctgggatccgtggaactactgtgatgggcggtga

SEQ ID NO: 12839 - DNA, 120 bp, synthetic construct
  misc_feature 1..120: note = Artificially Synthesized Probe
  source 1..120: mol_type = other DNA
ttaattaattaaattaaataagtgggtgttttaagtgctcagcttccttggttctaccaccttctctccctgaccctccttccctttccccctgaccttggcctttattctagaacggat

SEQ ID NO: 12840 - DNA, 120 bp, synthetic construct
  misc_feature 1..120: note = Artificially Synthesized Probe
  source 1..120: mol_type = other DNA
tgtgatttttatcctgtctttatctcctctattttctctgtcttctcatcttttcgtccatcactgaaccatctcctctctctgccaagttagaggaggcgggaaaaaacctccaaataa

SEQ ID NO: 12841 - DNA, 120 bp, synthetic construct
  misc_feature 1..120: note = Artificially Synthesized Probe
  source 1..120: mol_type = other DNA
taaccaagttggcatgtggctgtcatttgtccctttacattactgagctaccattgtctgaagaacccaacattccccaaagatcaactggtcttcaaatttcacatctgtttagattag

SEQ ID NO: 12842 - DNA, 120 bp, synthetic construct
  misc_feature 1..120: note = Artificially Synthesized Probe
  source 1..120: mol_type = other DNA
gttcagagtacccatgttgtgccatatatgttttgagaatcaactgacatagtacataattagagtacctggcacacacgataagcacttggtatatgctggcgattgttgttcctgttt

SEQ ID NO: 12843 - DNA, 120 bp, synthetic construct
  misc_feature 1..120: note = Artificially Synthesized Probe
  source 1..120: mol_type = other DNA
agctctttataggtagagccctgcttactagaataaaagctgaaaccttctttccccatctagagatttccttctggagtaagaacattacaggaaaacctctagatccagatgaacaac

SEQ ID NO: 12844 - DNA, 120 bp, synthetic construct
  misc_feature 1..120: note = Artificially Synthesized Probe
  source 1..120: mol_type = other DNA
ctccattgtattgaattttaagaagctggtgagactgatattatcccatttacagatgaggaaagcagggcccaaaaggttcgggaacttgtctgaaatctcacagctctcaggtcattg

SEQ ID NO: 12845 - DNA, 120 bp, synthetic construct
  misc_feature 1..120: note = Artificially Synthesized Probe
  source 1..120: mol_type = other DNA
agccacagcgcctggccaaaatgtttttatgtttatttttcttagtatgaaactccagcgtattaaagagcattgagaacggttgatctggtaaatcgctataaaggcggcatttctttt

SEQ ID NO: 12846 - DNA, 120 bp, synthetic construct
  misc_feature 1..120: note = Artificially Synthesized Probe
  source 1..120: mol_type = other DNA
gaacatttggctcatctagggaaaaacaagagtcccacctcacacctaatcaaaaagtaaattccagcagattaaatacctgaatatgacaggaaggtacacaccaaattcatgggacag

SEQ ID NO: 12847 - DNA, 120 bp, synthetic construct
  misc_feature 1..120: note = Artificially Synthesized Probe
  source 1..120: mol_type = other DNA
cgcctggccgagttttttaatttctaaaaataaaaatgagtatacatctaaagtagtagaagaaaatgcagagaatgttttataatcttaaaatagagccttcctaagagtgaagtgaaa

SEQ ID NO: 12848 - DNA, 120 bp, synthetic construct
  misc_feature 1..120: note = Artificially Synthesized Probe
  source 1..120: mol_type = other DNA
gaagcaagttgccaagcaatatttgtagtatggttacatatctccaaataaatgtgtcatatgtatgcttttaggtacaccaaggtgggactggaagggatcacagtacactgttaatag

SEQ ID NO: 12849 - DNA, 120 bp, synthetic construct
  misc_feature 1..120: note = Artificially Synthesized Probe
  source 1..120: mol_type = other DNA
tagccagcttttttcaaacacatgcctcagttgtagtggctgtttaatattatgtttttatagttggaggccctactccttaaaacctatgaatgtaaacctcccatgcaagcctgagca

SEQ ID NO: 12850 - DNA, 120 bp, synthetic construct
  misc_feature 1..120: note = Artificially Synthesized Probe
  source 1..120: mol_type = other DNA
gaatattttaaactaccacacttaccatgcatgtggtaaactatcagtctgtatttatcagtgatggttatttcctaatacccaggaggcatccatgtgagccacccttccattgcttta

SEQ ID NO: 12851 - DNA, 120 bp, synthetic construct
  misc_feature 1..120: note = Artificially Synthesized Probe
  source 1..120: mol_type = other DNA
agccctttctcaggccctgaatcgccatgcagaggccctcaagtgaccctagggaagaagcaagaaacttcggggctgcagcctcaggatgaggcagaaggaagggtaagggaaaggatg

SEQ ID NO: 12852 - DNA, 120 bp, synthetic construct
  misc_feature 1..120: note = Artificially Synthesized Probe
  source 1..120: mol_type = other DNA
attcaattaataagccttaagtatctattgtgcactaccgtggtaagataattccatgatcctccagaaattccacccaacgctgctggaaagtaggcttactacatgctacatgcaagt

SEQ ID NO: 12853 - DNA, 120 bp, synthetic construct
  misc_feature 1..120: note = Artificially Synthesized Probe
  source 1..120: mol_type = other DNA
aagcaattggagtttgaacccaggcagagtaattctagattctcactcgaatcacagtgacctccaatgcaattggtgagccacgatggtccccttcaacagacaaggaaattttttttt

SEQ ID NO: 12854 - DNA, 120 bp, synthetic construct
  misc_feature 1..120: note = Artificially Synthesized Probe
  source 1..120: mol_type = other DNA
gtgaagtaaagattctcacaagccttggctgtgaggccacagctatccagcctggtgaagataaggagttggttaaggtaacaccaggggctacttatgttattcggaggcagtgtctca

SEQ ID NO: 12855 - DNA, 120 bp, synthetic construct
  misc_feature 1..120: note = Artificially Synthesized Probe
  source 1..120: mol_type = other DNA
cctgttttaaaaaaaaaaaaaatcccaaataaactagatgatgcctcatcccattctaagtccttcagattagggctacagctggcctggcagaaaggtgagggagaaagtcacaattaa

SEQ ID NO: 12856 - DNA, 120 bp, synthetic construct
  misc_feature 1..120: note = Artificially Synthesized Probe
  source 1..120: mol_type = other DNA
agagagacttcctgtcttttctttccacctctcttcttgctacctgaatcttttgtagtgaagcaggatagttcataaatagaaaaatgaaggatgagaaggcgcttccactgtccaaac

SEQ ID NO: 12857 - DNA, 120 bp, synthetic construct
  misc_feature 1..120: note = Artificially Synthesized Probe
  source 1..120: mol_type = other DNA
ttttgctggtgccttgataaaaaaaatacacaaagtgtgttttttgagcacttctacccacgtcttatactagtcactaggagatacagttggcatagctcctatgcttgtggaatgcca

SEQ ID NO: 12858 - DNA, 120 bp, synthetic construct
  misc_feature 1..120: note = Artificially Synthesized Probe
  source 1..120: mol_type = other DNA
atcctgccttcagatttcaataaatgatgctgagggggaagtatgaggtcacataggatcataaatctaggaacccagattttagctagggattagaaagggtgtccagctgggtgtagt

SEQ ID NO: 12859 - DNA, 120 bp, synthetic construct
  misc_feature 1..120: note = Artificially Synthesized Probe
  source 1..120: mol_type = other DNA
gttcacactgagagttgaggccagctcgtcacaggcagcagcagtgaggcggcagatcttcagcctgcacaaagtccaattcaacaagcattatggaggctttcctttctttttcttttt

SEQ ID NO: 12860 - DNA, 120 bp, synthetic construct
  misc_feature 1..120: note = Artificially Synthesized Probe
  source 1..120: mol_type = other DNA
tgggcgtggtggcgcatgcctgtaatcccagctacttgggaggctgaggcaggagaatcacttgaacccaggaggcggaggttgccgtgagctgagatcacgccattgcactccagcctg

SEQ ID NO: 12861 - DNA, 120 bp, synthetic construct
  misc_feature 1..120: note = Artificially Synthesized Probe
  source 1..120: mol_type = other DNA
ttcacgaatgcagaacccgtggacacagagggctgactgtggctcagtggcatgaagtagtttcacgctactgggaaatcatcactgctatccatctctggaactttttttttttttgag

SEQ ID NO: 12862 - DNA, 120 bp, synthetic construct
  misc_feature 1..120: note = Artificially Synthesized Probe
  source 1..120: mol_type = other DNA
gcatttttataccatcattcaatatgaagagatttgccattttattatagttgaccccaggaagaactcaccacaaagtccgtagtctgcagactgggtgcctcagtccctggcatagta

SEQ ID NO: 12863 - DNA, 120 bp, synthetic construct
  misc_feature 1..120: note = Artificially Synthesized Probe
  source 1..120: mol_type = other DNA
gatttaaaggtggagatttggggattaccagcattttgtgatatttcatgccccaggagacaatgagcttaagaagttgctcccggggatagagactcactgaatcatctgcagcctgca

SEQ ID NO: 12864 - DNA, 120 bp, synthetic construct
  misc_feature 1..120: note = Artificially Synthesized Probe
  source 1..120: mol_type = other DNA
atgataaattttacctgtcaagaaaagcaacaagaacaatataaaatgttttgatgctttgtagtcaaatacattcacaaaggttgcccttaaagaaattcaaggccatgtgcggtggct

SEQ ID NO: 12865 - DNA, 120 bp, synthetic construct
  misc_feature 1..120: note = Artificially Synthesized Probe
  source 1..120: mol_type = other DNA
ggacagaggcctcagaagaacttaacctgcccactccttgtcttggacttccagcagccccccacctgccttgagaaaatagatttatgtggtgaagccacccagtctttggcacttttt

SEQ ID NO: 12866 - DNA, 120 bp, synthetic construct
  misc_feature 1..120: note = Artificially Synthesized Probe
  source 1..120: mol_type = other DNA
taatcattgatagttggtttacttgtttccctctttattatctgtctccgttctcattaggatgcgtgctctcttgggaccattggcttattcacacagtcttctgtctacagaagattg

SEQ ID NO: 12867 - DNA, 120 bp, synthetic construct
  misc_feature 1..120: note = Artificially Synthesized Probe
  source 1..120: mol_type = other DNA
aaaagggacttagtaatatttgttgattgaataaattctcccagacatcgacctcaatttagtcccaatgggtgttgtttagtctttgtggcactattgacactttggggccagagggac

SEQ ID NO: 12868 - DNA, 120 bp, synthetic construct
  misc_feature 1..120: note = Artificially Synthesized Probe
  source 1..120: mol_type = other DNA
caggatatagtacatagctgcaaagaattcctggaaactcaagtggatgaagctgtagtacctctcacagttgatgtccttctggaagatgttcatgttgaggaaggcagagacgtcttc

SEQ ID NO: 12869 - DNA, 120 bp, synthetic construct
  misc_feature 1..120: note = Artificially Synthesized Probe
  source 1..120: mol_type = other DNA
tcttccatgagccggaatttcctgcggacatagtccctgtaggtttcctggggatctaggggagaggaatgaaggttttgtggaagactcatcagcagcctctaatgagttcacgaggta

SEQ ID NO: 12870 - DNA, 120 bp, synthetic construct
  misc_feature 1..120: note = Artificially Synthesized Probe
  source 1..120: mol_type = other DNA
ctgtgtccagccccacaaagtgactttcagcaaaggatttatagaacgggtacattaccagatagtgcagacatgaatctgccttttttcaaagggggcacaagccaggtgcggtggctc

SEQ ID NO: 12871 - DNA, 120 bp, synthetic construct
  misc_feature 1..120: note = Artificially Synthesized Probe
  source 1..120: mol_type = other DNA
tggagaaaccctggtctggatacaaatgcatcccttggtattggatgccagcagaggcccatgatagctgcctgagagaagcttaaaaaaaagaatctgagtttgatactaaaattttca

SEQ ID NO: 12872 - DNA, 120 bp, synthetic construct
  misc_feature 1..120: note = Artificially Synthesized Probe
  source 1..120: mol_type = other DNA
ttgctcagctggtgaacccactcttattctactttagtagagctggagactagattcatttcatgctccccttgaaaaaaatagccagaaacatttgtggcattgttaacagtgttgctg

SEQ ID NO: 12873 - DNA, 120 bp, synthetic construct
  misc_feature 1..120: note = Artificially Synthesized Probe
  source 1..120: mol_type = other DNA
atgagatggtttggtagccatctttcagccaggagatgacacgtgtcaggacaaaatgctgacgtggaaaggttgatgagttgaaacacaggaggaaactgcccctttgatggtgtcatt

SEQ ID NO: 12874 - DNA, 120 bp, synthetic construct
  misc_feature 1..120: note = Artificially Synthesized Probe
  source 1..120: mol_type = other DNA
cttgaagtgttggaaatagtggtatgggccatcgtgcccagcccaaaaaaggccttcgtttggatatatcataagattctacacatcgagtccttccttggcatctttggtcctcagaag

SEQ ID NO: 12875 - DNA, 120 bp, synthetic construct
  misc_feature 1..120: note = Artificially Synthesized Probe
  source 1..120: mol_type = other DNA
gtttgttttgcaagatgaagagttctgcagattgaatgcacatcagtgtaaatgtacaacactcagcagcacacttaaaaatggttaagagggccagggcgcggtggctcacgcctgtaa

SEQ ID NO: 12876 - DNA, 120 bp, synthetic construct
  misc_feature 1..120: note = Artificially Synthesized Probe
  source 1..120: mol_type = other DNA
ggagtagctgggattacaggcatgtacaaccacgaccagctaatttttgtatttttagtagagacagggtttcaccatgttggccaggctgttgtcaaattcctagtctcaagtgattca

SEQ ID NO: 12877 - DNA, 120 bp, synthetic construct
  misc_feature 1..120: note = Artificially Synthesized Probe
  source 1..120: mol_type = other DNA
taaataaaaataaaaaaggtaattcttgaaaattgcagctgaaaaaggcctcagagatgttctccctcagtgtttcctaggcatgccgcgagaaccagccacatcaaaatgcagattcct

SEQ ID NO: 12878 - DNA, 120 bp, synthetic construct
  misc_feature 1..120: note = Artificially Synthesized Probe
  source 1..120: mol_type = other DNA
ggaaggaaggagggaagaaaggctacaaacaagtgtctttggttttttcagtcattaaagactttgttttttacagagatgtttcccagcacactactactggcacacctcattaacgac

SEQ ID NO: 12879 - DNA, 120 bp, synthetic construct
  misc_feature 1..120: note = Artificially Synthesized Probe
  source 1..120: mol_type = other DNA
agtgccatctctgccacttcagcaatagcctatatttgctgagcacttgctacctgctctgaattgtgttaagcactttgcatgtattatctcttgagcttatgcctgagtataaatcat

SEQ ID NO: 12880 - DNA, 120 bp, synthetic construct
  misc_feature 1..120: note = Artificially Synthesized Probe
  source 1..120: mol_type = other DNA
agtggcttcaaggtttcagtaagtaatacttttccaggcaaagaagatggagaatattccaggcagaacacagcatgaacaaagaccaaagggatgaaattagaattctgtacacagtca

SEQ ID NO: 12881 - DNA, 120 bp, synthetic construct
  misc_feature 1..120: note = Artificially Synthesized Probe
  source 1..120: mol_type = other DNA
ccacctctcaggttcaagcgattctcctgcctcagcctcccatgtagctgggactataagcgtgtgccaccacgcctggctaatttttgtatttttagtagagacagggttttgctatgt

SEQ ID NO: 12882 - DNA, 120 bp, synthetic construct
  misc_feature 1..120: note = Artificially Synthesized Probe
  source 1..120: mol_type = other DNA
tccaggggaccggccttctccatgcttccccaggggatcttgccttctcccagctctgtcgcggtccccaggtataacttgaacttcttcagttccacagcctcgagttcttccaagtag

SEQ ID NO: 12883 - DNA, 120 bp, synthetic construct
  misc_feature 1..120: note = Artificially Synthesized Probe
  source 1..120: mol_type = other DNA
ggctgtctgcttgtggatttcattcctggggcgcggggctgtctgcttgtggatttcatttctgccttttagtttttactttttctttctttggaggtggaaattgggcataagacaata

SEQ ID NO: 12884 - DNA, 120 bp, synthetic construct
  misc_feature 1..120: note = Artificially Synthesized Probe
  source 1..120: mol_type = other DNA
aaaaaaaaaaaaaagggcaaccgaggccggacgtggtggcttacgcctgtaatcccaacactttgggaggccgaggcgggcatatcacctgagctcaggaggtcaagatcagcctggcca

SEQ ID NO: 12885 - DNA, 120 bp, synthetic construct
  misc_feature 1..120: note = Artificially Synthesized Probe
  source 1..120: mol_type = other DNA
atttcgactgagcacagtggctgtaagcccagcatgttgggaagctgaggtgggtgaatcatttgaggtcagaccagcctgactaacatggcgaaaccccatctctacaaaaaatacaaa

SEQ ID NO: 12886 - DNA, 120 bp, synthetic construct
  misc_feature 1..120: note = Artificially Synthesized Probe
  source 1..120: mol_type = other DNA
ctggtgaacatggcaaaaccccatctctactaaaaaaaaatacaaaaattagctgggcgcggtggcaggtgcctgtaataccagctactcgggaggctgaggcaggagaatcacttgaac

SEQ ID NO: 12887 - DNA, 120 bp, synthetic construct
  misc_feature 1..120: note = Artificially Synthesized Probe
  source 1..120: mol_type = other DNA
tcaatcatctggcccttcctccagtctcacatttttgtgggactcctgtgcatacataattgaatctggtttttcttctgtcaaactgttttgtgtcaatgtaattcatagcccatccaa

SEQ ID NO: 12888 - DNA, 120 bp, synthetic construct
  misc_feature 1..120: note = Artificially Synthesized Probe
  source 1..120: mol_type = other DNA
agacagagagggacagggaaagagaatttcagacttatctaacattgacacttaggagaagtagggagaaagaggtgggaaaataaagtggctaggtaaaaatgaacatgtcagtaacaa

SEQ ID NO: 12889 - DNA, 120 bp, synthetic construct
  misc_feature 1..120: note = Artificially Synthesized Probe
  source 1..120: mol_type = other DNA
ttaaaattagtgcttggaaaaaaaaattagtgcttgaccaggaggcaagcacacctcctcatcctctcatggatgtctgtctgtagaaagtaaatggagacagcttcattttacccaact

SEQ ID NO: 12890 - DNA, 120 bp, synthetic construct
  misc_feature 1..120: note = Artificially Synthesized Probe
  source 1..120: mol_type = other DNA
accagaagtctgtttaaatccatccttctccccagccacccatgagttatgtgaccttggggttgctacttaacatttcagtctcaatttcctcaatagaacaaaagttagaagaattgt

SEQ ID NO: 12891 - DNA, 120 bp, synthetic construct
  misc_feature 1..120: note = Artificially Synthesized Probe
  source 1..120: mol_type = other DNA
cccagctagggcaggagaatcacttgaacccgggaggcagaggttgcagtgagccaagatcatgccactgcactccagcctgggcaacaacagagagacttcatctctaaataaataaat

SEQ ID NO: 12892 - DNA, 120 bp, synthetic construct
  misc_feature 1..120: note = Artificially Synthesized Probe
  source 1..120: mol_type = other DNA
cattttcctgcctcagcctccagaatagctggaattacaggcatctgccactacgcctggctaattttttgtgtatttttagtagagatgggatttcaccatgttggtcaggctgatctc

SEQ ID NO: 12893 - DNA, 120 bp, synthetic construct
  misc_feature 1..120: note = Artificially Synthesized Probe
  source 1..120: mol_type = other DNA
aaaaacgaaaagaaatatagatgtacatatacatatgttggttctaaaacatgaaaaaggctgggcgcggtggttcgtgcctgcaacccaagcactttgggaggccgaggcgggcggatc

SEQ ID NO: 12894 - DNA, 120 bp, synthetic construct
  misc_feature 1..120: note = Artificially Synthesized Probe
  source 1..120: mol_type = other DNA
gcctcagcctcccgagtagctgggactacaggtgcccgccaccacgcccggctaattttttgtatttttagtagagacggggtttcaccgtgttagccaggatggtctcgatctcctgac

SEQ ID NO: 12895 - DNA, 120 bp, synthetic construct
  misc_feature 1..120: note = Artificially Synthesized Probe
  source 1..120: mol_type = other DNA
gtagggccaggtgttgggaggtgagtagctctccggcagctctgcaacttcatttctttatttctccattccacagttggtaaaatttctccttttatttcatatattttttttctgaga

SEQ ID NO: 12896 - DNA, 120 bp, synthetic construct
  misc_feature 1..120: note = Artificially Synthesized Probe
  source 1..120: mol_type = other DNA
agtagggccaggtgttgggaggtgagtagctctccggcagctctgcaacttcatttctttatttctccattccacagttggtaaaatttctccttttatttcatatattttttttctgag

SEQ ID NO: 12897 - DNA, 120 bp, synthetic construct
  misc_feature 1..120: note = Artificially Synthesized Probe
  source 1..120: mol_type = other DNA
ataaaattcagtggttctgactggggaaagagtagcagatgcttagatctagagagactctagttaaggttggctcataagaggatagttgtgtgtgcttttatttctgttctcttgggg

SEQ ID NO: 12898 - DNA, 120 bp, synthetic construct
  misc_feature 1..120: note = Artificially Synthesized Probe
  source 1..120: mol_type = other DNA
cttaagttgccaggctggtctggaacttctggactggagtgatcacccacctgagcttcccaaagtgcggggattgcaagcgtcagccaccacccccagtgttgtgtttttgtttgtttt

SEQ ID NO: 12899 - DNA, 120 bp, synthetic construct
  misc_feature 1..120: note = Artificially Synthesized Probe
  source 1..120: mol_type = other DNA
tctgatctatgcttgtcctttcattgttgtgttactactttgctataatgagagagtgttttcgctttataggttaacttttagaacctgagcagcccctcagggaaaaccctgacagta

SEQ ID NO: 12900 - DNA, 120 bp, synthetic construct
  misc_feature 1..120: note = Artificially Synthesized Probe
  source 1..120: mol_type = other DNA
tgaaaagatgcaccgaatggatctgtctgagagagcaaaggatgaagtcagaggtgagtggaaatcggtccacactgtgtcctaggaggaagcaggcgtcctctccaggactttagaaat

SEQ ID NO: 12901 - DNA, 120 bp, synthetic construct
  misc_feature 1..120: note = Artificially Synthesized Probe
  source 1..120: mol_type = other DNA
tggtatatatgtgccacattttcttaatccagtctatcattgttggacatttgggttggttccaagtctttgctattgtgaataatgctgcaataaacatacgtgtgcatgtgtctttat

SEQ ID NO: 12902 - DNA, 120 bp, synthetic construct
  misc_feature 1..120: note = Artificially Synthesized Probe
  source 1..120: mol_type = other DNA
actctactttctaccccataacttttttttttgtttgtttgagacaagtctcactctgtcacccaggatggagtgcagcagcacaatctcagcttattgcaactcccgccccctgggttc

SEQ ID NO: 12903 - DNA, 120 bp, synthetic construct
  misc_feature 1..120: note = Artificially Synthesized Probe
  source 1..120: mol_type = other DNA
gaatactcctcaaccttaaggaactcctatctttttatttaaaaattgccagttttatttcagctagagatcactttttagcataatgtttcctgtctttaacaatgggtgagggttttt

SEQ ID NO: 12904 - DNA, 120 bp, synthetic construct
  misc_feature 1..120: note = Artificially Synthesized Probe
  source 1..120: mol_type = other DNA
acaagtgatccagttctaagtgtcatcttttcttttatgaaggcaataaaatcttgagcttatggtaaaatgcaaaattttccccccttctcctttttcagaagcagctttgaaatcctt

SEQ ID NO: 12905 - DNA, 120 bp, synthetic construct
  misc_feature 1..120: note = Artificially Synthesized Probe
  source 1..120: mol_type = other DNA
ccggttttgtttttttttttttttttttttttttttttttttttttgaaacagggcttcactctgtcacttaggctggagtggtgcaatcatggttcactgcagccttgacctcccaagc

SEQ ID NO: 12906 - DNA, 120 bp, synthetic construct
  misc_feature 1..120: note = Artificially Synthesized Probe
  source 1..120: mol_type = other DNA
ctcactctgttgcccaggatggaatgcagtggcatgatctcagctcactgcaacctctgacctccgcctcccggttcaagtgattctcttgcctcagcctcccgagtagctgggattata

SEQ ID NO: 12907 - DNA, 120 bp, synthetic construct
  misc_feature 1..120: note = Artificially Synthesized Probe
  source 1..120: mol_type = other DNA
gcctgccttggcctcccaaagtgttgggttacaggcatgagccaccatgcccggctgattccaccttgttcttacattctttcccagttcattttaaatttatctacctcatcagaaact

SEQ ID NO: 12908 - DNA, 120 bp, synthetic construct
  misc_feature 1..120: note = Artificially Synthesized Probe
  source 1..120: mol_type = other DNA
tcctggagaatgccaacctcccttccgtaagaatagagggaagaacgaacgttgcagagaattagaactcagtttgtagaaagttaggagcacagcgcagagagtttttgtttttgtttt

SEQ ID NO: 12909 - DNA, 120 bp, synthetic construct
  misc_feature 1..120: note = Artificially Synthesized Probe
  source 1..120: mol_type = other DNA
ttgacaggcataaatgtatttatggtacattgctcagacaactttaatataaacaacttacagagaaaattgagtcttttgggtaggtgacttgcctgagctgactttgtgataggtttt

SEQ ID NO: 12910 - DNA, 120 bp, synthetic construct
  misc_feature 1..120: note = Artificially Synthesized Probe
  source 1..120: mol_type = other DNA
agtatttcttgctatggctctgtataatagaggtgagtaacttggttgaaggaattgtttgccctgttcatctctctagacacggccaatgtcattcctggcacacaatctttttttttc

SEQ ID NO: 12911 - DNA, 120 bp, synthetic construct
  misc_feature 1..120: note = Artificially Synthesized Probe
  source 1..120: mol_type = other DNA
atagaatagggcttgggctgattgataatgtcaacagggggtttaacttgcggtcttctttcagcagaagtgtttgataaactgaggcgtttcatggcaaacagggagtttgtgagctct

SEQ ID NO: 12912 - DNA, 120 bp, synthetic construct
  misc_feature 1..120: note = Artificially Synthesized Probe
  source 1..120: mol_type = other DNA
acaaggcattttgttattttggttttccctatgggtaactgattgcatcctctctcccttccctcctcaccaatgataaagacaaagacaataggtgcaggtatatattgaagacgaagt

SEQ ID NO: 12913 - DNA, 120 bp, synthetic construct
  misc_feature 1..120: note = Artificially Synthesized Probe
  source 1..120: mol_type = other DNA
cagtttctcactgccctgttctacaccctggagaaggaggaggaagaggatagggacggccacacctgggacattggggacgtacagaagctgctttccggagtagaaagactcaggaac

SEQ ID NO: 12914 - DNA, 120 bp, synthetic construct
  misc_feature 1..120: note = Artificially Synthesized Probe
  source 1..120: mol_type = other DNA
aatatccctgcacttaaatgcagtagacgttgtgccatcttcattctgcgtcaagcactgtcgaaacctgcagaaaatgtcactgcaggtaataaaggagaatctcccggagaatgtcac

SEQ ID NO: 12915 - DNA, 120 bp, synthetic construct
  misc_feature 1..120: note = Artificially Synthesized Probe
  source 1..120: mol_type = other DNA
taataagtgattacatggtccagctttcaattgtactcatttgtcaggggtatatgcccagagaaaccctaaatacttcagccgtgatggacacacatttggtgtaaccctttcttctct

SEQ ID NO: 12916 - DNA, 120 bp, synthetic construct
  misc_feature 1..120: note = Artificially Synthesized Probe
  source 1..120: mol_type = other DNA
taaatatatcgagcccctggtttccatttaagtacgatacaggtgtacacactaaagatttcactttcgttctcttttccctaggttcaaaaacatttccccagctgatgctcatcggaa

SEQ ID NO: 12917 - DNA, 120 bp, synthetic construct
  misc_feature 1..120: note = Artificially Synthesized Probe
  source 1..120: mol_type = other DNA
ccagagtccttatgttttggttttggttttggttttttctttttcttttttctttttgagatggagtctcgctctgtcacccaggctggagtgcgttggtatgatctcaggtcactgcag

SEQ ID NO: 12918 - DNA, 120 bp, synthetic construct
  misc_feature 1..120: note = Artificially Synthesized Probe
  source 1..120: mol_type = other DNA
ctccatctcgaggacagaaaaaaaattgattgctctggctctactgatacaatcttaggctgcttaatgggatcttagttgaataggatgctgtacatcttacaggtattggaaggttga

SEQ ID NO: 12919 - DNA, 120 bp, synthetic construct
  misc_feature 1..120: note = Artificially Synthesized Probe
  source 1..120: mol_type = other DNA
cactgtgcccagccactcatttcttatgaatttattctaacacattttccggatgaacagggcaccttgaaacataggttagtgggctgggtatggtggctcctgcctgtaatcccagta

SEQ ID NO: 12920 - DNA, 120 bp, synthetic construct
  misc_feature 1..120: note = Artificially Synthesized Probe
  source 1..120: mol_type = other DNA
cagagcataaataactccctttcaaaaaaccaaacaatgaaacataggttagcggagtctgcatccaacattagagtcagattgactaagttctgtatttccagctgattcctgggcgat

SEQ ID NO: 12921 - DNA, 120 bp, synthetic construct
  misc_feature 1..120: note = Artificially Synthesized Probe
  source 1..120: mol_type = other DNA
gcatgatgctaatgacaactggtaagacctgggtagatgatggtaggaaaaaagtataagtagtagtagagtagtagtaatattctatagggatttggggaatgtagctggttttcgggt

SEQ ID NO: 12922 - DNA, 120 bp, synthetic construct
  misc_feature 1..120: note = Artificially Synthesized Probe
  source 1..120: mol_type = other DNA
gtcctgtaatcccagctacttgggaggctgaggcaggagaatcgcttgaagtcgggaggttgcagtgagccgagatcgtgccagcctgggtgacagaacgagattgtctcaaaaaaaaaa

SEQ ID NO: 12923 - DNA, 120 bp, synthetic construct
  misc_feature 1..120: note = Artificially Synthesized Probe
  source 1..120: mol_type = other DNA
cacacccactatatctaggccctgaaacattaaaaaagaagtcccacaagcagtgagatgtcaccgactcactaactgtatcttcaaatgaatgtctagtttttttggttgtgtgtgtgt

SEQ ID NO: 12924 - DNA, 120 bp, synthetic construct
  misc_feature 1..120: note = Artificially Synthesized Probe
  source 1..120: mol_type = other DNA
gataatctgtgttggttaatatctaggatcctagtaccagatatgttggagtgtgagctggtgtcttctgcctgtaagacactacctctctagcaactgaatttagcaaatacaatcgta

SEQ ID NO: 12925 - DNA, 120 bp, synthetic construct
  misc_feature 1..120: note = Artificially Synthesized Probe
  source 1..120: mol_type = other DNA
aggaaaccactgtgcaacttgagatgtctgtggtgagttaacttataagttcaacttcctatacttacaccttactgaatctgtggctagtgtaaaataatcagtgaagccgacttccca

SEQ ID NO: 12926 - DNA, 120 bp, synthetic construct
  misc_feature 1..120: note = Artificially Synthesized Probe
  source 1..120: mol_type = other DNA
ctctatcagcaggtgagtggtctcaacttggctatcttacaaataccttgtgagttagctacaatcagatgcacttgaacctggaatcctatctgggaggcaatcttaaaagaatttgac

SEQ ID NO: 12927 - DNA, 120 bp, synthetic construct
  misc_feature 1..120: note = Artificially Synthesized Probe
  source 1..120: mol_type = other DNA
gtctcaaagaataacttcaaagatggaagttatttaacctctctgctcaaaagcctcagtgcttccctatgtcaatccaggtaaaatcctatattgacgatggcttcagggtcttctgtg

SEQ ID NO: 12928 - DNA, 120 bp, synthetic construct
  misc_feature 1..120: note = Artificially Synthesized Probe
  source 1..120: mol_type = other DNA
aagatgctgtttgaaaccttgacatgttccagtggcaccctccggacactcaggtatgatccatttacttccccatcaggctttctccagagtggtaggtttaggggaagcataatgaca

SEQ ID NO: 12929 - DNA, 120 bp, synthetic construct
  misc_feature 1..120: note = Artificially Synthesized Probe
  source 1..120: mol_type = other DNA
ggcctgagttgtattttgataccatggcatcaaagaaccaagaagccccttcctaggaatgtgggaacttcagaaattctcacaagcaatatactctactgctggcttaaaataatcttt

SEQ ID NO: 12930 - DNA, 120 bp, synthetic construct
  misc_feature 1..120: note = Artificially Synthesized Probe
  source 1..120: mol_type = other DNA
agcgggtaagcaggtattagagctatagcccagctgtactcagcaattccattttctgtgtatgataatcaacaagcatctcaaactgcacaatggctatataccattacaaggttaacc

SEQ ID NO: 12931 - DNA, 120 bp, synthetic construct
  misc_feature 1..120: note = Artificially Synthesized Probe
  source 1..120: mol_type = other DNA
aaaaaaaaatcaatgtggaacactcctttgccacctagaataatcaggaaaggtgacccatgccctgtgcctccttaacagactttcaggtacttgggaatttgaaacaaatctccttga

SEQ ID NO: 12932 - DNA, 120 bp, synthetic construct
  misc_feature 1..120: note = Artificially Synthesized Probe
  source 1..120: mol_type = other DNA
aaattagtttcataggtcttcaacctggagggatcagagaacacaaatgttcccagaaattcattctcaactacccaggatgcctgaatatctgttttcaaacactcaaagcaggaaacg

SEQ ID NO: 12933 - DNA, 120 bp, synthetic construct
  misc_feature 1..120: note = Artificially Synthesized Probe
  source 1..120: mol_type = other DNA
ctccaaataaataaataaaaaatagtggcaaatcaaaccttcagtagaactaagagaatgccagagtgaaccccagggttaatgatagcaaacttggctctaacgtggctgcagcatgca

SEQ ID NO: 12934 - DNA, 120 bp, synthetic construct
  misc_feature 1..120: note = Artificially Synthesized Probe
  source 1..120: mol_type = other DNA
tacaaataagtcattgaaaagatatacacgggtcacaactaagggagcatctgtaggacgatcttctgaaaagctaagacccaggacagctctgggaactacctatttttggatataatg

SEQ ID NO: 12935 - DNA, 120 bp, synthetic construct
  misc_feature 1..120: note = Artificially Synthesized Probe
  source 1..120: mol_type = other DNA
aaaaaaattagccagctgtggtggtgtgtacctgtaatcccagctactcaggaggttgaggcaggaaaatcgcttcaacctgtgagaaggaggctgcagtgagtcaagatcgcgccactg

SEQ ID NO: 12936 - DNA, 120 bp, synthetic construct
  misc_feature 1..120: note = Artificially Synthesized Probe
  source 1..120: mol_type = other DNA
aacaaaaaacccatacctgagtatcttcaaggatccagttctttgtcttagaaccccaaagagcttaattatgccactcttccacaaatgattctggcccaggtccagagtttcaagctt

SEQ ID NO: 12937 - DNA, 120 bp, synthetic construct
  misc_feature 1..120: note = Artificially Synthesized Probe
  source 1..120: mol_type = other DNA
agggaatcttgtaaataaaatactgagctagtgagaaagtagaatgatttatggctcataacttacacgaggatcccccataaggccctgtaggccactgtagaagcctttggttttgtt

SEQ ID NO: 12938 - DNA, 120 bp, synthetic construct
  misc_feature 1..120: note = Artificially Synthesized Probe
  source 1..120: mol_type = other DNA
tatatatttcacttctccaggccctctacctgactttagaagtgcccacccacatatattcagtttctggaggggtttgatcttaaaactggatccgaagtgatacagtctgagatattg

SEQ ID NO: 12939 - DNA, 120 bp, synthetic construct
  misc_feature 1..120: note = Artificially Synthesized Probe
  source 1..120: mol_type = other DNA
tggttatgctgcattgctgtaacctacaggataatcaaaggaagagaagcctgttatccctctggctaacgccctgtgaagcagttatttccaacactatataccttccacttatatact

SEQ ID NO: 12940 - DNA, 120 bp, synthetic construct
  misc_feature 1..120: note = Artificially Synthesized Probe
  source 1..120: mol_type = other DNA
cagaccgacccaggacaggatctgagccctgggtcacttattttctgcgtggttagattatggaaatttcactttccctgtcattttatttcatgtttaagttttgtctttaactgacac

SEQ ID NO: 12941 - DNA, 120 bp, synthetic construct
  misc_feature 1..120: note = Artificially Synthesized Probe
  source 1..120: mol_type = other DNA
accacataactcaatctacctccaatagcaggcagtactatgtcataggaatttgaaagaacacacacaaagcatcagatccgagaaccaactactcatctcaaatcttccttcatagca

SEQ ID NO: 12942 - DNA, 120 bp, synthetic construct
  misc_feature 1..120: note = Artificially Synthesized Probe
  source 1..120: mol_type = other DNA
agttttccaacctgcaaaaatatgaaacaaatggtagaaggatgagaacatttccacaactccaacctgctcagtgatgtccacatgctagggtactcagcttcagcccttcctgttcat

SEQ ID NO: 12943 - DNA, 120 bp, synthetic construct
  misc_feature 1..120: note = Artificially Synthesized Probe
  source 1..120: mol_type = other DNA
cccatggccattagggtaacatccagccacttctccaagagattgtaatacaattctgtgcaatgtttcaccaaaacggcctgtgtggatgattttgcaggggggaaaaaaaaatttttt

SEQ ID NO: 12944 - DNA, 120 bp, synthetic construct
  misc_feature 1..120: note = Artificially Synthesized Probe
  source 1..120: mol_type = other DNA
ctgctctcaatcccaacaattaggcaaggtgcagtcaggaatagcatgtccctaaagctggaacccagcacagaattcggggtgtttctttgcatggatagctggttatgcaacacagaa

SEQ ID NO: 12945 - DNA, 120 bp, synthetic construct
  misc_feature 1..120: note = Artificially Synthesized Probe
  source 1..120: mol_type = other DNA
cagcctgggcaacagagcaagactccatctcaaaagaaaaaaaaattcgccgggtgtggtggctcacgcctgtaatcccagcactttgggaggccgaggccgaggcgggtggatcacgag

SEQ ID NO: 12946 - DNA, 120 bp, synthetic construct
  misc_feature 1..120: note = Artificially Synthesized Probe
  source 1..120: mol_type = other DNA
gagatgaaacagcacatttccaaatttaaaaaacaaaagtacaagaagcttagtcatcgttcagggtcttccttgcaagatgagcttctacttactccactttctgcagatgacaggtgc

SEQ ID NO: 12947 - DNA, 120 bp, synthetic construct
  misc_feature 1..120: note = Artificially Synthesized Probe
  source 1..120: mol_type = other DNA
aaaacagttcttacctttcaaattcaatgtccagttcaaaatccatgtaattctccaggaacaccccctttgctacctgcagtgagagtttctgcaagtcttgacaatgcttcaggctga

SEQ ID NO: 12948 - DNA, 120 bp, synthetic construct
  misc_feature 1..120: note = Artificially Synthesized Probe
  source 1..120: mol_type = other DNA
gactttcagctcatcaaggccatcgaccacgaacaggattctctgtgcttgggctaggatgcttggaatgtcatcctgcaattcaggccagtctttggagatcagctctgcaaaactgca

SEQ ID NO: 12949 - DNA, 120 bp, synthetic construct
  misc_feature 1..120: note = Artificially Synthesized Probe
  source 1..120: mol_type = other DNA
ctcaaaaaaaaaaaaaactaccagaaatgaataaaaccaggaagaagtgatgcaccttgcatgctctcaaacaccaaactcatgaccataggaccgtatttacccacctggctttgctaa

SEQ ID NO: 12950 - DNA, 120 bp, synthetic construct
  misc_feature 1..120: note = Artificially Synthesized Probe
  source 1..120: mol_type = other DNA
aactggggggaaaaaaggaaaaacagttcacgagttaccatcattaaatgaaaccacagtttcctgtgtgccaagaacaagactgttcctgctgtacagtgagtggtaaaatattccaaa

SEQ ID NO: 12951 - DNA, 120 bp, synthetic construct
  misc_feature 1..120: note = Artificially Synthesized Probe
  source 1..120: mol_type = other DNA
actacaaaccaagacttcctcgccaccaaccctcagagccacttgtttaacatttcagcccaccactgaatgacacattgaaaacaaatagcaagaggacagatataaatataactgtac

SEQ ID NO: 12952 - DNA, 120 bp, synthetic construct
  misc_feature 1..120: note = Artificially Synthesized Probe
  source 1..120: mol_type = other DNA
ctggaaaataaataacagaaaaagtgacttgccaagcccgggtgctgatagaggtggacagctttacccttggagggaacagcaaatctttttccccagctgtgacgtgtggggaaaagg

SEQ ID NO: 12953 - DNA, 120 bp, synthetic construct
  misc_feature 1..120: note = Artificially Synthesized Probe
  source 1..120: mol_type = other DNA
gcgacacaaggagaccttgtctctattttttaagtatttttaaagtaatatatacaacgtttacttgtcaaagtgtacagcatggagcgatgttatatatacagtgaaatgattaccaca

SEQ ID NO: 12954 - DNA, 120 bp, synthetic construct
  misc_feature 1..120: note = Artificially Synthesized Probe
  source 1..120: mol_type = other DNA
gagtgcagtggcgcgatctgggctcactgcaagctccgcctcccaggttcacgccattctcctgcctcagcctcccaagtagctgggactacaggcgcccgccactatgcccagctaatt

SEQ ID NO: 12955 - DNA, 120 bp, synthetic construct
  misc_feature 1..120: note = Artificially Synthesized Probe
  source 1..120: mol_type = other DNA
ttcaccattttgggcaggctggtctcaaacttctggcctcaagtgatccacccgcctcggcctcccaaagtgttgggataacaggcatgaaccactgtgcctggccttatatttttttgt

SEQ ID NO: 12956 - DNA, 120 bp, synthetic construct
  misc_feature 1..120: note = Artificially Synthesized Probe
  source 1..120: mol_type = other DNA
aaataaaaattaaaaaaaaagaggacaaaaactcccgtgacttcctaagttacaaatacaataagtctactttgtggccaactgtggtgcctcctgcctataaatcccagcaggctgaga

SEQ ID NO: 12957 - DNA, 120 bp, synthetic construct
  misc_feature 1..120: note = Artificially Synthesized Probe
  source 1..120: mol_type = other DNA
tttggtagtttaaactgttaatttaatggaagcaaatggtcccacaaatgaagatgtatatatcagttgcagcatgccatctatagaaataggcactatggaggcctggcatggtggctc

SEQ ID NO: 12958 - DNA, 120 bp, synthetic construct
  misc_feature 1..120: note = Artificially Synthesized Probe
  source 1..120: mol_type = other DNA
attttgttaaaacatttggcctttagtcctagagcagctatggagagataaacatgaaagaggtatctcttgttatacatacccaggccctgcaaccacacctgagtttatgtaaatgag

SEQ ID NO: 12959 - DNA, 120 bp, synthetic construct
  misc_feature 1..120: note = Artificially Synthesized Probe
  source 1..120: mol_type = other DNA
ctcagcacagaccctttactggtgtcgggctgagggacggtcaggtctttcccttcccatgagaccatatttcaggctatcacatggggagaaaccctggacaatacctggctttcctag

SEQ ID NO: 12960 - DNA, 120 bp, synthetic construct
  misc_feature 1..120: note = Artificially Synthesized Probe
  source 1..120: mol_type = other DNA
aaaaaataaaaatgaaaaaatgtgaatcaggctgcactctggcccacatcctggctgctgtgtatcacgtggctctagacactgcacttttgcctcctcatcattgctgtagataggatt

SEQ ID NO: 12961 - DNA, 120 bp, synthetic construct
  misc_feature 1..120: note = Artificially Synthesized Probe
  source 1..120: mol_type = other DNA
aaaaaaaaaaaaaaccctagacccaaacttctgggggagatggattggaggtttcctcccatctcctcattcctcagccctgtgattaaacttccttctcttctgcaacacagtgacccg

SEQ ID NO: 12962 - DNA, 120 bp, synthetic construct
  misc_feature 1..120: note = Artificially Synthesized Probe
  source 1..120: mol_type = other DNA
gagaccatcctggctaacacggtgaaaccatctctactaaaaaaaaaaaatacaaaaaattagctgggcgtggtggcgggcgcctgtagtcccagctactcgggaggctgaggcaggaga

SEQ ID NO: 12963 - DNA, 120 bp, synthetic construct
  misc_feature 1..120: note = Artificially Synthesized Probe
  source 1..120: mol_type = other DNA
agtgagccaagatcacgccactgcactccagcctgggcgacaagagcaaaactccatctcaaaaaaaataagggcaactagcagccctatgggctgctgtctatggagtagctattcttt

SEQ ID NO: 12964 - DNA, 120 bp, synthetic construct
  misc_feature 1..120: note = Artificially Synthesized Probe
  source 1..120: mol_type = other DNA
gtgagctgtgatcctcaacctcctgggttcaagggattgtcgagcctcagcctcccaagtagctgggattatagacattcgctcccatgcctggctaatttttgtattgcaaaaatgcac

SEQ ID NO: 12965 - DNA, 120 bp, synthetic construct
  misc_feature 1..120: note = Artificially Synthesized Probe
  source 1..120: mol_type = other DNA
cacgccttctaattttttgcatttttagtagaaacggggtttcaccatgttggccaggcttgtctcgaactcctgtcctctggtgatccacctgccttggcctcccaaagtgctggaatt

SEQ ID NO: 12966 - DNA, 120 bp, synthetic construct
  misc_feature 1..120: note = Artificially Synthesized Probe
  source 1..120: mol_type = other DNA
atcatctggcccttcctccagtctcacatttttgtgggactcctgtgcatacataattgaatctggtttttcttctgtcaaactgttttgtgtcaatgtaattcatagcccatccaaaga

SEQ ID NO: 12967 - DNA, 120 bp, synthetic construct
  misc_feature 1..120: note = Artificially Synthesized Probe
  source 1..120: mol_type = other DNA
gctcacaacactaaagactgcgcatgaaagggtcatgattgagcaatctaggggatacataacaggggtttcgtgcactgctggtcagagagaaagaatagggcagggagtttcacagtg

SEQ ID NO: 12968 - DNA, 120 bp, synthetic construct
  misc_feature 1..120: note = Artificially Synthesized Probe
  source 1..120: mol_type = other DNA
acaggctttcacagacctgggcattttgttgaattgtttttgaattgtggtttcttatcagttcatccgatactctgttctaaccacgtagttcctcttttggatctccaaacccctttg

SEQ ID NO: 12969 - DNA, 120 bp, synthetic construct
  misc_feature 1..120: note = Artificially Synthesized Probe
  source 1..120: mol_type = other DNA
ccagaagtctgtttaaatccatccttctccccagccacccatgagttatgtgaccttggggttgctacttaacatttcagtctcaatttcctcaatagaacaaaagttagaagaattgta

SEQ ID NO: 12970 - DNA, 120 bp, synthetic construct
  misc_feature 1..120: note = Artificially Synthesized Probe
  source 1..120: mol_type = other DNA
ccgagaccacaccactgcactccagcctgggcaacagagcgagagtctgtctcaaaaaggaaacaaaaaaaaaagtacctccaaattatggtagggtgtccatattaagaaggtagaaaa

SEQ ID NO: 12971 - DNA, 120 bp, synthetic construct
  misc_feature 1..120: note = Artificially Synthesized Probe
  source 1..120: mol_type = other DNA
aagctgacagctgtttgtgatcttcaagacctcagacaggttttctaaatatgccttgccttcattttctcaaggaaagtgaaaaatgggtaggatcatggcaatcactactgtgtagca

SEQ ID NO: 12972 - DNA, 120 bp, synthetic construct
  misc_feature 1..120: note = Artificially Synthesized Probe
  source 1..120: mol_type = other DNA
tggaggcggaggttgcagtgagccaagattgcgccactgcactccagcccgggcgacagtgccagactcagtctcagaaaaaaaaaaagcaaaacaaacaaagaaacatgaaaaaaagct

SEQ ID NO: 12973 - DNA, 120 bp, synthetic construct
  misc_feature 1..120: note = Artificially Synthesized Probe
  source 1..120: mol_type = other DNA
gtctcatagttgacgtgtcattgatatttcacttgaaatacggttggatttttattaataatatacctggggtgatgggagaaggtagccaatcacagctgaggcttctaagcggtgatt

SEQ ID NO: 12974 - DNA, 120 bp, synthetic construct
  misc_feature 1..120: note = Artificially Synthesized Probe
  source 1..120: mol_type = other DNA
atagttgacgtgtcattgatatttcacttgaaatacggttggatttttattaataatatacctggggtgatgggagaaggtagccaatcacagctgaggcttctaagcggtgattctcag

SEQ ID NO: 12975 - DNA, 120 bp, synthetic construct
  misc_feature 1..120: note = Artificially Synthesized Probe
  source 1..120: mol_type = other DNA
cacatactccggtgtctccagctgtgaagtgggaccagtatcaatacatgggaaagtgctgagaaggaagaaaatatttcaggtataatactaatccatcaaacacgttttattcaagaa

SEQ ID NO: 12976 - DNA, 120 bp, synthetic construct
  misc_feature 1..120: note = Artificially Synthesized Probe
  source 1..120: mol_type = other DNA
aacagataatccgcttctcatcttcatagactttggcctcctctggttttatcaggtttccatttaggctgttgaaaaggaggaagacaaaagtacacaggtaaaatgttaaggatcctc

SEQ ID NO: 12977 - DNA, 120 bp, synthetic construct
  misc_feature 1..120: note = Artificially Synthesized Probe
  source 1..120: mol_type = other DNA
aggccttccctgcaacctcatctaaatcaggttccctcttggccttcccctttgtgatagtacccatcacagttgtaattaaataattacgcaaatgattttttctttaatgtgcttctc

SEQ ID NO: 12978 - DNA, 120 bp, synthetic construct
  misc_feature 1..120: note = Artificially Synthesized Probe
  source 1..120: mol_type = other DNA
aagctgaagtctcctggccctactaaaatggttccttgtgtaggaatggtgaccctcaagagggaagcaatgcagattttgaaacttgacagaattaaagcaactgtaggtctttactac

SEQ ID NO: 12979 - DNA, 120 bp, synthetic construct
  misc_feature 1..120: note = Artificially Synthesized Probe
  source 1..120: mol_type = other DNA
tttttttcttctattagcataaggaagttctcaaagcagaaaaaagaagtagacaaagagcacaggtcagttcaagtcagcctggaaatgtcttacggaacccagaaaaggggaagaatg

SEQ ID NO: 12980 - DNA, 120 bp, synthetic construct
  misc_feature 1..120: note = Artificially Synthesized Probe
  source 1..120: mol_type = other DNA
gagactccatttatatttttatatatatttgggagaccaccaatctgaacaacaaattgtaagaaacacaccatgggacaggaagtctgacgtctccttccaggtagctagggaaaggca

SEQ ID NO: 12981 - DNA, 120 bp, synthetic construct
  misc_feature 1..120: note = Artificially Synthesized Probe
  source 1..120: mol_type = other DNA
tcaatggcagaggtaatgaccttccctttcaaaagggacaaaaatagaaccaggaagtgggcaccaagttctgtattcagttacactctgctgttttctagtcaccacttaggctttttt

SEQ ID NO: 12982 - DNA, 120 bp, synthetic construct
  misc_feature 1..120: note = Artificially Synthesized Probe
  source 1..120: mol_type = other DNA
attaaaaactgttgtcctttaaaggtcactatcaagaaagaggaaaaactccacagaaagaaagaaaatacttgcaaaacctgtatctagtaaaggtctagcacccagaatatatagaga

SEQ ID NO: 12983 - DNA, 120 bp, synthetic construct
  misc_feature 1..120: note = Artificially Synthesized Probe
  source 1..120: mol_type = other DNA
aaaagtagcacagtctgaaattgtaaggctctctgagttaccataaatgctttaacgtctggttgactttcaacatttctgccaaactctctgccacttcatcgttgagttcattttggg

SEQ ID NO: 12984 - DNA, 120 bp, synthetic construct
  misc_feature 1..120: note = Artificially Synthesized Probe
  source 1..120: mol_type = other DNA
cagggtaggacccacttgtgccagtggacgaaagaatcattaggaagaagaatagaacagaaagaacatttaaaaaaaaaaattccttgaagggcagtttggatgtgcctgcccaaattt

SEQ ID NO: 12985 - DNA, 120 bp, synthetic construct
  misc_feature 1..120: note = Artificially Synthesized Probe
  source 1..120: mol_type = other DNA
tcatgaagaggatattgtcattattctcagtaactaatttagcaagatcaaatgagcactgggctctgagtagatgatagggagggttgtaatacaactccctcacttaacctgtaagga

SEQ ID NO: 12986 - DNA, 120 bp, synthetic construct
  misc_feature 1..120: note = Artificially Synthesized Probe
  source 1..120: mol_type = other DNA
ctgtacctgtttatgcttgtagaagtggctattctcttctctaggaggaaattatcaacttaactgaaaggcctagagcctttccaattgggagacaccttttctgttaagattccaggc

SEQ ID NO: 12987 - DNA, 120 bp, synthetic construct
  misc_feature 1..120: note = Artificially Synthesized Probe
  source 1..120: mol_type = other DNA
atttatagagaggaagagtccctcttttccagcatcatcctgaggacaaggaaggggcaggaatctgctggccagcatcttattaagtttcatctgcacttaggaaaccctccctctacc

SEQ ID NO: 12988 - DNA, 120 bp, synthetic construct
  misc_feature 1..120: note = Artificially Synthesized Probe
  source 1..120: mol_type = other DNA
tcagagacattcctgaagacacagtcttccaggagacaaagagcaggaagtaccttcagaaaccccatcagcaacgttcctgtcacataaagaggacgttacccaaccaagctctgtggc

SEQ ID NO: 12989 - DNA, 120 bp, synthetic construct
  misc_feature 1..120: note = Artificially Synthesized Probe
  source 1..120: mol_type = other DNA
ttcacaccaagcaaactacctgcttacaccattccaggtatggcttgctggaacccagaataagagttttcagtgttttgcttacatatatgtatttactatacaattgaatggcatcac

SEQ ID NO: 12990 - DNA, 120 bp, synthetic construct
  misc_feature 1..120: note = Artificially Synthesized Probe
  source 1..120: mol_type = other DNA
gcccaccacagctcaaggaggcctgcctgcctctgtaggctccacctctgggggcagggcacagacaaacaaaaagacagcagtaacctctgcagacttaagtgtccctgtctgacagct

SEQ ID NO: 12991 - DNA, 120 bp, synthetic construct
  misc_feature 1..120: note = Artificially Synthesized Probe
  source 1..120: mol_type = other DNA
tcagattcaggaaatacagagaacgccacaaagatactcctcgagaagagcaactccaagacacataattgtcagattcaccaaagttgaaatgaaggaaaaaatgttaagggcagccag

SEQ ID NO: 12992 - DNA, 120 bp, synthetic construct
  misc_feature 1..120: note = Artificially Synthesized Probe
  source 1..120: mol_type = other DNA
atacccaggaattgaactcagctctgcaccaagcagacctaatagacatctacagaactctccaccccaaatcaacagaatatacatttttttcagcaccacaccacacctattccaaaa

SEQ ID NO: 12993 - DNA, 120 bp, synthetic construct
  misc_feature 1..120: note = Artificially Synthesized Probe
  source 1..120: mol_type = other DNA
ctgaaactattccaatcaatagaaaaagagggaatcctccctaactcattttatgaggccagcatcattctgataccaaagccgggcagagacacaaccaaaaaagagaattttagacca

SEQ ID NO: 12994 - DNA, 120 bp, synthetic construct
  misc_feature 1..120: note = Artificially Synthesized Probe
  source 1..120: mol_type = other DNA
aatttacagattcaatgccatccccatcaagctaccaatgactttcttcacagaattggaaaaaactactttaaagttcatatggaaccaaaaaagagcccgcatcgccaagtcaatcct

SEQ ID NO: 12995 - DNA, 120 bp, synthetic construct
  misc_feature 1..120: note = Artificially Synthesized Probe
  source 1..120: mol_type = other DNA
ttcaaccattgtggaagtcagtgtggcgattcctcagggatctagaactagaaataccatttgacccagccatcccattactgggtatatacccaaatgagtataaatcatgctgctata

SEQ ID NO: 12996 - DNA, 120 bp, synthetic construct
  misc_feature 1..120: note = Artificially Synthesized Probe
  source 1..120: mol_type = other DNA
gttattgcttaatgggcacggtttcagtttcgcagcatggtgaaagctctccactatctctccccgacagcgagccccagtggtccttctggtgtactgatgtatgaaaagaacagcaag

SEQ ID NO: 12997 - DNA, 120 bp, synthetic construct
  misc_feature 1..120: note = Artificially Synthesized Probe
  source 1..120: mol_type = other DNA
acagaggtatctttacttgaccaacatggccctgggacaagtggaaggctttaggatgaaagctctttactgtgacatttaatctttgaacaacagaagggggtgatcaagagaatatac

SEQ ID NO: 12998 - DNA, 120 bp, synthetic construct
  misc_feature 1..120: note = Artificially Synthesized Probe
  source 1..120: mol_type = other DNA
tctcagactccaaaacctcaaaggctctgaatgcccaaagtttctcacaattcttttggcaactgatgtggagctacttatagtctttcttaccacacttggtttgactgtttcatacat

SEQ ID NO: 12999 - DNA, 120 bp, synthetic construct
  misc_feature 1..120: note = Artificially Synthesized Probe
  source 1..120: mol_type = other DNA
ttacgctgagtctgaaataaaacagcaaaaaaattacgagtcagggcaggcactcattatgaaggaccattaatcttacaaagatccagaagccttcaggccctggagttttctcaggta

SEQ ID NO: 13000 - DNA, 120 bp, synthetic construct
  misc_feature 1..120: note = Artificially Synthesized Probe
  source 1..120: mol_type = other DNA
atggagactccataccagtcctgaactacctacctctagacttttacatgagagaaataagcttgtaactcaccaacatttggggttttcgctctcagctaaaactaatcctaactgatg

SEQ ID NO: 13001 - DNA, 120 bp, synthetic construct
  misc_feature 1..120: note = Artificially Synthesized Probe
  source 1..120: mol_type = other DNA
aggtctgctttctctgcagtaataaaagctcccatattccagaaactttttgagggctatctcggagccttacattaatcttaaaaggaaggttctttatgcattctggcactgctatgt

SEQ ID NO: 13002 - DNA, 120 bp, synthetic construct
  misc_feature 1..120: note = Artificially Synthesized Probe
  source 1..120: mol_type = other DNA
ctttctcctcagggctgccgcgggcaccagatgccgcaggagtttctgtttggctttggacaacagcccgcacaggaagaggttggtgaactggaagtgatccttgttcttgaagaggtc

SEQ ID NO: 13003 - DNA, 120 bp, synthetic construct
  misc_feature 1..120: note = Artificially Synthesized Probe
  source 1..120: mol_type = other DNA
cctcctcggggtcccgctctgggtagcagtagtgcttgaagagcaggtcctgcagacacagcctgtcactttccttgaagcagctgaacatgcggcagcgaaagtggaagaagaatttga

SEQ ID NO: 13004 - DNA, 120 bp, synthetic construct
  misc_feature 1..120: note = Artificially Synthesized Probe
  source 1..120: mol_type = other DNA
cagtccaggtctagaacatctctaccatcttcccagagttttctggagcctatttgtagccaatccctgggccgtaggcaactactgatttgctttgtctatagatttaccttttctgga

SEQ ID NO: 13005 - DNA, 120 bp, synthetic construct
  misc_feature 1..120: note = Artificially Synthesized Probe
  source 1..120: mol_type = other DNA
cttggcatgtggtggatacagcaaaaaatacttattgaactaatcagttaactgatggggtcttccattagtttggaaataaggactggcactcaacggtgacagaatactttgcctaga

SEQ ID NO: 13006 - DNA, 120 bp, synthetic construct
  misc_feature 1..120: note = Artificially Synthesized Probe
  source 1..120: mol_type = other DNA
aatctgtgaaatgacctcctgagcaagaaataaaaccactcagctctaagaaaccaggaggcttccatgagcctaaaaataaaaaggacagacaaatagccatggacttctctacctctt

SEQ ID NO: 13007 - DNA, 120 bp, synthetic construct
  misc_feature 1..120: note = Artificially Synthesized Probe
  source 1..120: mol_type = other DNA
tcttatgcttatgttctttttccctcctaatttaaaggggatctaaaaatgaagtgtctgggaaccaatacacacagcaatgagaactgagatgtcagggtttgctccagacacaaacac

SEQ ID NO: 13008 - DNA, 120 bp, synthetic construct
  misc_feature 1..120: note = Artificially Synthesized Probe
  source 1..120: mol_type = other DNA
ttattactataaagcaaaagtgtgctttgatcctatactgggatagagatggaaaggtgtttattttacataataaggttaacagggcttggaggtttctgcattccccaagcagggaac

SEQ ID NO: 13009 - DNA, 120 bp, synthetic construct
  misc_feature 1..120: note = Artificially Synthesized Probe
  source 1..120: mol_type = other DNA
ttaacattcaggtccagtggttctcaattttttttccaccaagtggcacatgagtctcctgctctttgacatgcttctatgttttctttttttaacctatcaaatgccagaccccacaca

SEQ ID NO: 13010 - DNA, 120 bp, synthetic construct
  misc_feature 1..120: note = Artificially Synthesized Probe
  source 1..120: mol_type = other DNA
gaaaaaaaatatcctttgcaatacatagaaagtaacacaaaaattaattcaccagaaataccacaatgttactgtattccagctagtcctgctgcctggaaaggctccagggttggggcc

SEQ ID NO: 13011 - DNA, 120 bp, synthetic construct
  misc_feature 1..120: note = Artificially Synthesized Probe
  source 1..120: mol_type = other DNA
aagaacttaacaaggtatggatgttggaagggaaagcagagaaactgaactctgccttggtaaacagaatctaagggtagaccaaaaccataccatgggagactggagatcaattcgaag

SEQ ID NO: 13012 - DNA, 120 bp, synthetic construct
  misc_feature 1..120: note = Artificially Synthesized Probe
  source 1..120: mol_type = other DNA
gtggacagtgccactccagggcaatcactaaaagctagggtgttgagacatcagagttcctgcctgctgcccttccatttgaaatactgatgccaggaatgatctttgttgttgttgttg

SEQ ID NO: 13013 - DNA, 120 bp, synthetic construct
  misc_feature 1..120: note = Artificially Synthesized Probe
  source 1..120: mol_type = other DNA
ccactggtggaaatgtaaatctgtggaagtctctggaaagtcctttgacacaatatgtgtcaacagactctgaaaactttctatttagtaacttccccttctagaaacccgccttttgaa

SEQ ID NO: 13014 - DNA, 120 bp, synthetic construct
  misc_feature 1..120: note = Artificially Synthesized Probe
  source 1..120: mol_type = other DNA
acaaaaatgatgagcaacaggaagtgttcataagctgggaaacagaaatgggtactaaccgaactatattatattaatatctcgtgaggtcaccaggacccctcaggaaatgattgacct

SEQ ID NO: 13015 - DNA, 120 bp, synthetic construct
  misc_feature 1..120: note = Artificially Synthesized Probe
  source 1..120: mol_type = other DNA
tttatgtctgttcatgggactttattataagatcactgattataaggaccatcacttgttagcaagttagccagcctttctgtgccgtgattgcctcaaggtaagagttccacctcaaaa

SEQ ID NO: 13016 - DNA, 120 bp, synthetic construct
  misc_feature 1..120: note = Artificially Synthesized Probe
  source 1..120: mol_type = other DNA
cttattttgtgtatctttataataaacccccatgaacatagcctcagtgtgcccctgttctctgcagcctaaaaaacactagcaaacatgatccatttagcaggagcttcatgctgtgca

SEQ ID NO: 13017 - DNA, 120 bp, synthetic construct
  misc_feature 1..120: note = Artificially Synthesized Probe
  source 1..120: mol_type = other DNA
cttttagccatcactgcttaatttatcaatgtgcaatttttttttttttgcttctggcactatgattagcacaagatgggggcagctgcatcagctcaggcccacaaataaccacaatga

SEQ ID NO: 13018 - DNA, 120 bp, synthetic construct
  misc_feature 1..120: note = Artificially Synthesized Probe
  source 1..120: mol_type = other DNA
tttttttttttataagaaggctatacacttgcatgattgaaatattttagggccttttcctcattagggcatctcaggacatcttgaggcaggccagcacaacattctcagcgactgcct

SEQ ID NO: 13019 - DNA, 120 bp, synthetic construct
  misc_feature 1..120: note = Artificially Synthesized Probe
  source 1..120: mol_type = other DNA
attttgatttctcagcagcaaatggatgatgtcaaaggggcctcacattttcctaaccagtatcagctccccaacccaaatggttattattaccaaggaaactagttcagattctttttc

SEQ ID NO: 13020 - DNA, 120 bp, synthetic construct
  misc_feature 1..120: note = Artificially Synthesized Probe
  source 1..120: mol_type = other DNA
tacaattattattggaagctttttaactccattgacactcactgactttaagtatctgaaagcacttaatccctcagaatttgaaagcagatggaagtcagtccctcccggaatcacctc

SEQ ID NO: 13021 - DNA, 120 bp, synthetic construct
  misc_feature 1..120: note = Artificially Synthesized Probe
  source 1..120: mol_type = other DNA
gttttcttctctgtaagtacagataataactgcacctactccatgtagggatctctgtgagcatgcagtgagttaatacacgtacatacggtatttagaacagcactggtcacatagtaa

SEQ ID NO: 13022 - DNA, 120 bp, synthetic construct
  misc_feature 1..120: note = Artificially Synthesized Probe
  source 1..120: mol_type = other DNA
gtcccacacagtggaggcttttcctgtgacctgaaaacacccaataaagaattttgtttttaccaaaccctgggtctctcaagtgcacacaaatgatgaattcagattttcaaaggtgaa

SEQ ID NO: 13023 - DNA, 120 bp, synthetic construct
  misc_feature 1..120: note = Artificially Synthesized Probe
  source 1..120: mol_type = other DNA
ctcctaattctagttctgctctgatctcctgtctcatgacatgctgttgttttcacttaaagcactttccacaagttacaattatgtatttacctgtgtgcttactgccctaacctccta

SEQ ID NO: 13024 - DNA, 120 bp, synthetic construct
  misc_feature 1..120: note = Artificially Synthesized Probe
  source 1..120: mol_type = other DNA
ccccacatctgtctgggtgaaggcatgttttattacacacaggctaacaatctcagtgcatcgagatgacatttatctcaaaactaacattgcaacccactctaataatgttagtcaata

SEQ ID NO: 13025 - DNA, 120 bp, synthetic construct
  misc_feature 1..120: note = Artificially Synthesized Probe
  source 1..120: mol_type = other DNA
tagctcatcaaatactgaaaactgcccagcaaggaaagcattattgtaactagtttacaaaggaggacacagagttggagtggttaagtatgttggtgaaggtcacacagttagttaagg

SEQ ID NO: 13026 - DNA, 120 bp, synthetic construct
  misc_feature 1..120: note = Artificially Synthesized Probe
  source 1..120: mol_type = other DNA
ccaaatgactacattctcccaattctgaccctaacctgtatggtggcaatgacagaacagaaggccaagggacatcaactttctgaaacaaatgtaatcaaggtgaatgttcatgtttta

SEQ ID NO: 13027 - DNA, 120 bp, synthetic construct
  misc_feature 1..120: note = Artificially Synthesized Probe
  source 1..120: mol_type = other DNA
cttgatctttatgcctatattacttactgtttctatttctgatgtctaatctaaacagcactgctgttaggatcaaagtgaccatccatgatgcacagagcacgtaccagggtaaagttc

SEQ ID NO: 13028 - DNA, 120 bp, synthetic construct
  misc_feature 1..120: note = Artificially Synthesized Probe
  source 1..120: mol_type = other DNA
acaatatttgaaagagccctcttctaccactctgctgtttgttttaaacacagcttgcttatctgtctggcatattcggtagaagtctgtactttgtcaatgcctggtttgcctggattt

SEQ ID NO: 13029 - DNA, 120 bp, synthetic construct
  misc_feature 1..120: note = Artificially Synthesized Probe
  source 1..120: mol_type = other DNA
caaacaccaacaaccgaaatgtttcctagaatgcagagctaatgagacatcaacctctgtcatttcctatgtttttcacaatgtgccaaaacaactgcacacattggaggcgtttttgaa

SEQ ID NO: 13030 - DNA, 120 bp, synthetic construct
  misc_feature 1..120: note = Artificially Synthesized Probe
  source 1..120: mol_type = other DNA
gtgctaggctttgtgggattcagaaagaaaagaaaatttgctctctcagcaaattatgacatcatgaggtaacactgccaggccatggatgcagtattggaaaataaaaaatacaacacc

SEQ ID NO: 13031 - DNA, 120 bp, synthetic construct
  misc_feature 1..120: note = Artificially Synthesized Probe
  source 1..120: mol_type = other DNA
ctccaaacccaaaggatccaaattaaagtagtccaagaaaaagaaacaagcaatttggtctgacattgtgcttaaggaaaagggaggatataaaatatccagtggctggatcagtagctg

SEQ ID NO: 13032 - DNA, 120 bp, synthetic construct
  misc_feature 1..120: note = Artificially Synthesized Probe
  source 1..120: mol_type = other DNA
atagaaaacaagtccaactttccaattcctgcacttgaacatataaagtccatgtcttcagtgagaacatactgggtataccagtaacacggaccacacggtgtgaaagaaagattggtg

SEQ ID NO: 13033 - DNA, 120 bp, synthetic construct
  misc_feature 1..120: note = Artificially Synthesized Probe
  source 1..120: mol_type = other DNA
cagtccaagctgcaagaatgtctgggcttcaataagcatccatcttattctccaaatagaagagagtaaacatggacccaaggcttgtattcatcttgcatttccacaaacttgtcttat

SEQ ID NO: 13034 - DNA, 120 bp, synthetic construct
  misc_feature 1..120: note = Artificially Synthesized Probe
  source 1..120: mol_type = other DNA
gtaagatcccaggggatgtaatcattggagaggatgtggtgtcggaaacatacgtgtgaggagattctagggaatcaacaggggataaagttactgaactctcagacagttggaccttct

SEQ ID NO: 13035 - DNA, 120 bp, synthetic construct
  misc_feature 1..120: note = Artificially Synthesized Probe
  source 1..120: mol_type = other DNA
tttcacctctcctcaaaaaaacaattttgccccttagggggaacatctctttagttgggaattcataaaataaagcatgcccctgagccagagactcacttaaaagagtactgagcttat

SEQ ID NO: 13036 - DNA, 120 bp, synthetic construct
  misc_feature 1..120: note = Artificially Synthesized Probe
  source 1..120: mol_type = other DNA
gcctgcagaagacctctaggtgaaaggatcacttgtatgaggcattcatgtcccctacatggcagaatctaccctgttacatactgaagataaaaacctatatattacatgtcagaattt

SEQ ID NO: 13037 - DNA, 120 bp, synthetic construct
  misc_feature 1..120: note = Artificially Synthesized Probe
  source 1..120: mol_type = other DNA
accagctatcactctcatctaatctacgcatttgggaggcatcttggcacaacaaattatcactaataatcagaaagactggtgttgtctgcagttggctctatcactatcttcctatat

SEQ ID NO: 13038 - DNA, 120 bp, synthetic construct
  misc_feature 1..120: note = Artificially Synthesized Probe
  source 1..120: mol_type = other DNA
tcccactacaatctaacccattttatcagcctgtttagtctcaacacactgtacatgaagcaatgtgaaatccttccctttctgagctgataatttctttgtggctacattccttaagca

SEQ ID NO: 13039 - DNA, 120 bp, synthetic construct
  misc_feature 1..120: note = Artificially Synthesized Probe
  source 1..120: mol_type = other DNA
taaaagcagctaccctttactgaatacctagtacatgacaggaaagtagataaggcacatatgccaacacaacaactcacagaggaaagggttattattatccgcattttacaaggaagg

SEQ ID NO: 13040 - DNA, 120 bp, synthetic construct
  misc_feature 1..120: note = Artificially Synthesized Probe
  source 1..120: mol_type = other DNA
tacacagaatagatgcacccacgctctgactgtggtttcagtcactcacaaggcatttagaatcatggtcaatgtgagtaaatgcccagagcttagaatttaaaatcatgattcaacaag

SEQ ID NO: 13041 - DNA, 120 bp, synthetic construct
  misc_feature 1..120: note = Artificially Synthesized Probe
  source 1..120: mol_type = other DNA
ctactcagtggtacttggtgctactctaaacatacatccctgtgtgtttttagtccttattttcctttgtctctgcattggtatctcagctagctggagggttgaaagtttgacaatata

SEQ ID NO: 13042 - DNA, 120 bp, synthetic construct
  misc_feature 1..120: note = Artificially Synthesized Probe
  source 1..120: mol_type = other DNA
ctttgaagtggtctgcacagtatttgtcatacctaggtaaggggaagcagagaacaggcaaaagagctcagattagactggagctctatttgctttttcatttggaactactgtggattt

SEQ ID NO: 13043 - DNA, 120 bp, synthetic construct
  misc_feature 1..120: note = Artificially Synthesized Probe
  source 1..120: mol_type = other DNA
cctaagtaaaccatagagcatcctatacaattaagaccgggagggttcacagacttaatctaattcatgcttcctgataaatctagatggggaaaaacagtcttagggaaaggaatgggg

SEQ ID NO: 13044 - DNA, 120 bp, synthetic construct
  misc_feature 1..120: note = Artificially Synthesized Probe
  source 1..120: mol_type = other DNA
atagggatctcttgttttgggaaggtttcaacctctggcagtgataaaagaatgggtatagcaaatagctaaaattgagcttccctctactttaagagacaacttgcttccaaatggttc

SEQ ID NO: 13045 - DNA, 120 bp, synthetic construct
  misc_feature 1..120: note = Artificially Synthesized Probe
  source 1..120: mol_type = other DNA
tactctgtcttgcctacacagtaagtaccaactcacacaacagggtgggtgagaaaagtgacttaaatcccatcaaaaaaagagaaatcacacttcagctttttgaagtcattttagctt

SEQ ID NO: 13046 - DNA, 120 bp, synthetic construct
  misc_feature 1..120: note = Artificially Synthesized Probe
  source 1..120: mol_type = other DNA
atctttaaagttggaaggaaagatggctggagatgggctcaggatgtagcagagttcagcttgatgaattgtttgtaaacagactattaaagcctattttctgactcctaaggaatctga

SEQ ID NO: 13047 - DNA, 120 bp, synthetic construct
  misc_feature 1..120: note = Artificially Synthesized Probe
  source 1..120: mol_type = other DNA
ctttaaaaaattaagctgctgttgtttttcttatataagaaaagcttcacttgggtctgggacaactcacagggcccaatttgttcactaaaaccatcctccaaggcagagtggccagga

SEQ ID NO: 13048 - DNA, 120 bp, synthetic construct
  misc_feature 1..120: note = Artificially Synthesized Probe
  source 1..120: mol_type = other DNA
gaacataacaataaatacagttatgcaaccgcataatgacattttagtcaatgcaggcagcacatacgacagtggtcccataatgaagctgaagctgacaaattcctgttgcctagtaac

SEQ ID NO: 13049 - DNA, 120 bp, synthetic construct
  misc_feature 1..120: note = Artificially Synthesized Probe
  source 1..120: mol_type = other DNA
aaagtaaggcccaattttcaaaagcaattaccaaattaccaaagataaaatacctaggaacaatcttcacaagaaatgtgttacacctaaatgaagacaactttaatactgtcctaacag

SEQ ID NO: 13050 - DNA, 120 bp, synthetic construct
  misc_feature 1..120: note = Artificially Synthesized Probe
  source 1..120: mol_type = other DNA
tgcctgcaagataactgaaatatctatcatgatggcactggttaaaatatggtatgcctgtaaaagggaattctgtagctataaaaaatattgaggaagttcaggctgggtgtggtggct

SEQ ID NO: 13051 - DNA, 120 bp, synthetic construct
  misc_feature 1..120: note = Artificially Synthesized Probe
  source 1..120: mol_type = other DNA
ggattgctagtaaaatgagcataaatgcatatttccccatcagaatggaaccaccagaaataaacagatctatcaactgagagagaactcaacctcagcctgaagcaaagtagtaggaag

SEQ ID NO: 13052 - DNA, 120 bp, synthetic construct
  misc_feature 1..120: note = Artificially Synthesized Probe
  source 1..120: mol_type = other DNA
gtggaggccttggaggccaggtgtttcaaaccacatatctaaaacacagagaaaggtagcccaacacatattcgactttatttgagtgacaaaatcagtgttatattaagctctgagatt

SEQ ID NO: 13053 - DNA, 120 bp, synthetic construct
  misc_feature 1..120: note = Artificially Synthesized Probe
  source 1..120: mol_type = other DNA
ctgcatcctaaggtagaaccttacaccatcagtatcctcccctgaagctatgaaaataggcagatattttcatttcattcattcccccaccttatagaggtaagacttggctaattaaaa

SEQ ID NO: 13054 - DNA, 120 bp, synthetic construct
  misc_feature 1..120: note = Artificially Synthesized Probe
  source 1..120: mol_type = other DNA
ttaaagggaaggcaaggactgaatacaatgaaggatgtttcagatttgacttgtgtgcaaaccttttgttcctcctgggtacaggtttcctcatctttaaaatacacattcctccgtatg

SEQ ID NO: 13055 - DNA, 120 bp, synthetic construct
  misc_feature 1..120: note = Artificially Synthesized Probe
  source 1..120: mol_type = other DNA
ttttttttttgagagaaaattgctagttgactgattaatgactaaatacaaaggtgacaggggccaaagggacactccacaaagcagtttttcctatctcagctgctattcagggaagtg

SEQ ID NO: 13056 - DNA, 120 bp, synthetic construct
  misc_feature 1..120: note = Artificially Synthesized Probe
  source 1..120: mol_type = other DNA
tctgcttttttctgaacgcaagtacctttgtttttacatggagaccgactgcagagattcaccagggtctgaaacagaggcaggggtgtacatacatcaaaattcaaatactagaaatga

SEQ ID NO: 13057 - DNA, 120 bp, synthetic construct
  misc_feature 1..120: note = Artificially Synthesized Probe
  source 1..120: mol_type = other DNA
agatagcagctctggccaaaaacagatttttcccccactcaatgttgtaacaaaatgacaccgaaggaaacaaagttacttgagggcctgctgtagtctaattcctcttaggtcttctat

SEQ ID NO: 13058 - DNA, 120 bp, synthetic construct
  misc_feature 1..120: note = Artificially Synthesized Probe
  source 1..120: mol_type = other DNA
acaagctgcttaattttgtggaggtgggtgctcacatgtctaatatagcctaagccttacttaagtgcgccctgtaagtcaagttaagtttggccatttattcctatgttctttggagtt

SEQ ID NO: 13059 - DNA, 120 bp, synthetic construct
  misc_feature 1..120: note = Artificially Synthesized Probe
  source 1..120: mol_type = other DNA
cccatatcccttaaactttcttacaagctagattgggtgccagaagctctgaggtgcccacttcctttctataatcaaaggcttagaagtatttaaaagactgagcttactatagatacc

SEQ ID NO: 13060 - DNA, 120 bp, synthetic construct
  misc_feature 1..120: note = Artificially Synthesized Probe
  source 1..120: mol_type = other DNA
gaacctccattctggcaaggatctaagccattacaaaagaattagacctctgaagagtagcatcagtttaatcttagattcataaaagtgaatgacctgaactaagtcatgctgggggca

SEQ ID NO: 13061 - DNA, 120 bp, synthetic construct
  misc_feature 1..120: note = Artificially Synthesized Probe
  source 1..120: mol_type = other DNA
gccaggctggtcttgaactgtgtctatatgtctttcttccctaacagactatgagcttcatgaaaatagaaactaaaacttatttatcttatcactgccggcacctagcatggtggcctc

SEQ ID NO: 13062 - DNA, 120 bp, synthetic construct
  misc_feature 1..120: note = Artificially Synthesized Probe
  source 1..120: mol_type = other DNA
aaatatttaccaaataatggttaaaatattttccagacttggacccataaccaaaaatatcagtaaactccaaacagaagaaacataaagaacactacaccaggctaggcatggtggctc

SEQ ID NO: 13063 - DNA, 120 bp, synthetic construct
  misc_feature 1..120: note = Artificially Synthesized Probe
  source 1..120: mol_type = other DNA
aatagaagagaggccaggaggaatgtaaatgtgagtgtacagctcttctcctctatatgaagtggtacgattgaaggtacattataataagttaaagctgcacaccagtaaaccctacaa

SEQ ID NO: 13064 - DNA, 120 bp, synthetic construct
  misc_feature 1..120: note = Artificially Synthesized Probe
  source 1..120: mol_type = other DNA
agctagagtagctatatcagtatcaggcaaagtagacttcagagagagaaatatgacaagagtttaaaaaggccatttcaaaatgataaatgggtcaattcctcaaaaggacataagaac

SEQ ID NO: 13065 - DNA, 120 bp, synthetic construct
  misc_feature 1..120: note = Artificially Synthesized Probe
  source 1..120: mol_type = other DNA
ctctcaatttgataaagggcctttatgaaaacctataggtaacatctcacttaatggtaaaagactacatacttttcccctaggatcaaaaacaaggtaaggcttctctcaccacttcta

SEQ ID NO: 13066 - DNA, 120 bp, synthetic construct
  misc_feature 1..120: note = Artificially Synthesized Probe
  source 1..120: mol_type = other DNA
ctatagtgacagaaggtaaaactgtgactccacaggcaagaaagagagaaggttaaattgcaatgggatgaagatagttttagggtgacaaatatgtttattattttgggtgatagtttc

SEQ ID NO: 13067 - DNA, 120 bp, synthetic construct
  misc_feature 1..120: note = Artificially Synthesized Probe
  source 1..120: mol_type = other DNA
ctttgcaaacagcagcattctcacaagggtttggggaacagggagccaatactgtctgacaattcttgcctagaaagtaaatgacagagtttatgacagataaacaggtaagaaaacgaa

SEQ ID NO: 13068 - DNA, 120 bp, synthetic construct
  misc_feature 1..120: note = Artificially Synthesized Probe
  source 1..120: mol_type = other DNA
acaatgtgctatcaagtctttcaggtaacacagtcatgctatggctattctgctactctacacaacttagagtcactattaacagctgctattaacagctcaagactccagggaagtaat

SEQ ID NO: 13069 - DNA, 120 bp, synthetic construct
  misc_feature 1..120: note = Artificially Synthesized Probe
  source 1..120: mol_type = other DNA
tcaaagcaggttccttggttcaggcatggatttgaggcacattcatcaatattcacctggcagttatagcctgtagacaaaaggaaaaaaccaaaaacagtaaaactttctgacagcctc

SEQ ID NO: 13070 - DNA, 120 bp, synthetic construct
  misc_feature 1..120: note = Artificially Synthesized Probe
  source 1..120: mol_type = other DNA
agtagagaaactatggcactgtggaaaagaaaacatggtctaggaatgcagaggtatgggttcaaggagtattctgctgcccactgggcatataatttgggattttaccttttgaatttt

SEQ ID NO: 13071 - DNA, 120 bp, synthetic construct
  misc_feature 1..120: note = Artificially Synthesized Probe
  source 1..120: mol_type = other DNA
tactggtctgtagcctgagggttgaggacctccggtgtagaccaaagatgactaaataactaagaatatctcaatgtgttaaaaagtttgttgaaagagttctgaacatgtggattcttc

SEQ ID NO: 13072 - DNA, 120 bp, synthetic construct
  misc_feature 1..120: note = Artificially Synthesized Probe
  source 1..120: mol_type = other DNA
cttgcatcaccttgcacatggtgtgtaccatgtggccctatcaggtgtatccagtaaagaaaccttcttggtgctttcctggctcactaagttagtgaaattataatgaaatttcttatg

SEQ ID NO: 13073 - DNA, 120 bp, synthetic construct
  misc_feature 1..120: note = Artificially Synthesized Probe
  source 1..120: mol_type = other DNA
taatacatactaaaaacataactgccaaagattcatacaatgagtatgggttcctcccatgaggtccttgctaatgacccatataagggagacattcctccttatgttccatctaggtcc

SEQ ID NO: 13074 - DNA, 120 bp, synthetic construct
  misc_feature 1..120: note = Artificially Synthesized Probe
  source 1..120: mol_type = other DNA
gggaaacttcacaaggttctaagaagagaatgtcaaatgttaccaaagaaggcttctcttcttaatgctgccctgagtacaactcaaagaagcattcattaacatgctttgtgccggttt

SEQ ID NO: 13075 - DNA, 120 bp, synthetic construct
  misc_feature 1..120: note = Artificially Synthesized Probe
  source 1..120: mol_type = other DNA
ttattctttgcagaataaattttcaagccatctttatctgaaagcattaaatgcagtccactatgttgattgacagctgttccatcaggaaggtcctaccctcaaggagtttccactgag

SEQ ID NO: 13076 - DNA, 120 bp, synthetic construct
  misc_feature 1..120: note = Artificially Synthesized Probe
  source 1..120: mol_type = other DNA
ggctgctgtgcactggtaacattacttaacatctctgtgttctgggtttcttattctgtaggtattctcaacgtcggtgacaattgacaatttagtgcctagctcaaaattagttcttca

SEQ ID NO: 13077 - DNA, 120 bp, synthetic construct
  misc_feature 1..120: note = Artificially Synthesized Probe
  source 1..120: mol_type = other DNA
gtgcgtgtgcatgtacacgcacatgtgtgtatgtgtaaatgcctaggctgttcatactttaagagaagttatattcaaaattcttctagccatttactttcttcctcctgggcagaaaga

SEQ ID NO: 13078 - DNA, 120 bp, synthetic construct
  misc_feature 1..120: note = Artificially Synthesized Probe
  source 1..120: mol_type = other DNA
aaaggattttattaatcatacttagccatgatctttccttttcactgtgctaacattcaaactgatggtgcagaggcaatggggtgaaaccgatcacatcagcatgaatcaaggcagtag

SEQ ID NO: 13079 - DNA, 120 bp, synthetic construct
  misc_feature 1..120: note = Artificially Synthesized Probe
  source 1..120: mol_type = other DNA
ataattacagaggaacagtttattgagttctatgagcaaagtacgctgctttgcctgtcatgtaagttttctctaaccctgtcacccaccctgcacattagtctgtgttacacccatttt

SEQ ID NO: 13080 - DNA, 120 bp, synthetic construct
  misc_feature 1..120: note = Artificially Synthesized Probe
  source 1..120: mol_type = other DNA
gaaggtaactctgggtagtatatctcactttaagtacccagtgagtgactaccacaattttagctgacaaactgtaaaatatttcttccatccactcccctatccaaacaccaaactacc

SEQ ID NO: 13081 - DNA, 120 bp, synthetic construct
  misc_feature 1..120: note = Artificially Synthesized Probe
  source 1..120: mol_type = other DNA
cattttcctttgatctggaacatagtacatctctgtccactaaccatagttgtgaccataatcattcatctaataagtaaaacagaaccatccaaacctgtgagatgctgctgcctgaga

SEQ ID NO: 13082 - DNA, 120 bp, synthetic construct
  misc_feature 1..120: note = Artificially Synthesized Probe
  source 1..120: mol_type = other DNA
gtcaatgttctcctcacacaacacaccagtgaaacctttggaaagaattttatcaaggattctcaaagaccaaggcagatattccacaccagaacacaagtgtagctacatccatttact

SEQ ID NO: 13083 - DNA, 120 bp, synthetic construct
  misc_feature 1..120: note = Artificially Synthesized Probe
  source 1..120: mol_type = other DNA
acatctggcttactgaaatccaatcccaagtacaaaatgtgattacaaacccagaaatgcagaatatttgtgcacagatcgtttttgactctagttgcagaagtcagcaaagaggaccca

SEQ ID NO: 13084 - DNA, 120 bp, synthetic construct
  misc_feature 1..120: note = Artificially Synthesized Probe
  source 1..120: mol_type = other DNA
gtctctaccattgcttcttcacagacagacttcacttctaaatgaaggatgtaggaagtgaaatttataggtggaacctcaaacaagtaactgtagcttcagaggcaacagaaaccttct

SEQ ID NO: 13085 - DNA, 120 bp, synthetic construct
  misc_feature 1..120: note = Artificially Synthesized Probe
  source 1..120: mol_type = other DNA
ttacattaaaagacattggcaagacctagcatataaacaaggactgctccacattttctgtgataaatccatactttctggactgtggaaggcccaaaatgtccccactctatgttccta

SEQ ID NO: 13086 - DNA, 120 bp, synthetic construct
  misc_feature 1..120: note = Artificially Synthesized Probe
  source 1..120: mol_type = other DNA
tgaaagacacaagtaccaattactgggatcaaagcagttgagtttccacaaatgtgaacaatagaagagcatctgatggttatagcatcagggccaggccttcaataatatcattcccaa

SEQ ID NO: 13087 - DNA, 120 bp, synthetic construct
  misc_feature 1..120: note = Artificially Synthesized Probe
  source 1..120: mol_type = other DNA
cctctactagagtaatcttttaatagcatcaacattcctgattcaggtggccccaggtctctgaagatattactaggcttcctgttttatatagttcacatgggaactggattttccagt

SEQ ID NO: 13088 - DNA, 120 bp, synthetic construct
  misc_feature 1..120: note = Artificially Synthesized Probe
  source 1..120: mol_type = other DNA
atcttcatgtgacctgtctgaaattaaggcaagcagagctccagaaggctgggtcttcacatgaattttaaggccaatttgagccatctaaatgatattttttccaggcaaatcgtttca

SEQ ID NO: 13089 - DNA, 120 bp, synthetic construct
  misc_feature 1..120: note = Artificially Synthesized Probe
  source 1..120: mol_type = other DNA
ccactatagcaacaatggagactaaggcaaaggctcctacatcccttaacaaagaacaagataatgtcttcaacttacaaccaggaatctgtgattaacaaaaacagtatagggccagat

SEQ ID NO: 13090 - DNA, 120 bp, synthetic construct
  misc_feature 1..120: note = Artificially Synthesized Probe
  source 1..120: mol_type = other DNA
aaaatagaaaagatgtgcacaaagagaaaaaaacatggtggcattcaagttgttggttccaattgctactgaagcccaactactagtaagcctactcagtggcatagccattctgagaga

SEQ ID NO: 13091 - DNA, 120 bp, synthetic construct
  misc_feature 1..120: note = Artificially Synthesized Probe
  source 1..120: mol_type = other DNA
tgggctcccataaaaattgtctcatttatatctgaggaaacagcctcaaagaggtaaaataatttgcctttgtaagccagtgagtgaaggacagttgagatttgaactggagctgcctca

SEQ ID NO: 13092 - DNA, 120 bp, synthetic construct
  misc_feature 1..120: note = Artificially Synthesized Probe
  source 1..120: mol_type = other DNA
taaggaacactcgtattagaaaggaataaaggcagaaggtcactagatatttgagtgggaaaagttcttggcgatcacctagaggtcttaacgtgtatgctctacggtcattgagcttat

SEQ ID NO: 13093 - DNA, 120 bp, synthetic construct
  misc_feature 1..120: note = Artificially Synthesized Probe
  source 1..120: mol_type = other DNA
gtttatactaaccacaataacttttgttgattcctcaaacattaagttctctcctgcctcagtgctgctgcataagctgctctgtccacctgaaacattttttccctgcttattcacatg

SEQ ID NO: 13094 - DNA, 120 bp, synthetic construct
  misc_feature 1..120: note = Artificially Synthesized Probe
  source 1..120: mol_type = other DNA
ctttccagtcatctctcaactgtgaagtctgtgggaaaaagtctgatcacattactggtccagttaagggtcaactctcattgcaacaacaatctccacaagaggaacaaataaaaaatg

SEQ ID NO: 13095 - DNA, 120 bp, synthetic construct
  misc_feature 1..120: note = Artificially Synthesized Probe
  source 1..120: mol_type = other DNA
attctaacacctaccagtgttttctgcctatctctttaggctctaaccatgaaatatcactagctccagccactctgggcttttttcatttctcaaaatgatcacattctttccctcctc

SEQ ID NO: 13096 - DNA, 120 bp, synthetic construct
  misc_feature 1..120: note = Artificially Synthesized Probe
  source 1..120: mol_type = other DNA
gaaactaggggagaaagagcgggttttctttttattccccaacgtcactactaacctcagcagtaaaaacatatgcactgagttatttctaggttccagatgatatgtgctttacattga

SEQ ID NO: 13097 - DNA, 120 bp, synthetic construct
  misc_feature 1..120: note = Artificially Synthesized Probe
  source 1..120: mol_type = other DNA
cccacctcccctgtctatgggcaggcagttactctgctcagaatgagtaaaatggaaaaaaacaacatggcacctattaaaagattctacaacataaaacatggagaatgtaatgcttaa

SEQ ID NO: 13098 - DNA, 120 bp, synthetic construct
  misc_feature 1..120: note = Artificially Synthesized Probe
  source 1..120: mol_type = other DNA
aaagacatagtataatataaattatcacaccatggtctgtcgttctcgtggaccaatttcctcttcctagaatgacaagcatgtggcttatgttctcgctctttcctctcctgtctcgca

SEQ ID NO: 13099 - DNA, 120 bp, synthetic construct
  misc_feature 1..120: note = Artificially Synthesized Probe
  source 1..120: mol_type = other DNA
tcctggttgtcagttattaataaccatggtttgttaaaatcagttctgggaatgtcaaaataagtaagagcagtttcctgccttccagaggctgatagtctcttaggcaagctgaacaaa

SEQ ID NO: 13100 - DNA, 120 bp, synthetic construct
  misc_feature 1..120: note = Artificially Synthesized Probe
  source 1..120: mol_type = other DNA
gtctgcccaactgataggaaaccgaatttggggtgaggaggtagaattcagaaaacaggcttattatacttctcacaatcaggcttacagcagaaaaattgaaatgtgagacatattttc

SEQ ID NO: 13101 - DNA, 120 bp, synthetic construct
  misc_feature 1..120: note = Artificially Synthesized Probe
  source 1..120: mol_type = other DNA
aaggaatatccagtattcaggcttatccctataagacacttccctataaagaagtaaatcatctccccacacccactccctaagaccaatttcttttttccatctgagcttaagctagtc

SEQ ID NO: 13102 - DNA, 120 bp, synthetic construct
  misc_feature 1..120: note = Artificially Synthesized Probe
  source 1..120: mol_type = other DNA
ctggcaacttcatttccttcattttctcacctcactactccaacccctcctttttcattttgtcaaaagccagaccaaatagttaatgcttcaagtctacaggtggaaattgtaaaagga

SEQ ID NO: 13103 - DNA, 120 bp, synthetic construct
  misc_feature 1..120: note = Artificially Synthesized Probe
  source 1..120: mol_type = other DNA
acaaaattttccttctgtttttctctttacaataggataggggctgggatggtaaatagctcagctacatgctactgagaacaaaggtctgtaaggagtgctagtaactgctgtcatcaa

SEQ ID NO: 13104 - DNA, 120 bp, synthetic construct
  misc_feature 1..120: note = Artificially Synthesized Probe
  source 1..120: mol_type = other DNA
atcagaagcctcagtactacacagttactgtctcacagagcaagggagagatcagaatgtggtcaagttcttaacaagtatctcatcctgtccaatactgtaaggatcattaaaaagaga

SEQ ID NO: 13105 - DNA, 120 bp, synthetic construct
  misc_feature 1..120: note = Artificially Synthesized Probe
  source 1..120: mol_type = other DNA
tcatatctgccacagcatctagcatggtgctgggttcagagttgctgcccaataatacctgtgaaaatatgtctttgagtgaacataggaaaatgtatgaggttagtacaataagcaatg

SEQ ID NO: 13106 - DNA, 120 bp, synthetic construct
  misc_feature 1..120: note = Artificially Synthesized Probe
  source 1..120: mol_type = other DNA
cacctgcaagctattcgtacatggtaagctaaagttctgcatcaacttcctcacctgtaaaaaatgaggctaattccacttgcctatcctgtctttctaattataagtgccacatcatga

SEQ ID NO: 13107 - DNA, 120 bp, synthetic construct
  misc_feature 1..120: note = Artificially Synthesized Probe
  source 1..120: mol_type = other DNA
cttgatgaagatattctttggaaaatttaaagacatagttttagattgttggggaaaatggggcccctggcctacaactgctaaacttgagaggtctggtggtgtagtagaaggtcaatg

SEQ ID NO: 13108 - DNA, 120 bp, synthetic construct
  misc_feature 1..120: note = Artificially Synthesized Probe
  source 1..120: mol_type = other DNA
atggatcggagacctaaaggtaggtggtaaaattataaatcacttagaaatagtaaatctttgtaatgtgggataagcaaagttttcacaaatatgactgaaagcacaagcaacaaaaga

SEQ ID NO: 13109 - DNA, 120 bp, synthetic construct
  misc_feature 1..120: note = Artificially Synthesized Probe
  source 1..120: mol_type = other DNA
tctaatccttttatgttacagatgaggaagttgagagccacatggctgacttgaccaagattaaacggctagtaagtaggaataagtactgaaacagaaactttacccaattgcagtcca

SEQ ID NO: 13110 - DNA, 120 bp, synthetic construct
  misc_feature 1..120: note = Artificially Synthesized Probe
  source 1..120: mol_type = other DNA
tggacaaaagtaaaaagatagaaggatactttttttcccccagaagaagtctgtcacaaaagcaaacctgcaaatatacgatcagtataacacccaagaaaatgacacatgcggccaggc

SEQ ID NO: 13111 - DNA, 120 bp, synthetic construct
  misc_feature 1..120: note = Artificially Synthesized Probe
  source 1..120: mol_type = other DNA
tcagagagctctttatgaagtttaaacaaaatcagagaaataaagagatgtgggaaagaaagaaaaaaaagaaagtacattgaggacagtccaatctaactgtgaactcataagggacag

SEQ ID NO: 13112 - DNA, 120 bp, synthetic construct
  misc_feature 1..120: note = Artificially Synthesized Probe
  source 1..120: mol_type = other DNA
caaggacaaaaggagaggccaaactaagtctaggacgcacaatacaaagaagaaaatgagaagaccaaagttacagtctcaatactatgacatgatactaaaccatacagtcagtcagcc

SEQ ID NO: 13113 - DNA, 120 bp, synthetic construct
  misc_feature 1..120: note = Artificially Synthesized Probe
  source 1..120: mol_type = other DNA
catatatttttaacccaaacagcttaaagcatttaacgaaaagttttacacacctacaaagtgctttcaggaagcagatgtgcagtgcaatgtggcgcagtaagatgcacaaagcaaagg

SEQ ID NO: 13114 - DNA, 120 bp, synthetic construct
  misc_feature 1..120: note = Artificially Synthesized Probe
  source 1..120: mol_type = other DNA
taatggataacaatgcagaggctatgggagtgaataatcactctctctcagctaaaaacttcctttattgacttctctaacttcccgtcaacatcttgctgccaaatcaacctcttgttc

SEQ ID NO: 13115 - DNA, 120 bp, synthetic construct
  misc_feature 1..120: note = Artificially Synthesized Probe
  source 1..120: mol_type = other DNA
aagcactttattaaccacacatacatattttccagtgtctaattctcatcgtgttcttttccattccagacttgcctgtccctttcccagagctctgttcctcttatttctcactgtttc

SEQ ID NO: 13116 - DNA, 120 bp, synthetic construct
  misc_feature 1..120: note = Artificially Synthesized Probe
  source 1..120: mol_type = other DNA
ggcaattgtaggttagtcacattgaagcccaatcctgcaggacgctatcagcaataggagtctggatccatctactctctcagagctcactgtctttgcatatgctgctcctgtttgaat

SEQ ID NO: 13117 - DNA, 120 bp, synthetic construct
  misc_feature 1..120: note = Artificially Synthesized Probe
  source 1..120: mol_type = other DNA
gcaggggaagcaaagcagattctttgaggcagaaagagaaagagaaaaaaatatcctcacagaactagtaaatttggtattcacatggctggctttttgttgtcattagtctaagtcact

SEQ ID NO: 13118 - DNA, 120 bp, synthetic construct
  misc_feature 1..120: note = Artificially Synthesized Probe
  source 1..120: mol_type = other DNA
ttcttcttgtctttccactcatgtcactaagaggcacttatttacagtggagaagagatataaatgctcacttctagcaagtgtgattttcagagtgatgcccacaactgaaacagaaag

SEQ ID NO: 13119 - DNA, 120 bp, synthetic construct
  misc_feature 1..120: note = Artificially Synthesized Probe
  source 1..120: mol_type = other DNA
aaaaaaaaaaaaaaaggtgatcagaatcttgcagaacacaccaagaagagatccttcttaacaacaaaggaagaagttttaatttgggaccatttcagagtgacattttaattatgaaga

SEQ ID NO: 13120 - DNA, 120 bp, synthetic construct
  misc_feature 1..120: note = Artificially Synthesized Probe
  source 1..120: mol_type = other DNA
cagagttcaccacctttcaggtcctaacatttgtgctcatgccccaacttcccagtgcagaaaacaagatgggccggtggaaagctgacctggctactgccactacagagtgcccaattt

SEQ ID NO: 13121 - DNA, 120 bp, synthetic construct
  misc_feature 1..120: note = Artificially Synthesized Probe
  source 1..120: mol_type = other DNA
aaacataacctgctgaggtgtttgctgaaggcaaaaggaatacaaaatgggtagaagaaggtagtcatcaataccagctactaccatgtgaccagctgcagaaatgaggactgtaattgt

SEQ ID NO: 13122 - DNA, 120 bp, synthetic construct
  misc_feature 1..120: note = Artificially Synthesized Probe
  source 1..120: mol_type = other DNA
accatttgcctaaaggaatcatgaaagggtcactaagacacagttttaaataacattggacaatcaccagttgtagaaaagggcattccaggcaaaagggtgtgtaactgtatggaagca

SEQ ID NO: 13123 - DNA, 120 bp, synthetic construct
  misc_feature 1..120: note = Artificially Synthesized Probe
  source 1..120: mol_type = other DNA
tctaaaagcaaatagtcaataacttcagcaacttttcctctggtgacagtgtacttatttcttttagtgaagtaaactctgattccccatcctggtgtacatattttttttttgagacag

SEQ ID NO: 13124 - DNA, 120 bp, synthetic construct
  misc_feature 1..120: note = Artificially Synthesized Probe
  source 1..120: mol_type = other DNA
tcaacatgacccttattcaaacgcaaaatgcaccccagctttttttcatgtgtgtacaggttgggatggtgtaacagcaccttttttagagcactgttcgtacttgtctgcttaaattca

SEQ ID NO: 13125 - DNA, 120 bp, synthetic construct
  misc_feature 1..120: note = Artificially Synthesized Probe
  source 1..120: mol_type = other DNA
gttttagttttcagggactagaaaactgaatctagtaggctgttccaccattacctcaaagattacacatttaaaccaaactctaaatccccctctcaaaaaccagctcttctgtgccca

SEQ ID NO: 13126 - DNA, 120 bp, synthetic construct
  misc_feature 1..120: note = Artificially Synthesized Probe
  source 1..120: mol_type = other DNA
attccatctcaaaaaaaaaagttttgccaagtgaaaacatcttttctgtcttctttgtgcttattgaggaaaatacaatgccccatccaaatcacagcttgatttgagaatagtttcttg

SEQ ID NO: 13127 - DNA, 120 bp, synthetic construct
  misc_feature 1..120: note = Artificially Synthesized Probe
  source 1..120: mol_type = other DNA
cacattgttgctccctatcaagtatggaaaaataagttttaacctaagatatatttaagaaatcagtaaaaccagagattgacaaagtacagtttgcaagtctaatttggaccactgcct

SEQ ID NO: 13128 - DNA, 120 bp, synthetic construct
  misc_feature 1..120: note = Artificially Synthesized Probe
  source 1..120: mol_type = other DNA
gaggtcccatttccctttccaaattattgtttcacagctaaccttctatgactgtagcctaatttcagatatttctctttcttttccatctacttcttacttatccctccgcaacaaaac

SEQ ID NO: 13129 - DNA, 120 bp, synthetic construct
  misc_feature 1..120: note = Artificially Synthesized Probe
  source 1..120: mol_type = other DNA
tgaaattactggctgactacttcaacaaaagaacagtcttcaatgtgggtggatcccactgtgagaaagctctttctttcttaattcttcaaattctgcctcccttcctaggtatatacc

SEQ ID NO: 13130 - DNA, 120 bp, synthetic construct
  misc_feature 1..120: note = Artificially Synthesized Probe
  source 1..120: mol_type = other DNA
tggcgtattcctcagtatagggttatttccaggtttcttcacctttttagtggtgcttctatgcttaatagtagtcataataatcagaatgaccaaaattttctgcctcccttcccaggt

SEQ ID NO: 13131 - DNA, 120 bp, synthetic construct
  misc_feature 1..120: note = Artificially Synthesized Probe
  source 1..120: mol_type = other DNA
caacttttacattatactcatacaatcacagaatttcagcagtgatctcagaaaccaaatggtctgaacccctatagcactgaaaaggacaccaaagctaactgatttgcccaaagttgg

SEQ ID NO: 13132 - DNA, 120 bp, synthetic construct
  misc_feature 1..120: note = Artificially Synthesized Probe
  source 1..120: mol_type = other DNA
ccaaagcaggctaaatttcatgtgatggataaagtcagtctctcaatccaaatgttccacaaaatccatctctactctgtgatctgtctggtagaataacaggccaaatcaacctaatag

SEQ ID NO: 13133 - DNA, 120 bp, synthetic construct
  misc_feature 1..120: note = Artificially Synthesized Probe
  source 1..120: mol_type = other DNA
aaaaaaaaaaagtgtcatttctgacattgagaggtccacatttccattgttactgttcaaacatacgcatggggttggatgtagaaaagcaaaggaaggaagaaaacagagaaaaacaag

SEQ ID NO: 13134 - DNA, 120 bp, synthetic construct
  misc_feature 1..120: note = Artificially Synthesized Probe
  source 1..120: mol_type = other DNA
tagataaaaataattgctaacagccaaggctagctggaaccagtgaaagttcctatgtaacattcaattcccaaggctccgactacaaacttgtaggtaccccagagcctatagaatcaa

SEQ ID NO: 13135 - DNA, 120 bp, synthetic construct
  misc_feature 1..120: note = Artificially Synthesized Probe
  source 1..120: mol_type = other DNA
cacgaggaattgtgaggctgggaattatctctgaaaccccacctcacttagtttacatgtgttaggtttttcaccccctcatctgaataaagcattaaatacacactgattttaagaaac

SEQ ID NO: 13136 - DNA, 120 bp, synthetic construct
  misc_feature 1..120: note = Artificially Synthesized Probe
  source 1..120: mol_type = other DNA
aaattattaattctcatactcccagtgcctaacacaatgactggcatatagaaggcattcaactattcagtgcagaagcacaaggtcaaaatgaagggctctgtggaatctttacccctt

SEQ ID NO: 13137 - DNA, 120 bp, synthetic construct
  misc_feature 1..120: note = Artificially Synthesized Probe
  source 1..120: mol_type = other DNA
ctccaagcaggggatcctagggtaagaactgtactgtgtctcttttttaatatccctcacagtgcccatcaccctctaggtgcacagataattcaatatacacttatgtaaatgaattgt

SEQ ID NO: 13138 - DNA, 120 bp, synthetic construct
  misc_feature 1..120: note = Artificially Synthesized Probe
  source 1..120: mol_type = other DNA
agttaaacgactaaggcactaccatcgtctaggcaagagaatcttaaccaccatcaaatgttttccacacagaataggcagacctagtttattctggaaaattgagggtttggatatgta

SEQ ID NO: 13139 - DNA, 120 bp, synthetic construct
  misc_feature 1..120: note = Artificially Synthesized Probe
  source 1..120: mol_type = other DNA
agttattatctgtgcccctacactgggatattacaaactgttttattttacacatctctgtatgcttcatctccccagcaagacttcagaagactgccaccatgtcttatgcaggagaaa

SEQ ID NO: 13140 - DNA, 120 bp, synthetic construct
  misc_feature 1..120: note = Artificially Synthesized Probe
  source 1..120: mol_type = other DNA
ggaggacggagagacactaaacttcattcctaactactgtatgttgagaggaggcctaatgaaaacctctatcacacccacatatttatgctagcttaacaaattttaaagtgcttggaa

SEQ ID NO: 13141 - DNA, 120 bp, synthetic construct
  misc_feature 1..120: note = Artificially Synthesized Probe
  source 1..120: mol_type = other DNA
tggacttgctcctgttccattagtaaaaagaaaggagaagtttcaaattagttctctctactgaagcacactttaatagacaatatcctctatccccaccttcactgccctcttcttcta

SEQ ID NO: 13142 - DNA, 120 bp, synthetic construct
  misc_feature 1..120: note = Artificially Synthesized Probe
  source 1..120: mol_type = other DNA
aaaaaactatgtcctcttcatgtcaccagtcaaggatcttccaggacccttactccactcaccagtgcaggctgaaccatactagatcataaggcaaaagaaaaaatcagtagtacttat

SEQ ID NO: 13143 - DNA, 120 bp, synthetic construct
  misc_feature 1..120: note = Artificially Synthesized Probe
  source 1..120: mol_type = other DNA
tatgagtgtctctactctctacttactatacagacatttaccaagaagacaaagaaggcaatggctctagtttttcttggatggattcaggaaatctggaccaccaacatgactgcctaa

SEQ ID NO: 13144 - DNA, 120 bp, synthetic construct
  misc_feature 1..120: note = Artificially Synthesized Probe
  source 1..120: mol_type = other DNA
taggcccaccctaacgtgtcctaaaacctagcatccataggatcaagatgatctgccaatcttgacaaaattcaacattctttagtgggagataaactttaaaatctatcacccacaatg

SEQ ID NO: 13145 - DNA, 120 bp, synthetic construct
  misc_feature 1..120: note = Artificially Synthesized Probe
  source 1..120: mol_type = other DNA
caccactcacccctacgctggccctgtaaaaggaatttggcttcaactttcttttcttaatccactaagcaatcgcatgaataaaaagataatcacatgccctgcatgcctgatagaatt

SEQ ID NO: 13146 - DNA, 120 bp, synthetic construct
  misc_feature 1..120: note = Artificially Synthesized Probe
  source 1..120: mol_type = other DNA
ttaggtgtcctctcctggtaagtgctcagagattagtctcccctagaaaccttctttccccatgtcagaccaaaaatatataggcgaacacttagaacatatttgaaattctccatatat

SEQ ID NO: 13147 - DNA, 120 bp, synthetic construct
  misc_feature 1..120: note = Artificially Synthesized Probe
  source 1..120: mol_type = other DNA
ctactctaaggtattaagttccctcccttattatctccagttgtatctccattcttagaggagaatgcaccacgtttttttttcccccagctagaaaaactaaatgagcagcccataata

SEQ ID NO: 13148 - DNA, 120 bp, synthetic construct
  misc_feature 1..120: note = Artificially Synthesized Probe
  source 1..120: mol_type = other DNA
atagtgagaaagataacagtaagatagtaagaagttcttattagccaattatctggcatccacatccttccatcctcacccccaaccaaaatctgtaccaggaaagctcaagaaccagta

SEQ ID NO: 13149 - DNA, 120 bp, synthetic construct
  misc_feature 1..120: note = Artificially Synthesized Probe
  source 1..120: mol_type = other DNA
cttagccttcaggtgaagttttaaaacagaccgcttcaagaagtaatcagaaacagcaataacagtaattcgacaaactaaaattgagagcctagtatgcaccaggcacaaaattaggat

SEQ ID NO: 13150 - DNA, 120 bp, synthetic construct
  misc_feature 1..120: note = Artificially Synthesized Probe
  source 1..120: mol_type = other DNA
actttacataaattagctaactaattcaatcttcacaacaacccttagaagtaaatttcattatacccactctcaggtgagaaaacagggaggataagtggcctgcctactgccatgcca

SEQ ID NO: 13151 - DNA, 120 bp, synthetic construct
  misc_feature 1..120: note = Artificially Synthesized Probe
  source 1..120: mol_type = other DNA
cagaatgccatgggtgcaaaaatcacggcctgttcctattaagtgtcctgacaaatcattacagtgacaggttcagagaaatacaaataacccaaagtcaatatgtagcaatcaatctag

SEQ ID NO: 13152 - DNA, 120 bp, synthetic construct
  misc_feature 1..120: note = Artificially Synthesized Probe
  source 1..120: mol_type = other DNA
aggaaaatggtggttacggaagctgtgggcctgatgatcaatgggtacaaaaagctacagttacacaagaagaatttttttgtatatgtttgagatatattgcatagagtggtgaatata

SEQ ID NO: 13153 - DNA, 120 bp, synthetic construct
  misc_feature 1..120: note = Artificially Synthesized Probe
  source 1..120: mol_type = other DNA
agtcacatttaaccccaattttcatgtcaataaatatttgctggctgaaataaatcttatttactgtgtgtgtatctgctgtttgtgcaggccctcctctactccaccaaaaaaaaaaaa

SEQ ID NO: 13154 - DNA, 120 bp, synthetic construct
  misc_feature 1..120: note = Artificially Synthesized Probe
  source 1..120: mol_type = other DNA
cattctctgcccagtttatgccctctttactgaacagatcgtcattgaactcagttccattcctccatgcatgtctgtgcttccactgatttctgccttcctcattactatctaaattct

SEQ ID NO: 13155 - DNA, 120 bp, synthetic construct
  misc_feature 1..120: note = Artificially Synthesized Probe
  source 1..120: mol_type = other DNA
tttgtcgagaaactactgtcagcattgtcccctactaggcactgcatgaaaattaagcacaaataaaacaaacaatctctgtcctcatggtccttacaatctaatgagaagttgggagta

SEQ ID NO: 13156 - DNA, 120 bp, synthetic construct
  misc_feature 1..120: note = Artificially Synthesized Probe
  source 1..120: mol_type = other DNA
gctcagtaaaatgaacaaagcaaagttttctaaaatgactgcctgcattattaccaaaaataggagaattgagggcagacaaggagacatcagggatttgcaataattctcatagcgccc

SEQ ID NO: 13157 - DNA, 120 bp, synthetic construct
  misc_feature 1..120: note = Artificially Synthesized Probe
  source 1..120: mol_type = other DNA
tcaaatcacagataaagcattattttcctgaagaagctctcagagacccactgatacagatgttcctcttctgtgctcccattttatcctaagtagatgtattataagtgctggctcact

SEQ ID NO: 13158 - DNA, 120 bp, synthetic construct
  misc_feature 1..120: note = Artificially Synthesized Probe
  source 1..120: mol_type = other DNA
atcttgtattatctgttctgttccactatctgtatttgtactattatcaagacaaattttgcctgtcaccaatttcctgtgcttttagaaaactccctttttaaagcttttttttttttt

SEQ ID NO: 13159 - DNA, 120 bp, synthetic construct
  misc_feature 1..120: note = Artificially Synthesized Probe
  source 1..120: mol_type = other DNA
ttcacctgtgaatagtattcctgtacccaaattcctgtacacatcactgagaattgtctaaacccaagtgcctcaaaaggtcctaaacccttgactcatagccaggatatttcttttatt

SEQ ID NO: 13160 - DNA, 120 bp, synthetic construct
  misc_feature 1..120: note = Artificially Synthesized Probe
  source 1..120: mol_type = other DNA
tatatatatatatatatattcctgaacttcaatttttatttattttattctcccttgctttgtttcttcagacatacagctatgtcccacatcaacacaacttgggtctcctggtcaaca

SEQ ID NO: 13161 - DNA, 120 bp, synthetic construct
  misc_feature 1..120: note = Artificially Synthesized Probe
  source 1..120: mol_type = other DNA
tatcactcttaaaattctctcttcaataaaactccattctactttagggacatgggagtgacactcatgttgaacaagagggacttacaaagggagttttaccagtttcaccacttcggg

SEQ ID NO: 13162 - DNA, 120 bp, synthetic construct
  misc_feature 1..120: note = Artificially Synthesized Probe
  source 1..120: mol_type = other DNA
acaacaacactatgaggcatgtaaattggtattagcaccattttacacaagaaactgcaactcaaagaaataagggccttgcccaaagtcacacaaatcaagatgtctgaaccaggacca

SEQ ID NO: 13163 - DNA, 120 bp, synthetic construct
  misc_feature 1..120: note = Artificially Synthesized Probe
  source 1..120: mol_type = other DNA
aaaccaacaaataaactatccagacacatacccttcatgatgttgaatcccaatttaggaaacctcagacagctcagagcactgtcttatccacaaggctgagaatacaagacttttgtc

SEQ ID NO: 13164 - DNA, 120 bp, synthetic construct
  misc_feature 1..120: note = Artificially Synthesized Probe
  source 1..120: mol_type = other DNA
gcatgcagcagtagcattcaacaaggtcctgtaggacactctggtagattcccccttctactgctctgtcatttctagcttacttgctagttaaggtggaaagactttaaaaaaaaaaaa

SEQ ID NO: 13165 - DNA, 120 bp, synthetic construct
  misc_feature 1..120: note = Artificially Synthesized Probe
  source 1..120: mol_type = other DNA
cacttccaggcctttccagctccttcctactcaaattttgcgattcacaagttaagtttttcatcccatctttagttgcttcatggccctgcacatgtcattcttctaattagaatgtaa

SEQ ID NO: 13166 - DNA, 120 bp, synthetic construct
  misc_feature 1..120: note = Artificially Synthesized Probe
  source 1..120: mol_type = other DNA
atagcatatctgccatcatgtggaaagataaaattcaattcccaggcattcccaggtgcacttctaaggaagtggtatggtgtgaagaataaagcaatggaccaagggctaaaaagtcag

SEQ ID NO: 13167 - DNA, 120 bp, synthetic construct
  misc_feature 1..120: note = Artificially Synthesized Probe
  source 1..120: mol_type = other DNA
aaattggtttcatgacccattcgtggtcatgatctgcagtgtaaaaaacaatggactaaagcatgcagtaaagaatgtggcttggcaattagacaggcccaataccactttttttttttt

SEQ ID NO: 13168 - DNA, 120 bp, synthetic construct
  misc_feature 1..120: note = Artificially Synthesized Probe
  source 1..120: mol_type = other DNA
atctgtattctaacaagtcctccaaaacttgatgtgcactcaagtttgaaaaccagcattacaaactgatgatttagggaccaatagcaattccagggagctacatgtacaatcaaacgg

SEQ ID NO: 13169 - DNA, 120 bp, synthetic construct
  misc_feature 1..120: note = Artificially Synthesized Probe
  source 1..120: mol_type = other DNA
agattccttatttctgtcaatagaataatgatccagttatataccaaagagcagatagaagacctggctttggagtcatgtgactctgcattagatctcatggggtctctgtctcagtct

SEQ ID NO: 13170 - DNA, 120 bp, synthetic construct
  misc_feature 1..120: note = Artificially Synthesized Probe
  source 1..120: mol_type = other DNA
ctagatctatgcagcattctggacagctattccttgccaactgagattaggcactattataaaaaaagttttgaaaaaacaattccaaggtctattcctcctcccaacacacacacacac

SEQ ID NO: 13171 - DNA, 120 bp, synthetic construct
  misc_feature 1..120: note = Artificially Synthesized Probe
  source 1..120: mol_type = other DNA
cagcctatgttgtacgctcttgaaaaaccttaaggaagctttaaagagcagcaaaatcacttcaggccactcaggaagaactatggcttgagacattaaaaatggctgaggaaaaatact

SEQ ID NO: 13172 - DNA, 120 bp, synthetic construct
  misc_feature 1..120: note = Artificially Synthesized Probe
  source 1..120: mol_type = other DNA
gaaatccgacataggccacttcgcatgcctgatcagatatgctttcccaatgctgaaaaccaactgcttctaacattttaaacctgatttccatgaaaactcaggggtgaaagaaacaaa

SEQ ID NO: 13173 - DNA, 120 bp, synthetic construct
  misc_feature 1..120: note = Artificially Synthesized Probe
  source 1..120: mol_type = other DNA
acatgtctgagcatgcaggtgaaggacggtgttttaaaatagcagggataatctaagattaggtattggtgtcaaacacacttctcttatctattagtacagatgaccaccagttttcag

SEQ ID NO: 13174 - DNA, 120 bp, synthetic construct
  misc_feature 1..120: note = Artificially Synthesized Probe
  source 1..120: mol_type = other DNA
ccccaagcatctgtcacataataaaccctcagaatatggaagctactgatagtcacataaacttcatgaaaacagaaacattcatctgttttgttcactctattaacaaggaggcatggc

SEQ ID NO: 13175 - DNA, 120 bp, synthetic construct
  misc_feature 1..120: note = Artificially Synthesized Probe
  source 1..120: mol_type = other DNA
gggtggttccccacacaagatcccaaaatctccaggagcccctgaggttgtaataaaagacaatgggatatttttattatttcaaaatgtctaacagagatagttcgttaactgctttaa

SEQ ID NO: 13176 - DNA, 120 bp, synthetic construct
  misc_feature 1..120: note = Artificially Synthesized Probe
  source 1..120: mol_type = other DNA
ttttaaaataataaaattgaggcacaccatgcttcagaaactagcccaaagacacggggctagtaaatttagagcaaggcttgtatgttttccaaccttctccccaccaaagctggtatc

SEQ ID NO: 13177 - DNA, 120 bp, synthetic construct
  misc_feature 1..120: note = Artificially Synthesized Probe
  source 1..120: mol_type = other DNA
tccaactcaaaaaaaaagaaaaatcaagccacaagtttaagtaccagctctgtcacttattatgtaggggtaaacaatgtatacaagtcacctaacccctgtgaggctccatttccacca

SEQ ID NO: 13178 - DNA, 120 bp, synthetic construct
  misc_feature 1..120: note = Artificially Synthesized Probe
  source 1..120: mol_type = other DNA
ttttcctattcataaattaattttgggatggggcacagaaacaaagaccagtggacataaatttgagtctcggtctaactggcgttttctgaactacaccattaaaaaaaaaaaaaaaga

SEQ ID NO: 13179 - DNA, 120 bp, synthetic construct
  misc_feature 1..120: note = Artificially Synthesized Probe
  source 1..120: mol_type = other DNA
tttcctagacatatacagctgaaagcatgctgatttacgatacagtcagataagaactttcaagtagctacagaaaatagcagttaacaaatgaattaaccaatatcattagaaaccaaa

SEQ ID NO: 13180 - DNA, 120 bp, synthetic construct
  misc_feature 1..120: note = Artificially Synthesized Probe
  source 1..120: mol_type = other DNA
tcttctcacaaaaaaaaagatgaaaataaaaagagatgaaaaagaagcaaacaacaattttaaaacgtgcctgcctcagaacaaggcagtttattttagaatgtaaccacagcttcttgt

SEQ ID NO: 13181 - DNA, 120 bp, synthetic construct
  misc_feature 1..120: note = Artificially Synthesized Probe
  source 1..120: mol_type = other DNA
gccgcaaacccactaacagacataatagacaccacaacatgtgccaaatttatatttacaccctcaccagacaaaggggtttttgtcttttccccaagccaagttctaatacttctaaat

SEQ ID NO: 13182 - DNA, 120 bp, synthetic construct
  misc_feature 1..120: note = Artificially Synthesized Probe
  source 1..120: mol_type = other DNA
tgccagaaatgagtgacctttatatctctccacactaacacatctgagggaaactgccgacaccaaatatgtgttcatgagctaatgaagcagaaatcctcaaaggaagcaccatttgca

SEQ ID NO: 13183 - DNA, 120 bp, synthetic construct
  misc_feature 1..120: note = Artificially Synthesized Probe
  source 1..120: mol_type = other DNA
ggtacctcttgactagaatgttgtaaacatcagatccagcatgggatggacagaaagactagatgaattttaaagttcccgccaatgcataagtcaacaaagaggaaaatttcagccact

SEQ ID NO: 13184 - DNA, 120 bp, synthetic construct
  misc_feature 1..120: note = Artificially Synthesized Probe
  source 1..120: mol_type = other DNA
atcagaaaaagaaagaaagaaaccccacacacaaagaaattcaaaattacaagttaaaatgaaacatctggggaagggaaaaatttggtttttccccaaatgtaaggtaagcatgactcc

SEQ ID NO: 13185 - DNA, 120 bp, synthetic construct
  misc_feature 1..120: note = Artificially Synthesized Probe
  source 1..120: mol_type = other DNA
tgtacttaatcagtgggttgcaaccaagttacttgtcagaatcacctgtaaaccttgaaaaaatatggattctcaaacttaccttatcagaatccctgggtgctgagtccaagatccacc

SEQ ID NO: 13186 - DNA, 120 bp, synthetic construct
  misc_feature 1..120: note = Artificially Synthesized Probe
  source 1..120: mol_type = other DNA
gaacacctgtctaaaaatcaaaatatctaaatcctatcctttgagtcaacttgactaacactcaacttgactacctaaaagctagctaataatcgcagcacctcagcagagcagaggtgg

SEQ ID NO: 13187 - DNA, 120 bp, synthetic construct
  misc_feature 1..120: note = Artificially Synthesized Probe
  source 1..120: mol_type = other DNA
ttagctggataatttctttcccattttattggtgagttcatatagcagagctggatttgaatccaggattacagagcagggctccaaagcccaagttatttccactaaagggtctgaaga

SEQ ID NO: 13188 - DNA, 120 bp, synthetic construct
  misc_feature 1..120: note = Artificially Synthesized Probe
  source 1..120: mol_type = other DNA
agcgagtggcctcgctccgcgccggcggccgagcctggccttcccacacagagaaggaccgagggggagaagggtcgccccaggtggcagccccgggcgccgcggacagcgcccctcagc

SEQ ID NO: 13189 - DNA, 120 bp, synthetic construct
  misc_feature 1..120: note = Artificially Synthesized Probe
  source 1..120: mol_type = other DNA
ttcattcattcatttgttcatccgtgtagcgaatatttcttaagtgccttactttgcgtagctgtgtgcttggcagtgggatgataccaaagatgcacaagcaactttgagtaccaagac

SEQ ID NO: 13190 - DNA, 120 bp, synthetic construct
  misc_feature 1..120: note = Artificially Synthesized Probe
  source 1..120: mol_type = other DNA
gttaaagaaacagaaaaaaaaaatggaggtgtgactaattggatgtgggagtttacaatcctgttgggatgggaaatcctacccatagaacctctccctgactcctataggataaaattc

SEQ ID NO: 13191 - DNA, 120 bp, synthetic construct
  misc_feature 1..120: note = Artificially Synthesized Probe
  source 1..120: mol_type = other DNA
ttcagaagaatataagatagttatccccaaagagcaactctagaagcgactgtagctatgacaacattattaaaataaatgtgcaggccaggcgtggcggcttatgtcataatcccagca

SEQ ID NO: 13192 - DNA, 120 bp, synthetic construct
  misc_feature 1..120: note = Artificially Synthesized Probe
  source 1..120: mol_type = other DNA
ccatgtaacccaggaacccaaggatatgtgatgagatgtttgtggaagcaggaattaaaaggaagatttcttttaataatgccttgcagttgcgcagtgatttagaccttccaaaaacac

SEQ ID NO: 13193 - DNA, 120 bp, synthetic construct
  misc_feature 1..120: note = Artificially Synthesized Probe
  source 1..120: mol_type = other DNA
agaattaagaaccagccagacccttccactgagcctagacccaattaattacctctgctctaattaagggaatcagtaatgtaagtaattgtaatatgggcgatatagtttgcctgtgtc

SEQ ID NO: 13194 - DNA, 120 bp, synthetic construct
  misc_feature 1..120: note = Artificially Synthesized Probe
  source 1..120: mol_type = other DNA
ttccttcatgattagccaagacattcttgacagcaagattcaggcatacagaaagtttctacttcaaaatatggaaaatcttcttaccatctaggtgcagatcatatctaagtcccctga

SEQ ID NO: 13195 - DNA, 120 bp, synthetic construct
  misc_feature 1..120: note = Artificially Synthesized Probe
  source 1..120: mol_type = other DNA
tgactactttatcctctttctcagaccactgatccaaccatttctctttcacacttttgcctcctttcctcttataacaggtactaacagtctaagcagaaaaagaagaacagatggtgg

SEQ ID NO: 13196 - DNA, 120 bp, synthetic construct
  misc_feature 1..120: note = Artificially Synthesized Probe
  source 1..120: mol_type = other DNA
agcttatgagtaggtattattatttctactttacagtgcagaaaatgaaacctgagtaagttgtcttagatcacacagctgctaagcagtggcacagggatttaagcccaggtccatctg

SEQ ID NO: 13197 - DNA, 120 bp, synthetic construct
  misc_feature 1..120: note = Artificially Synthesized Probe
  source 1..120: mol_type = other DNA
tgggatctgtatccagaagttgtccatcttatttcaaagacagcctttggggacaatccctccatacttcttttattgccaatcacaattggatgaataagtggactctttctttgtctt

SEQ ID NO: 13198 - DNA, 120 bp, synthetic construct
  misc_feature 1..120: note = Artificially Synthesized Probe
  source 1..120: mol_type = other DNA
cacacacacacacacattttctattgtatttctatttcaaattcatctttcacttccaaacctcttaaaacagtggtttgtcccttgctgtttttatttctgcaatttattacagcttcc

SEQ ID NO: 13199 - DNA, 120 bp, synthetic construct
  misc_feature 1..120: note = Artificially Synthesized Probe
  source 1..120: mol_type = other DNA
aaatacaagtataaacccatcacttcatacttaaaactcaccaatggctccccattctctacagttagagcccaaactggacagatggcatggaaaatcgttggcattctgaccacattt

SEQ ID NO: 13200 - DNA, 120 bp, synthetic construct
  misc_feature 1..120: note = Artificially Synthesized Probe
  source 1..120: mol_type = other DNA
gctttcaatataggtgtattgaatgaatgttgggaacatagtacacatttgataaataatgatttgagtaggcacttgctgcttacccagtggaacaggcaagcaggcaaagaggaggag

SEQ ID NO: 13201 - DNA, 120 bp, synthetic construct
  misc_feature 1..120: note = Artificially Synthesized Probe
  source 1..120: mol_type = other DNA
ttggagaactaaaaaaggtgaaagttacagagtcagccaatgtcatagcaggaattaaattcaaggtgttctgatttccagggcagcctacaaatatccaccatattgaaagaactgttt

SEQ ID NO: 13202 - DNA, 120 bp, synthetic construct
  misc_feature 1..120: note = Artificially Synthesized Probe
  source 1..120: mol_type = other DNA
taggagagaaggaaagcacagggatcaagtacaggggacaaatacatagcattgatctgcctgagataaaatctaaagacgcagtagtaaattcttaatgagtactgagagagaacaaag

SEQ ID NO: 13203 - DNA, 120 bp, synthetic construct
  misc_feature 1..120: note = Artificially Synthesized Probe
  source 1..120: mol_type = other DNA
ctcacaatccagtctccttatgttccttctgttacaggaattgcagcctcatcacctatcacaatatttctcaacccttttcttttcattattgccttcctaaggaggcttttcagatgt

SEQ ID NO: 13204 - DNA, 120 bp, synthetic construct
  misc_feature 1..120: note = Artificially Synthesized Probe
  source 1..120: mol_type = other DNA
gaaattattctcagttctgaagccagatttagacattttgcctttgttcctcaggagcctggaccacccagccaactgtgccctattgatgaaaatctctgattattataggggaataca

SEQ ID NO: 13205 - DNA, 120 bp, synthetic construct
  misc_feature 1..120: note = Artificially Synthesized Probe
  source 1..120: mol_type = other DNA
ggaaaaagttttgatttgtgctttgagaatgaattagggatttatgaaaagaaaagttggaggaagggcattacagacagagagatgaggatgggacaggaacagcatgaccaaggaagg

SEQ ID NO: 13206 - DNA, 120 bp, synthetic construct
  misc_feature 1..120: note = Artificially Synthesized Probe
  source 1..120: mol_type = other DNA
ggagcagccctaccatggagcttaggtatgctgaagcttagaaggtaaatcaggagccatttcatggtttcacacaaaaaaggaaaaacactgaattttcaattttggaagaaaagctta

SEQ ID NO: 13207 - DNA, 120 bp, synthetic construct
  misc_feature 1..120: note = Artificially Synthesized Probe
  source 1..120: mol_type = other DNA
tttgaaatctccatacttagtaagccccttactaaaacacttttgagggatttggaacacattttttataagtgcctaattgtatcatgatggcatttttttacttttttttttccttca

SEQ ID NO: 13208 - DNA, 120 bp, synthetic construct
  misc_feature 1..120: note = Artificially Synthesized Probe
  source 1..120: mol_type = other DNA
taatagccattctgactggcatgagatggtatctcattgtggttttgatttgcatttctctaatgatcagtgattttgagctttttatcatatgtttttggccacatgtatgacttcttt

SEQ ID NO: 13209 - DNA, 120 bp, synthetic construct
  misc_feature 1..120: note = Artificially Synthesized Probe
  source 1..120: mol_type = other DNA
cagatgctctcatcctctcctatggaatcagttattacctagagagactcatgccctcaactctttcctgagtatgagacacgtaatttcaactgctttctcaacattttcatttaagta

SEQ ID NO: 13210 - DNA, 120 bp, synthetic construct
  misc_feature 1..120: note = Artificially Synthesized Probe
  source 1..120: mol_type = other DNA
agttgttctgagccaggcactgagctagattctaggggtacaaagataaagatggcccttacaaagatggctcttaaggagcttatcttcaattagtagagaaagacataagtgtaaatg

SEQ ID NO: 13211 - DNA, 120 bp, synthetic construct
  misc_feature 1..120: note = Artificially Synthesized Probe
  source 1..120: mol_type = other DNA
gtacttttcttattgggttgtgagctcctagatgtcaagtattggggctctttaatttctatcctcccagtgcctaatacattttttcatcaagcaataagagagaggatcttcagcctg

SEQ ID NO: 13212 - DNA, 120 bp, synthetic construct
  misc_feature 1..120: note = Artificially Synthesized Probe
  source 1..120: mol_type = other DNA
gatctccagcaacagagccaatttctattgaccacccgctcaaaaaagcacaggtttattttagcctccatgctatttgatctttatcttgatgatgctatagccttcaaccctcttgat

SEQ ID NO: 13213 - DNA, 120 bp, synthetic construct
  misc_feature 1..120: note = Artificially Synthesized Probe
  source 1..120: mol_type = other DNA
ggctagctctccgaggctgctgtacaaaaagcctgtattctaatagactcattaaccccaaaacctattcagagcacctaactttcatttgttgaactgcacatgaaatatatttgggga

SEQ ID NO: 13214 - DNA, 120 bp, synthetic construct
  misc_feature 1..120: note = Artificially Synthesized Probe
  source 1..120: mol_type = other DNA
acaactggtacctggtaaaaacaagttcttgaatgaatggccctccaccattcattctcacaaaagtagctctccttcacttactttggttctcaaaaggttactatccaaacaactacc

SEQ ID NO: 13215 - DNA, 120 bp, synthetic construct
  misc_feature 1..120: note = Artificially Synthesized Probe
  source 1..120: mol_type = other DNA
cccccccaccttttctactggtgtagcatttttttctattgatgtaattttgatttccagttacagtaaagacacttgactggataccatacaagaggcaactatatatatatatatata

SEQ ID NO: 13216 - DNA, 120 bp, synthetic construct
  misc_feature 1..120: note = Artificially Synthesized Probe
  source 1..120: mol_type = other DNA
atataaacaataccaggttcaagatagaaaataaacacagatttcaggtaaaatataagtattgtatcagccagggcctgccatccccaacttgaccccattgcccaagctgatgtctgc

SEQ ID NO: 13217 - DNA, 120 bp, synthetic construct
  misc_feature 1..120: note = Artificially Synthesized Probe
  source 1..120: mol_type = other DNA
tccctgcttcccaaagctgtgcactgctccctggtccattctttgaatactattgccagaatagtatcgtctccatattatgactcaatttttactctttttgtcttaaggcattttact

SEQ ID NO: 13218 - DNA, 120 bp, synthetic construct
  misc_feature 1..120: note = Artificially Synthesized Probe
  source 1..120: mol_type = other DNA
tttttgtacaaagacatttgggtgtcattggtggacagatcttacctgtgttcttaagccagtgttgtcatcatgtgtattgttatagttagccagacaccaagatgctggcactgacag

SEQ ID NO: 13219 - DNA, 120 bp, synthetic construct
  misc_feature 1..120: note = Artificially Synthesized Probe
  source 1..120: mol_type = other DNA
gctgttttcttcccctccttttcatctaaacttctcagaaaagtgtcttgcactcactatttccacttcctcaacttgcttctatctagcttctgccccgatcattcctctaaaaattga

SEQ ID NO: 13220 - DNA, 120 bp, synthetic construct
  misc_feature 1..120: note = Artificially Synthesized Probe
  source 1..120: mol_type = other DNA
atctttccttcctaacaaagaataagccgcaattcactctctctggcacctgaactttggggtaacgattaactgcgatccgaagccttcaggcaagtaaaaaattcctgaagtgattac

SEQ ID NO: 13221 - DNA, 120 bp, synthetic construct
  misc_feature 1..120: note = Artificially Synthesized Probe
  source 1..120: mol_type = other DNA
agagataaactcacttaacgaaggttgtacttagtaaaggcaataagagactaaatctaaaccaagacgcttgactccgtagctgctgcttcgtgaatattaatgaggcttcgttttagg

SEQ ID NO: 13222 - DNA, 120 bp, synthetic construct
  misc_feature 1..120: note = Artificially Synthesized Probe
  source 1..120: mol_type = other DNA
ataactatcggaaagaaccctccttgtcttaaacataatttctgaatatagtttgaggcgtatgtcactttctgttgctttaaagagtggagtgttgatccctgtagcaaacttcggttc

SEQ ID NO: 13223 - DNA, 120 bp, synthetic construct
  misc_feature 1..120: note = Artificially Synthesized Probe
  source 1..120: mol_type = other DNA
ccaagatcacaaaacctgaggacaacattgcacaaatttgttttccagggtaatagtgagaggtttatacttgttttttaaaaaaatcacagtcatgtgcctcattgcaactgctgggtc

SEQ ID NO: 13224 - DNA, 120 bp, synthetic construct
  misc_feature 1..120: note = Artificially Synthesized Probe
  source 1..120: mol_type = other DNA
tgtcaaggtttaattctgttttaaggtaggtttggtgtcatttagttgtgccaaggagatagaaagtggttctttatcttctgtcactggagttcgatggtcaactcttgaacatggggg

SEQ ID NO: 13225 - DNA, 120 bp, synthetic construct
  misc_feature 1..120: note = Artificially Synthesized Probe
  source 1..120: mol_type = other DNA
cggtctgcccctggaggtggtagcaaggttccacaggtagagatggcaattttattataggttttgtattatagcttttagtttggtgatagaacagctcttgttcatgagtacgtatct

SEQ ID NO: 13226 - DNA, 120 bp, synthetic construct
  misc_feature 1..120: note = Artificially Synthesized Probe
  source 1..120: mol_type = other DNA
acgcacactggtataaagtactgtttataattggtcttatgtgtgccagtaccagtaatgcattgaatactttgatttggctctcagctttgtccttcagttctgaggttggtccatatg

SEQ ID NO: 13227 - DNA, 120 bp, synthetic construct
  misc_feature 1..120: note = Artificially Synthesized Probe
  source 1..120: mol_type = other DNA
tcccctctcagactatgaagcaggtggggttacaggagcataaccaagcccagcttgtttggttatcacttttaagaatatttctcgttagtaagaattgaaatacattccaagagaaga

SEQ ID NO: 13228 - DNA, 120 bp, synthetic construct
  misc_feature 1..120: note = Artificially Synthesized Probe
  source 1..120: mol_type = other DNA
agttgaagaaagtgtactaaggtctgcatagtagtaaaggatgccttgagggaaacaaatattaatagaaacttcagtggtgagatggcaagggcccagcatagatagatggcaatgaaa

SEQ ID NO: 13229 - DNA, 120 bp, synthetic construct
  misc_feature 1..120: note = Artificially Synthesized Probe
  source 1..120: mol_type = other DNA
attggaaagataggtgtttcttacatgaagttgctgtattgggatttagagaccagtacgttcagttgttgaattaaacgtgaaccccttggtatttgctaatagagacttctgcctgac

SEQ ID NO: 13230 - DNA, 120 bp, synthetic construct
  misc_feature 1..120: note = Artificially Synthesized Probe
  source 1..120: mol_type = other DNA
tgatttcactacaccctcacttgccattatctgactctaatcctggtggtatgaagtgctgattgtgggtttgattgcgtctccctgtggactaataatgagcatcttttcatgtattca

SEQ ID NO: 13231 - DNA, 120 bp, synthetic construct
  misc_feature 1..120: note = Artificially Synthesized Probe
  source 1..120: mol_type = other DNA
gggctttgttccattttgagtaaacttatgtgtatggtgtgaatggaggggtctaaatatagactttggatgtagattagcagttgccccaacatgatttgttcaaaaactattttttcc

SEQ ID NO: 13232 - DNA, 120 bp, synthetic construct
  misc_feature 1..120: note = Artificially Synthesized Probe
  source 1..120: mol_type = other DNA
agacactgtgccagttcttgggtttgtttataaattttaggatctgtttctacagagaaaccagcttggggagtcttctaacgattgtatttaacctgtatattcggggagtgtttccat

SEQ ID NO: 13233 - DNA, 120 bp, synthetic construct
  misc_feature 1..120: note = Artificially Synthesized Probe
  source 1..120: mol_type = other DNA
ttacagaaaacttaagagtggggaatggtctgttttctttatccatgtggccctccacccagtttgttagtcttgtgtaaccttttgtccaagtggttgctgctttttccttcctttttt

SEQ ID NO: 13234 - DNA, 120 bp, synthetic construct
  misc_feature 1..120: note = Artificially Synthesized Probe
  source 1..120: mol_type = other DNA
acacacaaacatactaaatgtaaggtggtggggcggggggagccaatagacttttttgaaagagatggaccctcactttgtcactcagtctgggttagagttgcgtgatctcggcttact

SEQ ID NO: 13235 - DNA, 120 bp, synthetic construct
  misc_feature 1..120: note = Artificially Synthesized Probe
  source 1..120: mol_type = other DNA
acctgatgaaatagtttatttacaatttaaacgaataaatttcatattctacaacacatataatctattgactaaatgtaactaatgatgaacctccatacaaacaaccccactaaaaag

SEQ ID NO: 13236 - DNA, 120 bp, synthetic construct
  misc_feature 1..120: note = Artificially Synthesized Probe
  source 1..120: mol_type = other DNA
aacaggatcccaaggcagaggaatttttcttagtgcagaacaaaatgaaaagtctcccatgtctacttctttctacacagacacggcaaccatccgatttctcaatcttttccccacctt

SEQ ID NO: 13237 - DNA, 120 bp, synthetic construct
  misc_feature 1..120: note = Artificially Synthesized Probe
  source 1..120: mol_type = other DNA
cctcacttctcagacggggcagctgccgggcggaggggctcctcacttctcagacggggtggttgccaggcagagggtctcctcacttctcagacggggcggccaggcagagacgctcct

SEQ ID NO: 13238 - DNA, 120 bp, synthetic construct
  misc_feature 1..120: note = Artificially Synthesized Probe
  source 1..120: mol_type = other DNA
tatgcaaggaacgtagtgcactggttgcaagataacattctgaccttccatgttaaaatagatcagtgaaaaccctttgcctattctggttgtaagatatgctagagaaccaacagaggg

SEQ ID NO: 13239 - DNA, 120 bp, synthetic construct
  misc_feature 1..120: note = Artificially Synthesized Probe
  source 1..120: mol_type = other DNA
actgtaaaccctttagccttcctggttatcactgatttttgtcccttggatacaatgctaaaatgacatcttttagatgcccctcccctccattttaatatggtcctatctccttggttt

SEQ ID NO: 13240 - DNA, 120 bp, synthetic construct
  misc_feature 1..120: note = Artificially Synthesized Probe
  source 1..120: mol_type = other DNA
agaacagtttgggtcacttgacatggttctccaaagggatgttatgggttgtatttggttctgggtgataaccgacttgttagataatttagataagcaaccgagttgccatgtttgttt

SEQ ID NO: 13241 - DNA, 120 bp, synthetic construct
  misc_feature 1..120: note = Artificially Synthesized Probe
  source 1..120: mol_type = other DNA
ctcttatttacagttgactcataagtgtaaggacaatgtaaaagtggttaaatagggatgttaggtatcgtgtggagaacggatgctgcatttaatggtctttaggtttcctgtggtcag

SEQ ID NO: 13242 - DNA, 120 bp, synthetic construct
  misc_feature 1..120: note = Artificially Synthesized Probe
  source 1..120: mol_type = other DNA
tgctgttacagagattatcaaaactaaatgcttcctgtttttgacatagagatgcatgatgcaagcaacgacaatgtatatttgtttgaacctgatgataagatctctggctgggcgtgg

SEQ ID NO: 13243 - DNA, 120 bp, synthetic construct
  misc_feature 1..120: note = Artificially Synthesized Probe
  source 1..120: mol_type = other DNA
ggtgtttatgtaactttatttgccaaatctggccaactctaaagctgatctcgggagatgaagttggaagtaacattggccatatgggtctctgttctttctgttgatttccttaagtaa

SEQ ID NO: 13244 - DNA, 120 bp, synthetic construct
  misc_feature 1..120: note = Artificially Synthesized Probe
  source 1..120: mol_type = other DNA
ttccaaatgttccattagacctcctatctgcctattctagcctcacttgcaaagaaaatgtggcatgttaaaacagcttaaaagcagcctttcaacctgtatggttttttcccctaggct

SEQ ID NO: 13245 - DNA, 120 bp, synthetic construct
  misc_feature 1..120: note = Artificially Synthesized Probe
  source 1..120: mol_type = other DNA
gagcttcatgaattgataagcaagttactcatcagagtaaatttcacttaagcccttcaggatcttgcaattctggggaggaatatgaactgctaatcagccatgcaaagataacttggc

SEQ ID NO: 13246 - DNA, 120 bp, synthetic construct
  misc_feature 1..120: note = Artificially Synthesized Probe
  source 1..120: mol_type = other DNA
cccccttttttttttaagcattttctcagcagactagctaaggacaatagatggcatgtcctgacacccatggggcactctgggtgttggggcagaaacttgagagggaatgagcttctg

SEQ ID NO: 13247 - DNA, 120 bp, synthetic construct
  misc_feature 1..120: note = Artificially Synthesized Probe
  source 1..120: mol_type = other DNA
cctcagctgcaagagccgcattcttactgatttgactcaagaggctcccacttcaaaggtgtgagaagagtaaaaaagagtccttggttatctcaccgccgtgcctcaggattctttctc

SEQ ID NO: 13248 - DNA, 120 bp, synthetic construct
  misc_feature 1..120: note = Artificially Synthesized Probe
  source 1..120: mol_type = other DNA
ggcccccctccgagactgcagcctccccccagccctcctgcagctcctctccgtcccctcctgtgctggtccccctggctatgccctgtggggtggtctagtggcctagctccaactctg

SEQ ID NO: 13249 - DNA, 120 bp, synthetic construct
  misc_feature 1..120: note = Artificially Synthesized Probe
  source 1..120: mol_type = other DNA
ctacactgtaactagcagcatagtgcttaactagttaacaagaaatgctgcttccctttgaattgtttcgggggtgtagaaattgcacttatttctatgaaccccatggagggatgccca

SEQ ID NO: 13250 - DNA, 120 bp, synthetic construct
  misc_feature 1..120: note = Artificially Synthesized Probe
  source 1..120: mol_type = other DNA
tctcactgaatcatgtcctcttccttctccactttggcaaaggtggccaccttgttcttgaggagatagaggtgtccaggacctccctgtaagaagctgtggtcaggcatctgctcctcc

SEQ ID NO: 13251 - DNA, 120 bp, synthetic construct
  misc_feature 1..120: note = Artificially Synthesized Probe
  source 1..120: mol_type = other DNA
tcttaattccccccaatgcctcttccccttgatctcccccaccacacgctcttctccttgatctccccccaatgcctcttccccttgacctgcccgccacgcctcttccttttgatctcc

SEQ ID NO: 13252 - DNA, 120 bp, synthetic construct
  misc_feature 1..120: note = Artificially Synthesized Probe
  source 1..120: mol_type = other DNA
ttccccttggtctcccccagccacacgcctcttccccttcgtttccccccgccacacgcctcttctccttgatctttccccctcaacatctacgcctcttctccttggtcttccccaacc

SEQ ID NO: 13253 - DNA, 120 bp, synthetic construct
  misc_feature 1..120: note = Artificially Synthesized Probe
  source 1..120: mol_type = other DNA
tctggctgccaggcagcccaagggtatagccctgtgagacaccctcccccaggcagctggagaaggctgcgtggtcccaggcagagctggctggactcgggttggggcggagtcctgctc

SEQ ID NO: 13254 - DNA, 120 bp, synthetic construct
  misc_feature 1..120: note = Artificially Synthesized Probe
  source 1..120: mol_type = other DNA
gcagaggaggaagctaatgtgggtggggtctaaggcacatgaagcagacacggaccagaggctcggttggttcaggggcaggatctgagaacactggggcagggccagaggcggagtctg

SEQ ID NO: 13255 - DNA, 120 bp, synthetic construct
  misc_feature 1..120: note = Artificially Synthesized Probe
  source 1..120: mol_type = other DNA
tcctgctctgtgtccttgagccacctcaggggcaggtcctctcctccaccaaactttggaccctgccaaggcccaacatccaaaacgggcaaaaaagcttcccagacacatctgtgtgat

SEQ ID NO: 13256 - DNA, 120 bp, synthetic construct
  misc_feature 1..120: note = Artificially Synthesized Probe
  source 1..120: mol_type = other DNA
gaaggaatcccagaacagaaaagccaaatgtatgtcaagacagagaggagcaggtccctgcggggaccctgaaactgtgatgacctatggcacgtatgaaacagaagtaggcttctattt

SEQ ID NO: 13257 - DNA, 120 bp, synthetic construct
  misc_feature 1..120: note = Artificially Synthesized Probe
  source 1..120: mol_type = other DNA
ggtaacttgacgctttgatttttttggcttaactttccctttggccacccaaagtttgagaaacattcctttgaaagcacagtctgtctccaggaggcccaggaaaacaatgcgtctgtt

SEQ ID NO: 13258 - DNA, 120 bp, synthetic construct
  misc_feature 1..120: note = Artificially Synthesized Probe
  source 1..120: mol_type = other DNA
agcagccgttggagacgagggacaggcggcgcttgttctggggggccggctgcatctcgggggacccgtcgtggccagagtaggcatcagccagcaggtgatctaggagagacactgagt

SEQ ID NO: 13259 - DNA, 120 bp, synthetic construct
  misc_feature 1..120: note = Artificially Synthesized Probe
  source 1..120: mol_type = other DNA
gctgctgttccccgggggaaccgaggccactcccgacctggggggtgcgctcgcccaccacgcgctcgcgaggggaggggagggaagagcagggcaggggaccaggaagagggaggcgcg

SEQ ID NO: 13260 - DNA, 120 bp, synthetic construct
  misc_feature 1..120: note = Artificially Synthesized Probe
  source 1..120: mol_type = other DNA
ttcctaagaacccctgtgtttctcagactgaaaatgtgttttgaactttgttcacgaagtgaggccgctgttgaaattcgtcaagactgggaaagagccaaagtgggaaggagcatgggt

SEQ ID NO: 13261 - DNA, 120 bp, synthetic construct
  misc_feature 1..120: note = Artificially Synthesized Probe
  source 1..120: mol_type = other DNA
ttccttttcagtagaggaaggagagtagcgcacgaataggaagatggttctcttattattattattcaagttaggatatgtgtcctgaatgatgaggtgcatgtgctgtatcccttattc

SEQ ID NO: 13262 - DNA, 120 bp, synthetic construct
  misc_feature 1..120: note = Artificially Synthesized Probe
  source 1..120: mol_type = other DNA
cttgggaaagatttccatccagtggttttgttttggtatgtctgagctgggaaagaaaggggtttacaagagcgtcaggaaaaggaagattgaagaggagatggggccataatattcgga

SEQ ID NO: 13263 - DNA, 120 bp, synthetic construct
  misc_feature 1..120: note = Artificially Synthesized Probe
  source 1..120: mol_type = other DNA
ccaccggctgcccagctgccccccattgtgtcccaagggaatgctgggccatggccacaaggggctcatggagagagcagcctggcttcctcccaggccaaggccccgccagatgactcc

SEQ ID NO: 13264 - DNA, 120 bp, synthetic construct
  misc_feature 1..120: note = Artificially Synthesized Probe
  source 1..120: mol_type = other DNA
ggcaggtatttgcatcttcaccctcaatccctcctagaaaaagggacaatgatgcttcattcagaggatggtgaagagataacttgagctcacatatgacatgcatagcacagtgcctgg

SEQ ID NO: 13265 - DNA, 120 bp, synthetic construct
  misc_feature 1..120: note = Artificially Synthesized Probe
  source 1..120: mol_type = other DNA
aatgttggagacacacatgttccacccatagtactgagtccacttctcaacactgaggactcgaggggcagtcggagaggccacttggtagcttgtgttgatgtttgatcttggggttgt

SEQ ID NO: 13266 - DNA, 120 bp, synthetic construct
  misc_feature 1..120: note = Artificially Synthesized Probe
  source 1..120: mol_type = other DNA
cagcttttgcttcctcctgaccaggagtctcccaggcctcgtgcccctgggttatctttcaggggcccacagtcctagcctcaggactcctgcatctgggcatcatccctgatgccttct

SEQ ID NO: 13267 - DNA, 120 bp, synthetic construct
  misc_feature 1..120: note = Artificially Synthesized Probe
  source 1..120: mol_type = other DNA
ttcgagagggggatttgctccctccaacaggacagtttccaggagcatatgttcggtattgacctggtcaagtttcctagctactctctcccctcgcctgtccaaaactccacatatgct

SEQ ID NO: 13268 - DNA, 120 bp, synthetic construct
  misc_feature 1..120: note = Artificially Synthesized Probe
  source 1..120: mol_type = other DNA
ccttcttccttctgtttccaggtggaggccgtcattcatccccaattcctggaagaattgctttccccagatccacagatggatttcttggccctaagccaggacctggagcaggaggaa

SEQ ID NO: 13269 - DNA, 120 bp, synthetic construct
  misc_feature 1..120: note = Artificially Synthesized Probe
  source 1..120: mol_type = other DNA
gggaactcatcagtccccatctgctgagagaagaggcctcaacctagcaccttctcctgccaacaaggccaagaagcgacctctctttggaagcctgtcccctgctgaaaagacacccta

SEQ ID NO: 13270 - DNA, 120 bp, synthetic construct
  misc_feature 1..120: note = Artificially Synthesized Probe
  source 1..120: mol_type = other DNA
tgaactcatgtggaattgatgtagacacagatttacattggtttctaaaacagttccctcccaacacaccatcaccaatgggaacaaacatgtccagtccatcaggcgcagggtgggtgt

SEQ ID NO: 13271 - DNA, 120 bp, synthetic construct
  misc_feature 1..120: note = Artificially Synthesized Probe
  source 1..120: mol_type = other DNA
tgactcctctacattcagggccatcctcaagagataaggtagcactgcccctttgcagggtttaggaatgttaagtgagccgtgtttgaagggaacatggtccatactctggcgtgtgtg

SEQ ID NO: 13272 - DNA, 120 bp, synthetic construct
  misc_feature 1..120: note = Artificially Synthesized Probe
  source 1..120: mol_type = other DNA
ggtcctatgttccaggaacctgtttactttcaaattttcctgtttcagttggactcaggagcatctggtgagccaggtcactctctgggtcttacccttggcttttctcattgtggaaac

SEQ ID NO: 13273 - DNA, 120 bp, synthetic construct
  misc_feature 1..120: note = Artificially Synthesized Probe
  source 1..120: mol_type = other DNA
ggtttccttttcagtagaggaaggagagtagcgcacgaataggaagatggttctcttattattattattcaagttaggatacgtgtcctgaatgatgaggtgcatgtgctgtatccctta

SEQ ID NO: 13274 - DNA, 120 bp, synthetic construct
  misc_feature 1..120: note = Artificially Synthesized Probe
  source 1..120: mol_type = other DNA
tgggaaagatttccatccagtggttttgttttgttatgtctgagctgggaaagaaaggggtttacaagagcgtcaggaaaaggaagattgaagaggagatggggccataatattcggaag

SEQ ID NO: 13275 - DNA, 120 bp, synthetic construct
  misc_feature 1..120: note = Artificially Synthesized Probe
  source 1..120: mol_type = other DNA
tacattttcaacaatattaatctggctgcggctcaggacagactgtcaggggcctcatctcaactgcccgtcactgtctcgtgagtccagccaatccttactttcaataattttcacaac

SEQ ID NO: 13276 - DNA, 120 bp, synthetic construct
  misc_feature 1..120: note = Artificially Synthesized Probe
  source 1..120: mol_type = other DNA
cacatgctatgacacattacatgatagcagttatgattactgtccccattactatcattatcaagactaggccatctaggagagcactccccaaagccacgggctccagtgatagctctg

SEQ ID NO: 13277 - DNA, 120 bp, synthetic construct
  misc_feature 1..120: note = Artificially Synthesized Probe
  source 1..120: mol_type = other DNA
ttaaccctgattgcctccaaatactgacacactggtgctgaggacttcagcacaggaatgttggagacacacatgttccacccatagtactgagtccacttctcaacactgaggactcga

SEQ ID NO: 13278 - DNA, 120 bp, synthetic construct
  misc_feature 1..120: note = Artificially Synthesized Probe
  source 1..120: mol_type = other DNA
agagggggatttgctccctccaacaggacagtttccaggagcatatgttcggtattgacctggtcaagtttcctagctactctctcccctcgcctgtccaaaactccacatatgctctgc

SEQ ID NO: 13279 - DNA, 120 bp, synthetic construct
  misc_feature 1..120: note = Artificially Synthesized Probe
  source 1..120: mol_type = other DNA
ggtctgctggattccagggggtggcactcccaggtccttggaattaagctctgttccttagctactcagcagtgtgtgtatttccaaggatttgagtgtctgtgtatgtgattgtgtgtg

SEQ ID NO: 13280 - DNA, 120 bp, synthetic construct
  misc_feature 1..120: note = Artificially Synthesized Probe
  source 1..120: mol_type = other DNA
ggagaagcgcctcctacccttgaaggagaaacagcatgcgagggcagcccctagtcgtggcacagcccggttggactcaagttcttctaagtttgcagctggccaaggagcagagagaga

SEQ ID NO: 13281 - DNA, 120 bp, synthetic construct
  misc_feature 1..120: note = Artificially Synthesized Probe
  source 1..120: mol_type = other DNA
tgtaagtgtgaataaatgtagttgtcttggaaaatgctcttggggctgctgcctctgtcctcggtgctgtgctgctccgtggagggtgtctgtgagggagggcagaggaactggcagatg

SEQ ID NO: 13282 - DNA, 120 bp, synthetic construct
  misc_feature 1..120: note = Artificially Synthesized Probe
  source 1..120: mol_type = other DNA
atgatgactgaactcatgtggaattgatgtagacacagatttacattggtttctaaaacagttccctcccaacacaccatcaccaatgggaacaagcatgtccagtccatcaggcgcagg

SEQ ID NO: 13283 - DNA, 120 bp, synthetic construct
  misc_feature 1..120: note = Artificially Synthesized Probe
  source 1..120: mol_type = other DNA
acaaatacatttctttttttaatatgtgccaccacccccaagtctatggccctttgtccgagcagccctatgtgactaggacaaagtccataatctcaagaacttccttcatgactggta

SEQ ID NO: 13284 - DNA, 120 bp, synthetic construct
  misc_feature 1..120: note = Artificially Synthesized Probe
  source 1..120: mol_type = other DNA
tccatttctcatggctacatacctaagagtgaaattggtggaccatatggaaactctgtgtttaaccatttcagaaggtgccagactgttcccagtgtacatgaaccattttatataccc

SEQ ID NO: 13285 - DNA, 120 bp, synthetic construct
  misc_feature 1..120: note = Artificially Synthesized Probe
  source 1..120: mol_type = other DNA
gccggttgtagggaggagggaaaggagagggagaagggggaggagacgtccccagcccagtccccggctgagcgctggcggtcggtgcggcgtcaggtgcgcccgccaggtgagcgcgct

SEQ ID NO: 13286 - DNA, 120 bp, synthetic construct
  misc_feature 1..120: note = Artificially Synthesized Probe
  source 1..120: mol_type = other DNA
gcaacaggtgtattattgggatacctggaaaagagaaacgtttcccatgaaggcacttatggtgttttttggtgattcttggtgtgatagaaaactaggcgttcccaagtgtaacaatag

SEQ ID NO: 13287 - DNA, 120 bp, synthetic construct
  misc_feature 1..120: note = Artificially Synthesized Probe
  source 1..120: mol_type = other DNA
ttaagtgtgtgtgggaggcagagatatttcctcaaacaaagcaacactttttttttggtcgttttgcaatttatttagttattaggggcctcctttgttaggtgacggagcagaggatag

SEQ ID NO: 13288 - DNA, 120 bp, synthetic construct
  misc_feature 1..120: note = Artificially Synthesized Probe
  source 1..120: mol_type = other DNA
tcaaaatagacatttgatgtctgggatatgggcattccagatgcggtggagatgatacctatattttaggtatgagggcagaggggagtttgctctgaaaaaaaaaacaagttttgtgtg

SEQ ID NO: 13289 - DNA, 120 bp, synthetic construct
  misc_feature 1..120: note = Artificially Synthesized Probe
  source 1..120: mol_type = other DNA
gccaccttgcccagcctcagcctgtttttttcatcttagcttagttttccattaagacagcttttggtcagtaaacattgtcaaggggagaacactttatattttatcattagcccaaga

SEQ ID NO: 13290 - DNA, 120 bp, synthetic construct
  misc_feature 1..120: note = Artificially Synthesized Probe
  source 1..120: mol_type = other DNA
cacggtgcctggccagcttttctagatctttaatgatcttagtcaccctcctggagaggcacatagtttagaatgtgatgtacaaatcaggttttgtttgttctttttaatagcatatta

SEQ ID NO: 13291 - DNA, 120 bp, synthetic construct
  misc_feature 1..120: note = Artificially Synthesized Probe
  source 1..120: mol_type = other DNA
caaaaaaaaaaaaaatcagtttacattttaaaaatgactcatttatgccaccaatatagtcacccttcagtatctgtgagaggttgcttccaggacccccatgatactaaaatctgagga

SEQ ID NO: 13292 - DNA, 120 bp, synthetic construct
  misc_feature 1..120: note = Artificially Synthesized Probe
  source 1..120: mol_type = other DNA
gattattcccgcatttgagtgcacttagaggagataaggaatttgtctcagattgcgagccagtaaatgggggctgttaaaaccactaggttgtttcaaactcatcattctgacattaca

SEQ ID NO: 13293 - DNA, 120 bp, synthetic construct
  misc_feature 1..120: note = Artificially Synthesized Probe
  source 1..120: mol_type = other DNA
ggcatgagccacatgatttggttcacaatttaaaatccgtgcttttggggagacgtgacaactctgaatcctggaaatagcagtttgaaaagggatcttgtttgaatttttgacaactta

SEQ ID NO: 13294 - DNA, 120 bp, synthetic construct
  misc_feature 1..120: note = Artificially Synthesized Probe
  source 1..120: mol_type = other DNA
acattctatatatttccatctttgaggatttatctaatacatagttgggcagggtttaattctgagagatttgaaatacactgtcctaaagggtatagaagagagttgccaggtggggcg

SEQ ID NO: 13295 - DNA, 120 bp, synthetic construct
  misc_feature 1..120: note = Artificially Synthesized Probe
  source 1..120: mol_type = other DNA
agtagatctcaaagttccctactctactaatcactggtataacctggaaagaatttattgttggttcaacatagctaaggagtggcatgaagttctgtagctgatgtgggaagtaccttg

SEQ ID NO: 13296 - DNA, 120 bp, synthetic construct
  misc_feature 1..120: note = Artificially Synthesized Probe
  source 1..120: mol_type = other DNA
ctcccttttcttactcatcctccatccactatattcttactgtaaccttattttaaaagatgacaccattccaccatgctcccacttcactgttccataagctagccacctgtgttatca

SEQ ID NO: 13297 - DNA, 120 bp, synthetic construct
  misc_feature 1..120: note = Artificially Synthesized Probe
  source 1..120: mol_type = other DNA
aaagggtctgcactgaaaactgaatttctctcaactttcagaatgacagtttgtctctgctaggacaactgctgtcacctattcctaatgtttgtttcaagagattgccaaggtttatat

SEQ ID NO: 13298 - DNA, 120 bp, synthetic construct
  misc_feature 1..120: note = Artificially Synthesized Probe
  source 1..120: mol_type = other DNA
aaacattgatagggatttcctcctctaagtagtttgcagctttaaccatgataagtgtagtggagtgtgatataggcaaaaacaaacagtttctcctgctgttctgtcacaacacatctg

SEQ ID NO: 13299 - DNA, 120 bp, synthetic construct
  misc_feature 1..120: note = Artificially Synthesized Probe
  source 1..120: mol_type = other DNA
atggtgaactgcaacatacataaagaaaaggacacagaacatatgtaggagatcatgaggaaagaccaagcaaacatacatactcatcacccaggtcaagaaacagaacacttcaaagtc

SEQ ID NO: 13300 - DNA, 120 bp, synthetic construct
  misc_feature 1..120: note = Artificially Synthesized Probe
  source 1..120: mol_type = other DNA
aatataataatgcgatatgtattttttcatttttttcagcattacctgtaactgcatgtattcatagttcatcagttttggcttcatagcactgtagaaatataacatgagccatatatg

SEQ ID NO: 13301 - DNA, 120 bp, synthetic construct
  misc_feature 1..120: note = Artificially Synthesized Probe
  source 1..120: mol_type = other DNA
aataagtactgttccgtaccagaatacacattcaaggatgtttatagttaaactgtttacaatacccccaaacagagataacccaaatgtctgagcagaatgggttgtggctagaggcca

SEQ ID NO: 13302 - DNA, 120 bp, synthetic construct
  misc_feature 1..120: note = Artificially Synthesized Probe
  source 1..120: mol_type = other DNA
tcatggtgtttattgccacaattgtctatataatgggagtgaacccaactgctcagtcttctggatctctatatggttcacaaatatatgccctctgcaaccaattttatacacctgcag

SEQ ID NO: 13303 - DNA, 120 bp, synthetic construct
  misc_feature 1..120: note = Artificially Synthesized Probe
  source 1..120: mol_type = other DNA
gtctgattctagccatgctgatgggtgagaagtgaagtggtgctttattgtgattttgattcgtattttctttatagctaatgttattagctatatagtcatgtacttattggccatttc

SEQ ID NO: 13304 - DNA, 120 bp, synthetic construct
  misc_feature 1..120: note = Artificially Synthesized Probe
  source 1..120: mol_type = other DNA
accgctgggattataggcatcttttcactttcttgatggtgtcctttgcataaaagcttttagttttgggccgggcatggtagctcacgcctgtaatcccagcactttggaaggccaagg

SEQ ID NO: 13305 - DNA, 120 bp, synthetic construct
  misc_feature 1..120: note = Artificially Synthesized Probe
  source 1..120: mol_type = other DNA
ccttgtttttccttttttcttacactaactcaggagttcccattcctgaatgagtcactcctttggagttagacctctagtatctgtctaccattatttagaagactgaaggttttccct

SEQ ID NO: 13306 - DNA, 120 bp, synthetic construct
  misc_feature 1..120: note = Artificially Synthesized Probe
  source 1..120: mol_type = other DNA
gattgatagttcctaacattaggcattttctgaggattgagtcaagcagtatgtacgtgtgtgtacatttgctggccttagcccagttagtgtgggttaggttttatgatatgtctgaaa

SEQ ID NO: 13307 - DNA, 120 bp, synthetic construct
  misc_feature 1..120: note = Artificially Synthesized Probe
  source 1..120: mol_type = other DNA
gcctttgcaaaacaaaaactacttcttccctctactcccttttatttttctgcttatcattttggagataaacagaaaccattgccaaaggtgctctcgtgggtcaagattggcaagagt

SEQ ID NO: 13308 - DNA, 120 bp, synthetic construct
  misc_feature 1..120: note = Artificially Synthesized Probe
  source 1..120: mol_type = other DNA
ggtagctgccgggcagagacgctcctcacttcccagacagagtggctgccgggcggaggggctcctcacttctcatatggggcggttgccaggcggagggtctcctcacttctcagacgg

SEQ ID NO: 13309 - DNA, 120 bp, synthetic construct
  misc_feature 1..120: note = Artificially Synthesized Probe
  source 1..120: mol_type = other DNA
ttaccaagcttcctatatgatgtgatttgctgaaagcctggaaagttcctctttaaagatgcctcccaaatgagtgttagtaaactgtttttagagctttttagaggccaggtgtggtgg

SEQ ID NO: 13310 - DNA, 120 bp, synthetic construct
  misc_feature 1..120: note = Artificially Synthesized Probe
  source 1..120: mol_type = other DNA
agatagatgaaatttttttctggttaattaaggagcaaaaatgaagcagtcttaggaaagccaggaaggctgtggtatgtattcaccactgagacgatagttcttatgtccctgcccttg

SEQ ID NO: 13311 - DNA, 120 bp, synthetic construct
  misc_feature 1..120: note = Artificially Synthesized Probe
  source 1..120: mol_type = other DNA
cctgataatgtggccatcgctgtggaattgtgtcatcctgcatctaaactgttcacagtggagtagattagggagttttcttccttttggtcatgagaaattaatatcaaaacaatctct

SEQ ID NO: 13312 - DNA, 120 bp, synthetic construct
  misc_feature 1..120: note = Artificially Synthesized Probe
  source 1..120: mol_type = other DNA
tctgcccttcttagggctttttttcccccttcctttttctggatatcttgttccttgtaaaataaacagctcatgtttgcacgctgcttggtttttaacctggtcttttatagtcactca

SEQ ID NO: 13313 - DNA, 120 bp, synthetic construct
  misc_feature 1..120: note = Artificially Synthesized Probe
  source 1..120: mol_type = other DNA
caccatgcctggcctggggtactttctttaatcatctttttcctttcctatttcttattctaaattggaagtatgctcatactcccttaaatttttttttttacttttgttattatttat

SEQ ID NO: 13314 - DNA, 120 bp, synthetic construct
  misc_feature 1..120: note = Artificially Synthesized Probe
  source 1..120: mol_type = other DNA
tctttatgcactcttgctagtgtttgtgtaagataaatttctagaactagtcattgagtgtgcacacttaaaattttactaggttagctgggcatggtagctcgactctagtcccagcta

SEQ ID NO: 13315 - DNA, 120 bp, synthetic construct
  misc_feature 1..120: note = Artificially Synthesized Probe
  source 1..120: mol_type = other DNA
tgtcagtccttggtacattttaacatccttgattggtgtaatgttcctctctcatatttcttgtttttattttcgcccaacctagacctttaagatcaccagaagctttagaccaccaga

SEQ ID NO: 13316 - DNA, 120 bp, synthetic construct
  misc_feature 1..120: note = Artificially Synthesized Probe
  source 1..120: mol_type = other DNA
gttttatattaacagaaagcattttcatccacatgcctggggtcacatatgggtgacaaagccaggattagaaccctaactgagcatttccatgccagtagattcttaggaaaaacctta

SEQ ID NO: 13317 - DNA, 120 bp, synthetic construct
  misc_feature 1..120: note = Artificially Synthesized Probe
  source 1..120: mol_type = other DNA
acctgcatgtagtgtcttggcatttgcctttttacgcagagttaggttatagattaatacatgttgatggagttgaagtccatctgatgtcgccattgtctggtcctctattttatcaca

SEQ ID NO: 13318 - DNA, 120 bp, synthetic construct
  misc_feature 1..120: note = Artificially Synthesized Probe
  source 1..120: mol_type = other DNA
tgaggcatagtcctgaggaagtatagtctattgcgtgatcattagtgtccttttcacaaatgactaaccctttatagatatgacaagccaaagtgccttctctcctttagggaaagatgt

SEQ ID NO: 13319 - DNA, 120 bp, synthetic construct
  misc_feature 1..120: note = Artificially Synthesized Probe
  source 1..120: mol_type = other DNA
gtttaagtaaggggccttgaatgagatcattggtaagcctcactgagtacaaggtttttctacctcatccccttccagagctctaataacttattgactctcagggaatttcagaattta

SEQ ID NO: 13320 - DNA, 120 bp, synthetic construct
  misc_feature 1..120: note = Artificially Synthesized Probe
  source 1..120: mol_type = other DNA
ctatattattactgtttctttggacagcgtgcagttgggtaggggcaatttgttttctaaatcctaaatgccatctgagcaaggtaaaataaccagacatgttcaaacctggtccacgat

SEQ ID NO: 13321 - DNA, 120 bp, synthetic construct
  misc_feature 1..120: note = Artificially Synthesized Probe
  source 1..120: mol_type = other DNA
ttcaaaatggggaggagtttaagacaatgagaatggtctcctttgttacaaagaccagtcaaaatacccatccaagatgggtacttcaagccatgtttgaattcttgaggtggcagtttt

SEQ ID NO: 13322 - DNA, 120 bp, synthetic construct
  misc_feature 1..120: note = Artificially Synthesized Probe
  source 1..120: mol_type = other DNA
accgcacctggcctagagaaatctttgatttgtgttttcatcctgctttcttctgtccttaatttcttagagatatcctcaagttacttaagggaaaattgttacaaagacactttgctg

SEQ ID NO: 13323 - DNA, 120 bp, synthetic construct
  misc_feature 1..120: note = Artificially Synthesized Probe
  source 1..120: mol_type = other DNA
caaatatattttgcctttgcctctagactgttggagtctggcatcagctggctcaggatttaaaaaaaaaaatggaatgtttcatgaatttgggtgctgttcttgcccaaaggccatgct

SEQ ID NO: 13324 - DNA, 120 bp, synthetic construct
  misc_feature 1..120: note = Artificially Synthesized Probe
  source 1..120: mol_type = other DNA
cccactggtttcgcagttgctgccaaattccactttcagagggaaatgattctattcctttctgtctctgaatgttaaacaatcaagaatacccctatgtactttgaggggtaggtaaat

SEQ ID NO: 13325 - DNA, 120 bp, synthetic construct
  misc_feature 1..120: note = Artificially Synthesized Probe
  source 1..120: mol_type = other DNA
gtagctggcactacaagcacacgtaccaaaccctaaaatgccattgatcctatcacaaagctagagcggttctacccttttgaatagcagctctttttcacagaaatatctgtagattta

SEQ ID NO: 13326 - DNA, 120 bp, synthetic construct
  misc_feature 1..120: note = Artificially Synthesized Probe
  source 1..120: mol_type = other DNA
gggggaagtaggacttgattgctgtttcattttaatgcctctccgggcctgatagcttttaagaaagggcttacattcctcagataagaagaacctgtatatgtatttcacattaaggca

SEQ ID NO: 13327 - DNA, 120 bp, synthetic construct
  misc_feature 1..120: note = Artificially Synthesized Probe
  source 1..120: mol_type = other DNA
attttcttcagtgtcttcccccttttcattacaagataaataataactatctcttggggttttttaaggttaaaaatgtgtctgcaggcacacaggacgtgccttcacccccatctgact

SEQ ID NO: 13328 - DNA, 120 bp, synthetic construct
  misc_feature 1..120: note = Artificially Synthesized Probe
  source 1..120: mol_type = other DNA
agtgaacgtctggcctagggtaggtgtcatatgataattgaaatggtatctctgtggtggaaacacttaccctaaagctcaattctaattccacctaatgactagtgagagaagactatt

SEQ ID NO: 13329 - DNA, 120 bp, synthetic construct
  misc_feature 1..120: note = Artificially Synthesized Probe
  source 1..120: mol_type = other DNA
ggcggcggttacagtgagctgagatcacaccagtgcactccagcctgcgtgacaaagtgaaactctgtctcaaaaaaaaaaacaaaaggccggacgcggtggctcacccctgtaatccca

SEQ ID NO: 13330 - DNA, 120 bp, synthetic construct
  misc_feature 1..120: note = Artificially Synthesized Probe
  source 1..120: mol_type = other DNA
atttttaccatgtaaattttattttagtttctacactttattgttaaaaactaagatacagactgggtgcagtggcttatgcctgtaatcccaccactttgggaggctgcagtgagctgc

SEQ ID NO: 13331 - DNA, 120 bp, synthetic construct
  misc_feature 1..120: note = Artificially Synthesized Probe
  source 1..120: mol_type = other DNA
ccccaatgcccgactcctgattagtgggccatgatatatgagatttactctgagtgcatagttgttttggtattcagacttgatcttgctgttgatttcaattgtgaatgatttggagaa

SEQ ID NO: 13332 - DNA, 120 bp, synthetic construct
  misc_feature 1..120: note = Artificially Synthesized Probe
  source 1..120: mol_type = other DNA
taatgtcatcactttctatttctccacagattttaaaacataaagatactggccaaagtacattgattcccccacccccccttaaaatactagcataccagagctgggcatagtggctca

SEQ ID NO: 13333 - DNA, 120 bp, synthetic construct
  misc_feature 1..120: note = Artificially Synthesized Probe
  source 1..120: mol_type = other DNA
acttatgccccagaattttttttgaaggtctggaaagtgcaaacacgatgcttcattttagaacccagatgaatgggtgaatgggagtggtactaagagatactaatgcacaatatctcc

SEQ ID NO: 13334 - DNA, 120 bp, synthetic construct
  misc_feature 1..120: note = Artificially Synthesized Probe
  source 1..120: mol_type = other DNA
aagctttcaaagaaggctgactccttgcattgctaaatgagaccattgtttggtagtaataggctggtaggatgatgttaggacttttatgcaagttagaggagttatagaagcccagtt

SEQ ID NO: 13335 - DNA, 120 bp, synthetic construct
  misc_feature 1..120: note = Artificially Synthesized Probe
  source 1..120: mol_type = other DNA
catgtcaggtgttcaggacaattactgaattgaaaacacatgcataagaatccttcttttctgattacacacagcatcagtgaaggcagagaaacaacccatgatcaacaatgccatgac

SEQ ID NO: 13336 - DNA, 120 bp, synthetic construct
  misc_feature 1..120: note = Artificially Synthesized Probe
  source 1..120: mol_type = other DNA
tctacctcaaagaagaggcatagtacctggcagttttggcagagtgtctaggaacttgttaatcattgactcatggagaaagtcacattttctctccattagaagtaacattagcatagc

SEQ ID NO: 13337 - DNA, 120 bp, synthetic construct
  misc_feature 1..120: note = Artificially Synthesized Probe
  source 1..120: mol_type = other DNA
gcctgtagaaaagaatgatcactgttttcctgacagcctttgtagagtaagtccctggcacaggtcaagtaaacacctcttatagatcagcctgaactttttaaaatgaaatctgagatc

SEQ ID NO: 13338 - DNA, 120 bp, synthetic construct
  misc_feature 1..120: note = Artificially Synthesized Probe
  source 1..120: mol_type = other DNA
agacagttttttgtgtggtgttggctggttttttccttagcacccttttgtgacaaagtttgaagtggagagaatgtttggcagtaaccatgtctttgaactttggcagtaaccactttg

SEQ ID NO: 13339 - DNA, 120 bp, synthetic construct
  misc_feature 1..120: note = Artificially Synthesized Probe
  source 1..120: mol_type = other DNA
tgagatcccctattcactgatgattctgatactttatcttcccctctcccctcaagagtttttggcctggcttagccatctatctgtaaaatattcacctaacttgtatcacggaagatt

SEQ ID NO: 13340 - DNA, 120 bp, synthetic construct
  misc_feature 1..120: note = Artificially Synthesized Probe
  source 1..120: mol_type = other DNA
tgctaaggatacatatgtagtcattttctctctcaccttttagggaatatccacctatcacttcagatcaacaaagacaactgtacaagaggaattttgacactggcctacaggaataca

SEQ ID NO: 13341 - DNA, 120 bp, synthetic construct
  misc_feature 1..120: note = Artificially Synthesized Probe
  source 1..120: mol_type = other DNA
cccgtcttagcctcccaaagtgctgggattacaggcgtgagccaccgcgcccagcccctacaaagcactattctatgtacatctatcctttcctatttaaaataaaatagccaggctggg

SEQ ID NO: 13342 - DNA, 120 bp, synthetic construct
  misc_feature 1..120: note = Artificially Synthesized Probe
  source 1..120: mol_type = other DNA
atactgtgaattataatccaaggctgctttattttgtagctctaattgttctcgctttgacggttgggaactttcagttgcttcccgtgtccctttgacatactcttattgtggggtttt

SEQ ID NO: 13343 - DNA, 120 bp, synthetic construct
  misc_feature 1..120: note = Artificially Synthesized Probe
  source 1..120: mol_type = other DNA
caaagttgcaaaattgccctccagagagactgcaccaactgtgtctccctcttgatacaatacaggactcatttgatgcacatctcattaaatattctgccatttttcagttgaggtgat

SEQ ID NO: 13344 - DNA, 120 bp, synthetic construct
  misc_feature 1..120: note = Artificially Synthesized Probe
  source 1..120: mol_type = other DNA
gccccagtaaacatattcctttgtgtctgtcgttaataggctgctgctgatgaatacaatagactgaagcaagtgaagggagtaagtatccgagattgttcttttaggaagaactttctt

SEQ ID NO: 13345 - DNA, 120 bp, synthetic construct
  misc_feature 1..120: note = Artificially Synthesized Probe
  source 1..120: mol_type = other DNA
aaaatattgcagcttcatacatatttgtaaatgtttgagcgtagaagtgatgggcatttgtctatccagccttagtagatactgtcaaatggccttccaaagtacttgtaccagtttaca

SEQ ID NO: 13346 - DNA, 120 bp, synthetic construct
  misc_feature 1..120: note = Artificially Synthesized Probe
  source 1..120: mol_type = other DNA
atggttggagactatgatagacagaaaacatagaaggctgatgccaagttgtttgagaaattaagtatctgacatctctgcaatcttctcagaaggcaaatgactttggaccataacccc

SEQ ID NO: 13347 - DNA, 120 bp, synthetic construct
  misc_feature 1..120: note = Artificially Synthesized Probe
  source 1..120: mol_type = other DNA
tataaggtattaaacctggtgttttctttccataataacctgtttgatgttattagtgctgttaacatacagcaatggaaaaccacactcaggagttgtatctgttgttgtttatactcc

SEQ ID NO: 13348 - DNA, 120 bp, synthetic construct
  misc_feature 1..120: note = Artificially Synthesized Probe
  source 1..120: mol_type = other DNA
ggattctcttgatgagcacctttaactgatttttctgttaaagttttaacaatttgttcttggaagtcagttcgtgaaggcaagtttgtcagtattttcacaaaactattcagctgaatc

SEQ ID NO: 13349 - DNA, 120 bp, synthetic construct
  misc_feature 1..120: note = Artificially Synthesized Probe
  source 1..120: mol_type = other DNA
ggctgttgtcacactagcaagtggcaaaacaagggattaggatcttagtctcttcaactgttagattctatacttccatcctgtgttgactttgttaatggattggataatgtgagatca

SEQ ID NO: 13350 - DNA, 120 bp, synthetic construct
  misc_feature 1..120: note = Artificially Synthesized Probe
  source 1..120: mol_type = other DNA
gctacccccatcttccaaagccagaaggtgaaactttaacaagttttctaaaagcaaattgtgttttttaaaagtgcatgtgtcatccaatcccatatgattgatctgtgctgggtgcag

SEQ ID NO: 13351 - DNA, 120 bp, synthetic construct
  misc_feature 1..120: note = Artificially Synthesized Probe
  source 1..120: mol_type = other DNA
ttcccagtgtcgggatctgttcataaaatgccttccagttgcacaggtcaggtgcacaccttacaccttcacagaactctgaggggtgcaaaggcagctggagattctacttgtattcct

SEQ ID NO: 13352 - DNA, 120 bp, synthetic construct
  misc_feature 1..120: note = Artificially Synthesized Probe
  source 1..120: mol_type = other DNA
agctgggatttgaacccaggaccctctgcgccctgacagccctcaatatattgggctttggaccacatgccttccttcccatagagctttctacaggcaggcgtccctccaggccccatt

SEQ ID NO: 13353 - DNA, 120 bp, synthetic construct
  misc_feature 1..120: note = Artificially Synthesized Probe
  source 1..120: mol_type = other DNA
aaaagtaaggtctgcccagaaacctcggggcttttcagagtccagggattttgtaggtcgtgggcctgtttgtcagaatgggacaggggtggcttccttttgtactgcatgcgtgagtgt

SEQ ID NO: 13354 - DNA, 120 bp, synthetic construct
  misc_feature 1..120: note = Artificially Synthesized Probe
  source 1..120: mol_type = other DNA
gtaccctgatgtctgtgaggtgcatgggagaggcagcgtccatactccccgcttccctcggggtcctggggagtggcagcaaaaagaccagcgagccttcggagaattataactttatgt

SEQ ID NO: 13355 - DNA, 120 bp, synthetic construct
  misc_feature 1..120: note = Artificially Synthesized Probe
  source 1..120: mol_type = other DNA
tgctcagtcctgcagtcaactaggactttctgatcaactcagttgtaggaaatatctttcctacccgatggactgttctgtttgaattgagaaaatgctgagaccccactgggttgatct

SEQ ID NO: 13356 - DNA, 120 bp, synthetic construct
  misc_feature 1..120: note = Artificially Synthesized Probe
  source 1..120: mol_type = other DNA
gtgtccccaggactagagctgggttttgctgaacactgtgtcttgggatcttgggtcctagatactagattttggaaatctatttgtgcattcctttgttttgtaactaattctcaatta

SEQ ID NO: 13357 - DNA, 120 bp, synthetic construct
  misc_feature 1..120: note = Artificially Synthesized Probe
  source 1..120: mol_type = other DNA
tgtccccaggattcacgtgtttttcaagggctaacggaaatgctgagatctaaaagcatgtttattgctgccaaggcctgacgatgaaacttcaagtcaaattagtaagctttattaatg

SEQ ID NO: 13358 - DNA, 120 bp, synthetic construct
  misc_feature 1..120: note = Artificially Synthesized Probe
  source 1..120: mol_type = other DNA
atccctagtatccttgcatattgtttcgcctgcccagaacatgtgtgtttgaggttgtcttgctctctcatataacatgtgcctcttgctatctcttgtgtaacatatatgttctatata

SEQ ID NO: 13359 - DNA, 120 bp, synthetic construct
  misc_feature 1..120: note = Artificially Synthesized Probe
  source 1..120: mol_type = other DNA
tctgcggggaggacttttagggggtaacaggatctgtgcagcgtgcaggatctttgcagtggggccaggatctgtgcagtgggtaggatctacattgggagtcagtgtctgttcaaggga

SEQ ID NO: 13360 - DNA, 120 bp, synthetic construct
  misc_feature 1..120: note = Artificially Synthesized Probe
  source 1..120: mol_type = other DNA
tttgccgcaggcacaagggagggagaagctgtcctgggttctatggttatgaacatgtcagggcagaatgacacagaacacacaagaagttcaagggaacacattatgagattgtgaaca

SEQ ID NO: 13361 - DNA, 120 bp, synthetic construct
  misc_feature 1..120: note = Artificially Synthesized Probe
  source 1..120: mol_type = other DNA
tgtctgcatttctgagtgtgtacccatccatgtctctgtgtgttcacccgtatgcctgtctgggcatctgtgtgtgtgtttgcaggaatgtgtgtccccatgtgtcccttgagtgtctct

SEQ ID NO: 13362 - DNA, 120 bp, synthetic construct
  misc_feature 1..120: note = Artificially Synthesized Probe
  source 1..120: mol_type = other DNA
cactgatctggggcccagctgtggcagaggtgccctgggcactgatctggggcccagctgtggcagaggtgccctgggcgtgtctccaagtgacgaacagacccgggtttcaccccgtct

SEQ ID NO: 13363 - DNA, 120 bp, synthetic construct
  misc_feature 1..120: note = Artificially Synthesized Probe
  source 1..120: mol_type = other DNA
tgagtctctaaaccaaatgggaccgtgtccttgcgggtgcatgtgtgtctttgtgttctgtgagtccctgtctgtgcacacgtgtcctcgtgtctccatgtgtccctgcatgtgcatgtg

SEQ ID NO: 13364 - DNA, 120 bp, synthetic construct
  misc_feature 1..120: note = Artificially Synthesized Probe
  source 1..120: mol_type = other DNA
accctgacctctggtttgagctgtggaccaggctctgtgtcaagctgtctgcttgaatgacctcatgagatcccacagcggccctgggagagtcttttttcagcccattccctagatggg

SEQ ID NO: 13365 - DNA, 120 bp, synthetic construct
  misc_feature 1..120: note = Artificially Synthesized Probe
  source 1..120: mol_type = other DNA
ggcagtgtggggggcagtgtgggggcagtgtgtgggtcagtgtgggggcagtgtgtgggtcagtgtggggggcagtgtggggggcagtgtgggggtcagtgtgggggcagtgtgggggca

SEQ ID NO: 13366 - DNA, 120 bp, synthetic construct
  misc_feature 1..120: note = Artificially Synthesized Probe
  source 1..120: mol_type = other DNA
gaacccttcacgtggattgtggattgggcaggtagaagatggagatgacttaagcagaaagggagggttttctgggcagaggaaatgatggacctcaaatctatccagagaagagagaac

SEQ ID NO: 13367 - DNA, 120 bp, synthetic construct
  misc_feature 1..120: note = Artificially Synthesized Probe
  source 1..120: mol_type = other DNA
cttcctctatagagtggggatcaaagtagtatttttgcaaatcttcaatgacataaattccccctgaagagcttggcacaggtatttgccatgatcattgtcattgttgttgtctcttcg

SEQ ID NO: 13368 - DNA, 120 bp, synthetic construct
  misc_feature 1..120: note = Artificially Synthesized Probe
  source 1..120: mol_type = other DNA
caccatcaccaccataatcccccccaactattacaaccattaacttatttaacaaaaatttattaatcaccaacgattttcccagccctttccagcaccatttcaggtgcttggatacac

SEQ ID NO: 13369 - DNA, 120 bp, synthetic construct
  misc_feature 1..120: note = Artificially Synthesized Probe
  source 1..120: mol_type = other DNA
cctgggcttctggccgtttgggaatgcgctgtgcaagacagtcattgccattgactactacaacatgttcaccagcaccttcaccctaactgccatgagtgtggatcgctatgtagccat

SEQ ID NO: 13370 - DNA, 120 bp, synthetic construct
  misc_feature 1..120: note = Artificially Synthesized Probe
  source 1..120: mol_type = other DNA
tagtgacatcatgggacaggtcaaagcattagggccacctccatggccccagacagactaaagctgccctcctggtgcagggccgaggggacacaaggacctacctggaagcagctgaca

SEQ ID NO: 13371 - DNA, 120 bp, synthetic construct
  misc_feature 1..120: note = Artificially Synthesized Probe
  source 1..120: mol_type = other DNA
atcacccttcctggtctacagatggaagctgcaggttggtgactttgcaaatgcacttcctacagatgaactattaaaagacctgcaacattgaaaaaactcattttttccaccaaaacc

SEQ ID NO: 13372 - DNA, 120 bp, synthetic construct
  misc_feature 1..120: note = Artificially Synthesized Probe
  source 1..120: mol_type = other DNA
attttttcctttcccagtagagctccatgacattgccagagatgtgggttagaaagagatcagtaagagaacatctccagcctcatctacgttctaagatgagaacaaaataattactac

SEQ ID NO: 13373 - DNA, 120 bp, synthetic construct
  misc_feature 1..120: note = Artificially Synthesized Probe
  source 1..120: mol_type = other DNA
gaaggattctgattgcgattagtgttccatagattattttgtcttttgtctgaagtgatgctgaatacaacctcagtcaccgaatttctcctcttgggagtgacagacattcaagaactg

SEQ ID NO: 13374 - DNA, 120 bp, synthetic construct
  misc_feature 1..120: note = Artificially Synthesized Probe
  source 1..120: mol_type = other DNA
gtgaagggggccttgggtagagtgatcagaaggctttgatttgaataaaccagagaactctactgaggcataaataaccagcaatgaaaaagtagagatgtgtaattttactgcttctca

SEQ ID NO: 13375 - DNA, 120 bp, synthetic construct
  misc_feature 1..120: note = Artificially Synthesized Probe
  source 1..120: mol_type = other DNA
aatgttagcaagaataacccttgttataagtattatgctggcaacaattgtcgagtcctcctcctcactcttctgggctaatttgttcttttctccccatttaatagtccttttccccat

SEQ ID NO: 13376 - DNA, 120 bp, synthetic construct
  misc_feature 1..120: note = Artificially Synthesized Probe
  source 1..120: mol_type = other DNA
ggttgaattccaagaataatctatggcatgaaagattttacctgtcaacagtggctggctcttcatggttgctacaatgagtgtgtaagattctgaaggactcctttaataagcctaaac

SEQ ID NO: 13377 - DNA, 120 bp, synthetic construct
  misc_feature 1..120: note = Artificially Synthesized Probe
  source 1..120: mol_type = other DNA
aaaacttcttgaaacagtacttattttctctcctccatacacaattgaaatggctctcaactcatgcccagaagtcagtgttcagtctctcacctggcagatagcaacttacaaagatgc

SEQ ID NO: 13378 - DNA, 120 bp, synthetic construct
  misc_feature 1..120: note = Artificially Synthesized Probe
  source 1..120: mol_type = other DNA
tactttaatacgttgctcgatgggatcttacaggtcttcattcacccctttcctgctcacacaaccacaacctgcagctattacctattgttaggcttaaaataattacttggcttcatt

SEQ ID NO: 13379 - DNA, 120 bp, synthetic construct
  misc_feature 1..120: note = Artificially Synthesized Probe
  source 1..120: mol_type = other DNA
tatttatgttgttttttgtattctatggaggaatcgtgtttggaaaccttcttattgtcataacagtggtatctgactcccaccttcactctcccatgtacttcctgctagccaacctct

SEQ ID NO: 13380 - DNA, 120 bp, synthetic construct
  misc_feature 1..120: note = Artificially Synthesized Probe
  source 1..120: mol_type = other DNA
acacactgaggaacaaagacatgaagacggcaataagacagctgagaaaatgggatgcacattctagtgtaaagttttagatcttatataactgtgagattaatctcagataatgacaca

SEQ ID NO: 13381 - DNA, 120 bp, synthetic construct
  misc_feature 1..120: note = Artificially Synthesized Probe
  source 1..120: mol_type = other DNA
tgagtggaagtgtgtatatttgtgtgcaagtgtgtactcatatacttccaccttaccaccctagaaaggcatgatgaaaatttaagatagaaggaaaatataaattgaaaaaaaaaaacc

SEQ ID NO: 13382 - DNA, 120 bp, synthetic construct
  misc_feature 1..120: note = Artificially Synthesized Probe
  source 1..120: mol_type = other DNA
gggataattggtttttcttgcaatatctcaagcttcttaaagtgaaagggaagggaagaaccaggagcatgctcttaaaggagaatactatccctatttgggcaactctgacagttgtca

SEQ ID NO: 13383 - DNA, 120 bp, synthetic construct
  misc_feature 1..120: note = Artificially Synthesized Probe
  source 1..120: mol_type = other DNA
cgaaataaagccattgtagctaaaacgtggagcagtcaggcgagggaaggcaaggaaaacagcacttaaaagatttgaagacaaacctgcaggactcggtagtcatttagaacagtggtt

SEQ ID NO: 13384 - DNA, 120 bp, synthetic construct
  misc_feature 1..120: note = Artificially Synthesized Probe
  source 1..120: mol_type = other DNA
gtgccccttggacagggtaagtaggtcccaccgaatgtctgaataatccagtgcaacattgaagctcttttaacttttggttgaactaaaccctagtaaaaactcttgttttagaattgt

SEQ ID NO: 13385 - DNA, 120 bp, synthetic construct
  misc_feature 1..120: note = Artificially Synthesized Probe
  source 1..120: mol_type = other DNA
actccactcccgctacttctctccttccttttcccaataaattacacgttagcacctttgtataaacacaagtaaccatctgtgtgtttcctgtggttttttactgcctattttgactat

SEQ ID NO: 13386 - DNA, 120 bp, synthetic construct
  misc_feature 1..120: note = Artificially Synthesized Probe
  source 1..120: mol_type = other DNA
ataatattttctaacagataattctgcaataacttctcctttagctatgagtccagtcttccccagacacagcaagtggatcttgacttatccaggccacttttcacttctgctgcactg

SEQ ID NO: 13387 - DNA, 120 bp, synthetic construct
  misc_feature 1..120: note = Artificially Synthesized Probe
  source 1..120: mol_type = other DNA
caagtgaacaaaggtctctggttttcctaggcagaggaccctgcggccttccgcagtgtttgtgtccctgattacttgagattagggattggtgatgactcttaacgagcatgctgcctt

SEQ ID NO: 13388 - DNA, 120 bp, synthetic construct
  misc_feature 1..120: note = Artificially Synthesized Probe
  source 1..120: mol_type = other DNA
cctacccactaattttggtatgcttggctctattaggtacatacctaggagtattaattggcatttatggaaaacatctcttcaattcaacaaaagtatgtgcatatacggagggagtgc

SEQ ID NO: 13389 - DNA, 120 bp, synthetic construct
  misc_feature 1..120: note = Artificially Synthesized Probe
  source 1..120: mol_type = other DNA
acatgcccaaatactgaaattgagaacaggagaaaaattaaccttgataacacttcttaaaggagaacctggagatgtagctactccaccacggaagagaaagaagatagtggttgaagc

SEQ ID NO: 13390 - DNA, 120 bp, synthetic construct
  misc_feature 1..120: note = Artificially Synthesized Probe
  source 1..120: mol_type = other DNA
taaagtacttggttcagtgcctatcaagcaccagttaagtgcttgatagacgttagctattattagatgtcttggaatgcttggagtgtaagggagggaaaaaagtgatagctaagctag

SEQ ID NO: 13391 - DNA, 120 bp, synthetic construct
  misc_feature 1..120: note = Artificially Synthesized Probe
  source 1..120: mol_type = other DNA
gatagtacattgccatctccaggaagacttgacggctttgggattttgtttaaacttttataataaggatcctaagactgttgcctttaaatagcaaagcagcctacctggaggctaagt

SEQ ID NO: 13392 - DNA, 120 bp, synthetic construct
  misc_feature 1..120: note = Artificially Synthesized Probe
  source 1..120: mol_type = other DNA
caggtacgtattcatcgtgcagaaaagctaccaggagagcgagacgggccccgagagctccatcatcaccaaggtcaaggggatcaccacgtccgagcacaaagtgtgggacgtggagga

SEQ ID NO: 13393 - DNA, 120 bp, synthetic construct
  misc_feature 1..120: note = Artificially Synthesized Probe
  source 1..120: mol_type = other DNA
actaaacaacccttctgtgcctcctcagccaatttctgggtacgatggccccaaatttcaccatcctcatcaagaacagcatccactaccccaaattccacttctccaagtaagagccgc

SEQ ID NO: 13394 - DNA, 120 bp, synthetic construct
  misc_feature 1..120: note = Artificially Synthesized Probe
  source 1..120: mol_type = other DNA
gttcccattgcaggtttgccaaatactacaagatcaatggcaccaccacccgcacgctcatcaaggcctacgggatccgcattgacgtcattgtgcatggacaggtgcctgcacctgctg

SEQ ID NO: 13395 - DNA, 120 bp, synthetic construct
  misc_feature 1..120: note = Artificially Synthesized Probe
  source 1..120: mol_type = other DNA
actggatcttgctaacattcatgaacaaaaacaaggtctacagccataagaaatttgacaaggtgtgtacgccgagccacccctcaggtagctggcctgtgacccttgcccgtgtattgg

SEQ ID NO: 13396 - DNA, 120 bp, synthetic construct
  misc_feature 1..120: note = Artificially Synthesized Probe
  source 1..120: mol_type = other DNA
tcagcctggtgggagaggagaaaaaaggaagagggataagcgagctgatgtacttaaccatttccctattgttgggcagtaagtttgaaatgttcactactataaaaaatactgcaatga

SEQ ID NO: 13397 - DNA, 120 bp, synthetic construct
  misc_feature 1..120: note = Artificially Synthesized Probe
  source 1..120: mol_type = other DNA
aaataagagtgtcagagaatacatatcttgggcaggtcccagaaagcgtctgccatctcccccactttaattctgtgtactggcctaagggcaaacagctggcaggaaggtggtgtcttt

SEQ ID NO: 13398 - DNA, 120 bp, synthetic construct
  misc_feature 1..120: note = Artificially Synthesized Probe
  source 1..120: mol_type = other DNA
aaaaatacaaaaaaaaaagccagtttccatcagagtaatgagctcccactcttgcaccaagattatgcagaaaaatggtgggagctgggggctgtgcaaaaagcaaggaaactggaagag

SEQ ID NO: 13399 - DNA, 120 bp, synthetic construct
  misc_feature 1..120: note = Artificially Synthesized Probe
  source 1..120: mol_type = other DNA
gaagacatttttgttgcaatatgaaacaaatagtatgactatcctcaggttctgtggcttctgccagccatttcgaagtctggttaaaatcagcagccatgacccctgccttttttgctt

SEQ ID NO: 13400 - DNA, 120 bp, synthetic construct
  misc_feature 1..120: note = Artificially Synthesized Probe
  source 1..120: mol_type = other DNA
gaggttgcttttcactgactatcctttgcaccttctaaactttgaatcatgtaagtattacccagtcaaaatattgtaacttaaatcagctgagcatactgctgctttcagggtggggga

SEQ ID NO: 13401 - DNA, 120 bp, synthetic construct
  misc_feature 1..120: note = Artificially Synthesized Probe
  source 1..120: mol_type = other DNA
aggttaggtcagcatctcatttaagcacctcttggtgggcccagcacacagcatgcgtcaatacatgtttacagctcatatgaatgagtgaaggtgcagccaggttgagggaaaatccaa

SEQ ID NO: 13402 - DNA, 120 bp, synthetic construct
  misc_feature 1..120: note = Artificially Synthesized Probe
  source 1..120: mol_type = other DNA
cccagctgaacgctgccaattcctgagtcagcaaggaatgaaagctgggccaggagaaaggccaccaaggtcagtgagtacctggggtgtggtttgcaagagagtcacagaaccccagtc

SEQ ID NO: 13403 - DNA, 120 bp, synthetic construct
  misc_feature 1..120: note = Artificially Synthesized Probe
  source 1..120: mol_type = other DNA
tcatttgtaaaatggggaagatcggtgtctatctgattcagttgcttacatgagttaacaaatacggagagtacagaggggttccaggcagagagtcagtgctgtggagcagcgcgctgt

SEQ ID NO: 13404 - DNA, 120 bp, synthetic construct
  misc_feature 1..120: note = Artificially Synthesized Probe
  source 1..120: mol_type = other DNA
caccctgcatcctccaccctgcatcctccaccctgcgtcctccacccagtgtcctccaccctgcgtcctccaccctgcatcctccaccctgcatcctccacccagcgtcctccaccctgc

SEQ ID NO: 13405 - DNA, 120 bp, synthetic construct
  misc_feature 1..120: note = Artificially Synthesized Probe
  source 1..120: mol_type = other DNA
aaactccggaaacagcctctgcatggaagaaaatatccgcttttctttcctttactactccagcttccctcagccccggcgcaccaggaccaccaagtccaagaatcccaaaacagaagt

SEQ ID NO: 13406 - DNA, 120 bp, synthetic construct
  misc_feature 1..120: note = Artificially Synthesized Probe
  source 1..120: mol_type = other DNA
acggtaaaactctctctttttgatgaggtagatgagtaccaggtcgcagaagaaagcaccctgcaaaacaggggttcctgattcagaatcctagacctctgagagcactgttcatttagg

SEQ ID NO: 13407 - DNA, 120 bp, synthetic construct
  misc_feature 1..120: note = Artificially Synthesized Probe
  source 1..120: mol_type = other DNA
cagagaccaaccccaaacctaaccttgaccaccacctcttcctgcgccattacttccagttcacaggtctgtccccagagggtgctctgattttacccacatcacaagaaagtgatgaat

SEQ ID NO: 13408 - DNA, 120 bp, synthetic construct
  misc_feature 1..120: note = Artificially Synthesized Probe
  source 1..120: mol_type = other DNA
tcagcctttcagtcgggtggttctcagccagctgggattttgctccatcacaactgcaggggagggtgcccctaacatctagtgggtagaaaccgggaatgctcttaaacatcctacaat

SEQ ID NO: 13409 - DNA, 120 bp, synthetic construct
  misc_feature 1..120: note = Artificially Synthesized Probe
  source 1..120: mol_type = other DNA
gcctaatcctgccctcttttagcagaagtagagatagagactttagaagttcagggactcacctgggatcccagggatatcccagccacgcctcggctggggactgacctaaacccatgc

SEQ ID NO: 13410 - DNA, 120 bp, synthetic construct
  misc_feature 1..120: note = Artificially Synthesized Probe
  source 1..120: mol_type = other DNA
acgcacagcggggcccccagggaccctcccaacgtcccccgccccccgcccagcctcagaacaggagaacgcacagcggggcccccagggaccctcccaacgtccccctcccagcctgag

SEQ ID NO: 13411 - DNA, 120 bp, synthetic construct
  misc_feature 1..120: note = Artificially Synthesized Probe
  source 1..120: mol_type = other DNA
aacgtccccctcccagcctgagaacaggagaacacacagctgggcccccagggaccctcccaacgtcccccgccccccgcccagcctcagaacaggagaacacacagctgggcccccagg

SEQ ID NO: 13412 - DNA, 120 bp, synthetic construct
  misc_feature 1..120: note = Artificially Synthesized Probe
  source 1..120: mol_type = other DNA
ggacttagaaggactcccggaaccctgactctcagcagccccaggagtggcttgcagaccttctcactgagccaaaaacaaagaggcatccagctatttgaaatccctgccagacattcc

SEQ ID NO: 13413 - DNA, 120 bp, synthetic construct
  misc_feature 1..120: note = Artificially Synthesized Probe
  source 1..120: mol_type = other DNA
gaaagtttattgtccagacggctaaaagaatagtgagggtggcactcagaggcagctttatcaagatcacagttccattcaatattaattcctatcacgccacccttgataaaagagaga

SEQ ID NO: 13414 - DNA, 120 bp, synthetic construct
  misc_feature 1..120: note = Artificially Synthesized Probe
  source 1..120: mol_type = other DNA
caagcccacgtacttggagaagttgaatttggggaaacggatgtggttctttatgaaaatggtgaagtcttcggcctccttcaggaatggctccctgaaaaccaacccagaacagcctgt

SEQ ID NO: 13415 - DNA, 120 bp, synthetic construct
  misc_feature 1..120: note = Artificially Synthesized Probe
  source 1..120: mol_type = other DNA
tttggggataatggggccacaaacttggtatactctgcccatctgctcatggaccccacagtccccaggtagatgtccattgatagatctcctccagactcacaaaccccaactgcccca

SEQ ID NO: 13416 - DNA, 120 bp, synthetic construct
  misc_feature 1..120: note = Artificially Synthesized Probe
  source 1..120: mol_type = other DNA
aagatccgaggtgttggtgaaggccacgcccttgactttggtgatgacagcactctgcagggaggtgtcgacgtcttggtaacccttctttatcaggaacacccatctgtgggaaggggg

SEQ ID NO: 13417 - DNA, 120 bp, synthetic construct
  misc_feature 1..120: note = Artificially Synthesized Probe
  source 1..120: mol_type = other DNA
cccaggtgacagggtgagacccagcctcaaaaacaacaacaaaaaaatgaaataagagtacaaatcccatacttgttgacactaaaaacgcaagcaataaaagaaaaaataggtaagttg

SEQ ID NO: 13418 - DNA, 120 bp, synthetic construct
  misc_feature 1..120: note = Artificially Synthesized Probe
  source 1..120: mol_type = other DNA
aaaaattgaaaaattgaaaacatgttcacaaaaaacttgtacatgaatgttctcagaagcattcttcttctttttttttttttgagacagtcttgctctgctgcccaggctgctggagtg

SEQ ID NO: 13419 - DNA, 120 bp, synthetic construct
  misc_feature 1..120: note = Artificially Synthesized Probe
  source 1..120: mol_type = other DNA
gatttccacatccaggactgcgagaattaaatttctattgttcaagcaaaagcaactccatttattcattcatgcgttcatttcacatctattccctaagcagttaagtgctgctggggc

SEQ ID NO: 13420 - DNA, 120 bp, synthetic construct
  misc_feature 1..120: note = Artificially Synthesized Probe
  source 1..120: mol_type = other DNA
ttcccaaaagtccgcggagaacttacacgaccaggtacgccaggatggaggcctgcagcagccggtacagcaggcccaccttcttgttcttggcgatgacatacttctcggtcttgtagt

SEQ ID NO: 13421 - DNA, 120 bp, synthetic construct
  misc_feature 1..120: note = Artificially Synthesized Probe
  source 1..120: mol_type = other DNA
acatcatgggctggttataggaattcaatgtgaaaaaatgtgcagatgttggctgagtacttagcacagtggtgggcccatccttggtagtttttatttactcatttaacaaatgctgag

SEQ ID NO: 13422 - DNA, 120 bp, synthetic construct
  misc_feature 1..120: note = Artificially Synthesized Probe
  source 1..120: mol_type = other DNA
ggaggcaggagaccaagaagttggggagaaaaggaaaaagaaaatcacctgacatcatctgaggcgcccccaactcctctgagaatgggtgtgaaggaaatgacaggagctgaagctagc

SEQ ID NO: 13423 - DNA, 120 bp, synthetic construct
  misc_feature 1..120: note = Artificially Synthesized Probe
  source 1..120: mol_type = other DNA
cctccattctccccatgggtctccgttccagaccttcctgtcacttcttatctgttcttaacatagccccagacagcgcctccctcccatctcctgagcagccatcggcctcttcctgaa

SEQ ID NO: 13424 - DNA, 120 bp, synthetic construct
  misc_feature 1..120: note = Artificially Synthesized Probe
  source 1..120: mol_type = other DNA
taaaatgggaaaattaacaccccttcctgggttacggcgaagattgaattatataatgcacacaaagtgtctggcagaggggtcccctttccaatgcaaatcaaagaaaatgactaaagt

SEQ ID NO: 13425 - DNA, 120 bp, synthetic construct
  misc_feature 1..120: note = Artificially Synthesized Probe
  source 1..120: mol_type = other DNA
gggcaaagaggaagaaagaaaaaaaagatgggtagataagaggtaagtggttgcattgagtctttgatcagctttcactgaatacattttccgtgtgaggtggggagaggaatagtcact

SEQ ID NO: 13426 - DNA, 120 bp, synthetic construct
  misc_feature 1..120: note = Artificially Synthesized Probe
  source 1..120: mol_type = other DNA
aagttacaagaagattcagctctggatggtcttatgataacacatgtgggtcacacgcttgagggcatgcacacacctggtgtgaacccccagatgtttatgaaagttccttgtttagga

SEQ ID NO: 13427 - DNA, 120 bp, synthetic construct
  misc_feature 1..120: note = Artificially Synthesized Probe
  source 1..120: mol_type = other DNA
tgagagaatgaaggaaaacaacagcacacagaaccaagagaatgagcctccaggctttggcagagaaacaagagccttggttaagttttggttcggccaggtaggtgtatcataaatgga

SEQ ID NO: 13428 - DNA, 120 bp, synthetic construct
  misc_feature 1..120: note = Artificially Synthesized Probe
  source 1..120: mol_type = other DNA
atcatgaaatctttttgcaacaagagcaggcggaggataaaagggaaagagagaaaaattgagagggatatggagagaaagagaacatactcaaaaacattccaccatcctgacatcagc

SEQ ID NO: 13429 - DNA, 120 bp, synthetic construct
  misc_feature 1..120: note = Artificially Synthesized Probe
  source 1..120: mol_type = other DNA
tgtaaaatgggaagagggatgcctgcctcacagtagcaagacctcatagtgctgccgtgaatgttcagccgatgagacagtgtgtgtagaacgccaggctcacagtagctctcaacagat

SEQ ID NO: 13430 - DNA, 120 bp, synthetic construct
  misc_feature 1..120: note = Artificially Synthesized Probe
  source 1..120: mol_type = other DNA
atcataatgctttatttattctgtcctgtgcatcatggcatggttccctcagattccactcaaaaatcagggtaattcagcaaactcgtattagcatcttctttggcagtggttctcaca

SEQ ID NO: 13431 - DNA, 120 bp, synthetic construct
  misc_feature 1..120: note = Artificially Synthesized Probe
  source 1..120: mol_type = other DNA
cgggaagaataacctgactgctgagtgtgtcttaatgtcttgatcagacttcctgtgactttgagctctgaataaacatttttatattttcaccttttgccgttcatatgcacacaaggc

SEQ ID NO: 13432 - DNA, 120 bp, synthetic construct
  misc_feature 1..120: note = Artificially Synthesized Probe
  source 1..120: mol_type = other DNA
gtcacttcagcctgggaggttgagttgcagtgcactgtgcttaaaaaaagagagagagagacattcaaagacagagggtgtattagtttcctatttgttaaaagaaacacaagacaaatt

SEQ ID NO: 13433 - DNA, 120 bp, synthetic construct
  misc_feature 1..120: note = Artificially Synthesized Probe
  source 1..120: mol_type = other DNA
ccatagtatccgtaaactgtcatgacgctggtgggagtgtcttttagcatgctaatgtattataattagtgtataacgagcagtgaggacgaccagaagtcactctcgtcatcgtcttgg

SEQ ID NO: 13434 - DNA, 120 bp, synthetic construct
  misc_feature 1..120: note = Artificially Synthesized Probe
  source 1..120: mol_type = other DNA
caggagatggaatgaaatctcctcttctgtctacttcagacctcttaggttcttcaaaggctatgtcaaattccatctcctgaaggatcaacatcagaatgttagtgattgtcttgtaaa

SEQ ID NO: 13435 - DNA, 120 bp, synthetic construct
  misc_feature 1..120: note = Artificially Synthesized Probe
  source 1..120: mol_type = other DNA
gggaatttccttgtgggccaattgtgagggaagtatgtagctttttatctttatagttattttatttatgaaccatgagaggcaggtttgagggacccagttcccaggactcttcccttt

SEQ ID NO: 13436 - DNA, 120 bp, synthetic construct
  misc_feature 1..120: note = Artificially Synthesized Probe
  source 1..120: mol_type = other DNA
cacatgtaatcctaagtgtttctgtgaccttatgtggacggagttctgcctctctagggattgtccactgtgaatccactataatttattagctattcttttgtgggtatttagaccatg

SEQ ID NO: 13437 - DNA, 120 bp, synthetic construct
  misc_feature 1..120: note = Artificially Synthesized Probe
  source 1..120: mol_type = other DNA
caattgctccagcaacatttatgatatagtctctactacctccagccatctgcaagcctatttctgtcatagatcaagttgtatgtcctttaagttttatccttcctttgtcttggcctg

SEQ ID NO: 13438 - DNA, 120 bp, synthetic construct
  misc_feature 1..120: note = Artificially Synthesized Probe
  source 1..120: mol_type = other DNA
tcttacttttcactctttatatcttttactttatgtctttttttctcttgctgcagtgcttagaatcatccacacaatgttaaaaagatgtgactttttgatcctaccacgttcctgatt

SEQ ID NO: 13439 - DNA, 120 bp, synthetic construct
  misc_feature 1..120: note = Artificially Synthesized Probe
  source 1..120: mol_type = other DNA
gagactctgctacccatatattacctatgctttaatgtttgtcacactgtcattgacttgctttatggccaattacatagtcacttttttaaatgacccatgacccgtgtgtgctttgct

SEQ ID NO: 13440 - DNA, 120 bp, synthetic construct
  misc_feature 1..120: note = Artificially Synthesized Probe
  source 1..120: mol_type = other DNA
gttctgggattacaagcaattatttacatatttggatttgttctcaccaatcttttatttttatttgtccaatttctccctatgtggccttttctctttccttgcttttttggaaggcag

SEQ ID NO: 13441 - DNA, 120 bp, synthetic construct
  misc_feature 1..120: note = Artificially Synthesized Probe
  source 1..120: mol_type = other DNA
tttgttcacgattctttgttgcacttcagaccattcttatgacatcagatacctccatcctaaactacgccttcagaaattgccttggtgaaaatctgattttaaaatatcggtttttgt

SEQ ID NO: 13442 - DNA, 120 bp, synthetic construct
  misc_feature 1..120: note = Artificially Synthesized Probe
  source 1..120: mol_type = other DNA
aagagatgacacaactgttttttggatgtcactgttgttgacaagtctgcttccaatcgaattgttatttcctcctagataatccgactttcctttctgaatgcctttaagatcctctct

SEQ ID NO: 13443 - DNA, 120 bp, synthetic construct
  misc_feature 1..120: note = Artificially Synthesized Probe
  source 1..120: mol_type = other DNA
attcgctttctgtcagtctcattccctcctgacaaccttacagtacttactccccacggtcagagtaagcactggctgctgtttggtttttacacctgttgggaaaaggagtatattagt

SEQ ID NO: 13444 - DNA, 120 bp, synthetic construct
  misc_feature 1..120: note = Artificially Synthesized Probe
  source 1..120: mol_type = other DNA
tgggaatccagaaatgaataagacagctgagggtgcagccctcatggggcttacaacctatgaatggtagcatcagagaatctactggtaaacaaacaattgcaaatgatactgagttct

SEQ ID NO: 13445 - DNA, 120 bp, synthetic construct
  misc_feature 1..120: note = Artificially Synthesized Probe
  source 1..120: mol_type = other DNA
ttaggatatggatgtatctttttggggaccaccattccacctactacaccccctttgcctgtagatgggctcaacaggaccctctggggttcccacagatctctgggccaacagccactt

SEQ ID NO: 13446 - DNA, 120 bp, synthetic construct
  misc_feature 1..120: note = Artificially Synthesized Probe
  source 1..120: mol_type = other DNA
gatgctccaccctcctctggccaatccgaggtgttctcctaggatttctgaaccttgggcacagtggattggtgttttctcatctcttcctgaagaaacctccatccactcaaagctcct

SEQ ID NO: 13447 - DNA, 120 bp, synthetic construct
  misc_feature 1..120: note = Artificially Synthesized Probe
  source 1..120: mol_type = other DNA
gcatgaaccactgcgccaggccctctattcctttttgatacctcaaatatctataacaaaaagtagataatgacactgtcttatacaagaatatagatagtgttcctcaaattccattat

SEQ ID NO: 13448 - DNA, 120 bp, synthetic construct
  misc_feature 1..120: note = Artificially Synthesized Probe
  source 1..120: mol_type = other DNA
atctattttattggaatgaccttgcagtcatatattcggatgagggaggaaggatttacaaacaaatgtttgctttctcagccaagccatttggacagagtgggggcatgttcagggttg

SEQ ID NO: 13449 - DNA, 120 bp, synthetic construct
  misc_feature 1..120: note = Artificially Synthesized Probe
  source 1..120: mol_type = other DNA
tctattttacaaaatcagaatttcaccaattgtgggttcagatgtgttatcctacaaactggaaaccctactgagtcacccagttaatacacagcagagaggaaattcgtgggcaggtct

SEQ ID NO: 13450 - DNA, 120 bp, synthetic construct
  misc_feature 1..120: note = Artificially Synthesized Probe
  source 1..120: mol_type = other DNA
tgggtgaatttggttgtgacttttggagtaaaaggcaaaaatccactcctgagatcaaataattaattgatgtggaagcaagatgtgtaaactgcactgggttaaagaagtgatgggggc

SEQ ID NO: 13451 - DNA, 120 bp, synthetic construct
  misc_feature 1..120: note = Artificially Synthesized Probe
  source 1..120: mol_type = other DNA
ggctttttataaagcccttttgcccacatagcctgaacctggtgacggccctctgaaataagggttattgaaagcatcttcttgttggcaaatctgttttataggtgaagcaatgggcaa

SEQ ID NO: 13452 - DNA, 120 bp, synthetic construct
  misc_feature 1..120: note = Artificially Synthesized Probe
  source 1..120: mol_type = other DNA
caaaaccttaatgagctctcattccaaaatgaaaaccatcatttaaatactcaaaatagcataaagaaaagaaaaccaggcaacatggtaaagggaggtctcaggggagcggtggggtgt

SEQ ID NO: 13453 - DNA, 120 bp, synthetic construct
  misc_feature 1..120: note = Artificially Synthesized Probe
  source 1..120: mol_type = other DNA
gcttctggatggaaggagatggagagcgccatgggagggttttttttttgcatgggcctgacaatcattctgatcctgatcattctgcctggtctattccaagctttttttttttttttt

SEQ ID NO: 13454 - DNA, 120 bp, synthetic construct
  misc_feature 1..120: note = Artificially Synthesized Probe
  source 1..120: mol_type = other DNA
tcattcttaaagtgattaaactgacactgatttggtgacaggtcaacttattgcctccacccaggcatcacctcctccaggaagttctcagggattccctctatcacagctgtctgctat

SEQ ID NO: 13455 - DNA, 120 bp, synthetic construct
  misc_feature 1..120: note = Artificially Synthesized Probe
  source 1..120: mol_type = other DNA
actgttgttgtcattgcctctgtcctgccctgatgcagctgaggctacgttaactcccaggggcctgtagagtgtgtcccatggaccttgtgcaccagaaactcctgggaactcatttaa

SEQ ID NO: 13456 - DNA, 120 bp, synthetic construct
  misc_feature 1..120: note = Artificially Synthesized Probe
  source 1..120: mol_type = other DNA
aatgtggtcaggacgcaggctggaatccagtgaggactgtattccggtcccagcactgttccaggtggtgtgaccttgaacagtgaactcatattctgtcttctcccaagttgatatggt

SEQ ID NO: 13457 - DNA, 120 bp, synthetic construct
  misc_feature 1..120: note = Artificially Synthesized Probe
  source 1..120: mol_type = other DNA
tcagaggtcttcatggcagcccctcccgtcacaggcccagaggcctaggagaaaatggtttcgtaggccaggcccagggtccccatgctatgtgcagcctagggacttggtgccctgcat

SEQ ID NO: 13458 - DNA, 120 bp, synthetic construct
  misc_feature 1..120: note = Artificially Synthesized Probe
  source 1..120: mol_type = other DNA
gtgaaaacggactaatacacgggtggaaggggtacccactagttcctgcctcataacttgttagatggattccatgagctaatgcctgctaagagcagatggaccggacgtgccaggagc

SEQ ID NO: 13459 - DNA, 120 bp, synthetic construct
  misc_feature 1..120: note = Artificially Synthesized Probe
  source 1..120: mol_type = other DNA
atcccccatctccaatccataccggtgaatcccagcacaaatgctcctcgtccataaatttcccccatcacccccagcaggaattcatccctctttcttttcacccccacacaacatcct

SEQ ID NO: 13460 - DNA, 120 bp, synthetic construct
  misc_feature 1..120: note = Artificially Synthesized Probe
  source 1..120: mol_type = other DNA
gctgatatgtgccatttttgatttgcaagagtggaactttcatctggttcatcctaatagtaacttatagtagtgattatgtccaacatcacacctgcctgctagaatacaagcctgcgg

SEQ ID NO: 13461 - DNA, 120 bp, synthetic construct
  misc_feature 1..120: note = Artificially Synthesized Probe
  source 1..120: mol_type = other DNA
agtgacgtattgctgactcatgcttgactagcctggcaggttgatgcaaactcagcacagaacaataataataatagttgcatttattgagaatgagttgtgtgttagccagtgctgcat

SEQ ID NO: 13462 - DNA, 120 bp, synthetic construct
  misc_feature 1..120: note = Artificially Synthesized Probe
  source 1..120: mol_type = other DNA
aaaacaacaacaaaaaacacccaaatcactcagaatgaagagaattggagaaaaagtcacactcagcaccaggctttggccccacctgcctctccagcaccattgtaggccactctcgct

SEQ ID NO: 13463 - DNA, 120 bp, synthetic construct
  misc_feature 1..120: note = Artificially Synthesized Probe
  source 1..120: mol_type = other DNA
gttcttcctgtaagcatcgtcagtaaattttctatcaccaccatcaatgggaaaccagcagcacttcctgcagatagaaggcaactgtgaagttaaacagaatgaaacaagatcctgcta

SEQ ID NO: 13464 - DNA, 120 bp, synthetic construct
  misc_feature 1..120: note = Artificially Synthesized Probe
  source 1..120: mol_type = other DNA
aaaaaaaagagctacagggaaagacagagtagagcggaatggaggggctcataggtgccagcgtggtagggaaggtggattaggttacattcttaaagccgagtctggtggctcattcca

SEQ ID NO: 13465 - DNA, 120 bp, synthetic construct
  misc_feature 1..120: note = Artificially Synthesized Probe
  source 1..120: mol_type = other DNA
gttaaggctgcttgtttagaaactgagaatcatcacagggtcttaaacagaggaggattatgatctggtttgttagaaaagggaacaagccctgctatgtgttgttgagtaaagagaaca

SEQ ID NO: 13466 - DNA, 120 bp, synthetic construct
  misc_feature 1..120: note = Artificially Synthesized Probe
  source 1..120: mol_type = other DNA
aggaggtcaaaactgcagtgaagaagtaaatttgaagatcacagacctccttaagacccactcatcttcccagaaactcacacctgggcacataatttggcgtctactctcagggagttc

SEQ ID NO: 13467 - DNA, 120 bp, synthetic construct
  misc_feature 1..120: note = Artificially Synthesized Probe
  source 1..120: mol_type = other DNA
gttttacagatttgttttatgcccaagttaaggtttaccaagcagctggcacgctttagggacccaacaaatgctagtcccttttcttgtccattgaatgaactcaacattcctttaacc

SEQ ID NO: 13468 - DNA, 120 bp, synthetic construct
  misc_feature 1..120: note = Artificially Synthesized Probe
  source 1..120: mol_type = other DNA
aaaaaaaagtgaggaagaacaaggcactgcaacactaatttttttttttaggagaaaactgaggctcaaacaggtgaaggaatgtccccaaggccacatggctaacaagagatcaccgac

SEQ ID NO: 13469 - DNA, 120 bp, synthetic construct
  misc_feature 1..120: note = Artificially Synthesized Probe
  source 1..120: mol_type = other DNA
atcaagagtaagtcggccctgccttgttctcctgtctgtgcaccttcctgcttcccatagtccgctgttgcctggagggaatcatccaggcaatagggtagcatctgagcacctactgtg

SEQ ID NO: 13470 - DNA, 120 bp, synthetic construct
  misc_feature 1..120: note = Artificially Synthesized Probe
  source 1..120: mol_type = other DNA
atacttttctgagctgtctgtcctgcatgcaagtagatatttttaatgttgtctgttttctgtgctgttcctgtaagtgtgctattaaaatacactaaactaggctgggcgcgatggttc

SEQ ID NO: 13471 - DNA, 120 bp, synthetic construct
  misc_feature 1..120: note = Artificially Synthesized Probe
  source 1..120: mol_type = other DNA
tgagtccccccccggcactggctgggaagagggaaatcgacctctaagttcatttgccttttttttctttttctccatgacagaaaaaaaacagcagaaaataaagaacattctgtcaaa

SEQ ID NO: 13472 - DNA, 120 bp, synthetic construct
  misc_feature 1..120: note = Artificially Synthesized Probe
  source 1..120: mol_type = other DNA
aacacagaaatgttacagatgaaacattcttaccaaacaaagcaatatttaacatcaagagagaaggggataggaaaaggggtcagtgaaccagtccaaggagagtgatgtggacaagga

SEQ ID NO: 13473 - DNA, 120 bp, synthetic construct
  misc_feature 1..120: note = Artificially Synthesized Probe
  source 1..120: mol_type = other DNA
tctcgggaaaaaaaaaaaaaaagacagtcatcttgagctagtgaagacctgctctttttatagccagagtcctctggtgaggactgatagtaatagagtatgcctgcttatgtccctatc

SEQ ID NO: 13474 - DNA, 120 bp, synthetic construct
  misc_feature 1..120: note = Artificially Synthesized Probe
  source 1..120: mol_type = other DNA
tcagattttctgtttctgcattgacattctgcaaaagattgtgtgtagaataaagggttccttggccaaaaggaattaaagtattgaccccaagcgttttgtttccctccagtttggcca

SEQ ID NO: 13475 - DNA, 120 bp, synthetic construct
  misc_feature 1..120: note = Artificially Synthesized Probe
  source 1..120: mol_type = other DNA
atgtacccccaaatctaaatttttaaatttaaaataaataagagtatggaacttggagtctaatagctgtagtccaagtatagctgggtggccttaggcaaacaattttccacgtctggg

SEQ ID NO: 13476 - DNA, 120 bp, synthetic construct
  misc_feature 1..120: note = Artificially Synthesized Probe
  source 1..120: mol_type = other DNA
accttcatcaacgacttcttcacctaccacatcaggcatggggaggtgcactgcggcaccaacgtgcgcagaaagcccttctccttcaagtggtggaacatggtgccctgagcccatctt

SEQ ID NO: 13477 - DNA, 120 bp, synthetic construct
  misc_feature 1..120: note = Artificially Synthesized Probe
  source 1..120: mol_type = other DNA
ccttttcttctgtagggtctcggagcagatcgagctgactcccgttctgccaggtctggtcgctggggttttgtctatgggaacttccttggagtgggctttaatgacggactttcatag

SEQ ID NO: 13478 - DNA, 120 bp, synthetic construct
  misc_feature 1..120: note = Artificially Synthesized Probe
  source 1..120: mol_type = other DNA
ggttgacctctctctagtagatagacgtgcaatggacacatagtaggtgcctgataaatgtttattcttatataatgtgtattaccgaaatatctttgaggtgtatttgtggtgggccgg

SEQ ID NO: 13479 - DNA, 120 bp, synthetic construct
  misc_feature 1..120: note = Artificially Synthesized Probe
  source 1..120: mol_type = other DNA
tgtgacctctgaactaatcaattgtttgataagtattgctgacctcacaagctagcctaggagtgagactgagctgatcttttacggtcttataggaatcatcacattgtttactgcact

SEQ ID NO: 13480 - DNA, 120 bp, synthetic construct
  misc_feature 1..120: note = Artificially Synthesized Probe
  source 1..120: mol_type = other DNA
tcaaggcccacagacagtgctgttatgttctggagacacccaatctgaaaacattgactgagatattaagttatttccgaaggatcaaataggaaaacaattggaaaggagtgaaaagat

SEQ ID NO: 13481 - DNA, 120 bp, synthetic construct
  misc_feature 1..120: note = Artificially Synthesized Probe
  source 1..120: mol_type = other DNA
tatagaggtgacaatttgaattcttattgtgataggctggatagaagacactggttgacctctggtagaggtaccagagtatcagtgagtttttgccaacaactttggccaagaaagata

SEQ ID NO: 13482 - DNA, 120 bp, synthetic construct
  misc_feature 1..120: note = Artificially Synthesized Probe
  source 1..120: mol_type = other DNA
tttttcctagattcctcactctcccctcttctctttgtgtgcttggttatttttgactgggtatttgtcattactgctgaaaaattgcttgtagagattccttcaggcctaggatgaatg

SEQ ID NO: 13483 - DNA, 120 bp, synthetic construct
  misc_feature 1..120: note = Artificially Synthesized Probe
  source 1..120: mol_type = other DNA
tgctcctctcagcaaatatgccccataaggataaaagtgcctctctgcttacttatctctttgagttcttgctttcttccagattttggcctagtagtttcttcctattttgtcagctat

SEQ ID NO: 13484 - DNA, 120 bp, synthetic construct
  misc_feature 1..120: note = Artificially Synthesized Probe
  source 1..120: mol_type = other DNA
ggggcaggacactactccctgtttcagactcagactggtacccaagcttgctttgcttctcttttaataaagattaaagctttcccaaaaggttaattggtttatcataagcattgaatt

SEQ ID NO: 13485 - DNA, 120 bp, synthetic construct
  misc_feature 1..120: note = Artificially Synthesized Probe
  source 1..120: mol_type = other DNA
catgccttcccaatttccagcaaagtaagcaactcaagcattagtgatgattttattttcatacatttgctagtgttaaaaacctgaattaactttttggccctctgctgggggtcccat

SEQ ID NO: 13486 - DNA, 120 bp, synthetic construct
  misc_feature 1..120: note = Artificially Synthesized Probe
  source 1..120: mol_type = other DNA
agaactctgatcaccctaccacacgcttaccacttctctctttatcacgtgctctttgaaagtgaccctgcctattttctacagctttatttcctctttcattcaacaagaaatattttc

SEQ ID NO: 13487 - DNA, 120 bp, synthetic construct
  misc_feature 1..120: note = Artificially Synthesized Probe
  source 1..120: mol_type = other DNA
gccacgatttattgagcactgacctgtaggttaactcattgactcttcaccatctcgcgaagcaagtttgtgaataaatagtccaaagggaactcatttaactgaaatgggtctttaaag

SEQ ID NO: 13488 - DNA, 120 bp, synthetic construct
  misc_feature 1..120: note = Artificially Synthesized Probe
  source 1..120: mol_type = other DNA
ttccattttcttctcagtgttgaggctgtgactcaaaaagtctcttacacatcacactgtgttattaatccttgttgtcataataacatcccttgggattcaggaaggcaccttgtgtac

SEQ ID NO: 13489 - DNA, 120 bp, synthetic construct
  misc_feature 1..120: note = Artificially Synthesized Probe
  source 1..120: mol_type = other DNA
tatgcacgtggtattgccataagggtaattgctacctccctgtattatagcggagttcctctgggcatgcataatacctttctttcatcatgctcatcaagacttattcatactttgtta

SEQ ID NO: 13490 - DNA, 120 bp, synthetic construct
  misc_feature 1..120: note = Artificially Synthesized Probe
  source 1..120: mol_type = other DNA
tagtgtctataaataaagctttcgaaacgtaccatgcttattcgtttacacattgtggcttcttttacagcaaggatgggtatttctgtgtggcctgaaaggctgagaatgtgtactgtc

SEQ ID NO: 13491 - DNA, 120 bp, synthetic construct
  misc_feature 1..120: note = Artificially Synthesized Probe
  source 1..120: mol_type = other DNA
aaattaatagtaagacatatctgaatttttgttctagaaggtcccagagctctcctttaccattctacctcagagagcccttttccttctgcatgttatcttgggactgtccagggctct

SEQ ID NO: 13492 - DNA, 120 bp, synthetic construct
  misc_feature 1..120: note = Artificially Synthesized Probe
  source 1..120: mol_type = other DNA
gactcctcttacaagacccatatctaggaactgcagtttaagatcttatgccctgttggctaaaattcaaaatagcaggccctaagagggacggcctttattttgtctttttaaaacact

SEQ ID NO: 13493 - DNA, 120 bp, synthetic construct
  misc_feature 1..120: note = Artificially Synthesized Probe
  source 1..120: mol_type = other DNA
tattccatgaggaatgtagctggaacgtttaaaagcttactatccttgtcctgttttaccgttacctaatgggaagacagctttctggaaaaacctgaagaccattctttcttagtgagc

SEQ ID NO: 13494 - DNA, 120 bp, synthetic construct
  misc_feature 1..120: note = Artificially Synthesized Probe
  source 1..120: mol_type = other DNA
ctttatctcattaggtttaaaaattaatatgttgcgttatatagcacttatctttacagagattattcatcttcaatgcaataaataaaagaaaagccaagccaggtgtgatggcacatg

SEQ ID NO: 13495 - DNA, 120 bp, synthetic construct
  misc_feature 1..120: note = Artificially Synthesized Probe
  source 1..120: mol_type = other DNA
agctccgtgcaggagaaacatggagaattaagacaatcacctccctctaagaagctttgtgtgcttttcccagatcttcattttcataggcagtatgatttcaaaatgttgtccagtaaa

SEQ ID NO: 13496 - DNA, 120 bp, synthetic construct
  misc_feature 1..120: note = Artificially Synthesized Probe
  source 1..120: mol_type = other DNA
atgtaaattagtaaagccactgtggaaaacaaatggagatttctcaaaaaactaaaaacagaactatgatacagtccatcagttccactacgggtatctattcaaaggaaaagcaatcag

SEQ ID NO: 13497 - DNA, 120 bp, synthetic construct
  misc_feature 1..120: note = Artificially Synthesized Probe
  source 1..120: mol_type = other DNA
aaaaaaaaaaagtcactctcatcacagtctccactgttgtaatggtccactgtctgcaaggacaagttattgatcaggaggatttccaaccaagagcgagaacccaaacaaattagcaca

SEQ ID NO: 13498 - DNA, 120 bp, synthetic construct
  misc_feature 1..120: note = Artificially Synthesized Probe
  source 1..120: mol_type = other DNA
acaaatgccttccagtcactacctccttctcctcggtaaccatcctgactaatcttgccggtttttgagcttttagaaatggaattctacgttatacaatcttttgtgtttggtttcttt

SEQ ID NO: 13499 - DNA, 120 bp, synthetic construct
  misc_feature 1..120: note = Artificially Synthesized Probe
  source 1..120: mol_type = other DNA
tgcttacagtttggggctattatgaagaatggacatgaagaatttttgaagcgtggctagataaatggttagcacaagtaggcttttgaagaagggacatgattctgggccagatgactt

SEQ ID NO: 13500 - DNA, 120 bp, synthetic construct
  misc_feature 1..120: note = Artificially Synthesized Probe
  source 1..120: mol_type = other DNA
agtagatattaaaagagatgttgaacacataaggtccaggtggccgcaatgctttccttttatcccttcctacatagatagatggaagggactcggcacaataaaaagaaggagcatgta

SEQ ID NO: 13501 - DNA, 120 bp, synthetic construct
  misc_feature 1..120: note = Artificially Synthesized Probe
  source 1..120: mol_type = other DNA
attcacgtgcagggttcctagaaatgatgatcctgcataattgttgtggaaatcatttgtcttctattggattcatgaaggcttaaacacatggtcaggggatcagactcactaatagct

SEQ ID NO: 13502 - DNA, 120 bp, synthetic construct
  misc_feature 1..120: note = Artificially Synthesized Probe
  source 1..120: mol_type = other DNA
gtctcaatatttatagcaactgtgtgaggtaggtgctattattccatccattttgctgacggggagattgaagctacgagtggctttagaattgattacctcaagtcacacaggtcattt

SEQ ID NO: 13503 - DNA, 120 bp, synthetic construct
  misc_feature 1..120: note = Artificially Synthesized Probe
  source 1..120: mol_type = other DNA
ttttttcacaatgcatgtttctttctgttgtttccacagaaacattcaggtagaggctacagatttacatgaaaaggaaagatcagtttcctagccttgtgtcaggagcccatgtgaggc

SEQ ID NO: 13504 - DNA, 120 bp, synthetic construct
  misc_feature 1..120: note = Artificially Synthesized Probe
  source 1..120: mol_type = other DNA
cgtcagagaagaggggcattcctttgaaaagaattcctaaacagaatttttataaatggagtacaaaatagcacgaggaacagtgagaaacatcttcaggattcccatggcctaggcatg

SEQ ID NO: 13505 - DNA, 120 bp, synthetic construct
  misc_feature 1..120: note = Artificially Synthesized Probe
  source 1..120: mol_type = other DNA
agactagcccacttggttgaaggattcaaattctaaatatacgaaaggttatttccatttcaaaaagtgatgcagaaagacaaatagcatgttctctcactcatatgtggattctaaaga

SEQ ID NO: 13506 - DNA, 120 bp, synthetic construct
  misc_feature 1..120: note = Artificially Synthesized Probe
  source 1..120: mol_type = other DNA
ggcgtgagccaccaaggccggcagaactatggaaatttctaagaaacaaaaacccaaacagtccttcttattcagacttctttgtaaaaccgaccaaaataactctctctttttcttaat

SEQ ID NO: 13507 - DNA, 120 bp, synthetic construct
  misc_feature 1..120: note = Artificially Synthesized Probe
  source 1..120: mol_type = other DNA
tgaaataccattgttcattcatcagattggtagaaatccaaaagtcttgatatactctgtggcaatgctgttgggaactgaaactcccatccatcgctggtaggagtatagattggtgta

SEQ ID NO: 13508 - DNA, 120 bp, synthetic construct
  misc_feature 1..120: note = Artificially Synthesized Probe
  source 1..120: mol_type = other DNA
agaagccagagagaacagggatatctgggggaatttcaggggttagattgataggtgtgcagaatgtgaaggtggagtggtaagagatgagatgaaaagacccattttaattatcattaa

SEQ ID NO: 13509 - DNA, 120 bp, synthetic construct
  misc_feature 1..120: note = Artificially Synthesized Probe
  source 1..120: mol_type = other DNA
aatgtgtatttttaacaagtgcccatgagagtcttaaattaggtaagtttgggaaatgagatatcagtagaaacaggatactgtggggtcagaggaggaagttgctcagtctgtctgtag

SEQ ID NO: 13510 - DNA, 120 bp, synthetic construct
  misc_feature 1..120: note = Artificially Synthesized Probe
  source 1..120: mol_type = other DNA
ctgacaggttgtctgattttatacagcttaaattcctaagagaatctaatgggttcatcctgtgtgttgatttcacttgggtcaacctagtgcaataagccattttatagggagggtagc

SEQ ID NO: 13511 - DNA, 120 bp, synthetic construct
  misc_feature 1..120: note = Artificially Synthesized Probe
  source 1..120: mol_type = other DNA
gatgctgatttcaaaggatattttacaaatgcatttgtgaatggtagttcgttcttttaaacgtttggactgctttggctttttctgtggtggggcctagaagaagacaggtcacagcag

SEQ ID NO: 13512 - DNA, 120 bp, synthetic construct
  misc_feature 1..120: note = Artificially Synthesized Probe
  source 1..120: mol_type = other DNA
gagtagaaaatatggctgaaaggtaaatggaaccggcttagcggagggccttaagttccaagctaaggattaggactttgttctgtggtttataggaagtgattacaagttttggatata

SEQ ID NO: 13513 - DNA, 120 bp, synthetic construct
  misc_feature 1..120: note = Artificially Synthesized Probe
  source 1..120: mol_type = other DNA
gatcatgaagaaagactcaacaggatgtgcggatacataattagatcaatgatacataattagagaggaaggagagcagtaggtcctataagccctcgtcgtcattttaaaagcaagcca

SEQ ID NO: 13514 - DNA, 120 bp, synthetic construct
  misc_feature 1..120: note = Artificially Synthesized Probe
  source 1..120: mol_type = other DNA
agggctgaatgaaaattaatctcacctccactttggagagacaaaagggactcagaagagaacactgctaggtctcactggctttctctcaaaacagaatctcacttgtgatatttttaa

SEQ ID NO: 13515 - DNA, 120 bp, synthetic construct
  misc_feature 1..120: note = Artificially Synthesized Probe
  source 1..120: mol_type = other DNA
catatgaggagaaccaagatggaaagcacagaacatatgattatgattccaagtgaaagatgcagccaaagctctcctgtgtcataaacctgttccttcctgcaggatatctgaaaaagc

SEQ ID NO: 13516 - DNA, 120 bp, synthetic construct
  misc_feature 1..120: note = Artificially Synthesized Probe
  source 1..120: mol_type = other DNA
gttggaggcttccgagaggcattgtttgcatgataagtaaatgcatattgtgaaactgtgttcctgggattggatttagcatgatctattgttggctccctttattcacaatctctcttt

SEQ ID NO: 13517 - DNA, 120 bp, synthetic construct
  misc_feature 1..120: note = Artificially Synthesized Probe
  source 1..120: mol_type = other DNA
tttgttcacttgatttggttattgttctgttggttgtaacttgttttacaggactcacttgtgtccacacatctgtgatccctttgaaccttaagaatcaaaccattgtctgggagcggt

SEQ ID NO: 13518 - DNA, 120 bp, synthetic construct
  misc_feature 1..120: note = Artificially Synthesized Probe
  source 1..120: mol_type = other DNA
tgagtcattttatgttcgcaacaaaacttgcataatttcaattccatgagagaatgtggaatgaactaaaatggaaaattttcttttaaagaatgagctttttgtctgggtgtagtggtt

SEQ ID NO: 13519 - DNA, 120 bp, synthetic construct
  misc_feature 1..120: note = Artificially Synthesized Probe
  source 1..120: mol_type = other DNA
caccgcacccagcccaaaacatagttttaaaaagtggatgagatcattgtccagattgtagttaattaatatcaaagaggcaaacacacgaatggcctaagtaacttattacacagaaaa

SEQ ID NO: 13520 - DNA, 120 bp, synthetic construct
  misc_feature 1..120: note = Artificially Synthesized Probe
  source 1..120: mol_type = other DNA
tgtaaagagagaagtaaagtggatttgtttgcactgcctgggaaggagtagggtacagaggggattcaagggcacgtgcttgttttttttaattgagacattatgaacatctcagaacaa

SEQ ID NO: 13521 - DNA, 120 bp, synthetic construct
  misc_feature 1..120: note = Artificially Synthesized Probe
  source 1..120: mol_type = other DNA
ccttttaaacctgggtgatttagaattcaaactaccatcacttctccagactagattaaatgccacctggactgatcagatccaacatcctaccatgagtctggtattttctttgctatt

SEQ ID NO: 13522 - DNA, 120 bp, synthetic construct
  misc_feature 1..120: note = Artificially Synthesized Probe
  source 1..120: mol_type = other DNA
aattaaattttagtggatgttcatgtgcacaggtgggcagcagcaccttagtctagtatgttgggattgggatcagagtctttttccataaatgcagcagcattgagcaatataattcca

SEQ ID NO: 13523 - DNA, 120 bp, synthetic construct
  misc_feature 1..120: note = Artificially Synthesized Probe
  source 1..120: mol_type = other DNA
attgctgagtcatggggaaggtaaatgtaaatgtcagggttttttttcccaggatgattgccccacttcatacctccaccatcaaaatatgagagcacatgtttgctgccattagatatt

SEQ ID NO: 13524 - DNA, 120 bp, synthetic construct
  misc_feature 1..120: note = Artificially Synthesized Probe
  source 1..120: mol_type = other DNA
tggcattaattaacaaggaaattgaaaaaaaggacatttaaatgctatccttgaggtatcacatatgcttggcaccaaggacacagaataccttcaggggactggacatggtggcttctg

SEQ ID NO: 13525 - DNA, 120 bp, synthetic construct
  misc_feature 1..120: note = Artificially Synthesized Probe
  source 1..120: mol_type = other DNA
tggtttggggggtgtctacagtgaatcatctgtattcacatttatagagaactttgccatttgcatgttcatatctgtcatcttatgtaaactgccaaacagttctagttgtagccctct

SEQ ID NO: 13526 - DNA, 120 bp, synthetic construct
  misc_feature 1..120: note = Artificially Synthesized Probe
  source 1..120: mol_type = other DNA
tactggagtatttgggttctcagttcaagcctataggacttggggagaacatgcattcactgaaacgatgacattcctctaaggtgcaaatgttaaaaggtcatgcaaccagaactatta

SEQ ID NO: 13527 - DNA, 120 bp, synthetic construct
  misc_feature 1..120: note = Artificially Synthesized Probe
  source 1..120: mol_type = other DNA
tcagtgagaaatagagtcaaggtcaactacagaaataagagtctgatcaagtcaactgtgaaagtctctagttgtcacttttctcctctttggcaggaaaggacgggacaagatgattat

SEQ ID NO: 13528 - DNA, 120 bp, synthetic construct
  misc_feature 1..120: note = Artificially Synthesized Probe
  source 1..120: mol_type = other DNA
agatcccctcctgttatatgtttcccttcatgcgaagatcactggtgaaaacaactttcgtgttgggctatacacacaaagtccattttctctaatgtgacaccccttgaaaagaaaaag

SEQ ID NO: 13529 - DNA, 120 bp, synthetic construct
  misc_feature 1..120: note = Artificially Synthesized Probe
  source 1..120: mol_type = other DNA
caaaatggaaggacattctgttatttctctcattttctgacatgagagaacacaccagagattcaggagtgccacttcccctaccccacaacctgacataaatactaagaagaatttatc

SEQ ID NO: 13530 - DNA, 120 bp, synthetic construct
  misc_feature 1..120: note = Artificially Synthesized Probe
  source 1..120: mol_type = other DNA
tgactttgaaggggatatgagaccactgtcaccacatcttttgattttttcaagagaatacagaatctggatttgtatacacaacttcctttttgctttggagacaaggcctcgctctgt

SEQ ID NO: 13531 - DNA, 120 bp, synthetic construct
  misc_feature 1..120: note = Artificially Synthesized Probe
  source 1..120: mol_type = other DNA
atttcttcccccaataacaggctctctcatttcctctatttaatattggttatataaaggagttccttcctttccagatgccagggcaccagtagacataaacccttccatgttcacaat

SEQ ID NO: 13532 - DNA, 120 bp, synthetic construct
  misc_feature 1..120: note = Artificially Synthesized Probe
  source 1..120: mol_type = other DNA
tgtgtgtgtgtagaggagtgtttcagagttcttccttattcttgtcttcctttttgattgtaatcatctatagagggcttcaacttagccagcaggattttgttgacaatttggggcttt

SEQ ID NO: 13533 - DNA, 120 bp, synthetic construct
  misc_feature 1..120: note = Artificially Synthesized Probe
  source 1..120: mol_type = other DNA
tttcaccactatttcataggaaacttccaaacttaaatatttctggcccttagatcatgggttagcataacaggtggggacacttaaaacatagaaggttctgccctcatcctcctgtta

SEQ ID NO: 13534 - DNA, 120 bp, synthetic construct
  misc_feature 1..120: note = Artificially Synthesized Probe
  source 1..120: mol_type = other DNA
tcagaaacatgtgttattgtgaagacttccggacccttctgtgatcatttccttcctagaactgcctgaacttatcaaataaacttatctatttcaagaccttcggggaatggctgctaa

SEQ ID NO: 13535 - DNA, 120 bp, synthetic construct
  misc_feature 1..120: note = Artificially Synthesized Probe
  source 1..120: mol_type = other DNA
agaggtccttagcctgagatctaggacttcagggtgggctaacaaaaaatcttagaggcaaaaatgtttgtgttttgataagggaaggaaggagcattttcctgggttgagaatttatag

SEQ ID NO: 13536 - DNA, 120 bp, synthetic construct
  misc_feature 1..120: note = Artificially Synthesized Probe
  source 1..120: mol_type = other DNA
tgcagtttatggactcttcttcaagtgggaaaaattgtttccttcctctgtattaacctcaattgaagactgtctaggaggttgctttagttccacagtgttagagaattgagtgaggca

SEQ ID NO: 13537 - DNA, 120 bp, synthetic construct
  misc_feature 1..120: note = Artificially Synthesized Probe
  source 1..120: mol_type = other DNA
gcatcctaaatgcctgtgtaaattgataataaaaatagataatcagggatatgatgtgctgcccacccctaccactcgccgtatgttaagttactttgggtctaagtagaggcagaatat

SEQ ID NO: 13538 - DNA, 120 bp, synthetic construct
  misc_feature 1..120: note = Artificially Synthesized Probe
  source 1..120: mol_type = other DNA
atgaaggtttgagtcactgccattgaaaatttgaaatgatctccacagccacagacatgtgcccacttttgtcttccttcaaaccattgcaaatttcttgattacctacaatctgaaagc

SEQ ID NO: 13539 - DNA, 120 bp, synthetic construct
  misc_feature 1..120: note = Artificially Synthesized Probe
  source 1..120: mol_type = other DNA
gcttctatacttgctcccaaagcctagtttggaaactattctacagtggttgtgagatcacatgtttgcaagagaaaacttcttggtgaagctggaggggacattaacatatgttataat

SEQ ID NO: 13540 - DNA, 120 bp, synthetic construct
  misc_feature 1..120: note = Artificially Synthesized Probe
  source 1..120: mol_type = other DNA
aataagatataccacaataaaataatcaaggcagtgcccaccagagccaaatgaagcacatgaaggaaaaggctgaaaactcaagtcagggttgaaagtcatgggtgatgtttcagcaca

SEQ ID NO: 13541 - DNA, 120 bp, synthetic construct
  misc_feature 1..120: note = Artificially Synthesized Probe
  source 1..120: mol_type = other DNA
tccattaacatagtgctttacagtttgccccctgcagcaacccatggagatacatgtcatttattagcccatttttccagtgaggaaactgagtttagaaaagttgaatgacacacatag

SEQ ID NO: 13542 - DNA, 120 bp, synthetic construct
  misc_feature 1..120: note = Artificially Synthesized Probe
  source 1..120: mol_type = other DNA
ataaaggaacttttaaaaatgactctgtcattattagttttaccagttattaaactgggcactaatgtaatggtgccctgaagatggggagacctgtgggattgttggctcccacactaa

SEQ ID NO: 13543 - DNA, 120 bp, synthetic construct
  misc_feature 1..120: note = Artificially Synthesized Probe
  source 1..120: mol_type = other DNA
gctgctgaagatgtagcttctctgaataccacattcgatgccttctaatttgctgtgctgtatactgagaaatcagaacaccctgtttatttaaattcctcttaaagcaagagactcagc

SEQ ID NO: 13544 - DNA, 120 bp, synthetic construct
  misc_feature 1..120: note = Artificially Synthesized Probe
  source 1..120: mol_type = other DNA
atgcaccccataagcatatacactatgtacccaagaaagttaaaaatttaaaattaaagaaaaaggtgaatgaggtattacccagattgtggctgattagtattaaaaaagacaaacaca

SEQ ID NO: 13545 - DNA, 120 bp, synthetic construct
  misc_feature 1..120: note = Artificially Synthesized Probe
  source 1..120: mol_type = other DNA
ggaacgctgttcccgtgtttgggggacaacatgtacaaaacacccccatatcaaagtaagtcacaaaacctttggaaggactttcttgagctatttaaactgagaagaaaaataactctt

SEQ ID NO: 13546 - DNA, 120 bp, synthetic construct
  misc_feature 1..120: note = Artificially Synthesized Probe
  source 1..120: mol_type = other DNA
tgaatggtaaaaccatccctcatccaagataagagcagtagggtggaaatgaaaaaagtcatatactactaatttgacttctcaaatctcccagcatgtccctttcagcatgttcacagg

SEQ ID NO: 13547 - DNA, 120 bp, synthetic construct
  misc_feature 1..120: note = Artificially Synthesized Probe
  source 1..120: mol_type = other DNA
gagatggagtcttgctctgtcataatcatataggtttgggattttatctttactcagtgactgaaagaatagcaacctttggttatggttatgtcagctcagatatttctaccctttggg

SEQ ID NO: 13548 - DNA, 120 bp, synthetic construct
  misc_feature 1..120: note = Artificially Synthesized Probe
  source 1..120: mol_type = other DNA
attactccttaccccgatggggtagagaagcttatataccatcctgagattatagaaaaaatgaaggctcagaggatggccaaaaccaggttatggcaggaaatcaggttacgctggtaa

SEQ ID NO: 13549 - DNA, 120 bp, synthetic construct
  misc_feature 1..120: note = Artificially Synthesized Probe
  source 1..120: mol_type = other DNA
cctggatgatagcacatctgtttacagcgtggtttactgaatattttaagcccactattgagaccgactgctcaaaaaaagattcatttcaaaatatcactgctaattgacagtgcacct

SEQ ID NO: 13550 - DNA, 120 bp, synthetic construct
  misc_feature 1..120: note = Artificially Synthesized Probe
  source 1..120: mol_type = other DNA
aaattaagataggctgggcgcggtggctcaccctgtaatcccaacactttgggaggccgattgtttcagcccaggagtttgagatcagccttggcaacatggcgaaaccctctccctgct

SEQ ID NO: 13551 - DNA, 120 bp, synthetic construct
  misc_feature 1..120: note = Artificially Synthesized Probe
  source 1..120: mol_type = other DNA
cttgtaaaactaatgcttgctggggctttgttgcctttcgtccatggctcccagagatttgtcaagtagtaattatttttcacaatgctcttggtgaggaaagtaagaatcattactcct

SEQ ID NO: 13552 - DNA, 120 bp, synthetic construct
  misc_feature 1..120: note = Artificially Synthesized Probe
  source 1..120: mol_type = other DNA
tcctctctcttgtcttactcccccataatctcccactctttagctagagtgaattattcaacttttctttggaaacccctttattaagatacaatttaccgcaaagcctcttgccaccac

SEQ ID NO: 13553 - DNA, 120 bp, synthetic construct
  misc_feature 1..120: note = Artificially Synthesized Probe
  source 1..120: mol_type = other DNA
tttgagtcttcctctccttggcctctttgagcctatttatcatagctttcttagtctttacgctagtggttgagcttatcctctcctttatgcattcttgtgtgtaattttgagcccaat

SEQ ID NO: 13554 - DNA, 120 bp, synthetic construct
  misc_feature 1..120: note = Artificially Synthesized Probe
  source 1..120: mol_type = other DNA
ggggaggattgtaaaaccattacatgtttgactgaggaatgagattggctgtaagtatttgtgtcagtgactaggagagacacagctctgtaattgattatacttcaataccagatggaa

SEQ ID NO: 13555 - DNA, 120 bp, synthetic construct
  misc_feature 1..120: note = Artificially Synthesized Probe
  source 1..120: mol_type = other DNA
tcttcacacccaccctttcctgaagtcacattttcagctgagactgggaatagaaaagtgattgcttctaacctcagtgaaataaatcctcagtgagttaaaaaacggtggttcctctaa

SEQ ID NO: 13556 - DNA, 120 bp, synthetic construct
  misc_feature 1..120: note = Artificially Synthesized Probe
  source 1..120: mol_type = other DNA
gtgaacatgaggatacaaatatttcttcaagactctttcatttcctttgaatatacacccataagtaggattgctggatcatatggtagttccatttttaattcactgaggaacctccat

SEQ ID NO: 13557 - DNA, 120 bp, synthetic construct
  misc_feature 1..120: note = Artificially Synthesized Probe
  source 1..120: mol_type = other DNA
gaaaacaagttgtccgatttttcccccagggtctctaatttaggtcttcattggaaatagtctaagatacatcagactgtattaggaatgtactagcagcagttctcaagtatggcttac

SEQ ID NO: 13558 - DNA, 120 bp, synthetic construct
  misc_feature 1..120: note = Artificially Synthesized Probe
  source 1..120: mol_type = other DNA
agtacttgcacagtggtttgtgctacaagcaatactagccactattttttttcatggatcaccatgtctacttgaaagcatgagtgataaactatggttattcagatatgactattcggc

SEQ ID NO: 13559 - DNA, 120 bp, synthetic construct
  misc_feature 1..120: note = Artificially Synthesized Probe
  source 1..120: mol_type = other DNA
gataaaatagaaatcacaattaatcattagcaatcataacaatgttctttctagatggtgatggaaagtggggactggctggttggtggagaccttcaggtgctggagaaaataagatgg

SEQ ID NO: 13560 - DNA, 120 bp, synthetic construct
  misc_feature 1..120: note = Artificially Synthesized Probe
  source 1..120: mol_type = other DNA
ttctggaaaacaaaataaaatatcatcataattctaaaatccctaacctacttctgtgcatagtggcagaaaagtctctggcagcacatgccccaaactgcagattacagtggctacctc

SEQ ID NO: 13561 - DNA, 120 bp, synthetic construct
  misc_feature 1..120: note = Artificially Synthesized Probe
  source 1..120: mol_type = other DNA
aaaaaaaaaagccagtggataatgaatgcacagaacaataaacatagctgtgtcctttctgttcttgtggagaaatgacaccatgtgtttctgtgaccttccttcttctgctttcctctc

SEQ ID NO: 13562 - DNA, 120 bp, synthetic construct
  misc_feature 1..120: note = Artificially Synthesized Probe
  source 1..120: mol_type = other DNA
tgagaatatggaagttggcaagtgaatgaggtggctaatgaaacttaactgggtgatagggcaagttgtatgtaacctaatattcaatttcagaagttccagttactctccatgccctgt

SEQ ID NO: 13563 - DNA, 120 bp, synthetic construct
  misc_feature 1..120: note = Artificially Synthesized Probe
  source 1..120: mol_type = other DNA
tgtggaaatcattccattccgagtggctgcctacaacaaagccaaaaaagccatggacttctatgatccagcaaggtaggttttcagaggaaaattcttttatcaacatctgtataaaag

SEQ ID NO: 13564 - DNA, 120 bp, synthetic construct
  misc_feature 1..120: note = Artificially Synthesized Probe
  source 1..120: mol_type = other DNA
agctctatgtattttctactgcacctgagcaggcaggtcccagatttcttaaggctttgtttgaccatgtgtctagttacttgctgaaaagtgaatatattttccagcatgtcttgacaa

SEQ ID NO: 13565 - DNA, 120 bp, synthetic construct
  misc_feature 1..120: note = Artificially Synthesized Probe
  source 1..120: mol_type = other DNA
tcccctcagctgcttaacaaagttcctcgaacagaaagtgcttacaaagctgccttctcggatactgaaaggtcgagttttctgaactgcactgattttattgcagttgaaaaaaaaaaa

SEQ ID NO: 13566 - DNA, 120 bp, synthetic construct
  misc_feature 1..120: note = Artificially Synthesized Probe
  source 1..120: mol_type = other DNA
gggaattgtccggagagaatcatcactctgaccggccccaccaatgccatctttaaggctttcgctatgatcatcgacaagctggaggaagatatcaacagctccatgaccaacagtacc

SEQ ID NO: 13567 - DNA, 120 bp, synthetic construct
  misc_feature 1..120: note = Artificially Synthesized Probe
  source 1..120: mol_type = other DNA
gctagaacagtgtaggttccctcaataacccctttctgctgttctcccatgatccaactgtgtaatttctggtcagtgattccaggttttaaataatttgtaagtgttcagtttctacac

SEQ ID NO: 13568 - DNA, 120 bp, synthetic construct
  misc_feature 1..120: note = Artificially Synthesized Probe
  source 1..120: mol_type = other DNA
tagacggatctggctcgtctctagccagctcaacacttaacataagcttttgggcaacttattaaatctctgtgggtcattttaataataattcttccttcacaagtgtatcgttagacc

SEQ ID NO: 13569 - DNA, 120 bp, synthetic construct
  misc_feature 1..120: note = Artificially Synthesized Probe
  source 1..120: mol_type = other DNA
caggtagatcctactaggtttagatgaagcctccagaagctgtttttcttttgccaaagttaacttaggaggctgatttaatatgaaccccctcctgcacccctttttatttttatgttt

SEQ ID NO: 13570 - DNA, 120 bp, synthetic construct
  misc_feature 1..120: note = Artificially Synthesized Probe
  source 1..120: mol_type = other DNA
caggtgtgagccgcagtgcctggtcagtataaatatattttaaaaatctgtatatatgttgccaaattggtttcctgaaaacttactctactttacatgacagtgtataggattgcctgt

SEQ ID NO: 13571 - DNA, 120 bp, synthetic construct
  misc_feature 1..120: note = Artificially Synthesized Probe
  source 1..120: mol_type = other DNA
atttttgtttgttattttaaacacaacctcaccagctttggctactttcctaagggggaaataatagccaatttgaggtatgtggttttttttgttgttgttggggaaggggacggtagg

SEQ ID NO: 13572 - DNA, 120 bp, synthetic construct
  misc_feature 1..120: note = Artificially Synthesized Probe
  source 1..120: mol_type = other DNA
ctcctgggctcaagcgatgctcgtctcagcctcccaaagtgctgggattacaggtgtgagccactgtgcccagccgaggctcctggtagattgagagctctgacctcatctcctcaaaga

SEQ ID NO: 13573 - DNA, 120 bp, synthetic construct
  misc_feature 1..120: note = Artificially Synthesized Probe
  source 1..120: mol_type = other DNA
ggaacacagatgtgcagattttggaatggctgctgataagaataaggtatttgttcaaatggtggtgtgaacactttttaggtgtggctcagctggcctacccactagaataataataaa

SEQ ID NO: 13574 - DNA, 120 bp, synthetic construct
  misc_feature 1..120: note = Artificially Synthesized Probe
  source 1..120: mol_type = other DNA
ggaatgaaaacttgcttgtagtttggggaaaatgagggatttgctttgcttttcagtgcgtgtttccagaatattgtgtgttttttacttaggaagagtccttagtctgttttggggggg

SEQ ID NO: 13575 - DNA, 120 bp, synthetic construct
  misc_feature 1..120: note = Artificially Synthesized Probe
  source 1..120: mol_type = other DNA
accaaatgccgaaatagaaggaatcacatttgttttgtgcaatttatgagagctgagaaaaacttgtacagaaggaaccattgaaaagagagatagaacaaagatgttttctggacatga

SEQ ID NO: 13576 - DNA, 120 bp, synthetic construct
  misc_feature 1..120: note = Artificially Synthesized Probe
  source 1..120: mol_type = other DNA
ataggctcctaatcttgcatgttttcagcctcaccttttcctcttttaggctagcgattgtgagtttagaacccttctggttaatttcctttagagaacaaacattctctgtcctctcaa

SEQ ID NO: 13577 - DNA, 120 bp, synthetic construct
  misc_feature 1..120: note = Artificially Synthesized Probe
  source 1..120: mol_type = other DNA
tctgtgtgataggttttccttcagaactgcaaatcatttcttttttttcctttcaaatcatttttgtagagcaaagactagctcttttgctcttgacaattcatgaacttcctttaagat

SEQ ID NO: 13578 - DNA, 120 bp, synthetic construct
  misc_feature 1..120: note = Artificially Synthesized Probe
  source 1..120: mol_type = other DNA
tgcaaagtaagtgtttaatactcaaattcaatccattgctttcctcagttacatagtgcttattgagtatctttggggtacaagacactgagctaggtacttggggtagggcagaggtat

SEQ ID NO: 13579 - DNA, 120 bp, synthetic construct
  misc_feature 1..120: note = Artificially Synthesized Probe
  source 1..120: mol_type = other DNA
aggtacccaatcgtgatggggagtgaaaccagtgttactgcctcctgttttgaaaagtgcactcagaacgttttccagaaaacactgtggtattttgtgaatgtcgttttttatatcaag

SEQ ID NO: 13580 - DNA, 120 bp, synthetic construct
  misc_feature 1..120: note = Artificially Synthesized Probe
  source 1..120: mol_type = other DNA
aataatgtgttatgtgaagtataaagtatatttgtgagagatacagtaagaggctgggatgagggagagagatactgcagacagaaactggcaacatttccagggagaagaaaggaagga

SEQ ID NO: 13581 - DNA, 120 bp, synthetic construct
  misc_feature 1..120: note = Artificially Synthesized Probe
  source 1..120: mol_type = other DNA
gtgagtcaccacgcctggcttttaatttttgttttcaagggctagtctttactttcagatcttcattgcttaattaattgcttactaatgctgcttgtcatattgatacctccactcact

SEQ ID NO: 13582 - DNA, 120 bp, synthetic construct
  misc_feature 1..120: note = Artificially Synthesized Probe
  source 1..120: mol_type = other DNA
atatatgttcctcctggccaggatccaatccagaataaagcattgactttagatgttatctctttttaatcttttttgatctggagcagttcctgtctttgttctccatgatcttgatat

SEQ ID NO: 13583 - DNA, 120 bp, synthetic construct
  misc_feature 1..120: note = Artificially Synthesized Probe
  source 1..120: mol_type = other DNA
ggttcctggctatcatgagtaaatgctactgtgaacatttgtgtattactttgtgtggatatatgttttcataacccttggatagataggtacctaagagtgggattgtaggttttatga

SEQ ID NO: 13584 - DNA, 120 bp, synthetic construct
  misc_feature 1..120: note = Artificially Synthesized Probe
  source 1..120: mol_type = other DNA
tatgtacatattagtcatttgtaaaccttctttgctgaaatgtctattcagatcttttgtccatctcgtaattgggtttttgagttgtaagagttcttcatatattctggatacaagtcc

SEQ ID NO: 13585 - DNA, 120 bp, synthetic construct
  misc_feature 1..120: note = Artificially Synthesized Probe
  source 1..120: mol_type = other DNA
ccagtttatcaagttttcttttgtgggtcatgcttctattgtcatatgtaaaaacttgtaatacaaagtcatgaagattttgttttcttcatggagttttttttgtaggtttggctcttt

SEQ ID NO: 13586 - DNA, 120 bp, synthetic construct
  misc_feature 1..120: note = Artificially Synthesized Probe
  source 1..120: mol_type = other DNA
gaatttacatcctaacatattgagtcttccactccacgtagatggaatgtttctctgtttatgtagctctatactttgtctcagcaatattttgtaatttgcagcatacctgtcttgcac

SEQ ID NO: 13587 - DNA, 120 bp, synthetic construct
  misc_feature 1..120: note = Artificially Synthesized Probe
  source 1..120: mol_type = other DNA
acgaggtcaggagatagagaccatcctggctaacacggtgaaaccctgtctttactaaaaatacaaaaaaattagccgggtgtggtggcgggtgcctgtagtcccagctactcgggaggc

SEQ ID NO: 13588 - DNA, 120 bp, synthetic construct
  misc_feature 1..120: note = Artificially Synthesized Probe
  source 1..120: mol_type = other DNA
tattacagtaattctcacctcatagaatgagttggaagggttgcctctgtgaggtaggttccctatgcactggttatgaacttttctgatttcagtaagacagaacactcacacaagtta

SEQ ID NO: 13589 - DNA, 120 bp, synthetic construct
  misc_feature 1..120: note = Artificially Synthesized Probe
  source 1..120: mol_type = other DNA
cactttggttattgttggtgtatagcagagctatttatttgtctatattaattttgtaacctaagactttactgaattcctttatcagatctaggagtcttttggatgagtcgctagagt

SEQ ID NO: 13590 - DNA, 120 bp, synthetic construct
  misc_feature 1..120: note = Artificially Synthesized Probe
  source 1..120: mol_type = other DNA
gttagtcttgagtgatcttttgtatttctatgatattggttataatatttccagtttcatttttcattgagcttatttggatctattctcttcttggttagtctaatggtcgaccaattt

SEQ ID NO: 13591 - DNA, 120 bp, synthetic construct
  misc_feature 1..120: note = Artificially Synthesized Probe
  source 1..120: mol_type = other DNA
attttgtctgatataagaatagctactttgcgaggccaagacgggcggatcgcgaggtcaggagatcgagaccatcctggctaacacggtgaaaccctgtctctactgaaaatacaaaaa

SEQ ID NO: 13592 - DNA, 120 bp, synthetic construct
  misc_feature 1..120: note = Artificially Synthesized Probe
  source 1..120: mol_type = other DNA
tctttgagcttcttgcatttggatattgaaatctcaggcaaggccagggaagttttcctcaatgattctctcaaataagttttctaaacttttagccttctcttctccctcaggaccacc

SEQ ID NO: 13593 - DNA, 120 bp, synthetic construct
  misc_feature 1..120: note = Artificially Synthesized Probe
  source 1..120: mol_type = other DNA
aaggatgtgactttagtgtttatagtttattatagcctaatgtgattcttaatgcttttagggggaagactgtatgagttccttggctatagagagtctttgtatgatggcttctttaga

SEQ ID NO: 13594 - DNA, 120 bp, synthetic construct
  misc_feature 1..120: note = Artificially Synthesized Probe
  source 1..120: mol_type = other DNA
atgcagtcactctgtagtgttccaggaaggctgtctataggttcacctttgccaagctcctgtggagaagccccaactgtgtctgtgtagtggtggacaaggtgggagagaagatacctt

SEQ ID NO: 13595 - DNA, 120 bp, synthetic construct
  misc_feature 1..120: note = Artificially Synthesized Probe
  source 1..120: mol_type = other DNA
ttctcaggtcattagggtaatgttccagagaggaatataactgcctctactgcacagaagagatcgcacagtgtgtggggagtaacaggtggcactaagcctcacccagatcccacacgg

SEQ ID NO: 13596 - DNA, 120 bp, synthetic construct
  misc_feature 1..120: note = Artificially Synthesized Probe
  source 1..120: mol_type = other DNA
gaggtgttaagtctgcaactattattgtgcacctatttctccccacaattctgttaacttttgctttgtgtattttagggctcttgttgcttcatagattttggggctctgttaggtgtg

SEQ ID NO: 13597 - DNA, 120 bp, synthetic construct
  misc_feature 1..120: note = Artificially Synthesized Probe
  source 1..120: mol_type = other DNA
gcatgattgctgaaaaagaaggatttacttctgccatttagttatttctgtatgtgttttggttttttatgcctcagttcctccattatggccttggggtggtgatatttagttgagttg

SEQ ID NO: 13598 - DNA, 120 bp, synthetic construct
  misc_feature 1..120: note = Artificially Synthesized Probe
  source 1..120: mol_type = other DNA
tctcccaaagagctgcaattacaggcatgagccattgtgcccagccttctttcaatattttgtttttatttttattttagacacagggtcttgctgtgtcacgcagaatagagtgcagtg

SEQ ID NO: 13599 - DNA, 120 bp, synthetic construct
  misc_feature 1..120: note = Artificially Synthesized Probe
  source 1..120: mol_type = other DNA
gaaattttagttctcttatcactgtgtttaaccagcaatctgacagtaatttccttaaatgtctgtctcccagaagtgtggaggggtgtggaacaaactacctttttaaatcccttgtgg

SEQ ID NO: 13600 - DNA, 120 bp, synthetic construct
  misc_feature 1..120: note = Artificially Synthesized Probe
  source 1..120: mol_type = other DNA
tcagcactcttaattggttcttgtggatttgaattatagtctggtgttattttctttcatccagtaggacattttgagctggtatgggcaatggtggcagccttggttaagaatgccaca

SEQ ID NO: 13601 - DNA, 120 bp, synthetic construct
  misc_feature 1..120: note = Artificially Synthesized Probe
  source 1..120: mol_type = other DNA
tgcctcagaaagtaatatgctgaccatcctaccagttacggggagaaaatgcacatataattcttaaagaacttcactgattaggtctgttgcctcctgtatagaatttctgtgggaaaa

SEQ ID NO: 13602 - DNA, 120 bp, synthetic construct
  misc_feature 1..120: note = Artificially Synthesized Probe
  source 1..120: mol_type = other DNA
tcttaaaatattaataaaaatgaacattggatgccaagacagaatggttggggggaaaaagtagtgatagccatccaacttgaggagaggagttctagagggagtgtaaatgggaaaccc

SEQ ID NO: 13603 - DNA, 120 bp, synthetic construct
  misc_feature 1..120: note = Artificially Synthesized Probe
  source 1..120: mol_type = other DNA
ttgcatcactgtaaatgcagtttaactctcattttcctgtctttcaacagtattcccttggcttccattataccatactctggcatttcttctcacaactctgaccataccttcctggtt

SEQ ID NO: 13604 - DNA, 120 bp, synthetic construct
  misc_feature 1..120: note = Artificially Synthesized Probe
  source 1..120: mol_type = other DNA
agtcttccagtggctcaggtaaaagctttgacactgccttgactcgtcttttgctatcacatcccaaatttagtcagaaggtcctgttggctttactttagaatataatccacaatataa

SEQ ID NO: 13605 - DNA, 120 bp, synthetic construct
  misc_feature 1..120: note = Artificially Synthesized Probe
  source 1..120: mol_type = other DNA
tttctggtgctgatgtaaacatttcacattagaggcaatcttaggtcataggatatatatgtcttcagcttctctaggtaatgcccgtctgtttactaaacaggttgcagccagcaattt

SEQ ID NO: 13606 - DNA, 120 bp, synthetic construct
  misc_feature 1..120: note = Artificially Synthesized Probe
  source 1..120: mol_type = other DNA
ccatgggagcttgagaagaaagcgtattttgttgttagatgaagtatgtccatcatatcctgtttattgatactgtttttcttttaattttaaaaatgatttctatttattttacttctt

SEQ ID NO: 13607 - DNA, 120 bp, synthetic construct
  misc_feature 1..120: note = Artificially Synthesized Probe
  source 1..120: mol_type = other DNA
tttaccttcttcagtggttgccttagaggttgcaatataatttacagctattttaagttaatttcagataacacttttctgcttcccaggttgtatgagtaccttataatagcaaaatca

SEQ ID NO: 13608 - DNA, 120 bp, synthetic construct
  misc_feature 1..120: note = Artificially Synthesized Probe
  source 1..120: mol_type = other DNA
gtggtttggtgtctgacaatttggggaacttttctgtcattattgcttcctatattctgttcttttttctctttctgctccttctggaattctcattatgtatatgttacatcgtttgta

SEQ ID NO: 13609 - DNA, 120 bp, synthetic construct
  misc_feature 1..120: note = Artificially Synthesized Probe
  source 1..120: mol_type = other DNA
tttagtgtgtcttatgacttattcctgatagctggacatgatacactaggtaaaaggaactattgtaaataggcccttagtaatgataaggagctggggaagaggaagtgttctgtagtc

SEQ ID NO: 13610 - DNA, 120 bp, synthetic construct
  misc_feature 1..120: note = Artificially Synthesized Probe
  source 1..120: mol_type = other DNA
tgtgttagataatgtttgtgttagaagataagagggcaaagagggcaaatatatatataaatgcacatggatgcatgggtgtctctgtagagagaagaaactgacagggtatgccttagg

SEQ ID NO: 13611 - DNA, 120 bp, synthetic construct
  misc_feature 1..120: note = Artificially Synthesized Probe
  source 1..120: mol_type = other DNA
aaaagacaataaggcagggaaaacttgggtctttagtttggagtcgtatctttaagctacatcctatcctcattcagccacgtcactatcttctctgcatttgtcatcttggctgaatca

SEQ ID NO: 13612 - DNA, 120 bp, synthetic construct
  misc_feature 1..120: note = Artificially Synthesized Probe
  source 1..120: mol_type = other DNA
aggttggtatatatcttagagtacataagtgttttccaatcattggccaggtgcatgatggtcatatatcatgtgttgatgaatttggtcatagttgttaacttctttttttttgagaca

SEQ ID NO: 13613 - DNA, 120 bp, synthetic construct
  misc_feature 1..120: note = Artificially Synthesized Probe
  source 1..120: mol_type = other DNA
aaaattgtttctccccatgtcaggttggcatcgatcttgactcattcctttcccttacctatcagcatcatttagccccatctttaagacatgtctagaatcagaacacttcttagcatc

SEQ ID NO: 13614 - DNA, 120 bp, synthetic construct
  misc_feature 1..120: note = Artificially Synthesized Probe
  source 1..120: mol_type = other DNA
tccaaagtggctgtacccatttataaatattttttgaatgaaagaattctgtcatgctgaaaatgctttttattcaacaaatactcatttagaatatgtggaaaaaggcaaatagcaaag

SEQ ID NO: 13615 - DNA, 120 bp, synthetic construct
  misc_feature 1..120: note = Artificially Synthesized Probe
  source 1..120: mol_type = other DNA
cctgtttgccaggtacattattcttaatgttggccaggcctgatcttaccctgttggagctgatattccaggagagatgtccggcagtaaacagggaaataggtgatgcagagaaaagta

SEQ ID NO: 13616 - DNA, 120 bp, synthetic construct
  misc_feature 1..120: note = Artificially Synthesized Probe
  source 1..120: mol_type = other DNA
gactggttcctgggctctacctagttgtccttttgaaataaataaatgtaaaatgatgcaaacagcatgccctttaggaaacatgtttatgcatactgcttatagccagaggctgggaca

SEQ ID NO: 13617 - DNA, 120 bp, synthetic construct
  misc_feature 1..120: note = Artificially Synthesized Probe
  source 1..120: mol_type = other DNA
atgtatatgcatgtgtatgtataggtatgcatgtgtatgtatgtatatgcatgtgtataggtatgcatgtgtatgtatgtatatgcatgtgtatgtataggtatgcatgtgtatgtatgt

SEQ ID NO: 13618 - DNA, 120 bp, synthetic construct
  misc_feature 1..120: note = Artificially Synthesized Probe
  source 1..120: mol_type = other DNA
tttgctttttgaaggagctttagcagattaacctaacagggaatgtgaacccacagtggtttatgcagagctctgcctttgcatttccaagtccttgttcttttaatgttccaggaagtt

SEQ ID NO: 13619 - DNA, 120 bp, synthetic construct
  misc_feature 1..120: note = Artificially Synthesized Probe
  source 1..120: mol_type = other DNA
ccctagggtttgctgttttctgttattgtttttgtcttttttattcttgtagtctcttcctgcaccaaggattagcctgagatgtaaccttaaggtcttccttaggtcttttctgagcct

SEQ ID NO: 13620 - DNA, 120 bp, synthetic construct
  misc_feature 1..120: note = Artificially Synthesized Probe
  source 1..120: mol_type = other DNA
tcctggtgcttcctactctgccatcttctaactttttcttaaggtacatatgataactcttgattctcattataaagttttatatcctgctacctattaaatactcttgtttgtaatttt

SEQ ID NO: 13621 - DNA, 120 bp, synthetic construct
  misc_feature 1..120: note = Artificially Synthesized Probe
  source 1..120: mol_type = other DNA
tttctttccttgtcttgcattggctacaactccctatatgtcaaatgtaatggtgaatcatagttgtgattctgggcatctttgtattgtttgtaagtttagcaagactgctgtcagtgt

SEQ ID NO: 13622 - DNA, 120 bp, synthetic construct
  misc_feature 1..120: note = Artificially Synthesized Probe
  source 1..120: mol_type = other DNA
actgcaagctctgcctcccgggtacacgccattctcctgcctcagccacccaagtagcagggactacaggcacccaccaccatgcctggctaattttgtttttgtatttttagtagagac

SEQ ID NO: 13623 - DNA, 120 bp, synthetic construct
  misc_feature 1..120: note = Artificially Synthesized Probe
  source 1..120: mol_type = other DNA
aaaagtgaatatgctagaaaagagtcaaagcagtgactttagaagctacttaagagtgcacacacaaatcaatacggtagtcaggggaaggcattacttctggggaagaagagtacaaag

SEQ ID NO: 13624 - DNA, 120 bp, synthetic construct
  misc_feature 1..120: note = Artificially Synthesized Probe
  source 1..120: mol_type = other DNA
aaaacaaaaagtgagaatgaaacatgtcagttgatggaactcccttcactgtaaaagtcaatcatgaagcagctgactatgcttcaatctgagtgcagtagcccctgataagcatttgag

SEQ ID NO: 13625 - DNA, 120 bp, synthetic construct
  misc_feature 1..120: note = Artificially Synthesized Probe
  source 1..120: mol_type = other DNA
cagaagtggggatgagggtagagaacaatgtataagtactatatgtttagtttcagaaaaaaatgcaactgaaaaatgggaggagaagagaggggaagaatattgcagaatcagctcact

SEQ ID NO: 13626 - DNA, 120 bp, synthetic construct
  misc_feature 1..120: note = Artificially Synthesized Probe
  source 1..120: mol_type = other DNA
tcctgcctcagcttcccaggaaggacattttcaactgctaaaagccatagttcacaatgataatgtaaagcatatcgaatatctgtgccagaaataaccaccatctttataaagctgaaa

SEQ ID NO: 13627 - DNA, 120 bp, synthetic construct
  misc_feature 1..120: note = Artificially Synthesized Probe
  source 1..120: mol_type = other DNA
agtaaacactggctaacttcaaaaaagagacagtaaaagcagaagtatgaagtgagaaagggaataaccattgaaaaagaagaaacttaagaatcgttaagaggccaggtgtggtggctc

SEQ ID NO: 13628 - DNA, 120 bp, synthetic construct
  misc_feature 1..120: note = Artificially Synthesized Probe
  source 1..120: mol_type = other DNA
aaacaccaggcccaaatagtttcatgtggaatttctgagacctttaagggccaaatagtcctagtgccacataaattcttccagagcatagaaagtaaacaaaacacacaagaaccttcc

SEQ ID NO: 13629 - DNA, 120 bp, synthetic construct
  misc_feature 1..120: note = Artificially Synthesized Probe
  source 1..120: mol_type = other DNA
cagttatccaagaagaggaccaattagagacaaaagccttgggagagatgtcaagctgtaacgtaggtgatatagtattgtagtattcaagaaaactctagagaatgcattattatacta

SEQ ID NO: 13630 - DNA, 120 bp, synthetic construct
  misc_feature 1..120: note = Artificially Synthesized Probe
  source 1..120: mol_type = other DNA
agggtattacaataggaccaccttcctataggcagtttgtcattgaccagaacctctttgtgtagtgcccaactgtatatgataatgatattttatcaaatctcaggggcaaaaattagc

SEQ ID NO: 13631 - DNA, 120 bp, synthetic construct
  misc_feature 1..120: note = Artificially Synthesized Probe
  source 1..120: mol_type = other DNA
attgctggtaggggactctggtattatccaggactaaattagcatttgccctttaactcagcaatcccattcctagcaatttaccctgaagatacacttcccaccatacaaaattataga

SEQ ID NO: 13632 - DNA, 120 bp, synthetic construct
  misc_feature 1..120: note = Artificially Synthesized Probe
  source 1..120: mol_type = other DNA
aacaaaaaaactcaccatttggcagctatcatgacagtaatgagtcaggcaagaatcatggctgcttggtggctgctaggatgctaaacctagtggatgaagaactagattaatgattaa

SEQ ID NO: 13633 - DNA, 120 bp, synthetic construct
  misc_feature 1..120: note = Artificially Synthesized Probe
  source 1..120: mol_type = other DNA
agcaccaggtgatcctggctcaggttctggaccagaattttgttgcttgtgctgctataaaggatactattggaacaattggcaaacttgaataatgtcatataataagaaatagtggcc

SEQ ID NO: 13634 - DNA, 120 bp, synthetic construct
  misc_feature 1..120: note = Artificially Synthesized Probe
  source 1..120: mol_type = other DNA
aaaggtaaagttgtcacaaaaattccacactcaaataggacttttaaaacaaacttcattggtgtgtccatcttagcagcagttgaggttttccacaccatttctccccagcagggagga

SEQ ID NO: 13635 - DNA, 120 bp, synthetic construct
  misc_feature 1..120: note = Artificially Synthesized Probe
  source 1..120: mol_type = other DNA
caaaggtttataggaaacttacattcttagtgtataaggttttcaattttttaggggtcagttttctgttcccccctacccccagctaaatatatgactcacccactaatcatgagctcc

SEQ ID NO: 13636 - DNA, 120 bp, synthetic construct
  misc_feature 1..120: note = Artificially Synthesized Probe
  source 1..120: mol_type = other DNA
atcacgccactgcatgacagagtgacactgtccccacctccccaaaaaaaaaattttgtcatggtaaaatatatataacaaaatatgtctgtttggcccatttaaagtagtgcaaccgca

SEQ ID NO: 13637 - DNA, 120 bp, synthetic construct
  misc_feature 1..120: note = Artificially Synthesized Probe
  source 1..120: mol_type = other DNA
atcatgtcttttgatacacaattttttttttttttttgagatggagtctcgcgctctcttgctgtctccagcccgggctggagtgcaatggtacgatctcggcttattgcaatctctgtg

SEQ ID NO: 13638 - DNA, 120 bp, synthetic construct
  misc_feature 1..120: note = Artificially Synthesized Probe
  source 1..120: mol_type = other DNA
aattgggaagtgtgtcttccaactttattgttgttcttaggattgttttaggcatttggggcccttttaaattccatatgaattttggtagtgactttcccatttctccaaaaaaggctg

SEQ ID NO: 13639 - DNA, 120 bp, synthetic construct
  misc_feature 1..120: note = Artificially Synthesized Probe
  source 1..120: mol_type = other DNA
agtacatagaattcctgtacaccttctgctcccacatgcacacatgcacagcctccatatgtccaaaatcctgcataagagcagtatatttgaggttaatggttgtattaatctgttttc

SEQ ID NO: 13640 - DNA, 120 bp, synthetic construct
  misc_feature 1..120: note = Artificially Synthesized Probe
  source 1..120: mol_type = other DNA
gtagtcatctttacttgagatatttatttcctaatgtagctttgtgataccgtctagtgttcttttcttttaacctgaagggcttcctttagcatttttctgtggagtaggctggttggt

SEQ ID NO: 13641 - DNA, 120 bp, synthetic construct
  misc_feature 1..120: note = Artificially Synthesized Probe
  source 1..120: mol_type = other DNA
gtcttctcctggtgctcttatcctgtgtatgttggttcacatgtgggtgtcccacaggtcccttaggttctgctcatttaatttttttattttctcctcagagtaatttcaattgtttta

SEQ ID NO: 13642 - DNA, 120 bp, synthetic construct
  misc_feature 1..120: note = Artificially Synthesized Probe
  source 1..120: mol_type = other DNA
aagaaaactcctggtcttgaaattgtctctgtgttggggctctcctttgatgcttagccaaacttgaactaaggtttgagatcagctcaaggttaaagtttaaggttttctctggtcttt

SEQ ID NO: 13643 - DNA, 120 bp, synthetic construct
  misc_feature 1..120: note = Artificially Synthesized Probe
  source 1..120: mol_type = other DNA
tggcttgtgacttgcctatttatttcctttcctttccttttttttttatttgagatggagtctcactctgttgcctagagtggtggtgcaatcttggctcactgcaacctctgcctcctg

SEQ ID NO: 13644 - DNA, 120 bp, synthetic construct
  misc_feature 1..120: note = Artificially Synthesized Probe
  source 1..120: mol_type = other DNA
aattaagttggaaactcttctaggaggggagatttactagtaattgagctcctactctgtgctgctttatagattccatttcctttactccttggaactatgctaggaggcagtatcgtc

SEQ ID NO: 13645 - DNA, 120 bp, synthetic construct
  misc_feature 1..120: note = Artificially Synthesized Probe
  source 1..120: mol_type = other DNA
ttaaaaagatctcttgaggatgttgttcccagccccgcagaaatgtctgtgcttttttaacacaggggaactgaaggcagtagtgggaaaaagccagaaaagataatgagcattaacttt

SEQ ID NO: 13646 - DNA, 120 bp, synthetic construct
  misc_feature 1..120: note = Artificially Synthesized Probe
  source 1..120: mol_type = other DNA
tggccaccgaattgtatactcaggtcttagggtaccgaaaaagggaaatagcacatttaattccccttgatacaagaccatggatttaataatggaaaacagggctaacatctttggctc

SEQ ID NO: 13647 - DNA, 120 bp, synthetic construct
  misc_feature 1..120: note = Artificially Synthesized Probe
  source 1..120: mol_type = other DNA
aaactgaggcctagatttggaagttgcacagtgtcatttttgccacattttataggccaagaaaactcaacaaggttaagcgaaggaatacaaatccacctcttgaagagagaagtggta

SEQ ID NO: 13648 - DNA, 120 bp, synthetic construct
  misc_feature 1..120: note = Artificially Synthesized Probe
  source 1..120: mol_type = other DNA
ttggccagcaagaaggtacaacgtccttggagaaaacatgcaaatattccattgtaaacaaatcaaaggaaaagaaaccaagaactgaattactgtctgcccattcacatcccattcctg

SEQ ID NO: 13649 - DNA, 120 bp, synthetic construct
  misc_feature 1..120: note = Artificially Synthesized Probe
  source 1..120: mol_type = other DNA
aaggtcgtggctgcaaaggtttttccatggtagttaccattttctctttgtaactgataactaatttgtggggtattatttaatcttgtctgtcaataaactttcacctgggccaggcgc

SEQ ID NO: 13650 - DNA, 120 bp, synthetic construct
  misc_feature 1..120: note = Artificially Synthesized Probe
  source 1..120: mol_type = other DNA
acttttaaatcatgagttcatactgaaacttttaatccaacaccatgggtgcttctttgccttcccccattctgtattgtctctcttaccacagcagtaataaccctggctcccattatt

SEQ ID NO: 13651 - DNA, 120 bp, synthetic construct
  misc_feature 1..120: note = Artificially Synthesized Probe
  source 1..120: mol_type = other DNA
gcttgcctagtgagttttctgagcccacagttcttgttttcgtgatctctgctatggtccataaaagagtacatacaagctcttttttttctttttggaggtaagagtccaagaagtgtt

SEQ ID NO: 13652 - DNA, 120 bp, synthetic construct
  misc_feature 1..120: note = Artificially Synthesized Probe
  source 1..120: mol_type = other DNA
accaacagatggccagtcatctttttgagttgctagagtaatggggagcacatccacaatacacccttctaatgcttgttagaaagtgcttttgttgcaaagttcttctagcttcttttt

SEQ ID NO: 13653 - DNA, 120 bp, synthetic construct
  misc_feature 1..120: note = Artificially Synthesized Probe
  source 1..120: mol_type = other DNA
tttgcataggcatattaggccatttaaggaactcaccccctattgccagacccatgaagtgtgtagggtatgacttcttaaagaaagagtgaggaggtctaatgccaagagaaacttttt

SEQ ID NO: 13654 - DNA, 120 bp, synthetic construct
  misc_feature 1..120: note = Artificially Synthesized Probe
  source 1..120: mol_type = other DNA
cttcaaactgaactggaaacccattggagtagatatttagcctttttgtgtggcatggtagtctacaattctgtcagcatctgttttccatacaagactgtcacgcaaaggatcaatttg

SEQ ID NO: 13655 - DNA, 120 bp, synthetic construct
  misc_feature 1..120: note = Artificially Synthesized Probe
  source 1..120: mol_type = other DNA
atatccacagagggtgtgtggtttttggcagagatgtactatgtcagaatttcatcttagcttgtcaatgttctgctccttcattatttgtgttccacaaaggtcaaccaaatccagtga

SEQ ID NO: 13656 - DNA, 120 bp, synthetic construct
  misc_feature 1..120: note = Artificially Synthesized Probe
  source 1..120: mol_type = other DNA
cttgatattataaacaaaaaagacaaagacaaattcccagtgcttgttctgcggaagctgctggatcgtgaagaaaatcctcagctaaagttgttgttgacagcaactgatggaggcaaa

SEQ ID NO: 13657 - DNA, 120 bp, synthetic construct
  misc_feature 1..120: note = Artificially Synthesized Probe
  source 1..120: mol_type = other DNA
gacagtaacacttatgaaattcatgtagatgttacagataagggaaacccacctatggttggtcactgcacggtcctagtggaactactggatgaaaatgataattcacctgaggtgatt

SEQ ID NO: 13658 - DNA, 120 bp, synthetic construct
  misc_feature 1..120: note = Artificially Synthesized Probe
  source 1..120: mol_type = other DNA
ggtagatgtggacggggaagatcagtctattggaggggaccactctaggaaggtgggttattacgttttcattttccttttgtgctttatgaataatattttctcttaccgcattttctc

SEQ ID NO: 13659 - DNA, 120 bp, synthetic construct
  misc_feature 1..120: note = Artificially Synthesized Probe
  source 1..120: mol_type = other DNA
agtgttaccaaacaccaatgccatgaatttgtcatcttgcctatggctcttagcaattacttttttctttcctttctctttgagtatggagattgaatttgttactcagtacgtgcttca

SEQ ID NO: 13660 - DNA, 120 bp, synthetic construct
  misc_feature 1..120: note = Artificially Synthesized Probe
  source 1..120: mol_type = other DNA
gatttgtaagacaaacccacctttgaagaggtactgatcatacacaagaaggtataggaaaggagttggaagctcacaaagagaaacataaacatatgcaggaatcaggaacgaagaaga

SEQ ID NO: 13661 - DNA, 120 bp, synthetic construct
  misc_feature 1..120: note = Artificially Synthesized Probe
  source 1..120: mol_type = other DNA
tggaacctcaggaacaaggaccaaaaggtctcagaggaactaagtctttctagtcatgaaatattgttttactaaccaaaagagaggcataattttagctgctagacaaagtggccagga

SEQ ID NO: 13662 - DNA, 120 bp, synthetic construct
  misc_feature 1..120: note = Artificially Synthesized Probe
  source 1..120: mol_type = other DNA
taatgaaagattcaaatacaggcagttgacacaggcaattccccaatgtttgatcactgcacagacttgatagaagtcttggacatcaatgatagtgttccagagttagcagtaagtcac

SEQ ID NO: 13663 - DNA, 120 bp, synthetic construct
  misc_feature 1..120: note = Artificially Synthesized Probe
  source 1..120: mol_type = other DNA
gattttactctggagagtcgcctcccaaggtcaacattacggcttttagtcctagtgttctcccatggttcagattttggagatggacttcaataggaaatttttgagaatataagtact

SEQ ID NO: 13664 - DNA, 120 bp, synthetic construct
  misc_feature 1..120: note = Artificially Synthesized Probe
  source 1..120: mol_type = other DNA
tctctcacaaatggtgatgagcagggttgaggcagcttcgtccacaaacaattttgtttcttcatgatcaatatccatcttttttgagatgttgattgcagtgggtggaattttagcctt

SEQ ID NO: 13665 - DNA, 120 bp, synthetic construct
  misc_feature 1..120: note = Artificially Synthesized Probe
  source 1..120: mol_type = other DNA
ttctgagaagatgatttctatgaagataaacattaaggaaatcttcagaaaagggaaaaccctgtcctactttatggtgctggaattctcttcatccatagctataggacaagagccaat

SEQ ID NO: 13666 - DNA, 120 bp, synthetic construct
  misc_feature 1..120: note = Artificially Synthesized Probe
  source 1..120: mol_type = other DNA
aatctgttggttttggagaacctcctggggttctgacaacggtgtcaaaatttatttatgtgttttcaagaaataatagcactaggtctgttagaatatcagtggatgacgtgcactagt

SEQ ID NO: 13667 - DNA, 120 bp, synthetic construct
  misc_feature 1..120: note = Artificially Synthesized Probe
  source 1..120: mol_type = other DNA
tcatttttccagagtaaaccttctaaggttcatttccctacctcgcaagactccacattccatgtaacatcttcatccccaattcccataataaggtgattgaggatctgttgtttcctt

SEQ ID NO: 13668 - DNA, 120 bp, synthetic construct
  misc_feature 1..120: note = Artificially Synthesized Probe
  source 1..120: mol_type = other DNA
aatgcaagcccacagagatgagaatagatcatgtggaacataaacactaaagagctgcttttataaaacttcaattttttctttgagttccctagcagccaaagtaacaagggagactga

SEQ ID NO: 13669 - DNA, 120 bp, synthetic construct
  misc_feature 1..120: note = Artificially Synthesized Probe
  source 1..120: mol_type = other DNA
tcaacgagatttttaacctgaaactgaagaatctggtactgtaagtgtaaagaagcttattttggaagccaatttcgtatgcgatgtttggttttcagagaaggggattgggcaccccac

SEQ ID NO: 13670 - DNA, 120 bp, synthetic construct
  misc_feature 1..120: note = Artificially Synthesized Probe
  source 1..120: mol_type = other DNA
gaactttagattatgaagaaaacaagttttataaaattgaagtacaggctacagataaggggactcccccaatggcaggtcactgtacagtctgggtggaaatcttggacaccaacgata

SEQ ID NO: 13671 - DNA, 120 bp, synthetic construct
  misc_feature 1..120: note = Artificially Synthesized Probe
  source 1..120: mol_type = other DNA
gacaggagccagggtcaaatcaccccggacaggtgagttttctacagattccacctatcaggaagtgtatgtgaaattatttaaaatccagttttttttcacggattttttaagggaaag

SEQ ID NO: 13672 - DNA, 120 bp, synthetic construct
  misc_feature 1..120: note = Artificially Synthesized Probe
  source 1..120: mol_type = other DNA
cagggctgcagtgacctatcatcgtgagacccccatctgaaaaaataattttttttgcctgttcttgattttgttccatgaaaaggcaagagatttgtcaactattggatactcaaacaa

SEQ ID NO: 13673 - DNA, 120 bp, synthetic construct
  misc_feature 1..120: note = Artificially Synthesized Probe
  source 1..120: mol_type = other DNA
agtggtggtattacagactttcttgagaatcatatctagctatttcccccccgtatagaggcataacataccatttggcacaatattcaaagagtctatgctgaagcctattcatagact

SEQ ID NO: 13674 - DNA, 120 bp, synthetic construct
  misc_feature 1..120: note = Artificially Synthesized Probe
  source 1..120: mol_type = other DNA
agctgatcttgaattaatgaataaactcatgaaaggtcttttgatgcccccttgcataacagtcaccattctgattttctgaagagaagcatgtcctaactactaaatgacctgtagggg

SEQ ID NO: 13675 - DNA, 120 bp, synthetic construct
  misc_feature 1..120: note = Artificially Synthesized Probe
  source 1..120: mol_type = other DNA
ttacataatcagtcacatgatgtcgctctacactcagaaggtgaaacaggaaaatttttttctccgcacccacattccaatcattcacggaataggatcgactccataatgactgtgatg

SEQ ID NO: 13676 - DNA, 120 bp, synthetic construct
  misc_feature 1..120: note = Artificially Synthesized Probe
  source 1..120: mol_type = other DNA
agcccagctataaagtagtgttgtctgaaaatgtccaaaacgacacaagagtgatccaactaaatgcttccgatccagacgaaggacttaatggagaaatttcctatgggatcaaaatga

SEQ ID NO: 13677 - DNA, 120 bp, synthetic construct
  misc_feature 1..120: note = Artificially Synthesized Probe
  source 1..120: mol_type = other DNA
cgtggtggcgaaagtgcgcgcggtggacgctgactccggctataacgcttggctgtcctacgagttgcaaccggcggcggtcggcgcgcacatcccgttccacgtggggctgtacactgg

SEQ ID NO: 13678 - DNA, 120 bp, synthetic construct
  misc_feature 1..120: note = Artificially Synthesized Probe
  source 1..120: mol_type = other DNA
tatttaaccatctgtacgatacagtacagttggtaaccaactgtggctcaaaccagtttcagatgatcccaaacttatcatagtataccactgccctgtgcctattaccaagtgaatctt

SEQ ID NO: 13679 - DNA, 120 bp, synthetic construct
  misc_feature 1..120: note = Artificially Synthesized Probe
  source 1..120: mol_type = other DNA
aagtagaagttgactctcacttttttagtttgttcagctgagaagatgacattgccattaaccaacctgcagaacaaggttggagaaacagtttgtgtgtatttgagcaggtagggaatg

SEQ ID NO: 13680 - DNA, 120 bp, synthetic construct
  misc_feature 1..120: note = Artificially Synthesized Probe
  source 1..120: mol_type = other DNA
gatggaaatgaggttgagaatttgagaagagaggaaagagaatatggaagaatctctgtaagcaagagggaggagttaattatcaattcacttgagagcccaactgaggtaaaggtgaga

SEQ ID NO: 13681 - DNA, 120 bp, synthetic construct
  misc_feature 1..120: note = Artificially Synthesized Probe
  source 1..120: mol_type = other DNA
aatttaaatgacggcaaggttttactcagtgatgatgaagtaagatggagagagaaaatggaaactttaacctcctggttaaattctatttaaccaggacgccgattcgggctacaatgc

SEQ ID NO: 13682 - DNA, 120 bp, synthetic construct
  misc_feature 1..120: note = Artificially Synthesized Probe
  source 1..120: mol_type = other DNA
tgaaaatgtcaggaaatgcaaggggcaaaaaaatactacatcaatggaaaatatgaagactgagtcatacttacacttacacgttcatgcgcatggtgtcgctcttcactgagaacgttt

SEQ ID NO: 13683 - DNA, 120 bp, synthetic construct
  misc_feature 1..120: note = Artificially Synthesized Probe
  source 1..120: mol_type = other DNA
aagaaattatatgaaatatccgtggaggcagttgacaaaggaaatattccaatggcgggtcattgtacccttttggtggaagtactagatgtaaatgataacgccccagaggttaccatc

SEQ ID NO: 13684 - DNA, 120 bp, synthetic construct
  misc_feature 1..120: note = Artificially Synthesized Probe
  source 1..120: mol_type = other DNA
ggcgtcggcaggcgctgtgggtccagaagcggcgctggtggatgtcaatgtttacttgatcattgccatctgcgcggtgtccagcctgttggtgctcacgttgctgctgtatactgcgct

SEQ ID NO: 13685 - DNA, 120 bp, synthetic construct
  misc_feature 1..120: note = Artificially Synthesized Probe
  source 1..120: mol_type = other DNA
gagagagacctggtaggctttttgttattatttcttttccaaagtttgaagggatttccaaaaggtactggtgactgaaagtaccttttggcagtccctgcaaatctaatggttttaata

SEQ ID NO: 13686 - DNA, 120 bp, synthetic construct
  misc_feature 1..120: note = Artificially Synthesized Probe
  source 1..120: mol_type = other DNA
ggatattgacattgatacagtaaagaagtaacatagttccgtaacaaccagattcttgatatcacctttttatagccacatctgcttccctgcctaatgctggcaagcagtaatctgttc

SEQ ID NO: 13687 - DNA, 120 bp, synthetic construct
  misc_feature 1..120: note = Artificially Synthesized Probe
  source 1..120: mol_type = other DNA
tatgagtcttcctctccccacccctcatggttactgttaaaacttttctttttatcctgacttttgcagattgattgtgatgtgctttagtatggttttctttatgttagtctgttgggg

SEQ ID NO: 13688 - DNA, 120 bp, synthetic construct
  misc_feature 1..120: note = Artificially Synthesized Probe
  source 1..120: mol_type = other DNA
acaggacagccgcccaacaataaagaattagctcaaaatgtcagtagttccactgttgagaaactctgctttaaagagtcttggacttagttctgacgtgaagttaagttgctcagtacc

SEQ ID NO: 13689 - DNA, 120 bp, synthetic construct
  misc_feature 1..120: note = Artificially Synthesized Probe
  source 1..120: mol_type = other DNA
attggagaactcactgttgaagttatctgtatcaggattttgattggtgggaatatttctgattactgactcaattttaatagtataaggaccattcagagtttaatttactcgagtcag

SEQ ID NO: 13690 - DNA, 120 bp, synthetic construct
  misc_feature 1..120: note = Artificially Synthesized Probe
  source 1..120: mol_type = other DNA
gacctagttgttaagcatttaccagtacactactgcacctgattgcaagcaagaaccactcagttgagtcagaaccaggagaggtaatattaagttgttttaagatattaggtagttggg

SEQ ID NO: 13691 - DNA, 120 bp, synthetic construct
  misc_feature 1..120: note = Artificially Synthesized Probe
  source 1..120: mol_type = other DNA
gtttctcttccttacttcttgcccctctgacctttcatcagggattattgtctttccatgttagaataatttgagagtttcctttagtccaaagatgctggtgaggaatgatttcaggtt

SEQ ID NO: 13692 - DNA, 120 bp, synthetic construct
  misc_feature 1..120: note = Artificially Synthesized Probe
  source 1..120: mol_type = other DNA
gctcatggttttagcgtctatttctgatatgtccagtaactgggatcctcatgggtctattcctgtggtgtgttttaaaattgtatctttatggtgttttgtctccacataaacctggtt

SEQ ID NO: 13693 - DNA, 120 bp, synthetic construct
  misc_feature 1..120: note = Artificially Synthesized Probe
  source 1..120: mol_type = other DNA
agtagctattgtgaatagtgctgcagtaagtatgggaggtgcaggtatcactttgacatactggtttccttttctttggataaatgcccaatagtggaattgctggatgatatggtagtt

SEQ ID NO: 13694 - DNA, 120 bp, synthetic construct
  misc_feature 1..120: note = Artificially Synthesized Probe
  source 1..120: mol_type = other DNA
ccatcctgatgccctacctcttgtatagaaacaacccagatccaaagtggccagaaagttactttaccttctgaatttgtggtctttttcagaatctctacctgttaattctgcatgact

SEQ ID NO: 13695 - DNA, 120 bp, synthetic construct
  misc_feature 1..120: note = Artificially Synthesized Probe
  source 1..120: mol_type = other DNA
ttcctatcagttcctcctcagtataggggtttttgctacaagaagacatttgttagttgacaagttcatagggctaagacaggtttagcacaatccaatctatttgtagtcccttctgct

SEQ ID NO: 13696 - DNA, 120 bp, synthetic construct
  misc_feature 1..120: note = Artificially Synthesized Probe
  source 1..120: mol_type = other DNA
ttctctgtctttgctattgtgaatagtgccatgatgaacatacacatacatgtgtctttatagtagaatgacttatattcctttggttatgtacacagttatgggatttgctggcttgaa

SEQ ID NO: 13697 - DNA, 120 bp, synthetic construct
  misc_feature 1..120: note = Artificially Synthesized Probe
  source 1..120: mol_type = other DNA
ctgtctatctccatgggttcaaaaaatatatttttttattatactttaagttttagggtacatgtgcacaatgtgcaggttagttacatatgtatacatgtgccatgctggtgtgctgca

SEQ ID NO: 13698 - DNA, 120 bp, synthetic construct
  misc_feature 1..120: note = Artificially Synthesized Probe
  source 1..120: mol_type = other DNA
tggtggtttcttttgctgtgcagaagctctttagtttaattagatcccatttgtcaattttggcttttgttgccattgcttttggtgttttagacatgaagtccttgcccatgcctaagt

SEQ ID NO: 13699 - DNA, 120 bp, synthetic construct
  misc_feature 1..120: note = Artificially Synthesized Probe
  source 1..120: mol_type = other DNA
cttcctcttttcctaattgaataccctttatttccttctcctgcctaattgccctggccagaacttccaacactatgttgaataggagtggtgagagagggcatccctgtcttgtggcag

SEQ ID NO: 13700 - DNA, 120 bp, synthetic construct
  misc_feature 1..120: note = Artificially Synthesized Probe
  source 1..120: mol_type = other DNA
atacgatatttgtctttctgtgcctggtttatgtcacttataatgacatccagtttcatccaggttgttgcaaatgactggatcttgttttttttatggctgaatagtactccattgtgt

SEQ ID NO: 13701 - DNA, 120 bp, synthetic construct
  misc_feature 1..120: note = Artificially Synthesized Probe
  source 1..120: mol_type = other DNA
tctctcaatctgtgggttgtctcttcactttgttgattgtttgcttttctgtgcagaaggtttttaagttgatgtgatcccatatatccatttttttcctttggttccctgtgattgtgg

SEQ ID NO: 13702 - DNA, 120 bp, synthetic construct
  misc_feature 1..120: note = Artificially Synthesized Probe
  source 1..120: mol_type = other DNA
aggataatttgatttcttcctttctaatttggatgtcctttatgtcttctctctctctctctttcttttttttttttttttttgagatgaggacttgctttgttgcccaggctggtctcg

SEQ ID NO: 13703 - DNA, 120 bp, synthetic construct
  misc_feature 1..120: note = Artificially Synthesized Probe
  source 1..120: mol_type = other DNA
tgaggaaaggatgcattttaaaaaacaagtttttcaaaaatatagggaggattgtggttacttctagaaacagtagtgcagtcaggaaaaattcagcacaatatgtatcagtggaattca

SEQ ID NO: 13704 - DNA, 120 bp, synthetic construct
  misc_feature 1..120: note = Artificially Synthesized Probe
  source 1..120: mol_type = other DNA
acaaagacattgaatcttgacctgtttgtcaatgatgtgacttccttgctgcattggataatacctcttaaatactggaaaattatttgttgatttttggtctattcacaatgtaacagc

SEQ ID NO: 13705 - DNA, 120 bp, synthetic construct
  misc_feature 1..120: note = Artificially Synthesized Probe
  source 1..120: mol_type = other DNA
agagtttttctgctgttatattttagaattttcatggtttcaggttttagatttaagtctttgatccatcttgagttgatttttgtgtaaggtgagagatgaggatccagtttcattctt

SEQ ID NO: 13706 - DNA, 120 bp, synthetic construct
  misc_feature 1..120: note = Artificially Synthesized Probe
  source 1..120: mol_type = other DNA
tgttagtctcctttgataacaccctcacagacacacccaggaacaatactttgcatccttcaatccaatcaagttgacactcagtattaaccatcacaagtcctccccttgtcaacttga

SEQ ID NO: 13707 - DNA, 120 bp, synthetic construct
  misc_feature 1..120: note = Artificially Synthesized Probe
  source 1..120: mol_type = other DNA
ctggacctgtgaattccggctatgggagaaacagtaccatatattggatgctgattcagagcatacacaaccttctggagaattttgccccagccctgcaaagtattgtcacctagttga

SEQ ID NO: 13708 - DNA, 120 bp, synthetic construct
  misc_feature 1..120: note = Artificially Synthesized Probe
  source 1..120: mol_type = other DNA
atttcccttcactgctgtccttcaggtatgtcctaggaaggggctgtagtgctgcagctgtccactttcaggtggtggacatatcatgcagaaccatctgtgaaccagtccttagtcttc

SEQ ID NO: 13709 - DNA, 120 bp, synthetic construct
  misc_feature 1..120: note = Artificially Synthesized Probe
  source 1..120: mol_type = other DNA
caaaatgtcatcaaggtaatgaaccagtgtgatatcttatggaagggaaaatcaatcaagttctctccaaacaagattatgacacaaagccggagagttgatatacccctgaggtaggat

SEQ ID NO: 13710 - DNA, 120 bp, synthetic construct
  misc_feature 1..120: note = Artificially Synthesized Probe
  source 1..120: mol_type = other DNA
ctggagtcaacgtcagcttagagacactgttcagtagtccctgaaatggcaatcatttccctttccccaatcacagttactctggtaaaaagccgtaggtctccatggggaaggatggga

SEQ ID NO: 13711 - DNA, 120 bp, synthetic construct
  misc_feature 1..120: note = Artificially Synthesized Probe
  source 1..120: mol_type = other DNA
ggggaagccatcactgttgcctcaggcagtgcagggtttttctcctcagacaaatgtggaaaggctgatggcagtgtgggttggggaggacatgttgccactactggggatgagaaagct

SEQ ID NO: 13712 - DNA, 120 bp, synthetic construct
  misc_feature 1..120: note = Artificially Synthesized Probe
  source 1..120: mol_type = other DNA
agatgtaggctgggaggctaagtcagtctaatctctccatgttcttctgcctgtttttattctggctgtgctggcagctgattagattgtgcccacccagattgagggtagatctgcctt

SEQ ID NO: 13713 - DNA, 120 bp, synthetic construct
  misc_feature 1..120: note = Artificially Synthesized Probe
  source 1..120: mol_type = other DNA
gcctcatagaatcagtttggaagttaacccctcctctactttttggaatagtttgagtaggattggtattagttcttctttaaatgtttggtagaatttggcagtgaagccaatgggtcc

SEQ ID NO: 13714 - DNA, 120 bp, synthetic construct
  misc_feature 1..120: note = Artificially Synthesized Probe
  source 1..120: mol_type = other DNA
tgttctatagtgcagattaagtctgatgtttctttgttgagtttttgtctgtcagttctgtccaatacggaaagtggggtgttgaattctccacctattattgtattgtgatctctatct

SEQ ID NO: 13715 - DNA, 120 bp, synthetic construct
  misc_feature 1..120: note = Artificially Synthesized Probe
  source 1..120: mol_type = other DNA
gggcacgcaccaccacaacacccacctaatttttatatttttagtagagacggggtttcaccatgttggccaggatagtctcgatctcttgacctagtgatccgcccatcttggcctccc

SEQ ID NO: 13716 - DNA, 120 bp, synthetic construct
  misc_feature 1..120: note = Artificially Synthesized Probe
  source 1..120: mol_type = other DNA
tccacagggaatctgcctggccactgctgatgttcacttaaagcttaagggctgttcagttgtgttgtggtgaatgctgccaggcctgggactcttcaaggaagtgggcacccctctgcc

SEQ ID NO: 13717 - DNA, 120 bp, synthetic construct
  misc_feature 1..120: note = Artificially Synthesized Probe
  source 1..120: mol_type = other DNA
caaaatctcccttcatgtgcagctgctggctgagtccagcacagtgttgttccctgctacgacagcaccgagtttaatgtaaagttccccagttgctgtgctttacttcctccaagtgcg

SEQ ID NO: 13718 - DNA, 120 bp, synthetic construct
  misc_feature 1..120: note = Artificially Synthesized Probe
  source 1..120: mol_type = other DNA
tgttttataattctttttatagagatctttcacatccttgattagccatattcctaggtattttctttttgtgtatgtctattgtaaatggcattgtgttcttgatttggccctcagctt

SEQ ID NO: 13719 - DNA, 120 bp, synthetic construct
  misc_feature 1..120: note = Artificially Synthesized Probe
  source 1..120: mol_type = other DNA
agactaagacagatatcgtttaggttagttggtttttagtgttgttcacatctttcatttcctagtgatcttctgcctagttgttgtccattattggaagtggagtattaaagtctccag

SEQ ID NO: 13720 - DNA, 120 bp, synthetic construct
  misc_feature 1..120: note = Artificially Synthesized Probe
  source 1..120: mol_type = other DNA
cagaaacagattctccgtagagcctctaaagggagtgcaaccttgccaacatcttgagttttaattctcctctccaaacctgggagaaaaactgtcttaagcaacccagtgtgtagtaat

SEQ ID NO: 13721 - DNA, 120 bp, synthetic construct
  misc_feature 1..120: note = Artificially Synthesized Probe
  source 1..120: mol_type = other DNA
tacatatttgataaacattcacactagattttcctctgtgctgcagacaaaaattttcttcaatggtgtctgaaaagggaggcctgcaaccactaccaaaccactctacctgagattagt

SEQ ID NO: 13722 - DNA, 120 bp, synthetic construct
  misc_feature 1..120: note = Artificially Synthesized Probe
  source 1..120: mol_type = other DNA
ttggaaagggttggtatattggtattttctagagtagtgattctcactgagatgcaaaaccaaagactccttgttttggattaaaaagatctaggtacagaggctgagggcagaactctc

SEQ ID NO: 13723 - DNA, 120 bp, synthetic construct
  misc_feature 1..120: note = Artificially Synthesized Probe
  source 1..120: mol_type = other DNA
gcaagccatgagaatggttgttggactgcagtttcggactctattactacatgtatagtatttagaataaaagagctaggtctcctcatgtcagcacttatttgaccaatgggagtatga

SEQ ID NO: 13724 - DNA, 120 bp, synthetic construct
  misc_feature 1..120: note = Artificially Synthesized Probe
  source 1..120: mol_type = other DNA
atactatccctctaggtgcagctcagaattcctaaacctggtataattggaggcatggctgcagacctaaaagttcggtacatctttacagttgtatttcatctgtttaaggcagaaaga

SEQ ID NO: 13725 - DNA, 120 bp, synthetic construct
  misc_feature 1..120: note = Artificially Synthesized Probe
  source 1..120: mol_type = other DNA
attggggctttggacatattgcacctgtattaaaagaaggatttgagtgaggaatttagtgcttcatagtcaatagtcaatgagtctccttttggctcgcctccttcttagggaaaggaa

SEQ ID NO: 13726 - DNA, 120 bp, synthetic construct
  misc_feature 1..120: note = Artificially Synthesized Probe
  source 1..120: mol_type = other DNA
cctcatggtgttttctaaatatttacagaaagaaaatttacagagtagtttcctggtcaaactctaatgagtatctcagtactttcccctccacttctcacgtcttctttggggacgggt

SEQ ID NO: 13727 - DNA, 120 bp, synthetic construct
  misc_feature 1..120: note = Artificially Synthesized Probe
  source 1..120: mol_type = other DNA
tttactctcccgaatgcccaagatgacgacgagggaagcaatgggatactaagctacagcctaagccccagtcagcactttcgcctggacatgggatcgcgggttgacggcagcgaatac

SEQ ID NO: 13728 - DNA, 120 bp, synthetic construct
  misc_feature 1..120: note = Artificially Synthesized Probe
  source 1..120: mol_type = other DNA
ctttagtgtaaaggatgaagacctcgattctaatggtagggtcatttgtggcatgtctagtgcaggcccttttcagctgacggcttcctttgacaactactacagcctgctgattgatgg

SEQ ID NO: 13729 - DNA, 120 bp, synthetic construct
  misc_feature 1..120: note = Artificially Synthesized Probe
  source 1..120: mol_type = other DNA
tgcgaaatcttgccactggggtaggactgaatttgccaatatcctgtattcagattcggaataggaaaggggatcacgctaatgtcaatgccatggtaagcaaattttatggaatttgat

SEQ ID NO: 13730 - DNA, 120 bp, synthetic construct
  misc_feature 1..120: note = Artificially Synthesized Probe
  source 1..120: mol_type = other DNA
gtgaaggtgtcttctttgggaatgacaccctaaaacatagctgatagctccatagcagtgttttgtaactgctttggagtttttgcttacacaaaaactgtaagcctctctcataacatc

SEQ ID NO: 13731 - DNA, 120 bp, synthetic construct
  misc_feature 1..120: note = Artificially Synthesized Probe
  source 1..120: mol_type = other DNA
ttgtagagctagcaagaaaaacttcaatgctgtgtctgggactaagtatgagtccagttctacagatgacaaaggaattaataggtatgcacatcattacattgtgatatttgcagtgga

SEQ ID NO: 13732 - DNA, 120 bp, synthetic construct
  misc_feature 1..120: note = Artificially Synthesized Probe
  source 1..120: mol_type = other DNA
acttaccatacaactggccttattaaatttccacatgaaagttatacatagtttcaacataccaatgttatattagtgtattgttcacctggaattaaagcatcttcttttttgccaggg

SEQ ID NO: 13733 - DNA, 120 bp, synthetic construct
  misc_feature 1..120: note = Artificially Synthesized Probe
  source 1..120: mol_type = other DNA
tgcaatctcgtattctcctgtgctgtagagaaagataaacactttatttctaacccatcccaaattccttggctgttcctagagccatctggttaccatctacagatattctgtgttcat

SEQ ID NO: 13734 - DNA, 120 bp, synthetic construct
  misc_feature 1..120: note = Artificially Synthesized Probe
  source 1..120: mol_type = other DNA
ataatcagtgcttcatcaagggcattcttactggtatttttcttactgcaaatgtccaatcatgaatgtaataaccaccagtacagtgtggagccactgctttgactccttctgtggttc

SEQ ID NO: 13735 - DNA, 120 bp, synthetic construct
  misc_feature 1..120: note = Artificially Synthesized Probe
  source 1..120: mol_type = other DNA
ttacaaaactagtatagagagatcccatgtgcttgtcacccacttttccccagtgataacaccctgaatccttttcatgtgagtcttaatagtcttttgaatgcttccttgatttctggt

SEQ ID NO: 13736 - DNA, 120 bp, synthetic construct
  misc_feature 1..120: note = Artificially Synthesized Probe
  source 1..120: mol_type = other DNA
ctaaaccaccacgcccagccaaagttgtcttttttatttagtattctttctatccttttaaagaaaacatatcctgcttcaagtcatgaagatatattcctgtgttttcttctataacat

SEQ ID NO: 13737 - DNA, 120 bp, synthetic construct
  misc_feature 1..120: note = Artificially Synthesized Probe
  source 1..120: mol_type = other DNA
attcttgtgccaatacattctgtgttaaatatagtaacttttcatttgtattgatatctaattgtgtaagttctctcactttgttattctgcttcaagattaacttagctatttttggcc

SEQ ID NO: 13738 - DNA, 120 bp, synthetic construct
  misc_feature 1..120: note = Artificially Synthesized Probe
  source 1..120: mol_type = other DNA
cataggccaccatgcctggtcttttaaaaactttctaatcacatagttttcttgctttctgtcattgcctatgaaattcagtataaaattgaatagaagtaatgttaatggataatcttg

SEQ ID NO: 13739 - DNA, 120 bp, synthetic construct
  misc_feature 1..120: note = Artificially Synthesized Probe
  source 1..120: mol_type = other DNA
agatgcgcacacacacacacgcacaagaaattggcttttaactttccattcttataatgctctagtcggagtttggcatcaaggctatcctggctttatatagtaagttaagaagtgtta

SEQ ID NO: 13740 - DNA, 120 bp, synthetic construct
  misc_feature 1..120: note = Artificially Synthesized Probe
  source 1..120: mol_type = other DNA
agggtgtgaatggtcaatttctataaatgttctgcatgttcaagaaaaagcagtattctgacattgcttgttgttgtgttctgtatatgtccattaggtcatctttgctagttgtgttgt

SEQ ID NO: 13741 - DNA, 120 bp, synthetic construct
  misc_feature 1..120: note = Artificially Synthesized Probe
  source 1..120: mol_type = other DNA
caagtttataggattaaattttcctttcctattttccttctggcctttttggtgccaagtcaaattccccagcagttttctgggctggagagtaggtgggtttagttttcacatactatt

SEQ ID NO: 13742 - DNA, 120 bp, synthetic construct
  misc_feature 1..120: note = Artificially Synthesized Probe
  source 1..120: mol_type = other DNA
tcctacaacttatgtccaattttatgtcaagttcaatattctgtttacctctttgggcttagctttcctccacaatttgtcctagcagttccccattatcttatcagattttcagtgctt

SEQ ID NO: 13743 - DNA, 120 bp, synthetic construct
  misc_feature 1..120: note = Artificially Synthesized Probe
  source 1..120: mol_type = other DNA
gatggcataatgtatttttaggcagaatattacaaaggcatgttttccacaaactagttggatttggccctgtgtcaataaaaattccagtaagatgattattttgctttagcatgacaa

SEQ ID NO: 13744 - DNA, 120 bp, synthetic construct
  misc_feature 1..120: note = Artificially Synthesized Probe
  source 1..120: mol_type = other DNA
atgtcacagaagtcaagaagaggtctctgaagtgttcattggactggtcattatgatgtcatgagcactttagcatgagcagctttagaagtgtggttataggagaagcagtgaattaaa

SEQ ID NO: 13745 - DNA, 120 bp, synthetic construct
  misc_feature 1..120: note = Artificially Synthesized Probe
  source 1..120: mol_type = other DNA
attttgcctttgaacaccttagtaagtctgagcatttacatggaaaaaatgctgggtttattcctcctgttattgtattttacaagtctgtcgagggtccacagtgatctttgccccata

SEQ ID NO: 13746 - DNA, 120 bp, synthetic construct
  misc_feature 1..120: note = Artificially Synthesized Probe
  source 1..120: mol_type = other DNA
aaagacttaaacatagacctgaaattgtaaaactaacaaagaaaacacagtgggaaagatgaaagatcaataacactgatctgagcaatgatgttttttatatgaccctgaaagcacagg

SEQ ID NO: 13747 - DNA, 120 bp, synthetic construct
  misc_feature 1..120: note = Artificially Synthesized Probe
  source 1..120: mol_type = other DNA
catcagactgtagcccataaataggtacgtgtcaattaaaataataaaaatagtaaaatgtatagttacttccacggggtagaaaatgtggtatatattcatggtatactacacagcctt

SEQ ID NO: 13748 - DNA, 120 bp, synthetic construct
  misc_feature 1..120: note = Artificially Synthesized Probe
  source 1..120: mol_type = other DNA
ccttaaccctgatcttatgagaaaagtgttccatattttacaattaagtatgtgctactcataggtttttcccaaatactttattaaatttaggaagtaccctttctggtttgctcagag

SEQ ID NO: 13749 - DNA, 120 bp, synthetic construct
  misc_feature 1..120: note = Artificially Synthesized Probe
  source 1..120: mol_type = other DNA
tcacccatttattacttaggagtgtgatcaagtttacaaatatttttggttttcctagctatcttgttgcttttgatttctaatctaattctcttttggtcagagaacatactctgcatg

SEQ ID NO: 13750 - DNA, 120 bp, synthetic construct
  misc_feature 1..120: note = Artificially Synthesized Probe
  source 1..120: mol_type = other DNA
tgtttagatttgtgtccttcaatacattatttgctttctatttgtcccctctgattttgttcttctgtttccgcttatctgttgtcttttgaattatttgggtattcctcagaatctctt

SEQ ID NO: 13751 - DNA, 120 bp, synthetic construct
  misc_feature 1..120: note = Artificially Synthesized Probe
  source 1..120: mol_type = other DNA
gttatagtagctactttaaagtcattgtccgctaattcccacatctgtgtcatctcaggtttggattcttgatggtctttacctttaggaatgcatcacatttttctggtattctatgtt

SEQ ID NO: 13752 - DNA, 120 bp, synthetic construct
  misc_feature 1..120: note = Artificially Synthesized Probe
  source 1..120: mol_type = other DNA
tgcgggtacaggcattgggtaaatactcctgttccaaaagggaaaaaccagccaaaagaaagaattataggccccatgcaagtccgaaatccagtagggcagttattaaatcttaaagct

SEQ ID NO: 13753 - DNA, 120 bp, synthetic construct
  misc_feature 1..120: note = Artificially Synthesized Probe
  source 1..120: mol_type = other DNA
agtttagttcttttagctttagcctttgctctttatatgtgattcagggacggcagagatgtgggaagaatttgatcatagaatttagggctcaccttcttttgttctgtgcactcaagg

SEQ ID NO: 13754 - DNA, 120 bp, synthetic construct
  misc_feature 1..120: note = Artificially Synthesized Probe
  source 1..120: mol_type = other DNA
cccagagtccttagatatttgctttatgtattttggccaggagctatagttgttatctctggaagggtctgtttattatgagcttactttgatctactagactgagcttcagacattgtg

SEQ ID NO: 13755 - DNA, 120 bp, synthetic construct
  misc_feature 1..120: note = Artificially Synthesized Probe
  source 1..120: mol_type = other DNA
attaatcttgagttaatttttgtataagatgtaaggaaagggtccagtttcaattttctgcatatggctagccaattctcccagcaccatttattaaatagggaatcttttcctcattgc

SEQ ID NO: 13756 - DNA, 120 bp, synthetic construct
  misc_feature 1..120: note = Artificially Synthesized Probe
  source 1..120: mol_type = other DNA
ttcattcataatatggctgtctacttgcttgttgtttgtgcataggaatgctagcaatttttgcacattgattttgtatcctgagactttgctgaagttgcttatcagcttaagaagctt

SEQ ID NO: 13757 - DNA, 120 bp, synthetic construct
  misc_feature 1..120: note = Artificially Synthesized Probe
  source 1..120: mol_type = other DNA
acaaaaatttggcgaagcattttggcatgtctacctaaaatttaaatatgtaagcactagtccccccttacctgcagtttcactctgagcagtttcagaaaataggtgagcacagtacag

SEQ ID NO: 13758 - DNA, 120 bp, synthetic construct
  misc_feature 1..120: note = Artificially Synthesized Probe
  source 1..120: mol_type = other DNA
tttgtttcaattctatcagccaagtatactatgctttctttgcttgtgatagaaaaaagagagaaaaaacacagaagcaaaaagtaaagttgtacaatagtgtgtagagtgtggttccat

SEQ ID NO: 13759 - DNA, 120 bp, synthetic construct
  misc_feature 1..120: note = Artificially Synthesized Probe
  source 1..120: mol_type = other DNA
gagcttatgataattggatcaaaggaatactagtccagcttgagagtactgcagaaaaccaatcacagaaagctatgatgaaattttaattataaaggatattgaatatcctagagtgac

SEQ ID NO: 13760 - DNA, 120 bp, synthetic construct
  misc_feature 1..120: note = Artificially Synthesized Probe
  source 1..120: mol_type = other DNA
tctgtcaaggaatacacgagtgggatttatatcagaaaaatcaaagccatttgtaaagccccattacttaggcagaatatcataggtaggaggtagatgttactgaaagaagaagttggg

SEQ ID NO: 13761 - DNA, 120 bp, synthetic construct
  misc_feature 1..120: note = Artificially Synthesized Probe
  source 1..120: mol_type = other DNA
gaaacatagcttaacctaggcagttgcaattcttgttccaaaaatgctcaatttgctgctggactgcatggacacttgctacctccttgttttgagtcattaacaaaatgttgaatggga

SEQ ID NO: 13762 - DNA, 120 bp, synthetic construct
  misc_feature 1..120: note = Artificially Synthesized Probe
  source 1..120: mol_type = other DNA
aagcttaatggcactttttaaaagataggaaattgggttctctagtcacatctgtaagttatttcagtgccttggaagatcatttatctggccacagataattgacttacttacatcagt

SEQ ID NO: 13763 - DNA, 120 bp, synthetic construct
  misc_feature 1..120: note = Artificially Synthesized Probe
  source 1..120: mol_type = other DNA
actagctccttccctatttgacagatacttctcaacctcctctccataagatatgctctatccctatataggaaatttttctgtagcagcttgagtttactaaaaataagatctgaagaa

SEQ ID NO: 13764 - DNA, 120 bp, synthetic construct
  misc_feature 1..120: note = Artificially Synthesized Probe
  source 1..120: mol_type = other DNA
taggctaagtaacatgtccatagccaaacagttagtcactggcaggagtgtgactgactccaaagtctatattcctaattactgtgttctactttttaatagagagctcttgaaggtcca

SEQ ID NO: 13765 - DNA, 120 bp, synthetic construct
  misc_feature 1..120: note = Artificially Synthesized Probe
  source 1..120: mol_type = other DNA
actttgttccagtccatagctagaaaatgacccatagaggaagatctacagatgacagaatactgggagatgaagagaaaggacgttttagtgagtgctttttttgcacatgaggcaata

SEQ ID NO: 13766 - DNA, 120 bp, synthetic construct
  misc_feature 1..120: note = Artificially Synthesized Probe
  source 1..120: mol_type = other DNA
taaacagagcattttaaacatttaaatattggttatttgccaaggcacacactgaaaataagggccacttggccgagagcagaattgagtcttggatcccaggatgctggttttaggctt

SEQ ID NO: 13767 - DNA, 120 bp, synthetic construct
  misc_feature 1..120: note = Artificially Synthesized Probe
  source 1..120: mol_type = other DNA
gagcgccgttgaggtggaaatattggacatcaacgacaactcaccgcgtttcccgcggcccaactaccagcttcaggtaagcgaatcggtggcgcctggagcgcgctttcacatagagag

SEQ ID NO: 13768 - DNA, 120 bp, synthetic construct
  misc_feature 1..120: note = Artificially Synthesized Probe
  source 1..120: mol_type = other DNA
tacactgaaggttgagatctctgacatcaatgacaatccaccaagcttcctggaggactcctattccatctacatacaggagaacaatttgccaggtgtgttgctctgtactgtgcaagc

SEQ ID NO: 13769 - DNA, 120 bp, synthetic construct
  misc_feature 1..120: note = Artificially Synthesized Probe
  source 1..120: mol_type = other DNA
cctttatctaataatagcattaagcacagtgtcttttatatttcttttgacaatcatcattttgagcatcatcaagtgctaccgctacactgcgtatggcactgcatgctgtggaggctt

SEQ ID NO: 13770 - DNA, 120 bp, synthetic construct
  misc_feature 1..120: note = Artificially Synthesized Probe
  source 1..120: mol_type = other DNA
gaacctatgtgataggatcctctggaaatgcatgtcacaagtgataaagctgtagtatttagacatcatactgaagctaaagtttgctttggctgtatgatgtggcaactcttctgtaga

SEQ ID NO: 13771 - DNA, 120 bp, synthetic construct
  misc_feature 1..120: note = Artificially Synthesized Probe
  source 1..120: mol_type = other DNA
ggcacaaaagttccattcctgattgagagtagatttttctcatggacatttcagatagatttattcatttatcagaagtgcctggtgttagtcaatgctgagaaaccatgggaggcagat

SEQ ID NO: 13772 - DNA, 120 bp, synthetic construct
  misc_feature 1..120: note = Artificially Synthesized Probe
  source 1..120: mol_type = other DNA
ctttctttttttcctacctagttactacagatggcaggagagtcctggggtacaattagtaccatgtgcctacattaaaagtagatgggaattagagaggaagagtaagggaatttgtac

SEQ ID NO: 13773 - DNA, 120 bp, synthetic construct
  misc_feature 1..120: note = Artificially Synthesized Probe
  source 1..120: mol_type = other DNA
tggtgttgtgattgttaatgagtcactttgagtactctagtagatttgtccaacagtgtctcagtgggcccagctggcacaacatgtagaaattatgaaagagtagcagagatgaattaa

SEQ ID NO: 13774 - DNA, 120 bp, synthetic construct
  misc_feature 1..120: note = Artificially Synthesized Probe
  source 1..120: mol_type = other DNA
gttctgggtacttgcttgttgcctaccaatttttgctctcaatgagaggtcagaataatgtcaatttgcaaatgtttgaggaaacattcctgtcaccaaacccagaggtttagctgaata

SEQ ID NO: 13775 - DNA, 120 bp, synthetic construct
  misc_feature 1..120: note = Artificially Synthesized Probe
  source 1..120: mol_type = other DNA
aacagtctatgtatcccttttctgatgatttgtaacaaattaccacaagtaagttgtttaaaacaccacctatttgttatctcacagtcctgtaccatgtggctgagttgtccgctcagg

SEQ ID NO: 13776 - DNA, 120 bp, synthetic construct
  misc_feature 1..120: note = Artificially Synthesized Probe
  source 1..120: mol_type = other DNA
tctgcagtggatatattcttaatacagtcctattaggaaggaaaaggagatattatatgcagtctcatgtcccagagggcaatttgttgatgtcttccacatggatttccatggtacgaa

SEQ ID NO: 13777 - DNA, 120 bp, synthetic construct
  misc_feature 1..120: note = Artificially Synthesized Probe
  source 1..120: mol_type = other DNA
ttgttgctgatggactagtatagaaaatagcagcatgacaaattaaatgtgtcattggggaagtgagattgtataatgaactgagtttcctggtcagtcctgctggaactgtgcctttca

SEQ ID NO: 13778 - DNA, 120 bp, synthetic construct
  misc_feature 1..120: note = Artificially Synthesized Probe
  source 1..120: mol_type = other DNA
tgtagaggaaaatacaaaatacaacttttatcccccatttttttcattcaactatacctcaatattcagtgacagggccacctcaatctccgcccatgaaaacgcatctagaggagtgtc

SEQ ID NO: 13779 - DNA, 120 bp, synthetic construct
  misc_feature 1..120: note = Artificially Synthesized Probe
  source 1..120: mol_type = other DNA
cctggaaatatttaagggagtaactaatcaattagcagcattcctgggagaacattgtcttgtcattttaacagaaaactctctttgtgattttgcagccacgacagcccaaccctgact

SEQ ID NO: 13780 - DNA, 120 bp, synthetic construct
  misc_feature 1..120: note = Artificially Synthesized Probe
  source 1..120: mol_type = other DNA
ctggaggtgatccagtatccatgccatggggccaaataaaagattcattatttgcgaatgtctttggaaaccaaatgggaaggaccaagaaacaaatgatcacaactatcaaaaggattt

SEQ ID NO: 13781 - DNA, 120 bp, synthetic construct
  misc_feature 1..120: note = Artificially Synthesized Probe
  source 1..120: mol_type = other DNA
cctaaataatactaatctttttcgtatgtgtgcttgggtgttctcggtctttccagtcttggacatcatgtaactattctttaaaaaattctgctttgagctgagctggctccaggatag

SEQ ID NO: 13782 - DNA, 120 bp, synthetic construct
  misc_feature 1..120: note = Artificially Synthesized Probe
  source 1..120: mol_type = other DNA
atactgcaccatgttctcttttcccttgaacagtttatgttctatctctgcttgcctctaaaggtctcccagtttgtatctcactcccagcaatgttttatgctgaattaatctcttctg

SEQ ID NO: 13783 - DNA, 120 bp, synthetic construct
  misc_feature 1..120: note = Artificially Synthesized Probe
  source 1..120: mol_type = other DNA
ttgtttaaatcaggtacctttcaaatgcttaggtcatccaagccatgcagagaagatctggtggccttatgcacagagatgacactgttaacaaagatcttttggttgaagactatggaa

SEQ ID NO: 13784 - DNA, 120 bp, synthetic construct
  misc_feature 1..120: note = Artificially Synthesized Probe
  source 1..120: mol_type = other DNA
acatgcagctaagggcccatttttactggcaactttaagggcattcgttgattctaatcagccaggatttgctatttatggatgttgcacaattcaactaaaagtcacatttgtccaaaa

SEQ ID NO: 13785 - DNA, 120 bp, synthetic construct
  misc_feature 1..120: note = Artificially Synthesized Probe
  source 1..120: mol_type = other DNA
tcagtggtgtaaagttaaagggattctctgccttctccctgtccttctggtacttttaggtttttaggactcaatatatgttctgcactgcttggagggaatatggcataaagattaaga

SEQ ID NO: 13786 - DNA, 120 bp, synthetic construct
  misc_feature 1..120: note = Artificially Synthesized Probe
  source 1..120: mol_type = other DNA
attgctcttctcatcccaacacttgcaatggctgaataaaggaagtggggcctgccttacgctaatcctcgttcatatgtgtttcttaaagttatttttccttcactgatgaattccttt

SEQ ID NO: 13787 - DNA, 120 bp, synthetic construct
  misc_feature 1..120: note = Artificially Synthesized Probe
  source 1..120: mol_type = other DNA
aaagattaattaggtagcggaagccactaaggcagtgagtcttagttagagaactttggtttagacaatggttctcaaaggggcagcaacaccaacaatacccggaaacttgttagaaat

SEQ ID NO: 13788 - DNA, 120 bp, synthetic construct
  misc_feature 1..120: note = Artificially Synthesized Probe
  source 1..120: mol_type = other DNA
tctgctatagagaagatttttttaaagtgcctgtctctttgtttccttaggggattgcttttgccctgatttgccacatctctttactctgtggaaaatggacagtttatgtgccctagt

SEQ ID NO: 13789 - DNA, 120 bp, synthetic construct
  misc_feature 1..120: note = Artificially Synthesized Probe
  source 1..120: mol_type = other DNA
gatacataatagaagaatttcttccgtaacagtagccccaaacagagatcacgtgtctcctgaaacctatccagtctcatgtgcactcagatgtacgatcctggatataacattttagag

SEQ ID NO: 13790 - DNA, 120 bp, synthetic construct
  misc_feature 1..120: note = Artificially Synthesized Probe
  source 1..120: mol_type = other DNA
tgtcctagtgacagcaagggtctttcatggcaatattttaaaagaaactctgcccagatttcaaaggaacgtgaaaattttatcttcagaggcagtcagctttgcagttgaaaaggccat

SEQ ID NO: 13791 - DNA, 120 bp, synthetic construct
  misc_feature 1..120: note = Artificially Synthesized Probe
  source 1..120: mol_type = other DNA
agaagctcccttctctcagctaaagcctattagcaaaaatagagccctgaggacattgtattttaagtgtatgttccagtgagtgggtcgttgctgggtcaagttttataagtctttaaa

SEQ ID NO: 13792 - DNA, 120 bp, synthetic construct
  misc_feature 1..120: note = Artificially Synthesized Probe
  source 1..120: mol_type = other DNA
ttcatgacaatttaggtttgctcctcacttttttctgagtcctctctagtagagccattaatatgcatattgctactagcagcctgttcaaggtaatgtaggctctttctatcatgctct

SEQ ID NO: 13793 - DNA, 120 bp, synthetic construct
  misc_feature 1..120: note = Artificially Synthesized Probe
  source 1..120: mol_type = other DNA
ttcctgtgttggggataggagggtgggatggttcagggtcaattttatggatccatatgtatctaaggatgtgtttgttttttgggaacattttgtataacaaccagtttcactctagct

SEQ ID NO: 13794 - DNA, 120 bp, synthetic construct
  misc_feature 1..120: note = Artificially Synthesized Probe
  source 1..120: mol_type = other DNA
acagtcctgcccttataaatctaatggtgaagggagaaatgtaaagaaatatgatggaaatattacattgtcatgtgataagggcgacaataatgccctacgtaggtagggtcaacgaag

SEQ ID NO: 13795 - DNA, 120 bp, synthetic construct
  misc_feature 1..120: note = Artificially Synthesized Probe
  source 1..120: mol_type = other DNA
aaaatactgggtattgcaggatggcaagtaggatgtggagaggaagagaattccaggcaaaggaaacaatgcgtgcatgcaaaaacaaaatacaaaaaactgaattgtgtagtctgggtt

SEQ ID NO: 13796 - DNA, 120 bp, synthetic construct
  misc_feature 1..120: note = Artificially Synthesized Probe
  source 1..120: mol_type = other DNA
gagaaaatgtggagagtgaagggcaggtttaaaatttgtctcatgttagtttctgaagggagatagcctggcattgcacagtgcctcacatttctatcgtatcacttaataattgtgcaa

SEQ ID NO: 13797 - DNA, 120 bp, synthetic construct
  misc_feature 1..120: note = Artificially Synthesized Probe
  source 1..120: mol_type = other DNA
cactatcttgaagttcttgataatttgttaacaagggccgcctccccccattttcatttggcaaatttcactggttcctgcaaattatgtagttaatcctgggtgcaggctagtttttga

SEQ ID NO: 13798 - DNA, 120 bp, synthetic construct
  misc_feature 1..120: note = Artificially Synthesized Probe
  source 1..120: mol_type = other DNA
tcaagaagtagaattacagaatcataggatataaaaatatcaaattggcaaattggcattcacgtacctgtggttggactgcacttgttacatacttccctctgagccttccatccccac

SEQ ID NO: 13799 - DNA, 120 bp, synthetic construct
  misc_feature 1..120: note = Artificially Synthesized Probe
  source 1..120: mol_type = other DNA
ctgtaagtcaatgttaatcaaatagtatcctagaaaatagtagaaagcagaatgctggagctgagatttgaacccaagacttttgatacttcgtccagtgtgctttccaccatgcctaag

SEQ ID NO: 13800 - DNA, 120 bp, synthetic construct
  misc_feature 1..120: note = Artificially Synthesized Probe
  source 1..120: mol_type = other DNA
aatctgggttcgcagcacatgatgtctttatactcttaacctagaaatggcagagttattttgggcacaaagcaagagctgtggctttaaaaatatgccaagtgtatttatctcttccgc

SEQ ID NO: 13801 - DNA, 120 bp, synthetic construct
  misc_feature 1..120: note = Artificially Synthesized Probe
  source 1..120: mol_type = other DNA
taaatacatgcaaaataccccataaactgtctaatccataataagcaatcaatagtccttaaacaaatgaatcttctgttgctctgatcttaataagtaaaatttaacgagtttttactt

SEQ ID NO: 13802 - DNA, 120 bp, synthetic construct
  misc_feature 1..120: note = Artificially Synthesized Probe
  source 1..120: mol_type = other DNA
tgagatattttacaacctgggctgtttcagtggttgatggcggatggtttttgccttttggtcagcctgagtatatactatcattctacaatcggccaaattctgacagagagggagaca

SEQ ID NO: 13803 - DNA, 120 bp, synthetic construct
  misc_feature 1..120: note = Artificially Synthesized Probe
  source 1..120: mol_type = other DNA
gagatactagaaatgtctacttcatagggctcttgtcaggaccaaaacctatacgacgtgcagatttgtttaactctgttgcacacacataggaagggcacagtaaatgttaactacatc

SEQ ID NO: 13804 - DNA, 120 bp, synthetic construct
  misc_feature 1..120: note = Artificially Synthesized Probe
  source 1..120: mol_type = other DNA
cgtattctgttaaataaacttttaaatcctattgggttgtaatctgtagtctgggaagggctctgcctaacgattcagacccctaccagatttatatgtgtctgaaatcctccttctagc

SEQ ID NO: 13805 - DNA, 120 bp, synthetic construct
  misc_feature 1..120: note = Artificially Synthesized Probe
  source 1..120: mol_type = other DNA
ttaggtgccgaatcagaggtttttaaatacatttctctcttttgtctcagtctcttagagacaggacctgtattttaaaggtaaacaggcagattctggctgagctcaattgcagatttg

SEQ ID NO: 13806 - DNA, 120 bp, synthetic construct
  misc_feature 1..120: note = Artificially Synthesized Probe
  source 1..120: mol_type = other DNA
ccaaagagtgtttgaggatctgaaagaaggcctgtatggttggagtataatagtaagagggagatttgtagatgagagtggagaagaaataaaaatcagattattgaagggacttatgta

SEQ ID NO: 13807 - DNA, 120 bp, synthetic construct
  misc_feature 1..120: note = Artificially Synthesized Probe
  source 1..120: mol_type = other DNA
agagatgatggtgtcctgaaagagtggtggcagtgaaaattgggagaagaggacagagtcaagatatatttaggaggcagaaatgacaggtcttgatgatgtattataaatggagaatga

SEQ ID NO: 13808 - DNA, 120 bp, synthetic construct
  misc_feature 1..120: note = Artificially Synthesized Probe
  source 1..120: mol_type = other DNA
ccttttgtaacaggggtccagtccatctaagaacttattggggttattctacatgacaaagaactcatgagaataagtgtttcaagaaggggatgacaaatgctgctgagaggtttgata

SEQ ID NO: 13809 - DNA, 120 bp, synthetic construct
  misc_feature 1..120: note = Artificially Synthesized Probe
  source 1..120: mol_type = other DNA
ttgagtgtatgtccaactagactgtgagcacactgagggaaggaatttggcttggaaagtaaaattggctcccagtgttttatctaaacaaataggctcaatttacaacaggattccatc

SEQ ID NO: 13810 - DNA, 120 bp, synthetic construct
  misc_feature 1..120: note = Artificially Synthesized Probe
  source 1..120: mol_type = other DNA
ggagcctactaacagccaaattgacaaaagtgacttcataaccttcggcaaaaaggaggagaccaagaaaaagaagaaaaagaagaagggtaacaagacccaggagaaaaaagagaaagg

SEQ ID NO: 13811 - DNA, 120 bp, synthetic construct
  misc_feature 1..120: note = Artificially Synthesized Probe
  source 1..120: mol_type = other DNA
atacctgcaagccaacagttcagtgttttaacagagaaccaccctgggaaacagaagcagatctgatgtgtttcctatacatgtcctgtgctcactttattaaaaattcttttgcacaca

SEQ ID NO: 13812 - DNA, 120 bp, synthetic construct
  misc_feature 1..120: note = Artificially Synthesized Probe
  source 1..120: mol_type = other DNA
gtgattcaaggaattttatttatggtccagccaagagccatctcgtgccaagacttctgctggcaagggaatggataaagctgttttgttctagtaacaattttggaatgaatactgaca

SEQ ID NO: 13813 - DNA, 120 bp, synthetic construct
  misc_feature 1..120: note = Artificially Synthesized Probe
  source 1..120: mol_type = other DNA
ctgaaggtggttctgtacctgctccgagtgtgcttagcgatggcctggaaatccggcggcgccagccactcggagctaatccacaatctccgcagtaagtgccacctccgcccgttgtag

SEQ ID NO: 13814 - DNA, 120 bp, synthetic construct
  misc_feature 1..120: note = Artificially Synthesized Probe
  source 1..120: mol_type = other DNA
ggataggatgagtgctgtgtcactttctttttttaaatcgaaatatagcgtccccgttttgttgggagactacaagggccgcagtctataataaactcactggtcagaatttatagcatt

SEQ ID NO: 13815 - DNA, 120 bp, synthetic construct
  misc_feature 1..120: note = Artificially Synthesized Probe
  source 1..120: mol_type = other DNA
tgagccaccgcgccaggccggtacttgatatattagtcattttggatttttttttggtggggggacaatacttaatgtggaaactgagtctttagtgtttggtaagagagaatgttgatt

SEQ ID NO: 13816 - DNA, 120 bp, synthetic construct
  misc_feature 1..120: note = Artificially Synthesized Probe
  source 1..120: mol_type = other DNA
ttatcatagtaggcacttggctgtggcagaaatttgtaatcaatcaggctcttaaagtctctccttttttgggccaaatttgtggtaagccaagactagatagatcttttcccggtggtt

SEQ ID NO: 13817 - DNA, 120 bp, synthetic construct
  misc_feature 1..120: note = Artificially Synthesized Probe
  source 1..120: mol_type = other DNA
gtctatagcagtcttgccctatagagtgcttggtgatgttctctatattgtccagtgtggtagctactagctacatgtggcatttaacatttgaaatgtggacaactgaagaaccgaaat

SEQ ID NO: 13818 - DNA, 120 bp, synthetic construct
  misc_feature 1..120: note = Artificially Synthesized Probe
  source 1..120: mol_type = other DNA
taataatggacccaaagtgcaagaataatggtgctggcatgtaatgatacttgttctattttattcattatttttgttaatttcttaattgtgcctaatttataaactaaactttattat

SEQ ID NO: 13819 - DNA, 120 bp, synthetic construct
  misc_feature 1..120: note = Artificially Synthesized Probe
  source 1..120: mol_type = other DNA
aaatagcgaattccagatttggatttaggatctgggagaaaagattggaggcaaggatccaacaccaaggttttaggccttggcaactggaatgatttgccattttctaaattggaaatg

SEQ ID NO: 13820 - DNA, 120 bp, synthetic construct
  misc_feature 1..120: note = Artificially Synthesized Probe
  source 1..120: mol_type = other DNA
tatgcacatgggaaaaatagaaccagctggtaaaatcctaagaaattggagcctcaaagtccagaggccttctcattttgacttatttcaaaccagtcttatggataggtactagtaagt

SEQ ID NO: 13821 - DNA, 120 bp, synthetic construct
  misc_feature 1..120: note = Artificially Synthesized Probe
  source 1..120: mol_type = other DNA
actgtaagggatattgtagaagggattttgtcatcagatttgaatgtacactagatctctaaggacccttccaaatccaagattctgtgatttttttccccagtggtcccttgtacctag

SEQ ID NO: 13822 - DNA, 120 bp, synthetic construct
  misc_feature 1..120: note = Artificially Synthesized Probe
  source 1..120: mol_type = other DNA
cgcgcccggccatgttgtgaatttaaaactaattcctttcacattttttcagtacagaaagtacctgggagtgtctcagcctctacttagcatctatcatgcctaatcattctgaatggg

SEQ ID NO: 13823 - DNA, 120 bp, synthetic construct
  misc_feature 1..120: note = Artificially Synthesized Probe
  source 1..120: mol_type = other DNA
gaataatcactgattctttcagactgtcatcagattaactcagcagttcttacaaatgcctttcatagccatccctttcaccatattttcattgataccatcccagcccaggttcgtagt

SEQ ID NO: 13824 - DNA, 120 bp, synthetic construct
  misc_feature 1..120: note = Artificially Synthesized Probe
  source 1..120: mol_type = other DNA
actgatataactatatgaaggaaggggataggtttgtgttgtgtaaatactcatccatcttggcaggaggtcagcagatgatgtctaaagtagataaaacatgaaatacacacacacaca

SEQ ID NO: 13825 - DNA, 120 bp, synthetic construct
  misc_feature 1..120: note = Artificially Synthesized Probe
  source 1..120: mol_type = other DNA
gactttaacctctgtttcttgttccataatttataaactgacactacctcttaacccatctacttggtaagaaagggtattagggagttcccgctctcatttcctaattgattgacagtt

SEQ ID NO: 13826 - DNA, 120 bp, synthetic construct
  misc_feature 1..120: note = Artificially Synthesized Probe
  source 1..120: mol_type = other DNA
tctatgatatatatgttatatatatctatgatatatatctatgatatatatatctatgatatatatgatatatatatctatgatatgtatatctatgatatatatgatatatatatctat

SEQ ID NO: 13827 - DNA, 120 bp, synthetic construct
  misc_feature 1..120: note = Artificially Synthesized Probe
  source 1..120: mol_type = other DNA
gaatatggtaccaatttatgaagttagactcaatggctcctaaagcctcttgtgactttgagagtctatgaatcaccctctgggatttgaattaatttcaggggaaatgaaccactcaag

SEQ ID NO: 13828 - DNA, 120 bp, synthetic construct
  misc_feature 1..120: note = Artificially Synthesized Probe
  source 1..120: mol_type = other DNA
cgtctctactaaaaatacaaaaaattagccagtcgtggtggcgggtgcctgtagtcccagctactctggaggctgaggcaggaaaacggcgtgaacccgggaggcggagcttgcagtgag

SEQ ID NO: 13829 - DNA, 120 bp, synthetic construct
  misc_feature 1..120: note = Artificially Synthesized Probe
  source 1..120: mol_type = other DNA
atttctgtctttgctatacaattgggtatgtgtcctttgccaacatatccctggttatctcttggttaaatgaaacacatcctctagaagattcctcagaaagggcttgtgtgtacagca

SEQ ID NO: 13830 - DNA, 120 bp, synthetic construct
  misc_feature 1..120: note = Artificially Synthesized Probe
  source 1..120: mol_type = other DNA
gttttctggtgtctctttgtaattaatctcctcccttctcctatcctctagcaactacagacgggccttctaccactatggttttggcttttctagaatgtgttaaaaatggaatcatgt

SEQ ID NO: 13831 - DNA, 120 bp, synthetic construct
  misc_feature 1..120: note = Artificially Synthesized Probe
  source 1..120: mol_type = other DNA
ctcactgcagcctccacctcccaggttcaagcgattctcctgcctcagccttctgagtagctgggattacaggtgcgcaccaccacacccggctaatgtttgtatttttagtagagatag

SEQ ID NO: 13832 - DNA, 120 bp, synthetic construct
  misc_feature 1..120: note = Artificially Synthesized Probe
  source 1..120: mol_type = other DNA
ttggtttttttctttttcctacttttaggcattttgtggacagagttcattgtgtaccccctcctgttagtatagcatcctgcaccttctttaatggatgatgatattggtagtggggag

SEQ ID NO: 13833 - DNA, 120 bp, synthetic construct
  misc_feature 1..120: note = Artificially Synthesized Probe
  source 1..120: mol_type = other DNA
aacagtcaacagtatggtctggtcttcatcctgcctctgtgactgctcatcatctttcatggctctgttttctttgcatatcttttagatgttggctttgtcttctctacttattctctg

SEQ ID NO: 13834 - DNA, 120 bp, synthetic construct
  misc_feature 1..120: note = Artificially Synthesized Probe
  source 1..120: mol_type = other DNA
gaaaccaggttgccattacctgggccattacaacaacttccaatcattctctcttccagttcagtctctatagcacagctggtgtaattattctaaaatatctctgatcatgtctctctc

SEQ ID NO: 13835 - DNA, 120 bp, synthetic construct
  misc_feature 1..120: note = Artificially Synthesized Probe
  source 1..120: mol_type = other DNA
agccaccacaccctgccgtaaaaaaaaacttttaatgaaaacttacagtattagccgagtgctgagttttctttaggggccttagtgttgactaaagattagttttcaggttaggattaa

SEQ ID NO: 13836 - DNA, 120 bp, synthetic construct
  misc_feature 1..120: note = Artificially Synthesized Probe
  source 1..120: mol_type = other DNA
caactctcaacttactgaaattcttcctttcttagctgactctacaggagaagaaatttttagctgccgtactttagagggactgttttactagatgagcacgttaccctttggcatgat

SEQ ID NO: 13837 - DNA, 120 bp, synthetic construct
  misc_feature 1..120: note = Artificially Synthesized Probe
  source 1..120: mol_type = other DNA
gtgagccactgcgcttggcccagaaggagctttttaaggtagaaactggcatattaaaagattttggtggttgtcagtatctgtgacatgtaaaaattgaacataaaaggttatttagta

SEQ ID NO: 13838 - DNA, 120 bp, synthetic construct
  misc_feature 1..120: note = Artificially Synthesized Probe
  source 1..120: mol_type = other DNA
agccactgggcctggccagaacaataacttttctgattctctgcaagtatttggggttggagaagctcttatttaaacttaatactaatataaattctatatgtatttatagcaaattga

SEQ ID NO: 13839 - DNA, 120 bp, synthetic construct
  misc_feature 1..120: note = Artificially Synthesized Probe
  source 1..120: mol_type = other DNA
aatatgtagacatgtatgcatacatttgtgtttgtgtgtatcctgttaataagtgaaagaccggtaagcccaaaagaaaatgtgtaaaggacaggattgatagttcatcgtggccaggcg

SEQ ID NO: 13840 - DNA, 120 bp, synthetic construct
  misc_feature 1..120: note = Artificially Synthesized Probe
  source 1..120: mol_type = other DNA
gccaccatgcccagcctcatcttcacttatacttagtaaattgcaaattagcactataatgaggtaccagttttcacctatcagattgttagagattaaaaaatttgatactttgtattg

SEQ ID NO: 13841 - DNA, 120 bp, synthetic construct
  misc_feature 1..120: note = Artificially Synthesized Probe
  source 1..120: mol_type = other DNA
caggtggttttttgggtgggaaaaataagaatgaaacagtataaaagttgagtcccaaagggtatttagaatattctgtaatgtatgaaaatcacatatgcacacatacatgcacatata

SEQ ID NO: 13842 - DNA, 120 bp, synthetic construct
  misc_feature 1..120: note = Artificially Synthesized Probe
  source 1..120: mol_type = other DNA
tttgaactactactgaagggggaattaatgaattttataagtataatggtagaaaaatttattctttttcttgaaggtagaacgtaatatagccccaccccacccccccactctggtgcg

SEQ ID NO: 13843 - DNA, 120 bp, synthetic construct
  misc_feature 1..120: note = Artificially Synthesized Probe
  source 1..120: mol_type = other DNA
tgggaaattgactggagtggtatgctttcaggtattaagggaaatactttgtgatttttttctttcccctgaagtttggtctgggtgtccagttcattgctgaacaaagcatagcagtta

SEQ ID NO: 13844 - DNA, 120 bp, synthetic construct
  misc_feature 1..120: note = Artificially Synthesized Probe
  source 1..120: mol_type = other DNA
agtatttacctaggagtggaattaccagatcatatatgaaaactctatgtttaacattttgtggaatggccaaaccgtttttcaaagcagctgcaccattttacagtcccactagcaatg

SEQ ID NO: 13845 - DNA, 120 bp, synthetic construct
  misc_feature 1..120: note = Artificially Synthesized Probe
  source 1..120: mol_type = other DNA
cttatttcacttagcatatgtcatagcttatgtcagaattttctcccaaagctgatgcatttttaattacttatattttctgagccatctatgactgttaataaggaaaacttgtgtatc

SEQ ID NO: 13846 - DNA, 120 bp, synthetic construct
  misc_feature 1..120: note = Artificially Synthesized Probe
  source 1..120: mol_type = other DNA
agtactcaaaggctgaggaggtaatgtcagaaggacatacgagcagatttgaagaggctcccaaaggccaaattggagagaatttgagaatcaacaagaataatgatggtaacagattat

SEQ ID NO: 13847 - DNA, 120 bp, synthetic construct
  misc_feature 1..120: note = Artificially Synthesized Probe
  source 1..120: mol_type = other DNA
cctgaagaacagagcaaagtggtaggtggagggagataattgggggaacattctagattggcaaatgtaatgcatgaaccttgaatatattgggggaaaaaacagccatttaacacatat

SEQ ID NO: 13848 - DNA, 120 bp, synthetic construct
  misc_feature 1..120: note = Artificially Synthesized Probe
  source 1..120: mol_type = other DNA
gtttcctagtggtggttgacttattcttaaaactttttttttcaggaacacttcctaatggtccttcctgttgcatcatatcaggaggtccataatgtctggtcatccacttttagtgac

SEQ ID NO: 13849 - DNA, 120 bp, synthetic construct
  misc_feature 1..120: note = Artificially Synthesized Probe
  source 1..120: mol_type = other DNA
cttccccacctttcccccctttctattccacaaagccgccattgtcatcctggcccgttctcaatgagctgttgggcacacctcccagacggggtggtggccgggcagaggggctcctca

SEQ ID NO: 13850 - DNA, 120 bp, synthetic construct
  misc_feature 1..120: note = Artificially Synthesized Probe
  source 1..120: mol_type = other DNA
gcagagacgctcctcatatcccagacggggtggcggccgggcagaggctgcaatctcggcactttgggaggccaaggcaggcggctgggaggtagaggttgtagctagccgagatcacgc

SEQ ID NO: 13851 - DNA, 120 bp, synthetic construct
  misc_feature 1..120: note = Artificially Synthesized Probe
  source 1..120: mol_type = other DNA
gatagtacagttcctgtgtacttttgtccacacagtcttaccattggtaaagcaaatctcaccatttgctttatcatttattctctctccctttatcccctctctcctctgtgtgtgtgt

SEQ ID NO: 13852 - DNA, 120 bp, synthetic construct
  misc_feature 1..120: note = Artificially Synthesized Probe
  source 1..120: mol_type = other DNA
gcatttttgcctggcatatcccagaaatgaagtatcttagcagaggcatttgatgtcagtgtgtcccataattgtggtgttaactttgatcatctgattaaggtagtgttgacccagttt

SEQ ID NO: 13853 - DNA, 120 bp, synthetic construct
  misc_feature 1..120: note = Artificially Synthesized Probe
  source 1..120: mol_type = other DNA
gcatgcatatgcgctagaacttctatttgatcagttgcatgaaggagctaaagctcttgatgtaggatctggaagtggaatccttactgcatgttttgcacgtatggtaagagttttatt

SEQ ID NO: 13854 - DNA, 120 bp, synthetic construct
  misc_feature 1..120: note = Artificially Synthesized Probe
  source 1..120: mol_type = other DNA
tttttttttttcttcttaaaaacagaggttttattgcatttggtccacagttggtatttcaccttatctcatggtgcagggaccctgggtaggggactctctacagtacttggtggggca

SEQ ID NO: 13855 - DNA, 120 bp, synthetic construct
  misc_feature 1..120: note = Artificially Synthesized Probe
  source 1..120: mol_type = other DNA
acacatttaccatgtgtgaaagtactttgtgttttaagcactagagcctgtgttctaagtgctaccccatttttatgatggggtttatgcctttttcctccccattttgtactgaggaac

SEQ ID NO: 13856 - DNA, 120 bp, synthetic construct
  misc_feature 1..120: note = Artificially Synthesized Probe
  source 1..120: mol_type = other DNA
attataggtgtgagccactgtatatattttcatgttttctactaaaagcagtagaaacaagtgtagaaattccttcccatcaggcgggaggcagggtgtgtggtggctcagtcctgtaat

SEQ ID NO: 13857 - DNA, 120 bp, synthetic construct
  misc_feature 1..120: note = Artificially Synthesized Probe
  source 1..120: mol_type = other DNA
ctggaaaagtcataggaattgatcacattaaagagctagtagatgactcagtaaataatgtcaggaaggacgatccaacacttctgtcttcagggagagtacagcttgttggtaagtatc

SEQ ID NO: 13858 - DNA, 120 bp, synthetic construct
  misc_feature 1..120: note = Artificially Synthesized Probe
  source 1..120: mol_type = other DNA
gtgtggacactgaaaggggaatacaggagtaaaccacaccaaaatgagtctcatgttgccagtgagggacatgagagatcaagagatagacgaaggtcaagtgacagatcacgggattca

SEQ ID NO: 13859 - DNA, 120 bp, synthetic construct
  misc_feature 1..120: note = Artificially Synthesized Probe
  source 1..120: mol_type = other DNA
tttgaatgattaggatgagatttaaaacagaacttttcagttccgttatctccagtgccgtttcatgctttagagtgagtcacgtgcagggagtgtgaacgtcagaggtggtttattatc

SEQ ID NO: 13860 - DNA, 120 bp, synthetic construct
  misc_feature 1..120: note = Artificially Synthesized Probe
  source 1..120: mol_type = other DNA
tactaaaccccagtttgtggcgctcatatttgatccaggtaagaactaggacaacagtagaattgggaaaatccctctggagtttatgacctgataatcaggttttttttgtttgtttgt

SEQ ID NO: 13861 - DNA, 120 bp, synthetic construct
  misc_feature 1..120: note = Artificially Synthesized Probe
  source 1..120: mol_type = other DNA
ctgtttcttctgtctagtctcatccgtttttttggtaggcttagatcagttatgggaagatgaaagttgtataatttgttctggtcattgacttgctgcttattggccaagtgactggga

SEQ ID NO: 13862 - DNA, 120 bp, synthetic construct
  misc_feature 1..120: note = Artificially Synthesized Probe
  source 1..120: mol_type = other DNA
cttaggaattggtggcatcaagaccttgaaaatcataggtaaaacatgggtctgaaaagagggaatgctgcttgagactctgcatgaggaataatcagcactaatctctacgtaagaaat

SEQ ID NO: 13863 - DNA, 120 bp, synthetic construct
  misc_feature 1..120: note = Artificially Synthesized Probe
  source 1..120: mol_type = other DNA
agcaggcctggagaataaccagctcagatttggagcaagaggaggaaaggaaacaatgattggatacttcttgactcagcagcaaatcatagttacacagtcataactagaaatgatttt

SEQ ID NO: 13864 - DNA, 120 bp, synthetic construct
  misc_feature 1..120: note = Artificially Synthesized Probe
  source 1..120: mol_type = other DNA
aattctatgctctgcctttggcccgccaagaggatagttctatattagttggttcagttcaaacattttgagcactacagttgtaccaggtactgtgttagatgctaaagacacaaagat

SEQ ID NO: 13865 - DNA, 120 bp, synthetic construct
  misc_feature 1..120: note = Artificially Synthesized Probe
  source 1..120: mol_type = other DNA
ataaaatctgtaacttggtgatgtatgtgcttttttttttttcttttagctaatagatcagttaaagcccggaggaagattgatattgcctgttggtcctgcaggcggaaaccaaatgtt

SEQ ID NO: 13866 - DNA, 120 bp, synthetic construct
  misc_feature 1..120: note = Artificially Synthesized Probe
  source 1..120: mol_type = other DNA
acaaggagaaagaaggggaaagataacggtcgtctcagttttctaaaatgtcagaataccagagaggacattctacctctcagcttggtttatctgtttcaaccaaatcatagatacctg

SEQ ID NO: 13867 - DNA, 120 bp, synthetic construct
  misc_feature 1..120: note = Artificially Synthesized Probe
  source 1..120: mol_type = other DNA
tttctcttttcctccccttcccactcccttccatgagagagagtgacatcagtacataacagtgccattagctcaaattacttgaaattaaatgccaaaacaagaacggctttacagttt

SEQ ID NO: 13868 - DNA, 120 bp, synthetic construct
  misc_feature 1..120: note = Artificially Synthesized Probe
  source 1..120: mol_type = other DNA
aaaggttcccctgttttctaattatataaaccttaggcccccacaaaacctgaatccacctttgataaaaccaaactatttgtattaagaaatttaaaatagggccaggtatggtggctt

SEQ ID NO: 13869 - DNA, 120 bp, synthetic construct
  misc_feature 1..120: note = Artificially Synthesized Probe
  source 1..120: mol_type = other DNA
gcttttctttggccatttgttcagttgctaaatatttttcagcgtgaggatcttcttaatattattcgtgaattcaaccaatatgcatatgccaactaggccaggcactgtactaggtgc

SEQ ID NO: 13870 - DNA, 120 bp, synthetic construct
  misc_feature 1..120: note = Artificially Synthesized Probe
  source 1..120: mol_type = other DNA
gccaccagcctcaaactttcttcaggattactttaactcattataatactttcctaggaaccttctcttgtgtctcaccagctttccacctttcttactgaggaataatccagagctaat

SEQ ID NO: 13871 - DNA, 120 bp, synthetic construct
  misc_feature 1..120: note = Artificially Synthesized Probe
  source 1..120: mol_type = other DNA
ctttgtttattgatgtcttcttaaagtgccttgcatctatgaaaaagatgttaggaattgactgcatttccaagactgacagtattggtgctaagggatccaattgatcccgtgttccat

SEQ ID NO: 13872 - DNA, 120 bp, synthetic construct
  misc_feature 1..120: note = Artificially Synthesized Probe
  source 1..120: mol_type = other DNA
tcttttccttttttaaagtattttttagacagagaggatagttggaaaaatggtacctatgttgttgagggggcattaatttatttacagtatacttaatgtcttgcagcaggtaaattg

SEQ ID NO: 13873 - DNA, 120 bp, synthetic construct
  misc_feature 1..120: note = Artificially Synthesized Probe
  source 1..120: mol_type = other DNA
agttttactgaggtataactgagataccatacagtttattttagactgcatttttattccttccttcctctcactggcagttgctggtacagtgctgcacctggctgagtgaatggtttc

SEQ ID NO: 13874 - DNA, 120 bp, synthetic construct
  misc_feature 1..120: note = Artificially Synthesized Probe
  source 1..120: mol_type = other DNA
cataagatggcaggtgatgtcctgtaaacactcagctgttcagattggacataactgacttagttcttcccttctctctctctcaaaattataggagacttgtagtttagtgtggttttc

SEQ ID NO: 13875 - DNA, 120 bp, synthetic construct
  misc_feature 1..120: note = Artificially Synthesized Probe
  source 1..120: mol_type = other DNA
cctggttaagaaatcaaagaagatgaaggggtgtgaagaaggcggagacatcataaccctggccatccataaatgttcagtttatttacttctctgaagtttgactgagctgaaattcag

SEQ ID NO: 13876 - DNA, 120 bp, synthetic construct
  misc_feature 1..120: note = Artificially Synthesized Probe
  source 1..120: mol_type = other DNA
agttgagaagactgtagaatccttctttgaattggaaagagccacaaagcacagggtgctttaggccttctgcctggtcagtaagagtctgttcctcttatccagggagaatcaacagaa

SEQ ID NO: 13877 - DNA, 120 bp, synthetic construct
  misc_feature 1..120: note = Artificially Synthesized Probe
  source 1..120: mol_type = other DNA
cctttttactccaatttttcttctttgaggccaagttcagagactggagaaatgcaattcagctgactcttgaagtcattagacattcgggagtctgcctctgaatgagcttctagtaga

SEQ ID NO: 13878 - DNA, 120 bp, synthetic construct
  misc_feature 1..120: note = Artificially Synthesized Probe
  source 1..120: mol_type = other DNA
caccctcattatggcaactggacataaacttaacagagggcttcccagcaaaatgtcctcttcttcctacaaacaggctgtttctatatgtgcatgtttcatgctaagcacttctttctt

SEQ ID NO: 13879 - DNA, 120 bp, synthetic construct
  misc_feature 1..120: note = Artificially Synthesized Probe
  source 1..120: mol_type = other DNA
tttcttctatgatatccaaattggactgacctcacttcaaagttgctgtcccattttgtcaccctatcttatctcggggaaattgcagactgatggccagaccaactctgttgaaattct

SEQ ID NO: 13880 - DNA, 120 bp, synthetic construct
  misc_feature 1..120: note = Artificially Synthesized Probe
  source 1..120: mol_type = other DNA
aaattaaacaactatctatgtaagaaaacactttcacaagggctagccaggtgagagatcatagcacccgcttttaacttgctaacaagaaaagatgcattgaagaagggaggaaggaca

SEQ ID NO: 13881 - DNA, 120 bp, synthetic construct
  misc_feature 1..120: note = Artificially Synthesized Probe
  source 1..120: mol_type = other DNA
gaggagaaaaaagaaaagaagaatgagcaggaacacagaatgcttaagagatctagaagagggcctgaaaagagaaaatcaaagattcattggccttaaagagggacttgagaaggagca

SEQ ID NO: 13882 - DNA, 120 bp, synthetic construct
  misc_feature 1..120: note = Artificially Synthesized Probe
  source 1..120: mol_type = other DNA
tcctgactttttaatgatcgtcattctaactggcatgagtggtatctcattgtggttttgatttgcatttctctgatgaccagtgatgatgagcattttttcatatgtctgttggctgca

SEQ ID NO: 13883 - DNA, 120 bp, synthetic construct
  misc_feature 1..120: note = Artificially Synthesized Probe
  source 1..120: mol_type = other DNA
tttatttccttgaacagtggtttgtagtcctccttgaagaggtccttcacatcccttgtaagttggattcccaggtattttattctctttgaagcaattgtgaatgggagttcactcatg

SEQ ID NO: 13884 - DNA, 120 bp, synthetic construct
  misc_feature 1..120: note = Artificially Synthesized Probe
  source 1..120: mol_type = other DNA
ttgcccgaatttcagagcctgttattggtctattcagagattcagcttcttcctggtttagtcttgcgagggtgtatgtgtcaaggaatttatccatttcttctagattttcttgtttat

SEQ ID NO: 13885 - DNA, 120 bp, synthetic construct
  misc_feature 1..120: note = Artificially Synthesized Probe
  source 1..120: mol_type = other DNA
ggacttgcattatgaatctgggtgctcctgtattgggtacatatatatttaggatagttagctcttcttgttgaattgatccctttaccattatatagtggccttctttgtctcttttga

SEQ ID NO: 13886 - DNA, 120 bp, synthetic construct
  misc_feature 1..120: note = Artificially Synthesized Probe
  source 1..120: mol_type = other DNA
ttggtcttttcacatagtcccatatttcttggaggctttgttcatttctttttattcttttttctctaaacttctcttctcacttcatttcattcatttgatcttgaatcaccaataccc

SEQ ID NO: 13887 - DNA, 120 bp, synthetic construct
  misc_feature 1..120: note = Artificially Synthesized Probe
  source 1..120: mol_type = other DNA
ccagtttgaacttccctgcagcttttttttcctactcaagcctcagcaatggcgggcacccctccccaagccttgctgccaccttgcagttcgatctcagactgctgtgctagcaaggag

SEQ ID NO: 13888 - DNA, 120 bp, synthetic construct
  misc_feature 1..120: note = Artificially Synthesized Probe
  source 1..120: mol_type = other DNA
catgtttttgcagtggctggtactggttgttcctttccatgtttagtgcttccttcaggagctcttgtaaggcaggtctggtggtgacaaagtctctcagcatttgcttgtctgtaacag

SEQ ID NO: 13889 - DNA, 120 bp, synthetic construct
  misc_feature 1..120: note = Artificially Synthesized Probe
  source 1..120: mol_type = other DNA
gctctggtttctccccatctttgtggttttatgtactactttggtctttgatgttggtgacctacagatggggttttagtgtggatgtctttttgttgatgttgatgctattcctttctg

SEQ ID NO: 13890 - DNA, 120 bp, synthetic construct
  misc_feature 1..120: note = Artificially Synthesized Probe
  source 1..120: mol_type = other DNA
tctatctcacttgaagctgtagaccggagctgttcctattcagccatcttggaagcaaccctctttttttttttttttgtattttggtagagacagggtttcaccatattgcccagactg

SEQ ID NO: 13891 - DNA, 120 bp, synthetic construct
  misc_feature 1..120: note = Artificially Synthesized Probe
  source 1..120: mol_type = other DNA
ccatttctggttagaaaatcttgccaaaaccaaccaaacaaatgcatagaagtatatgaagaaggaaatgaaagattccctgcctcccaatcccacttgcttggtgtcagccattattta

SEQ ID NO: 13892 - DNA, 120 bp, synthetic construct
  misc_feature 1..120: note = Artificially Synthesized Probe
  source 1..120: mol_type = other DNA
atgaaaagctttacttctgggattccctaattccttcatcccttaggacagtgcagtttttcatctcctgatcttgggtccagtactaaagcgcgcgtttgattttgttttcatgggatc

SEQ ID NO: 13893 - DNA, 120 bp, synthetic construct
  misc_feature 1..120: note = Artificially Synthesized Probe
  source 1..120: mol_type = other DNA
aatccaccctctactgcatgctcccctcacagaacagactaatttttgtgtgtgtgtccttgttttgcctacctgtaccccagatagacttttctgtcttagaactacctgtccctcttt

SEQ ID NO: 13894 - DNA, 120 bp, synthetic construct
  misc_feature 1..120: note = Artificially Synthesized Probe
  source 1..120: mol_type = other DNA
ttaatcgctttcatttaaggatttgagtttgaggtcttgcatacaatgtgatcccactgtatgactacacaaatgttggcaaaagtgagttcagaggaagtggtaggcaagtacttccca

SEQ ID NO: 13895 - DNA, 120 bp, synthetic construct
  misc_feature 1..120: note = Artificially Synthesized Probe
  source 1..120: mol_type = other DNA
gctcactacacgccttaccggtccggggacgcgacgcgaacccctcagtccccacggcagaccccgagccgggaaagacggcgcccggagccagccgggagctgggcagcagcggccgag

SEQ ID NO: 13896 - DNA, 120 bp, synthetic construct
  misc_feature 1..120: note = Artificially Synthesized Probe
  source 1..120: mol_type = other DNA
acagcatttttagctttttatctcatggaaggtagtactcataaatcaaactaccaggcctagtgattccagcctctgagctaacgggtctgtaaaaagttacttcatttctctaggcct

SEQ ID NO: 13897 - DNA, 120 bp, synthetic construct
  misc_feature 1..120: note = Artificially Synthesized Probe
  source 1..120: mol_type = other DNA
caactaaaaaatgtaaaaaagcagccttgcacgttatccaaattcagttcagttcagtgttacttattgagcaatgatggtggaggccagcacaaactggatacaaaactaccctcaggt

SEQ ID NO: 13898 - DNA, 120 bp, synthetic construct
  misc_feature 1..120: note = Artificially Synthesized Probe
  source 1..120: mol_type = other DNA
cagagcatcaaggtgtacacataggttcttttttcctggacagtaagtgtccactgatgattgtcctcccttcttaggtacatctctttttctatctctgatatgctaatattttcagtc

SEQ ID NO: 13899 - DNA, 120 bp, synthetic construct
  misc_feature 1..120: note = Artificially Synthesized Probe
  source 1..120: mol_type = other DNA
cctgcagacaactgtcagaggacaatgacttcagagaagattcagtgaatttctaacatcaaacttcaactactgtaatatgcttgtctagccatctctttgttgttgctgttctacagc

SEQ ID NO: 13900 - DNA, 120 bp, synthetic construct
  misc_feature 1..120: note = Artificially Synthesized Probe
  source 1..120: mol_type = other DNA
ttgcatgtagatgtacagttgttctaacactgtttgttaagagcactatcctttttccatttaattgccttagcacctttgttcaaatcaattgaccacatatataatcgtctgtatctg

SEQ ID NO: 13901 - DNA, 120 bp, synthetic construct
  misc_feature 1..120: note = Artificially Synthesized Probe
  source 1..120: mol_type = other DNA
tatgagcactttgagggctaagcaatgggataatatctttctaagggaacagttaaatcaacttcatttggtcttccatggacatgagtttcaagtggctttctggcctttcttctgttg

SEQ ID NO: 13902 - DNA, 120 bp, synthetic construct
  misc_feature 1..120: note = Artificially Synthesized Probe
  source 1..120: mol_type = other DNA
aaaaaaaaaaaaaaaagaactaaataaactcttcttcccccacaaatttaccagtttagccattttaagtgtacaggtcagtagttgcattaagtacattcacattattatgcaacaagt

SEQ ID NO: 13903 - DNA, 120 bp, synthetic construct
  misc_feature 1..120: note = Artificially Synthesized Probe
  source 1..120: mol_type = other DNA
attattaagaatttcaagtcatcaacaacagagcattaaaccaagccagtccttctgagtgcaaagccctgtgtgactacacgggttgtatgcacaagaaacctactctgctggttgtag

SEQ ID NO: 13904 - DNA, 120 bp, synthetic construct
  misc_feature 1..120: note = Artificially Synthesized Probe
  source 1..120: mol_type = other DNA
ttgattaaaatgtgcctaggtgtggttactttcatgtttctcgtgctttggatttgttacgcttaccggatctgtgtgtttacagttttcattatacttggacaattttcagccattatt

SEQ ID NO: 13905 - DNA, 120 bp, synthetic construct
  misc_feature 1..120: note = Artificially Synthesized Probe
  source 1..120: mol_type = other DNA
tgaaacaaactacttccagccttgtatgagccaagaggattgtttaatctgattctcttgtgtggttcttaccccaaccttggtagtttcctgatataccgatcagtattcagctgaata

SEQ ID NO: 13906 - DNA, 120 bp, synthetic construct
  misc_feature 1..120: note = Artificially Synthesized Probe
  source 1..120: mol_type = other DNA
ggcattggtattgggaatggcgaggaagagataggttggagaatttgagttagaactgataggattttttgattaattgagtgtgggaaatgagggagatggtggaaacaaatgttattc

SEQ ID NO: 13907 - DNA, 120 bp, synthetic construct
  misc_feature 1..120: note = Artificially Synthesized Probe
  source 1..120: mol_type = other DNA
agatgacaaaatgtcaagtcagagattattgcagacttttgttttgttttgggtttttgactgtgggtgtgtccattcctcccttctttggacaataaccctactttttttttggggggg

SEQ ID NO: 13908 - DNA, 120 bp, synthetic construct
  misc_feature 1..120: note = Artificially Synthesized Probe
  source 1..120: mol_type = other DNA
atttcgttagagaggaattaaagcaggaggtgaaagaactgcaaaacccctaaggtagaaataagcttagtgtgtttgaggaagaaaatggccagtgcagctggagcataataaataaga

SEQ ID NO: 13909 - DNA, 120 bp, synthetic construct
  misc_feature 1..120: note = Artificially Synthesized Probe
  source 1..120: mol_type = other DNA
actgccctaggacactttaacctcttcatgaagttgcctgttctcttagatttatttgctagagcagcctcataactataggtgattcatactaggtctcacaggagttccaaacagaat

SEQ ID NO: 13910 - DNA, 120 bp, synthetic construct
  misc_feature 1..120: note = Artificially Synthesized Probe
  source 1..120: mol_type = other DNA
gtacgcatgctcattcacactcacatctaaccctacaacaccagctccgagaaagtggatgcaatgaaggaaatgttaacatgagcagtgaccctagtgtacaaacaatatcaaatttta

SEQ ID NO: 13911 - DNA, 120 bp, synthetic construct
  misc_feature 1..120: note = Artificially Synthesized Probe
  source 1..120: mol_type = other DNA
taaaaaataatctaatctcggaagcaacattccatcactgctgccctactgtattcattacaaatgagtactagatccatcccagactcaaggcgagggaattacacaagggtttgatga

SEQ ID NO: 13912 - DNA, 120 bp, synthetic construct
  misc_feature 1..120: note = Artificially Synthesized Probe
  source 1..120: mol_type = other DNA
ttaaaaaagatagactcttgaaaaattgcactctagttacattagtgccaactcatgaggtcacctgttcttttttccctctcccattatctcccctttctaccccattctaccctctcc

SEQ ID NO: 13913 - DNA, 120 bp, synthetic construct
  misc_feature 1..120: note = Artificially Synthesized Probe
  source 1..120: mol_type = other DNA
accacaagctctgagcctgggccagcttgggtatttctgtacctctctgtctgttattattatatcacacgcatagcctaaaactgggatacttttatctgaataaaagattattctggt

SEQ ID NO: 13914 - DNA, 120 bp, synthetic construct
  misc_feature 1..120: note = Artificially Synthesized Probe
  source 1..120: mol_type = other DNA
atgcccggccaagggtgttatattcttttacataatacagttatgcaacgattttaaatattcttaggagatacacattaaatatttaggggtgaagaatctacatcttactctcaaatg

SEQ ID NO: 13915 - DNA, 120 bp, synthetic construct
  misc_feature 1..120: note = Artificially Synthesized Probe
  source 1..120: mol_type = other DNA
actggaactacttgccccatcctggaaaatgactcggattttagtgatggtgtgattgtcatgaatgccttgaaagctatttatgaatttattccagtattgtttctggtcccagaaatg

SEQ ID NO: 13916 - DNA, 120 bp, synthetic construct
  misc_feature 1..120: note = Artificially Synthesized Probe
  source 1..120: mol_type = other DNA
tgttttacaaatgaggaagctaaagcacagagtttaagtcatgtccaaaattgcatggttggaaattgacagaggaggaggattggaacccatgtccctgactgtagagccagtaatctt

SEQ ID NO: 13917 - DNA, 120 bp, synthetic construct
  misc_feature 1..120: note = Artificially Synthesized Probe
  source 1..120: mol_type = other DNA
cacttaggaaattaagtcccttacaaattcccctgtaccccacaaatacttctgctttttccaagaattattttctcttctaaactgctcctggtcctgattttggttgttccgagtcac

SEQ ID NO: 13918 - DNA, 120 bp, synthetic construct
  misc_feature 1..120: note = Artificially Synthesized Probe
  source 1..120: mol_type = other DNA
gtccttgcccatgcctatgtcctgaatggtattgcctaggttttcttctagggtttttatggtttcaggtctaacatttaagtctttaatacatctcgaattagttcttgtataaggtgt

SEQ ID NO: 13919 - DNA, 120 bp, synthetic construct
  misc_feature 1..120: note = Artificially Synthesized Probe
  source 1..120: mol_type = other DNA
gtgagagagggcatccctgtcttgtgccagttttcaaagagaatgcttccagtttttgcccattcagtatgatattgcctgtgggtttgtcatagatagctcttattattttgagatatg

SEQ ID NO: 13920 - DNA, 120 bp, synthetic construct
  misc_feature 1..120: note = Artificially Synthesized Probe
  source 1..120: mol_type = other DNA
ttgaatgtgtttgctcttgcttctctagttcttttaattgtgatgttagggtgtcaattttagatctttcctgctttctcttgtgggcatttagtgctataaattttcctctacacactg

SEQ ID NO: 13921 - DNA, 120 bp, synthetic construct
  misc_feature 1..120: note = Artificially Synthesized Probe
  source 1..120: mol_type = other DNA
ttatgatgttagctggttattttgcttgttagttgctgcagtttcttcctagccttgatggtctttacaatttggcatgtttttgcagtggctggtaccggttgttcctttccatgttta

SEQ ID NO: 13922 - DNA, 120 bp, synthetic construct
  misc_feature 1..120: note = Artificially Synthesized Probe
  source 1..120: mol_type = other DNA
tggggaggagctgcgttcctttggaggaggaaaggcactctgatttttagagtttccagtttttctgctctatttttccccatctttgtggttttatctacctttggtctttgatgatgg

SEQ ID NO: 13923 - DNA, 120 bp, synthetic construct
  misc_feature 1..120: note = Artificially Synthesized Probe
  source 1..120: mol_type = other DNA
cagatcttttcattcttgtatatacaacagtttacttggacagcctgggtagtcaggaacatccatccaagccacacttctgcctattaggttcctctgttgtgctaaacaacaatttga

SEQ ID NO: 13924 - DNA, 120 bp, synthetic construct
  misc_feature 1..120: note = Artificially Synthesized Probe
  source 1..120: mol_type = other DNA
gaagaccagcttagatccaagagaggggaattagattctacctctgaataagagaagtagcaaaaaatttgtagccatcttgaatctaccacattccttttcctctggccacagacatta

SEQ ID NO: 13925 - DNA, 120 bp, synthetic construct
  misc_feature 1..120: note = Artificially Synthesized Probe
  source 1..120: mol_type = other DNA
tttctttttttttttaatcaatatcttataataatgtggctaaaagaaacctctttgtagttttgaaattctgctgaaaatctccttagccagatcctcccattcattgggcaccttttc

SEQ ID NO: 13926 - DNA, 120 bp, synthetic construct
  misc_feature 1..120: note = Artificially Synthesized Probe
  source 1..120: mol_type = other DNA
agattccacctctcaatgggagaagtagcaagtaatttgtggtcatctttaatctactacagacactgtatccttgatctcagaatgatgcctctttgtctggaaagggcatttgttttt

SEQ ID NO: 13927 - DNA, 120 bp, synthetic construct
  misc_feature 1..120: note = Artificially Synthesized Probe
  source 1..120: mol_type = other DNA
actgtaaagactgtgacaccttccgattttttgtcccttatcatcaattcaggtattccctgaagcacaatcagttgaccaaactaagagcagtgccctcaggaaagaataaaatgaata

SEQ ID NO: 13928 - DNA, 120 bp, synthetic construct
  misc_feature 1..120: note = Artificially Synthesized Probe
  source 1..120: mol_type = other DNA
agattggggagttctttgttgagcagcattgtttcagcaaaaagatgactaatacagtgactcaacacaaggatttcatgagactggctactacacatatggtttccaagaaaggatatg

SEQ ID NO: 13929 - DNA, 120 bp, synthetic construct
  misc_feature 1..120: note = Artificially Synthesized Probe
  source 1..120: mol_type = other DNA
aagttattttaaaaatacatgaacgtattttctagcgtcacttctgagaccccacagctcacctagttagtgctatcatttcttgaatccagtgagctgcctgtagacagagttcctctc

SEQ ID NO: 13930 - DNA, 120 bp, synthetic construct
  misc_feature 1..120: note = Artificially Synthesized Probe
  source 1..120: mol_type = other DNA
cagcctgtatcagaaccttagcagagactttgggccttttggggtctcaaatttatcatctctgaaacaagtacaacgaaattaacattgccacatgtgggcactataaagcctttttca

SEQ ID NO: 13931 - DNA, 120 bp, synthetic construct
  misc_feature 1..120: note = Artificially Synthesized Probe
  source 1..120: mol_type = other DNA
actccatctctggctctggggttacctgtgggtggggcgatgcagacacacaagaaaacctcctctacaaattcttcctgtagttggttgattgtattctaagaccttcgttgggatggg

SEQ ID NO: 13932 - DNA, 120 bp, synthetic construct
  misc_feature 1..120: note = Artificially Synthesized Probe
  source 1..120: mol_type = other DNA
aaactgcgttttcttccagtccttcccccagacacactttaaaatgaagccccattcaaggaaagggtaaggataagagaccatgtattgagacaaagacttcgtttctgttttttagtg

SEQ ID NO: 13933 - DNA, 120 bp, synthetic construct
  misc_feature 1..120: note = Artificially Synthesized Probe
  source 1..120: mol_type = other DNA
aagcgaaactccgcctcaaaaaaaaaaaaaaaaaaaaaaaaaaaaaagaccaggcgaggtggctcacgcctgtaattgcagtactttgggaggctgaggggggcggattacgaggtcagg

SEQ ID NO: 13934 - DNA, 120 bp, synthetic construct
  misc_feature 1..120: note = Artificially Synthesized Probe
  source 1..120: mol_type = other DNA
attatacaccatgtactctttcgtacgtggctcctttcactcaatcttttgcttttggagttctatactgttatatggtactgtagtccatttattcttgcttttaaataggcttctata

SEQ ID NO: 13935 - DNA, 120 bp, synthetic construct
  misc_feature 1..120: note = Artificially Synthesized Probe
  source 1..120: mol_type = other DNA
ttggaaaaatcctataatcacagatcatggctgacatctcagatccttcctaactcacagatcagattagttcataaacacttattaaaaatttgagggccggatgaaatggctcacgcc

SEQ ID NO: 13936 - DNA, 120 bp, synthetic construct
  misc_feature 1..120: note = Artificially Synthesized Probe
  source 1..120: mol_type = other DNA
ttacaaaaagctgatttggtcaccagctttcagatttatttccgtgaacagggcgagagttgtcaaaagaataagctcatggagctgatgaagaacttgatgatgaggggaggttttctc

SEQ ID NO: 13937 - DNA, 120 bp, synthetic construct
  misc_feature 1..120: note = Artificially Synthesized Probe
  source 1..120: mol_type = other DNA
aggatctggggattaggaatgtggacattcttataaggccattattttagcctaccacatcgttcaatgctgaaaaagtcattactaattatcttccccatttcagtggaaatgttctgg

SEQ ID NO: 13938 - DNA, 120 bp, synthetic construct
  misc_feature 1..120: note = Artificially Synthesized Probe
  source 1..120: mol_type = other DNA
cactagatcagtctggacctgactcccccaacccccattttttcagctacatgctaagactatgtttaaaatacctaaagactgggaaggggttgtttttgtctcagaaaggataagtaa

SEQ ID NO: 13939 - DNA, 120 bp, synthetic construct
  misc_feature 1..120: note = Artificially Synthesized Probe
  source 1..120: mol_type = other DNA
gccagtgagggaagaggtaacttgcaactagtgtcttcttatcatggtcatggtggaaagggtggaaagaagcaataacttctgacatatagaaagcattcactggccaggcacagtggc

SEQ ID NO: 13940 - DNA, 120 bp, synthetic construct
  misc_feature 1..120: note = Artificially Synthesized Probe
  source 1..120: mol_type = other DNA
gagagtcattgcgacttaatttaccctgagctaaaattattatgagtgggccttaatataccagttgttcccacctacacatctagccttgcctttgctgggataaatttgtataccctt

SEQ ID NO: 13941 - DNA, 120 bp, synthetic construct
  misc_feature 1..120: note = Artificially Synthesized Probe
  source 1..120: mol_type = other DNA
cctagaggattctatgagtgttgttttagtatgttataaaaccgcactgagaagagagactctagattcattcttgctaatcctcaacaggtctataatgctgctgagaaattctcctcc

SEQ ID NO: 13942 - DNA, 120 bp, synthetic construct
  misc_feature 1..120: note = Artificially Synthesized Probe
  source 1..120: mol_type = other DNA
ccaaaaacaaaacaaaacaaagatcccgaaacttaaagaaattgttgtggatgcacgatgattttgtagctcactgtagctattggggacttagcactccagaaaacagcctctcagagt

SEQ ID NO: 13943 - DNA, 120 bp, synthetic construct
  misc_feature 1..120: note = Artificially Synthesized Probe
  source 1..120: mol_type = other DNA
ttccctgtaaatgtgtggttagaaatagggcatattgggaagagtaaaagtttggagtcaaatagacagttttcaagttcaggctctgacaccaactagctgtgcgatcttgggcaaatt

SEQ ID NO: 13944 - DNA, 120 bp, synthetic construct
  misc_feature 1..120: note = Artificially Synthesized Probe
  source 1..120: mol_type = other DNA
gtatattttccgccactctaaacctccggactttttatttctctgcgttcttttctagtttgtttctatgggtattttcacaatagtgcaaatcttagcccctttctttttttttttttt

SEQ ID NO: 13945 - DNA, 120 bp, synthetic construct
  misc_feature 1..120: note = Artificially Synthesized Probe
  source 1..120: mol_type = other DNA
aaatacctgtgattggcctgaagagagggcctgaaaatcaccattcctttgggagtttagacactcatatgggaataaataaccttaggttaattattttagtaggtgagactggagaga

SEQ ID NO: 13946 - DNA, 120 bp, synthetic construct
  misc_feature 1..120: note = Artificially Synthesized Probe
  source 1..120: mol_type = other DNA
gcaactcaagaaaatatgagtgatataccatgcagaaatcaagcaggtgaacagcttgtgagtaggttgtacttggaaaatgcttggtacttccgaaagcaaaataatgtcctggtgaga

SEQ ID NO: 13947 - DNA, 120 bp, synthetic construct
  misc_feature 1..120: note = Artificially Synthesized Probe
  source 1..120: mol_type = other DNA
aatgcccagagaggtgaaagtgacatgcaagccaatatagtagcttgttgccacaaattaattaattgtgtgtgaagccaatgggtttctcaagactgtgccttaataaagcagaaatga

SEQ ID NO: 13948 - DNA, 120 bp, synthetic construct
  misc_feature 1..120: note = Artificially Synthesized Probe
  source 1..120: mol_type = other DNA
gaagtcctctacatctctgtttacagaattcttgggagcccccaagagtttaaagaataagctacctattgaaagcatctttctgtagggttattgaaatcatctgtttctgacatcccc

SEQ ID NO: 13949 - DNA, 120 bp, synthetic construct
  misc_feature 1..120: note = Artificially Synthesized Probe
  source 1..120: mol_type = other DNA
ctacctccagctctccctatccacattccccactttccttttttttatagcacttgttcccaactgctactatacaatttatttattgtctccccttactgtaaaaattccatgagtgca

SEQ ID NO: 13950 - DNA, 120 bp, synthetic construct
  misc_feature 1..120: note = Artificially Synthesized Probe
  source 1..120: mol_type = other DNA
agattattttgcagaggatgatggggagatggtacccagaacgagtcacacagcaggtaaggatgctgtgggccttgccttgttaaattctttgtttcttttgtttattcatttggtttt

SEQ ID NO: 13951 - DNA, 120 bp, synthetic construct
  misc_feature 1..120: note = Artificially Synthesized Probe
  source 1..120: mol_type = other DNA
ttagccagagatctacctgaattgcaaaaccaaagggaagataacattcttttggggtctattttccacaaaacttgttctcgacctgagggttttacttccttgctaagttctttgcct

SEQ ID NO: 13952 - DNA, 120 bp, synthetic construct
  misc_feature 1..120: note = Artificially Synthesized Probe
  source 1..120: mol_type = other DNA
atgcactaataaagcctgccttaaatttctgttctagtttaaaccccgaaacagtaccaggcaaggttagtggctattgaaaatatcattaaggacagggttatctaaagacacactgga

SEQ ID NO: 13953 - DNA, 120 bp, synthetic construct
  misc_feature 1..120: note = Artificially Synthesized Probe
  source 1..120: mol_type = other DNA
gaatttccatcttttctgaacataaaaaaaagaagaattctaagaagttgactgaagcatctgggtgctttttcttgggctccttctggcaagttggcagaacgaaggaaagaaggcagg

SEQ ID NO: 13954 - DNA, 120 bp, synthetic construct
  misc_feature 1..120: note = Artificially Synthesized Probe
  source 1..120: mol_type = other DNA
tgttttccccactctcagacctattgcaatccctttaattgctaaaataacacagtagtagcatactgctaagaaagacagatggagaaaagatgggattggttctgccactttttagca

SEQ ID NO: 13955 - DNA, 120 bp, synthetic construct
  misc_feature 1..120: note = Artificially Synthesized Probe
  source 1..120: mol_type = other DNA
gcaaaggcctatggacccaaactagtttgattcactggggatggctattaatatgatctaccacagactactttaagtaaactgtttctatgtggcctagattgagtttgtattttgcag

SEQ ID NO: 13956 - DNA, 120 bp, synthetic construct
  misc_feature 1..120: note = Artificially Synthesized Probe
  source 1..120: mol_type = other DNA
tattaaattctctgttgctagcttggacctctctcgatatctaggaattgtctgcagtgtgcggtggcacagtaacaaccatttgtttctcaacaagaatctgataatgttgcttgaacc

SEQ ID NO: 13957 - DNA, 120 bp, synthetic construct
  misc_feature 1..120: note = Artificially Synthesized Probe
  source 1..120: mol_type = other DNA
gttttttttttttcaccttttggatctgctgtgatgcagaaagggcaagcagagctgcagagctcctcaaaactgtgtggggtgctctccaaaggccagccagcctgcatgttccttttc

SEQ ID NO: 13958 - DNA, 120 bp, synthetic construct
  misc_feature 1..120: note = Artificially Synthesized Probe
  source 1..120: mol_type = other DNA
ctccaaagctgagttagattttactagtcagggaagtagagtataatattccagacagaggggagatttgggggaaggaagagagatatgttcaaataagagactggactatagagaggt

SEQ ID NO: 13959 - DNA, 120 bp, synthetic construct
  misc_feature 1..120: note = Artificially Synthesized Probe
  source 1..120: mol_type = other DNA
gcagcacatacataatactggctagcatttgatgatcactttctatgtggcagatattgctctaagtatgtgacagcatgatctcatttacaacaaccttgtgaaaaggcatgttcacca

SEQ ID NO: 13960 - DNA, 120 bp, synthetic construct
  misc_feature 1..120: note = Artificially Synthesized Probe
  source 1..120: mol_type = other DNA
ctggtgaaagtttggtgctaatgaaggtgttggcttatttggaaatggaatcactagttcctcctatttagattgatgcagattgaaatcctaccagattcctgcctctctaggtaaact

SEQ ID NO: 13961 - DNA, 120 bp, synthetic construct
  misc_feature 1..120: note = Artificially Synthesized Probe
  source 1..120: mol_type = other DNA
agtgctggaatttcaggcgcgaactacgcgcctggcctcttttccactttaaatggaatgataaaactaaaaatgaaaaggacgggagagaaagagtctttttgaaataatatttgacag

SEQ ID NO: 13962 - DNA, 120 bp, synthetic construct
  misc_feature 1..120: note = Artificially Synthesized Probe
  source 1..120: mol_type = other DNA
actttcagcaatcacaagtgcagtttgttttcccttttcaatctcatgtttaaaaagggaaacagaaggcttccacacacaggcattccacagactttccatgcaaagttttctttccta

SEQ ID NO: 13963 - DNA, 120 bp, synthetic construct
  misc_feature 1..120: note = Artificially Synthesized Probe
  source 1..120: mol_type = other DNA
gcttacagtgtgccaagttctgagaatgcacttgaccttattatcttattcagttctcctaatagtcttttgaggttggtacaaccattgtctttgtttgtagagagacactgaagctag

SEQ ID NO: 13964 - DNA, 120 bp, synthetic construct
  misc_feature 1..120: note = Artificially Synthesized Probe
  source 1..120: mol_type = other DNA
gtaatagaagtaaagagtgctatggaatatataactgggcacttactcaatctgaagagattgggggattcagggaaagtttcctagaggaaactgcatctaaccagggtcctgaagaag

SEQ ID NO: 13965 - DNA, 120 bp, synthetic construct
  misc_feature 1..120: note = Artificially Synthesized Probe
  source 1..120: mol_type = other DNA
cgtgagttatttgttcaaagtctgccttttctgttagaacatgagctcactatagcagggacagtggttgtcttttcacttctagatacagtgattagcataatgcctggtacatagtag

SEQ ID NO: 13966 - DNA, 120 bp, synthetic construct
  misc_feature 1..120: note = Artificially Synthesized Probe
  source 1..120: mol_type = other DNA
agtgtttgagccacaacacctggcaactcttagctcttgtggccagagcaggtcgtagtcatgccttcaaaattgccttcactcctagaaaaaaatggagaaaggattatttaaaatcta

SEQ ID NO: 13967 - DNA, 120 bp, synthetic construct
  misc_feature 1..120: note = Artificially Synthesized Probe
  source 1..120: mol_type = other DNA
tttagaagggtgacttgtttgttgattgtacaatccaaaagaaaaaagcaggactttgtggaattcatagtcagttttctgaagcaggtatcagtagttggcttctgagacaagggcaga

SEQ ID NO: 13968 - DNA, 120 bp, synthetic construct
  misc_feature 1..120: note = Artificially Synthesized Probe
  source 1..120: mol_type = other DNA
tttttttttttttttacatagatccaggttgtcagatcctttagggtcaccaccaggaagattatttacagtgaaggacactttttgaaaaggtatagggggcctgaggtagaagaggga

SEQ ID NO: 13969 - DNA, 120 bp, synthetic construct
  misc_feature 1..120: note = Artificially Synthesized Probe
  source 1..120: mol_type = other DNA
tgggtgctaaaaagcaggaaatactccccagacatttgtgtacccttcccatagggctgttttgaaaatatgacaattagcaaagttataggttaaatcgtctattgggcatcatccttg

SEQ ID NO: 13970 - DNA, 120 bp, synthetic construct
  misc_feature 1..120: note = Artificially Synthesized Probe
  source 1..120: mol_type = other DNA
cccaatgagaaaaaaggagagccgggatttgaacgctggtcttcatggttcaaagctattgctcttttcacagttccacgctacccaccctagataaatatgtataatagtgatcatatt

SEQ ID NO: 13971 - DNA, 120 bp, synthetic construct
  misc_feature 1..120: note = Artificially Synthesized Probe
  source 1..120: mol_type = other DNA
tctccccactgcctatccaagctcaactcatcctttgagacaagctaaagtgccaattctctgtggtaccttctctggccacctctccttcctaatttttatagtttttacttttttttt

SEQ ID NO: 13972 - DNA, 120 bp, synthetic construct
  misc_feature 1..120: note = Artificially Synthesized Probe
  source 1..120: mol_type = other DNA
aaataagaaaatgtattttagaaggtgatagtgctacggaataaaaaacaatgaagggggattcggagagctgggatgaggcatggggtgcctaaagagtattcacttcaccaagaaggt

SEQ ID NO: 13973 - DNA, 120 bp, synthetic construct
  misc_feature 1..120: note = Artificially Synthesized Probe
  source 1..120: mol_type = other DNA
attttcctgttcattgattccacaaatatttagggagtgcttcctgagtactatgcaacaagaatacaaggacacaaaatatgccttgtcagctctcaaaacactctagccaggttgagg

SEQ ID NO: 13974 - DNA, 120 bp, synthetic construct
  misc_feature 1..120: note = Artificially Synthesized Probe
  source 1..120: mol_type = other DNA
attaaacacttatctaaactctggcagcctggctccccttgagcaaaatggaggtgatattaactgggttatcaccttgaagagcttagaccaggaaagggccttaaaaatcactaattt

SEQ ID NO: 13975 - DNA, 120 bp, synthetic construct
  misc_feature 1..120: note = Artificially Synthesized Probe
  source 1..120: mol_type = other DNA
actagatggcaatgtaacatacaaaagttgaaaaacacaggtttggaggatcataatgtaaaacacatatcttaacatatcatggccagctgtatggccacgtagctctttgagggttgg

SEQ ID NO: 13976 - DNA, 120 bp, synthetic construct
  misc_feature 1..120: note = Artificially Synthesized Probe
  source 1..120: mol_type = other DNA
gttttatgtacatggtcttttctatagcaaccttatttcttgcttctggccacactccttttggtcttatagtccaaatcagccacaagtcatttaaataccccctccccaccctctatt

SEQ ID NO: 13977 - DNA, 120 bp, synthetic construct
  misc_feature 1..120: note = Artificially Synthesized Probe
  source 1..120: mol_type = other DNA
ctgctttccttctctgtaaagaaagaggactggaataaatcagagcctctctcaaacactgacgtggaactgtgcggaacaatcaccttgggagctggtttaaaatgtagattccatgcc

SEQ ID NO: 13978 - DNA, 120 bp, synthetic construct
  misc_feature 1..120: note = Artificially Synthesized Probe
  source 1..120: mol_type = other DNA
aagatgactatgcagataagcttttaagacagaatcttaggcatttttagtctttggaatagcttgccttaaaatgaagaagagagtaacctgtgggatagcagttggcctgggtggagt

SEQ ID NO: 13979 - DNA, 120 bp, synthetic construct
  misc_feature 1..120: note = Artificially Synthesized Probe
  source 1..120: mol_type = other DNA
caggattttttttttttttaaagctgaatcagatggctgtctggatcatttgatctcactctctgctccgccctagcgaaagatctttaggaaacaactttgggtggggtgtgagaaggc

SEQ ID NO: 13980 - DNA, 120 bp, synthetic construct
  misc_feature 1..120: note = Artificially Synthesized Probe
  source 1..120: mol_type = other DNA
acaaggtttgactctttataatctccccctcataattcccacagatgtgtctgatgttcattcttgttattcatattgtgatcccacgagattaggaagattaattagcagcaatgtgcc

SEQ ID NO: 13981 - DNA, 120 bp, synthetic construct
  misc_feature 1..120: note = Artificially Synthesized Probe
  source 1..120: mol_type = other DNA
gagaactggagagtgggtgctatctttctctttccaagtggcaagtcttctcctaggtagctgattgaggagactaaaatagatataatccttacttgtaaatggaagctataaggattt

SEQ ID NO: 13982 - DNA, 120 bp, synthetic construct
  misc_feature 1..120: note = Artificially Synthesized Probe
  source 1..120: mol_type = other DNA
tgagagagttgtgttgcgttgttttatgacccttaagctgcctgacttctctgagattgaaacttctttggttttctcatctttgagattggatgatacttttcctgcgcaatctttgag

SEQ ID NO: 13983 - DNA, 120 bp, synthetic construct
  misc_feature 1..120: note = Artificially Synthesized Probe
  source 1..120: mol_type = other DNA
ccccatgggtaaacatgttttagtgtattagacgttagataaatagaaaggattgtgatttctatcctgcatagctggagacacatactagaaagcatgcacctgctcaggttattgtct

SEQ ID NO: 13984 - DNA, 120 bp, synthetic construct
  misc_feature 1..120: note = Artificially Synthesized Probe
  source 1..120: mol_type = other DNA
tgggctatatagacactggatattatttagccttagaaaggtatgaaactctgacatgtgctgtaacatgagtgaaccttaaagatgtcatgctaagtaaagtcagtccctaaaggacaa

SEQ ID NO: 13985 - DNA, 120 bp, synthetic construct
  misc_feature 1..120: note = Artificially Synthesized Probe
  source 1..120: mol_type = other DNA
gccagctactgtgctagattctggtggagaagacatcaacaaataaataaaaatggtataataagggctgccatagaggtatggacagattttgctatagtgcaataaaatccaccagga

SEQ ID NO: 13986 - DNA, 120 bp, synthetic construct
  misc_feature 1..120: note = Artificially Synthesized Probe
  source 1..120: mol_type = other DNA
cttgtggtggtggtaagatgaggctgcaggggagaaatcatggaaagctttggacttatccattcattcattaataaacattaattaggtacctgctatgttccaagtactagaagttgg

SEQ ID NO: 13987 - DNA, 120 bp, synthetic construct
  misc_feature 1..120: note = Artificially Synthesized Probe
  source 1..120: mol_type = other DNA
aagcatggactgccagcaacagcttttccctgctgggtgaatttacttgtttgaaagaacaaagtgggtatggatggggtgtttttaaatgtgttttagataatttaaattttgccctag

SEQ ID NO: 13988 - DNA, 120 bp, synthetic construct
  misc_feature 1..120: note = Artificially Synthesized Probe
  source 1..120: mol_type = other DNA
aaagaaaaggtttagttcctcagcctcctcaggagtttcatccatatgttttcaaaagtcaccgtgaacatatttttctcttttgccttgctccctgctctggcttttgccatctcatct

SEQ ID NO: 13989 - DNA, 120 bp, synthetic construct
  misc_feature 1..120: note = Artificially Synthesized Probe
  source 1..120: mol_type = other DNA
caaaaggttgcattcttttgagtttctaattagcctttccaaaggaggcaatcagatatgcatttatctcagtgagcagagagataactttgaatagaatgggaggcaggtttgccctaa

SEQ ID NO: 13990 - DNA, 120 bp, synthetic construct
  misc_feature 1..120: note = Artificially Synthesized Probe
  source 1..120: mol_type = other DNA
tatcttcttttgagaactgtctattcatatccttagcccactttatgatgggattgtttgtttttttcttgctgatttgtttgagtttgttgtagattctggatgttagtcctttgtcag

SEQ ID NO: 13991 - DNA, 120 bp, synthetic construct
  misc_feature 1..120: note = Artificially Synthesized Probe
  source 1..120: mol_type = other DNA
gttcttgatttgattctcagcttggtcgctgttggtgtatagaagagctactgattcgcatgcattaattttgtatccagaaattttgctgaattgttttatcagttctaggagctttct

SEQ ID NO: 13992 - DNA, 120 bp, synthetic construct
  misc_feature 1..120: note = Artificially Synthesized Probe
  source 1..120: mol_type = other DNA
ttttttttttgagatggagtcttgctctgtcgcctaggctggagtgcagtggtgcgatctcggctcactacaagctccgcctcccgggttcatgccattctcctgcctcagcctcccgag

SEQ ID NO: 13993 - DNA, 120 bp, synthetic construct
  misc_feature 1..120: note = Artificially Synthesized Probe
  source 1..120: mol_type = other DNA
atttttgttcaatttgaagatttttttaatttccatctcgatttcatgatcattcaggagcaggttaatttccatgtatttgcatggttttgaaagctccttttggagttgatttccagt

SEQ ID NO: 13994 - DNA, 120 bp, synthetic construct
  misc_feature 1..120: note = Artificially Synthesized Probe
  source 1..120: mol_type = other DNA
ttatgtgttaggtgagtctcttaaaggcagcagatagttggtcggttaattcttatccattctgcaattctgtatcttttaagtggcgcatttcggccatttacattcaatgttagtatt

SEQ ID NO: 13995 - DNA, 120 bp, synthetic construct
  misc_feature 1..120: note = Artificially Synthesized Probe
  source 1..120: mol_type = other DNA
cacccacctagcacagttgtattgatgacaacagggttgtcaactctctacttcaaaaatcaggaagtgctgggtccagagctggattcccagagtcttgctgtagcagaaatcaaatga

SEQ ID NO: 13996 - DNA, 120 bp, synthetic construct
  misc_feature 1..120: note = Artificially Synthesized Probe
  source 1..120: mol_type = other DNA
tgtccttctttgccccatatcctccccccacttttcccaaattcactcatgcacatggcaagtaaacgctaaatacttcccatttaaatgctatagaggaagaaatctgttttgtgttta

SEQ ID NO: 13997 - DNA, 120 bp, synthetic construct
  misc_feature 1..120: note = Artificially Synthesized Probe
  source 1..120: mol_type = other DNA
gaatgttggaaagtgaaagtcctcttggggcaggggaaggagagcatttaaatgcttcccatttatttctgatcagctcttgatagaaaaaaaattgctccctatttaaatcctatggaa

SEQ ID NO: 13998 - DNA, 120 bp, synthetic construct
  misc_feature 1..120: note = Artificially Synthesized Probe
  source 1..120: mol_type = other DNA
ctaaaacaaatgttgaaaaaaaattacaggagtggagagcaggttgcagtattaaggagtggccaggagaggccgtgtttagaaagcgatttaaaacacccttccatacccaaatgcaca

SEQ ID NO: 13999 - DNA, 120 bp, synthetic construct
  misc_feature 1..120: note = Artificially Synthesized Probe
  source 1..120: mol_type = other DNA
cacacggtagtttgtggaccacactaccttttactttttttttttgaaaggatgggatggaaagggaagcaaataaacatgacagttaccagtgcaggaagatttgtttctaggtttacc

SEQ ID NO: 14000 - DNA, 120 bp, synthetic construct
  misc_feature 1..120: note = Artificially Synthesized Probe
  source 1..120: mol_type = other DNA
tttcaaagtggctatgccatagaaaataattttcaaatagcaacttgaaggagatgacgaagttggccaaacagagaactgggggaagaatattccaggcagagaaacatcaggaaagcc

SEQ ID NO: 14001 - DNA, 120 bp, synthetic construct
  misc_feature 1..120: note = Artificially Synthesized Probe
  source 1..120: mol_type = other DNA
ctccaacattagtaatttggagaaaagaggaagaatcagaaaaggaagatagagaaggtacaaaccagtgaagtaggagaaaaagtctggagtcccggaagccaaatgaagaatgtgtgt

SEQ ID NO: 14002 - DNA, 120 bp, synthetic construct
  misc_feature 1..120: note = Artificially Synthesized Probe
  source 1..120: mol_type = other DNA
ggagcatggatagttgatctatggttataagtggaaagacagagaatgtaacccgagatgtgtagatggattgatatggcggtaagagactgccagtgctttcttctggtttttttgttt

SEQ ID NO: 14003 - DNA, 120 bp, synthetic construct
  misc_feature 1..120: note = Artificially Synthesized Probe
  source 1..120: mol_type = other DNA
atgagatgtcacattcttttgttgtagttagtctttgaactcctgtgcgtgctaagtctgaaatccttacagcacatttcgatttggactagtcacatctcaagggttcagtagccacat

SEQ ID NO: 14004 - DNA, 120 bp, synthetic construct
  misc_feature 1..120: note = Artificially Synthesized Probe
  source 1..120: mol_type = other DNA
accaagattctattctaacagagtgactatagggaatgaatagctcatgacacactgagaagggtttaattggagatcagtgtgaataccacagcagaatgtatcttgggaactctgtgc

SEQ ID NO: 14005 - DNA, 120 bp, synthetic construct
  misc_feature 1..120: note = Artificially Synthesized Probe
  source 1..120: mol_type = other DNA
cacatagatgtagatttatattcctgctccttagaagactagaacagcgatgcttagagaaagagcaaaccaaggtatggtatatcttgagttagagtaggagttgagttgagtgggagc

SEQ ID NO: 14006 - DNA, 120 bp, synthetic construct
  misc_feature 1..120: note = Artificially Synthesized Probe
  source 1..120: mol_type = other DNA
atgctttgcatttgaataccttctgataggtggctaggtgtctcacataagcgtaaaagatgagtaatgcaggtggtattatcattcttatgggcaagaaggagaggctgtaaatcaagt

SEQ ID NO: 14007 - DNA, 120 bp, synthetic construct
  misc_feature 1..120: note = Artificially Synthesized Probe
  source 1..120: mol_type = other DNA
tccttcactcactgaccttaacacaactctgattacactgagaactccttgaggtcaaggacaatgatgccaagaaaagcacttaggttttggcaatctttaatctccaatactttcttg

SEQ ID NO: 14008 - DNA, 120 bp, synthetic construct
  misc_feature 1..120: note = Artificially Synthesized Probe
  source 1..120: mol_type = other DNA
attatctcaccatgaactatcatcactcagaactctagttatcagaaaaaatggctgctaggtaatgactgatgtcattgtcatcctgtgtcagatcagagggcacagttcaagttgggt

SEQ ID NO: 14009 - DNA, 120 bp, synthetic construct
  misc_feature 1..120: note = Artificially Synthesized Probe
  source 1..120: mol_type = other DNA
tgcacaggagtaggatgtttagcccttcttacggagagcatgagcagtagaagaggaggctggaatcctaaagtgtattcaatcttctattgtcaatgggtcaataatatacctattaga

SEQ ID NO: 14010 - DNA, 120 bp, synthetic construct
  misc_feature 1..120: note = Artificially Synthesized Probe
  source 1..120: mol_type = other DNA
gagcccccgcgcccagccaaaagtgagaatgtcttttaaagacttcagataaaaagttttccacataatctcacagcattatctattaccttctcactcattcaacaaacgtatcattgt

SEQ ID NO: 14011 - DNA, 120 bp, synthetic construct
  misc_feature 1..120: note = Artificially Synthesized Probe
  source 1..120: mol_type = other DNA
agttctgccacaccatcatttcctctgtccttagggagtttgcaatttaaaagggtaaataagacaggtgtagaaatatgaagcatttacacgggatgccaatgttgcagtatgaaaaga

SEQ ID NO: 14012 - DNA, 120 bp, synthetic construct
  misc_feature 1..120: note = Artificially Synthesized Probe
  source 1..120: mol_type = other DNA
gcgatgtgatttttgtgcataatttcatttagtctccctaacatcctttgtagattggtatcattgttatctccttgatagatgaggtgaatgaggctcttagagagggcaggtgacttg

SEQ ID NO: 14013 - DNA, 120 bp, synthetic construct
  misc_feature 1..120: note = Artificially Synthesized Probe
  source 1..120: mol_type = other DNA
ggaactttctgttgatcagtttatacctgatagagattccctatgtcacatcatgagactaagaactaggcagaggacatccatatagctccagtcatttgagacctcacgtatttttag

SEQ ID NO: 14014 - DNA, 120 bp, synthetic construct
  misc_feature 1..120: note = Artificially Synthesized Probe
  source 1..120: mol_type = other DNA
attgaccacaaagctggggacatagcaactgtttagcaaatcttctattttactgattcatcaattggtacagatgaattattcttgcagtgccaggccatggaactgatatagagatct

SEQ ID NO: 14015 - DNA, 120 bp, synthetic construct
  misc_feature 1..120: note = Artificially Synthesized Probe
  source 1..120: mol_type = other DNA
tagttgcccctgacccacccaccttcttcataattccttcttcaacatggacccgatcatgccaatactttgcttaaagctccctgataagtctttgatttctactgattattatccagt

SEQ ID NO: 14016 - DNA, 120 bp, synthetic construct
  misc_feature 1..120: note = Artificially Synthesized Probe
  source 1..120: mol_type = other DNA
aagtggagagcttgaaacgagaactccaggacaagaaacagcatctggataaaacatggtaagttgtaattttaagctctggtcctttccagagtctgtcttactaatctgagagcaata

SEQ ID NO: 14017 - DNA, 120 bp, synthetic construct
  misc_feature 1..120: note = Artificially Synthesized Probe
  source 1..120: mol_type = other DNA
ccgagaaggaatctgtttcttataaataaaagcgttagtgtgaaaggataaatgtataaggatgtttattgcatcattagttgtaatggcaaaaaactagaaacaattatccatcaatag

SEQ ID NO: 14018 - DNA, 120 bp, synthetic construct
  misc_feature 1..120: note = Artificially Synthesized Probe
  source 1..120: mol_type = other DNA
agaatgaaactgggcccctacctttcagcacatataaaaattaactcaagatggagtaaagatgtaaatgtaagacctcaaactataagaatcctagaagaaaacccaagaaacaccatt

SEQ ID NO: 14019 - DNA, 120 bp, synthetic construct
  misc_feature 1..120: note = Artificially Synthesized Probe
  source 1..120: mol_type = other DNA
tctctactttccctctgaaattcatcaatgttcctgggtcttagggctcctaatctaggtagaaattttgcagcctctcagtttttgttctttttccaggaatccaggctagcaaagaat

SEQ ID NO: 14020 - DNA, 120 bp, synthetic construct
  misc_feature 1..120: note = Artificially Synthesized Probe
  source 1..120: mol_type = other DNA
cagcccaaaaagactaagataatgccattgaagttttcctagaggaagcgaaatctgagctgagctttgaaggatgaataggaggtagaataaataggtagaaagtggatagggaaagga

SEQ ID NO: 14021 - DNA, 120 bp, synthetic construct
  misc_feature 1..120: note = Artificially Synthesized Probe
  source 1..120: mol_type = other DNA
gtatttgctttcagattttccctactaggttccccaagacagtgtcatatttgaaccccaattaaaaaaaactgaactaaaaaccaaaacaaaaccccaagtaaagcacatgcacatctg

SEQ ID NO: 14022 - DNA, 120 bp, synthetic construct
  misc_feature 1..120: note = Artificially Synthesized Probe
  source 1..120: mol_type = other DNA
catagatgatcaataagtttatttgaacccatagtttgtatacctcagcacagtattttacaacttaaccctagtctgagggtctgaattttcagtctcttctccagccattgcctcttc

SEQ ID NO: 14023 - DNA, 120 bp, synthetic construct
  misc_feature 1..120: note = Artificially Synthesized Probe
  source 1..120: mol_type = other DNA
aaaatttcttctcctgagcatcgctatactccttcaagtcaaatgaattatttctttatctttcatcctatagctctatggcagcactcaatgtactatatggtgcctctattctggtag

SEQ ID NO: 14024 - DNA, 120 bp, synthetic construct
  misc_feature 1..120: note = Artificially Synthesized Probe
  source 1..120: mol_type = other DNA
acagcgattgtttcttttccaacttcatatttccagtacttggtagagtgcattgagtacacaaaatagttatccaagaaccgtttattgaatggaacagccactaccaccaccaccaaa

SEQ ID NO: 14025 - DNA, 120 bp, synthetic construct
  misc_feature 1..120: note = Artificially Synthesized Probe
  source 1..120: mol_type = other DNA
atagccagcagcagaaagagtctgttacttttctcacttctagactttcttttaaggggctcattagggcaggcccaccagcataatatcccttttcgttaacttaaaatcaactgatta

SEQ ID NO: 14026 - DNA, 120 bp, synthetic construct
  misc_feature 1..120: note = Artificially Synthesized Probe
  source 1..120: mol_type = other DNA
gccaccacacctggccataatgtagttttaatattgaaaagagaactcactgtggtaaaaaataattgcattgattttctgggaagttacctcgaagggaactcctctccttcattcaac

SEQ ID NO: 14027 - DNA, 120 bp, synthetic construct
  misc_feature 1..120: note = Artificially Synthesized Probe
  source 1..120: mol_type = other DNA
aaggccgagaagcgattccatcctgattatttattagctgtatgactatggatatgtcacttctcagcttccatatacataaaatgagaagattagctcaaataatctctatagtttcct

SEQ ID NO: 14028 - DNA, 120 bp, synthetic construct
  misc_feature 1..120: note = Artificially Synthesized Probe
  source 1..120: mol_type = other DNA
atttcaaaatgctctctaggagatgagacagttgctcagtgagtaccactagtatagggagtcctagccttccaaaggtttatagtccagtgaaagactggtatgtaaacaaagaactaa

SEQ ID NO: 14029 - DNA, 120 bp, synthetic construct
  misc_feature 1..120: note = Artificially Synthesized Probe
  source 1..120: mol_type = other DNA
ttaattccacctatacttcacaactgagaataccacaaacagttgggccctagaagaaagaagagctcacagatcttgcacttctaggtctgaattgtccaagtgaagaacgctaattta

SEQ ID NO: 14030 - DNA, 120 bp, synthetic construct
  misc_feature 1..120: note = Artificially Synthesized Probe
  source 1..120: mol_type = other DNA
tggaacttaatgtaaatagtactgcatgcagtgaggcatatttcctaaaatagcaaacattcctgcgttaccatggagagatctgacttggaggttaaggcaagaatgtgctctaaatgc

SEQ ID NO: 14031 - DNA, 120 bp, synthetic construct
  misc_feature 1..120: note = Artificially Synthesized Probe
  source 1..120: mol_type = other DNA
ctttcaaaccatagcagataccaagatgagaaagctgtggttccttttcttaagtagcttaccagctaatggggagaacgcagtatggagaaatgacatacaagttactataggtacaaa

SEQ ID NO: 14032 - DNA, 120 bp, synthetic construct
  misc_feature 1..120: note = Artificially Synthesized Probe
  source 1..120: mol_type = other DNA
tttctcattcatacattctattcaataacaattgagtgcctaccatgactaggcaatggtgctgtcatggtaggcactagagaattaccttctatggaaggaggcagataaataagcaga

SEQ ID NO: 14033 - DNA, 120 bp, synthetic construct
  misc_feature 1..120: note = Artificially Synthesized Probe
  source 1..120: mol_type = other DNA
cttagaatttcataaaagtctagaaatgcagttggcttcaaacagcctctgctctttgctctgcaaaagttccagagtcaagggaatgctaagggcttaaccatcagattagaaaagagg

SEQ ID NO: 14034 - DNA, 120 bp, synthetic construct
  misc_feature 1..120: note = Artificially Synthesized Probe
  source 1..120: mol_type = other DNA
ggccttcttcatcctaacacccatctcaagtgccactcttgtcccttcaactataccagcccatactaacctctactttttctgtattcacactaaatttaattcagtaccatttagttt

SEQ ID NO: 14035 - DNA, 120 bp, synthetic construct
  misc_feature 1..120: note = Artificially Synthesized Probe
  source 1..120: mol_type = other DNA
gtaagtagttcttcattggtgtgcttttctgtctatctgcagaagttctgatctgttgtctgatacagcttaggatagttctcattcagtggttttcaaagtgtgattcccagatagcag

SEQ ID NO: 14036 - DNA, 120 bp, synthetic construct
  misc_feature 1..120: note = Artificially Synthesized Probe
  source 1..120: mol_type = other DNA
cccctttgcaatcacttctcaccctgtctctcaccgttcaaccacttcctgacttatatcacaatagatctgtttttcctatagtctgttattagacttcagacaatatcaggtgcattc

SEQ ID NO: 14037 - DNA, 120 bp, synthetic construct
  misc_feature 1..120: note = Artificially Synthesized Probe
  source 1..120: mol_type = other DNA
ttcacattttcctaataggaaaatgtggcttgcattgacagtaaaaaatgagatctttattatacttaagactgggtacagcagggtagtgtcctggcaggcagtctgtctttccatcag

SEQ ID NO: 14038 - DNA, 120 bp, synthetic construct
  misc_feature 1..120: note = Artificially Synthesized Probe
  source 1..120: mol_type = other DNA
aaagcatttcctcaaaatcatctcatttagtcttcaataagaagtttgggggcttattatgaactctcagagatggcatttggatgtcttcaggcttaggagtatggactctgtcctggg

SEQ ID NO: 14039 - DNA, 120 bp, synthetic construct
  misc_feature 1..120: note = Artificially Synthesized Probe
  source 1..120: mol_type = other DNA
aaaagcccatttctcttctactatcttcaagatcttggttaaccagattcacattgtatgtgccggactctttctcaggtgactgctctgtgcttttttatctaaagaagggcaagtcac

SEQ ID NO: 14040 - DNA, 120 bp, synthetic construct
  misc_feature 1..120: note = Artificially Synthesized Probe
  source 1..120: mol_type = other DNA
aatctatcgattcgacacagttattgcccggattgaagcgctttctattgagcgcttgcaaaagctgctactggagaaggatcgcctcaagttctgcattgccagtatgtatcggaagaa

SEQ ID NO: 14041 - DNA, 120 bp, synthetic construct
  misc_feature 1..120: note = Artificially Synthesized Probe
  source 1..120: mol_type = other DNA
tggcttcacgtgatttcggtctaggtggaggttagaaatattctggacttgagaaaattagtcatgaccccatttttgctgcaccttttgctctgtctcatttagtaaacgtgatttgca

SEQ ID NO: 14042 - DNA, 120 bp, synthetic construct
  misc_feature 1..120: note = Artificially Synthesized Probe
  source 1..120: mol_type = other DNA
tcagtggagcctcgcagctaaatttgggctttacagtatttctgtgactagacataggtgttacaaattaaacatggtgttttcatattagggtctaaaattagttgggccaggatggat

SEQ ID NO: 14043 - DNA, 120 bp, synthetic construct
  misc_feature 1..120: note = Artificially Synthesized Probe
  source 1..120: mol_type = other DNA
gcccaacatgtttgtaaataaaatgggcggtgtatctattgtttaaatctggttacttttaagctccttaagagccttatgacaaaaccagtgctagatgggacaatggcagactggttt

SEQ ID NO: 14044 - DNA, 120 bp, synthetic construct
  misc_feature 1..120: note = Artificially Synthesized Probe
  source 1..120: mol_type = other DNA
agtctaaaaactggccttagcctaaaaaaaagtctcatattgtgcaacactaggcctggaagcggttctcttttctgatactggaaagcctttgtcctaattctgagtcaaaagtgactt

SEQ ID NO: 14045 - DNA, 120 bp, synthetic construct
  misc_feature 1..120: note = Artificially Synthesized Probe
  source 1..120: mol_type = other DNA
gttcatattgcctcaggtgaaggcttcctgttatactcacaacaacaaatatctcaaataatttttccagaagtcattatccttgctgcttttttccctctccctctatccagtccacca

SEQ ID NO: 14046 - DNA, 120 bp, synthetic construct
  misc_feature 1..120: note = Artificially Synthesized Probe
  source 1..120: mol_type = other DNA
tccaggctcatattccattagctgttctttctgcctggattgttctgctgatctttgcaggactgattctttttccttcagatatctatttaaatgctgcctcataaagacctttctctg

SEQ ID NO: 14047 - DNA, 120 bp, synthetic construct
  misc_feature 1..120: note = Artificially Synthesized Probe
  source 1..120: mol_type = other DNA
atatcaaaatctgccaattttttccaataatgtgaaacaagcatgttgtaagaaaggtagccggaatgtaacttctctcaggaagtgtaagtttgatgagtatgccttttcaactccttg

SEQ ID NO: 14048 - DNA, 120 bp, synthetic construct
  misc_feature 1..120: note = Artificially Synthesized Probe
  source 1..120: mol_type = other DNA
ctggctctagcctgagtctgtcaacctttgtaggacttgggagatgaatactgtgtactccttgtgctctagggaatatttcatgtaaaagtgtagttcttctctttattcttatgaaga

SEQ ID NO: 14049 - DNA, 120 bp, synthetic construct
  misc_feature 1..120: note = Artificially Synthesized Probe
  source 1..120: mol_type = other DNA
aagatggtacaattcagaacctcaaggaaactctgaaaagcagggaacgtgaggtaacatatttaccaatcaaggacctgtgtggaaacaattggtcccttcaaagtagacaagtatttt

SEQ ID NO: 14050 - DNA, 120 bp, synthetic construct
  misc_feature 1..120: note = Artificially Synthesized Probe
  source 1..120: mol_type = other DNA
atgctgactttgccctgatcataactttttagcaggacagtttgtgttgaacccttgagtcagttgcataatctaagtatttcagttcaacacttgctgcccttgtaccatatgctagtt

SEQ ID NO: 14051 - DNA, 120 bp, synthetic construct
  misc_feature 1..120: note = Artificially Synthesized Probe
  source 1..120: mol_type = other DNA
catcgtgttagccaggatggtctcgatgtcctgacctcgtgatccgcccgcctcagcctcccaaagtgctgagattacaggcgtgagccactgcgcccggcctctttctttccttctttc

SEQ ID NO: 14052 - DNA, 120 bp, synthetic construct
  misc_feature 1..120: note = Artificially Synthesized Probe
  source 1..120: mol_type = other DNA
gtctgggcagggtcggggagtggtggagggatggaggtagaaataattcttaactttttgttatttagctaaaggaaacatttccccaagatttgtttagttgagaatatgtatttggta

SEQ ID NO: 14053 - DNA, 120 bp, synthetic construct
  misc_feature 1..120: note = Artificially Synthesized Probe
  source 1..120: mol_type = other DNA
gaaacttccacagagtaattttgatgatagaataaaagtttgaggggaagatggagcattaagaagagactgatctgttctgccacctactctaagcttcagtcacattgaatccactac

SEQ ID NO: 14054 - DNA, 120 bp, synthetic construct
  misc_feature 1..120: note = Artificially Synthesized Probe
  source 1..120: mol_type = other DNA
ccccttccatcattttctgaaaaccagggattttgctttataagggggaagaaaaccaaaaagagcagttactagttccatcattgtcaattagcaagtgagagattttagcgcttctac

SEQ ID NO: 14055 - DNA, 120 bp, synthetic construct
  misc_feature 1..120: note = Artificially Synthesized Probe
  source 1..120: mol_type = other DNA
agtgattatgtaatctcagccttggattaggactcttcagattgggaggactgtgacccaagtctttaatttcattctgtgcctgggcaagtcattgactttcactgggatttttttttt

SEQ ID NO: 14056 - DNA, 120 bp, synthetic construct
  misc_feature 1..120: note = Artificially Synthesized Probe
  source 1..120: mol_type = other DNA
gagcaccagggagcaggaaagccaagtaaggattaatgcacagatcagacaagtgtcatgtagtgcatttatagtctgcaaataggaagcatttgcagactatagatgtgtgtatattta

SEQ ID NO: 14057 - DNA, 120 bp, synthetic construct
  misc_feature 1..120: note = Artificially Synthesized Probe
  source 1..120: mol_type = other DNA
caccatgccctgcccatagtaaagtgttaatttttcctcatttctatgtgttttctcctcaaggctaaaaactcttagttgacttgtgctgcatttcagataccagtagctcagaatccc

SEQ ID NO: 14058 - DNA, 120 bp, synthetic construct
  misc_feature 1..120: note = Artificially Synthesized Probe
  source 1..120: mol_type = other DNA
aaaagtggaaggttttttcatatttcccctagaaattgtgacaagagctcagcttctgccctaaaacaatagtacttttcctcagagacagttggtgttatgattcatcatcttagaccc

SEQ ID NO: 14059 - DNA, 120 bp, synthetic construct
  misc_feature 1..120: note = Artificially Synthesized Probe
  source 1..120: mol_type = other DNA
cctgataaggtgacatttggcaaagacctgaagggagcaaaccacacaaatgtttgagtgaaaaggaatccacccctaagaagcaactatccgagaataaagacatttgttatactaatt

SEQ ID NO: 14060 - DNA, 120 bp, synthetic construct
  misc_feature 1..120: note = Artificially Synthesized Probe
  source 1..120: mol_type = other DNA
acagcagggccatgagctgacaccttttcctgggtatcgtttcaagtctggggccactcactgtaacttgacatcacctactaatgttatatatatatataatgttagcatagtttgata

SEQ ID NO: 14061 - DNA, 120 bp, synthetic construct
  misc_feature 1..120: note = Artificially Synthesized Probe
  source 1..120: mol_type = other DNA
aaattaaacatttacacagttcaaaactctagtatataaaatgatatactcagatgtccaatattttcctgttccttctctcctgtttccactcatctcctgcaggtaatcagtttcatt

SEQ ID NO: 14062 - DNA, 120 bp, synthetic construct
  misc_feature 1..120: note = Artificially Synthesized Probe
  source 1..120: mol_type = other DNA
aaagcactggtgaaaaaaggaagcgctgtgtgattgctgcttagagttatgacattagatccgtgaaattagatttagaaacatgaaacgagaaatttgagtataatcagtgtttatcaa

SEQ ID NO: 14063 - DNA, 120 bp, synthetic construct
  misc_feature 1..120: note = Artificially Synthesized Probe
  source 1..120: mol_type = other DNA
gaccacagctcagagttacagactgaaactaaaagcttgtttgttactatgctggcatctcttttagaagatcactcaatgtcatggcttcctaaattcagtttagctagctagtccaaa

SEQ ID NO: 14064 - DNA, 120 bp, synthetic construct
  misc_feature 1..120: note = Artificially Synthesized Probe
  source 1..120: mol_type = other DNA
gcaggagccagatcactaggtttgttaaaaggattaaatctatacaaagcatttattagagagcccagggcatagtaagtgttagcagctatggttgttatcatgattttttttttgaga

SEQ ID NO: 14065 - DNA, 120 bp, synthetic construct
  misc_feature 1..120: note = Artificially Synthesized Probe
  source 1..120: mol_type = other DNA
tagtaataggatatgcaaaagcatttgcctcagtgttaaaatgtaaacatggcagacattgtttcctcttttcacagatggaactttctgctctacagtccatgatggctgtgcaggaag

SEQ ID NO: 14066 - DNA, 120 bp, synthetic construct
  misc_feature 1..120: note = Artificially Synthesized Probe
  source 1..120: mol_type = other DNA
cccctttctgacatttgtagttctgaaaagagcagcagttcttttggacacataccaatagttatccctcacactcatacctaagtcacctccctcaactgaatctttctcttttatctg

SEQ ID NO: 14067 - DNA, 120 bp, synthetic construct
  misc_feature 1..120: note = Artificially Synthesized Probe
  source 1..120: mol_type = other DNA
atttatgccttttattcttcattaagtgcagatgcttatgatactgaagaggggagaaaaaagagggacaattaccggggctacccactttgtcatttgttttatggattgctctgagcc

SEQ ID NO: 14068 - DNA, 120 bp, synthetic construct
  misc_feature 1..120: note = Artificially Synthesized Probe
  source 1..120: mol_type = other DNA
attccttttcagcacaccatcccaccgtcaagtttggtaacaaatgagaaaacaaatatcttcagtagtggttctacttggctcagtcttgctccagtttatatttagtttgtcctgggt

SEQ ID NO: 14069 - DNA, 120 bp, synthetic construct
  misc_feature 1..120: note = Artificially Synthesized Probe
  source 1..120: mol_type = other DNA
aaccaggagagtagtcttgtaatagtagactgcaagtattgggaaggccaagttaaagaacagaggcaagaactatgaaagtgatcatagtcaacttttatctccaatactgtctcagag

SEQ ID NO: 14070 - DNA, 120 bp, synthetic construct
  misc_feature 1..120: note = Artificially Synthesized Probe
  source 1..120: mol_type = other DNA
ctttagctgtgtctataacagatagagcatcagtcaaactagagtggacagggagaaaatgctctactggggaagcactctggaatcttctgattaagtcatttgcaaaagattaatagc

SEQ ID NO: 14071 - DNA, 120 bp, synthetic construct
  misc_feature 1..120: note = Artificially Synthesized Probe
  source 1..120: mol_type = other DNA
cattattggactaagttagtaggtcagccttttcctttgatagtgtgtactcttatctgtcacccaaccttctccacaccctcttctcttcattcagttgtggacagcagtaattttttc

SEQ ID NO: 14072 - DNA, 120 bp, synthetic construct
  misc_feature 1..120: note = Artificially Synthesized Probe
  source 1..120: mol_type = other DNA
tatagaaaacagtcacaaaatcttgacatttggcatccctgaaaagctcaagtggccttttcaagtagggtatcatgtagtattctgcaggtttacagtcagtatcctgcaaggaaaggt

SEQ ID NO: 14073 - DNA, 120 bp, synthetic construct
  misc_feature 1..120: note = Artificially Synthesized Probe
  source 1..120: mol_type = other DNA
tgttctcacctgggccaagatcaattttctaaataaaaaatagctttgtaatttgtctccaacaaagaatgggaaatggaagggaacacaaaactgtggtcctgacaatactaattctac

SEQ ID NO: 14074 - DNA, 120 bp, synthetic construct
  misc_feature 1..120: note = Artificially Synthesized Probe
  source 1..120: mol_type = other DNA
ctttgaagaataaaagagaccatgagcaggaagaatttcttgacattacagaattatggcatcacaaaataggtgcagtggtcatatctcctggtctgcctgggagtcctaatttacatg

SEQ ID NO: 14075 - DNA, 120 bp, synthetic construct
  misc_feature 1..120: note = Artificially Synthesized Probe
  source 1..120: mol_type = other DNA
ttttctgtttatcccatattagtggcttaaaggaagataatgactacagagtagaattggggggaaatggtcttgactccacccagtttggactcattactaaagaacatgtcatgagcc

SEQ ID NO: 14076 - DNA, 120 bp, synthetic construct
  misc_feature 1..120: note = Artificially Synthesized Probe
  source 1..120: mol_type = other DNA
agtctaacatgtaaaacttaatctcgaagaagcaagttaaatgaacagattcttagctcccagagaatctaaaggcggcaggctattttatattttatcaaaaaataagcagacgagtca

SEQ ID NO: 14077 - DNA, 120 bp, synthetic construct
  misc_feature 1..120: note = Artificially Synthesized Probe
  source 1..120: mol_type = other DNA
aggtttttaaagcagccaaagattagggaatgtgtccatacacctctactcagctagtatcctgagtgagatggtttctggggttggtttgaatgagtaagtattggaaataactcttgt

SEQ ID NO: 14078 - DNA, 120 bp, synthetic construct
  misc_feature 1..120: note = Artificially Synthesized Probe
  source 1..120: mol_type = other DNA
tggttgccgaggctaggatcagaacaagatttcaagattcttaagttggggaggttctataagacacagtgagtgtcacagtaaattttctttgacaaattaaccataataaatttctac

SEQ ID NO: 14079 - DNA, 120 bp, synthetic construct
  misc_feature 1..120: note = Artificially Synthesized Probe
  source 1..120: mol_type = other DNA
tgcggacttagtgagaagatatctttttacataaactacttctcagtcatcttcctgttctccttgaacttcccagctgcctttccaacccatatcttcactccatttttctctccaatc

SEQ ID NO: 14080 - DNA, 120 bp, synthetic construct
  misc_feature 1..120: note = Artificially Synthesized Probe
  source 1..120: mol_type = other DNA
tccacttttccttttgcttgaacagcttctcctgagtcctccttaccgatggttgtgactttaattatatacatctctgtccctccagacagatccctctgtcctcactctctgatttca

SEQ ID NO: 14081 - DNA, 120 bp, synthetic construct
  misc_feature 1..120: note = Artificially Synthesized Probe
  source 1..120: mol_type = other DNA
aatttgtttgcttgtttccaggaaaatggtcccttaaaggtagattttgagcttctccttgttatgtccttggaaggtaaatttttgcctgacaccaagttcccttcctactccaagcat

SEQ ID NO: 14082 - DNA, 120 bp, synthetic construct
  misc_feature 1..120: note = Artificially Synthesized Probe
  source 1..120: mol_type = other DNA
gaatgattaaaccaagctaattacatattcataaacttacctacctaccatttttgatggtgaaacattgaaaatttactcttattttgaaatatacattttattggctatagtcaccct

SEQ ID NO: 14083 - DNA, 120 bp, synthetic construct
  misc_feature 1..120: note = Artificially Synthesized Probe
  source 1..120: mol_type = other DNA
caaacaggatatcagatttgcacagaggcctttgtggggcagatgggaacccagcacacaaaaagttgaattatatgaagcaatatcacaagtgagttaggaaatgtggaaaaaaaaacc

SEQ ID NO: 14084 - DNA, 120 bp, synthetic construct
  misc_feature 1..120: note = Artificially Synthesized Probe
  source 1..120: mol_type = other DNA
aagctgttctgggccctgctctcttcaatgtattggtgacctgaatggagatataaagcatataattaattctacaagttatccccaatcacttgtagtgggggccactacatgatttgt

SEQ ID NO: 14085 - DNA, 120 bp, synthetic construct
  misc_feature 1..120: note = Artificially Synthesized Probe
  source 1..120: mol_type = other DNA
gagaaagaatcaccgtattcacaccctccagtcctgtttcaacctcgtttgtttgcatttgttttaatttcttatgtgcttttctccctcaccatctctggattctcctcttctccatgg

SEQ ID NO: 14086 - DNA, 120 bp, synthetic construct
  misc_feature 1..120: note = Artificially Synthesized Probe
  source 1..120: mol_type = other DNA
ccttgttacatgaccagtattgctgtttttaattgaccaaaacgtataaggaatccctgctacctaatatgtctcactgctgtatacagaaccagaacagttcacgaaggaggaggaatt

SEQ ID NO: 14087 - DNA, 120 bp, synthetic construct
  misc_feature 1..120: note = Artificially Synthesized Probe
  source 1..120: mol_type = other DNA
cgccctctttatcccctttccacatcccagttttggtaaaatacctatcccctttttctttattgagaaactatctcacagattgtctgtatcctatgtcctattttcctcccagaaaca

SEQ ID NO: 14088 - DNA, 120 bp, synthetic construct
  misc_feature 1..120: note = Artificially Synthesized Probe
  source 1..120: mol_type = other DNA
cttggtgcaaattagctgttttggtcaattttatttcttcaacaaatatgaatgatttatgtggcaggcacttgtgtaggtactggggatatgggatgaataggacagacacagtcctgc

SEQ ID NO: 14089 - DNA, 120 bp, synthetic construct
  misc_feature 1..120: note = Artificially Synthesized Probe
  source 1..120: mol_type = other DNA
gaagggcttgagatgacagtgtttaccttaaaacattctcccatatgaatcaggaggtaccaagagaagggtctctttgtaccacaaacaataatagtaatattctgcctacattcagcc

SEQ ID NO: 14090 - DNA, 120 bp, synthetic construct
  misc_feature 1..120: note = Artificially Synthesized Probe
  source 1..120: mol_type = other DNA
aagattcagtgaaatggagaatacagggattctgagagaatcaatgggacagaatgtgaggggagatgagtggtctctttttgaccactgagaaaacatttcctgagagctcctctgtag

SEQ ID NO: 14091 - DNA, 120 bp, synthetic construct
  misc_feature 1..120: note = Artificially Synthesized Probe
  source 1..120: mol_type = other DNA
tcttgaggcagtgtagtgtggcagttaagagacaagatcctggggccagactggttggttcaaatcccagtttgaaaactttcctatgtcccagtttcttcatgtgttaaaatagtaata

SEQ ID NO: 14092 - DNA, 120 bp, synthetic construct
  misc_feature 1..120: note = Artificially Synthesized Probe
  source 1..120: mol_type = other DNA
aaagagcattaaactttcagcatgcagtaatagcttgtcctacattcttgtggccatcctaaatagataaggccatgttaatgtcttaagaaacaccagtgtgtgtggaatgaacacagg

SEQ ID NO: 14093 - DNA, 120 bp, synthetic construct
  misc_feature 1..120: note = Artificially Synthesized Probe
  source 1..120: mol_type = other DNA
accgggtctcagggatttcctcttagggatatattagtaaagatggtatagtatagtagtaatactggaatcagactacctacctctggtgcttactacccatgcaaccttcttaacctt

SEQ ID NO: 14094 - DNA, 120 bp, synthetic construct
  misc_feature 1..120: note = Artificially Synthesized Probe
  source 1..120: mol_type = other DNA
tcaggtggtggttaaaacagaaggcatgaaaggttctatctagacttaggatgaaatgatgctaattattcattgagtaactgctgtgaatctatgtgatactggtgctgtaagggatgt

SEQ ID NO: 14095 - DNA, 120 bp, synthetic construct
  misc_feature 1..120: note = Artificially Synthesized Probe
  source 1..120: mol_type = other DNA
tggcctggatgctgccaccaactcgctaaatgccttatccttgtggtgtctccatttatggcatggtaatgtgcatgcaggtactccacatatggataaagcgccatgctcttttataca

SEQ ID NO: 14096 - DNA, 120 bp, synthetic construct
  misc_feature 1..120: note = Artificially Synthesized Probe
  source 1..120: mol_type = other DNA
aaagtgaactaactaggtttcaagagtcttctgccccactaagggtcctgctttcctgctgtgtgtttaataagcaggatgagctttttccaaagttgggttgacagctaatttaatagt

SEQ ID NO: 14097 - DNA, 120 bp, synthetic construct
  misc_feature 1..120: note = Artificially Synthesized Probe
  source 1..120: mol_type = other DNA
acaaagtgagccactgtggggagagtgagaagatcacggcagactcttcttccttggtgactctgtcagatagatcttctttaagatggaaaacctccttcatctctcctacaatgatct

SEQ ID NO: 14098 - DNA, 120 bp, synthetic construct
  misc_feature 1..120: note = Artificially Synthesized Probe
  source 1..120: mol_type = other DNA
tctgctgcctgtttgatttttcttcaacgacagaggtttggactgttaggggcctaaatgcatcaaaacctagacagaatcgagaaaccatcctcattttccagttgtgtctgatttaag

SEQ ID NO: 14099 - DNA, 120 bp, synthetic construct
  misc_feature 1..120: note = Artificially Synthesized Probe
  source 1..120: mol_type = other DNA
ctcctcaaagaatgcctgggctgtgttacctggcaatttgagtatatttgcagtattgatctgaaatggtgccagcaccattgggatgtgttttaggatataatcattgtcttctacatt

SEQ ID NO: 14100 - DNA, 120 bp, synthetic construct
  misc_feature 1..120: note = Artificially Synthesized Probe
  source 1..120: mol_type = other DNA
tctgcatggctcgggctggatggcagagtttaaaaaaacaacacgggtacacgttacaaatgtaagagggagggaaagctctgtttgcttattttttggaaatgtatttactgttatttc

SEQ ID NO: 14101 - DNA, 120 bp, synthetic construct
  misc_feature 1..120: note = Artificially Synthesized Probe
  source 1..120: mol_type = other DNA
cgtagactgtggacagtcaccttttagaaagtgctttgatgtatttgtaggctggatgctcatcataaatttagtgtgctggtggtcactgatagcttagaaaaaaatgacaaccttcac

SEQ ID NO: 14102 - DNA, 120 bp, synthetic construct
  misc_feature 1..120: note = Artificially Synthesized Probe
  source 1..120: mol_type = other DNA
caccaacaatgaatgggcaacaaatgtgtcccatgacaaatggcaagagtattttctagcttccatttctttatcttgcctccttttcctttatctttccacatttgtccatttgtcttt

SEQ ID NO: 14103 - DNA, 120 bp, synthetic construct
  misc_feature 1..120: note = Artificially Synthesized Probe
  source 1..120: mol_type = other DNA
accatatccagcttgatttcatgtcccctttctcttctgaaaaactccaacgtggaacggacatattgactagttagtttcaggggaaggcaagtacatgtagacaaacagatgttcgtg

SEQ ID NO: 14104 - DNA, 120 bp, synthetic construct
  misc_feature 1..120: note = Artificially Synthesized Probe
  source 1..120: mol_type = other DNA
tgtaccagcttaactccaaacccacaggtaaagcacaaagcagagatggcagcctttgaaaagaagtctcatttggagtctactcttttcctacccaggcaggactatttcattcctcct

SEQ ID NO: 14105 - DNA, 120 bp, synthetic construct
  misc_feature 1..120: note = Artificially Synthesized Probe
  source 1..120: mol_type = other DNA
gaatatatctgagtttagagagtaactctctttaaggcagaactacgtctgatgcccagagtcacctgacttctcaccccatacttaatctgcttatatactgctgatgtctgtgccttt

SEQ ID NO: 14106 - DNA, 120 bp, synthetic construct
  misc_feature 1..120: note = Artificially Synthesized Probe
  source 1..120: mol_type = other DNA
aggaaatccatcatttctgtacaagcccacctgcatatatccagagtcacaagctatcaatttggataccagtctggtatctgctctacctcccttcactcacaactgacttggaaccaa

SEQ ID NO: 14107 - DNA, 120 bp, synthetic construct
  misc_feature 1..120: note = Artificially Synthesized Probe
  source 1..120: mol_type = other DNA
atttaaacgagtacaatttgccaggctcaggtgactctttccccagaggacttactgagcctgcagctgtatttttagagtcccttcaataatctttgacaacttgtgaagatcagagaa

SEQ ID NO: 14108 - DNA, 120 bp, synthetic construct
  misc_feature 1..120: note = Artificially Synthesized Probe
  source 1..120: mol_type = other DNA
ttttcaagcaaagttacttgacctccctcagcctccatttccatatctgcgaaataaaagtgatagtcttcatgaccccctgagttgacatctggggctcagatgtaaccctaactgtaa

SEQ ID NO: 14109 - DNA, 120 bp, synthetic construct
  misc_feature 1..120: note = Artificially Synthesized Probe
  source 1..120: mol_type = other DNA
aatataggatgagggtagaaatataggacaggcagccattcatggacatgagggtttggggtttggtagaaacatgttcacacaagtaaggtgtaggacaaaggttgctagaaatgccag

SEQ ID NO: 14110 - DNA, 120 bp, synthetic construct
  misc_feature 1..120: note = Artificially Synthesized Probe
  source 1..120: mol_type = other DNA
agcttgaggttggagtgagaagtcaggatggtggagcagagtcaccaaatcttgaaagctcacaggtcagggtaaaagttgacattctgtatagtagataatgaaactaagtctgttctt

SEQ ID NO: 14111 - DNA, 120 bp, synthetic construct
  misc_feature 1..120: note = Artificially Synthesized Probe
  source 1..120: mol_type = other DNA
gagagagaaattgaaaaactcagttataatccctcgtctaaggtgcccaactcacattctcacatgctaccaaaagacctcctccttctctttcatttttgagagtgaggactatgaaat

SEQ ID NO: 14112 - DNA, 120 bp, synthetic construct
  misc_feature 1..120: note = Artificially Synthesized Probe
  source 1..120: mol_type = other DNA
ggtcgtttgatttgggcaaggtgtctaaagtctcagaggtttaagctttagtttccttatatttaagatgaggataatgatcatatgtaccttatatgattttgagcattaaatgaaatc

SEQ ID NO: 14113 - DNA, 120 bp, synthetic construct
  misc_feature 1..120: note = Artificially Synthesized Probe
  source 1..120: mol_type = other DNA
atttgtcaaatgaaggtgacaataacatgattatgctgttttggcaattcaataaaaaaacacatgtggtccaccaagcaaaccgcctgaccaccaggcactgctcagcttacattagtt

SEQ ID NO: 14114 - DNA, 120 bp, synthetic construct
  misc_feature 1..120: note = Artificially Synthesized Probe
  source 1..120: mol_type = other DNA
agttttcctactgctgtttttgcttcattgcaccataatctctctattcttgaaaatgctgtctgtatccagcttgacttccttgtctgtgtcttctctactcagaaacttattatttat

SEQ ID NO: 14115 - DNA, 120 bp, synthetic construct
  misc_feature 1..120: note = Artificially Synthesized Probe
  source 1..120: mol_type = other DNA
ctttcttcctttgatgttaactccttctcccaccatttttgtttttttcatgctttgcatctctcaacagctgagacttcctcttccatgtatagcagccaggccctttcttctctatct

SEQ ID NO: 14116 - DNA, 120 bp, synthetic construct
  misc_feature 1..120: note = Artificially Synthesized Probe
  source 1..120: mol_type = other DNA
ctggctcaagctgacatcgcatggccactgagttggttagacctgagtctaggagcctcggctgaagcagactcaggctcaaaccggggtgcccctgattctgcatccacatcccatggt

SEQ ID NO: 14117 - DNA, 120 bp, synthetic construct
  misc_feature 1..120: note = Artificially Synthesized Probe
  source 1..120: mol_type = other DNA
atgagccttgggaattacccaccaggctgccagcccaggggcaggtgtggtccctccttcccaggcagctggggagtggcaatcctggtttgttttcgtttgtgggtttttttttttttt

SEQ ID NO: 14118 - DNA, 120 bp, synthetic construct
  misc_feature 1..120: note = Artificially Synthesized Probe
  source 1..120: mol_type = other DNA
ccattctgtggagtcttagttatctcagactaagggaacagaaacttgagtctgaattgccaccaaaaaaagcaaatcttcatgaagtgcaaatcctcatgaagtgcaaagcctcatgaa

SEQ ID NO: 14119 - DNA, 120 bp, synthetic construct
  misc_feature 1..120: note = Artificially Synthesized Probe
  source 1..120: mol_type = other DNA
caaccttcctggagcctggcccaggcctgggcatggattgtgaaccctaaaaccttgggctcaggaaccacaggtcccagaaggcggacaccaggcccccctccatccctcccaacatgt

SEQ ID NO: 14120 - DNA, 120 bp, synthetic construct
  misc_feature 1..120: note = Artificially Synthesized Probe
  source 1..120: mol_type = other DNA
agcctgagagtccacagctgccacctgctcccagacaaggctcctggcatgtctgaccaggagcctctggggaagtagggaagcccagactggacagtggagaggaagagaccagcaggc

SEQ ID NO: 14121 - DNA, 120 bp, synthetic construct
  misc_feature 1..120: note = Artificially Synthesized Probe
  source 1..120: mol_type = other DNA
tggctgttcccatactttctttgtgaaacaagagctgtgaaaacgtgtggggcagagagaagtgacagagtcaggtctgagatccaggaagaaactggtagagacaaagctggcaagaga

SEQ ID NO: 14122 - DNA, 120 bp, synthetic construct
  misc_feature 1..120: note = Artificially Synthesized Probe
  source 1..120: mol_type = other DNA
accatctgagggtcatgttgtgctctttccagaatctctggtatatgtccaggtgtcacgctgtgatctgtgtggcaccatctgagtgtcacgttatgtgaatccatgtggtatcagctg

SEQ ID NO: 14123 - DNA, 120 bp, synthetic construct
  misc_feature 1..120: note = Artificially Synthesized Probe
  source 1..120: mol_type = other DNA
atctgcatggtgccgagggtcacattgtgtggatctgtgtggtgccgtctgagggtcatgttgtgctctttccataatcactggtatatgtccaggtgtcatgctgtgaagatcagcaac

SEQ ID NO: 14124 - DNA, 120 bp, synthetic construct
  misc_feature 1..120: note = Artificially Synthesized Probe
  source 1..120: mol_type = other DNA
atgtaaacaaatgtcagaaccaggaagtaagaggagggtctggggtcacatccaactctctgaaggacagaatcccagtcaccggggggtgtctggtctcagtaaccctcgctgtgtctg

SEQ ID NO: 14125 - DNA, 120 bp, synthetic construct
  misc_feature 1..120: note = Artificially Synthesized Probe
  source 1..120: mol_type = other DNA
ctcatttgctgacgagctcactgactacaagacaaagaatatgctggccacacccatcatgaatggcaaagacgtcgtggcggtgatcatggcagtgaacaagctcaacggcccattctt

SEQ ID NO: 14126 - DNA, 120 bp, synthetic construct
  misc_feature 1..120: note = Artificially Synthesized Probe
  source 1..120: mol_type = other DNA
tctgaaaactggaattttaattcctcttgttgcaattcctgtttcaggtgttcttgaagtacctgaattttgccacgttgtacctgaagatctatcacctgagctacctccacaactgcg

SEQ ID NO: 14127 - DNA, 120 bp, synthetic construct
  misc_feature 1..120: note = Artificially Synthesized Probe
  source 1..120: mol_type = other DNA
ctctcacggccagggccgtgggaaccagggaccagggagagcatctgtgtaatgtatctggaattcttttgcgtgagagatttgtctcttctcctcatttactaatttattcaatcattt

SEQ ID NO: 14128 - DNA, 120 bp, synthetic construct
  misc_feature 1..120: note = Artificially Synthesized Probe
  source 1..120: mol_type = other DNA
tcaccagcgtttggtggaactgtagtctgatgggtgtatggtagcatctcattattgctgtaatttacaatcccctaatgacagatgatgtcgcacgtctattcatttacatatttgcca

SEQ ID NO: 14129 - DNA, 120 bp, synthetic construct
  misc_feature 1..120: note = Artificially Synthesized Probe
  source 1..120: mol_type = other DNA
aaccagagtttttaaatatattttcaacacaagtcctttatcagatatgtttgctttgagagcttcttgctaaattggggtcccattgagggccccaatgagggtcccagtaatgagggg

SEQ ID NO: 14130 - DNA, 120 bp, synthetic construct
  misc_feature 1..120: note = Artificially Synthesized Probe
  source 1..120: mol_type = other DNA
gaatagagagcaggtcccttaagttcatgggcaaatgtctgaacagccttttctaaaggaaagggggagaagtggggagcccaggcttctgggcaggagagatgcctctaagttcttatg

SEQ ID NO: 14131 - DNA, 120 bp, synthetic construct
  misc_feature 1..120: note = Artificially Synthesized Probe
  source 1..120: mol_type = other DNA
gaaaggtgtgtaaggactgcatctagattaattttttgtgttgttgttggcatgtggaagtccagttgatccagcaccatatgtagaaaaagcctaccttttctccgtcgtattgctttt

SEQ ID NO: 14132 - DNA, 120 bp, synthetic construct
  misc_feature 1..120: note = Artificially Synthesized Probe
  source 1..120: mol_type = other DNA
cagctcactgcaacctccacctcccgggttcaagcgactctcctgcctcagcctcccaagtagctgagactactgatgtgcatcaccatgcccacctaatttttgtatttttagtagaga

SEQ ID NO: 14133 - DNA, 120 bp, synthetic construct
  misc_feature 1..120: note = Artificially Synthesized Probe
  source 1..120: mol_type = other DNA
aaaaaaaaaaaaaagaatgcccttagctctagggtttttgttgaatttttaaaatccacttgaggaagttctctctatttctagtttgctaagtgtttttattcagaatgagtgttggat

SEQ ID NO: 14134 - DNA, 120 bp, synthetic construct
  misc_feature 1..120: note = Artificially Synthesized Probe
  source 1..120: mol_type = other DNA
ctgcttctattttttggaagggattgtagtgaattgacataacatctttcctaaatgtttggtcagattcaccagtgaaactattagggactggtgctttctttttggatgattattaat

SEQ ID NO: 14135 - DNA, 120 bp, synthetic construct
  misc_feature 1..120: note = Artificially Synthesized Probe
  source 1..120: mol_type = other DNA
gtactaagtctccaacagtagtggaggatgcgtctctccttacagctccatcagcttttgcttcatgtgtttcgaagctttgttattagatgtgtgaacatgaatgatttttatgtcttc

SEQ ID NO: 14136 - DNA, 120 bp, synthetic construct
  misc_feature 1..120: note = Artificially Synthesized Probe
  source 1..120: mol_type = other DNA
tccccagaatttgcaataatcatttatgactactctaagccctcttccaaatagcattatactgcttcacttagagtgtggctatcttaccacaatgtacctacaacttctcacttccac

SEQ ID NO: 14137 - DNA, 120 bp, synthetic construct
  misc_feature 1..120: note = Artificially Synthesized Probe
  source 1..120: mol_type = other DNA
taggatcagttttttggcatttgtcttttttgacagtcactgagcatcctagacgcgcggtttggtgtctgtcaatacttttggaaaatctcagccattattacttccaacatgtcttct

SEQ ID NO: 14138 - DNA, 120 bp, synthetic construct
  misc_feature 1..120: note = Artificially Synthesized Probe
  source 1..120: mol_type = other DNA
tgggatttggggtccatctggccgggagctgggctgtattgaatgaacatttgctgcagctgagggtgacagcagcttccgcgcccttgtttatggtttgtttttgcttctgtattagct

SEQ ID NO: 14139 - DNA, 120 bp, synthetic construct
  misc_feature 1..120: note = Artificially Synthesized Probe
  source 1..120: mol_type = other DNA
cctaggaaaagctgtttctgggtcttgccctccgaacggcatttttaggcatcctgacttgcaggaggcacaggcctgcctcacggctctttttgaaaataaaagtttgtgatgagcaaa

SEQ ID NO: 14140 - DNA, 120 bp, synthetic construct
  misc_feature 1..120: note = Artificially Synthesized Probe
  source 1..120: mol_type = other DNA
acataatggccatgattgaattgtcataatggctatgtttaatggctggctctcagaatgcctgaggattcaacaaccagctctgagaagctcaccatgagatgaagccctctgccctga

SEQ ID NO: 14141 - DNA, 120 bp, synthetic construct
  misc_feature 1..120: note = Artificially Synthesized Probe
  source 1..120: mol_type = other DNA
gtaggtcccacccagcactggatgtttggcttaacaagttcccaacattttaaagtcgagacaattcacgtaagaattagggtttctacatctcttgaaaggctgagagctcaacactgc

SEQ ID NO: 14142 - DNA, 120 bp, synthetic construct
  misc_feature 1..120: note = Artificially Synthesized Probe
  source 1..120: mol_type = other DNA
tgttttcccaagtcctgttctggacccactaactccagtgactgagctgacttcttcacacgggcatggggccaaagctcctgaccagtgcagggacacggggggtgggacatactcaga

SEQ ID NO: 14143 - DNA, 120 bp, synthetic construct
  misc_feature 1..120: note = Artificially Synthesized Probe
  source 1..120: mol_type = other DNA
ttttaaattaaaaataagaataagaatgtaaaacaatacagtagaacagccgttttcatggccttgccttgcactgggtgctaagtcatcggagatgatttgaagtcctgggggtgcgtg

SEQ ID NO: 14144 - DNA, 120 bp, synthetic construct
  misc_feature 1..120: note = Artificially Synthesized Probe
  source 1..120: mol_type = other DNA
ttctcaaagccctgctcgccgcaggtggttctggagcagccgggcggaggaagggctggtcggatgtttgcctgtcaagctcaaagcgacagattccactttccactcgtccactcctga

SEQ ID NO: 14145 - DNA, 120 bp, synthetic construct
  misc_feature 1..120: note = Artificially Synthesized Probe
  source 1..120: mol_type = other DNA
gaccagtgtcttctgcttctcaggaaattgtcttctacaaagtgatcgactacgtcctccacggcaaggaggagatcaaggtcattccgtaagtgcaggattttaccagaagcgtccccg

SEQ ID NO: 14146 - DNA, 120 bp, synthetic construct
  misc_feature 1..120: note = Artificially Synthesized Probe
  source 1..120: mol_type = other DNA
tcagggtggcagggcaggcaccaacgctgagtcctagaaagcaggctgaagccatacggcctccggagagggaggggttcccaagagggaggggccccagcacggcagcctggggaggag

SEQ ID NO: 14147 - DNA, 120 bp, synthetic construct
  misc_feature 1..120: note = Artificially Synthesized Probe
  source 1..120: mol_type = other DNA
acagaccttccgctgttttggatgaaatcgtttttctgatgctttttcagatttgtaacatcatgaatgcttccgctgacgaaatgttcaaatttcaggtatctgtctgtgccttggtag

SEQ ID NO: 14148 - DNA, 120 bp, synthetic construct
  misc_feature 1..120: note = Artificially Synthesized Probe
  source 1..120: mol_type = other DNA
agtgatgaacaccgacacctacgacaagatgaacaagctggagaaccgcaaggacatcgcacaggacatggtcctttaccacgtgaagtgcgacagggacgagatccagctcatcctggt

SEQ ID NO: 14149 - DNA, 120 bp, synthetic construct
  misc_feature 1..120: note = Artificially Synthesized Probe
  source 1..120: mol_type = other DNA
agccctcctggtcatcatgagagagtcccatcattatacctgaggactgcgtaaggcagtgcccgagagaggacaggtgggaaagtcagcaggccatgcacacggtcatttgtctccaga

SEQ ID NO: 14150 - DNA, 120 bp, synthetic construct
  misc_feature 1..120: note = Artificially Synthesized Probe
  source 1..120: mol_type = other DNA
gtgtgtgtatacttgtgtatctaagcaccttagtgtacgtgtgtgtacataagcctggctttcagtctcagccagtgtgtccctgagtgtgtttgcatggccagaatgtggctttgatgt

SEQ ID NO: 14151 - DNA, 120 bp, synthetic construct
  misc_feature 1..120: note = Artificially Synthesized Probe
  source 1..120: mol_type = other DNA
tgtatccgtgtgtgtgtgtgtttcttttcatgtgcacacctttgtgttttcttgtctcaacaacatcaccctgtccacccaactgggcaagttcttcactgttgggccacagggtacaag

SEQ ID NO: 14152 - DNA, 120 bp, synthetic construct
  misc_feature 1..120: note = Artificially Synthesized Probe
  source 1..120: mol_type = other DNA
acagccctaggaagagaatcctcttttctcatgcccctctgagaacaggtgcagcaggccagcattttcaaaagaagttttactaaatactaagggaaaacactcaagaaaaaatgtata

SEQ ID NO: 14153 - DNA, 120 bp, synthetic construct
  misc_feature 1..120: note = Artificially Synthesized Probe
  source 1..120: mol_type = other DNA
ccaacaacctgtaccagatgaagtaggcacctcagggcgggcatgtgaattagccctaaatcaactccacgcccttggcgtgaattaggcttcgcatagcaggctatgtagaaagtggag

SEQ ID NO: 14154 - DNA, 120 bp, synthetic construct
  misc_feature 1..120: note = Artificially Synthesized Probe
  source 1..120: mol_type = other DNA
ctgtgtaacaggtcccagaaccccttggctaagctccacggctcctcgattttggagcggcaccacctggagtttgggaagttcctgctctcggaggaggttggtatactcaccctcggt

SEQ ID NO: 14155 - DNA, 120 bp, synthetic construct
  misc_feature 1..120: note = Artificially Synthesized Probe
  source 1..120: mol_type = other DNA
tggcagtaacttacttcattttgaccttccactttttcacctgtaaaatggtgattcacaaccagcccctccccaggctggtcccagggacccagtgagaaaatacacataaacccagca

SEQ ID NO: 14156 - DNA, 120 bp, synthetic construct
  misc_feature 1..120: note = Artificially Synthesized Probe
  source 1..120: mol_type = other DNA
gctgagttctgggagcaaggtgacttggaaaggacagtcttggatcagcagcccattgtgagtgctgcttctggaaccttccactcctgaaacgggtgttagagacccctcttggtcctc

SEQ ID NO: 14157 - DNA, 120 bp, synthetic construct
  misc_feature 1..120: note = Artificially Synthesized Probe
  source 1..120: mol_type = other DNA
caagagggggctgccctcaggggaccacgggctggagccaacagcagctgtgggaagaagctgcccacagttcctaggagctgtggagccgctggccaagggagagggtgtcagcttccc

SEQ ID NO: 14158 - DNA, 120 bp, synthetic construct
  misc_feature 1..120: note = Artificially Synthesized Probe
  source 1..120: mol_type = other DNA
ggatgccacgggttccacatgaagttgtcccggagtgggctgtgcccactccccgccccatcctacccaccccgggtcgtcagtgctggggagaaggtgggacaagggtggatatttggg

SEQ ID NO: 14159 - DNA, 120 bp, synthetic construct
  misc_feature 1..120: note = Artificially Synthesized Probe
  source 1..120: mol_type = other DNA
acctcggtagcaaacccggactgaaaaatttcctctgttcctagccagtgaaccccatttttcaagaaagaagtaaccatatcttatgtcctttataaaggacttagttgcaacaagtca

SEQ ID NO: 14160 - DNA, 120 bp, synthetic construct
  misc_feature 1..120: note = Artificially Synthesized Probe
  source 1..120: mol_type = other DNA
gctaccccatgctattcccctaccctatgctgctcccactaccccatgctattcccactactccatgctgctgccactaccccatgctagtcccactaccccatgctattcccgctaccc

SEQ ID NO: 14161 - DNA, 120 bp, synthetic construct
  misc_feature 1..120: note = Artificially Synthesized Probe
  source 1..120: mol_type = other DNA
gctccctcaatcttcacccactaggatttgggttctgcctgtggctatttgctacaagaggttaggaagcccaagaaaatgactgaagatcattctggatattttaattttttttttttt

SEQ ID NO: 14162 - DNA, 120 bp, synthetic construct
  misc_feature 1..120: note = Artificially Synthesized Probe
  source 1..120: mol_type = other DNA
gatgccatcttgggaagaggaggaggtggtgaaccattgagcctaagaaacagcagtgatggactttgaaccttcaatttgactgaatattgatctgaaagagatatttaaattgaaaga

SEQ ID NO: 14163 - DNA, 120 bp, synthetic construct
  misc_feature 1..120: note = Artificially Synthesized Probe
  source 1..120: mol_type = other DNA
atttgcctcccattccttttcctcaataaacaataggataaaggtctaaagccttgactttagatttggagttgacaatctgcacaatccttctgcccaaagccatgaatgtcttctcgt

SEQ ID NO: 14164 - DNA, 120 bp, synthetic construct
  misc_feature 1..120: note = Artificially Synthesized Probe
  source 1..120: mol_type = other DNA
acaaaacaaaacaaaaaaccagatcaaacagcagagatggaattcctttggggtgggtggattggcttctactgtgaacagtttattccaacttaggcacaatgattgcttctggtaacg

SEQ ID NO: 14165 - DNA, 120 bp, synthetic construct
  misc_feature 1..120: note = Artificially Synthesized Probe
  source 1..120: mol_type = other DNA
cctgttgcctgtatttgtttccctgtgtttatacagaggaggatactatgtatactaaatgtatacacagttcatgtatgcatttactaaacactatacgttaacaggggtgggggagtt

SEQ ID NO: 14166 - DNA, 120 bp, synthetic construct
  misc_feature 1..120: note = Artificially Synthesized Probe
  source 1..120: mol_type = other DNA
atttaccattttcaccatggttaggggtgcaattcaatgacattaggtacatccaaaatgttgtgcaagcactgccaatatccacctccagaactatttcttcacctcacagaacctctg

SEQ ID NO: 14167 - DNA, 120 bp, synthetic construct
  misc_feature 1..120: note = Artificially Synthesized Probe
  source 1..120: mol_type = other DNA
tgctaagtagggcaaataataggctcacctccccaagttcctgtgaggattacatgatactgtatgcaaaatactttgcacagaacatggaacacagtaagggtttttagagcattgttt

SEQ ID NO: 14168 - DNA, 120 bp, synthetic construct
  misc_feature 1..120: note = Artificially Synthesized Probe
  source 1..120: mol_type = other DNA
taatgtgaattcaaatggctgccttggaaatgtcattgaacaacaaatcggggagtcacacccacactcctccacttggcaaaatactttggaaggaaactaaaagataattgtcaggaa

SEQ ID NO: 14169 - DNA, 120 bp, synthetic construct
  misc_feature 1..120: note = Artificially Synthesized Probe
  source 1..120: mol_type = other DNA
ctttccattaagacaatgttaaaagacaccagtaaagctgacattgcccacgtgtttagttaatatgcccatggttcaaagagactcatattacctcatcaaaggtgtttcccctagggc

SEQ ID NO: 14170 - DNA, 120 bp, synthetic construct
  misc_feature 1..120: note = Artificially Synthesized Probe
  source 1..120: mol_type = other DNA
aatttcagaagcacgcatctattcccaggcatatttcccttttccttttaaagatacatttcagggacttattaaaacatcaaaggccagtcatgcacatcgaagaactagggagattgt

SEQ ID NO: 14171 - DNA, 120 bp, synthetic construct
  misc_feature 1..120: note = Artificially Synthesized Probe
  source 1..120: mol_type = other DNA
agtttagtcaggatcatgtggatttaacctgagtgtaatgaagcttatgaaatcagtttagggatttgaaacacagagttaaatcctgggagacttcggcctcccagtaatgaacctact

SEQ ID NO: 14172 - DNA, 120 bp, synthetic construct
  misc_feature 1..120: note = Artificially Synthesized Probe
  source 1..120: mol_type = other DNA
atacgtcatttgacagattgctaatttctctggggtgtgtacagacattttggggcatacttccggaagcaacttgtccaaaaaccactcataggattgcattttatcatttggatctaa

SEQ ID NO: 14173 - DNA, 120 bp, synthetic construct
  misc_feature 1..120: note = Artificially Synthesized Probe
  source 1..120: mol_type = other DNA
aacaaatctagttgtaggctggtatgcagccactcacaattccaccttgatgaagaatagtttggtgggaacaaaaaattcagaagttatagcaaatagtgaggagggacaggaagagaa

SEQ ID NO: 14174 - DNA, 120 bp, synthetic construct
  misc_feature 1..120: note = Artificially Synthesized Probe
  source 1..120: mol_type = other DNA
attcctttatccagtgagcatttattgggcatttattttgtctgtttgtagatggtcgcttattgagcatttattctgtctcatttctaggtgctgggggtataatgttgagccagtcag

SEQ ID NO: 14175 - DNA, 120 bp, synthetic construct
  misc_feature 1..120: note = Artificially Synthesized Probe
  source 1..120: mol_type = other DNA
gggtgttcgctataaatacacgtggtgattgcatacaatttcacagctctgtcatcttgtcaatatttactcttggaaatgcaagttatttggcttctgttctctgccaagtgagtttgt

SEQ ID NO: 14176 - DNA, 120 bp, synthetic construct
  misc_feature 1..120: note = Artificially Synthesized Probe
  source 1..120: mol_type = other DNA
gcatcactactgttaataaaggcatctttacccacgacgagattgacggaaagattagaggaggagttagccataaacttttccatggttttctctgagctttacatgtgctatattcac

SEQ ID NO: 14177 - DNA, 120 bp, synthetic construct
  misc_feature 1..120: note = Artificially Synthesized Probe
  source 1..120: mol_type = other DNA
gccaccgcgcccagtcccaaatctttctatttggcagaattagtaagataaatctttctaacagtattttcccttacacattcacatcaacttcatttactttcgtgaatgtggcaccag

SEQ ID NO: 14178 - DNA, 120 bp, synthetic construct
  misc_feature 1..120: note = Artificially Synthesized Probe
  source 1..120: mol_type = other DNA
gggtaaagaacagcatttctctcaccaaccttggacagcatatgttaacagcctcctgaacccaaaaagaaggtctgagttgaattccatttagtctatgattttgtagtgtgattgagt

SEQ ID NO: 14179 - DNA, 120 bp, synthetic construct
  misc_feature 1..120: note = Artificially Synthesized Probe
  source 1..120: mol_type = other DNA
aggtttaccaagaaatttaagtggggcactgaggggcaacattctatccaaggcttacatcattgttgatggtcaaatgtaatcaaaagacaaaaccaattagaagtccgctgttccact

SEQ ID NO: 14180 - DNA, 120 bp, synthetic construct
  misc_feature 1..120: note = Artificially Synthesized Probe
  source 1..120: mol_type = other DNA
agattgtgttcaggattgcatggaaggcatttattcaggtgctgggagttgatctaaacaacaactaacgtgccctttaagcctaagattcaagtctaaactcagagaaacaaaacttag

SEQ ID NO: 14181 - DNA, 120 bp, synthetic construct
  misc_feature 1..120: note = Artificially Synthesized Probe
  source 1..120: mol_type = other DNA
ccctataaccatagcttagcttttctctcgtctcagtccacaagtgaaactcactgtttgacttttatcagcacgttttgttctggtttacgctaaaggatttttggatagcaggagata

SEQ ID NO: 14182 - DNA, 120 bp, synthetic construct
  misc_feature 1..120: note = Artificially Synthesized Probe
  source 1..120: mol_type = other DNA
aagaggctgagtggtcaataagtgcatgtctattgactttaattcttaaaagcaccatatagtctctttttctcatgtgtcacctccaggtgataaattgatgacggtgggaggaagcag

SEQ ID NO: 14183 - DNA, 120 bp, synthetic construct
  misc_feature 1..120: note = Artificially Synthesized Probe
  source 1..120: mol_type = other DNA
aaggttcctgccttcatgaacatattctctgtcctgctcactccttttggggcttattttctcctacttttgcttttagtggattttagattcagactctaccttccctttagtcaaaac

SEQ ID NO: 14184 - DNA, 120 bp, synthetic construct
  misc_feature 1..120: note = Artificially Synthesized Probe
  source 1..120: mol_type = other DNA
acagaatcccagaaatgagaattaaagaagaatgtagaatgagatctgggtgaagacctcgaaggactgaaattcacagtaaccgtagattggagacacctgtttcaaatggtagacctt

SEQ ID NO: 14185 - DNA, 120 bp, synthetic construct
  misc_feature 1..120: note = Artificially Synthesized Probe
  source 1..120: mol_type = other DNA
ttatgcatagagagtgaaagaatctatttcaccccaaggaaacggcagattggtggattgattgatccttctgtaccacagcacggaaaactgtgagtacaatcataacaggataaacac

SEQ ID NO: 14186 - DNA, 120 bp, synthetic construct
  misc_feature 1..120: note = Artificially Synthesized Probe
  source 1..120: mol_type = other DNA
gaggatgaagttatttatagttctggttcaggttctcctgcaaaacagatcagatttaagcaccattagttaagaagcacctgtcaattttgagacacagctggtgagctgctgctttaa

SEQ ID NO: 14187 - DNA, 120 bp, synthetic construct
  misc_feature 1..120: note = Artificially Synthesized Probe
  source 1..120: mol_type = other DNA
caagaagaggccagataatacacaaaattataacttctcttgaacccttcagagagctaaagtcacagggcaataaacttgaaatctaaggaaagacaggtgccttcaagcaaaggcaag

SEQ ID NO: 14188 - DNA, 120 bp, synthetic construct
  misc_feature 1..120: note = Artificially Synthesized Probe
  source 1..120: mol_type = other DNA
aacctttaggtctaggttcaaatgctgcactctcagaaagacttcgccaaacatctgaagtagcttctctagtcctcccctcatcatttttcaccattacatcctatttccttaatgaaa

SEQ ID NO: 14189 - DNA, 120 bp, synthetic construct
  misc_feature 1..120: note = Artificially Synthesized Probe
  source 1..120: mol_type = other DNA
agagttaagttatgtaatactcaattctgatttggaaaagtctaacttttcttttagctctggttaggatgagtgtaaggtgggatgagtgggggtttgtttctgcatgtgtccacacta

SEQ ID NO: 14190 - DNA, 120 bp, synthetic construct
  misc_feature 1..120: note = Artificially Synthesized Probe
  source 1..120: mol_type = other DNA
tttaggttcattagggtctcaaatatcaaaagtaccagagagatcattgaacacggtactgcagtgaatcacttagcaccatgttttcaaacttgtgtgattataagaatcacctggggc

SEQ ID NO: 14191 - DNA, 120 bp, synthetic construct
  misc_feature 1..120: note = Artificially Synthesized Probe
  source 1..120: mol_type = other DNA
acctcctagctctttgaccatacttttcttgtggaattctggataggttgtgtgatggcagttcatatacatgttcctttttttctgctgatatattatcttctcaggggttagaagccc

SEQ ID NO: 14192 - DNA, 120 bp, synthetic construct
  misc_feature 1..120: note = Artificially Synthesized Probe
  source 1..120: mol_type = other DNA
gtcccctgtggatgagaggggattactatattccatattgaaatcttgtcaaagcaaacgatttgcaacttgtctgtgagagtagatctagcttctggatggtccaaaaacttagactct

SEQ ID NO: 14193 - DNA, 120 bp, synthetic construct
  misc_feature 1..120: note = Artificially Synthesized Probe
  source 1..120: mol_type = other DNA
gcggggagtgaagggtatagcttgtaggaggacaaaagctgatttaatggggactcgattaaacacatctcgtttatgggactttttgtggctttaagtgtagatattggtatttcaatt

SEQ ID NO: 14194 - DNA, 120 bp, synthetic construct
  misc_feature 1..120: note = Artificially Synthesized Probe
  source 1..120: mol_type = other DNA
tagaaaaaatggaaagtggcagatgttgaagacagcatcaataaggccagtgatgaacaggatggcacaaaacaactctttagaaatattggaacaggtgtccattttcacatgtggcct

SEQ ID NO: 14195 - DNA, 120 bp, synthetic construct
  misc_feature 1..120: note = Artificially Synthesized Probe
  source 1..120: mol_type = other DNA
tctataataggaattgcttggcccaggtcactgaagcattttctgcttactttacttaggaacgtttttgggggtatgttgaacagttttcatgtttcatataaaaacacgtcagatgtg

SEQ ID NO: 14196 - DNA, 120 bp, synthetic construct
  misc_feature 1..120: note = Artificially Synthesized Probe
  source 1..120: mol_type = other DNA
taaactaaactgtctgccacgttttctttgtagctagagttagaagttggtaattcctaagccaagttctcagctttggaaaacgtgctcaaaatgcctggaaactgaggagtgagcatt

SEQ ID NO: 14197 - DNA, 120 bp, synthetic construct
  misc_feature 1..120: note = Artificially Synthesized Probe
  source 1..120: mol_type = other DNA
ggccgaatgtgcaggatcaccgaggggaaagtgagcttgacaggtaggagggattttaggggaaggaccaaaacaaaccacttgttgggtgaaatgttttgctaaaagtgtcgctggtgt

SEQ ID NO: 14198 - DNA, 120 bp, synthetic construct
  misc_feature 1..120: note = Artificially Synthesized Probe
  source 1..120: mol_type = other DNA
gaaaaaggcagagtgacgctgaattttgtaactacgtcaggaggctcttgaactttctgcagctcactcgtggactttgtagagatgcgtgttaaggaagaaggttcagctgagaaaaat

SEQ ID NO: 14199 - DNA, 120 bp, synthetic construct
  misc_feature 1..120: note = Artificially Synthesized Probe
  source 1..120: mol_type = other DNA
gtatgtgagaacatgccgtgtttcctgtctgtaatggtagaggcagccctgatcctggattttcacctgaggatggatagatcttcagggttcaagtgggtttgcatctggactttaggg

SEQ ID NO: 14200 - DNA, 120 bp, synthetic construct
  misc_feature 1..120: note = Artificially Synthesized Probe
  source 1..120: mol_type = other DNA
ggaggaagtgctgctgtggaaactgcaagttttggacatgagttgctcaggtcttttcagccgtgcattcttctacagcagaattgcattattcacttgctcagtgtgataccatgtcct

SEQ ID NO: 14201 - DNA, 120 bp, synthetic construct
  misc_feature 1..120: note = Artificially Synthesized Probe
  source 1..120: mol_type = other DNA
gtttctgtttaaagagttggattatacagggacccacagaattgggaactgacagtactgtagagcctgtgtatgaaaaagatggacaagcctgacattagcagctcactgttgagcaca

SEQ ID NO: 14202 - DNA, 120 bp, synthetic construct
  misc_feature 1..120: note = Artificially Synthesized Probe
  source 1..120: mol_type = other DNA
tctcagcagttcttgtcttcttcaggcttttcctccttgcctagagaaatttccctacatggaaacccctgtggctgtacagtcttttctgaccagtctgctgggttttttgttatttgt

SEQ ID NO: 14203 - DNA, 120 bp, synthetic construct
  misc_feature 1..120: note = Artificially Synthesized Probe
  source 1..120: mol_type = other DNA
gtggagaaacagtggtgaataaggtaggtctggctctgtctcctggaacttactggactgaggatgaacctttctccactaatttttgttctgaaaaatttcaaaaccgaagaatagttg

SEQ ID NO: 14204 - DNA, 120 bp, synthetic construct
  misc_feature 1..120: note = Artificially Synthesized Probe
  source 1..120: mol_type = other DNA
tctttctctctcttttttttttttagagacagagttttgctctgttgcccaaactagaatgcagtggcatgatcatagctcactgcagccttgaactcccttgggctcaagccatcctcc

SEQ ID NO: 14205 - DNA, 120 bp, synthetic construct
  misc_feature 1..120: note = Artificially Synthesized Probe
  source 1..120: mol_type = other DNA
cacaatctggatttgtctcattgtttccttgttagattaggttcaggctaagtatttatggcaagaatactgcttaggagatgatgagctaaaggtaactttttttttcaagatggagtc

SEQ ID NO: 14206 - DNA, 120 bp, synthetic construct
  misc_feature 1..120: note = Artificially Synthesized Probe
  source 1..120: mol_type = other DNA
cttttccatgggtaactcacatgttcttcctgcaggctggcatttgtctttcatggcttttttccatcggtcagaattacagtcttttgattgtatgtacgtacctggttattatcagat

SEQ ID NO: 14207 - DNA, 120 bp, synthetic construct
  misc_feature 1..120: note = Artificially Synthesized Probe
  source 1..120: mol_type = other DNA
attatttcccttcagtagccctacattttaaaagttaacgttcagcgttgagtcagggtcaggttttgaatgacacaggatgttttcagatcctgagtttacctgaagctctcaaagtag

SEQ ID NO: 14208 - DNA, 120 bp, synthetic construct
  misc_feature 1..120: note = Artificially Synthesized Probe
  source 1..120: mol_type = other DNA
attagttttactttaccaaaaggaagcacataggcctgctctgctctctgctacttgggggttttgtgtcatagattgtaggacactggtggtaatttaatttcagaagggaccttcttg

SEQ ID NO: 14209 - DNA, 120 bp, synthetic construct
  misc_feature 1..120: note = Artificially Synthesized Probe
  source 1..120: mol_type = other DNA
acagcatttaaagttatacctataaggggcacacagaagatatatggagagtttaaagaatgaaaataaactcacacgtgcccaccaccctacttgaaaaacaggattttaccagaaggc

SEQ ID NO: 14210 - DNA, 120 bp, synthetic construct
  misc_feature 1..120: note = Artificially Synthesized Probe
  source 1..120: mol_type = other DNA
ccatttaaaggtagcttagctttctgttcgggatcctttctcttgctggctgaagtgttcatctgcgtgacagcatcttgaccataggaggcgccctgatttccatcttttttttttttt

SEQ ID NO: 14211 - DNA, 120 bp, synthetic construct
  misc_feature 1..120: note = Artificially Synthesized Probe
  source 1..120: mol_type = other DNA
ttatgaaacaaaattctcagaaaatgcccagtttacccatgggctacatttttacaagttccaatttgtttaaaactcagggtttgttttcctatcagaggtgtggttgggggctcgggc

SEQ ID NO: 14212 - DNA, 120 bp, synthetic construct
  misc_feature 1..120: note = Artificially Synthesized Probe
  source 1..120: mol_type = other DNA
cccagtgatcaggtcataaccagggagtggggggcttgcatggtgaccccacacctgtgaggtgggcactggtgtttttggtggacttctcttgtgaggagcttttttttttaaaaaaaa

SEQ ID NO: 14213 - DNA, 120 bp, synthetic construct
  misc_feature 1..120: note = Artificially Synthesized Probe
  source 1..120: mol_type = other DNA
tcgggatgctgttaatgcagttgaatcaccacctcaaaatgctacaaaatctaccctttacaacaatagtagtacaaataaacgtttagacacttcacgctcaaagagggcttttgctcg

SEQ ID NO: 14214 - DNA, 120 bp, synthetic construct
  misc_feature 1..120: note = Artificially Synthesized Probe
  source 1..120: mol_type = other DNA
atccagaggcctttctacacttcagttggatgttgatttcaaaatgaccgatgtttctttctgactcatgaaggctgctgtctttggaatctgacattagagggaagcgaaactttacaa

SEQ ID NO: 14215 - DNA, 120 bp, synthetic construct
  misc_feature 1..120: note = Artificially Synthesized Probe
  source 1..120: mol_type = other DNA
acatcagctttctatgggcagggaccgtgtcctcttattggctgagtaattgggtccatagcgtaggtaagtcacctcctttaagagactttgataagcaaaatagtgaatatattcttt

SEQ ID NO: 14216 - DNA, 120 bp, synthetic construct
  misc_feature 1..120: note = Artificially Synthesized Probe
  source 1..120: mol_type = other DNA
tacattgttaactgggtttctgccctccctcctctccttcgtatttctgtgtctcattgacaactgttctgtagtcgctttgttgacagttgccaaactgctttccaaaaacatttccac

SEQ ID NO: 14217 - DNA, 120 bp, synthetic construct
  misc_feature 1..120: note = Artificially Synthesized Probe
  source 1..120: mol_type = other DNA
tttgtagatgagaacgttagacacatctcttgatggtctgcggaggttttttctgatgtagttaatttcattttaacctggcatcagcaagttacattctgtgtccttgtgtctcactgg

SEQ ID NO: 14218 - DNA, 120 bp, synthetic construct
  misc_feature 1..120: note = Artificially Synthesized Probe
  source 1..120: mol_type = other DNA
ataaaaggattatgccctcatgaaaaatgccttcaaccatgagactagtccccaaagttttggggactcagatcctttcagaaagaagaaactctttggaaaaccttgggcattctgcat

SEQ ID NO: 14219 - DNA, 120 bp, synthetic construct
  misc_feature 1..120: note = Artificially Synthesized Probe
  source 1..120: mol_type = other DNA
aacctgcttgtgaagtgttgagtttagacaacggaaagatcacatcagtatccccttagaaagggttccactaaatatcggtgctcgttcacaattctttcttcctcttttctacttatg

SEQ ID NO: 14220 - DNA, 120 bp, synthetic construct
  misc_feature 1..120: note = Artificially Synthesized Probe
  source 1..120: mol_type = other DNA
ttacagccaggctctcttcatggtgcccacaagcaacatcatacaaaatgtatgataacagttatttccaaaaacgaaacttcagggcagcctttgcaatgaatgtatactagaaggaca

SEQ ID NO: 14221 - DNA, 120 bp, synthetic construct
  misc_feature 1..120: note = Artificially Synthesized Probe
  source 1..120: mol_type = other DNA
catatcataaaagagaacaaggtcccctatgtaaccagagagcgggatgtcatgtcgcgcctggatcaccccttctttgttaagctttacttcacatttcaggacgacgagaagctgtgt

SEQ ID NO: 14222 - DNA, 120 bp, synthetic construct
  misc_feature 1..120: note = Artificially Synthesized Probe
  source 1..120: mol_type = other DNA
tggatctgccctgtgccagttgttgatggtgggtaggcagtttcttggggggactgttcaaggaagagtaagaggtgaggaaatggaaacgacgcaaggtgcttccctgggattttgcct

SEQ ID NO: 14223 - DNA, 120 bp, synthetic construct
  misc_feature 1..120: note = Artificially Synthesized Probe
  source 1..120: mol_type = other DNA
tgccagtaagtgtgaagtatctggaggtttccggtaatggggatggacgtttgccgcttgcaggggaatctgtatctgggatccatttattgtcggtcttaagtcctcttggaaaaggag

SEQ ID NO: 14224 - DNA, 120 bp, synthetic construct
  misc_feature 1..120: note = Artificially Synthesized Probe
  source 1..120: mol_type = other DNA
ctgggatgcccggcagatccagtgacatgactgtcttgggccacaggtactttcagtttgcactgaattaaaaattcttatcagacttttaaggttagttttccaaaaatgacttttaca

SEQ ID NO: 14225 - DNA, 120 bp, synthetic construct
  misc_feature 1..120: note = Artificially Synthesized Probe
  source 1..120: mol_type = other DNA
gtcagctcagaagtgtgcatagctttcattttgtgcgttaaaaatgatagattttacttcgttaaaaaacgacttagaatgacatggagatgtgaggtggtgaatccctactgtgtccag

SEQ ID NO: 14226 - DNA, 120 bp, synthetic construct
  misc_feature 1..120: note = Artificially Synthesized Probe
  source 1..120: mol_type = other DNA
caggtgcttattgggtagaaatcacaaactctggaggtgtaaagaaaggcagctgaaattctgaagagtgctcccgagtgctgggtagagagaagataaagccttgggatgaggtttggg

SEQ ID NO: 14227 - DNA, 120 bp, synthetic construct
  misc_feature 1..120: note = Artificially Synthesized Probe
  source 1..120: mol_type = other DNA
gtgttttcacactcagggctctggctgagattctgtcagttggtgctttcatctctgcacagtcatggaggccctaagaccttgtcttggatctgggaacttctctcagaatcctcaaac

SEQ ID NO: 14228 - DNA, 120 bp, synthetic construct
  misc_feature 1..120: note = Artificially Synthesized Probe
  source 1..120: mol_type = other DNA
aggtttgtgacgtgggtagagtttctttggaatctggtatttggcacagggatagtcttgttgccctgtagccacttaaaaaaaacgggcatttaagtgcgctgatgaaatagtgaaata

SEQ ID NO: 14229 - DNA, 120 bp, synthetic construct
  misc_feature 1..120: note = Artificially Synthesized Probe
  source 1..120: mol_type = other DNA
tttgaggtagttcagtatcttggaatttattcctgcgttgacttcttttgtgcagagatggcttccccaaaacaccttcaaatctagaataaaagtgttgatgggagcaaggcatagcga

SEQ ID NO: 14230 - DNA, 120 bp, synthetic construct
  misc_feature 1..120: note = Artificially Synthesized Probe
  source 1..120: mol_type = other DNA
cctatccaaacacatgtattttaatctgtagcttcccccatttttattttttcccttgcagtttgttgaagaaacaagtcatttgcatctgtgtggcgttgttgaacatggtcctctctc

SEQ ID NO: 14231 - DNA, 120 bp, synthetic construct
  misc_feature 1..120: note = Artificially Synthesized Probe
  source 1..120: mol_type = other DNA
acttgcgaggctgaggcaggagaatcgctggaacctggtaggcggaggttgcggtgagccaagatcacgacactgtgctgcagcctgggcaacagaggaaaactccatccctgtgcctcc

SEQ ID NO: 14232 - DNA, 120 bp, synthetic construct
  misc_feature 1..120: note = Artificially Synthesized Probe
  source 1..120: mol_type = other DNA
accaaacaggagacacgatctgctaatcatctacctgatatgggacttgtatccagaatgtaaggaactcagagggagaaaaaaaaaataaagcacggaacaaagggtatgagtagacat

SEQ ID NO: 14233 - DNA, 120 bp, synthetic construct
  misc_feature 1..120: note = Artificially Synthesized Probe
  source 1..120: mol_type = other DNA
ttagtggtaatagcttctcagtggagtccgcaggactttgtgcacacaggatcctgtcatctgtgattcgagctagttttatttgttccctttcaacctggctgccttttgtcttcttcc

SEQ ID NO: 14234 - DNA, 120 bp, synthetic construct
  misc_feature 1..120: note = Artificially Synthesized Probe
  source 1..120: mol_type = other DNA
cagatagaagtcaggggatctgtgaggctggataggaggaaattactaattttcactaacctttcagcaaagcgtaccatttccttccattatgaacatcagcaacaaacatctgtcatc

SEQ ID NO: 14235 - DNA, 120 bp, synthetic construct
  misc_feature 1..120: note = Artificially Synthesized Probe
  source 1..120: mol_type = other DNA
gacaaaaacctagactttttaataatggcatttgaaaaagtacaagtcacaaaagcaacactcgatgatagtaaagaacagaaacgccgaatatgtaggtggagcaagtggcgtcccatc

SEQ ID NO: 14236 - DNA, 120 bp, synthetic construct
  misc_feature 1..120: note = Artificially Synthesized Probe
  source 1..120: mol_type = other DNA
tgagtcttgttccctttgtagcgcctcagctcccaagctgtttgtgatggaaaggaggtttttctggcctgcaactgtttattgtgtgcctaggcacgtttggataccccaggtcctgca

SEQ ID NO: 14237 - DNA, 120 bp, synthetic construct
  misc_feature 1..120: note = Artificially Synthesized Probe
  source 1..120: mol_type = other DNA
gcattttaaggcgtattttccgtggcgtacacacacgtgatgcgttagtgttgtgttctaagcttcctgggtttgctgatgctttctggttgcagattgaatcgtttgggttttttttgt

SEQ ID NO: 14238 - DNA, 120 bp, synthetic construct
  misc_feature 1..120: note = Artificially Synthesized Probe
  source 1..120: mol_type = other DNA
tcactcagcgtctcggccgtctccaggcgttttcggttttgttgttttaacttttttcaaccagcagatactgagttgtcttttcattattattgaattcttttttaaaacagagatggg

SEQ ID NO: 14239 - DNA, 120 bp, synthetic construct
  misc_feature 1..120: note = Artificially Synthesized Probe
  source 1..120: mol_type = other DNA
caaacccacttatagtcacagataataattgggcgtacaggtatatgtctttccagtcattctttctgtgcattttatagctgtttgcgtggcttttatgccattcgagtcacgttggac

SEQ ID NO: 14240 - DNA, 120 bp, synthetic construct
  misc_feature 1..120: note = Artificially Synthesized Probe
  source 1..120: mol_type = other DNA
atacgtaaattctaaagtaagtgtttatgataaaacattcgataattcacagaggtgaaaagctacccccagaatccctttctgcttgaattccacgctctggagaggaccccgtgaggg

SEQ ID NO: 14241 - DNA, 120 bp, synthetic construct
  misc_feature 1..120: note = Artificially Synthesized Probe
  source 1..120: mol_type = other DNA
gatcattaagttggaatatgactttccagaaaaattcttccctaaggcaagagacctcgtggagaaacttttggtaaatatcgtgaatttccttttagaaaggtgatccgggacaccctg

SEQ ID NO: 14242 - DNA, 120 bp, synthetic construct
  misc_feature 1..120: note = Artificially Synthesized Probe
  source 1..120: mol_type = other DNA
tctgcgctgtcataaccccagtcgctccagcaccagtaacttaaaatgctgtgcagtgttgagcaaatgctaaatggtacagtaatttccgttgatttctaaattttagtttcttttatt

SEQ ID NO: 14243 - DNA, 120 bp, synthetic construct
  misc_feature 1..120: note = Artificially Synthesized Probe
  source 1..120: mol_type = other DNA
gttgtgagaggcaggcatgtcgcccacttcagccttgtttcctctgagttcctcttgccacctcccccgtgaccccctcgtacttaagtgctgttatcatgagatccatttttctggttt

SEQ ID NO: 14244 - DNA, 120 bp, synthetic construct
  misc_feature 1..120: note = Artificially Synthesized Probe
  source 1..120: mol_type = other DNA
ctagattttatctaaaagtcatccacagctaaatttctgctagtgtcaaagtttcccaacgcccctacctgctgtgtaacgcccctcatcctcccgacatcctttgagcccaaactctaa

SEQ ID NO: 14245 - DNA, 120 bp, synthetic construct
  misc_feature 1..120: note = Artificially Synthesized Probe
  source 1..120: mol_type = other DNA
gcacgtttatgagtgagtttccgttgtcgacactagcttgtctttttcctagagtaacaggcagcgttatctacagtaagtttagtttatctttgctgggattaagaggaatgtctttta

SEQ ID NO: 14246 - DNA, 120 bp, synthetic construct
  misc_feature 1..120: note = Artificially Synthesized Probe
  source 1..120: mol_type = other DNA
ttgaactggacttacagttttccgaagatgagaagaggttgttgttggagaagcaggctggcggaaacccttggtaagaacttatggacataagcaatgctttttgcagaattgcagcgt

SEQ ID NO: 14247 - DNA, 120 bp, synthetic construct
  misc_feature 1..120: note = Artificially Synthesized Probe
  source 1..120: mol_type = other DNA
ctctccagtctcgatactgtgtttttgtatggaagctgcaaattcttaccaagtccatcctgtccctatttatattttatgttttccattttaatctggtaagacgggcttcccccctaa

SEQ ID NO: 14248 - DNA, 120 bp, synthetic construct
  misc_feature 1..120: note = Artificially Synthesized Probe
  source 1..120: mol_type = other DNA
atttgcctttttgctgtcattctctgtgcgtgtatggtgagtttttcagtggtcacatgctgtagaatggaatctgcgtgcttttggtcttttctaaggtcataggtttttggtatcaat

SEQ ID NO: 14249 - DNA, 120 bp, synthetic construct
  misc_feature 1..120: note = Artificially Synthesized Probe
  source 1..120: mol_type = other DNA
atatgtgtgatgagctctttaaaatccaatgttgtttgtaacagcttttcagacaataaattaaagagtcactgaagctcttagaagctgcattgtagaggctggagaggccacacggta

SEQ ID NO: 14250 - DNA, 120 bp, synthetic construct
  misc_feature 1..120: note = Artificially Synthesized Probe
  source 1..120: mol_type = other DNA
tgacgggcaaaccgccgttatgcagacttagctatttggccagtatttttcttgaaaatgattggaatgagcttgttactttaaggaaaacaactgcctgtatttatgtcagtgataaca

SEQ ID NO: 14251 - DNA, 120 bp, synthetic construct
  misc_feature 1..120: note = Artificially Synthesized Probe
  source 1..120: mol_type = other DNA
ttaatgaattaaacatttgaaaatgtctcagttttaatttcctgcgtagtacatatcagttgatctgaaagctctttggggtcttccacagaggtaaagagtgtgaggggccataggact

SEQ ID NO: 14252 - DNA, 120 bp, synthetic construct
  misc_feature 1..120: note = Artificially Synthesized Probe
  source 1..120: mol_type = other DNA
tgtcttaaaaaaaaaaaaaatcaaggtgattcctggaagtgctcacagcaaggagctgtttctgtcgtgagctggcaggtgaatccgctgcacacacgctgtgctctagatgccgccagt

SEQ ID NO: 14253 - DNA, 120 bp, synthetic construct
  misc_feature 1..120: note = Artificially Synthesized Probe
  source 1..120: mol_type = other DNA
gcatttctgtgctctatgctttctgtgctgtggtgggtcttcctcatcacatgtccttttcaggaacctccttgatctgtttctctttgttttaatacccacattgtgtgtgtttgcagg

SEQ ID NO: 14254 - DNA, 120 bp, synthetic construct
  misc_feature 1..120: note = Artificially Synthesized Probe
  source 1..120: mol_type = other DNA
ttctatagtagaacctcagatcaggaatttccgtaagatcagatagaacacaaaccagtaactgttagctttaaccacatgaggtaaactgcagacattaaaatagtatcttggggccgg

SEQ ID NO: 14255 - DNA, 120 bp, synthetic construct
  misc_feature 1..120: note = Artificially Synthesized Probe
  source 1..120: mol_type = other DNA
cgtggagaatttctgtttgtgattgtcatgggagcatctctttcttgtttctttccacaggcaccagtttgtagaaaataatttaatactaaagatgggcccagtggataagcggaaggt

SEQ ID NO: 14256 - DNA, 120 bp, synthetic construct
  misc_feature 1..120: note = Artificially Synthesized Probe
  source 1..120: mol_type = other DNA
catattacttctacagtagaacgtcagatcaggaatttcagtatgattagacagaacacaaaccagtaactgttagctttaacccttggttagaaaatattcagctccaggtgctcacgg

SEQ ID NO: 14257 - DNA, 120 bp, synthetic construct
  misc_feature 1..120: note = Artificially Synthesized Probe
  source 1..120: mol_type = other DNA
ggggaacgcagaggcggaaaccttgcagcatttttatttaaaagaaaagaagaaaaaaaacacccaaccacacaaagaacaaaaccagtaacaaacacaaaggaattcagggtcgctttg

SEQ ID NO: 14258 - DNA, 120 bp, synthetic construct
  misc_feature 1..120: note = Artificially Synthesized Probe
  source 1..120: mol_type = other DNA
ttttgtgttttggttcaagtttctcagagcccctcagagcttctacatctgtgcatcagaaatctcacagccttctcatgctgccggctcatctgggcccatagagtgggctttgccagt

SEQ ID NO: 14259 - DNA, 120 bp, synthetic construct
  misc_feature 1..120: note = Artificially Synthesized Probe
  source 1..120: mol_type = other DNA
gggagtctctcttagccctttcaggaatttctgttcaggcttcctcctcctcatcagctattttacccatctcagaacgtcctgtgtctccatgtaggagagtggctctctcagatctct

SEQ ID NO: 14260 - DNA, 120 bp, synthetic construct
  misc_feature 1..120: note = Artificially Synthesized Probe
  source 1..120: mol_type = other DNA
ccgtatatcctgccctgccatttgttcactttttaaactaaaataggaacatccgacacacaccgtttgcatcgtcttctcccttgatattttaagcattttcccatgtcatgagtttct

SEQ ID NO: 14261 - DNA, 120 bp, synthetic construct
  misc_feature 1..120: note = Artificially Synthesized Probe
  source 1..120: mol_type = other DNA
tcgtgtccacaatggtactgaatttgcatctgcacagtcagcagagataacaagtgttgaactgaccttgccacatgcttagtgagtgatttgtaattaagtttatagactcagaaggta

SEQ ID NO: 14262 - DNA, 120 bp, synthetic construct
  misc_feature 1..120: note = Artificially Synthesized Probe
  source 1..120: mol_type = other DNA
ttgttacagtatttagagctgctgtagctgttccttcacaacataaaataggataaatgactagtacgtctttcaggtgggtggcaagcagaacatgcgtaatattctctacctggtctg

SEQ ID NO: 14263 - DNA, 120 bp, synthetic construct
  misc_feature 1..120: note = Artificially Synthesized Probe
  source 1..120: mol_type = other DNA
gattgaccgctgctatatggacaaggttaagcctggagagcgactgcagctatttactttggagttagaggaagacagatcttgcctgaaattttagagccaaagtgctcagagctctct

SEQ ID NO: 14264 - DNA, 120 bp, synthetic construct
  misc_feature 1..120: note = Artificially Synthesized Probe
  source 1..120: mol_type = other DNA
tttcaggactgttctctccagacttcagatatttctagttccacagaagaagccagtatttgaagagatgggtgcatccaccctcttatgccactacatgcttcttcttcttcttctttt

SEQ ID NO: 14265 - DNA, 120 bp, synthetic construct
  misc_feature 1..120: note = Artificially Synthesized Probe
  source 1..120: mol_type = other DNA
gtcttgctctccaccagagctctactacctcctaatggttgtacattcttctgacttcactagtagtgtgaacaaatattgtaatacaataaaaaccagtgtgcatgtgatcgtgccaaa

SEQ ID NO: 14266 - DNA, 120 bp, synthetic construct
  misc_feature 1..120: note = Artificially Synthesized Probe
  source 1..120: mol_type = other DNA
ggcaaaggtcactcttgctatgctttagcaaagagactggtggcattttgccccaccctagagatctgtggaactttgagcctgagagagatgatctgaaattggaacttaaatttaaag

SEQ ID NO: 14267 - DNA, 120 bp, synthetic construct
  misc_feature 1..120: note = Artificially Synthesized Probe
  source 1..120: mol_type = other DNA
gccccttcgttttggccaatttctaccatttggaatgggaacatttaaccaatacctgtactcccattgtatcttggatgtaacgtaacttgtttttgattttacaggttcataggcgga

SEQ ID NO: 14268 - DNA, 120 bp, synthetic construct
  misc_feature 1..120: note = Artificially Synthesized Probe
  source 1..120: mol_type = other DNA
tgtaccaggctctgagctaagagctttacatctgctctctaaattaatctccacctctctccatgagtaggtattatcagaaagacatcacaaggtaacacaaatgttgagatttgaacc

SEQ ID NO: 14269 - DNA, 120 bp, synthetic construct
  misc_feature 1..120: note = Artificially Synthesized Probe
  source 1..120: mol_type = other DNA
agaaggaataaaacaaaacacccccacaatccgattcattccagaataactacttttaacaccctggtttgtgtgctttcaaactctgttctcccatttccaaaggatgttgaggaacac

SEQ ID NO: 14270 - DNA, 120 bp, synthetic construct
  misc_feature 1..120: note = Artificially Synthesized Probe
  source 1..120: mol_type = other DNA
ttcatcacacaaccccagacagtaaaacacacagtggtgaaaaatacaccgatcctttcaaactcggttggagagacttgaaaggtctgtatgaggacattagaaaggtgagttttttat

SEQ ID NO: 14271 - DNA, 120 bp, synthetic construct
  misc_feature 1..120: note = Artificially Synthesized Probe
  source 1..120: mol_type = other DNA
agaatgcaatatgtatttatgtccagaaagaggttatggcagggttgggaacctgaaggaaaaaaatggtccaggtagctcatgcttgtccaatgagttatcccacctttcctcttaaaa

SEQ ID NO: 14272 - DNA, 120 bp, synthetic construct
  misc_feature 1..120: note = Artificially Synthesized Probe
  source 1..120: mol_type = other DNA
cactattgcactggggccccctttccagcctctcctctgaagctggttttgcttgggtcactgatagcttccctgtgctaaatccaatggatgtgttaccagcagcaaatttgtacaggt

SEQ ID NO: 14273 - DNA, 120 bp, synthetic construct
  misc_feature 1..120: note = Artificially Synthesized Probe
  source 1..120: mol_type = other DNA
acttcctttaattttgccattccctggggttccgtgggccccctcctctctctcttccttatatatctgtgtccatacttacgtctctcaaataatatcactactccaggttgaatcaca

SEQ ID NO: 14274 - DNA, 120 bp, synthetic construct
  misc_feature 1..120: note = Artificially Synthesized Probe
  source 1..120: mol_type = other DNA
gcattgtttatgttctagcctgcaggacagccaggtggatggccctgcagcgtgggagccttgcccacggagtgttgaatttctcaattgaaatgaatacacttaaattaaaccaaagtt

SEQ ID NO: 14275 - DNA, 120 bp, synthetic construct
  misc_feature 1..120: note = Artificially Synthesized Probe
  source 1..120: mol_type = other DNA
ggcccgagcatgcaatattcatcataacaactcccggtgagctctttttttcattcctttcttgtttttatatttgggaagtctttcttcccggggttacttactgtttcatttcccatt

SEQ ID NO: 14276 - DNA, 120 bp, synthetic construct
  misc_feature 1..120: note = Artificially Synthesized Probe
  source 1..120: mol_type = other DNA
aagctcttttttgatctgggttctttaataaaatgagcttgggttttgctgagctctgttgcaagttaggttctccaggaggcagactctgagatgaagtttaaaggacaggatgtttat

SEQ ID NO: 14277 - DNA, 120 bp, synthetic construct
  misc_feature 1..120: note = Artificially Synthesized Probe
  source 1..120: mol_type = other DNA
gtcccacgcagcgcagattcgcccctggttgagaatcactggtctagagaatgtgtttatatttttaatttctctcttaatatgtaatacagttcattgctctcagaaataaacatggga

SEQ ID NO: 14278 - DNA, 120 bp, synthetic construct
  misc_feature 1..120: note = Artificially Synthesized Probe
  source 1..120: mol_type = other DNA
acctgacattgaacctgacaggcttgcttgttggtgatgtcataatggagggatactgttttaaacctttgacaatcaaagtttaatggctcttaggaggcttatcagatgctgtgtttt

SEQ ID NO: 14279 - DNA, 120 bp, synthetic construct
  misc_feature 1..120: note = Artificially Synthesized Probe
  source 1..120: mol_type = other DNA
ttttgtgtatatttggattttttggggaaggatttctatggcttacagtttattctcaaagggaagtagggccctgaaaagctcaggaccccgtgtttgttttctctctgaatcttgcta

SEQ ID NO: 14280 - DNA, 120 bp, synthetic construct
  misc_feature 1..120: note = Artificially Synthesized Probe
  source 1..120: mol_type = other DNA
agtccagttttcaaagctgaactagatgtttagggggtcaaattattagacacagttttcacagtagataacaggttgagagtccaggtgtgataacaatcctgtattcagaggaggtaa

SEQ ID NO: 14281 - DNA, 120 bp, synthetic construct
  misc_feature 1..120: note = Artificially Synthesized Probe
  source 1..120: mol_type = other DNA
tagatccaggtatcatcataggggtctctctccacatatcccaagattcagaagctcttgtaatttcttcttcagtggcaagcaaataagcaatagtgtgaaccctgcatcatttatgat

SEQ ID NO: 14282 - DNA, 120 bp, synthetic construct
  misc_feature 1..120: note = Artificially Synthesized Probe
  source 1..120: mol_type = other DNA
aaagataattttttaaatctaatgaaggaggaaagaaaagtcctgacaggcatgctgaatcatagcatactcttgcaggtgtgaagtacagaggacgtagccaactctcaagaccaaggg

SEQ ID NO: 14283 - DNA, 120 bp, synthetic construct
  misc_feature 1..120: note = Artificially Synthesized Probe
  source 1..120: mol_type = other DNA
agtggtgcccaacttctgaatgcatgagaaaggctagaccttacctgttgttttaaggtaaggtctactgctaactagtaggaggtgtctaatttattagactgaaattcacttgcaaaa

SEQ ID NO: 14284 - DNA, 120 bp, synthetic construct
  misc_feature 1..120: note = Artificially Synthesized Probe
  source 1..120: mol_type = other DNA
aatgagtagcactgtagacatgatttccaggctgagagcagttgaaagggtctagggtttagttctaaggctgctggtaagaggagccagcgtgacatcatattttaaaattatatgtaa

SEQ ID NO: 14285 - DNA, 120 bp, synthetic construct
  misc_feature 1..120: note = Artificially Synthesized Probe
  source 1..120: mol_type = other DNA
taaacacctgaccaagaacactgttataaagatgattcttcagcccaataagatcagccagacttctgatcgtttactgtttttttggctaatggtacaatttctacttcttcaatgggg

SEQ ID NO: 14286 - DNA, 120 bp, synthetic construct
  misc_feature 1..120: note = Artificially Synthesized Probe
  source 1..120: mol_type = other DNA
atattattagcattgggaatatgggaaacagggacttggtttgaggatgcatagatcctgggttgaaggatgagaataaagttgaacagatgagaatgaaaatgcacaggcatccatcgc

SEQ ID NO: 14287 - DNA, 120 bp, synthetic construct
  misc_feature 1..120: note = Artificially Synthesized Probe
  source 1..120: mol_type = other DNA
tcaaattttagattaaaaggttttacgtcctgttgactaaattctgtacatcagaatgttggccaaaaagcagatggcgtttagatttggagaggatgtgggtaactctatgacccatcc

SEQ ID NO: 14288 - DNA, 120 bp, synthetic construct
  misc_feature 1..120: note = Artificially Synthesized Probe
  source 1..120: mol_type = other DNA
aaaagcatttcacttggagccaaaattctttggtttaatttttattgaaaataacatgtatcgtgccatgctctggggtgtgctcagtactagctgagatgattcctagtctgagctccc

SEQ ID NO: 14289 - DNA, 120 bp, synthetic construct
  misc_feature 1..120: note = Artificially Synthesized Probe
  source 1..120: mol_type = other DNA
ttccagtcagtttcatcattggctctactgctctgatggatttttcagaacgttctgttttccccctgtctttttctaggctgttcttgctggagatttaattctttctgcagcatctat

SEQ ID NO: 14290 - DNA, 120 bp, synthetic construct
  misc_feature 1..120: note = Artificially Synthesized Probe
  source 1..120: mol_type = other DNA
gtgttttcatttttgccatcttcttttggtatgcaggcgttgacttttcatcttttcttcccaagaattcaatcaaaataagctttcccgcaccttccccaatctgattgccaaactgta

SEQ ID NO: 14291 - DNA, 120 bp, synthetic construct
  misc_feature 1..120: note = Artificially Synthesized Probe
  source 1..120: mol_type = other DNA
atgctaaataagagaatagcctattttaagtgggtgctctaacacttttacagtaatcctttacatattatcatgcccttgatggcccaactctccctgaaggtcaggatccatcctctt

SEQ ID NO: 14292 - DNA, 120 bp, synthetic construct
  misc_feature 1..120: note = Artificially Synthesized Probe
  source 1..120: mol_type = other DNA
agacacaccaaaaagaggggaggaggagaactgaaagagcagaattattacagaagaagaactaatgggattgcaaaatgtattgagaattggagggaaacttacaagctgcattctact

SEQ ID NO: 14293 - DNA, 120 bp, synthetic construct
  misc_feature 1..120: note = Artificially Synthesized Probe
  source 1..120: mol_type = other DNA
tttttctgaatttctattttctccagggctgcttgtggcctggaattaatgggctctcttcctattacttgattttcaaagcctcagagtaccactacagaattgcatattgtgggtcac

SEQ ID NO: 14294 - DNA, 120 bp, synthetic construct
  misc_feature 1..120: note = Artificially Synthesized Probe
  source 1..120: mol_type = other DNA
tatatcactcttctacaagaaagttggtatcctattttttttgttattattatttcattctcaaaagagctgaagagttggtattccattgtaaggaagctcttaactgtatgggctctt

SEQ ID NO: 14295 - DNA, 120 bp, synthetic construct
  misc_feature 1..120: note = Artificially Synthesized Probe
  source 1..120: mol_type = other DNA
acagtgagagacctggctcctcttctccgcggtgtatttatttgcacaatctgagaatataccataggagtttacaaattcatgactcatatctctgtgaaaaacaaacccagtagctag

SEQ ID NO: 14296 - DNA, 120 bp, synthetic construct
  misc_feature 1..120: note = Artificially Synthesized Probe
  source 1..120: mol_type = other DNA
tcgtttagcacaaacaggcagacacaagtatgctatcttcccttctttctcacagcaagaagtagtaccctagactactctgctttccttttgcatttcttcagttaacaatttattagg

SEQ ID NO: 14297 - DNA, 120 bp, synthetic construct
  misc_feature 1..120: note = Artificially Synthesized Probe
  source 1..120: mol_type = other DNA
catggtttattcagccaatcttctatacatgggcatttaggtttccagttttacaattacaaacactactgcaagggctgatcgtgcataaacctatttttgtgttgtgagaggagtgcc

SEQ ID NO: 14298 - DNA, 120 bp, synthetic construct
  misc_feature 1..120: note = Artificially Synthesized Probe
  source 1..120: mol_type = other DNA
tgtgtctcagtttctcgaacttcataagtgacttaagatgtgagaactctcagaacagtgcctagcacatagtggacgctcagaaattgttagcttttatcatcaccaaccacataatcc

SEQ ID NO: 14299 - DNA, 120 bp, synthetic construct
  misc_feature 1..120: note = Artificially Synthesized Probe
  source 1..120: mol_type = other DNA
tatgagcttactgttcactcaactcagtggccacctgaccctttatggtgcatgcaattttaccatgtacttatggccaagcactacatagtcaacagacctcattaagttgtcaaaaag

SEQ ID NO: 14300 - DNA, 120 bp, synthetic construct
  misc_feature 1..120: note = Artificially Synthesized Probe
  source 1..120: mol_type = other DNA
atgcacttcagtggccggtgccagctagctttttggagttttaaaaagactttcagaagtcttatttctcccccattgaaaggagggaaaagggtttttatacagttacttcttttgaga

SEQ ID NO: 14301 - DNA, 120 bp, synthetic construct
  misc_feature 1..120: note = Artificially Synthesized Probe
  source 1..120: mol_type = other DNA
atagcttttcaggttagtatgctttttatttgtaagaatggtggcgtagtgatacagtcagcattctcccctagtgtgtaatcgtcaaaatagtaagaacgatggcagcagtgttggcat

SEQ ID NO: 14302 - DNA, 120 bp, synthetic construct
  misc_feature 1..120: note = Artificially Synthesized Probe
  source 1..120: mol_type = other DNA
ttatagtaacttttggtctttcagagattttgcctctattctgtcttcacgtttacaaaggtcagtcatgtcctccataaaattcagtgattccactgtgatacagaaaccacggccctt

SEQ ID NO: 14303 - DNA, 120 bp, synthetic construct
  misc_feature 1..120: note = Artificially Synthesized Probe
  source 1..120: mol_type = other DNA
cactctgaatatatttcagaagaaactaacttactttcccctacacacacaaaggagtaatggctatctctgctttcatatatagtgggggaaaggggaaatggacctctgcatagtatc

SEQ ID NO: 14304 - DNA, 120 bp, synthetic construct
  misc_feature 1..120: note = Artificially Synthesized Probe
  source 1..120: mol_type = other DNA
tggtaaatggcacagcagggaactgaacaagtctaagaccagtattcattttattacatcatacatagtgttattgccactggtaatgctgagaagttagtagctatgataccacacagg

SEQ ID NO: 14305 - DNA, 120 bp, synthetic construct
  misc_feature 1..120: note = Artificially Synthesized Probe
  source 1..120: mol_type = other DNA
aatttttatttgtcactaaatctgcaggcaactgttcttcctgctgtgtttctcttttcttttccacatacacattaaggggactggggagtgcccggggaagagtttgatattttgcat

SEQ ID NO: 14306 - DNA, 120 bp, synthetic construct
  misc_feature 1..120: note = Artificially Synthesized Probe
  source 1..120: mol_type = other DNA
ttctttgtctgtgatcacttggctgcggcttttctatgtatgccctattttttcttctaggattactaataccatggtcatggttacaggacaacttatttcatccttcaggttcactgc

SEQ ID NO: 14307 - DNA, 120 bp, synthetic construct
  misc_feature 1..120: note = Artificially Synthesized Probe
  source 1..120: mol_type = other DNA
tttctctctcttcttgctatcatcttaattcaggtcttttttataacctactctagtaacctgtttgttctgtctacctctgactcttaattccatggttctcaaccttggcggcacatt

SEQ ID NO: 14308 - DNA, 120 bp, synthetic construct
  misc_feature 1..120: note = Artificially Synthesized Probe
  source 1..120: mol_type = other DNA
gcatagacggtggatgtctcttagctcagcttttgttgccacagtttactgctcccccacatcatctagacacttagtttcatttttgttgtttcttgttatttcctattgttacaaact

SEQ ID NO: 14309 - DNA, 120 bp, synthetic construct
  misc_feature 1..120: note = Artificially Synthesized Probe
  source 1..120: mol_type = other DNA
atttgcagccaacagatctactggatgagtcggagtgagcaaaaaatcattacaaagcaagtgtggcatgagatctgtacttagtgtagtacctgaaagacttccaaataattaccttcc

SEQ ID NO: 14310 - DNA, 120 bp, synthetic construct
  misc_feature 1..120: note = Artificially Synthesized Probe
  source 1..120: mol_type = other DNA
gaaggcagtggaggaaggtcttccaagtgaggatgaaacattttaaacctaggatccattaaatccgaaggcaaaagaaagtcaccacacatcaggactaaaatgttgacttcccataaa

SEQ ID NO: 14311 - DNA, 120 bp, synthetic construct
  misc_feature 1..120: note = Artificially Synthesized Probe
  source 1..120: mol_type = other DNA
tgatgctacctaacagaagtaatcaacaaaacaactaaagacagcagtgtgatgatgaggcggcacattgtgggtgggctaaaccctcatcttaacaaaaaggtaacaggtaataactaa

SEQ ID NO: 14312 - DNA, 120 bp, synthetic construct
  misc_feature 1..120: note = Artificially Synthesized Probe
  source 1..120: mol_type = other DNA
agtactgccatgaagcaataagagagatcagtaaacttcgaccatccccagaaagagatgccctcattcagctttcagaaattgtactcacaagagataaatgacaactctttctgttct

SEQ ID NO: 14313 - DNA, 120 bp, synthetic construct
  misc_feature 1..120: note = Artificially Synthesized Probe
  source 1..120: mol_type = other DNA
gattatcagggtttgtttctcaatgactttgaggtttgacagcagagcacactctttggcagatgagggggcttgaggcttagtcttattccgtgattaaaagcatttcttgtatgtttg

SEQ ID NO: 14314 - DNA, 120 bp, synthetic construct
  misc_feature 1..120: note = Artificially Synthesized Probe
  source 1..120: mol_type = other DNA
ttcctcagatacgggcagagttgtggatgtgagaagggtctggcttgggtacctcagttccaaacctcctgtgtccatcagagagctggcggtcaccatggcaatgcgggagctggtgga

SEQ ID NO: 14315 - DNA, 120 bp, synthetic construct
  misc_feature 1..120: note = Artificially Synthesized Probe
  source 1..120: mol_type = other DNA
aatagaccagtctcttttctgtcccatttttctcttgcccactgtgtttttacctttaaacttagttcacccgtatttcaatttttgggctttcctgaccgaatgagaatgcctgcttgt

SEQ ID NO: 14316 - DNA, 120 bp, synthetic construct
  misc_feature 1..120: note = Artificially Synthesized Probe
  source 1..120: mol_type = other DNA
gggattctggccttaagttatttggaacagaattggggccttcagagtgttattgtgaagttccagtgcctgaagtgtatggctttagaaggtaaagaccataccatgatgatgataata

SEQ ID NO: 14317 - DNA, 120 bp, synthetic construct
  misc_feature 1..120: note = Artificially Synthesized Probe
  source 1..120: mol_type = other DNA
cccacccataagttggagttaaggtagaacagtaggtgctcttggctttaagagtgctaatcactttatcttcttaagctcattagaacttcacagtaacagtaacacaaggtggatatc

SEQ ID NO: 14318 - DNA, 120 bp, synthetic construct
  misc_feature 1..120: note = Artificially Synthesized Probe
  source 1..120: mol_type = other DNA
agattcttttggaatcgtgcctgtttcacagaggcagagacatgcaaaccttagaatgggagttgagctgtttgaagtctgccttcataaaaatgtcttattgcagcagtatattgcttt

SEQ ID NO: 14319 - DNA, 120 bp, synthetic construct
  misc_feature 1..120: note = Artificially Synthesized Probe
  source 1..120: mol_type = other DNA
ttgtattcttctccacagtgctgctatttagcagacacagaaactttcatgagtaagagtagcaagttctgagtttttgacttttgagcttggggaagatgtgcctagaaggaatgagta

SEQ ID NO: 14320 - DNA, 120 bp, synthetic construct
  misc_feature 1..120: note = Artificially Synthesized Probe
  source 1..120: mol_type = other DNA
cacttgaggcaacagtctaattggggcaaatggaagagaaatgcttcctgtaagagctagtgagcagaatctgtatttaatttttgagagtccttgaaattaacagatggatctatggtc

SEQ ID NO: 14321 - DNA, 120 bp, synthetic construct
  misc_feature 1..120: note = Artificially Synthesized Probe
  source 1..120: mol_type = other DNA
atgtaattatatatgtcatataatgtaataatatatgtcatatataatgtaataattatatatgtcatatataatgtaattatatatgtcatatataatgtaattatatatgtcatatat

SEQ ID NO: 14322 - DNA, 120 bp, synthetic construct
  misc_feature 1..120: note = Artificially Synthesized Probe
  source 1..120: mol_type = other DNA
aggatgaaaaacagttcagcaccctcattgagtttgttgccttgataggttaattctgatgttgcagcagtcccctttgtcactagagcttctgagacagtttctaaaattagactgaaa

SEQ ID NO: 14323 - DNA, 120 bp, synthetic construct
  misc_feature 1..120: note = Artificially Synthesized Probe
  source 1..120: mol_type = other DNA
agaatgggttggatattgaggatgttgaaaatttagtactatattcttttgaccaggggtttctgagggagtcagcagagttttgtctgctttggtgtggctaagagggtcagttgaata

SEQ ID NO: 14324 - DNA, 120 bp, synthetic construct
  misc_feature 1..120: note = Artificially Synthesized Probe
  source 1..120: mol_type = other DNA
ctccctcccggacggggtggctgccgggcggagacgctcctcacttcccagacggggcggctgccgggcagagggtctcctcacttctcagacggggcggccgggcagagacgctcctca

SEQ ID NO: 14325 - DNA, 120 bp, synthetic construct
  misc_feature 1..120: note = Artificially Synthesized Probe
  source 1..120: mol_type = other DNA
gggagagggagagggcttactttattctttaagatttccccttgggttattactcctgtgaatttatggttgaaatgtagtcaaggacacagtggttgtgtgcctgtactcaggaagctg

SEQ ID NO: 14326 - DNA, 120 bp, synthetic construct
  misc_feature 1..120: note = Artificially Synthesized Probe
  source 1..120: mol_type = other DNA
tagtgttcattccctcatctccttgcctactaactcttttttctgatgcctttgcaagtctttagagccagaaatccctttctttttgctctctacctcttttagggtctttagcatatc

SEQ ID NO: 14327 - DNA, 120 bp, synthetic construct
  misc_feature 1..120: note = Artificially Synthesized Probe
  source 1..120: mol_type = other DNA
gcattttaaaaaacttattcagatgattcttaaacatattgaaattcaagaactgctgccttagagaatcccagcagagctgagtgtggggtggggtggtcatgatggatctcctttttc

SEQ ID NO: 14328 - DNA, 120 bp, synthetic construct
  misc_feature 1..120: note = Artificially Synthesized Probe
  source 1..120: mol_type = other DNA
gcctatagcatgtgctgttgacttagaagcatatgttacttctggggtcttactgaaaaacaaatctacctgtgggttgtaggatatttggggatgtgtttaataactgagctcctgagt

SEQ ID NO: 14329 - DNA, 120 bp, synthetic construct
  misc_feature 1..120: note = Artificially Synthesized Probe
  source 1..120: mol_type = other DNA
cttgagccctacttgatatcattgatactttgggatattgcaaaattaggactagaaatacttgcattaatgttcctcaaaaagtgatgtagtaagcaattagacagtatctggctttaa

SEQ ID NO: 14330 - DNA, 120 bp, synthetic construct
  misc_feature 1..120: note = Artificially Synthesized Probe
  source 1..120: mol_type = other DNA
tctgtagagtggcttaaaacacgtattaatgatgaacaatagttgaggttgaatgcagaaggatttattttattgaactgtaatagtctagggcaagggccagcacactggcttgtggga

SEQ ID NO: 14331 - DNA, 120 bp, synthetic construct
  misc_feature 1..120: note = Artificially Synthesized Probe
  source 1..120: mol_type = other DNA
taaaatgccagttgacaaagctttgcagatagtatcgtaactcttctctaaagtgagaaatcctcagctggaagagaatggtgtctttctgaagtattctctgccatctggattttggga

SEQ ID NO: 14332 - DNA, 120 bp, synthetic construct
  misc_feature 1..120: note = Artificially Synthesized Probe
  source 1..120: mol_type = other DNA
aactctgagggttggagtgaattccattccttcatcggcttttgattttatttgcggctttggttggctccttgcctgctaaaaccttccccttagatctgtaactttattattaactca

SEQ ID NO: 14333 - DNA, 120 bp, synthetic construct
  misc_feature 1..120: note = Artificially Synthesized Probe
  source 1..120: mol_type = other DNA
atcaatgaagaaattaatttggggggatgggaatagagacattcatctacctactttgtgtttttttccttttcatccagctccctgtttcttgaagtgaaagagctcttcctggcagct

SEQ ID NO: 14334 - DNA, 120 bp, synthetic construct
  misc_feature 1..120: note = Artificially Synthesized Probe
  source 1..120: mol_type = other DNA
tccttattcttagatcctgtttgactaaccagccctagctttctccctcccactgctagctgacctgcttccttccattgttgttcagcttaacagctctcattcctcttcttccttaca

SEQ ID NO: 14335 - DNA, 120 bp, synthetic construct
  misc_feature 1..120: note = Artificially Synthesized Probe
  source 1..120: mol_type = other DNA
caatccctcatcctcttagaagcacctgtgaatgggaattgagccaactgttatagaaaattggttcagaaagtgcaatcttgccagatttctagcaaataggttcagtgttaccataag

SEQ ID NO: 14336 - DNA, 120 bp, synthetic construct
  misc_feature 1..120: note = Artificially Synthesized Probe
  source 1..120: mol_type = other DNA
tggaaggattttgatagtttttcagtgcttagggtttctaaagcttttcatctggctctgcctgcctttatcgggaactgtatcaagtgccatatcaagatgggtatttatcctgaggaa

SEQ ID NO: 14337 - DNA, 120 bp, synthetic construct
  misc_feature 1..120: note = Artificially Synthesized Probe
  source 1..120: mol_type = other DNA
gtgctaaaagtggggagatcatacttctctgtaattctcaaattttcttggtgcatgtttgatacttttctagaggagaaaattaaacacctgggggaggaaaacaggaagctgttgtgg

SEQ ID NO: 14338 - DNA, 120 bp, synthetic construct
  misc_feature 1..120: note = Artificially Synthesized Probe
  source 1..120: mol_type = other DNA
accatctcacaccagttagaatggcagtcattaaaaagtcaggaaacaacaggtgctggacaggatgtggagaaataggaacacttttacactgttggtgggactgtaaactagttcaac

SEQ ID NO: 14339 - DNA, 120 bp, synthetic construct
  misc_feature 1..120: note = Artificially Synthesized Probe
  source 1..120: mol_type = other DNA
agagacgtggcatcttaaaattttactcagattatgcatttgggtgactttgtagtccgcaaaatttgcagtcactaaggctaaggttaagaaaactattttataaatggacaaaggaca

SEQ ID NO: 14340 - DNA, 120 bp, synthetic construct
  misc_feature 1..120: note = Artificially Synthesized Probe
  source 1..120: mol_type = other DNA
cgtgcccggcccaaattccttaaacactcacacccatatatacattacctactcttaaataatgacaaaggtaataacaacttactttatctccagggcaagtgtaagtgatttaaattt

SEQ ID NO: 14341 - DNA, 120 bp, synthetic construct
  misc_feature 1..120: note = Artificially Synthesized Probe
  source 1..120: mol_type = other DNA
ggcaaattaaggtggtgacaattaagaatgtgttctcattttccaagtaggaaagtttttcgtaaagggcaagtgcatttaaagcattcagagtttggtttgggatttaccttttcttgg

SEQ ID NO: 14342 - DNA, 120 bp, synthetic construct
  misc_feature 1..120: note = Artificially Synthesized Probe
  source 1..120: mol_type = other DNA
tcagttccatgcagagtgggatggcaacttcagggaggggagttagttagtctaactaatatcagttagacgttattttacttataagttcaaccctgaatcaagggtgtgaagaaatag

SEQ ID NO: 14343 - DNA, 120 bp, synthetic construct
  misc_feature 1..120: note = Artificially Synthesized Probe
  source 1..120: mol_type = other DNA
ctccttcaggggcgtttgcaggagcgcgcccgcgagctgcgtgcggttattgagcgtttgaaatatggctcgtgtgattcctgaagggaatgcttagtttacgtcaatttaaacttaacg

SEQ ID NO: 14344 - DNA, 120 bp, synthetic construct
  misc_feature 1..120: note = Artificially Synthesized Probe
  source 1..120: mol_type = other DNA
tataatacattactgttaactaaggttcatgtttcattgagatttcctcagcttttacctgctgttctgttctagggtcccacatgacaagtagtcttcatgcctccgtaggcatgtttt

SEQ ID NO: 14345 - DNA, 120 bp, synthetic construct
  misc_feature 1..120: note = Artificially Synthesized Probe
  source 1..120: mol_type = other DNA
aaagacttatacagacagaaggcatgagcaactacaggaaggtgctagaagacagcatgtttcttcttgagtctcacctgtccacacttgaaagttccagagcctcatctggtgaaatct

SEQ ID NO: 14346 - DNA, 120 bp, synthetic construct
  misc_feature 1..120: note = Artificially Synthesized Probe
  source 1..120: mol_type = other DNA
atgttttaattttatttaattttgcttaaattttgaattgaaacatcctcatagctagtggctgctgttgggcattgcagttctaggctctgctgaagcatcatggtcagggaggcccat

SEQ ID NO: 14347 - DNA, 120 bp, synthetic construct
  misc_feature 1..120: note = Artificially Synthesized Probe
  source 1..120: mol_type = other DNA
cttgaaagtgcttggggcactgggcctcctggggcccatgtccgagaccatcacccctgaatcacacattattaccagtaactgtcagctgaacttggacagaagacaagcttttcaaaa

SEQ ID NO: 14348 - DNA, 120 bp, synthetic construct
  misc_feature 1..120: note = Artificially Synthesized Probe
  source 1..120: mol_type = other DNA
aaaaaaaaaaagcccttaacttttagcaaatgttggacagatcttgtttgcatgagaccaaatgcagtgcatatcccagcagtgattttatacctgcttgatgccttggaaagcggcgtg

SEQ ID NO: 14349 - DNA, 120 bp, synthetic construct
  misc_feature 1..120: note = Artificially Synthesized Probe
  source 1..120: mol_type = other DNA
ccttccaggtcgggagcaggctgaactcactgggctccgcctggcaagcttggggttgaagtttaataaaatcgtccattcgtctatgacgcgcgccatagagaccaccgatatcatcag

SEQ ID NO: 14350 - DNA, 120 bp, synthetic construct
  misc_feature 1..120: note = Artificially Synthesized Probe
  source 1..120: mol_type = other DNA
aggacagttacgagatcttcatctgtcacgccaacgtcatccgctacatcgtgtgcaggtaggcagctgctgggctgggcgtggtctaaaataatttcagacttagagaaaagcatgagg

SEQ ID NO: 14351 - DNA, 120 bp, synthetic construct
  misc_feature 1..120: note = Artificially Synthesized Probe
  source 1..120: mol_type = other DNA
cagctctacggttacatgcctgaaacagtcagaagggttggccaaatctcactaaatgcaaatttgaaacaaatttgcctcttctctggatccattaggaaatgtgtgtgtgggctccgc

SEQ ID NO: 14352 - DNA, 120 bp, synthetic construct
  misc_feature 1..120: note = Artificially Synthesized Probe
  source 1..120: mol_type = other DNA
ctttcccagaaagggacctgttgcactaactggctgctccctgcttttatatgggaaaagcagaaattaaactgtgtttcctcgtaagaagtcagcgttgttctgatctgtgcaaatctt

SEQ ID NO: 14353 - DNA, 120 bp, synthetic construct
  misc_feature 1..120: note = Artificially Synthesized Probe
  source 1..120: mol_type = other DNA
ggatgaggagggcacccaggttctgttcacaactcacttcacttcatacatccttttaatttcttaaaaccctcttgtcccttaaatatttgtcaattaaagattttctggctgggcaca

SEQ ID NO: 14354 - DNA, 120 bp, synthetic construct
  misc_feature 1..120: note = Artificially Synthesized Probe
  source 1..120: mol_type = other DNA
gaggtgacacgctagtgacagcccaatagggggttacccttattgagtaaaatacttcagattgacagctcaatcttagtttgcctccagttaatcttttatgcttagggattaaatgtg

SEQ ID NO: 14355 - DNA, 120 bp, synthetic construct
  misc_feature 1..120: note = Artificially Synthesized Probe
  source 1..120: mol_type = other DNA
ccaaaaaaccccatatatatatgtttctcctttataagcttagagattgctttggtggtcaagtgcagggcggctgggggaggtaagaccttcaggaaggccatatcccggacaagaccc

SEQ ID NO: 14356 - DNA, 120 bp, synthetic construct
  misc_feature 1..120: note = Artificially Synthesized Probe
  source 1..120: mol_type = other DNA
gtaggaggaagtaagagggtatctaggccaatttattcagctggaaatcaatctgtccagggctggaccaggcgcctccccctcgatacagctcctggctgaagaggtcatcagagcagc

SEQ ID NO: 14357 - DNA, 120 bp, synthetic construct
  misc_feature 1..120: note = Artificially Synthesized Probe
  source 1..120: mol_type = other DNA
cagcttctgtattgcatccacaggtgaatgtggccaggcaggcatctctgggggattagacgatgctcacacaaactggacagacgcatatggccgctctgcacccacacactcactagc

SEQ ID NO: 14358 - DNA, 120 bp, synthetic construct
  misc_feature 1..120: note = Artificially Synthesized Probe
  source 1..120: mol_type = other DNA
cactcacgtatttcaggactgtcttgagccgtgccatgcacaggatggtgacccagatggccgccccggagcccaagaagtcgcagtactgcagcgtgtcgtagctgaggatgcacagca

SEQ ID NO: 14359 - DNA, 120 bp, synthetic construct
  misc_feature 1..120: note = Artificially Synthesized Probe
  source 1..120: mol_type = other DNA
cctaggtttacttactcagcattctcagggcacatgagctgcagggagaggtaccagttgtctgtctctgggtaggggatgatgaggttggccctgcgagaccaggcgctcagagacaaa

SEQ ID NO: 14360 - DNA, 120 bp, synthetic construct
  misc_feature 1..120: note = Artificially Synthesized Probe
  source 1..120: mol_type = other DNA
tcttggcccgtgcctgctggtgtcactgtgccgcctgtcccgtgccaaggtaaatgaggaggcgctgcaggggttgcccggcgccctgcccgagcccaggccacaggccgcttgcagaca

SEQ ID NO: 14361 - DNA, 120 bp, synthetic construct
  misc_feature 1..120: note = Artificially Synthesized Probe
  source 1..120: mol_type = other DNA
cacccactccaccgaatctgagaaggggccggagggcagagccgggctgccccccaggcccccgctcacttgaggtagctgggatgggagaggagggtctgaggaaggggcacgtccggc

SEQ ID NO: 14362 - DNA, 120 bp, synthetic construct
  misc_feature 1..120: note = Artificially Synthesized Probe
  source 1..120: mol_type = other DNA
gcacaccaactctgaccttggcaaaggtcaccgacaccctctggcccctcagccagatcctctgctgtccctccccagatggcctacatcccaccctcctggcatctgggtcttttcaca

SEQ ID NO: 14363 - DNA, 120 bp, synthetic construct
  misc_feature 1..120: note = Artificially Synthesized Probe
  source 1..120: mol_type = other DNA
ttgggctatgatgactttggacacggcgagaccggagcccaaattccccttacccagagggagatactgcatgtgggagggacccaggccagaagcctggccagtcatgagaacaagggg

SEQ ID NO: 14364 - DNA, 120 bp, synthetic construct
  misc_feature 1..120: note = Artificially Synthesized Probe
  source 1..120: mol_type = other DNA
ctgtccacacacaggggttccatctcccaggaacccctcaccaggcctgagttctgggacaggagaatttcctttgccagtttccaacggagtaaggttttggtatttctgagggtctca

SEQ ID NO: 14365 - DNA, 120 bp, synthetic construct
  misc_feature 1..120: note = Artificially Synthesized Probe
  source 1..120: mol_type = other DNA
gagcaatttaatccggggcacggtcctcggggaaaactgcctttcatctctacctgtgccaagctcagaaagcaggaggcacagcccccgaaagaaacaggagctcaaaggagcattatt

SEQ ID NO: 14366 - DNA, 120 bp, synthetic construct
  misc_feature 1..120: note = Artificially Synthesized Probe
  source 1..120: mol_type = other DNA
cgccaccaccgcggccaccgcctcgcccccggtcccggtgccagcccggcccatggctccgcgctcggcccggcgctacccggcccgcgtcccgcgccgccggcccccgccgccgcccgg

SEQ ID NO: 14367 - DNA, 120 bp, synthetic construct
  misc_feature 1..120: note = Artificially Synthesized Probe
  source 1..120: mol_type = other DNA
tgcagtaataaacagctctaaatcaatcacagaaacgctcccctagaaaatactgaaggacagctgccagggatacgctgatcctcctccctcagcgcagaaatgcaaattaaaaactac

SEQ ID NO: 14368 - DNA, 120 bp, synthetic construct
  misc_feature 1..120: note = Artificially Synthesized Probe
  source 1..120: mol_type = other DNA
ctgcaagaaaggaacaggaagaacggtgtgttcaaagctctaccatttgtgtagaaaagggagaaaaacacgtttcctttgtgtgtgtcaaaggcatcgaatgtctggaatgatccagca

SEQ ID NO: 14369 - DNA, 120 bp, synthetic construct
  misc_feature 1..120: note = Artificially Synthesized Probe
  source 1..120: mol_type = other DNA
agccactttgtcaaaaaacagccacgcagcccttgccacaacagatgctcacactttgctggcaggcatgtgaaccccctcaaccttctgaaaattattgtgccaacattaaaatgtaat

SEQ ID NO: 14370 - DNA, 120 bp, synthetic construct
  misc_feature 1..120: note = Artificially Synthesized Probe
  source 1..120: mol_type = other DNA
ccggcctactctgaatatttatgcaacttttagatgggtctataaatgtgtcttcagaaggaatgtcagtaaagtgaaaaatccagttgctggataacagggacgcatcgtatttccaaa

SEQ ID NO: 14371 - DNA, 120 bp, synthetic construct
  misc_feature 1..120: note = Artificially Synthesized Probe
  source 1..120: mol_type = other DNA
catgaaccacaccacaggtgcccagacatcagagtttcacagacagaaatagtttccccagagttttggggcttttttaggctcaactatcatgcattattattctttcataaaaaaagg

SEQ ID NO: 14372 - DNA, 120 bp, synthetic construct
  misc_feature 1..120: note = Artificially Synthesized Probe
  source 1..120: mol_type = other DNA
aagagttttaccagaagtacgaccctaaggacgtcatcggcaggtaaggccgcggccagggaaacggaggtccaaagaggtcgagccccagcattcccgcttccgtttgaaggctggaga

SEQ ID NO: 14373 - DNA, 120 bp, synthetic construct
  misc_feature 1..120: note = Artificially Synthesized Probe
  source 1..120: mol_type = other DNA
gactgaatagttctaaatgggaagaatcagtgatcagtggagaacacctagtgactagactcttaccttgggtcaaccccattttttcacggattcattcatttatgccttcaacacaaa

SEQ ID NO: 14374 - DNA, 120 bp, synthetic construct
  misc_feature 1..120: note = Artificially Synthesized Probe
  source 1..120: mol_type = other DNA
ctaagatctaattttcagctttggtcttctagtcaatggcttcctacttatttggagcttcctacacttgagggaactttgggatttggatggggtaatcaggcaagtgtaagtggaata

SEQ ID NO: 14375 - DNA, 120 bp, synthetic construct
  misc_feature 1..120: note = Artificially Synthesized Probe
  source 1..120: mol_type = other DNA
catcgattcctacgagtcttctagcttcatgttcctggtgtttgacctgtgagtatctccctgccaccatctgagaagcctcctccccacctccatgtatggcccagcatttgtggtgca

SEQ ID NO: 14376 - DNA, 120 bp, synthetic construct
  misc_feature 1..120: note = Artificially Synthesized Probe
  source 1..120: mol_type = other DNA
ctattatgccatcctgcagccatgcagagtgcctacactccccaaaacagcacctgataatgttactttgaggactgatgcagagtgcaagtataacctcaattttgaaagtattatttt

SEQ ID NO: 14377 - DNA, 120 bp, synthetic construct
  misc_feature 1..120: note = Artificially Synthesized Probe
  source 1..120: mol_type = other DNA
atacagttgttgtgacaggaatgtttctactgcaaatgggaaacttcaaataaaattcacctgtgggattcttcagagcctttagtctgccactgactctctccctcaatggtttgtact

SEQ ID NO: 14378 - DNA, 120 bp, synthetic construct
  misc_feature 1..120: note = Artificially Synthesized Probe
  source 1..120: mol_type = other DNA
ttcaagaaatacttggtgtaggaatgaatttcccaacaaagtcagtttcaattcggggctgttaaaatctcctggaagtgtgccatggaacaaggttcagaaagtactggaagaattggt

SEQ ID NO: 14379 - DNA, 120 bp, synthetic construct
  misc_feature 1..120: note = Artificially Synthesized Probe
  source 1..120: mol_type = other DNA
aagaaattccttatctccacttcttccccttgggttgagtgatagttggagattataggaggaggaagaggtttgggcagataggaatgcagaaaatttttttttgcgtatgtattatga

SEQ ID NO: 14380 - DNA, 120 bp, synthetic construct
  misc_feature 1..120: note = Artificially Synthesized Probe
  source 1..120: mol_type = other DNA
tgagcgttgtgaaggcagccaaccctggaacctcaccccccgccagcggttccgggtaagcctgagtgtatcagggtctgggcccgtttctctgtcccatgatctttcccctgcactaga

SEQ ID NO: 14381 - DNA, 120 bp, synthetic construct
  misc_feature 1..120: note = Artificially Synthesized Probe
  source 1..120: mol_type = other DNA
aatttcccctggtggggatatagaggtagcaatgttgtttccctttaggaaatgttagcaagcccttgtgtgagaggtagttgggtagggtggctatgctggactttgcagcttcaaatt

SEQ ID NO: 14382 - DNA, 120 bp, synthetic construct
  misc_feature 1..120: note = Artificially Synthesized Probe
  source 1..120: mol_type = other DNA
gctgtgcttttatctgtcatcttggacttctgcataagggatcatttagagaaaggactctgactaaaaacaaaaagtctgaagtcctgatgtcatccaaacccttcattctacacctgc

SEQ ID NO: 14383 - DNA, 120 bp, synthetic construct
  misc_feature 1..120: note = Artificially Synthesized Probe
  source 1..120: mol_type = other DNA
ggtatccattcattcacttcactcaacagctgtttatgaccatgagcttcagaagcagacagatctgggtttcagcactggcttgtttccttaactcatgtaacaaatactgaataccca

SEQ ID NO: 14384 - DNA, 120 bp, synthetic construct
  misc_feature 1..120: note = Artificially Synthesized Probe
  source 1..120: mol_type = other DNA
tcttttgccagcttgctgtgtgactatgcaaatcgttaactctctgggcctaaatgaactcttatgagcctctccatttctaaagcctagggttaggaatcttgaattcttttttctgct

SEQ ID NO: 14385 - DNA, 120 bp, synthetic construct
  misc_feature 1..120: note = Artificially Synthesized Probe
  source 1..120: mol_type = other DNA
catctgtttcctttaaggagggtgcaaagttgttctaacagtttccgttacaagggtacaaactggccgctccccccaatagacggttttgttgagttcgcctctttttttttcttcttt

SEQ ID NO: 14386 - DNA, 120 bp, synthetic construct
  misc_feature 1..120: note = Artificially Synthesized Probe
  source 1..120: mol_type = other DNA
cataaaatggcgatggtaattatactagcctcacagtgtctgatgagatctctggagcctatttatctcacgggaaaatttttgaagagtgaaactagttgatctgtaagtgtcctgcca

SEQ ID NO: 14387 - DNA, 120 bp, synthetic construct
  misc_feature 1..120: note = Artificially Synthesized Probe
  source 1..120: mol_type = other DNA
ttccattcattcagaacacaggtttaagatgcctatttgtgttctaggccctgggatatagttgtgatgtaaagcccctgcccttagcaacttaaataagcaatagcaataacggcaata

SEQ ID NO: 14388 - DNA, 120 bp, synthetic construct
  misc_feature 1..120: note = Artificially Synthesized Probe
  source 1..120: mol_type = other DNA
gaaaagggcacacgccaaataatagcaaccacaacacagatttgagtagaacttcacactttggtctgtttcaccatcatgacaattttgtgagataggaaaaaaaaaaagtctgctccc

SEQ ID NO: 14389 - DNA, 120 bp, synthetic construct
  misc_feature 1..120: note = Artificially Synthesized Probe
  source 1..120: mol_type = other DNA
agcacagtgcttggtgcctagctcagtatgttcataaatgaatgaatgttgttgaatgtatgtcaacaccctagggatgttagattcacataatgatgtgtaccttttatccctgtacca

SEQ ID NO: 14390 - DNA, 120 bp, synthetic construct
  misc_feature 1..120: note = Artificially Synthesized Probe
  source 1..120: mol_type = other DNA
caaaaagaaatctaacagtaaatgcgatttaattatcatccccccacttccaatgctcaagccatcagagtatatccctaagttacccttcgttgctgctgtcgtctctgtcagtgacag

SEQ ID NO: 14391 - DNA, 120 bp, synthetic construct
  misc_feature 1..120: note = Artificially Synthesized Probe
  source 1..120: mol_type = other DNA
ctcctcaaagtttcttttctcccattctctgttgaacccagtctaggtagacttctctctcttccactccattgaaatagcccttgtcaaagtcaccagttactttcacattgttaaatc

SEQ ID NO: 14392 - DNA, 120 bp, synthetic construct
  misc_feature 1..120: note = Artificially Synthesized Probe
  source 1..120: mol_type = other DNA
ctcattttattaaatggcaattcttttcttccagttactcaaccaaaattctggtttttctttactccacaggccctcttcaatgccatcatcccagatcaccatgcagaagccttctct

SEQ ID NO: 14393 - DNA, 120 bp, synthetic construct
  misc_feature 1..120: note = Artificially Synthesized Probe
  source 1..120: mol_type = other DNA
ttgagtgatccatactgaatttattcattcaatgactatttagggttattctttatgccagactctgggtcagacctctaaggatgaaacataaataagacaaaattgcggccaggcgcg

SEQ ID NO: 14394 - DNA, 120 bp, synthetic construct
  misc_feature 1..120: note = Artificially Synthesized Probe
  source 1..120: mol_type = other DNA
aaagtattatggaggcgaagaagtaggtaactcactggagtacttgagaaaggcatcatatttcagctgggtcctgaagaatgagattttccatataagaagcagaggaggaacattcta

SEQ ID NO: 14395 - DNA, 120 bp, synthetic construct
  misc_feature 1..120: note = Artificially Synthesized Probe
  source 1..120: mol_type = other DNA
ccacctcaggttcccaatccccaaatcaatatcacagagtttagagtccaggccctcggctaaaattagaccccatagagtttctagtattaattggcccattattttaatagtaattaa

SEQ ID NO: 14396 - DNA, 120 bp, synthetic construct
  misc_feature 1..120: note = Artificially Synthesized Probe
  source 1..120: mol_type = other DNA
tcaatttattgaagtgtaaatttcatcaaaggcattagctgacaggctggtaacagtccacacaagatggtataggcctgaacagtgtagtggcagtaataaagtgggaccattttttcc

SEQ ID NO: 14397 - DNA, 120 bp, synthetic construct
  misc_feature 1..120: note = Artificially Synthesized Probe
  source 1..120: mol_type = other DNA
atgctaatgtagaggcttaaatgtgtgattttaggagaaaatatccagttctcctgttttcagcaattagaagaaactcctcctccaccgagtgcaactcttgggagtaatttaggtggt

SEQ ID NO: 14398 - DNA, 120 bp, synthetic construct
  misc_feature 1..120: note = Artificially Synthesized Probe
  source 1..120: mol_type = other DNA
tggacaaggttttctctctgaccttgcagggatttagttgttctctaaggagctaaggaatgggctgattttatgaccagcagctgtccttttaccatcctattaacagtctctttaata

SEQ ID NO: 14399 - DNA, 120 bp, synthetic construct
  misc_feature 1..120: note = Artificially Synthesized Probe
  source 1..120: mol_type = other DNA
tagtgaaaatagtgacatacaaaaatatacacattttaacaccatataaattactgacacgagacacacagtgagacggtgcagggagtacggtaggaactggagaggtaataacttagg

SEQ ID NO: 14400 - DNA, 120 bp, synthetic construct
  misc_feature 1..120: note = Artificially Synthesized Probe
  source 1..120: mol_type = other DNA
ggggataccttggagcccctggaggagcgagagggcagcggctccatcccttcaaagcggactttgtggcggaactgggggcggcacaggggctcagtcagtccggctgcaccctgggca

SEQ ID NO: 14401 - DNA, 120 bp, synthetic construct
  misc_feature 1..120: note = Artificially Synthesized Probe
  source 1..120: mol_type = other DNA
cagcgcccttccctgtgccaagtacgggcctcggccacggcgaagtgcacggcgaacagcagcaggcacacctgtggggggcgcggtcaggagggcgggagggacgctgccggggcgggg

SEQ ID NO: 14402 - DNA, 120 bp, synthetic construct
  misc_feature 1..120: note = Artificially Synthesized Probe
  source 1..120: mol_type = other DNA
tcatatacagagaaggaaacggcggtgttaagagggcaaaggtcacacagctagggagcagggctgatgccagagctccgctaaaggctgctctctcaacaagaggaacgatttaagtct

SEQ ID NO: 14403 - DNA, 120 bp, synthetic construct
  misc_feature 1..120: note = Artificially Synthesized Probe
  source 1..120: mol_type = other DNA
atgccagcagcacctacctccagttctagcagccacaaaggtatctacacatgtccacatgtcccctagggtctggctggactaaaggcaaaactaaagcccagaagacagaccagtgca

SEQ ID NO: 14404 - DNA, 120 bp, synthetic construct
  misc_feature 1..120: note = Artificially Synthesized Probe
  source 1..120: mol_type = other DNA
ctctgtcttctccccaggagtgctggacctgagggacatggtaggctgtgaattcatcccggcctccaggaggcagttgcagccaagcccatgttaacctgggcgggcagtttcttgagc

SEQ ID NO: 14405 - DNA, 120 bp, synthetic construct
  misc_feature 1..120: note = Artificially Synthesized Probe
  source 1..120: mol_type = other DNA
tacctgcgccctcgtcagcccatcaccgaaagaacggcctgacccagggtcacactgcactgaatgcttcctgttttgctgtctctcggaggataaaagacactcttggctgggcgcagt

SEQ ID NO: 14406 - DNA, 120 bp, synthetic construct
  misc_feature 1..120: note = Artificially Synthesized Probe
  source 1..120: mol_type = other DNA
tttttgtttgagtccaggggcagttcatacctctttagttcttggttgcttaacaatgagaagcactcaaaggaataacacacaaatcaaactagatgtggatgcaaaagcagcagtcac

SEQ ID NO: 14407 - DNA, 120 bp, synthetic construct
  misc_feature 1..120: note = Artificially Synthesized Probe
  source 1..120: mol_type = other DNA
cggccaaaaatggggtatttaaaaacccgcccataatttctcactgctctgagaccaagataaaaacgtggccccggccagcctcacacaggagcctttctgctcctacaaagccccatg

SEQ ID NO: 14408 - DNA, 120 bp, synthetic construct
  misc_feature 1..120: note = Artificially Synthesized Probe
  source 1..120: mol_type = other DNA
atgggacatctgcaccgtccgtgatggcagcccctcgcgacgtgtgccactgaacacttgacagcagactggtgcagctaaggaacagagttttaaatttcatattttcttttttagatg

SEQ ID NO: 14409 - DNA, 120 bp, synthetic construct
  misc_feature 1..120: note = Artificially Synthesized Probe
  source 1..120: mol_type = other DNA
ctgggacgtttctaagggactaactcagcctcttcacttcctatagatgtactgagattttcttctggagtgcatttcggaagcgtgcacagccgcgtgcttgcttcttctgagttatct

SEQ ID NO: 14410 - DNA, 120 bp, synthetic construct
  misc_feature 1..120: note = Artificially Synthesized Probe
  source 1..120: mol_type = other DNA
atgcgagtgaaacggctacgaggcggccggtcccatatggagagccagatgtgcttgtcaaagaagccacgctgcagctcagccaccagcaggcgccggaagcgcaaaagggctgcgtcg

SEQ ID NO: 14411 - DNA, 120 bp, synthetic construct
  misc_feature 1..120: note = Artificially Synthesized Probe
  source 1..120: mol_type = other DNA
tacacaaggagctgcggttactgcaatttgtccaattaacagcaggacctcaaggacatgattaagttacatggaaagaactgtaacttgtgacatgcaaacatggctgcacacgcctca

SEQ ID NO: 14412 - DNA, 120 bp, synthetic construct
  misc_feature 1..120: note = Artificially Synthesized Probe
  source 1..120: mol_type = other DNA
aaaaacgaaaacaaaaagggaatgccagaagggcaattccaatgaaaggaaaatggaggtactgaagaaacagccacggggagggtgctggcgcctccgtctgagagacgagctatgcag

SEQ ID NO: 14413 - DNA, 120 bp, synthetic construct
  misc_feature 1..120: note = Artificially Synthesized Probe
  source 1..120: mol_type = other DNA
ctcattgggccggggctccgagtgtaggtagactgccaggtagggctcaggttcctcagacaggtagtggcctggggcagaacgcgcaggtcacacgcctgccgggaagctcaaccaccc

SEQ ID NO: 14414 - DNA, 120 bp, synthetic construct
  misc_feature 1..120: note = Artificially Synthesized Probe
  source 1..120: mol_type = other DNA
gtagagaaaagagaagggagaagaagaggagcagggggaaagggaggggaagggggataagggaggggaagggggatgagggggatgaggaagatgaggggaatggacaaaaggacgggg

SEQ ID NO: 14415 - DNA, 120 bp, synthetic construct
  misc_feature 1..120: note = Artificially Synthesized Probe
  source 1..120: mol_type = other DNA
acctcttcacatgagagcggaggaggaggggagagaggagaggggagtggagaaaaaggggaggggaggaggggaagggctgggggggaagaagggaaagggctaggggaggggaggagg

SEQ ID NO: 14416 - DNA, 120 bp, synthetic construct
  misc_feature 1..120: note = Artificially Synthesized Probe
  source 1..120: mol_type = other DNA
cccaggctgcactcacctcgttcagcacggtgaccagggccaacgagtactcgatgacgtgctggggatcggcctgccgcagcagccctgggagcacactagcggtgagcccgtgcagcc

SEQ ID NO: 14417 - DNA, 120 bp, synthetic construct
  misc_feature 1..120: note = Artificially Synthesized Probe
  source 1..120: mol_type = other DNA
gaggcagcggccctccaagtacacgtaggagctgcggctcacttcgtacacggcctgtgccttgcaggacacacactccaaggacacaatgggcacccggccactccggatcagcacctg

SEQ ID NO: 14418 - DNA, 120 bp, synthetic construct
  misc_feature 1..120: note = Artificially Synthesized Probe
  source 1..120: mol_type = other DNA
tgtagcttttgccactagagcatatgtggcttgaagactgtacgtggaactgtggcaggtttggaaggaagcaaagctgaagcaggctgtcgtgttacatagaatttgcatcagaaacag

SEQ ID NO: 14419 - DNA, 120 bp, synthetic construct
  misc_feature 1..120: note = Artificially Synthesized Probe
  source 1..120: mol_type = other DNA
ctgcacgcggtagtccccaggcctcaggtaggagtgctcggccctgggctcatctgtgtcctgccctggcgacccatccccaaagtcccagtggtaggccacacgccgggggctggggct

SEQ ID NO: 14420 - DNA, 120 bp, synthetic construct
  misc_feature 1..120: note = Artificially Synthesized Probe
  source 1..120: mol_type = other DNA
cttccacggtggcgttggctgagcccagcgggttccctgccgtcatggtgaccaagtgcaggccgggtgtggggaagctatgggtggtaaatggctcggaggtctcccagctcagcccct

SEQ ID NO: 14421 - DNA, 120 bp, synthetic construct
  misc_feature 1..120: note = Artificially Synthesized Probe
  source 1..120: mol_type = other DNA
gatgctggtgaccagcacgggctcctgcacctccaccagggctgagtcattggcagcagagatgttgttggacgcggtgactgtcacaagataggagcctgggtctcggtagatgaacgt

SEQ ID NO: 14422 - DNA, 120 bp, synthetic construct
  misc_feature 1..120: note = Artificially Synthesized Probe
  source 1..120: mol_type = other DNA
ggccaccaggacgccgtcactcacacccacagccacggagggcagggaggcgcgcacgctcacaggcacctgctgcgtcaggttctcgaaggcattagatgccagcacggtcaggaggta

SEQ ID NO: 14423 - DNA, 120 bp, synthetic construct
  misc_feature 1..120: note = Artificially Synthesized Probe
  source 1..120: mol_type = other DNA
ggctggggctgggacaagagcctggtgcccaccccaaaccggcccccgagtcactcacaggaaggccacctccacggccgagtccaccagcacgcccgccgtcagtgctagcgtggcatt

SEQ ID NO: 14424 - DNA, 120 bp, synthetic construct
  misc_feature 1..120: note = Artificially Synthesized Probe
  source 1..120: mol_type = other DNA
gagggcgtgagagactcacgggggctcgtgtgaggtcagggagcagagttttaaattcattttgtgaaatgagacagtggaatgagttagcggagccactgtcagagccgtgactttcca

SEQ ID NO: 14425 - DNA, 120 bp, synthetic construct
  misc_feature 1..120: note = Artificially Synthesized Probe
  source 1..120: mol_type = other DNA
tccgtggctgcaagcagccgcagggcacaggcagggcaggcccaagtgccctccagctgggctggcaagtggggcagccatgacgaggcgttggcggagaggtacggggcccggggacca

SEQ ID NO: 14426 - DNA, 120 bp, synthetic construct
  misc_feature 1..120: note = Artificially Synthesized Probe
  source 1..120: mol_type = other DNA
agatgcccaactgcctgcaccagcaatcctggccttgctgtgaggacaggtctccccacctgggcagcactcccagcccagtgctgcgtccgtctccggccagccgactgacccaggccg

SEQ ID NO: 14427 - DNA, 120 bp, synthetic construct
  misc_feature 1..120: note = Artificially Synthesized Probe
  source 1..120: mol_type = other DNA
aaaaggcctggaggtaatgtgagtaaacgctttcctctctgcactctggattttcccaaccatcttcactgggcacaagcaacattaaggcccccaagttttttggcgagacccacagtg

SEQ ID NO: 14428 - DNA, 120 bp, synthetic construct
  misc_feature 1..120: note = Artificially Synthesized Probe
  source 1..120: mol_type = other DNA
gtgtccgaggggcagagcgggtgcaccgctggagaccggtgggaacgagggtgtcaacggtcagtgtgggcccaagacgggggtaccaggctctgccccatctggatggccctggggagg

SEQ ID NO: 14429 - DNA, 120 bp, synthetic construct
  misc_feature 1..120: note = Artificially Synthesized Probe
  source 1..120: mol_type = other DNA
cccacctggctgggaaggacagagctggccccacccaccggcactcaccacagccactgtccagcaaggggatgccaagcagaggctggccagccagggagccaggcccagcacacgtgg

SEQ ID NO: 14430 - DNA, 120 bp, synthetic construct
  misc_feature 1..120: note = Artificially Synthesized Probe
  source 1..120: mol_type = other DNA
cctatgccgagtgccacatggacctgtccacccagggccaggaagggcacggacccccaacccatcccacgcagggccaaggccccccatcccctgtccacagtcccccacagagccaag

SEQ ID NO: 14431 - DNA, 120 bp, synthetic construct
  misc_feature 1..120: note = Artificially Synthesized Probe
  source 1..120: mol_type = other DNA
actagcaacttacacgacatactaaaggccaaaaataccctcctgacacacagctaataaagaaaacgtcaactattccagttaaaaagaagaaaaggaaactgggtgtggtggcttatg

SEQ ID NO: 14432 - DNA, 120 bp, synthetic construct
  misc_feature 1..120: note = Artificially Synthesized Probe
  source 1..120: mol_type = other DNA
aaaacaaaaaaagaaaaaccaggcaattagaagaagcacaattggtcacagccgtaggaaaaacatcccatgtcagtagtcagtgaagaaaaagcaacagaaaccacagggcggcagcat

SEQ ID NO: 14433 - DNA, 120 bp, synthetic construct
  misc_feature 1..120: note = Artificially Synthesized Probe
  source 1..120: mol_type = other DNA
caggctctcgcacctgcccccaggcatggggagcagctcccacccaggccacgggagaaaggaaagaaggaaaagcctgaagatgtttggccacacctcattttctggaaaatccatcaa

SEQ ID NO: 14434 - DNA, 120 bp, synthetic construct
  misc_feature 1..120: note = Artificially Synthesized Probe
  source 1..120: mol_type = other DNA
ggcagcctcgcgccagcccccccaccccgcccctcgggcttcctctgcacccgccaggtgacatcatcgccgctgtctgatgccctgcccccacgttctggttccctgcaaggatggggg

SEQ ID NO: 14435 - DNA, 120 bp, synthetic construct
  misc_feature 1..120: note = Artificially Synthesized Probe
  source 1..120: mol_type = other DNA
gcaacagtgggactgaggagaacttccctgggtgtggggcagctcccggggccctcccaatccacagcagagggaatggccccagacaaaccagacctgcctcagagtctcacactcaga

SEQ ID NO: 14436 - DNA, 120 bp, synthetic construct
  misc_feature 1..120: note = Artificially Synthesized Probe
  source 1..120: mol_type = other DNA
gagatgagaaaggggagtctgcgatgtccttgcctacacagatggaaaaacacagccagctcaaaaagggccgtctggagacgagcccacctgtggggtgtaggaaggagagcgcttcat

SEQ ID NO: 14437 - DNA, 120 bp, synthetic construct
  misc_feature 1..120: note = Artificially Synthesized Probe
  source 1..120: mol_type = other DNA
gacagcagcgggatgttttcattccagggtgcttggcgggctgggctgccgtggccactgcagagctccagaaaagaacatgtgtgtctccctccaaagtatattccttgctggaaagca

SEQ ID NO: 14438 - DNA, 120 bp, synthetic construct
  misc_feature 1..120: note = Artificially Synthesized Probe
  source 1..120: mol_type = other DNA
gacagagctactttaacaaggtatgattgttggggctgccagtggctgagccaggtcactgctacactgccctgcagggtgcatctaatcatggagcccactttacaggtgaggaaactg

SEQ ID NO: 14439 - DNA, 120 bp, synthetic construct
  misc_feature 1..120: note = Artificially Synthesized Probe
  source 1..120: mol_type = other DNA
catgctgatgaaatcatcaccacggcttctcaaagagcctcaatttcctggtgtgtaaaatgagaccaggagtggctgcaaccctgcggtgccgtgatgaggtatggagagacaagaaca

SEQ ID NO: 14440 - DNA, 120 bp, synthetic construct
  misc_feature 1..120: note = Artificially Synthesized Probe
  source 1..120: mol_type = other DNA
gatttacgtttccctcatgactaatgaggccgaccatcttctcacacgctgttggccatctgtgcgtcttctttggagaaatctctgttcagatcctgtgattttttttttttttttttt

SEQ ID NO: 14441 - DNA, 120 bp, synthetic construct
  misc_feature 1..120: note = Artificially Synthesized Probe
  source 1..120: mol_type = other DNA
ctttgaaacctggcttcaatgtcacctgcactgggggtccttccaggccagccccctccccatcatccatctctgtccttggagaatcatctgcgtgttggttgaacgcgggctccagtg

SEQ ID NO: 14442 - DNA, 120 bp, synthetic construct
  misc_feature 1..120: note = Artificially Synthesized Probe
  source 1..120: mol_type = other DNA
ccaagacacagcgagaaatccaggctgcaggagccagtttcttcaacaaattgcacaaggaaaaagagaggaagggaagctcctagacatcatcggacatttaaaagacaggcggtggct

SEQ ID NO: 14443 - DNA, 120 bp, synthetic construct
  misc_feature 1..120: note = Artificially Synthesized Probe
  source 1..120: mol_type = other DNA
aagaaaaaaaaaaagacatcaactaattgcagtgtgtggaccttatttggctcttaattcaaactattaaaccaaaaatgtgaacacaccaggccttcggtggcatgaaggaactgtctg

SEQ ID NO: 14444 - DNA, 120 bp, synthetic construct
  misc_feature 1..120: note = Artificially Synthesized Probe
  source 1..120: mol_type = other DNA
agggagccacaagtggagaggcacctgcgtgagccccccaggaaggctactggtgacacccagacagcaacgctcttggacccttgaacacctgccagcagctgtgatctgtgtccttca

SEQ ID NO: 14445 - DNA, 120 bp, synthetic construct
  misc_feature 1..120: note = Artificially Synthesized Probe
  source 1..120: mol_type = other DNA
aggcgggagtgacccagaaacgttacaaaaccaaatgccagaacccacccaatgtttagcaagcctggggatgtgccacgtcccccagggatccagcacgcacccaaggagacactgtcc

SEQ ID NO: 14446 - DNA, 120 bp, synthetic construct
  misc_feature 1..120: note = Artificially Synthesized Probe
  source 1..120: mol_type = other DNA
gggccgccgtgccgcgccggagcctcgccctgggagcgtcctggcccgcgtcctgcttcccgtcccgggccagggaacgcgcccacgcccgcccgtcccgcggcctctcccgggtgccgc

SEQ ID NO: 14447 - DNA, 120 bp, synthetic construct
  misc_feature 1..120: note = Artificially Synthesized Probe
  source 1..120: mol_type = other DNA
agggggcgccgcggcaggtgaacggcgtgggaggggcgcgcgggcccggggggtgcgagaaagcctctgtcatcgccccggagccccgaaccgcggccgcttcccccgatcctcccctca

SEQ ID NO: 14448 - DNA, 120 bp, synthetic construct
  misc_feature 1..120: note = Artificially Synthesized Probe
  source 1..120: mol_type = other DNA
ggctcaggagaagatggaacacagagaggtaagatggggttcctgcaacagcccgtgttgcggggcatcatgggttacccggcctgaggtcacctttggcaccggttggtttgaaatgct

SEQ ID NO: 14449 - DNA, 120 bp, synthetic construct
  misc_feature 1..120: note = Artificially Synthesized Probe
  source 1..120: mol_type = other DNA
aagaaaaaagaaaatgggggtaatgaccaccgctaccgggtggggtggctgggaggagtgatgtggtaatatatgcaaagcacttagaatagaacctggcacccatttaccgtgtgaact

SEQ ID NO: 14450 - DNA, 120 bp, synthetic construct
  misc_feature 1..120: note = Artificially Synthesized Probe
  source 1..120: mol_type = other DNA
cagcatgatgtccagaactgggcctcagtccttgtctgacaagaagacttggctgtggccctgatatgatgacggaggcaggaccttagccttgatctaatgggggaggcttagcttagc

SEQ ID NO: 14451 - DNA, 120 bp, synthetic construct
  misc_feature 1..120: note = Artificially Synthesized Probe
  source 1..120: mol_type = other DNA
aagaggaaatttgaccccagcccttgttggtcagatggaaaaggctcccctgacccaccaactagtccaacaagggaggcttgactttagtgtttggcctagaggtttcactttaaccct

SEQ ID NO: 14452 - DNA, 120 bp, synthetic construct
  misc_feature 1..120: note = Artificially Synthesized Probe
  source 1..120: mol_type = other DNA
agcgtagcttgtatttacataaataaccagaataatgcttaaagcactggtgttaggaagctcgcagccctggaaagcttgatacccagcactgggcagcttggactgttagaaagtttt

SEQ ID NO: 14453 - DNA, 120 bp, synthetic construct
  misc_feature 1..120: note = Artificially Synthesized Probe
  source 1..120: mol_type = other DNA
ggaggctgaggcaagagaattgcttgaacctgggaggcagaggttgcagtaagccaagattgcactgttgcactccagcgtgggtgacacagcaaaactctttcaagaaaaaaaaaaaaa

SEQ ID NO: 14454 - DNA, 120 bp, synthetic construct
  misc_feature 1..120: note = Artificially Synthesized Probe
  source 1..120: mol_type = other DNA
ggcaccattggaatccagcctgggcaacaagagcaaaactctgtctcaaaaaaaaaaaaaatttgcaaaaattagctgggtgtggtggcgggcgcctgtagtcccagctactcgggaggc

SEQ ID NO: 14455 - DNA, 120 bp, synthetic construct
  misc_feature 1..120: note = Artificially Synthesized Probe
  source 1..120: mol_type = other DNA
ggaacgcagaagaaacagcttgttaaaaggcctagaagtcaactactcaaggccaccccatatcctgtcccctggctaaacaccccagatacttgagttgtccttttttttttttgagat

SEQ ID NO: 14456 - DNA, 120 bp, synthetic construct
  misc_feature 1..120: note = Artificially Synthesized Probe
  source 1..120: mol_type = other DNA
gctggagtgcagtggcataatcttgactcactgcaacctccgcctcccaggttcaagcgattctcctgcctcagcctcccaagtagttgggattacaggcgcccaccgccatgcccggct

SEQ ID NO: 14457 - DNA, 120 bp, synthetic construct
  misc_feature 1..120: note = Artificially Synthesized Probe
  source 1..120: mol_type = other DNA
gcttcgtgtcctcaaaagctgctagatccccactgctttctctaccctttgagggacaaccctctagtgacgtgacacatgaacttactccgttgacaaaacacgtttcatatccattgg

SEQ ID NO: 14458 - DNA, 120 bp, synthetic construct
  misc_feature 1..120: note = Artificially Synthesized Probe
  source 1..120: mol_type = other DNA
aaagtgcctctcctccctgggcctctgtttctccactagtatcaatgaggacattgaatctgtttctctgggtctttctggctcttgcatctgttgaccctgggggcttgggctgtaatc

SEQ ID NO: 14459 - DNA, 120 bp, synthetic construct
  misc_feature 1..120: note = Artificially Synthesized Probe
  source 1..120: mol_type = other DNA
tctcactttgggttggtgtgtccatcctgccagctcttgcgtctgcctgtgctgggcactgtgtctactttctccctacagtaatttcctgcccaagaagacccccttgggtgaagagat

SEQ ID NO: 14460 - DNA, 120 bp, synthetic construct
  misc_feature 1..120: note = Artificially Synthesized Probe
  source 1..120: mol_type = other DNA
gttaactgtgtttccttgggcaggtcccctcttctctctgtcagtttgctctactgtaaaatgggggcattggtggctgtgcacgttcagagctccttgtgagcccctgacatatagaaa

SEQ ID NO: 14461 - DNA, 120 bp, synthetic construct
  misc_feature 1..120: note = Artificially Synthesized Probe
  source 1..120: mol_type = other DNA
aaaaatgaaaagaaaccatcagtctacttgcctggcactttggctgagggcccagtgagccaggggtgttgtgcagggcacagggcacagcccagggaaagttttccttccctctaatac

SEQ ID NO: 14462 - DNA, 120 bp, synthetic construct
  misc_feature 1..120: note = Artificially Synthesized Probe
  source 1..120: mol_type = other DNA
tgattggccgggcacctgtaatcccagcactttggaggctgaggcgggtggatcacctgaggtcaggagttcgtgacctggccaacatggtaaaatcttgtctctactaaaaatacaaaa

SEQ ID NO: 14463 - DNA, 120 bp, synthetic construct
  misc_feature 1..120: note = Artificially Synthesized Probe
  source 1..120: mol_type = other DNA
tgtcttgggcctgagttctcccataaccacccctgcagcttctacgtggcttgtgttgtcctggggctgcagttcttacacgagaagaagatcatttacaggtgacttttgtcccaggga

SEQ ID NO: 14464 - DNA, 120 bp, synthetic construct
  misc_feature 1..120: note = Artificially Synthesized Probe
  source 1..120: mol_type = other DNA
ctctgcatgcagtcaaatggcgtcataaccattcccacttccttgggtacagggcagggcttggcacaggctcagctccctggcatcataaggcttggctattgaagttattgtgaatag

SEQ ID NO: 14465 - DNA, 120 bp, synthetic construct
  misc_feature 1..120: note = Artificially Synthesized Probe
  source 1..120: mol_type = other DNA
gcctctcctttgccctcagaccaccaactggcaagccctgctcgcccgcaccatccagccccccttcgtgcctaccctgtgtggccctgcggacctgcgctactttgagggcgagttcac

SEQ ID NO: 14466 - DNA, 120 bp, synthetic construct
  misc_feature 1..120: note = Artificially Synthesized Probe
  source 1..120: mol_type = other DNA
gtactttaagttgtactcagtttgggctaagcagttagcaatctcctggtcacacttgcacaacagttcttggcatttgttctctgccggtcctggaagaagtggggaaactgagattag

SEQ ID NO: 14467 - DNA, 120 bp, synthetic construct
  misc_feature 1..120: note = Artificially Synthesized Probe
  source 1..120: mol_type = other DNA
atcatatacctagaaaatcctagagactcctccaaaagactcctagatttgaccaatgaattcaataaagtctcaggttacaaaccagtagcactgctatacatcaataaggactaagct

SEQ ID NO: 14468 - DNA, 120 bp, synthetic construct
  misc_feature 1..120: note = Artificially Synthesized Probe
  source 1..120: mol_type = other DNA
gaggttcagtgtttgagaccagcctgaccaacatggagaaacctcgtctctactaaaaatacaaaattagctgggcgtagtggtacatgcctgtaatcccagctacttggtaagctgagg

SEQ ID NO: 14469 - DNA, 120 bp, synthetic construct
  misc_feature 1..120: note = Artificially Synthesized Probe
  source 1..120: mol_type = other DNA
aaaaaaaagtgggcacatgacatgaatagacatttctcaaaatatatataaatgaccagcaaatgaaaaaatgtttaacataactcgtcatcggggaactgcaaattaaaaccacaatga

SEQ ID NO: 14470 - DNA, 120 bp, synthetic construct
  misc_feature 1..120: note = Artificially Synthesized Probe
  source 1..120: mol_type = other DNA
tgtattgggtttgaatcagaaaaagtatgcaaatgaatggttgaatgaatggtgggatagatggatccctcatcatgcactcctgcttcttgttaccagggcaaaattctcacaacacaa

SEQ ID NO: 14471 - DNA, 120 bp, synthetic construct
  misc_feature 1..120: note = Artificially Synthesized Probe
  source 1..120: mol_type = other DNA
taaacataatatgtgcgaaaattagtcatagaaccagccagtgcaggaacaagccttcctgcctgtaagctttccatgggctgctgcacaacagaaaccctcagagaaatatgatgtagt

SEQ ID NO: 14472 - DNA, 120 bp, synthetic construct
  misc_feature 1..120: note = Artificially Synthesized Probe
  source 1..120: mol_type = other DNA
ccgggagactttctctcaccccaaccactctcagtaacagagaaatcctcaccatgcactcctgctttttgttattggggcaaaattctcacaacctaaaatttaccatattaaaatgta

SEQ ID NO: 14473 - DNA, 120 bp, synthetic construct
  misc_feature 1..120: note = Artificially Synthesized Probe
  source 1..120: mol_type = other DNA
gaagtcatatgatatacgtgacctcttttttgtattcctaacatagcaacagaaagcctatatacatgacctcttatgtctggctctgttcactcgatgctgtatttcttcttcctttct

SEQ ID NO: 14474 - DNA, 120 bp, synthetic construct
  misc_feature 1..120: note = Artificially Synthesized Probe
  source 1..120: mol_type = other DNA
catccatgttgtagcaggtatagtaattcacctgctttatctctcaacacaatagttacaaagcacttggcgcacacactacttccctgtctcctcctttttaacaatacctcgtggctc

SEQ ID NO: 14475 - DNA, 120 bp, synthetic construct
  misc_feature 1..120: note = Artificially Synthesized Probe
  source 1..120: mol_type = other DNA
tattttataaatatcattttcacctgggtaggagcaagcagaataggcaagttgaagggagaaaggaaagattttcaacagatttcccactgaagcctcatttcacctcctcatcaccca

SEQ ID NO: 14476 - DNA, 120 bp, synthetic construct
  misc_feature 1..120: note = Artificially Synthesized Probe
  source 1..120: mol_type = other DNA
ttaatcaagagttggaacagatctttgattctctccaggagttagcaggggtcagagagaagttcagataaagataggaggaggagatagaagaaaaattcccatccaatctgtttctca

SEQ ID NO: 14477 - DNA, 120 bp, synthetic construct
  misc_feature 1..120: note = Artificially Synthesized Probe
  source 1..120: mol_type = other DNA
tggatcaatgacctaaatattagagttaaatatgataaacctattagaagaaaacttaacggtaaatatttataactttggatttggcagtggattctaaggacaccaaaaacacgagca

SEQ ID NO: 14478 - DNA, 120 bp, synthetic construct
  misc_feature 1..120: note = Artificially Synthesized Probe
  source 1..120: mol_type = other DNA
ccgtatgacccagcaattccactcctaggtatatactccaaaatattgaaaccaggtactcaaataagtatttgttcatgaatgttcatagcagcactattcacataagccaaaaggtgg

SEQ ID NO: 14479 - DNA, 120 bp, synthetic construct
  misc_feature 1..120: note = Artificially Synthesized Probe
  source 1..120: mol_type = other DNA
agggaggaatgggaacggattgcttaaggggaaagggatttttcgaggcagagtgatgaaaaagtttaggtggtggttggatgacattgtgaatatactaagtatcactgaattatacac

SEQ ID NO: 14480 - DNA, 120 bp, synthetic construct
  misc_feature 1..120: note = Artificially Synthesized Probe
  source 1..120: mol_type = other DNA
ggccagatgcagtggctcacacctgtaattccagcactttgagaggctgaggcgggtggatcacttgaggtcaggagtacaagaccagcctgaccaacatggcaaaacctcatctctact

SEQ ID NO: 14481 - DNA, 120 bp, synthetic construct
  misc_feature 1..120: note = Artificially Synthesized Probe
  source 1..120: mol_type = other DNA
atgccatttctatcttcttccttgtcgtccagacatcaaataattaggtttcttcatggttttctttttcaagtcctcattgttaaagatcactcacattagggccagacaccatgcctc

SEQ ID NO: 14482 - DNA, 120 bp, synthetic construct
  misc_feature 1..120: note = Artificially Synthesized Probe
  source 1..120: mol_type = other DNA
cccctgcctctggaggtcatccaggcctcaccaggctacaccctctcataaaatcggattccctcccttcagggtaggtttataatgaaaccctccttagaggccaggtgcggtgacacc

SEQ ID NO: 14483 - DNA, 120 bp, synthetic construct
  misc_feature 1..120: note = Artificially Synthesized Probe
  source 1..120: mol_type = other DNA
gtgtgtgtgtgtgtgtgtgtgtgtgtgtgtgtgtgtgtgtttaatatagagacagggtctcactatgttgcctaggctggtttcaaactcctggtctccagtgatattactgcttcgacc

SEQ ID NO: 14484 - DNA, 120 bp, synthetic construct
  misc_feature 1..120: note = Artificially Synthesized Probe
  source 1..120: mol_type = other DNA
ttggacaaattcttaacctctctgggccttggtttcctcatctgtgaaatgggggataaactgacttcaactcatatgaatgaaatgagataatgagtataaagcccctggtgcatgaaa

SEQ ID NO: 14485 - DNA, 120 bp, synthetic construct
  misc_feature 1..120: note = Artificially Synthesized Probe
  source 1..120: mol_type = other DNA
gtagtaccagcaatagagtggaaactcacacacaggcttgcctgcttcctgggttagggttagggtttatacagctctgggaggttgacgcattgtgtttgatcatcttttttttttttt

SEQ ID NO: 14486 - DNA, 120 bp, synthetic construct
  misc_feature 1..120: note = Artificially Synthesized Probe
  source 1..120: mol_type = other DNA
tccaggccagattgaaattccattttgtctttttatcagtggaaaaagtagcatatttatgttggaggacaaagatgaatcaaagaggaagaaaatgtaaaacgcatttggggccgggcg

SEQ ID NO: 14487 - DNA, 120 bp, synthetic construct
  misc_feature 1..120: note = Artificially Synthesized Probe
  source 1..120: mol_type = other DNA
ggtacatgtatctgtgcaccccagaaatgggcagtcacccacgggacctctctacagtgaccccaaaggatggatagtgagatagggacagtatgttctattttttgtttttttgtttgt

SEQ ID NO: 14488 - DNA, 120 bp, synthetic construct
  misc_feature 1..120: note = Artificially Synthesized Probe
  source 1..120: mol_type = other DNA
gttattgaggccagagtttagagatcaagagacagagtgtttgtctttcaggaactcaatctaatggataattccatgtcaaggtgttaaaatgaggctgtaggagtgtagactatgggt

SEQ ID NO: 14489 - DNA, 120 bp, synthetic construct
  misc_feature 1..120: note = Artificially Synthesized Probe
  source 1..120: mol_type = other DNA
cctaggcacctttccaagtgctacaactttccaggtatcctcggggcagtcattgctgccacttgggtctccttttctccaagactgctactttttatttattgagcacctctttttttt

SEQ ID NO: 14490 - DNA, 120 bp, synthetic construct
  misc_feature 1..120: note = Artificially Synthesized Probe
  source 1..120: mol_type = other DNA
gccactgcacccagccaacgtgtttaaaaagttaatattagtaaactgttttaaaatacagtaccaactggtttagtcctcaaaacaagcccaaggagtgggcactattaggatttgcac

SEQ ID NO: 14491 - DNA, 120 bp, synthetic construct
  misc_feature 1..120: note = Artificially Synthesized Probe
  source 1..120: mol_type = other DNA
tttaaaaaagataaaatggcctcaaggtcacaaagctgtgttgtgctgaggtttttgtcaaaacccatgttctgatctttgctgtgtgactgtgggcatgttatttaacattgctggacc

SEQ ID NO: 14492 - DNA, 120 bp, synthetic construct
  misc_feature 1..120: note = Artificially Synthesized Probe
  source 1..120: mol_type = other DNA
tctgcttcctaaatacatctcaatattcaggtctatctccaatccagactctttgtggatgtcctttttgcattagtatctcagcccttgccatgtcttctgtttttgatatggagtctc

SEQ ID NO: 14493 - DNA, 120 bp, synthetic construct
  misc_feature 1..120: note = Artificially Synthesized Probe
  source 1..120: mol_type = other DNA
ttaagtaacttgtagaggttatgtagttactcagtttcagaactaggcttgaagcccaggcagtctgacaatagagaccctgccctgccataaattggatgatgataatgactgaattat

SEQ ID NO: 14494 - DNA, 120 bp, synthetic construct
  misc_feature 1..120: note = Artificially Synthesized Probe
  source 1..120: mol_type = other DNA
ataaacaaaagtatatgtgaattattattaaagccctcacacttgcaaagcttgggttctcactaatcctcacagcagctctgcgaaggagatggggcaggaaggagcaggaaggagcag

SEQ ID NO: 14495 - DNA, 120 bp, synthetic construct
  misc_feature 1..120: note = Artificially Synthesized Probe
  source 1..120: mol_type = other DNA
taagtctccacattcctaaaattaggatgatgttagtacctgactcacagggttgtgagagaatgaaatgagattatttgtatagaaatttatgtccagctccttcgggggagttgggga

SEQ ID NO: 14496 - DNA, 120 bp, synthetic construct
  misc_feature 1..120: note = Artificially Synthesized Probe
  source 1..120: mol_type = other DNA
gaaagcacttagggcctggtgtgtagttaggtgctcattaatgttagttattattattactaccactatagaggtttcaaaaaaataactaaacaagatggcatgggggggccgcgcatg

SEQ ID NO: 14497 - DNA, 120 bp, synthetic construct
  misc_feature 1..120: note = Artificially Synthesized Probe
  source 1..120: mol_type = other DNA
ggagaaatcagtgactagggaaatagtggcagtaggagtcctcagcttcagcctgaataacagctcctccacgtaggttttccaagaaccaggcccaaattccctctccagtctaattct

SEQ ID NO: 14498 - DNA, 120 bp, synthetic construct
  misc_feature 1..120: note = Artificially Synthesized Probe
  source 1..120: mol_type = other DNA
ctggcatacactttgtttgatgaataaataatactgacagtgtaccaacaccaggttataatccatcatcttctctcccccatcctcttccagaacaagaacaatatccccttctcagca

SEQ ID NO: 14499 - DNA, 120 bp, synthetic construct
  misc_feature 1..120: note = Artificially Synthesized Probe
  source 1..120: mol_type = other DNA
caccatacctcttaataaggtttcacctctttccacacatcctaccaaaccttcctatcaactcgtatgaaatgcatatgcctgtttctgttacacagatgaagaaacggaaactcagga

SEQ ID NO: 14500 - DNA, 120 bp, synthetic construct
  misc_feature 1..120: note = Artificially Synthesized Probe
  source 1..120: mol_type = other DNA
ggttgctacacccggtcttttaatagagtccgttcactttgcctccatcacctaagctccgtctcacatctcaattccttattccccctccctcatcctaaaccatacttagagccttca

SEQ ID NO: 14501 - DNA, 120 bp, synthetic construct
  misc_feature 1..120: note = Artificially Synthesized Probe
  source 1..120: mol_type = other DNA
gttatctgagccgcttaaacccattccttggacgtccaaccataagtgggaactagcctggatcgttaccctccagataactcttcggggaacttggaaccaataatcttgcctccatat

SEQ ID NO: 14502 - DNA, 120 bp, synthetic construct
  misc_feature 1..120: note = Artificially Synthesized Probe
  source 1..120: mol_type = other DNA
ataggccatggaccactactggtctgtgtccggagtgttggaatccctgttctagagactgcttgcaatccttgactagtggtacctccttccatctccaaaaccagcaagacagcctct

SEQ ID NO: 14503 - DNA, 120 bp, synthetic construct
  misc_feature 1..120: note = Artificially Synthesized Probe
  source 1..120: mol_type = other DNA
gggcatctttacttccattttcagccaagttcaaacaggacaaggttccatgaaaactatttgaaaagacagacagggattcttatattcccagaaccattcaaggccagtaactggaat

SEQ ID NO: 14504 - DNA, 120 bp, synthetic construct
  misc_feature 1..120: note = Artificially Synthesized Probe
  source 1..120: mol_type = other DNA
aaaggttagtgaagactctgtctttcaaaacataaaaatctgcgataaaaccaattattccatacagtgactacggtcagttctgagaaatgacacccaggttggcgatgtgtctcatgg

SEQ ID NO: 14505 - DNA, 120 bp, synthetic construct
  misc_feature 1..120: note = Artificially Synthesized Probe
  source 1..120: mol_type = other DNA
ccttctttcttcctgcagcaccctgagggctcgccatgtgccaagcacagtcagaaggctggggtgacagcaggttggagaaggacagacaatcaacaagtcaacagagaaccaagacag

SEQ ID NO: 14506 - DNA, 120 bp, synthetic construct
  misc_feature 1..120: note = Artificially Synthesized Probe
  source 1..120: mol_type = other DNA
ggtctttatccaagaaacactgtggctagaagtcagactctgggccctcttctaattaaactctgcccttgagtcatttcatctaatctcatggctgtaaattacacctgaagctcacac

SEQ ID NO: 14507 - DNA, 120 bp, synthetic construct
  misc_feature 1..120: note = Artificially Synthesized Probe
  source 1..120: mol_type = other DNA
gtctcaaaaacagacaaagaaaaatgctgtttgaatctcttgactgtgcttactggcatctaatgcgtgtcatttatttgtggtgatgcctatttctccccactgtctgctccacagggg

SEQ ID NO: 14508 - DNA, 120 bp, synthetic construct
  misc_feature 1..120: note = Artificially Synthesized Probe
  source 1..120: mol_type = other DNA
atactgcttaacagaggtaacaaaagagcaataattatgagttcaaggtcacagagaacgcagacgacacagatgctcagctacgacgctgcacgtagctctctgtgtaaaatgacccct

SEQ ID NO: 14509 - DNA, 120 bp, synthetic construct
  misc_feature 1..120: note = Artificially Synthesized Probe
  source 1..120: mol_type = other DNA
acacctgaaagagaggaaactcacaaaatgctttttggaggaactttttaatcttttataaaattaaaaaaaactggtctatatgacctgaaagattattcccagctctaaaaagacaag

SEQ ID NO: 14510 - DNA, 120 bp, synthetic construct
  misc_feature 1..120: note = Artificially Synthesized Probe
  source 1..120: mol_type = other DNA
tcctcagcctgccacgccaatgactcccactttttctgaatcctttccttaaggataacagtatcacaaaaatgctatttttcctccttctaatacagaatttgaaacactgggttaggt

SEQ ID NO: 14511 - DNA, 120 bp, synthetic construct
  misc_feature 1..120: note = Artificially Synthesized Probe
  source 1..120: mol_type = other DNA
atcctttaatcttgaagtgtggtccatctgggaccctaagtggtctgtgattacctgggccaacttgaaatgtcacagatgagaggttatctttgccgaatggctaaaaaatacaagacc

SEQ ID NO: 14512 - DNA, 120 bp, synthetic construct
  misc_feature 1..120: note = Artificially Synthesized Probe
  source 1..120: mol_type = other DNA
tttgctgaagacaagactttggttttacatgatactatcacacctgacctttgtgaagtagtcagggtaaaacattccagtttggccgaggagagagaaataccaaattctgcagtgact

SEQ ID NO: 14513 - DNA, 120 bp, synthetic construct
  misc_feature 1..120: note = Artificially Synthesized Probe
  source 1..120: mol_type = other DNA
cgcttgtggaatggtgatggtaacagtaacaaccccataggtttttgaggattaaaggaactaatacacatacattatttcaacagtgcctggcagattctaggcactgaataaatggta

SEQ ID NO: 14514 - DNA, 120 bp, synthetic construct
  misc_feature 1..120: note = Artificially Synthesized Probe
  source 1..120: mol_type = other DNA
agcatctcgaagttatacttctcgtccgtggcatgctggtccactatgaagatatcctcattcagtttggttattataaatcccaggttaaactgaccaatgatttccatttctgcaaac

SEQ ID NO: 14515 - DNA, 120 bp, synthetic construct
  misc_feature 1..120: note = Artificially Synthesized Probe
  source 1..120: mol_type = other DNA
attaaatactaacttagtcaatctggacaaaagacagacaccaccgctaaccttcacacgagaaattgacactgtcattctcagtcccacacaattaaatccggtgaaaatggattttcc

SEQ ID NO: 14516 - DNA, 120 bp, synthetic construct
  misc_feature 1..120: note = Artificially Synthesized Probe
  source 1..120: mol_type = other DNA
ccccaaatcctatctttgagggtctgtttcctggtaccaattccagatcaggcagagtgcaatcaatcaagagacaaaaaccacaccagtgattttaacagggacttttttttttaagac

SEQ ID NO: 14517 - DNA, 120 bp, synthetic construct
  misc_feature 1..120: note = Artificially Synthesized Probe
  source 1..120: mol_type = other DNA
ccaggaattgtctgaatatgccctggttcccagtacatagataatctgctcaaaagctggtgctggcctaaaagacccaagtcttccatgtgtttggagtctgtgtcctgccacagagaa

SEQ ID NO: 14518 - DNA, 120 bp, synthetic construct
  misc_feature 1..120: note = Artificially Synthesized Probe
  source 1..120: mol_type = other DNA
aaagaatttcttcttttttaaaacgctttgtgtttggggttgcgagattagttggctgaggcaaaactcgaaatttacatccggtatcttcctggtttgaatggcagtccacatctgaaa

SEQ ID NO: 14519 - DNA, 120 bp, synthetic construct
  misc_feature 1..120: note = Artificially Synthesized Probe
  source 1..120: mol_type = other DNA
tcaccagaatggtaaaattaaaaaaacaacaaatgctcacaaagatcaggatcaagaggaatgcctgaatacctctggtaggaatgaacctggtacagctgctttgaaaagttctctggg

SEQ ID NO: 14520 - DNA, 120 bp, synthetic construct
  misc_feature 1..120: note = Artificially Synthesized Probe
  source 1..120: mol_type = other DNA
gactataatggaacactgtatagcgaacgaataaatgaattttgccacatgacttgggtgaatctcacaaacaaaataatgagagaaagaaacaaatcacagaaaaggacagactgaata

SEQ ID NO: 14521 - DNA, 120 bp, synthetic construct
  misc_feature 1..120: note = Artificially Synthesized Probe
  source 1..120: mol_type = other DNA
catccagcagtggctgctgactgacatttagcttgttgacatcactatcaaacattcctatcaaagaggtctttaaaactgccaacaaaagcttttcctcttgtagcaaaatttgccttt

SEQ ID NO: 14522 - DNA, 120 bp, synthetic construct
  misc_feature 1..120: note = Artificially Synthesized Probe
  source 1..120: mol_type = other DNA
attggtacatctagaacacaatacagaaaaagccttaaaatgatcatattcactgacccagtaattctactcccggcaatttatattcagaataattaaagatgtaggctgagtgcagtg

SEQ ID NO: 14523 - DNA, 120 bp, synthetic construct
  misc_feature 1..120: note = Artificially Synthesized Probe
  source 1..120: mol_type = other DNA
agttgtactgaaatgccaatggaacttacctgaatcaacagaaatgttaagaacaacaaatggatactggtgtcgattatacatgtggtagacctcattcacgagtctgcagacctgcac

SEQ ID NO: 14524 - DNA, 120 bp, synthetic construct
  misc_feature 1..120: note = Artificially Synthesized Probe
  source 1..120: mol_type = other DNA
tataattaataattatgaatccatcacactataggttaaaaaatttagaagttcaaccacatctggcagattacaagcaaactctaaagcatcattgaaaaacaggggctgggagcggtg

SEQ ID NO: 14525 - DNA, 120 bp, synthetic construct
  misc_feature 1..120: note = Artificially Synthesized Probe
  source 1..120: mol_type = other DNA
actggtaatatgtgtttatatatttatgtatctatacacacaacacatataatgtatatatgcagatacaaacacactcacgtatatgcaatttaaaaaactatacagaggccaggcgcg

SEQ ID NO: 14526 - DNA, 120 bp, synthetic construct
  misc_feature 1..120: note = Artificially Synthesized Probe
  source 1..120: mol_type = other DNA
atactgtatgtcaaaaatgcctttgtgataacctaacctactgaatgtcccatctcagccttgcctcagaatacttacatagtctataggcaaaataacctattttataataaaatgttg

SEQ ID NO: 14527 - DNA, 120 bp, synthetic construct
  misc_feature 1..120: note = Artificially Synthesized Probe
  source 1..120: mol_type = other DNA
gcacattcttaaagtgaaatgaaaacaaaacaccaggtgacatgctgataaggatcactattgcagttcacgggtatctgtgctccaaatcttgatgagtcatcaaagaaccaaaccttc

SEQ ID NO: 14528 - DNA, 120 bp, synthetic construct
  misc_feature 1..120: note = Artificially Synthesized Probe
  source 1..120: mol_type = other DNA
aaaacatggtttgaattaagcaactgactcctttgtataaatcatctttcttagccacagcattgctcacagttttataaaggacataaaaaactattatccctagccaggcgtggtggc

SEQ ID NO: 14529 - DNA, 120 bp, synthetic construct
  misc_feature 1..120: note = Artificially Synthesized Probe
  source 1..120: mol_type = other DNA
tacctacttattcagaacccacacattgcccacaataacttatatttttttcagagagagagtgaaaagacgcagtatacgagtgtctctggaagaataaaatgaaacacattcagctct

SEQ ID NO: 14530 - DNA, 120 bp, synthetic construct
  misc_feature 1..120: note = Artificially Synthesized Probe
  source 1..120: mol_type = other DNA
aaaaaaaaatcaattctaagattttattctccattctactggaagggacaatggaaacccgctataatcactagagcaataagaggcgttgaagtaaccggccatcactacctgcttctg

SEQ ID NO: 14531 - DNA, 120 bp, synthetic construct
  misc_feature 1..120: note = Artificially Synthesized Probe
  source 1..120: mol_type = other DNA
ttcactgaaacaatctctatgaacaaacagaaacaacctaagcaagcatcattgaggagttgattaattatggtatagccatagcgcagcagaatgacaacaaataaggcagtgtgcacc

SEQ ID NO: 14532 - DNA, 120 bp, synthetic construct
  misc_feature 1..120: note = Artificially Synthesized Probe
  source 1..120: mol_type = other DNA
taaaaaaagtttttagctgcatatgtttaagtaactttttagattatgaaaaacacacatacaaaatgggaaggcacaaagaagacagcaaaaactgcatgagatctcacatccaaggat

SEQ ID NO: 14533 - DNA, 120 bp, synthetic construct
  misc_feature 1..120: note = Artificially Synthesized Probe
  source 1..120: mol_type = other DNA
ccaggcatggtggctcaggcctgtaatcccagcactttgagaggccaaggtgggcagatcacctgaggtcaggaattcgagaccagcctggccagcctggacaacatggtgaaaccccgt

SEQ ID NO: 14534 - DNA, 120 bp, synthetic construct
  misc_feature 1..120: note = Artificially Synthesized Probe
  source 1..120: mol_type = other DNA
ttcctttgaaattccttatggcgcacaggtagtgtggaaaataactgctgcacgctgactgtggtccctctggggcgggggtagggggttttctggataattttcccattgtgatcaaac

SEQ ID NO: 14535 - DNA, 120 bp, synthetic construct
  misc_feature 1..120: note = Artificially Synthesized Probe
  source 1..120: mol_type = other DNA
tgacttagattggcagcgagacaaaacagaattcagaagctagaagttgagatgttgagatagaaaactgaaaataataatgattccaattaattttcagagaggtttctctaaggggtc

SEQ ID NO: 14536 - DNA, 120 bp, synthetic construct
  misc_feature 1..120: note = Artificially Synthesized Probe
  source 1..120: mol_type = other DNA
aaaaaaaaaaaagagaatgggttctggaatcagacttcctggatcctattttatcagctttataatctcaaaaaaaggaaatttcctatcccctaatttcctcatttgtaaaatagagaa

SEQ ID NO: 14537 - DNA, 120 bp, synthetic construct
  misc_feature 1..120: note = Artificially Synthesized Probe
  source 1..120: mol_type = other DNA
cccagctgttctgcaaattaaatatttctgtgcaattcttagcataacacctgcctggcacaccgtaagaacacaataaaagctgttattattattactacctagctaagtactaggcac

SEQ ID NO: 14538 - DNA, 120 bp, synthetic construct
  misc_feature 1..120: note = Artificially Synthesized Probe
  source 1..120: mol_type = other DNA
ccctcaaagctcttgctgtactagctttaagagttttataaaggttttatctccccttattccctgctccaatacatcctccactctatcaccagagctatttttgaaatcacaaatctg

SEQ ID NO: 14539 - DNA, 120 bp, synthetic construct
  misc_feature 1..120: note = Artificially Synthesized Probe
  source 1..120: mol_type = other DNA
ctctgtctaaaccgctctcctcttcctcctctgcccaaacaatgtctgctcaaagaatgtatcccgtgtgttcattaacttagcaatttccagcaaacagtttaattgataacttgttaa

SEQ ID NO: 14540 - DNA, 120 bp, synthetic construct
  misc_feature 1..120: note = Artificially Synthesized Probe
  source 1..120: mol_type = other DNA
cacatcctaacaggtagaaacgtattgcatttttaaaaactgcgcagctatgcaaataaggatgtgtctggacgctctaccgtccccaaaataaccttaattttttaaaaaggccaggca

SEQ ID NO: 14541 - DNA, 120 bp, synthetic construct
  misc_feature 1..120: note = Artificially Synthesized Probe
  source 1..120: mol_type = other DNA
tgcgtgcacttttcctacaaagcatcgtgtgagatccgcgtgcttatgctcctgtactcttcagagaagaaaatcttcattggcctcatcccccatgaccagggcaactttgtcaacggc

SEQ ID NO: 14542 - DNA, 120 bp, synthetic construct
  misc_feature 1..120: note = Artificially Synthesized Probe
  source 1..120: mol_type = other DNA
tgtgttccccggctaatgtctaaagtgctcatgccaggtcccagctggactcccctcggtagggccccaccttttgttacctgaaaatgtccttaaagcctcctccatgtaagaaactgg

SEQ ID NO: 14543 - DNA, 120 bp, synthetic construct
  misc_feature 1..120: note = Artificially Synthesized Probe
  source 1..120: mol_type = other DNA
ccaaaccagttgagaggtggagatgggaactttataatagatttggggcggcaaaagcctggtcataccctgttcacgtggacatatccggccgacacgaggtgcttcttgagaaaggtg

SEQ ID NO: 14544 - DNA, 120 bp, synthetic construct
  misc_feature 1..120: note = Artificially Synthesized Probe
  source 1..120: mol_type = other DNA
agaacaaatgcacacacaaacgaatgaacgaaggaatgaacagcttccctactactctgatgtagaaagtctgaaagcactggtctcgtaaaccaacatctaagatgtcacagcaaaaaa

SEQ ID NO: 14545 - DNA, 120 bp, synthetic construct
  misc_feature 1..120: note = Artificially Synthesized Probe
  source 1..120: mol_type = other DNA
tatcactgccatctcacagatggggaaaccgagtcacagagcacctccatctcaagcatccgtgatgcctctgagtggggcccgacatcttaaccttactgtctcctgttactccttatg

SEQ ID NO: 14546 - DNA, 120 bp, synthetic construct
  misc_feature 1..120: note = Artificially Synthesized Probe
  source 1..120: mol_type = other DNA
gagctgacatatatcattctccccactgcttaactgcttacaacgatccctgcatttatcattaggcccatttctcagaaaagtaagtagaggctaaaaagttgagagcacgcaacaaac

SEQ ID NO: 14547 - DNA, 120 bp, synthetic construct
  misc_feature 1..120: note = Artificially Synthesized Probe
  source 1..120: mol_type = other DNA
ccttgtccaatttctaaggtcttggacaggtacccaccccactgaaacaggcaacacttctttctttactggacacatccccttctctcccagccatattttttcttttctttttttgag

SEQ ID NO: 14548 - DNA, 120 bp, synthetic construct
  misc_feature 1..120: note = Artificially Synthesized Probe
  source 1..120: mol_type = other DNA
gtttctggatttcccgatggcctgagcatcatccgcgcagtgaacatcctccctaaatcggctcgatcccctctcccccaaaggatctagctaattctaaatcaagcacaaactttatct

SEQ ID NO: 14549 - DNA, 120 bp, synthetic construct
  misc_feature 1..120: note = Artificially Synthesized Probe
  source 1..120: mol_type = other DNA
tttcctcatctataaaaaggataatcgtttccgcttcgtggggttaccatgacgattaaaggagctaacacgtgacaaaagctttaaaaaatgggtggtagtgagccctgtttaagtctt

SEQ ID NO: 14550 - DNA, 120 bp, synthetic construct
  misc_feature 1..120: note = Artificially Synthesized Probe
  source 1..120: mol_type = other DNA
agtaaataaaatgggcacagtaattccaacccccagctattcactgataatcagacgctgccattcggtttcagaaaatgttgaatgaacactcacaacacacttcacatttatctcaga

SEQ ID NO: 14551 - DNA, 120 bp, synthetic construct
  misc_feature 1..120: note = Artificially Synthesized Probe
  source 1..120: mol_type = other DNA
ttggcctaggacattgcttcctacacagtggaagtgctgttgcctgctagccattaaggctgagtgcaccgtctcatgtctgaggatctgggctggggtttcagtcatgttccaatcaga

SEQ ID NO: 14552 - DNA, 120 bp, synthetic construct
  misc_feature 1..120: note = Artificially Synthesized Probe
  source 1..120: mol_type = other DNA
tgttctataaatagagacgctcctggaaaggagaggccttctctataaggcactaggacacatggtaaggctgcaattgttaaaactgcaaggctcgtgtccaagaactcgcctcttgag

SEQ ID NO: 14553 - DNA, 120 bp, synthetic construct
  misc_feature 1..120: note = Artificially Synthesized Probe
  source 1..120: mol_type = other DNA
acatgaaacctctacgatctgttcgggacaatgtgactcaaaacacagccttagagaaacatgcaatgactatgacctctgtttcacaaatggagacctggaggcccagagaagttaagt

SEQ ID NO: 14554 - DNA, 120 bp, synthetic construct
  misc_feature 1..120: note = Artificially Synthesized Probe
  source 1..120: mol_type = other DNA
aggaccagtaaggctcagagcagggaagggactggctttagatcacacagcaagccccaggcaagcctgtctggctctggggtcctgagactgcacttctgtagaagtactctgggctaa

SEQ ID NO: 14555 - DNA, 120 bp, synthetic construct
  misc_feature 1..120: note = Artificially Synthesized Probe
  source 1..120: mol_type = other DNA
aaaaaaaaaaaggaatttcatctgctttttttactcttttaacatggtgtctagaaaatttagaattccacgtggggcttgtgttgaatttgatggatgatgccaccctgctccgtcgcc

SEQ ID NO: 14556 - DNA, 120 bp, synthetic construct
  misc_feature 1..120: note = Artificially Synthesized Probe
  source 1..120: mol_type = other DNA
gaaatttgcaggccttttatgactcacgatcattgatgttggtgtttgctgagcacctattcagtgctgggattccacacctggcatctcacctatctgactcactcagggagttcaaag

SEQ ID NO: 14557 - DNA, 120 bp, synthetic construct
  misc_feature 1..120: note = Artificially Synthesized Probe
  source 1..120: mol_type = other DNA
gtactcaatcttggagtagccacgggattaaagagtgaaatagggtgagtgagttgtgagggctcccccaactcaggagacatgagcaaaaaggacagggcgacttccacagacctcttt

SEQ ID NO: 14558 - DNA, 120 bp, synthetic construct
  misc_feature 1..120: note = Artificially Synthesized Probe
  source 1..120: mol_type = other DNA
tttccatttgcccccaacaataatggccgtcctcatatgctcaatcatgaccacagtaaacgaaggcaagcgacctgacgtccctgacccacaataaacttcttcgacaaaagtagagga

SEQ ID NO: 14559 - DNA, 120 bp, synthetic construct
  misc_feature 1..120: note = Artificially Synthesized Probe
  source 1..120: mol_type = other DNA
acgcattccctcgcttcagtgtatgcgaaacgccccgtctagtgatcagctcttctctcaggccttggctctcgagaatccggcacggccttggcaaacaccgatctcttataaacgcgc

SEQ ID NO: 14560 - DNA, 120 bp, synthetic construct
  misc_feature 1..120: note = Artificially Synthesized Probe
  source 1..120: mol_type = other DNA
agaataaacactggtacctcaacacatcatttggggtgatatcacagaagaaccgcataataacctcagccttttggttcttggatgcaatccaagaacaattattttagactgaagtct

SEQ ID NO: 14561 - DNA, 120 bp, synthetic construct
  misc_feature 1..120: note = Artificially Synthesized Probe
  source 1..120: mol_type = other DNA
aagaacaactgcaacttgacaatgtccacatggctcaaaggataagaattgagaacctgagaggacaagaaagttcaagtgctgccccttcattttacacataataaaaccattagatgc

SEQ ID NO: 14562 - DNA, 120 bp, synthetic construct
  misc_feature 1..120: note = Artificially Synthesized Probe
  source 1..120: mol_type = other DNA
gtggataagctgaggtatacatacttcatgacattaagtcttggaactacatacagcatgtgctcaaacatacttgctgaatactgttccctgctgaggcaattaactaaatgcacatag

SEQ ID NO: 14563 - DNA, 120 bp, synthetic construct
  misc_feature 1..120: note = Artificially Synthesized Probe
  source 1..120: mol_type = other DNA
tggtattccagaagcaaaccccggaaaatgtttcaagaagagactgatcaacccatttcactggaatgctggagacaaaagcttgactggaaatacagaagtaacgatgaataaatgaca

SEQ ID NO: 14564 - DNA, 120 bp, synthetic construct
  misc_feature 1..120: note = Artificially Synthesized Probe
  source 1..120: mol_type = other DNA
tactatgtctactcactaaaaagtgaaactatgaatgggcatgaacagcaaacccaatgaactgtattcagcttctttaacacacttcaaaattatatataatcacagtacttacccaca

SEQ ID NO: 14565 - DNA, 120 bp, synthetic construct
  misc_feature 1..120: note = Artificially Synthesized Probe
  source 1..120: mol_type = other DNA
ttttctgtgtgaaaacagaagttagctgaggtcataaaaacaccatgtagtaacatattcagctgccccccagatttctccacttagatgtttggcagaaagaaattaatttggccaggc

SEQ ID NO: 14566 - DNA, 120 bp, synthetic construct
  misc_feature 1..120: note = Artificially Synthesized Probe
  source 1..120: mol_type = other DNA
tcattcattagtccatccaacaaacattttaatgcctctgataccaggaacagttccaggtgctaggggtaaaaatctccgtctctcgtggcagggagaaacagacaataaaaataagta

SEQ ID NO: 14567 - DNA, 120 bp, synthetic construct
  misc_feature 1..120: note = Artificially Synthesized Probe
  source 1..120: mol_type = other DNA
ccatttaaacccccactcttccacatttaaactaatagtgcctcctaactccctgagaaaatagagggcatcagtaaaatgtccttcaaagaccaaaaagcccagtagcctttttatatc

SEQ ID NO: 14568 - DNA, 120 bp, synthetic construct
  misc_feature 1..120: note = Artificially Synthesized Probe
  source 1..120: mol_type = other DNA
gcatgcctcggtctaggtccccatttacagagagaacacaaggaaccacattttttcgtccatctcggcccttcacagaaaaacagaagaaaaataatcatttcacagaactttttttgt

SEQ ID NO: 14569 - DNA, 120 bp, synthetic construct
  misc_feature 1..120: note = Artificially Synthesized Probe
  source 1..120: mol_type = other DNA
ctgcgccctacctcgaaaggtaacacttttaagtaaaaattgtttgctgattattcaaaagaggccttagggaaaaaaatggtgtgctttagggaaaggggtttggagtataattttctg

SEQ ID NO: 14570 - DNA, 120 bp, synthetic construct
  misc_feature 1..120: note = Artificially Synthesized Probe
  source 1..120: mol_type = other DNA
ccaacaatgtcaggatatctggtggcaactcttccaacaatatctgatttctcacactatccagaataaattcttttctatcctaactgttcttcagcctttattggtctgcttcactgt

SEQ ID NO: 14571 - DNA, 120 bp, synthetic construct
  misc_feature 1..120: note = Artificially Synthesized Probe
  source 1..120: mol_type = other DNA
cagtcttggctcactgatgatcctggaacaatatattgctacaaaaggtaaggaagtgctcgtcaagacaatgatggaaatatgtcaaaaggacactggccaagtctaggacaatttgac

SEQ ID NO: 14572 - DNA, 120 bp, synthetic construct
  misc_feature 1..120: note = Artificially Synthesized Probe
  source 1..120: mol_type = other DNA
atttggcaaacctcacattagtaactgatctgggcaagaatcatcaatggatgctgcaaccagtaaggcaaaatttggtgacaaagaaattgtctgcatcatcttaaagtatctgcccac

SEQ ID NO: 14573 - DNA, 120 bp, synthetic construct
  misc_feature 1..120: note = Artificially Synthesized Probe
  source 1..120: mol_type = other DNA
aaaaatacataggagctccaggtaaaacatacatgtaatttagacacattgccaggatacatgtgtaaaagttcgtgatctcctaggttccacagggtttctattaactcctttccccag

SEQ ID NO: 14574 - DNA, 120 bp, synthetic construct
  misc_feature 1..120: note = Artificially Synthesized Probe
  source 1..120: mol_type = other DNA
tgaagaagacatgctctgcactcccccagcaaccttcttggctgcaacccctccataagcaacacaatctcgattgttgctgaatcctttcatatcctaatgggaattaacctccaaata

SEQ ID NO: 14575 - DNA, 120 bp, synthetic construct
  misc_feature 1..120: note = Artificially Synthesized Probe
  source 1..120: mol_type = other DNA
ttaaattaaaggtaattattgcagtacctttctccaccactggagtcgatgacgtaaccagaaatcaagccactggtttgaagttctcggaggagtaaaccatactaacgaagcttcagt

SEQ ID NO: 14576 - DNA, 120 bp, synthetic construct
  misc_feature 1..120: note = Artificially Synthesized Probe
  source 1..120: mol_type = other DNA
accgcgcccgacaaagattttcaaatctataagaaagttgaaaaaataataaacatccatatacaatgaacacttgtataccctttacctagattcatcaattatcaacattttgccaca

SEQ ID NO: 14577 - DNA, 120 bp, synthetic construct
  misc_feature 1..120: note = Artificially Synthesized Probe
  source 1..120: mol_type = other DNA
gcaatatcatgaaatggtgaattttctaatgtatctttccttctacatttattccatagcttctgtaaaaacataagctttctctacctcttccccccgcccccgacctctagggtcaat

SEQ ID NO: 14578 - DNA, 120 bp, synthetic construct
  misc_feature 1..120: note = Artificially Synthesized Probe
  source 1..120: mol_type = other DNA
ccaattcatatttaatttaccaatccatatttaacattagtttatacgtaccttcttttacatattatctcttcttttacaatgaatatcttggttcctaataacaactaacccaactat

SEQ ID NO: 14579 - DNA, 120 bp, synthetic construct
  misc_feature 1..120: note = Artificially Synthesized Probe
  source 1..120: mol_type = other DNA
agaaggttctcccgtagtttcccagaagtttttaatacgttctcaagaaatgctactagctgttccttactcagctctttgtcttgcaagatttcgcgtagagtttctgcagaaactaac

SEQ ID NO: 14580 - DNA, 120 bp, synthetic construct
  misc_feature 1..120: note = Artificially Synthesized Probe
  source 1..120: mol_type = other DNA
atgctcggtcctgtagatcccgggaggccatgttataaaaggagacttgctgggatgtgacgggttgccacttgaaatatcttccatttggataaagtaggaatatttatacatgtgccc

SEQ ID NO: 14581 - DNA, 120 bp, synthetic construct
  misc_feature 1..120: note = Artificially Synthesized Probe
  source 1..120: mol_type = other DNA
agggctttggctttagcgaaagtctgaaagggaagccataggaacttaaacgtaccgactataaagctctgagaaaagctgatgttttagaaagaccatacattctaggtacaaatacct

SEQ ID NO: 14582 - DNA, 120 bp, synthetic construct
  misc_feature 1..120: note = Artificially Synthesized Probe
  source 1..120: mol_type = other DNA
atttttggcatgtctttgggtttcatgtttcttaacccaactgcctgcagggccttatggctgtcaggagcagttcttgggaattaaagtaattactgaagaagtattctagtgagaaaa

SEQ ID NO: 14583 - DNA, 120 bp, synthetic construct
  misc_feature 1..120: note = Artificially Synthesized Probe
  source 1..120: mol_type = other DNA
aaaagttgccctggggggaacggaacaaacactacttttcttcaacctttgcttccacagactttttcatccctaagatactagaagaagagcatacataaacgacaaatatagccaatg

SEQ ID NO: 14584 - DNA, 120 bp, synthetic construct
  misc_feature 1..120: note = Artificially Synthesized Probe
  source 1..120: mol_type = other DNA
ttcagttaaaaaaaaaaaaaaaagctacctttctcgtcttggttcatgacacatggaggctgcttgtttgtggttgccagtcatagtgattgttcttccttttcaaggttggatggcaag

SEQ ID NO: 14585 - DNA, 120 bp, synthetic construct
  misc_feature 1..120: note = Artificially Synthesized Probe
  source 1..120: mol_type = other DNA
gaaaagcaaggagccagaattaagaggttgggtcagtctgcagtgagttcatgcatttagaggtgttcttcaagatgactaatgtcaaaaattgagacatctgttgcggttttttttttt

SEQ ID NO: 14586 - DNA, 120 bp, synthetic construct
  misc_feature 1..120: note = Artificially Synthesized Probe
  source 1..120: mol_type = other DNA
tcagtcttgtgtgttgtctggttacgtattccctgggtgataccattcaatgtcttaatgtacttgtggctcagacctgagtgcaaggtggaaataaacatcaaacatcttttcattatc

SEQ ID NO: 14587 - DNA, 120 bp, synthetic construct
  misc_feature 1..120: note = Artificially Synthesized Probe
  source 1..120: mol_type = other DNA
cagcctggccaacctggtgaaacctcatctctactaaaaatacaaaaaaaaattagccaggcatagtggcaggcacctgtaatcctagctacttggtaggctgaggcaggagaatccttg

SEQ ID NO: 14588 - DNA, 120 bp, synthetic construct
  misc_feature 1..120: note = Artificially Synthesized Probe
  source 1..120: mol_type = other DNA
aaaaaaaaaagaaaaaggaaagtgagtcagatgccaagctggtattgcggcatcagcttgtgtagtaagatttgacctggtcagaaaggtctcaaatggctaccctgagaaagaagtgga

SEQ ID NO: 14589 - DNA, 120 bp, synthetic construct
  misc_feature 1..120: note = Artificially Synthesized Probe
  source 1..120: mol_type = other DNA
aaaactaaaaactctgcttctcagagttgtggggattagatatgaagtacttagaagagtggttagcacatggtacatgcatgaacagttctgttagtgtgtaaacacccagcagggatt

SEQ ID NO: 14590 - DNA, 120 bp, synthetic construct
  misc_feature 1..120: note = Artificially Synthesized Probe
  source 1..120: mol_type = other DNA
ttttgtgttcatcaatctctagcacctgtgtccctaaaaacatattgagaaaaagtgagaagcaagcacaaacctaattgtgcaaagaaaggtcgaaattgccactattatgaggcaggc

SEQ ID NO: 14591 - DNA, 120 bp, synthetic construct
  misc_feature 1..120: note = Artificially Synthesized Probe
  source 1..120: mol_type = other DNA
agaatgtcttttataactgttcctcctctctccaccattcccaggatctaatttagttttacacattacatttgactgttaggtgtctttggtttcttttactccagagcagtctttcca

SEQ ID NO: 14592 - DNA, 120 bp, synthetic construct
  misc_feature 1..120: note = Artificially Synthesized Probe
  source 1..120: mol_type = other DNA
ccagtacaaggccttgtttccatatgtggtcaatcttgcttcaactgcagtcccctcaccacctggcaactgcaaacatgccttctgtctctatagatttgttgtttctggacttttttt

SEQ ID NO: 14593 - DNA, 120 bp, synthetic construct
  misc_feature 1..120: note = Artificially Synthesized Probe
  source 1..120: mol_type = other DNA
tgagccactgcgcccagccgatgttgactcttttaaaagttcaggacaggctgggcgcagtggctcacgcctgtaatcccagcactttgggaggctgaggcaggtggatcacaaggtcag

SEQ ID NO: 14594 - DNA, 120 bp, synthetic construct
  misc_feature 1..120: note = Artificially Synthesized Probe
  source 1..120: mol_type = other DNA
atttagcaggaagatttcataggtgatactttgtgtacttaatcttgcctcacatcaggaggcacaaagtctcaggctgactcatcagtgaggctaaatttgaacttgcagttaaggtaa

SEQ ID NO: 14595 - DNA, 120 bp, synthetic construct
  misc_feature 1..120: note = Artificially Synthesized Probe
  source 1..120: mol_type = other DNA
cgcctgccttagcctcccaaagtgctgggattacaggtgtgacccaccactcctggccaaaaaattcttttaaaattttttgtagagacaagctttcaccatgttgcccaggctggtctc

SEQ ID NO: 14596 - DNA, 120 bp, synthetic construct
  misc_feature 1..120: note = Artificially Synthesized Probe
  source 1..120: mol_type = other DNA
ctgcatcatccaggagtgaggaaaggggcttgggccaggatagtaatgtcagtggtgaaaagtaaatctgctttaatgacaggattactttaaatgaaagaggaggatatgatggcttat

SEQ ID NO: 14597 - DNA, 120 bp, synthetic construct
  misc_feature 1..120: note = Artificially Synthesized Probe
  source 1..120: mol_type = other DNA
gccccgcctattaatttataatagccttacagatccactgcttccttttactgccctgaactcaaattatgggtgtgactttcttacaacatttttaaagatcagtaaggtctaactaga

SEQ ID NO: 14598 - DNA, 120 bp, synthetic construct
  misc_feature 1..120: note = Artificially Synthesized Probe
  source 1..120: mol_type = other DNA
aaaatagagttctagacttaggcaatgataaatgagttattcatgtacatgaacatctggctggacatttcagtcatgtggacagtgccatgcatgacaagatgtgcaacatctccccaa

SEQ ID NO: 14599 - DNA, 120 bp, synthetic construct
  misc_feature 1..120: note = Artificially Synthesized Probe
  source 1..120: mol_type = other DNA
tatccttgggaggacagagaagaaatgtttcacagtgggtgtctccaagtagaggctcaaggactgtggccagaggacttatttttacctgcattacatatgaaaaatttcaaaaacata

SEQ ID NO: 14600 - DNA, 120 bp, synthetic construct
  misc_feature 1..120: note = Artificially Synthesized Probe
  source 1..120: mol_type = other DNA
tttttgtatttttagcaaagacagggtttcaccacgttggcccaggctgatcttgaactcctgacctcaggtgatccacctgccttggcctcccaaagtgctgggattacaggtatgagg

SEQ ID NO: 14601 - DNA, 120 bp, synthetic construct
  misc_feature 1..120: note = Artificially Synthesized Probe
  source 1..120: mol_type = other DNA
taaatctgcttttcatagaaaaaacttttttcatatttatttcataatagatttacataattgctaactgaattgcatatttaaaatagatatttttcacatatgcagatctgggaagaa

SEQ ID NO: 14602 - DNA, 120 bp, synthetic construct
  misc_feature 1..120: note = Artificially Synthesized Probe
  source 1..120: mol_type = other DNA
caaacagtaactaacatatatacatatatccctaaaagttgtggacatttaagctttttcaaaatttctaaccctagctacaaccagtcaacccccagcactagctgaagctgcagtggg

SEQ ID NO: 14603 - DNA, 120 bp, synthetic construct
  misc_feature 1..120: note = Artificially Synthesized Probe
  source 1..120: mol_type = other DNA
agaatggcgtgaacccgggaggcggaccttgcagtgagccgagatcgtgctactgcactccagcctgggcgacagagcaagactccatctcaaaaaaaaaaaaaaaaaaaaaaatatata

SEQ ID NO: 14604 - DNA, 120 bp, synthetic construct
  misc_feature 1..120: note = Artificially Synthesized Probe
  source 1..120: mol_type = other DNA
acataaacatctttacggcatggttctgagtctgcctagttcacttcctgcaggtctgttgcttgctgcccagtttttgtattcattgatctgcggggcagtgacatggttctcagaatg

SEQ ID NO: 14605 - DNA, 120 bp, synthetic construct
  misc_feature 1..120: note = Artificially Synthesized Probe
  source 1..120: mol_type = other DNA
ttcttactctggtgataattttgtgatctttttttccagtgtgtctctatgcatggagtaagaaagaaaccatcctacaatagcaccaaatccagcatggatgggtaagaagactgacca

SEQ ID NO: 14606 - DNA, 120 bp, synthetic construct
  misc_feature 1..120: note = Artificially Synthesized Probe
  source 1..120: mol_type = other DNA
aactctccttggtatggaaaaatggttcaaatgctgttgctttcaagaggttctttttctttctcctcagctgtgttggtgcaggactttcacatgtctttggagtagaataagatgtgc

SEQ ID NO: 14607 - DNA, 120 bp, synthetic construct
  misc_feature 1..120: note = Artificially Synthesized Probe
  source 1..120: mol_type = other DNA
aggacactcccagccactgagtggaaatctccgcctttaaactctgaggtgtttatatttgggtactttcgaacacttaaaaacattttttttcccttagaacaccttctaaaagaacct

SEQ ID NO: 14608 - DNA, 120 bp, synthetic construct
  misc_feature 1..120: note = Artificially Synthesized Probe
  source 1..120: mol_type = other DNA
atttattaaacctttgcttgtatctgtacaatattgatctctgctgattgcttaaaatagaacctgattatctctactactacagcatctcctaagccaaacagccccaccacagaggag

SEQ ID NO: 14609 - DNA, 120 bp, synthetic construct
  misc_feature 1..120: note = Artificially Synthesized Probe
  source 1..120: mol_type = other DNA
aggacttctaatttatctcctcagggacctcctgggcctgcagatcaatctcctcagggaactcttgggatggtttatcaatctcagggatgccctgagataacagattgatcgcagaag

SEQ ID NO: 14610 - DNA, 120 bp, synthetic construct
  misc_feature 1..120: note = Artificially Synthesized Probe
  source 1..120: mol_type = other DNA
ctccagagattctaattctataggtttagcgtaaaggtgtagtttggaggagggaggaggaagaaggcaatataattttgttggaacactctcatttgaatctgatgtacaccttctgtt

SEQ ID NO: 14611 - DNA, 120 bp, synthetic construct
  misc_feature 1..120: note = Artificially Synthesized Probe
  source 1..120: mol_type = other DNA
tgacagattctgggaaaagggaacatcagaacatattgccattgaagaaaaccttgaaaagttggtaaacctgagcctacaaaggctcaatccatcattgagttgaaggtatgctagtta

SEQ ID NO: 14612 - DNA, 120 bp, synthetic construct
  misc_feature 1..120: note = Artificially Synthesized Probe
  source 1..120: mol_type = other DNA
aaagatgtaagctgagctttacccaagtaaagaagtagccttaatatcctgctagtggtctgattcaggcaaatcaaaaaggtcaaacagaaacagaagagggagaagggtaagatttcc

SEQ ID NO: 14613 - DNA, 120 bp, synthetic construct
  misc_feature 1..120: note = Artificially Synthesized Probe
  source 1..120: mol_type = other DNA
tgctagtcatctttactggagaaaactgtagagatcaaatagggatgaaaggggaatgaagtctccattctttcttccccaaagagcgctttgaggaagaacttctctccaaattagaaa

SEQ ID NO: 14614 - DNA, 120 bp, synthetic construct
  misc_feature 1..120: note = Artificially Synthesized Probe
  source 1..120: mol_type = other DNA
caggagccacacgttctcaacataagtcaaagccaacttacccttccttggctgagaagtagcatttcctggggacccttcaaccaaaccattttcaattttttaaacgttatattatga

SEQ ID NO: 14615 - DNA, 120 bp, synthetic construct
  misc_feature 1..120: note = Artificially Synthesized Probe
  source 1..120: mol_type = other DNA
ttataaaagcatccaaacatgaaccatgcactgcatctcgttatgtctttgaagtgtcttttaatctagaatagtgcagcctctccttttttcatagtaacttttttgagacagggtctc

SEQ ID NO: 14616 - DNA, 120 bp, synthetic construct
  misc_feature 1..120: note = Artificially Synthesized Probe
  source 1..120: mol_type = other DNA
tactttaagaggtgatcccatgtgctgtatattgcatcatactggaggcatattgcctcattgtcccattataagtaaggctaagtttactaactaggttaaggtggcaccaacaagatc

SEQ ID NO: 14617 - DNA, 120 bp, synthetic construct
  misc_feature 1..120: note = Artificially Synthesized Probe
  source 1..120: mol_type = other DNA
acttcagcctcctgagtagctacattcagtgtacttcaatcaactacataattattctttttaatgcccaaattgtcccaattttggtcactgggagcctctttgggcttgattgtttcc

SEQ ID NO: 14618 - DNA, 120 bp, synthetic construct
  misc_feature 1..120: note = Artificially Synthesized Probe
  source 1..120: mol_type = other DNA
catttacaggctcacaagtcaaagctatacaaaaaggcacactcagagaaactgcatttccttcatgcccttcagccccattccctattgttaaatctgaggtaataaattttgtttctg

SEQ ID NO: 14619 - DNA, 120 bp, synthetic construct
  misc_feature 1..120: note = Artificially Synthesized Probe
  source 1..120: mol_type = other DNA
actttgcatagaaatggcttcagaatagattcttaaaagtggattattggggccgggcgtggtggctcacgcctgtaattacagcactttgggaggcagaggtgggcagatcacgaggtc

SEQ ID NO: 14620 - DNA, 120 bp, synthetic construct
  misc_feature 1..120: note = Artificially Synthesized Probe
  source 1..120: mol_type = other DNA
tgcacctggcctaatttgtcaatcttttttttgcttcacaagtttgactttgagtcagaattaggctttccttactttcagatgataaaggaatttaccactaacaccctgcttactttt

SEQ ID NO: 14621 - DNA, 120 bp, synthetic construct
  misc_feature 1..120: note = Artificially Synthesized Probe
  source 1..120: mol_type = other DNA
tttgtggagacaaggtttcaccatgttgcccaggctggtcttgaactcctgtgctcaagtgatccgcccaccttggcctcccaaagagctgggattacaggcatgagccactgtgcccag

SEQ ID NO: 14622 - DNA, 120 bp, synthetic construct
  misc_feature 1..120: note = Artificially Synthesized Probe
  source 1..120: mol_type = other DNA
ccctcttacagttccctatgaattagaggagtcagcttttccatttctgaagaaaagacattaaaattctgatagggattgcattaaatccatagatcgctttggggaatactgccatct

SEQ ID NO: 14623 - DNA, 120 bp, synthetic construct
  misc_feature 1..120: note = Artificially Synthesized Probe
  source 1..120: mol_type = other DNA
agcagccttgccaacatggtgaaaccctgtctctactaaaattagaaaaaaattagctgggcatgatggcaagcacctgtaatcccagctactcgggaggctgagacaggagaatcgctt

SEQ ID NO: 14624 - DNA, 120 bp, synthetic construct
  misc_feature 1..120: note = Artificially Synthesized Probe
  source 1..120: mol_type = other DNA
ttagctggatgtggtggtatatgcctatagccccagctatttgggaggctgaggtggaaggattgctccagcacaggaggtcaaggctgcagtgagccatgatggcacaactacactcaa

SEQ ID NO: 14625 - DNA, 120 bp, synthetic construct
  misc_feature 1..120: note = Artificially Synthesized Probe
  source 1..120: mol_type = other DNA
tttgctagcattttgttcgggacttttgcctctataattaagggatattggtttcttctcctatggtgtcatctgaaatgtgttatctgacctcaagaaaatgtttccttctcttcaatt

SEQ ID NO: 14626 - DNA, 120 bp, synthetic construct
  misc_feature 1..120: note = Artificially Synthesized Probe
  source 1..120: mol_type = other DNA
ccgggatagtctcgatctcctgacctcgtgatccgcccatctcgacctcccaaagtgctgggattacaggcgtgagccaccacgcccggctccttttgctttttgagtttagtttactct

SEQ ID NO: 14627 - DNA, 120 bp, synthetic construct
  misc_feature 1..120: note = Artificially Synthesized Probe
  source 1..120: mol_type = other DNA
aaagaaaaagaatatgttgtttaatttctatacttgtgaattttccagttttctcttctgttattaattctagcatcattccattgtggttggagaaggtcttttgtatgacttcaactt

SEQ ID NO: 14628 - DNA, 120 bp, synthetic construct
  misc_feature 1..120: note = Artificially Synthesized Probe
  source 1..120: mol_type = other DNA
gcccggctaatttttttgtatttttagtagagatggagtttcaccatgttagccaggatggtctcaatctcctgaccttgtgatccacccgcctcagcctcccaaagtgctgggattaca

SEQ ID NO: 14629 - DNA, 120 bp, synthetic construct
  misc_feature 1..120: note = Artificially Synthesized Probe
  source 1..120: mol_type = other DNA
acacgcaggcacgcacaaggaaaggtggaatctgttagaaaacaaaacaacatgagagaatattactaaaattacagttcaaggtataagttggaagtctgtcttattagacttttcatt

SEQ ID NO: 14630 - DNA, 120 bp, synthetic construct
  misc_feature 1..120: note = Artificially Synthesized Probe
  source 1..120: mol_type = other DNA
ctattttctataaaaatatttaagaacagcaaattagaaaataaaccaattcaacactaaataaataaatagagtctcttgtggacactttaaaaagtgcattctgggccgggcgcagtg

SEQ ID NO: 14631 - DNA, 120 bp, synthetic construct
  misc_feature 1..120: note = Artificially Synthesized Probe
  source 1..120: mol_type = other DNA
ggggcaagagtgagtaaaaatgctgcaaagcttttctgccatttttaggttgcctctttctggattcagcattttcctggttactgaaaatcttttactattctccagagttctcacaat

SEQ ID NO: 14632 - DNA, 120 bp, synthetic construct
  misc_feature 1..120: note = Artificially Synthesized Probe
  source 1..120: mol_type = other DNA
gagccactgcaccccactcattcttcactgttcttggttgtgtatttttcaatgaaaactttagaattcaggagtgatatttctatgatgtttagttggcctatgcaattatcctttttt

SEQ ID NO: 14633 - DNA, 120 bp, synthetic construct
  misc_feature 1..120: note = Artificially Synthesized Probe
  source 1..120: mol_type = other DNA
tgtctttgtggattgcctaactagctttctaatttactactttcttatattctaggaagcatgggcatgggggcagagagaagggtaaaaaaataagaatatccctacctgcagatgcct

SEQ ID NO: 14634 - DNA, 120 bp, synthetic construct
  misc_feature 1..120: note = Artificially Synthesized Probe
  source 1..120: mol_type = other DNA
aaggataaacataaatatgtaaccctaatactagggactggtgatggaaaaaatgtccccattggaggatgaagaaaaacacatccaaaccactatctcagtccccagtctttcctatgc

SEQ ID NO: 14635 - DNA, 120 bp, synthetic construct
  misc_feature 1..120: note = Artificially Synthesized Probe
  source 1..120: mol_type = other DNA
tctcaggtgaatggatttatgtagtagggataaaaatgaaaaagtgatggtattgtgtatcaagacagtcaagctaaaaaggctctcttttagggcaggccttctggaccacactctaag

SEQ ID NO: 14636 - DNA, 120 bp, synthetic construct
  misc_feature 1..120: note = Artificially Synthesized Probe
  source 1..120: mol_type = other DNA
ctgacattctggatgagcgtgagccacagtctttcccactttattaatttactttggtgaattcagtgtgcagcttagtaacaggctatacttgtgtgctggatatagttacaggatata

SEQ ID NO: 14637 - DNA, 120 bp, synthetic construct
  misc_feature 1..120: note = Artificially Synthesized Probe
  source 1..120: mol_type = other DNA
ctagccaataggagattagcacgtagaggttttctagtcaggaagccagcctagttttacttccctcagagagtcttagctcttgaatagaagaaaaccatacctaaaaaacctagattt

SEQ ID NO: 14638 - DNA, 120 bp, synthetic construct
  misc_feature 1..120: note = Artificially Synthesized Probe
  source 1..120: mol_type = other DNA
ttggagaaaacacagaaagatcaaagttatatcagctgaggaattgggggtatgggggaagagaagaaatggaatcaatctaggaaacactattcccatcctaagaaggggaaccatcat

SEQ ID NO: 14639 - DNA, 120 bp, synthetic construct
  misc_feature 1..120: note = Artificially Synthesized Probe
  source 1..120: mol_type = other DNA
cccatctattactgatgaagaaaacttgttataaggccagtgtcatcttaagcatgaatagttcttgagctatgtccttgctgagagacaagtgaaaaaaggagttatcccccaaaaccc

SEQ ID NO: 14640 - DNA, 120 bp, synthetic construct
  misc_feature 1..120: note = Artificially Synthesized Probe
  source 1..120: mol_type = other DNA
taggaaccagcagtttctaaagtcaagatggacacaaattgaagggcatgtgaagaatcagttgattatatgtagagcatgcctattatgtgaggagcaccctactaagaaggaatacag

SEQ ID NO: 14641 - DNA, 120 bp, synthetic construct
  misc_feature 1..120: note = Artificially Synthesized Probe
  source 1..120: mol_type = other DNA
gagagtaataacagttgctaaatatgactgcttttcttcagagaagctaaaactagctggctctatcccagaccaccccaagctttgtcctacatacacttcctccactgaatacttttc

SEQ ID NO: 14642 - DNA, 120 bp, synthetic construct
  misc_feature 1..120: note = Artificially Synthesized Probe
  source 1..120: mol_type = other DNA
tgtgaaaaacacaggtttcaggggaagacgtggcacatttcttcaaatgaggaatacgacatttatgagggttgcaagtacctctatttatagctctgtctttgataactctgaaggttc

SEQ ID NO: 14643 - DNA, 120 bp, synthetic construct
  misc_feature 1..120: note = Artificially Synthesized Probe
  source 1..120: mol_type = other DNA
actctatattaatcattttgccacctcaaccccaaagtataaaactcaggtcctggattcctgtccctacaaagccaagcaatgttagaaagtttggaagtaccaaaggatttatagggg

SEQ ID NO: 14644 - DNA, 120 bp, synthetic construct
  misc_feature 1..120: note = Artificially Synthesized Probe
  source 1..120: mol_type = other DNA
aagcagcactagtaattgaaaagaaagcctgtgattacaataggaagcttcccataggcctgaaagaagtcaatcttatcaagtctgagagatgatacacagagctttcctttacctgtg

SEQ ID NO: 14645 - DNA, 120 bp, synthetic construct
  misc_feature 1..120: note = Artificially Synthesized Probe
  source 1..120: mol_type = other DNA
tgctgataaagatcctcattagaacaagaggaagacagacagagctcttgactgacccactttctggaatgacagtacagataaagtgccaggtatttgctcctatctgagctataattt

SEQ ID NO: 14646 - DNA, 120 bp, synthetic construct
  misc_feature 1..120: note = Artificially Synthesized Probe
  source 1..120: mol_type = other DNA
gacctgttatagcttcctttcaactatatattgtctcttacaggatcctcattccctcatctctaccatttgtgatttcaccattgcacatgacttctgaacttccagctttacaacgct

SEQ ID NO: 14647 - DNA, 120 bp, synthetic construct
  misc_feature 1..120: note = Artificially Synthesized Probe
  source 1..120: mol_type = other DNA
ctagctggattctccaaattataaggataagcaagttttttttttttaatagaattcaaaagaaggggccttcctctcatctcccacctgctagctcctcacctgtgtgttgtcctcata

SEQ ID NO: 14648 - DNA, 120 bp, synthetic construct
  misc_feature 1..120: note = Artificially Synthesized Probe
  source 1..120: mol_type = other DNA
ggaataaatacctcaataaatcttgttttctcatgcctcatattcccaggaccaagatcatgcctgtcttcacctcacgtctagggcttctttcatatccactacattccccctcttcca

SEQ ID NO: 14649 - DNA, 120 bp, synthetic construct
  misc_feature 1..120: note = Artificially Synthesized Probe
  source 1..120: mol_type = other DNA
aatccctcaaaatctccacagaatgttttcatgagtagagatcacagataacattatcttcttcctctaaacaagatgctagcctgagcctagagtagaaatgctgcctcaaaactgggt

SEQ ID NO: 14650 - DNA, 120 bp, synthetic construct
  misc_feature 1..120: note = Artificially Synthesized Probe
  source 1..120: mol_type = other DNA
aagcttctaagcttctgcttttgaatatccctaaagctaccatttaatacttctggctatcatgctacggaaaccatatgaagaaccatgtggagaaaagaggcactgaggttacaggga

SEQ ID NO: 14651 - DNA, 120 bp, synthetic construct
  misc_feature 1..120: note = Artificially Synthesized Probe
  source 1..120: mol_type = other DNA
aaaggtgggggaccacaaatggactgctataaatactcgtggaagaaaaaatattcattcccccactgtctctgtcccttcattttccccaacttactctctaatcattttatcctggcc

SEQ ID NO: 14652 - DNA, 120 bp, synthetic construct
  misc_feature 1..120: note = Artificially Synthesized Probe
  source 1..120: mol_type = other DNA
aagaagatggacaaaaaacataaaaagaacacaagatctgagaggtagtggtaagggggactacatcttaccttgcccctcattagaagcttttactccatgagggtagtaagtcaattg

SEQ ID NO: 14653 - DNA, 120 bp, synthetic construct
  misc_feature 1..120: note = Artificially Synthesized Probe
  source 1..120: mol_type = other DNA
caacaaaacaaaaaaaacggcgggggaatataagtggagttaagaagactgtgtataagaggcctaggctccgttagtcagatagtgtggggtcaggaagtaaccattagcctggcttaa

SEQ ID NO: 14654 - DNA, 120 bp, synthetic construct
  misc_feature 1..120: note = Artificially Synthesized Probe
  source 1..120: mol_type = other DNA
ttttttttgagatagagtttcactcttgttgcccaggctggagtacaatggcatgatctcagctcactgcaacctccacctcctgggatcaagtgattctactgcctcagcctcccaagc

SEQ ID NO: 14655 - DNA, 120 bp, synthetic construct
  misc_feature 1..120: note = Artificially Synthesized Probe
  source 1..120: mol_type = other DNA
ttaaaataaagcaaaaactttcaaatattcttctgtaagcccattctccccagcgcagaccactatgtctcttaccccagaatcttggcacagtcatcgtagtatttcatcgagttcttg

SEQ ID NO: 14656 - DNA, 120 bp, synthetic construct
  misc_feature 1..120: note = Artificially Synthesized Probe
  source 1..120: mol_type = other DNA
ccttgctctgatagtgaaaatgtgaatgtctgtatcctccactcattatcttcacctgaatatgaaagccaatcacattcacatcatgttattttctaggacctcctccccatatacttc

SEQ ID NO: 14657 - DNA, 120 bp, synthetic construct
  misc_feature 1..120: note = Artificially Synthesized Probe
  source 1..120: mol_type = other DNA
atctttgtaatagatgaggtaaaatctctatataacaggtccaaccctctgtccgaagactcatggctctaaccccacccataatccaataaccaaaaccccacatagataggtggtata

SEQ ID NO: 14658 - DNA, 120 bp, synthetic construct
  misc_feature 1..120: note = Artificially Synthesized Probe
  source 1..120: mol_type = other DNA
agaataggagcctttccacagtaggaaatatgtgctcaagcaggagagctagagaaccaacaaccatgagacgacaggaagatcctaagggcaggggtttctttttttttttttttggag

SEQ ID NO: 14659 - DNA, 120 bp, synthetic construct
  misc_feature 1..120: note = Artificially Synthesized Probe
  source 1..120: mol_type = other DNA
gggaactataaggggaaacaaaacaaagctataggaagaaggatcaacaagaaaggaggcatatgggctatgacttgagatgctaaaagagccataaaagaaaagcaaggtatccctttt

SEQ ID NO: 14660 - DNA, 120 bp, synthetic construct
  misc_feature 1..120: note = Artificially Synthesized Probe
  source 1..120: mol_type = other DNA
accctctctcaaaccaaaaatttaaaaaataataaaacccccatgctctctctctccttcatctactccaccttaaaagacagttgcacagccagataccatggttcatccctgtaattc

SEQ ID NO: 14661 - DNA, 120 bp, synthetic construct
  misc_feature 1..120: note = Artificially Synthesized Probe
  source 1..120: mol_type = other DNA
tatagaaccagtgctagtctaggccaaggtccctcacaccaggagctacagtgaaaaaaaaaaaaatcctgcctaaaactgtaccagtaagaatatcttaagactttaacttgaaccagc

SEQ ID NO: 14662 - DNA, 120 bp, synthetic construct
  misc_feature 1..120: note = Artificially Synthesized Probe
  source 1..120: mol_type = other DNA
ttgagtcacacatcagcaattttccgtggtctccaaaagttctcagaaacactgaccaatgactctagtgaaagccacaaactccttaagtaaatgaacttgtcttacagaaataatatc

SEQ ID NO: 14663 - DNA, 120 bp, synthetic construct
  misc_feature 1..120: note = Artificially Synthesized Probe
  source 1..120: mol_type = other DNA
agattcctaaccctttgccctttcttccattgagtccttcctcgttttccactgaatgtacactcatgttcttgaaattctactgcaactacataacggggcatggtaactaatagaata

SEQ ID NO: 14664 - DNA, 120 bp, synthetic construct
  misc_feature 1..120: note = Artificially Synthesized Probe
  source 1..120: mol_type = other DNA
attggtcaactaattccattaatccaactaatcctcgcactcactgattgcccagtattaaactccttcaccctctcgcacgagtcatcatacttggtaacatctttatattgacccctc

SEQ ID NO: 14665 - DNA, 120 bp, synthetic construct
  misc_feature 1..120: note = Artificially Synthesized Probe
  source 1..120: mol_type = other DNA
tggtgagatgaaagagctgttttctgatacttttattttattttcagcaagggtacctacggtacctgaaaacaacgatggcatggaaaacacttcccatttacctgttgttgctgctgt

SEQ ID NO: 14666 - DNA, 120 bp, synthetic construct
  misc_feature 1..120: note = Artificially Synthesized Probe
  source 1..120: mol_type = other DNA
tcggctttctcgtaacactatgacaaggttcacaacactgggggcactttctaaactgccttttcctctgtgatacaattggttgttcactaaaacagtgttactttcattttaattgtg

SEQ ID NO: 14667 - DNA, 120 bp, synthetic construct
  misc_feature 1..120: note = Artificially Synthesized Probe
  source 1..120: mol_type = other DNA
ctggaattacagatgatttcttatttcagaaatctgccaactataaaagagcaatctcttgatactgtcttgtctgcttctcttgctttctcaacctcttctcattctcttttttcttta

SEQ ID NO: 14668 - DNA, 120 bp, synthetic construct
  misc_feature 1..120: note = Artificially Synthesized Probe
  source 1..120: mol_type = other DNA
gaaacattttcataagcattagtgataatgtatgactcagcacctggcatagagaagctcaataaatggcaactgctaatcatcaaaaccacagatcggtagtagctgtagctgccacct

SEQ ID NO: 14669 - DNA, 120 bp, synthetic construct
  misc_feature 1..120: note = Artificially Synthesized Probe
  source 1..120: mol_type = other DNA
gtgattattggggagggtaaggggagcctggaagtctgtcacttgcacaaggttattgtctagttccaagtaaatgtcttattttaaatagagaagatactgtgagtcaggagtcattaa

SEQ ID NO: 14670 - DNA, 120 bp, synthetic construct
  misc_feature 1..120: note = Artificially Synthesized Probe
  source 1..120: mol_type = other DNA
ttagaaatgaacttttggaaacctagtcaagtctaaggtgggaaatggctgtcaaatacgtgggcctggcttcacaatgaataatctgtaacttcttgttttgctctgggtagagctttc

SEQ ID NO: 14671 - DNA, 120 bp, synthetic construct
  misc_feature 1..120: note = Artificially Synthesized Probe
  source 1..120: mol_type = other DNA
gtttcttaaccgttcaatgttttcatgggaaaacattccaaaaatgatgaagacaacacccttgtaataaaaaccttagagctcacccttcctgcagattttagcaggccccatgatgag

SEQ ID NO: 14672 - DNA, 120 bp, synthetic construct
  misc_feature 1..120: note = Artificially Synthesized Probe
  source 1..120: mol_type = other DNA
tgttttctcttctagactgagaagcggaaaagggaaggggactaaaaggttaaaaagatacacaccaaaccattaagttgtatctttgggaagggcagggcattttgaggaaaagcacaa

SEQ ID NO: 14673 - DNA, 120 bp, synthetic construct
  misc_feature 1..120: note = Artificially Synthesized Probe
  source 1..120: mol_type = other DNA
gagctttcttagatgaagtaacttgtaggtgactgcttatctaagcccattctcagagaacagggtaatcttaggaatcatgagcctcattacactcgaaggttttagactttgctttta

SEQ ID NO: 14674 - DNA, 120 bp, synthetic construct
  misc_feature 1..120: note = Artificially Synthesized Probe
  source 1..120: mol_type = other DNA
ggactgtggaaccacaagatggcaccagagatgattattgatggctttctactgtcattcttgtttacttgacatcattttgcttcttctccttcatcttccttgcattttcattttccc

SEQ ID NO: 14675 - DNA, 120 bp, synthetic construct
  misc_feature 1..120: note = Artificially Synthesized Probe
  source 1..120: mol_type = other DNA
gcacatctcccaagatcacaacagcaaaaccaataaatcccagacccagtcttccacctaattctgatacatctaaagagacgtctttgacagtgaataaagagacaacagttgaaacta

SEQ ID NO: 14676 - DNA, 120 bp, synthetic construct
  misc_feature 1..120: note = Artificially Synthesized Probe
  source 1..120: mol_type = other DNA
agcctgcacccaccaccaccaagtctgcacccaccactaccaaggagcctgcacccaccactaccaagtctgcacccaccactcccaaggagccttcacccaccaccaccaaggagcctg

SEQ ID NO: 14677 - DNA, 120 bp, synthetic construct
  misc_feature 1..120: note = Artificially Synthesized Probe
  source 1..120: mol_type = other DNA
actacaacagctaaagacaagacaacagaaagagacttacgtactacacctgaaactacaactgctgcacctaagatgacaaaagagacagcaactacaacagaaaaaactaccgaatcc

SEQ ID NO: 14678 - DNA, 120 bp, synthetic construct
  misc_feature 1..120: note = Artificially Synthesized Probe
  source 1..120: mol_type = other DNA
tagcttgtgaagttttacagcttccctgtaggtaagcagaggtgtaattacagtaagctttttcattctctagaaaattaagcctgggaatttagcatatgtgtgtctgtgagcagcaga

SEQ ID NO: 14679 - DNA, 120 bp, synthetic construct
  misc_feature 1..120: note = Artificially Synthesized Probe
  source 1..120: mol_type = other DNA
aaccaaagccgtggaagagtgctagtttgggttgttttctggaggggaatctgattgataagcacacctcacaggagaatccgagagtaataacagaaatattggattaagaaaattaga

SEQ ID NO: 14680 - DNA, 120 bp, synthetic construct
  misc_feature 1..120: note = Artificially Synthesized Probe
  source 1..120: mol_type = other DNA
ccatctccagctcgcagaattactgaagtttggggtattccttcccccattgatactgtttttactaggtgcaactgtgaaggaaaaactttcttctttaaggtaacacaaatatctttg

SEQ ID NO: 14681 - DNA, 120 bp, synthetic construct
  misc_feature 1..120: note = Artificially Synthesized Probe
  source 1..120: mol_type = other DNA
atgtgatattctaatacataacaggtggcagcattcagcagtatatttataaacaggaacctgtacagaagtgccctggaagaaggcctgctctaaattatccagtgtatggagaaacga

SEQ ID NO: 14682 - DNA, 120 bp, synthetic construct
  misc_feature 1..120: note = Artificially Synthesized Probe
  source 1..120: mol_type = other DNA
cttccaaatgtggttacctcagctatatcactgcccaacatcagaaaacctgacggctatgattactatgccttttctaaaggtaaggtattaactaacagtttcccaaggaggtgatat

SEQ ID NO: 14683 - DNA, 120 bp, synthetic construct
  misc_feature 1..120: note = Artificially Synthesized Probe
  source 1..120: mol_type = other DNA
ctagtagaacagcaagagcaattactactcgttctgggcagaccttatccaaagtctggtacaactgtccttagactgatgagcaaaggaggagtcaactaatgaagaaatgaataataa

SEQ ID NO: 14684 - DNA, 120 bp, synthetic construct
  misc_feature 1..120: note = Artificially Synthesized Probe
  source 1..120: mol_type = other DNA
gattgaatcacagagacacttagagggagggagagacctcaaagacagagagattcacagggccagagagacacgtagagtgggtcagagaagaggacagaggacagagacatagaaaag

SEQ ID NO: 14685 - DNA, 120 bp, synthetic construct
  misc_feature 1..120: note = Artificially Synthesized Probe
  source 1..120: mol_type = other DNA
acatagagagacattcatagagccagagacacagagagattcatagacatatagagagattcagagagcctgaatcacagagattcacagagccaaagagacaaacagagagattcatag

SEQ ID NO: 14686 - DNA, 120 bp, synthetic construct
  misc_feature 1..120: note = Artificially Synthesized Probe
  source 1..120: mol_type = other DNA
acagatacagatggagacacacagcagaggaaatagagaaatagaaagaaatagaaacagcatttctcggagacagggaaaagaaaacagatccactgagaggcagaaacagagacacat

SEQ ID NO: 14687 - DNA, 120 bp, synthetic construct
  misc_feature 1..120: note = Artificially Synthesized Probe
  source 1..120: mol_type = other DNA
cccctgttttgcagaaagggggccctgaggcagaaggtggtccacgaagtcaagagccacaagttcaccgctcgcttcttcaagcagcccaccttctgcagccactgcaccgacttcatc

SEQ ID NO: 14688 - DNA, 120 bp, synthetic construct
  misc_feature 1..120: note = Artificially Synthesized Probe
  source 1..120: mol_type = other DNA
agatatttcggttttcgctctttgaatctgtctgcctctctcctggctttctgatctccgtccgtgggcctgtgtctgtttgtcaatgggatcctattttctttctctctttttccatct

SEQ ID NO: 14689 - DNA, 120 bp, synthetic construct
  misc_feature 1..120: note = Artificially Synthesized Probe
  source 1..120: mol_type = other DNA
agaaagagaggaatttggaggcaccaaaagatggacagagaaactccaagagacggagacacagacacctggagaaagagactaaaatagaaaatggtggatacagacaacagcttagga

SEQ ID NO: 14690 - DNA, 120 bp, synthetic construct
  misc_feature 1..120: note = Artificially Synthesized Probe
  source 1..120: mol_type = other DNA
agaagtccatgaggcgttttaccaccctctcagctgaaaataacagaagtctacatagaagatgtgacttcatagaacatatattgagcaccactgtctaccagcacgtgtatgtgattg

SEQ ID NO: 14691 - DNA, 120 bp, synthetic construct
  misc_feature 1..120: note = Artificially Synthesized Probe
  source 1..120: mol_type = other DNA
tggcctcaagtattttgtatacagtataggttggatccacacaacagcttatttggttatttttccctgtctatctggtttgaatcccagctccaccactttttggttctgtgacatttc

SEQ ID NO: 14692 - DNA, 120 bp, synthetic construct
  misc_feature 1..120: note = Artificially Synthesized Probe
  source 1..120: mol_type = other DNA
gcctgggcagcaagaacaaaactctgtctcaaaaaaaaaaaaaaaaaaaaaaaaaaaaaaaaaaaaaaggtaacatgccttgaccaggcatggtggctcatgcctgtaatcccagctctt

SEQ ID NO: 14693 - DNA, 120 bp, synthetic construct
  misc_feature 1..120: note = Artificially Synthesized Probe
  source 1..120: mol_type = other DNA
cctgcattcttgcttaatggactctggaaatttagcattgcttcaaaatatagattatttatttccacttgacagaggaggatgctgaggctcaaaactgggaatgaacttgccccaaat

SEQ ID NO: 14694 - DNA, 120 bp, synthetic construct
  misc_feature 1..120: note = Artificially Synthesized Probe
  source 1..120: mol_type = other DNA
ctggtggtccccatccctgcctcattttttctccagagcacccattaccaaccatcaaactatatgttttatttatttaccatgtttacattctgtatccctccattaggaagtaaactc

SEQ ID NO: 14695 - DNA, 120 bp, synthetic construct
  misc_feature 1..120: note = Artificially Synthesized Probe
  source 1..120: mol_type = other DNA
cccaaaggccgagcacacccagccataccccttttggctcgaagccccgcctccaacctggcttcttgcaactttctgcacctgttaatgactttgactttctttttttttttgggacgg

SEQ ID NO: 14696 - DNA, 120 bp, synthetic construct
  misc_feature 1..120: note = Artificially Synthesized Probe
  source 1..120: mol_type = other DNA
tggatctgatttcagggtcactggttgcggaaagggctctatgccctgtcttctgggttctggagaggtaagaagtcatgagaaacgagactgagagcttggaattcttttttttttttt

SEQ ID NO: 14697 - DNA, 120 bp, synthetic construct
  misc_feature 1..120: note = Artificially Synthesized Probe
  source 1..120: mol_type = other DNA
tccattgaagcccccaactttagagttagacagagatgagagagagaagagagagtctcagaagaggcagaaacccaaagagagacacagatggagagggaggggagaagatgggggatg

SEQ ID NO: 14698 - DNA, 120 bp, synthetic construct
  misc_feature 1..120: note = Artificially Synthesized Probe
  source 1..120: mol_type = other DNA
tgtcttgtgcttgctgaataatccaggatccagagatgaatctgaccctcaagcaactctccaaggtagggacacagtcacagatacttaaaatacaggaagatgtgctaaattagaggt

SEQ ID NO: 14699 - DNA, 120 bp, synthetic construct
  misc_feature 1..120: note = Artificially Synthesized Probe
  source 1..120: mol_type = other DNA
gattacaggcgtgagccaccacacccagccgattcttgagttttaaaaaatctatcaagcatgatcatcttaatctctccattcattcattcactcactgaatatccttctttttctttc

SEQ ID NO: 14700 - DNA, 120 bp, synthetic construct
  misc_feature 1..120: note = Artificially Synthesized Probe
  source 1..120: mol_type = other DNA
agattcaacaacagcaacaacatgttatagtctttactggactcttacagaaactttcaccagagtttttaatgttgtgtgtgggggttcacctgcatcagaattcctagagtgcttgct

SEQ ID NO: 14701 - DNA, 120 bp, synthetic construct
  misc_feature 1..120: note = Artificially Synthesized Probe
  source 1..120: mol_type = other DNA
ctctcccacagttcagcaggcaccacttaatattaccaatgaacaccaactctgtgccaagccttgagctaggtacggggctaacaacacagcaaacagaaacagccctgattattatta

SEQ ID NO: 14702 - DNA, 120 bp, synthetic construct
  misc_feature 1..120: note = Artificially Synthesized Probe
  source 1..120: mol_type = other DNA
gtggaataaaatcttaacacagagggagcagttaaagggtttacaagcataggggagacatgacctggtttatttatttttaaattggctcctgtgcctgctgagtagagaatgcattag

SEQ ID NO: 14703 - DNA, 120 bp, synthetic construct
  misc_feature 1..120: note = Artificially Synthesized Probe
  source 1..120: mol_type = other DNA
acatctccgacttcagcttcctcatggttctaggaaaaggcagttttgggaaggttggattcctggggttctgggggaaagggaggatgtctgtgggaaggtcagatttctggttcttag

SEQ ID NO: 14704 - DNA, 120 bp, synthetic construct
  misc_feature 1..120: note = Artificially Synthesized Probe
  source 1..120: mol_type = other DNA
aacctgcaagattttaagagggcgtgactttacttccaggggctccgaatgagagtggccagccacctggattaaaatatatgtatgagcaactttgattcctttttttttttttgagaa

SEQ ID NO: 14705 - DNA, 120 bp, synthetic construct
  misc_feature 1..120: note = Artificially Synthesized Probe
  source 1..120: mol_type = other DNA
ctttgattcttagtaggaagccagaattgcatctgtgtgtgagtggctgtggaaagagattttggtgttcccggatttcgagcgaatggtgggcttcagtcttcaattctgagaaggcgg

SEQ ID NO: 14706 - DNA, 120 bp, synthetic construct
  misc_feature 1..120: note = Artificially Synthesized Probe
  source 1..120: mol_type = other DNA
aatactttaaactgggcagggctctccctggagtattcagttggatggaagcttatttcctgtgttgtacgtgtttctctgatgtaagtgtactggacttctgtgctgcatttttcaaga

SEQ ID NO: 14707 - DNA, 120 bp, synthetic construct
  misc_feature 1..120: note = Artificially Synthesized Probe
  source 1..120: mol_type = other DNA
atattcctgactctgacacaaatattctaggtgggtggaaccagtgacttggccgttaggtagtctttctatttgaggccaaatgaatgtttgaagtaggtatgctttgtttccagaata

SEQ ID NO: 14708 - DNA, 120 bp, synthetic construct
  misc_feature 1..120: note = Artificially Synthesized Probe
  source 1..120: mol_type = other DNA
ctcactttgccacttactggctgtgtcagcttagacaattacatacattctaaatcagcttgattggattcctggactgctgagtgtactacaactaaaaaaattggttaccacactctt

SEQ ID NO: 14709 - DNA, 120 bp, synthetic construct
  misc_feature 1..120: note = Artificially Synthesized Probe
  source 1..120: mol_type = other DNA
atgaaaccccatctctaaatctttgccttggtatcattttttgtaacctcagaagactgtgaactactcatccaaccaggagaatgcttttagggtgtttcctgcagtttttcctctctt

SEQ ID NO: 14710 - DNA, 120 bp, synthetic construct
  misc_feature 1..120: note = Artificially Synthesized Probe
  source 1..120: mol_type = other DNA
gctgtctctgtgcctattagaaaaatgctcccattcctgaagtcactttacttccatctgttggaaaagttgatatgatgcataggttttgttagaacaatgatttccagccctgttgcc

SEQ ID NO: 14711 - DNA, 120 bp, synthetic construct
  misc_feature 1..120: note = Artificially Synthesized Probe
  source 1..120: mol_type = other DNA
ttttccctctcctcttctccatctccctcatgatttgttctgtttctctgtgtgtccctgggtctctgggtatgaatttcatctgctatcattttcatgtatcctctccttcttcctgtc

SEQ ID NO: 14712 - DNA, 120 bp, synthetic construct
  misc_feature 1..120: note = Artificially Synthesized Probe
  source 1..120: mol_type = other DNA
tcctccagtacgtcccgctgctgtgctctggggatttctgggatatatggaggattctttccccagaggctcccaatcagcttttgttctagacttccccatcccgaagccatcacttct

SEQ ID NO: 14713 - DNA, 120 bp, synthetic construct
  misc_feature 1..120: note = Artificially Synthesized Probe
  source 1..120: mol_type = other DNA
caagagctccagccacagcagctgccgctcccgatgggtgcccttcatgaggctgctgttctccagggcacggcgggacaagtagggcagcacctccatcacggggccatagggcacgta

SEQ ID NO: 14714 - DNA, 120 bp, synthetic construct
  misc_feature 1..120: note = Artificially Synthesized Probe
  source 1..120: mol_type = other DNA
tccactctgtcctgtcttcacaccaccccgtatagcgtcttacaaagattctcagggtctgaaatatccacgcagtggcagttctcaagtttcatctccagcttactatatccaggtatc

SEQ ID NO: 14715 - DNA, 120 bp, synthetic construct
  misc_feature 1..120: note = Artificially Synthesized Probe
  source 1..120: mol_type = other DNA
gcagcagaagcatcagctgagccagcccacccctggcctacagaacatgccactgttccagcctctaagtttggggctggtttgttccttggccaaagccaactccgattgtttgagggt

SEQ ID NO: 14716 - DNA, 120 bp, synthetic construct
  misc_feature 1..120: note = Artificially Synthesized Probe
  source 1..120: mol_type = other DNA
gaggcctcctgagggactggcctccaacactgcatttgtacctttcaggagccatccgaataccctgatgaaatttagttttttaattgtgaagtttaataagtcagatgttaattttta

SEQ ID NO: 14717 - DNA, 120 bp, synthetic construct
  misc_feature 1..120: note = Artificially Synthesized Probe
  source 1..120: mol_type = other DNA
catccattgagctggctctttccaagggtatccacaggatcaggaggaacaggagcagcatctgcccctcccagcacctcatgaaaaagaaagaccagcaaccaagcaaaagcgatgtct

SEQ ID NO: 14718 - DNA, 120 bp, synthetic construct
  misc_feature 1..120: note = Artificially Synthesized Probe
  source 1..120: mol_type = other DNA
ttataaaagaataaccttaatgcttttgaaaaagtaacacatgacataaaagctgaggaaataccagttctgacctggggacacatgtggctgacaagttcagtctccaagcctctccct

SEQ ID NO: 14719 - DNA, 120 bp, synthetic construct
  misc_feature 1..120: note = Artificially Synthesized Probe
  source 1..120: mol_type = other DNA
gaactgaaaacacgctggaggaaatggtcatgtgacaccttccaagtttggggtgtcgggtacatctagtggaccctcataaagattgttgtcttcctcctgctccttagacactcttgg

SEQ ID NO: 14720 - DNA, 120 bp, synthetic construct
  misc_feature 1..120: note = Artificially Synthesized Probe
  source 1..120: mol_type = other DNA
cgaagtgtgtactccccagttcccacagaggccccaccgttgtgggagagccccctgcaactcccatgtgacattgaacaagtgaacactgatcacccaatcgtcaaacagaagggctcc

SEQ ID NO: 14721 - DNA, 120 bp, synthetic construct
  misc_feature 1..120: note = Artificially Synthesized Probe
  source 1..120: mol_type = other DNA
aagcactctgtggacactagtgggcttgtcttcttccccctggaccacagggggtctgtggggccatagtgtgcagtgattttggtcatgttaagttcccagggtaggcaacaagagaca

SEQ ID NO: 14722 - DNA, 120 bp, synthetic construct
  misc_feature 1..120: note = Artificially Synthesized Probe
  source 1..120: mol_type = other DNA
ttcactcatattttatccttccccccacccattggcctctggtgctgtttctggctttattacatcgttagtaagaacaggatccatgtctggtttgtttctactgcatagacaggtcta

SEQ ID NO: 14723 - DNA, 120 bp, synthetic construct
  misc_feature 1..120: note = Artificially Synthesized Probe
  source 1..120: mol_type = other DNA
gaaggttctagcacttaccagaaactggggtctccccagtgctgtgagcttaatggctatgaagccgtcatcgctgactctacctgtcagaagccacaggaaaagccatgacagccctga

SEQ ID NO: 14724 - DNA, 120 bp, synthetic construct
  misc_feature 1..120: note = Artificially Synthesized Probe
  source 1..120: mol_type = other DNA
ctttgggaggccaaggtggagggatcacttgagcccaggagttccaggccaaccagggcaacatagtgagacctcattttttttttttttttttgagatggagtctcactctgtcgccca

SEQ ID NO: 14725 - DNA, 120 bp, synthetic construct
  misc_feature 1..120: note = Artificially Synthesized Probe
  source 1..120: mol_type = other DNA
cttggcctcattggcgtagaagtaggtgcgggcactgatgacaccattcctgcggtccccgaaggcccagtgggcctggtattgcttgtcccgcttattcgtgcctggaatagcgaatgc

SEQ ID NO: 14726 - DNA, 120 bp, synthetic construct
  misc_feature 1..120: note = Artificially Synthesized Probe
  source 1..120: mol_type = other DNA
tgggtggagaaatcagaacgatattcctgagctctcagaacagcccagggcttgcagcaggttctcaaataaaggtagttacctggttccaagacagagccagtcagggctgagaggaac

SEQ ID NO: 14727 - DNA, 120 bp, synthetic construct
  misc_feature 1..120: note = Artificially Synthesized Probe
  source 1..120: mol_type = other DNA
cagtgatgggagctggcaggcagatatgctctggccaccttatgctgacagagatgtgacagaagagggtggaatgtcaccatgtgactagggaacaggcaggcagcacgtgaacccctg

SEQ ID NO: 14728 - DNA, 120 bp, synthetic construct
  misc_feature 1..120: note = Artificially Synthesized Probe
  source 1..120: mol_type = other DNA
acactctccaacaggcatcatggataagtcacaaggagacacaaatggtggttcccaggcaggtcaggggtcctatttccactggagaagaggaagaaagcaccctgggagcagctgatt

SEQ ID NO: 14729 - DNA, 120 bp, synthetic construct
  misc_feature 1..120: note = Artificially Synthesized Probe
  source 1..120: mol_type = other DNA
cttgtgacaggagggtaggttaggaaggcagatctctaagcagttccctgcactagggtctgcgtgactggtcactcctggccaagcaggccatgctgcagtgtggacatcagaccagtg

SEQ ID NO: 14730 - DNA, 120 bp, synthetic construct
  misc_feature 1..120: note = Artificially Synthesized Probe
  source 1..120: mol_type = other DNA
aagaaaattatatgaaattctaattactatggccctactgaggcagagtgaagccgttgtggcagggagggtgtggcccgactgagagtctgtgctacctggctgtttacacaaacttgc

SEQ ID NO: 14731 - DNA, 120 bp, synthetic construct
  misc_feature 1..120: note = Artificially Synthesized Probe
  source 1..120: mol_type = other DNA
ggactcctggtcctccccggctacaaaatgcccatagaaggtcatcttcatgagcttgttgaatagcctctgtcctagaagtttcctggaaacatacagcagctgaaaggcaaagggaag

SEQ ID NO: 14732 - DNA, 120 bp, synthetic construct
  misc_feature 1..120: note = Artificially Synthesized Probe
  source 1..120: mol_type = other DNA
aatcatatttcaccacgtcgctcattcagatgtcccaagctgccatgcaccaagcaccttttatagactggaaacaaccaaaggaaaccgaccaggatctcacatcctggtggtaaagga

SEQ ID NO: 14733 - DNA, 120 bp, synthetic construct
  misc_feature 1..120: note = Artificially Synthesized Probe
  source 1..120: mol_type = other DNA
gactttaaggcattttgttcttttatcaagaggattagaaactggaaaatgaacaggctgacatgttctccgtctcccactgagcctgagccaggcctcattcctgctggcagcacccag

SEQ ID NO: 14734 - DNA, 120 bp, synthetic construct
  misc_feature 1..120: note = Artificially Synthesized Probe
  source 1..120: mol_type = other DNA
agccccacatcttcttcaggtgaggagatccttcgaggatttagaaacctgcaccagtaacacatacacttgtaccccctgtgaaagactcaaccaaatgtgtgcagagtaacactggta

SEQ ID NO: 14735 - DNA, 120 bp, synthetic construct
  misc_feature 1..120: note = Artificially Synthesized Probe
  source 1..120: mol_type = other DNA
gggctctctatgaccaaaacttgaccttaagacatccttgtgtgcacacacagcaatgccctcccagagccctccatctgtccagttcagctccttcttcctccaccatcctccgcactc

SEQ ID NO: 14736 - DNA, 120 bp, synthetic construct
  misc_feature 1..120: note = Artificially Synthesized Probe
  source 1..120: mol_type = other DNA
tcccggggtttgaattccggggttccaggctatgagccctacaccaggattctcttgtctcaacatgaagaatactccattttaaattccaagtgataactctgtattcccacaagtggt

SEQ ID NO: 14737 - DNA, 120 bp, synthetic construct
  misc_feature 1..120: note = Artificially Synthesized Probe
  source 1..120: mol_type = other DNA
tagtcttaattcccctgaaaaagctgtttggatctttatcatttggtgacaagtatttgggacatgatagtgtcacttggggtcctcccaagagatgcccaaatggaaagaagcctgtgt

SEQ ID NO: 14738 - DNA, 120 bp, synthetic construct
  misc_feature 1..120: note = Artificially Synthesized Probe
  source 1..120: mol_type = other DNA
agcgtgcgggctcctatcttctggaagaactcttcgagggaaacttggaaaaagaatgttatgaagaaatctgtgtctatgaagaagcaagagaagtgtttgaaaatgaagtagtcactg

SEQ ID NO: 14739 - DNA, 120 bp, synthetic construct
  misc_feature 1..120: note = Artificially Synthesized Probe
  source 1..120: mol_type = other DNA
tatcccatttgtaacatttttatgttttaactctaaaggatgaattctggagacgatataagggtaagtggtttccttcgtctcctcagaagtattaattcctcgggatgaggtgcgtgg

SEQ ID NO: 14740 - DNA, 120 bp, synthetic construct
  misc_feature 1..120: note = Artificially Synthesized Probe
  source 1..120: mol_type = other DNA
cctcctgctcaggtccccgtccctgccacgtccccacatcctcctcctgctcaggtcctcgtccctgccacctccccccatcctcctcctgctcaggtccccgtccctgccacgtcccca

SEQ ID NO: 14741 - DNA, 120 bp, synthetic construct
  misc_feature 1..120: note = Artificially Synthesized Probe
  source 1..120: mol_type = other DNA
cctgcaggcggctccccgtgcatctcccagccctgcctccacaacggctcttgccaggacagcatctggggctacacctgcacctgctcccccggctatgagggcagcaactgcgagctg

SEQ ID NO: 14742 - DNA, 120 bp, synthetic construct
  misc_feature 1..120: note = Artificially Synthesized Probe
  source 1..120: mol_type = other DNA
agcaatttaaagggaatagccaatgcaagccggcagacaaaacaggcgcgtggattagtccatgtggaaaaaggacaaatagaagtgtcatcactcatggagtctttttttttttttaat

SEQ ID NO: 14743 - DNA, 120 bp, synthetic construct
  misc_feature 1..120: note = Artificially Synthesized Probe
  source 1..120: mol_type = other DNA
taagattataatggttagtaccatagacggaattatgcaacggttaacaccatagacagagtccgatattcgctgagaaggcgctgatttttattctcatgttgctgccgcaaatgcaga

SEQ ID NO: 14744 - DNA, 120 bp, synthetic construct
  misc_feature 1..120: note = Artificially Synthesized Probe
  source 1..120: mol_type = other DNA
agtagtcagctatttctccctcctcaggctaattcccagcacctcattctgggtccatttgctgtctggccagtattttattcttttcttgctttctgtatatcttcacaaaatagatat

SEQ ID NO: 14745 - DNA, 120 bp, synthetic construct
  misc_feature 1..120: note = Artificially Synthesized Probe
  source 1..120: mol_type = other DNA
aagagccatataaccagggaggaggcattctctaaacacagctggtgtgtttaagacagaggacactgacttaggcaggctacatactattagattttttacttcagtattataaattgt

SEQ ID NO: 14746 - DNA, 120 bp, synthetic construct
  misc_feature 1..120: note = Artificially Synthesized Probe
  source 1..120: mol_type = other DNA
tatattgttatgattctgttttctctcctttgttggtttatcatctctggttctttgttggcggttgcttcacagtttggagaatgcatctttaccctatcacagtccactccactttcg

SEQ ID NO: 14747 - DNA, 120 bp, synthetic construct
  misc_feature 1..120: note = Artificially Synthesized Probe
  source 1..120: mol_type = other DNA
catgcctggcccattattttcagattttttttctctcctccttctccctgctctgttttgggactctaattacatgtatcttaagctgtttgaaatcccatagctcagagatggtctgtt

SEQ ID NO: 14748 - DNA, 120 bp, synthetic construct
  misc_feature 1..120: note = Artificially Synthesized Probe
  source 1..120: mol_type = other DNA
ggaaattctggacagtagctgagaccgttgtttcttggggattacgattcctgaaaaccatcattccatagattttgtcaattttttgcttcaggtgggagggtaaatctgatcactgtt

SEQ ID NO: 14749 - DNA, 120 bp, synthetic construct
  misc_feature 1..120: note = Artificially Synthesized Probe
  source 1..120: mol_type = other DNA
tttctaatgcaacatagaactgaatttactgtcaataaaactgagatacttatcaactcaggaagcatatgtaaaataccagcagaagcctgggcccagcgacaggcaagtgctaactca

SEQ ID NO: 14750 - DNA, 120 bp, synthetic construct
  misc_feature 1..120: note = Artificially Synthesized Probe
  source 1..120: mol_type = other DNA
tttgagcattatgtccccttgaaaatcagactgtaaagaactgacgattgttcatgatttcagattttaacagaacgagccaagacccgctgatgatcaagataacgcacgtccatgtgc

SEQ ID NO: 14751 - DNA, 120 bp, synthetic construct
  misc_feature 1..120: note = Artificially Synthesized Probe
  source 1..120: mol_type = other DNA
aaattactcatatcagagactcagctttagaagttctaacttcattctctggggtgcaacctgtgtactgggcttttaacattcccgggtgatttttaacatttccatgcatgcagccaa

SEQ ID NO: 14752 - DNA, 120 bp, synthetic construct
  misc_feature 1..120: note = Artificially Synthesized Probe
  source 1..120: mol_type = other DNA
taaaagcaggcagggatgatcttggtgtttggcagagctagtaagaacagcaggcaagtaccctttgctggttagctacacatcaaagtcacttaagaaagagtttttaaaagtactgat

SEQ ID NO: 14753 - DNA, 120 bp, synthetic construct
  misc_feature 1..120: note = Artificially Synthesized Probe
  source 1..120: mol_type = other DNA
tggtgagtgggaccctttgtccttctccttccctccatcctcacaatttccagaacaaaccatgccccttaacttgaatcctctcacctccaggcttaagacacatttctagtgcccatt

SEQ ID NO: 14754 - DNA, 120 bp, synthetic construct
  misc_feature 1..120: note = Artificially Synthesized Probe
  source 1..120: mol_type = other DNA
tgtctgcttaggaagaacagagaatgggccactgtgcgaaggacgtggagccaaagagctggctggaaaggagtcttttaaggttcagagcaaatgtagctatattcttcctctttctct

SEQ ID NO: 14755 - DNA, 120 bp, synthetic construct
  misc_feature 1..120: note = Artificially Synthesized Probe
  source 1..120: mol_type = other DNA
ccccactctgaccagggaaagaaactagagagggtcaagattcacccatttgatcaattaactgaggtaggtttcattttcatataacttgcttgcctttgagatacttcaagtgactta

SEQ ID NO: 14756 - DNA, 120 bp, synthetic construct
  misc_feature 1..120: note = Artificially Synthesized Probe
  source 1..120: mol_type = other DNA
tttatggagtccaaacgcagaccgtagttcaccttacagccttgggtttgtctgcttttggagacatatatccagtagatagatagacaacacagatacatttttttccctttcttactg

SEQ ID NO: 14757 - DNA, 120 bp, synthetic construct
  misc_feature 1..120: note = Artificially Synthesized Probe
  source 1..120: mol_type = other DNA
ataggtattttttcagccctttccacactccttctctcttccctctagtagttgcagtgtctactcttcccatctttacatccatttttacccaatgctcagctccgacttatacatgag

SEQ ID NO: 14758 - DNA, 120 bp, synthetic construct
  misc_feature 1..120: note = Artificially Synthesized Probe
  source 1..120: mol_type = other DNA
caacgagaattcttgcctgcccactggtagaattcttgttttcagctgtctttcattgtttgcttttcaaagaaaaaccaaaggtaaagtggtatgatcttccacacgtgaaccagtttg

SEQ ID NO: 14759 - DNA, 120 bp, synthetic construct
  misc_feature 1..120: note = Artificially Synthesized Probe
  source 1..120: mol_type = other DNA
gatatcttagagaagtagacaaagaaatctatagttcagaatgaacagtaccaagaatgacatgtcccccaaattgagcatgggtagctggatctgaacctatcctacacatctgagtct

SEQ ID NO: 14760 - DNA, 120 bp, synthetic construct
  misc_feature 1..120: note = Artificially Synthesized Probe
  source 1..120: mol_type = other DNA
agtctcttcctctataaatggaaataattttgctccacacaagtcaccattagcacgttggtgggaagttaaactgcgaaactcagcataaacaaagagcaatgtaccactgttgcttac

SEQ ID NO: 14761 - DNA, 120 bp, synthetic construct
  misc_feature 1..120: note = Artificially Synthesized Probe
  source 1..120: mol_type = other DNA
tagataagactttgcccctctcctgggagctccaggacactaaaaagccaagcttgctaccaacacttgcccttccttaagtacattaaatataaccccaatagtaaaatatattcctaa

SEQ ID NO: 14762 - DNA, 120 bp, synthetic construct
  misc_feature 1..120: note = Artificially Synthesized Probe
  source 1..120: mol_type = other DNA
tcaattgtctggtgtgcagcctgtgttctgggcttttaagcttcccaggtgatttttaacatttctaggcatgcagccaaggttaagaattgctgttgttttgaccaataataacgtata

SEQ ID NO: 14763 - DNA, 120 bp, synthetic construct
  misc_feature 1..120: note = Artificially Synthesized Probe
  source 1..120: mol_type = other DNA
cagggatgatcttggggtggtgagagctagtgagaagagcaggctagtacttttgctggttagctacacattaaagccacctaagaatgagtacttaaaaatactgatccctgtgttcta

SEQ ID NO: 14764 - DNA, 120 bp, synthetic construct
  misc_feature 1..120: note = Artificially Synthesized Probe
  source 1..120: mol_type = other DNA
gtgcacagttagcaaaggcctggagtgaagaatgttgggaaaacttcaaggagctccttgtgcccacagtgctagtgacatggagattatgggaaagagtctgggaaggcagattgagga

SEQ ID NO: 14765 - DNA, 120 bp, synthetic construct
  misc_feature 1..120: note = Artificially Synthesized Probe
  source 1..120: mol_type = other DNA
caggacttatgttttggagtcctctccaggggcagtgttcctcttcaatgttccatcctagactattgtctctttctctggcctaacccacatttctttctttgttctcttcctgatcct

SEQ ID NO: 14766 - DNA, 120 bp, synthetic construct
  misc_feature 1..120: note = Artificially Synthesized Probe
  source 1..120: mol_type = other DNA
aaattcatctgaagttgtttggagctgtacgacaatggatgttattcttccagttctcccagcagctctacaaaatcagtgatataccatttggcgttatccttgacttgttgcctgatc

SEQ ID NO: 14767 - DNA, 120 bp, synthetic construct
  misc_feature 1..120: note = Artificially Synthesized Probe
  source 1..120: mol_type = other DNA
cgctcctggctgattttgtcatttcttgaaaatgagattgggagctccctgagaaatctcttcattttacttttatgcattcctcattaaactagtagcccaatgttcactacttagaca

SEQ ID NO: 14768 - DNA, 120 bp, synthetic construct
  misc_feature 1..120: note = Artificially Synthesized Probe
  source 1..120: mol_type = other DNA
aatgagctgagattgcaccactgcactccggcctaggtgacagagcaagaacctgtctcaaaaaataaaacctctgctagtctcagaaaatgacattaattcagaggaataaaatgctgt

SEQ ID NO: 14769 - DNA, 120 bp, synthetic construct
  misc_feature 1..120: note = Artificially Synthesized Probe
  source 1..120: mol_type = other DNA
gagcacacacctaggctaaaaggtggtgcccatcctacggggataaggcattgttaaaagttttaaaaggtttttagttccttattcacaacttttcttgggtttgcacaaagttgacaa

SEQ ID NO: 14770 - DNA, 120 bp, synthetic construct
  misc_feature 1..120: note = Artificially Synthesized Probe
  source 1..120: mol_type = other DNA
aaaatggccgtcggtaaagtcacacagcctggagctccacacctgttcctgggaataaacaagctttgctttgcttttatttccttttatgattatgattatgattatagaaatggggtc

SEQ ID NO: 14771 - DNA, 120 bp, synthetic construct
  misc_feature 1..120: note = Artificially Synthesized Probe
  source 1..120: mol_type = other DNA
aatataacagctgtggcaccgctatggaccagagaggggacaggaggcttccccaagggctgtagttcagtaatccattaacaaaagtctcccttctaaagtctctgtcttgtttttttt

SEQ ID NO: 14772 - DNA, 120 bp, synthetic construct
  misc_feature 1..120: note = Artificially Synthesized Probe
  source 1..120: mol_type = other DNA
tctacaatactcctaaagccaccagatattaggaaaacctgaacatttcgctcctgtaggcgacttaccagctccctgcaaaataaaatacaaaatacccaacactgagtaatacaaaag

SEQ ID NO: 14773 - DNA, 120 bp, synthetic construct
  misc_feature 1..120: note = Artificially Synthesized Probe
  source 1..120: mol_type = other DNA
acaacaaaaaaaaaacaatgggtagggtttgtctgctttaggaaaccgttccagaactctactctgcccatggacccagaaaaacacaagatgaggacaaacaaggaaagcttaggtttt

SEQ ID NO: 14774 - DNA, 120 bp, synthetic construct
  misc_feature 1..120: note = Artificially Synthesized Probe
  source 1..120: mol_type = other DNA
taaaaaatgaaaatgaaaataaataaaccacccagagggcactctaaaggaatagttagatgctcttgggaggatgtgccccccaacactggtgctgaaatacacctggagccggggttc

SEQ ID NO: 14775 - DNA, 120 bp, synthetic construct
  misc_feature 1..120: note = Artificially Synthesized Probe
  source 1..120: mol_type = other DNA
ctatccataggtatttttcttgcaagctgtgagctgtcataaatcaagaaagagaccaaaggttaagcattcttccatgaaaggcagttgaaaatgaaatagtgtccgggtgcagcagct

SEQ ID NO: 14776 - DNA, 120 bp, synthetic construct
  misc_feature 1..120: note = Artificially Synthesized Probe
  source 1..120: mol_type = other DNA
acatcaaaacacacagcatctgctgagtagaaaagcttcctcagctctgagtgggagaccatcgctggaagaattttcctcctacaagaaaaaagataaatgtatttaaagacatcaaat

SEQ ID NO: 14777 - DNA, 120 bp, synthetic construct
  misc_feature 1..120: note = Artificially Synthesized Probe
  source 1..120: mol_type = other DNA
aggagtttagactttaacttccagatactgggaaaggctttaagcctcagaaaaaaggtcagagctaaatatgagggctaaacatacacaatgtcgccaatgtacaggggctagttgaag

SEQ ID NO: 14778 - DNA, 120 bp, synthetic construct
  misc_feature 1..120: note = Artificially Synthesized Probe
  source 1..120: mol_type = other DNA
ggcctttattttttagaaaatctttggactagaattaggatgaaagggaccctcaagattgcctagaccagcctcctatcagagactaatatgtcatatacaaggctacacagatgatgt

SEQ ID NO: 14779 - DNA, 120 bp, synthetic construct
  misc_feature 1..120: note = Artificially Synthesized Probe
  source 1..120: mol_type = other DNA
agtagctgggactacaggtgtgagccaccacgactggctgatttttacattttaaacagttgaaaaaaaaatcaaaagaagaataatattttttgacatgtaaaaactaatgaaattcaa

SEQ ID NO: 14780 - DNA, 120 bp, synthetic construct
  misc_feature 1..120: note = Artificially Synthesized Probe
  source 1..120: mol_type = other DNA
gccacagtacccagccattaacataatgtctttattacataatttatgcccatcacgatctggctcctatgcctgtggattttaccaacctcagtccgcacaaatacacatacacacaca

SEQ ID NO: 14781 - DNA, 120 bp, synthetic construct
  misc_feature 1..120: note = Artificially Synthesized Probe
  source 1..120: mol_type = other DNA
cccttataccacattatttcctccccatcaacccagaaaatcagtcaatcactccagttgaattatcttctatctctgcacccagcacccaataggtgttagttaaatgtttcatgaatt

SEQ ID NO: 14782 - DNA, 120 bp, synthetic construct
  misc_feature 1..120: note = Artificially Synthesized Probe
  source 1..120: mol_type = other DNA
ctgacacaagacccaaagaggaatgcataatgcatgggtgccatcttcaagaggtttccagtcttgtcgaaatgattagacaaataattactggccatgtttgaaaaaccagttactttg

SEQ ID NO: 14783 - DNA, 120 bp, synthetic construct
  misc_feature 1..120: note = Artificially Synthesized Probe
  source 1..120: mol_type = other DNA
aaaaaaaaagcaagaccatcagccttgagtttgaaaggaaaggtacatttcctccactaaaagtgagaactgatttacacatccccagctgaacattaggcctgacttacagctcagaat

SEQ ID NO: 14784 - DNA, 120 bp, synthetic construct
  misc_feature 1..120: note = Artificially Synthesized Probe
  source 1..120: mol_type = other DNA
tgctgagtaaggtcagttgcttcaaagtaaattgtgtacattagaattccacacacagaaaaatcattgccagagaatggactctggattcttcgtatttggctctaacagggagggaga

SEQ ID NO: 14785 - DNA, 120 bp, synthetic construct
  misc_feature 1..120: note = Artificially Synthesized Probe
  source 1..120: mol_type = other DNA
cacagtagattctgaaaaggttctgaatcagaggagagtcaaagaggttccctgtaacaagggctgggatccccagcacatgcacttacactatattttattttatcttttgtttagaga

SEQ ID NO: 14786 - DNA, 120 bp, synthetic construct
  misc_feature 1..120: note = Artificially Synthesized Probe
  source 1..120: mol_type = other DNA
taaaagttgaaatgatatgtaatataaccagctattctgggaagctgagatcttctgcatgccacatagttgacatcaatttttaaaattcaggtgaggagtaaactgctggccgggtgc

SEQ ID NO: 14787 - DNA, 120 bp, synthetic construct
  misc_feature 1..120: note = Artificially Synthesized Probe
  source 1..120: mol_type = other DNA
tactcttctatggcttcaattctgcaaggttcaagtctgataggaaatcatgtacacctgattagcagggtacaaagacaagggagagggaaagagaatctcttaggagaactaaatgca

SEQ ID NO: 14788 - DNA, 120 bp, synthetic construct
  misc_feature 1..120: note = Artificially Synthesized Probe
  source 1..120: mol_type = other DNA
tcaccgacatgaaagtgacagggctatatggtcatgatattgaaaacctacccggcacggtaatacagaaatcttggattttattattttcctccctgatcctcattccaatatcagtca

SEQ ID NO: 14789 - DNA, 120 bp, synthetic construct
  misc_feature 1..120: note = Artificially Synthesized Probe
  source 1..120: mol_type = other DNA
caattagtgaaatctccgtcggggggcctcttttgaaatccacgtttggcattatacgcttgcagcagtgtaggtcccaaaagaacttcaaagactacttatattcttttttttttgaga

SEQ ID NO: 14790 - DNA, 120 bp, synthetic construct
  misc_feature 1..120: note = Artificially Synthesized Probe
  source 1..120: mol_type = other DNA
tccgtttaaaaaaaaaattattccatgtgtcacttgcccagctccttgtatgttaactacaacaaataaggggtgtttcccccaaacatttaccactggagttagctggctggagctggg

SEQ ID NO: 14791 - DNA, 120 bp, synthetic construct
  misc_feature 1..120: note = Artificially Synthesized Probe
  source 1..120: mol_type = other DNA
agaaacaaaatgttaaacaccaaatgtttgtatctaagtggtaacagaatttattttgtttgaggtgaaaagaaactcaagtaagtaaatgtggaaggctagaagagttaacttatgcta

SEQ ID NO: 14792 - DNA, 120 bp, synthetic construct
  misc_feature 1..120: note = Artificially Synthesized Probe
  source 1..120: mol_type = other DNA
catagctgttcttagtggaatgataggacatgtgaaccaaatacaatatagcataatgaagacaaaggcataattactggaataatagcacataagaaccaaatacaatacagcataatg

SEQ ID NO: 14793 - DNA, 120 bp, synthetic construct
  misc_feature 1..120: note = Artificially Synthesized Probe
  source 1..120: mol_type = other DNA
tttttataagtcattcagtgctaatagccttctaaagtatagtaaattggaacaagccctccggaaaacaatatggtgttattcagtaacattgaacacatgcggccaggtgcggtggct

SEQ ID NO: 14794 - DNA, 120 bp, synthetic construct
  misc_feature 1..120: note = Artificially Synthesized Probe
  source 1..120: mol_type = other DNA
gtaggatggtaggtatacggatgctttttatatctgtgtgtataaaatatttgctaacaattgtaatatttcttatcaatacgttaaataccaatacattgctggccgggcacggtggct

SEQ ID NO: 14795 - DNA, 120 bp, synthetic construct
  misc_feature 1..120: note = Artificially Synthesized Probe
  source 1..120: mol_type = other DNA
agtcataccatggaaatatgcccatgatatgttcacatgaataaaggaagttgaagaacgtatatatcgtttgagccatttttgaacaaagaaatctctatgtgtgtctatatccaggta

SEQ ID NO: 14796 - DNA, 120 bp, synthetic construct
  misc_feature 1..120: note = Artificially Synthesized Probe
  source 1..120: mol_type = other DNA
gctgttcatgacacagtgcaaaaatgtgttgtttgaaacaagcagagcagagcagggatacaaagaactgagggcaagcctcaatcaagcagaaagggagtggaaacccttgtaacccaa

SEQ ID NO: 14797 - DNA, 120 bp, synthetic construct
  misc_feature 1..120: note = Artificially Synthesized Probe
  source 1..120: mol_type = other DNA
caagaaggacaaacaaaaatacaaatatagagattcatggaaaacatgacaaaataaggcaagacaaaactgacaaaatccaggaaagaagcagaagggagccgggcacagtgactcaca

SEQ ID NO: 14798 - DNA, 120 bp, synthetic construct
  misc_feature 1..120: note = Artificially Synthesized Probe
  source 1..120: mol_type = other DNA
agacagctgtagaggacagaccaaagaaagccaacatgcacaattgaaattttcaacgaagataacccaaacattagaacaaataagtatttaactgggtgtggtgacttgaacctgtaa

SEQ ID NO: 14799 - DNA, 120 bp, synthetic construct
  misc_feature 1..120: note = Artificially Synthesized Probe
  source 1..120: mol_type = other DNA
ggtcttgcatgggaatatttttcttgaggacactgctaatgaataaacattactcaccaatggatagcaaagggaacttcagcaaagggacaagcaagagcattgagtgtacatcattgc

SEQ ID NO: 14800 - DNA, 120 bp, synthetic construct
  misc_feature 1..120: note = Artificially Synthesized Probe
  source 1..120: mol_type = other DNA
catactgatacaaattcattcattcagtcagtcattcatggaggagaagggaaagttcttccttacagcagaatttcaaccaataaatgtataatgaatgatgaaagcagaaaattggcc

SEQ ID NO: 14801 - DNA, 120 bp, synthetic construct
  misc_feature 1..120: note = Artificially Synthesized Probe
  source 1..120: mol_type = other DNA
ccaacttccatggggtaacacaatgtggcccagatggatgcctcaaagatggtgggtttggatcacagctaaggaacactcagctcggggaatctattgcttttgttgttgttgttttat

SEQ ID NO: 14802 - DNA, 120 bp, synthetic construct
  misc_feature 1..120: note = Artificially Synthesized Probe
  source 1..120: mol_type = other DNA
gaaatctattgttttcataccaagtagtgagtgggcaagcctgctctttgtccaggaagaaacattaacttgtctctgaagattagcaactgtataaacaaccctgagaaaagccccaga

SEQ ID NO: 14803 - DNA, 120 bp, synthetic construct
  misc_feature 1..120: note = Artificially Synthesized Probe
  source 1..120: mol_type = other DNA
gaaacatcaaataaccctaaagtaagggacagtctgtaaaataactggccagtattcaaaaaaatgccaagatcattaaagactgaaaaattgcagaactgttccagactgaagaacatg

SEQ ID NO: 14804 - DNA, 120 bp, synthetic construct
  misc_feature 1..120: note = Artificially Synthesized Probe
  source 1..120: mol_type = other DNA
gagaacttcttatacatgttatttaaattgttttttccccttatcaagaacacctatttatgtatttaatatgcttccatcagatgtcgcctgggagacaagtctcgctgttgttgccca

SEQ ID NO: 14805 - DNA, 120 bp, synthetic construct
  misc_feature 1..120: note = Artificially Synthesized Probe
  source 1..120: mol_type = other DNA
cgcatgcacaccgtgtaatgcctatggaactaataactagtcttctatcgtgcagtgctactagtcacatatatagatgtttttgtgattctcaaatacacaaacccacctaagagcatc

SEQ ID NO: 14806 - DNA, 120 bp, synthetic construct
  misc_feature 1..120: note = Artificially Synthesized Probe
  source 1..120: mol_type = other DNA
aaaataaataaagtaaaataccacgtgttactgaatccctggtatttggcgggacactggatactggaaacaattgtggagctctttggaaatttaccttaaaagggagtccgctcaaag

SEQ ID NO: 14807 - DNA, 120 bp, synthetic construct
  misc_feature 1..120: note = Artificially Synthesized Probe
  source 1..120: mol_type = other DNA
cgacacaatagcaggttgctctttgtgctaagactgacaccatgaggacacagatttgggggaagggggaatctctaggcaaaggctgttacagtcaaatctctgcgaacgattgtgatc

SEQ ID NO: 14808 - DNA, 120 bp, synthetic construct
  misc_feature 1..120: note = Artificially Synthesized Probe
  source 1..120: mol_type = other DNA
catcctgcagaagaagccccgccaccagcagcttctgccatctctctcctcctttttcttcagccacaggctcccagacatgacagccatcatcaaagagatcgttagcagaaacaaaag

SEQ ID NO: 14809 - DNA, 120 bp, synthetic construct
  misc_feature 1..120: note = Artificially Synthesized Probe
  source 1..120: mol_type = other DNA
gattagcgagctcggtaatccggtctcctaaatgaacaaaaaagtagacgctttttgaggttgagcatatttcgattaaatcttggcttaggccctagatcaagggtttagatcagaata

SEQ ID NO: 14810 - DNA, 120 bp, synthetic construct
  misc_feature 1..120: note = Artificially Synthesized Probe
  source 1..120: mol_type = other DNA
aatggggaaagtattgacaggaattgagagctattggtaggccagtgtataaggtatgtgaaaacagaattaagttattggtctgaagtgactgaagcatttaggctctatcaaggccta

SEQ ID NO: 14811 - DNA, 120 bp, synthetic construct
  misc_feature 1..120: note = Artificially Synthesized Probe
  source 1..120: mol_type = other DNA
gaaagtcagtgaagtgcttgcttttttgataattgcactcccaataattttgatattccaacgtacttggtttgcttgttttcacgttaatgttttctgtttattggagtgggaaggcat

SEQ ID NO: 14812 - DNA, 120 bp, synthetic construct
  misc_feature 1..120: note = Artificially Synthesized Probe
  source 1..120: mol_type = other DNA
ttgatattgtgtgtgacttcagagtttgtaaagagaattgtagaagtgttgcatgcatatgacaattttctgcttaattgaaatgtgaggcctctgccatactacaaggatttagcttcc

SEQ ID NO: 14813 - DNA, 120 bp, synthetic construct
  misc_feature 1..120: note = Artificially Synthesized Probe
  source 1..120: mol_type = other DNA
cagagagaataatgttgaggttagactaaccttaaattggtaaggctttgctgagcaaactgataactgtaagtcttttatagggtgcattactgccacatatacgttcttccataggtg

SEQ ID NO: 14814 - DNA, 120 bp, synthetic construct
  misc_feature 1..120: note = Artificially Synthesized Probe
  source 1..120: mol_type = other DNA
gattttagggaggcagtgtgggctctggagccagactgcttgttttgtaatcctggatcttccatttagtagctggatgactttgagtaggttatttagattttctcaatctattttatc

SEQ ID NO: 14815 - DNA, 120 bp, synthetic construct
  misc_feature 1..120: note = Artificially Synthesized Probe
  source 1..120: mol_type = other DNA
ggctgtactgatttcccagatgtaccacagcactcttagtagtgaagcacttgacttctagtgagtggattttttgtgtgtgtgttttatattgcagagtgaatacactctgtctgatac

SEQ ID NO: 14816 - DNA, 120 bp, synthetic construct
  misc_feature 1..120: note = Artificially Synthesized Probe
  source 1..120: mol_type = other DNA
agccactgcgcccggcctcagatactcttttaattagatgcgtttaaaaatttaacccaccattgctggcatgaatagatgtatttttagagtgattcataaatatcgtatacatgttta

SEQ ID NO: 14817 - DNA, 120 bp, synthetic construct
  misc_feature 1..120: note = Artificially Synthesized Probe
  source 1..120: mol_type = other DNA
ggaaaatgttatcctgattttatagacgagatagtgagtttagaaaggcagtatggtggaatggagcatagatttggagttggctagacctaaagtccagattaaatctctgctcaaggc

SEQ ID NO: 14818 - DNA, 120 bp, synthetic construct
  misc_feature 1..120: note = Artificially Synthesized Probe
  source 1..120: mol_type = other DNA
gtacctttgcccccaggtgtgatatttaagaaggtcaacttactaaatcagtgatggagttagtcctaacatctgggtgttctgactgctgctaggccagtattctttatatgataataa

SEQ ID NO: 14819 - DNA, 120 bp, synthetic construct
  misc_feature 1..120: note = Artificially Synthesized Probe
  source 1..120: mol_type = other DNA
ttaagtggatttaagataacctaaacattagagaggattttcatggttttgattcatgaaatcataatgttatacaaacctaactgaagtgttagagccttgaagatttttcccccgaat

SEQ ID NO: 14820 - DNA, 120 bp, synthetic construct
  misc_feature 1..120: note = Artificially Synthesized Probe
  source 1..120: mol_type = other DNA
tcttgtggggtgctaatgaaaacagggatggcaaaaatattttgtttgtgagtgtatgcatttatgctttttgacaacctaagaaacactcttacatctgagtatctttcatggactagc

SEQ ID NO: 14821 - DNA, 120 bp, synthetic construct
  misc_feature 1..120: note = Artificially Synthesized Probe
  source 1..120: mol_type = other DNA
cgttacctattctgtttacttaatagtatttaaagggtgtgagaggtgttatgtgtttctgtcccttgtttttattcctatccctcccatctaactgttggtactcttatcttcccaggt

SEQ ID NO: 14822 - DNA, 120 bp, synthetic construct
  misc_feature 1..120: note = Artificially Synthesized Probe
  source 1..120: mol_type = other DNA
tcacatgcatttctagtttatgtttttcttcgactaaaattctgcagcacttaggcaaagctatttttaccagttggaaaaaaagtaagtcatttccaaccaattttcctggcttgtagt

SEQ ID NO: 14823 - DNA, 120 bp, synthetic construct
  misc_feature 1..120: note = Artificially Synthesized Probe
  source 1..120: mol_type = other DNA
tgtgtgtattttaacagcaggagagttctgaaacaggaaaccagtcttatcatattcatccagagacctaggaagaaggtaattgtttggtatactcgttaaaaccagttggttgggcaa

SEQ ID NO: 14824 - DNA, 120 bp, synthetic construct
  misc_feature 1..120: note = Artificially Synthesized Probe
  source 1..120: mol_type = other DNA
atactgttctctggtctgtttttttcacaaatacactttttatttgtcgccaggtacttatttttaaagctatagaggtaatatttcatcaggtgagggtaactaccatggtttgtttgc

SEQ ID NO: 14825 - DNA, 120 bp, synthetic construct
  misc_feature 1..120: note = Artificially Synthesized Probe
  source 1..120: mol_type = other DNA
ggcccagagattgagtgatttacctgaggttataggctttagattgcatagctggaagtagaaccttgttcttctatattaaatgacaatattcattaagtacttagcacaggatttggt

SEQ ID NO: 14826 - DNA, 120 bp, synthetic construct
  misc_feature 1..120: note = Artificially Synthesized Probe
  source 1..120: mol_type = other DNA
tgcagaagctctttaggacaaattgttcttaaataatgaacagttggcactttttcaactggaaaattcaaggaactgctctttctgctttctgctcaatatgaatcttcaatttagaaa

SEQ ID NO: 14827 - DNA, 120 bp, synthetic construct
  misc_feature 1..120: note = Artificially Synthesized Probe
  source 1..120: mol_type = other DNA
ctgacttcattaattctttcaccctggctactggtttagctcagtgttttatgagccaggcagcttcagactttgcttttgatgctctttgttcattacctctaaagctgtattatcact

SEQ ID NO: 14828 - DNA, 120 bp, synthetic construct
  misc_feature 1..120: note = Artificially Synthesized Probe
  source 1..120: mol_type = other DNA
attaaaacaaatttagcatgtttacacaaaggtggggggaaactgtctaatatatctgagatctgttggagctggggtgaccatccaacttaggcaagatagctagtaccatgtatgcat

SEQ ID NO: 14829 - DNA, 120 bp, synthetic construct
  misc_feature 1..120: note = Artificially Synthesized Probe
  source 1..120: mol_type = other DNA
taggtacctttattagccccattctgcttaggaagcaacagaaagagtatgtattttgcctaaggttgcacaataagttaagctggggttccaattctagcaagttggttctagagtgta

SEQ ID NO: 14830 - DNA, 120 bp, synthetic construct
  misc_feature 1..120: note = Artificially Synthesized Probe
  source 1..120: mol_type = other DNA
cttaaaaagattgaattcctggactccatttaaaggagtaaatagctcacgaacaagacttgctgctctgcaaagtcttccatgttgatcctggtctttgactccttatctgtctgatta

SEQ ID NO: 14831 - DNA, 120 bp, synthetic construct
  misc_feature 1..120: note = Artificially Synthesized Probe
  source 1..120: mol_type = other DNA
ttaagaggtgattagataatggtatctctatccttatgaatggattaatgctgtttgaatggtagtggatgagttatcttgggagtttggcctcctccgtctcacatgcttccttacctt

SEQ ID NO: 14832 - DNA, 120 bp, synthetic construct
  misc_feature 1..120: note = Artificially Synthesized Probe
  source 1..120: mol_type = other DNA
accaagggtgtggtccaggaaccatttgctgaagagattaatattcctagaggagacccaagggctatttatcaagacagtggaaaaagaccccagaggcattttggagatctttgaggc

SEQ ID NO: 14833 - DNA, 120 bp, synthetic construct
  misc_feature 1..120: note = Artificially Synthesized Probe
  source 1..120: mol_type = other DNA
aattccagagtattggtagctataaccactttgggttccctgccattgcttctggtgcctcattttttctgacgtcttccattttcttacatttgtcttctaaggtggagttaagattac

SEQ ID NO: 14834 - DNA, 120 bp, synthetic construct
  misc_feature 1..120: note = Artificially Synthesized Probe
  source 1..120: mol_type = other DNA
aatgcccggatcacattaaaatgtttccaattagctcaaaaatgtcctttatggctggtttggctaaaacagtatccaggccagcattgcacctatgaaattggctgttaggaatcttgt

SEQ ID NO: 14835 - DNA, 120 bp, synthetic construct
  misc_feature 1..120: note = Artificially Synthesized Probe
  source 1..120: mol_type = other DNA
atgctcagattatcacagctagtcatttggacctttataccacctcctatgtccatttgatataggccattaatctctataagccttcctccttctcttggaatgaaaaggtatcctagg

SEQ ID NO: 14836 - DNA, 120 bp, synthetic construct
  misc_feature 1..120: note = Artificially Synthesized Probe
  source 1..120: mol_type = other DNA
cttcctaccaagaagtgcagtaaaagtgcagtgtccaaatagcccttgtaacaaaacctttctctttctcctgggtgccaatttgacatttaatcagttttgtttctagcagtgttcaat

SEQ ID NO: 14837 - DNA, 120 bp, synthetic construct
  misc_feature 1..120: note = Artificially Synthesized Probe
  source 1..120: mol_type = other DNA
tgactgggctggtgtgaaaggtctgtcagaaaatcatgagattagattgaggtacctcaaaaaatgagagctggtatgatgagtgggtaagaatcataaaagcgtagagtgttgatgatt

SEQ ID NO: 14838 - DNA, 120 bp, synthetic construct
  misc_feature 1..120: note = Artificially Synthesized Probe
  source 1..120: mol_type = other DNA
ttgcggtctagaaaggttaagtgacttgtccaaattacacaactagttagagacatagccagctcttaaatctgacttccagattttcactgtgtcttcttttttctgtaacgtgttgcc

SEQ ID NO: 14839 - DNA, 120 bp, synthetic construct
  misc_feature 1..120: note = Artificially Synthesized Probe
  source 1..120: mol_type = other DNA
tagaccaaattttaaggtaccactgtgcatatgtataccaactacctgaagaagtatttggttggtacaagagatatagaaaggaatcgctgggtgtaccaaggctaatcagttttataa

SEQ ID NO: 14840 - DNA, 120 bp, synthetic construct
  misc_feature 1..120: note = Artificially Synthesized Probe
  source 1..120: mol_type = other DNA
agcagtacagtcaccagacgtgtatcctctcctatggtacagaagtgtttattgggtctctttatggcctgcatgatatatcccacaagatgacctacttcacattattttaattctgta

SEQ ID NO: 14841 - DNA, 120 bp, synthetic construct
  misc_feature 1..120: note = Artificially Synthesized Probe
  source 1..120: mol_type = other DNA
ttggccaataaagctttgatagcctctattgcccaggcccctcctcttcttttatgagagaaaggatgaacagtgaccagaaataaaggtattgtttttttctatcaactaaaatggaaa

SEQ ID NO: 14842 - DNA, 120 bp, synthetic construct
  misc_feature 1..120: note = Artificially Synthesized Probe
  source 1..120: mol_type = other DNA
gaaagccacatctcatagaagctaactattcccaaattgtttttttcttcttttcctcttactactgctgttttcctcctttcttgctgctaagctcttgtcctgacatgctggtaatat

SEQ ID NO: 14843 - DNA, 120 bp, synthetic construct
  misc_feature 1..120: note = Artificially Synthesized Probe
  source 1..120: mol_type = other DNA
ttgactattttggcttttgttgccattgcttttggtgttttagtcatgaagtccttgcccatgcctatgtcctgaatggtattgcctaggtttgcttctagggtttttatggttttaggt

SEQ ID NO: 14844 - DNA, 120 bp, synthetic construct
  misc_feature 1..120: note = Artificially Synthesized Probe
  source 1..120: mol_type = other DNA
tctcttgcctgattgccctggccagaacttccaacactgtgttgaataggagtggtgagagagggcgtccctgtcttgtgccagttttcaaagggaatgcttccagtttttgcccattca

SEQ ID NO: 14845 - DNA, 120 bp, synthetic construct
  misc_feature 1..120: note = Artificially Synthesized Probe
  source 1..120: mol_type = other DNA
gtcctatctccttcaattctgctctgatcttagttatttcttgccttctgctagcttttgaatttgtttgctcttgcatctctagttgttttaattgtgatattagggtgttgattttag

SEQ ID NO: 14846 - DNA, 120 bp, synthetic construct
  misc_feature 1..120: note = Artificially Synthesized Probe
  source 1..120: mol_type = other DNA
aattggggcatttaccccatttacatttaaggttaatattgttatgtgtgaatttgatcctgtcattgtgatgttagctggttattttgcccattagttgatgtagtttcttcctagcat

SEQ ID NO: 14847 - DNA, 120 bp, synthetic construct
  misc_feature 1..120: note = Artificially Synthesized Probe
  source 1..120: mol_type = other DNA
gtttgttactactgaccttctgaagcctacttctgtcaactcgtcaaagtcattcttcatccagctttgttccattgctggtgaggagctgtgatcctttggaggagaagaggcactctg

SEQ ID NO: 14848 - DNA, 120 bp, synthetic construct
  misc_feature 1..120: note = Artificially Synthesized Probe
  source 1..120: mol_type = other DNA
ccttgtgcttcctgggtgaggcaatgccccgccctgcttcagctcaccctccgtgggctgcacccactttccaaccagtcccagtgagaagaaccaggtacctcagttggaaatgcagaa

SEQ ID NO: 14849 - DNA, 120 bp, synthetic construct
  misc_feature 1..120: note = Artificially Synthesized Probe
  source 1..120: mol_type = other DNA
gtgatttttgaaaaagatttatttattgtcttgttcactgtgagctttttcccccatgtataagcagctgtgtaatagattcaagagcaccccctcgcccctttttttttgagacagagt

SEQ ID NO: 14850 - DNA, 120 bp, synthetic construct
  misc_feature 1..120: note = Artificially Synthesized Probe
  source 1..120: mol_type = other DNA
gttaacttccccaagcattacttttagtaagtagtgagactgaaggttgagttctggtctgtcagattccgaagttgtttccttaggaaccatattatcttgtgtacaactcttgggcta

SEQ ID NO: 14851 - DNA, 120 bp, synthetic construct
  misc_feature 1..120: note = Artificially Synthesized Probe
  source 1..120: mol_type = other DNA
aatcgcctaggagggattaggaatatgaatagcatctaacttgttggcagtagaattgaaggtagaaggtggtaaaacatcaccttgaaagttctgcattcagcctagaattctgtatcc

SEQ ID NO: 14852 - DNA, 120 bp, synthetic construct
  misc_feature 1..120: note = Artificially Synthesized Probe
  source 1..120: mol_type = other DNA
atctctatgtatttgactattctaggtacctcgtataagcggaatcacgtgatatctttttgtaactggcttatttcactaactatcttcgaggttcatccatgttgtagcagttgttag

SEQ ID NO: 14853 - DNA, 120 bp, synthetic construct
  misc_feature 1..120: note = Artificially Synthesized Probe
  source 1..120: mol_type = other DNA
cccttattggatatgttatttgcaaatattttctcccataaagaatgggttactttttcactctgttgattgtttcctttgctgtgcaggagctatttagcttgaaaaaatccaacttgt

SEQ ID NO: 14854 - DNA, 120 bp, synthetic construct
  misc_feature 1..120: note = Artificially Synthesized Probe
  source 1..120: mol_type = other DNA
gttatttttcctgagctcgcctcctcccacctggatttttttttttatttctaccagaaacattgttgggattttggtagggattgtattagtctgtagattgcattgaatagtactgac

SEQ ID NO: 14855 - DNA, 120 bp, synthetic construct
  misc_feature 1..120: note = Artificially Synthesized Probe
  source 1..120: mol_type = other DNA
atcccaggaataaattttacttggtcttcgtgtataatccatttaataagctgtggaattcagtttgttggttctgtgttgaggactttatatcaatgttcctaagggctactggtctat

SEQ ID NO: 14856 - DNA, 120 bp, synthetic construct
  misc_feature 1..120: note = Artificially Synthesized Probe
  source 1..120: mol_type = other DNA
ttcccttgtgatttcttctgcgtttaaccgtgtattttttaatttccacagttggtgaattttctactttttcttcagttattgattttattgattttcagtggcatcctgttgtgatag

SEQ ID NO: 14857 - DNA, 120 bp, synthetic construct
  misc_feature 1..120: note = Artificially Synthesized Probe
  source 1..120: mol_type = other DNA
ccattgggggtcacatttaatgccctaaagttataacactgcaatttcaatttataccaatttactttcaatagcatacaaaaattcagctcataagattcagtccctgctcccttccag

SEQ ID NO: 14858 - DNA, 120 bp, synthetic construct
  misc_feature 1..120: note = Artificially Synthesized Probe
  source 1..120: mol_type = other DNA
tgatgatggtgttccacaggtgtcttaggctcttgtcttcaattttccttcagttttttttttctgttcctcagacacgtggtattttcagctgttctgccttccaagtttactgattct

SEQ ID NO: 14859 - DNA, 120 bp, synthetic construct
  misc_feature 1..120: note = Artificially Synthesized Probe
  source 1..120: mol_type = other DNA
ggcacaaagagctgaaattgactcaaactaactgatttaccattcaagtctttccttagaaactgaaaacctgaatagactccagagttccagaatcacagattctgcttacagtcgtct

SEQ ID NO: 14860 - DNA, 120 bp, synthetic construct
  misc_feature 1..120: note = Artificially Synthesized Probe
  source 1..120: mol_type = other DNA
agtagccccacattcttgtgcttgtttcttttttctgctctctttccttgcccaggtaagaggtctgcccataagggatattttgcagcatgtgaagctttttaaaaagttaggcttatt

SEQ ID NO: 14861 - DNA, 120 bp, synthetic construct
  misc_feature 1..120: note = Artificially Synthesized Probe
  source 1..120: mol_type = other DNA
tctaggaataatctctgactctcctgtaccttgtcctcactaggattcggtatccacggcaaaaagatctattaatagttggtatcaggcctgtacatgtgttaagagaaagatgaggaa

SEQ ID NO: 14862 - DNA, 120 bp, synthetic construct
  misc_feature 1..120: note = Artificially Synthesized Probe
  source 1..120: mol_type = other DNA
gctttcaataaagagaactgtcatgtacccactactccttacttactgaatcatcttcttttggatagagaagataaaagtgaaaagggaatttaagagttcctgcctttttccttgtct

SEQ ID NO: 14863 - DNA, 120 bp, synthetic construct
  misc_feature 1..120: note = Artificially Synthesized Probe
  source 1..120: mol_type = other DNA
ctgatctgtatcatatctaactacgccagtatttccttccttgtctgacgtgaactctaaaattatgtgaacactttctccctgtttcctggcatttccactcaaacttgttcctcattc

SEQ ID NO: 14864 - DNA, 120 bp, synthetic construct
  misc_feature 1..120: note = Artificially Synthesized Probe
  source 1..120: mol_type = other DNA
cctcatgcccatttgtagtcagtccccaaacctggtttcaggcaatctctgatctgctttctatatgctttgcctatactaggattacatataaatacagtcatatagcatgtattcctt

SEQ ID NO: 14865 - DNA, 120 bp, synthetic construct
  misc_feature 1..120: note = Artificially Synthesized Probe
  source 1..120: mol_type = other DNA
actggaatggctcaaaaagggcttacaggaattggcaaagacatagattaactggaactcttatgcatgttggttagagcacaaaatgatatgatttcttgggagaaatatttggcagtt

SEQ ID NO: 14866 - DNA, 120 bp, synthetic construct
  misc_feature 1..120: note = Artificially Synthesized Probe
  source 1..120: mol_type = other DNA
tgaaatgtttggagcttgcctgtgttgatgggattaaggcagggatgatttatgtgtaaatttatgcgttagtaacagcagtaaccgctgtagttacactagggttctaagagcaaatgt

SEQ ID NO: 14867 - DNA, 120 bp, synthetic construct
  misc_feature 1..120: note = Artificially Synthesized Probe
  source 1..120: mol_type = other DNA
taatttttcttttcgtttattttaggattggtgggagctgtccaatgtccttaggctgttttccaaatgagataccaaaagctagttctccatcgggtttctcaggctgctagaagcatt

SEQ ID NO: 14868 - DNA, 120 bp, synthetic construct
  misc_feature 1..120: note = Artificially Synthesized Probe
  source 1..120: mol_type = other DNA
ctcaacatgtttaagcacatttggcattatatcaattttatcttttccaggtgccttctaatctgtcccagtctggactaattgttcttcctggcttgctgtatggctgtctactcaaga

SEQ ID NO: 14869 - DNA, 120 bp, synthetic construct
  misc_feature 1..120: note = Artificially Synthesized Probe
  source 1..120: mol_type = other DNA
tgttaattcctcggcttcatggtcttctagcccttcttttgcctatcttatggggttgaggattaaacagtttatatacctgaggtgcttaggatatgtctgtcatatagtaagtgcttg

SEQ ID NO: 14870 - DNA, 120 bp, synthetic construct
  misc_feature 1..120: note = Artificially Synthesized Probe
  source 1..120: mol_type = other DNA
ctgctttaaatgacttggcatctagcccatatttgagcccataaccgtgtggtaatttgaagtgtaattcacagtagagcttctgttaaagcactaatagcatcttccatggaggtatac

SEQ ID NO: 14871 - DNA, 120 bp, synthetic construct
  misc_feature 1..120: note = Artificially Synthesized Probe
  source 1..120: mol_type = other DNA
caatgaagagaacattggaaacactaattttaccttataaagaaggtttcataaaggaaggcaagtttgagctggggtgaaaaggaccagtaagggttgactttcaagccaaggagagga

SEQ ID NO: 14872 - DNA, 120 bp, synthetic construct
  misc_feature 1..120: note = Artificially Synthesized Probe
  source 1..120: mol_type = other DNA
tgaacaaggtcacacaggtacatatggtagccgaccatccactgtttatgccaatattccctttacgttttgcttttttgcttgttcgttttaacctctccaaattttactgacttcaga

SEQ ID NO: 14873 - DNA, 120 bp, synthetic construct
  misc_feature 1..120: note = Artificially Synthesized Probe
  source 1..120: mol_type = other DNA
aactgtcagtaggtataggtggaaggagggcatttatcagagattttaatttaagaagaaagtcttcatccttatcctaccaacccccattccctgagcatatttatcattactagtccc

SEQ ID NO: 14874 - DNA, 120 bp, synthetic construct
  misc_feature 1..120: note = Artificially Synthesized Probe
  source 1..120: mol_type = other DNA
cctgagaaagtaggggaagtttagagaactgaagctgcacaaaactaatgtttattttctgttgtgttgtcctgagaccagcttcttagattgtgtttcctagtcctacatctctgattc

SEQ ID NO: 14875 - DNA, 120 bp, synthetic construct
  misc_feature 1..120: note = Artificially Synthesized Probe
  source 1..120: mol_type = other DNA
ctgagagactgttgaaaaaggtgatcgttggcttttcaacagggagtaaggtctggtttaaaaaaaaattagtaagcatttggccaagtagattaacaacattcagtttttctttactgt

SEQ ID NO: 14876 - DNA, 120 bp, synthetic construct
  misc_feature 1..120: note = Artificially Synthesized Probe
  source 1..120: mol_type = other DNA
tctcatggcttaacactttaaaccatgagaaaactgaagagttgagaagcttggcagatgctgctgtgatagtcaaaaagaaagtgggtgccatgagctactattgatgtatttgccatt

SEQ ID NO: 14877 - DNA, 120 bp, synthetic construct
  misc_feature 1..120: note = Artificially Synthesized Probe
  source 1..120: mol_type = other DNA
tattccttttgcattgagagtcctgacgaaatgtccatgtgacagttcattttgggtttagctctacctctaatatgtgacctatgctaccagtccgtatagcgtaaattcccagaatat

SEQ ID NO: 14878 - DNA, 120 bp, synthetic construct
  misc_feature 1..120: note = Artificially Synthesized Probe
  source 1..120: mol_type = other DNA
ccagtagagcttcagatcttgttcatcttgtgttcctccctccccaccctcagtccctggaaaacaggttttaaagatagttgctaatccttatttcttctaaatttttaaatcagttgc

SEQ ID NO: 14879 - DNA, 120 bp, synthetic construct
  misc_feature 1..120: note = Artificially Synthesized Probe
  source 1..120: mol_type = other DNA
gatagcactggcatgaattatagagctgaggatctaaagatttttactttgatttatcccattatcatctgcagggaaacaattgcttttactgattaaaaatgcaggctgggcacagcg

SEQ ID NO: 14880 - DNA, 120 bp, synthetic construct
  misc_feature 1..120: note = Artificially Synthesized Probe
  source 1..120: mol_type = other DNA
atcctgtaaacagcagtatcaggctgtagaatttgtcttctgaaagcagggaacttatatatagcaaagaacttcatagtgctcccatttcttgacaaaacctctcgagaagctcttgat

SEQ ID NO: 14881 - DNA, 120 bp, synthetic construct
  misc_feature 1..120: note = Artificially Synthesized Probe
  source 1..120: mol_type = other DNA
ggaacaaatagtttttgtaatggtctaggcttttccaacttaactgtgctctcacatgtggtctctttttctccctctttcctccttcttatacactctcacccacacacatatgcatac

SEQ ID NO: 14882 - DNA, 120 bp, synthetic construct
  misc_feature 1..120: note = Artificially Synthesized Probe
  source 1..120: mol_type = other DNA
ggagtatcctcgtgttcttaccttctttatccctgtgtttatttaaaaaggcaaaaaaaatggagcagatgctgttggttgaccatattttactgaacagtagcatttgtgtttaggttg

SEQ ID NO: 14883 - DNA, 120 bp, synthetic construct
  misc_feature 1..120: note = Artificially Synthesized Probe
  source 1..120: mol_type = other DNA
tccccctttcttttttgaagggagatgaggcagtcatattttggtaaagaatttgtagactttgcagaggtctcttcaaaataatctggctcagagtcttgacatatcctcagcagacat

SEQ ID NO: 14884 - DNA, 120 bp, synthetic construct
  misc_feature 1..120: note = Artificially Synthesized Probe
  source 1..120: mol_type = other DNA
ttaggaactcttgtgtacatgagttcattgagcttattcttaataaagacaaatcttctagaaataatagttgtatctttaaatgatctcaaggaaaatgtttggtttctctggggaatg

SEQ ID NO: 14885 - DNA, 120 bp, synthetic construct
  misc_feature 1..120: note = Artificially Synthesized Probe
  source 1..120: mol_type = other DNA
cccaactcaaagtagcttaaataaaaggagacattttttgacttacataacctaaaagctctggcctggatctaggtgctcaacagatctcaagagtatctctcttattctctctccctc

SEQ ID NO: 14886 - DNA, 120 bp, synthetic construct
  misc_feature 1..120: note = Artificially Synthesized Probe
  source 1..120: mol_type = other DNA
aacccaggacagctgagtacaagttttacccttatattcacattgaggtccagatcctggttttgaatgagataattacgtgcagtcggactgttttctgatcctaaaaatagagacaat

SEQ ID NO: 14887 - DNA, 120 bp, synthetic construct
  misc_feature 1..120: note = Artificially Synthesized Probe
  source 1..120: mol_type = other DNA
tcaaaatgtattaagtaaaagctgaaagaaatgaagaataattggtagaaaagcaatgataggaatccttaatgtacttcaaaaggcacgaagtaagaaggtacagtcatgtaccacata

SEQ ID NO: 14888 - DNA, 120 bp, synthetic construct
  misc_feature 1..120: note = Artificially Synthesized Probe
  source 1..120: mol_type = other DNA
aaagccagtcaaggataaaagaaaagagggaaactaaaagtgagacattaagtatgagaaaggagataaaactaaagtgtggaggtgatgttaaaaattatattcaggtctgtgctaatc

SEQ ID NO: 14889 - DNA, 120 bp, synthetic construct
  misc_feature 1..120: note = Artificially Synthesized Probe
  source 1..120: mol_type = other DNA
ctcacttctcttttctgtaaccctattatattactgctgtctctcagctgtgtttcattcctcaagcagaaagaagatgggaggatcatatagtagttgactagaagctgtggagtttga

SEQ ID NO: 14890 - DNA, 120 bp, synthetic construct
  misc_feature 1..120: note = Artificially Synthesized Probe
  source 1..120: mol_type = other DNA
ctctttttgagataggcctatatttagggacaagagaagagacaaccaataagggttgaaagaaaccttgagagagtaagtcctatgacagaagcagggaagtttcagaatgattgcaga

SEQ ID NO: 14891 - DNA, 120 bp, synthetic construct
  misc_feature 1..120: note = Artificially Synthesized Probe
  source 1..120: mol_type = other DNA
aatcagcctcataatcaatttctctggattaaggagtaagagcgtctcaagatttgctgtttatagagagggaggctaatagtttgagagagatacagaatctagggagagtgtgggttt

SEQ ID NO: 14892 - DNA, 120 bp, synthetic construct
  misc_feature 1..120: note = Artificially Synthesized Probe
  source 1..120: mol_type = other DNA
tctgaaatggccagcagctacagctgtacctatctactgtacatatcaagcaagtcactttattcttataatgtctatgacttctttctttgaaagcgcttccatcatcactgttggcac

SEQ ID NO: 14893 - DNA, 120 bp, synthetic construct
  misc_feature 1..120: note = Artificially Synthesized Probe
  source 1..120: mol_type = other DNA
gtgttcaagggtcagctgtgtaaataattttcctcaaaattaaagtggaaaaggagagttactactagtagaaagtagaactgtacccttgggcaggggtgtgtgtgtgtagttaaagat

SEQ ID NO: 14894 - DNA, 120 bp, synthetic construct
  misc_feature 1..120: note = Artificially Synthesized Probe
  source 1..120: mol_type = other DNA
aatgaggaggtcacattggagactctgaaacagatacatgtgagcctcccaactttttaatatttgttaatctagaagtgttgaattttgggtgctgacaaggcagcaggtagataagaa

SEQ ID NO: 14895 - DNA, 120 bp, synthetic construct
  misc_feature 1..120: note = Artificially Synthesized Probe
  source 1..120: mol_type = other DNA
gcatgcttttgtgtaactgcatctggtgtttgatcctcatgagagccctgttaaggaagggtacatattattgtcctcattttccttcgaaaacacatcagagtttgtattttgactgtc

SEQ ID NO: 14896 - DNA, 120 bp, synthetic construct
  misc_feature 1..120: note = Artificially Synthesized Probe
  source 1..120: mol_type = other DNA
tgcatgtagtacaaggatagctttacctgtgttagaagattgtttcacacatttacatcaactgcatagtcctgtttttgttgggccctaatgccagcatcactttttgctactgctgtt

SEQ ID NO: 14897 - DNA, 120 bp, synthetic construct
  misc_feature 1..120: note = Artificially Synthesized Probe
  source 1..120: mol_type = other DNA
gaagccaaattatatttatgaaagaaatattctgtgttataaccaccaaatacagcccaattctgactagatgatggaagaacctgtcccatcagaggtccagcatgaggtccagcagag

SEQ ID NO: 14898 - DNA, 120 bp, synthetic construct
  misc_feature 1..120: note = Artificially Synthesized Probe
  source 1..120: mol_type = other DNA
ttctagtttcctcttatgtactatgatttaatactgtagtaaagttttaataaaatatgagctatatgtaattaagtgggaggttgtggggctaggcacgaggctcacacgtgtaacccc

SEQ ID NO: 14899 - DNA, 120 bp, synthetic construct
  misc_feature 1..120: note = Artificially Synthesized Probe
  source 1..120: mol_type = other DNA
agcagaaggaaaaagctggacaagaatgtagtgtcagagaataggtatggaacgtgtgagtgactgttagaggatcttgaatggggataacagacttgatttcataaatactgagatgtc

SEQ ID NO: 14900 - DNA, 120 bp, synthetic construct
  misc_feature 1..120: note = Artificially Synthesized Probe
  source 1..120: mol_type = other DNA
caacctgagatttgggagggaaagatatccaaactatatcactaggtctggatcttgttatttattttttggaacatagtcatatatatccaaggatatatattgtagaagtccacagaa

SEQ ID NO: 14901 - DNA, 120 bp, synthetic construct
  misc_feature 1..120: note = Artificially Synthesized Probe
  source 1..120: mol_type = other DNA
actttgagtcaaggaagtgaaatttattgatagattgttggtgtaatatttatcctgtttgtggtagcttttttgaataataagtgtcttagaagaccatgttggagtagcctgcatgct

SEQ ID NO: 14902 - DNA, 120 bp, synthetic construct
  misc_feature 1..120: note = Artificially Synthesized Probe
  source 1..120: mol_type = other DNA
ctcttgtgaacatgtagtgatttgtattttgtgatctttgccgcatgctagagacttaagaatactatagcaaatatctgtcttctttacatttaaaaatttttcgtgactactccctgt

SEQ ID NO: 14903 - DNA, 120 bp, synthetic construct
  misc_feature 1..120: note = Artificially Synthesized Probe
  source 1..120: mol_type = other DNA
ctgcaggtgttttgcttactctggcattggtgagacattataagggtaaataatcctgtttgaaggaaaaggccttatggcattgtaacatgagaggaatttttcttaacaaggatggtt

SEQ ID NO: 14904 - DNA, 120 bp, synthetic construct
  misc_feature 1..120: note = Artificially Synthesized Probe
  source 1..120: mol_type = other DNA
tgagactaaggtgcaacatttttagatagtaatgaagaaaaggactaactttgtagtgttgctgccttgttaaacatactagatagcatattgccaatctttaaacattctcaatgatag

SEQ ID NO: 14905 - DNA, 120 bp, synthetic construct
  misc_feature 1..120: note = Artificially Synthesized Probe
  source 1..120: mol_type = other DNA
aactggagcttctcatgtttgtattgctgtagaagtaaacatgtatttgccatgcgtcatcagggaagttgcactcaccgtccaagaacttttgttaaagtaaatcttggaataggtagc

SEQ ID NO: 14906 - DNA, 120 bp, synthetic construct
  misc_feature 1..120: note = Artificially Synthesized Probe
  source 1..120: mol_type = other DNA
ctgggatatgaagtaggaatgggagaggaaagaaatagatgggaactcagtcatttgggaatgattcatatggaatgtttttactgcttccactcctgtctgccttccaatttattctca

SEQ ID NO: 14907 - DNA, 120 bp, synthetic construct
  misc_feature 1..120: note = Artificially Synthesized Probe
  source 1..120: mol_type = other DNA
accatttttttcttcccccttcctatttcttattctacctgattttcccctgttcattcaccacactcgtttctttctcttttttactctctcttaatttttcattcaatttttataaca

SEQ ID NO: 14908 - DNA, 120 bp, synthetic construct
  misc_feature 1..120: note = Artificially Synthesized Probe
  source 1..120: mol_type = other DNA
agagtacagatgcaaaagcccttagacaagagaatgagcttggtatatctgaagagtggataagtcattttgactgaaacagagtggacaagaaaaccagtccaagtgtaaagacactag

SEQ ID NO: 14909 - DNA, 120 bp, synthetic construct
  misc_feature 1..120: note = Artificially Synthesized Probe
  source 1..120: mol_type = other DNA
gggccttagctacctccccttggaaatggaaatacctaacatgtaaggttgttttgacagttattttcactaggcatgtaaaggcacttgactctctgttatagaccactgtattatgtt

SEQ ID NO: 14910 - DNA, 120 bp, synthetic construct
  misc_feature 1..120: note = Artificially Synthesized Probe
  source 1..120: mol_type = other DNA
atccagaggctagcagttcaacttctgtaacaccagatgttagtgacaatgaacctgatcattatagatattctgacaccactgactctgatccagagaatgaaccttttgatgaagatc

SEQ ID NO: 14911 - DNA, 120 bp, synthetic construct
  misc_feature 1..120: note = Artificially Synthesized Probe
  source 1..120: mol_type = other DNA
tcaaggccagtgctaaaattcagatgctgttagtacctacatcagtcaacaacttacacttattttactagttttcaatcataatacctgctgtggatgcttcatgtgctgcctgcaagc

SEQ ID NO: 14912 - DNA, 120 bp, synthetic construct
  misc_feature 1..120: note = Artificially Synthesized Probe
  source 1..120: mol_type = other DNA
tggtgctgaaattgttcactagctgtggtctgacctagttaatttacaaatacagattgaataggacctactagagcagcatttatagagtttgatggcaaatagattaggcagaacttc

SEQ ID NO: 14913 - DNA, 120 bp, synthetic construct
  misc_feature 1..120: note = Artificially Synthesized Probe
  source 1..120: mol_type = other DNA
tggaaggggtggaactgtgcactaaagtgggggctttaactgtagtatttggcagagttgccttctacctgccagttcaaaagttcaacctgttttcatatagaatatatatactaaaaa

SEQ ID NO: 14914 - DNA, 120 bp, synthetic construct
  misc_feature 1..120: note = Artificially Synthesized Probe
  source 1..120: mol_type = other DNA
atatcatgtcctttgtacgttgtaatatgagctggcttggttcagtaaatgccatcaccatttccattgagaatttaaaactcaccagtgtttaatatgcaggcttccaaaggcttatga

SEQ ID NO: 14915 - DNA, 120 bp, synthetic construct
  misc_feature 1..120: note = Artificially Synthesized Probe
  source 1..120: mol_type = other DNA
gtttgctttggtggtagtactctggttgttaagctaggtattttgagactacttccccatcacaacaacaataaaataatcactcataatcctatcacctggagacatagccatcgttaa

SEQ ID NO: 14916 - DNA, 120 bp, synthetic construct
  misc_feature 1..120: note = Artificially Synthesized Probe
  source 1..120: mol_type = other DNA
tgtgtggaatgaagtgaggcttgtagtcatggttctagtgtttcagtttgccaagtctgtttactgcagtgaaattcatcaaatgtttcagtgtggttttctgtagcctatcatttactg

SEQ ID NO: 14917 - DNA, 120 bp, synthetic construct
  misc_feature 1..120: note = Artificially Synthesized Probe
  source 1..120: mol_type = other DNA
agaagacttagtgtgacttactatttcacacgctttccatctcatgtagcacatcggataagcctgattagtctgacatctgtctttcacaaggcagaagacaaatccttttgagaaatc

SEQ ID NO: 14918 - DNA, 120 bp, synthetic construct
  misc_feature 1..120: note = Artificially Synthesized Probe
  source 1..120: mol_type = other DNA
aagacacaagacaaacaggaaagaaacacctgcccctgggaggaaagaacccttgagcaccaaaaccaaatttacatgagcgtcccgagccacgcgaatgactttctcccaccaagctga

SEQ ID NO: 14919 - DNA, 120 bp, synthetic construct
  misc_feature 1..120: note = Artificially Synthesized Probe
  source 1..120: mol_type = other DNA
acatctcatgcaggagaatcccaaaggaccagacgtcggatttggtggagtaatggcctcgggagagcgcttcaggggccgtccacttgtaggggatattgtggtcatgggagaggtaga

SEQ ID NO: 14920 - DNA, 120 bp, synthetic construct
  misc_feature 1..120: note = Artificially Synthesized Probe
  source 1..120: mol_type = other DNA
ccatcctggctaacacggtgaaaccccatctctactaaaaatacaaaaaattagccgggcgtggtggcgggcgcctgtagtcccagctactcgggaggctgaggcaggagaatggcgtga

SEQ ID NO: 14921 - DNA, 120 bp, synthetic construct
  misc_feature 1..120: note = Artificially Synthesized Probe
  source 1..120: mol_type = other DNA
ttcacgcacgggcatctccattccctggcagcgattgtctttggttttggtgagaaaggaaataatggaacttagagaggatgaagtctttgagccaatgtgatctgtgtgtgtctgtgt

SEQ ID NO: 14922 - DNA, 120 bp, synthetic construct
  misc_feature 1..120: note = Artificially Synthesized Probe
  source 1..120: mol_type = other DNA
ctgacatagaggccagacctctgctggggcccagacgggttccagggaagttttacccatttccagtgatctattttaatggctttccattacgtcaaggattttaaattttctttcttt

SEQ ID NO: 14923 - DNA, 120 bp, synthetic construct
  misc_feature 1..120: note = Artificially Synthesized Probe
  source 1..120: mol_type = other DNA
cttcaggaagtgccagtctgaagccagcacagggagcctggatttagcctcagatttagggccacgatcagcctgggttgggggtttctgagtgtctgacacaagggtggactctcctgg

SEQ ID NO: 14924 - DNA, 120 bp, synthetic construct
  misc_feature 1..120: note = Artificially Synthesized Probe
  source 1..120: mol_type = other DNA
ctgaccctgatcaggaaggcgcccgtggcgttgccctcggcctgcagccgacgcacagcttccgagcgggagatgcagccaaagaaccacctgcaggggaggagtctgagaacacgcgga

SEQ ID NO: 14925 - DNA, 120 bp, synthetic construct
  misc_feature 1..120: note = Artificially Synthesized Probe
  source 1..120: mol_type = other DNA
cccccctcacctggcctcccaccccgtcctcacctggcctcccgcacccccctcacctggcctcccgcccccccctcacctggcctcccgccccctcctcacctggcctcccgccccctc

SEQ ID NO: 14926 - DNA, 120 bp, synthetic construct
  misc_feature 1..120: note = Artificially Synthesized Probe
  source 1..120: mol_type = other DNA
ccgtgccctctgacccccgtgctccaactcccgcagggacagtcctgggcactcctgggcgccagcgcatggggcctgcagggaggatcaagcgggatgcccagcctggactttggggtg

SEQ ID NO: 14927 - DNA, 120 bp, synthetic construct
  misc_feature 1..120: note = Artificially Synthesized Probe
  source 1..120: mol_type = other DNA
gcaatgccattctactgacttagaacaacttttttgacttcctgcaaagaggacccttacagtatttttggagaagttagtaaaaccgaatctgacatcatcacctagcagttcatgcag

SEQ ID NO: 14928 - DNA, 120 bp, synthetic construct
  misc_feature 1..120: note = Artificially Synthesized Probe
  source 1..120: mol_type = other DNA
agccaccgcccttcctgggtggtgggtaaatattacagccttgatgagatagaaatatttaaactcttaaaaatcatgcaaatgctgtattcagtaggaaaatgcaactagttggacttc

SEQ ID NO: 14929 - DNA, 120 bp, synthetic construct
  misc_feature 1..120: note = Artificially Synthesized Probe
  source 1..120: mol_type = other DNA
tttcttcaggtctagctccattgctttttattccaggcaaacttcccaacctcctgaatagaccaaatatcctattatatgcttaaatcagagtgtgaaatatttcctttgtgaataaaa

SEQ ID NO: 14930 - DNA, 120 bp, synthetic construct
  misc_feature 1..120: note = Artificially Synthesized Probe
  source 1..120: mol_type = other DNA
caggtgaaggtgagtgttctctggttctaataaagttgtaatgccaggcagatctaccacactatagcatggcagttaggagtatatgagttatggtatgtgaggtatatgatgagtttt

SEQ ID NO: 14931 - DNA, 120 bp, synthetic construct
  misc_feature 1..120: note = Artificially Synthesized Probe
  source 1..120: mol_type = other DNA
actgatttcttctcattgcctttggtataaattctaatcttttttgccagagaaactggttccactaatgatctgggggctaggcctggagctgggaagggatcttttttcttttctttc

SEQ ID NO: 14932 - DNA, 120 bp, synthetic construct
  misc_feature 1..120: note = Artificially Synthesized Probe
  source 1..120: mol_type = other DNA
tttgcacgacaaaagtttgtagagagctgggaataatttctttacagacagtgtggtgatgaatgtcaatctgagtaggtaaggggcagagatttgtactgaggttgattcattctcttg

SEQ ID NO: 14933 - DNA, 120 bp, synthetic construct
  misc_feature 1..120: note = Artificially Synthesized Probe
  source 1..120: mol_type = other DNA
aagaaaaccatccaccctccaaaatagggatttgctaatgtaggagtagaaggcaaaagttgagggtaactcaggtaacacactcatacgtattaggatatgaacagctggtatagcaaa

SEQ ID NO: 14934 - DNA, 120 bp, synthetic construct
  misc_feature 1..120: note = Artificially Synthesized Probe
  source 1..120: mol_type = other DNA
gtctaaatagtttgtaaatccacacacttctactttgccagggatttcttagtgtaaaaatatcctgaagtctcacctgccttcaatccttactgtgtccatacccaccattaccaggat

SEQ ID NO: 14935 - DNA, 120 bp, synthetic construct
  misc_feature 1..120: note = Artificially Synthesized Probe
  source 1..120: mol_type = other DNA
ttataaattgtattcaaatttactgtaaagatcatgtcctctagacagcccctatcccacttgtataacccttgctcttcagcccctttcacacctgcataggtattcttctgctgtgat

SEQ ID NO: 14936 - DNA, 120 bp, synthetic construct
  misc_feature 1..120: note = Artificially Synthesized Probe
  source 1..120: mol_type = other DNA
ccatgaagcccgtattttctatcagtggcttcttggagatggtgttttaaatcttccaaaatcttcatcagcaccccaaaacttcctcctcaaagtaacaacataccttgctacagataa

SEQ ID NO: 14937 - DNA, 120 bp, synthetic construct
  misc_feature 1..120: note = Artificially Synthesized Probe
  source 1..120: mol_type = other DNA
aatcatcctgaaaaggaggctaacaaaggacaggactgagtctgtcttgaggtgagtgatatgatggaaagaatggattttcccccacccaactcatttttgatattacataaagtgaaa

SEQ ID NO: 14938 - DNA, 120 bp, synthetic construct
  misc_feature 1..120: note = Artificially Synthesized Probe
  source 1..120: mol_type = other DNA
tgaagaaaattaagtagtgtaatatggtagagtttaatctggccagacccagatttaggggtgaatgcacttttagacagagtgatcggggaagatccttatgaagaagaatcattgagc

SEQ ID NO: 14939 - DNA, 120 bp, synthetic construct
  misc_feature 1..120: note = Artificially Synthesized Probe
  source 1..120: mol_type = other DNA
ctggtttctgagccttgggaaacttcatatttggaagagacacaaggaggagctaggaaaagatagtgagaagaggtagccagtgaaaaaaagtagaactatactttgctttgaatgttg

SEQ ID NO: 14940 - DNA, 120 bp, synthetic construct
  misc_feature 1..120: note = Artificially Synthesized Probe
  source 1..120: mol_type = other DNA
ttaattttccttgttctaattttaaatacagtactaaggttgagaaagaaggggtcaggaaagggaagtaacattgagtgtctcgtgtgcctggcactccatatgatgcttcaatgcaca

SEQ ID NO: 14941 - DNA, 120 bp, synthetic construct
  misc_feature 1..120: note = Artificially Synthesized Probe
  source 1..120: mol_type = other DNA
aaatactttcagggtgacccatgagggaaaatcaccaaagcctttgaaataaaagattttcccttttctaagaataaaagatggtgttatgtcaagggcggctcgatggtgtggatgaaa

SEQ ID NO: 14942 - DNA, 120 bp, synthetic construct
  misc_feature 1..120: note = Artificially Synthesized Probe
  source 1..120: mol_type = other DNA
gtgccataacttgccttttttctaggcctccattttatgaactgaacatctggatttgatggcaagaaaacatttccttccgctggcttttctaataactccctcttacagatatgcatg

SEQ ID NO: 14943 - DNA, 120 bp, synthetic construct
  misc_feature 1..120: note = Artificially Synthesized Probe
  source 1..120: mol_type = other DNA
gcaattaatctgccaaactctttaatcaataaaatatggtatttaacaaccaaatttggcccctccctccccttaaatatatttccaatgctccttgctccattttaaacctgctgtcct

SEQ ID NO: 14944 - DNA, 120 bp, synthetic construct
  misc_feature 1..120: note = Artificially Synthesized Probe
  source 1..120: mol_type = other DNA
tgtcaactgagggcaaaattgcctaccctagccaccttaactgaaaactacaaacttcattgaaataatttctttatggctcccagcagtaacactgtgctattctagaccagttggtta

SEQ ID NO: 14945 - DNA, 120 bp, synthetic construct
  misc_feature 1..120: note = Artificially Synthesized Probe
  source 1..120: mol_type = other DNA
tatgttctgccagatggagataaaactgtggcagccacatcctgtgactagaaattgtttaagtaggcagacctgttggaggactaaagaacattaggcaaggagattaaattagtgtag

SEQ ID NO: 14946 - DNA, 120 bp, synthetic construct
  misc_feature 1..120: note = Artificially Synthesized Probe
  source 1..120: mol_type = other DNA
attcttctcaggattgtatctctactgcaggtcttctatgacgttttacagctggcctctttccattcagaattgctgttcatctttgaatgtctctgctttactcctgaatgaacacaa

SEQ ID NO: 14947 - DNA, 120 bp, synthetic construct
  misc_feature 1..120: note = Artificially Synthesized Probe
  source 1..120: mol_type = other DNA
cagactaattaacaagttttctatgccggctctgtcctttcctctcctctcacccctgaaaagtggttaaaagtttggcatttgttacccagaatactaaatgtaacacatatgtggcaa

SEQ ID NO: 14948 - DNA, 120 bp, synthetic construct
  misc_feature 1..120: note = Artificially Synthesized Probe
  source 1..120: mol_type = other DNA
gagggggccagtgctcattttgaggacacgatagttcggactgtctgaggaaatcgacagtgtgtgtttaatgaccaaaccaacatggctttgaagaatacatatatatttttttttttg

SEQ ID NO: 14949 - DNA, 120 bp, synthetic construct
  misc_feature 1..120: note = Artificially Synthesized Probe
  source 1..120: mol_type = other DNA
ttttcattagataatctaccaccaacacaatgatccaaaaatgcattatattcttgcactggagttcttcactttttgcttcaccccaaaactgccgctcctaaccacatgcttagctgc

SEQ ID NO: 14950 - DNA, 120 bp, synthetic construct
  misc_feature 1..120: note = Artificially Synthesized Probe
  source 1..120: mol_type = other DNA
aggttcttggggactatcttgagtctccagaaaacactgagaaccactgatacgccaacaagataaaattcttatccttaccgcagcatggaataggaccatactttcttccttataata

SEQ ID NO: 14951 - DNA, 120 bp, synthetic construct
  misc_feature 1..120: note = Artificially Synthesized Probe
  source 1..120: mol_type = other DNA
ggaatcatgaaaactatagtttttcctccaacgtaaggatctcatatcacgctttcattctgaactaaccattccctctctgcagttgatgtaactgtgccatgtgaccattgtacacat

SEQ ID NO: 14952 - DNA, 120 bp, synthetic construct
  misc_feature 1..120: note = Artificially Synthesized Probe
  source 1..120: mol_type = other DNA
ggacattggagacctgtagccaccttctgaatccacagctgacctagtggccttgatatataatattgattgcaggatagttttgtgatggttaagattgcaggctttaataactagatt

SEQ ID NO: 14953 - DNA, 120 bp, synthetic construct
  misc_feature 1..120: note = Artificially Synthesized Probe
  source 1..120: mol_type = other DNA
gtgaatgatttttgaaaatttggaaaactctaaccgaaatataccaggaactgctctcctcttcatctcagatgtctacttcctcttcagacctgtgtgtgaagctctagaataggctgt

SEQ ID NO: 14954 - DNA, 120 bp, synthetic construct
  misc_feature 1..120: note = Artificially Synthesized Probe
  source 1..120: mol_type = other DNA
cttaatacaagtgtctcctttccttggattctcaccatctgggtggtaaacatgacagaaacattcaagtatgttcaatgtagtacatggtaacaaatgctttagcacagactagggagc

SEQ ID NO: 14955 - DNA, 120 bp, synthetic construct
  misc_feature 1..120: note = Artificially Synthesized Probe
  source 1..120: mol_type = other DNA
aggaatgaaatccatgactagtacaaagacataataatgccctaagcaacttacgatattttgatgtttcttttctgacaccccattcgataggcttttgtcttcatgctcagcatctcc

SEQ ID NO: 14956 - DNA, 120 bp, synthetic construct
  misc_feature 1..120: note = Artificially Synthesized Probe
  source 1..120: mol_type = other DNA
aggtggcactcatccattcattcagttattctagctgtgctattgaatacttgctaactgcaaagcacagagctagatcctagtaagaatatagaaaagaaagtcacagtctctgccttg

SEQ ID NO: 14957 - DNA, 120 bp, synthetic construct
  misc_feature 1..120: note = Artificially Synthesized Probe
  source 1..120: mol_type = other DNA
gaagcaagaatgattgataaggaattaggtaggttctgtataaggaaaggtgatttcagatcccaaaagggcatggctgaatgtttagcctttcagagttggggaatccatttcttcctg

SEQ ID NO: 14958 - DNA, 120 bp, synthetic construct
  misc_feature 1..120: note = Artificially Synthesized Probe
  source 1..120: mol_type = other DNA
gaagtagagccagaatctaatccagacctcctgccagccactcccagaccccttctttcccccaaagaaaatgaagaacatattttttgtgcaaagagatacaatcaggaaattttttta

SEQ ID NO: 14959 - DNA, 120 bp, synthetic construct
  misc_feature 1..120: note = Artificially Synthesized Probe
  source 1..120: mol_type = other DNA
tcgaaacacaattttgagagaagttggaatggcagtgcagttagcagataaaaaaaatacccacttttctttacaagtctctatctaattcatactccctattgctctttcctgcttcac

SEQ ID NO: 14960 - DNA, 120 bp, synthetic construct
  misc_feature 1..120: note = Artificially Synthesized Probe
  source 1..120: mol_type = other DNA
tcctgtattggtgaattatatcagcttccatagacttgcctgagccaatataacctaggacatattctccttttcccttaactcagcattgactgacaaagaacatgctaggaagtctgt

SEQ ID NO: 14961 - DNA, 120 bp, synthetic construct
  misc_feature 1..120: note = Artificially Synthesized Probe
  source 1..120: mol_type = other DNA
tgtgcccagcaccattttaactgtattctaaaagcattttacagcctgctaatacataacctcatctccaaccttgcttcctaagttccactctgtgttccacaaatgggattaatcacc

SEQ ID NO: 14962 - DNA, 120 bp, synthetic construct
  misc_feature 1..120: note = Artificially Synthesized Probe
  source 1..120: mol_type = other DNA
ctcctccagtgatactatggaaaacaatgttttagaaaaataaagaaggtgtgaataatgattaaagaatcatacactctcaaagtgaaacaatttcccaagaaatgcggtagaataagc

SEQ ID NO: 14963 - DNA, 120 bp, synthetic construct
  misc_feature 1..120: note = Artificially Synthesized Probe
  source 1..120: mol_type = other DNA
ccaaattacagctttcatttgaattttgcccatttttccaatattgttcttttcctgctacagcatccaatctaggacctcatgttgcatttatttcttatgcatctttagtcccctagg

SEQ ID NO: 14964 - DNA, 120 bp, synthetic construct
  misc_feature 1..120: note = Artificially Synthesized Probe
  source 1..120: mol_type = other DNA
gatcacttgagaacataaagtcaactttccctggaagagtttctcattataaaagaaaggcaagcatcttcttcctaatatctagctttatcaggtcaggggctatattctcggaaggga

SEQ ID NO: 14965 - DNA, 120 bp, synthetic construct
  misc_feature 1..120: note = Artificially Synthesized Probe
  source 1..120: mol_type = other DNA
gtcattcccattgccttgcatagagatagaatcacaggtgacaggtcattggaaaatcacttcttgagagtgggtatctttattttgagttggtatctttttgagagttggccactcata

SEQ ID NO: 14966 - DNA, 120 bp, synthetic construct
  misc_feature 1..120: note = Artificially Synthesized Probe
  source 1..120: mol_type = other DNA
tttgggggagtcttccatgattaccctaagaatagggtaagcattcttcctccctgcttccatagaaagtaggaaactattgcacttacacattgtaatgtggctatagtatgatcaaaa

SEQ ID NO: 14967 - DNA, 120 bp, synthetic construct
  misc_feature 1..120: note = Artificially Synthesized Probe
  source 1..120: mol_type = other DNA
cagcagaattaacccaacattcagcaactccagatcagcttttcttacccccatgaagagctatcaatttaacaaccacagttgtaaggattcttaataagctgtcaatgagcactgctg

SEQ ID NO: 14968 - DNA, 120 bp, synthetic construct
  misc_feature 1..120: note = Artificially Synthesized Probe
  source 1..120: mol_type = other DNA
aagctcgaacttttgacagaaggatgccattttgaatttgccactgtggcctccagatccattgctgaggatgggctcgtcacacttcagcagcctgtcctgtttgtaaaccagccagac

SEQ ID NO: 14969 - DNA, 120 bp, synthetic construct
  misc_feature 1..120: note = Artificially Synthesized Probe
  source 1..120: mol_type = other DNA
aaagtgaatcgtaaagactttggaatctcctactaaaatattttaacaggaaagagacacatcagtgcattttacaagcagatcaatgtggcggtatctagcatgcatggggaagggatg

SEQ ID NO: 14970 - DNA, 120 bp, synthetic construct
  misc_feature 1..120: note = Artificially Synthesized Probe
  source 1..120: mol_type = other DNA
acttacttcagtgcatttgcttgcaaagggtgcaatgtgatgtttcctactggtagggtcgtatttcatatgtggtgatagtgttgctgaacaaataggaaatatccttgcctagactat

SEQ ID NO: 14971 - DNA, 120 bp, synthetic construct
  misc_feature 1..120: note = Artificially Synthesized Probe
  source 1..120: mol_type = other DNA
gttggtgctgtaaacacgtttctacataactagattaaattcacagacactcactgtcctagcactgtttattttctatggggagcttcatttacctattctttccctcaccccacttct

SEQ ID NO: 14972 - DNA, 120 bp, synthetic construct
  misc_feature 1..120: note = Artificially Synthesized Probe
  source 1..120: mol_type = other DNA
agaatatgggtaaggaagcatctttctcagttgttcttaacccttgtttccatcataatcaccatcagagctttaagaaaataccagtgcacagatcacgttaccccacaaacctactaa

SEQ ID NO: 14973 - DNA, 120 bp, synthetic construct
  misc_feature 1..120: note = Artificially Synthesized Probe
  source 1..120: mol_type = other DNA
ttttataacctcttgctctttgttcatgggtgcaatgttttctcatttctgaaaatatgaattgtagttggttatcctctcttttgctccttgcattgcctcattctcccaagtgcctct

SEQ ID NO: 14974 - DNA, 120 bp, synthetic construct
  misc_feature 1..120: note = Artificially Synthesized Probe
  source 1..120: mol_type = other DNA
cagtaaactgttgccatcattattatatttactgataagctaatggagggtagaaaagactgtttcctgtggttctctgaaatcataatacctggcttgtcgctgcccagagtgcttact

SEQ ID NO: 14975 - DNA, 120 bp, synthetic construct
  misc_feature 1..120: note = Artificially Synthesized Probe
  source 1..120: mol_type = other DNA
gcagttcttactttgagaaatagtgatgccttctctttattgtcacacacctacacatgtgccctcttaatttccattgctatgtcacatattttgctttacctattttccacactttcc

SEQ ID NO: 14976 - DNA, 120 bp, synthetic construct
  misc_feature 1..120: note = Artificially Synthesized Probe
  source 1..120: mol_type = other DNA
agttaagtaccttcacctactccctaccttgtttcatatataaaggcattctccaccaaagtatttgttagtgttctgctaacgttgatgtaaaaatcattagatgactgggggggcggg

SEQ ID NO: 14977 - DNA, 120 bp, synthetic construct
  misc_feature 1..120: note = Artificially Synthesized Probe
  source 1..120: mol_type = other DNA
ttaataaacaccttctgtaaaagaattctcatgcttaaaatttcatatgaagaggaaaggctgtaaggacaagttgatgggaaaaggggacgcctgatgaatgagagcatggcctgtaaa

SEQ ID NO: 14978 - DNA, 120 bp, synthetic construct
  misc_feature 1..120: note = Artificially Synthesized Probe
  source 1..120: mol_type = other DNA
atttctcttttctctgtcatcaaatttgctttctgatttctcctctgtattaactgatccaatggcttccgtcattctgaggaaaaagttcaagctccttttcaaggcctacagtgcttg

SEQ ID NO: 14979 - DNA, 120 bp, synthetic construct
  misc_feature 1..120: note = Artificially Synthesized Probe
  source 1..120: mol_type = other DNA
atgcattttacttcaaggaataagccagggaatgtcattgaagaatacggggtgatgctccttggatggcaactctgaaggaagaaaatgttttcacatcagtttgttctcagaagataa

SEQ ID NO: 14980 - DNA, 120 bp, synthetic construct
  misc_feature 1..120: note = Artificially Synthesized Probe
  source 1..120: mol_type = other DNA
tattctcacttgaaaggatttacaaagtcttggtgattcttgagtgtttcataggtccttttcccccaacctttcttttggggtatactcttcctacgtaggacatcatctctgtctgtt

SEQ ID NO: 14981 - DNA, 120 bp, synthetic construct
  misc_feature 1..120: note = Artificially Synthesized Probe
  source 1..120: mol_type = other DNA
tttgggctttgtaaacatggtactaagagaggaaatatagtttcattagggtaaaagctactgaaaattgccacttggtgaatgttctatcatagacttgaggtacatataaaaatctaa

SEQ ID NO: 14982 - DNA, 120 bp, synthetic construct
  misc_feature 1..120: note = Artificially Synthesized Probe
  source 1..120: mol_type = other DNA
gccagctactcaaatgcaacttagtatctccaacttttacagaagatagattcatctcaaccataccagatggttatttttgcaggaaagggataggtataaggtagaatggggagtgat

SEQ ID NO: 14983 - DNA, 120 bp, synthetic construct
  misc_feature 1..120: note = Artificially Synthesized Probe
  source 1..120: mol_type = other DNA
ttctagtctgtttgtaattcacatctaatgaaagagtgagagtggacgataaagggaacttgttgaaacatttctctcaaagcaaaagggatcattggaagcaggcagacaccagaattg

SEQ ID NO: 14984 - DNA, 120 bp, synthetic construct
  misc_feature 1..120: note = Artificially Synthesized Probe
  source 1..120: mol_type = other DNA
ttgcaattttcattcttaactctttcctgtcctatcatttctactccttttctagtttctctcattctctccctttttccatatttgtgccattgtcttttgcccaatcttgttgaactg

SEQ ID NO: 14985 - DNA, 120 bp, synthetic construct
  misc_feature 1..120: note = Artificially Synthesized Probe
  source 1..120: mol_type = other DNA
attcacatatttattttgtccttctcccattttccattaattaacaggattgactacagcaaagatgcccagtgttccactttcaagtgaccccttacctactcacaccactgcattctc

SEQ ID NO: 14986 - DNA, 120 bp, synthetic construct
  misc_feature 1..120: note = Artificially Synthesized Probe
  source 1..120: mol_type = other DNA
gttgtgagttctactggtaaattaaaggcaatgtagccatgttcccgggaaaaatcagattgatgcaagagatatttttgccaaggaggggcactatgctccttagaatactgatatatg

SEQ ID NO: 14987 - DNA, 120 bp, synthetic construct
  misc_feature 1..120: note = Artificially Synthesized Probe
  source 1..120: mol_type = other DNA
aaggatgaaggtgctgatgactaggtggaacatctcatgctattttattattttgtttattgcctgagtagtgtcacattgagttttccttttgaaggttctgtatttcacgtcacatgc

SEQ ID NO: 14988 - DNA, 120 bp, synthetic construct
  misc_feature 1..120: note = Artificially Synthesized Probe
  source 1..120: mol_type = other DNA
gctcaggaaacctcccaaggctatgtaaatagaggactcaggtgcctgtcactttccagccaagcaaatttaaatactgacagacacattttaacagattcagttacttcacagtttggt

SEQ ID NO: 14989 - DNA, 120 bp, synthetic construct
  misc_feature 1..120: note = Artificially Synthesized Probe
  source 1..120: mol_type = other DNA
ataattattattttgcagtattaaaactgtgcccttggcataaaaatcattccaggcaatccacactctttaaacaagtgggagaagagccgccctcaccttcctcattccatctagtcc

SEQ ID NO: 14990 - DNA, 120 bp, synthetic construct
  misc_feature 1..120: note = Artificially Synthesized Probe
  source 1..120: mol_type = other DNA
tttgtaattggtagacacctgcaagctcaaatcaaagccatgttcagaacgtgcatgcatgtatcactgcagaaatacagactctgcctgcaaatgtgagactaatctcacatcattgaa

SEQ ID NO: 14991 - DNA, 120 bp, synthetic construct
  misc_feature 1..120: note = Artificially Synthesized Probe
  source 1..120: mol_type = other DNA
acagttctgtagaatgcatgtgtcgtggtatagcagaagtgcttgaagatttgtttctctgccttatctttagtaattgtgtttatgttggctatctggctattgcccttgcgtgacaga

SEQ ID NO: 14992 - DNA, 120 bp, synthetic construct
  misc_feature 1..120: note = Artificially Synthesized Probe
  source 1..120: mol_type = other DNA
ctcctttctttaagttgcattaagtgtttgaatcctgagggtgatggaacagcaggaagatatttctctgcttagcagtgcaacagctgatgagatcaggatgtaattgttactgtcata

SEQ ID NO: 14993 - DNA, 120 bp, synthetic construct
  misc_feature 1..120: note = Artificially Synthesized Probe
  source 1..120: mol_type = other DNA
ttagaatcagcatacctcactttggaatagcactttaattacatctttctttattccaagctttcaggacccactagtaagctaaactcactggctctaatttctcaccgatgactagtc

SEQ ID NO: 14994 - DNA, 120 bp, synthetic construct
  misc_feature 1..120: note = Artificially Synthesized Probe
  source 1..120: mol_type = other DNA
cagtagctttccatacatttagtgtaaagagtggccttcatatgtctgtttaattaatatgatcttttgtaatccggttgtcattcatctctcctcccgcctcttgaatcattgcctcct

SEQ ID NO: 14995 - DNA, 120 bp, synthetic construct
  misc_feature 1..120: note = Artificially Synthesized Probe
  source 1..120: mol_type = other DNA
actttgctctcatggaagttccaagtccagctaggaagacagacacttatctggtaatcatccaaatataaatttacaagctgaggtccttgttagggcagtaaagcacagataattacg

SEQ ID NO: 14996 - DNA, 120 bp, synthetic construct
  misc_feature 1..120: note = Artificially Synthesized Probe
  source 1..120: mol_type = other DNA
tttgatgtgtatgggaagaaccaaaatacattcataaaaaggaaggttatggtcatgttagtgagatcaagttggttttgtcagctaagctactgcttggaaagaggagggggtgacagg

SEQ ID NO: 14997 - DNA, 120 bp, synthetic construct
  misc_feature 1..120: note = Artificially Synthesized Probe
  source 1..120: mol_type = other DNA
gtgtggtaagaatataacattgaccagagaatttttttttgtggcacaatgttgttctagatattatttaatcttactctctgccctttctctcttcctccctgcctctcttgttctccc

SEQ ID NO: 14998 - DNA, 120 bp, synthetic construct
  misc_feature 1..120: note = Artificially Synthesized Probe
  source 1..120: mol_type = other DNA
actttttgagtgccaacatgatgcggctcaaacaagtgaaaaattttacacgtgacctaaagtgactggtcatagtcaaaatgcagaaacataacacagaatttagtcagcatccccaga

SEQ ID NO: 14999 - DNA, 120 bp, synthetic construct
  misc_feature 1..120: note = Artificially Synthesized Probe
  source 1..120: mol_type = other DNA
tgcttatgtttttggtgtcgtatatgaaagtccattgccaagtcatgcagatttatccatatgttttgttctaaaaattttatagcattggctcttaaatttagctctgttacccacttt

SEQ ID NO: 15000 - DNA, 120 bp, synthetic construct
  misc_feature 1..120: note = Artificially Synthesized Probe
  source 1..120: mol_type = other DNA
caccatgcccggcccgtgattctaagttttatgtaaaaaggatagttgaaggctaaagaggctgcctaaatccttgtctcctcatacttctccaaaataatatatagctacaagaacagc

SEQ ID NO: 15001 - DNA, 120 bp, synthetic construct
  misc_feature 1..120: note = Artificially Synthesized Probe
  source 1..120: mol_type = other DNA
aagacaaacttaatctgtagttaacagaaagttgatcagaaggtacgtgagtctggtcaaaggagctgagttgactgggaagtaccacagaaggacattttgggatcacagaaattttct

SEQ ID NO: 15002 - DNA, 120 bp, synthetic construct
  misc_feature 1..120: note = Artificially Synthesized Probe
  source 1..120: mol_type = other DNA
ctttccagccccagaaatgactaaaatccagaacattctaaatatttgcttgtccttcttggtcttagtttaaatctttgtgctccaaagcctagagacagaaaacctctggatgacaac

SEQ ID NO: 15003 - DNA, 120 bp, synthetic construct
  misc_feature 1..120: note = Artificially Synthesized Probe
  source 1..120: mol_type = other DNA
agtctatgtggaaggaaaaatggaaattccaggaagataaaacagcagaggtactgtctgcctcattggacacctcttttacaaacactttgtgtagcttctatgggaacacattgttca

SEQ ID NO: 15004 - DNA, 120 bp, synthetic construct
  misc_feature 1..120: note = Artificially Synthesized Probe
  source 1..120: mol_type = other DNA
gcaagtgacagtgaagcttcttggtaattggggaattggggaagagatcttttgtgctttattggatttaaaggattatttttcaaaagttactgaaagcaataggcacctttcaagacc

SEQ ID NO: 15005 - DNA, 120 bp, synthetic construct
  misc_feature 1..120: note = Artificially Synthesized Probe
  source 1..120: mol_type = other DNA
ttccacttccggcatgaaactccctcattctcacagctcccgttaattactgtagtgtccaaattactatgatagaatcaacccaatgactgatgatcaaatggattctgcatctaacat

SEQ ID NO: 15006 - DNA, 120 bp, synthetic construct
  misc_feature 1..120: note = Artificially Synthesized Probe
  source 1..120: mol_type = other DNA
ttctattttatgtcacattatccatttaaggtttcctttcaatggcatttggctcttgccactagtataatctctccatagtttccaggcccaaagttagatctgcttctggggcacatg

SEQ ID NO: 15007 - DNA, 120 bp, synthetic construct
  misc_feature 1..120: note = Artificially Synthesized Probe
  source 1..120: mol_type = other DNA
aatggcccccatgaacgttaccatttggaagttgaagctggaaatactctggttagaaatgagtcgcataagaattgcgatttccgtgtaaaagatcttcaatattcaacagactacact

SEQ ID NO: 15008 - DNA, 120 bp, synthetic construct
  misc_feature 1..120: note = Artificially Synthesized Probe
  source 1..120: mol_type = other DNA
accaaattgccctggtgtatcagtgtatgaaatgactgcttcttgagaggctcaccaacactgaatacgcctttctttttctttatttggtggttgaaatatggtattgatatctttctt

SEQ ID NO: 15009 - DNA, 120 bp, synthetic construct
  misc_feature 1..120: note = Artificially Synthesized Probe
  source 1..120: mol_type = other DNA
gcattatgatagatgatgccatagttgtgatgccctggtgtgattagtttaaatgatgcaaaaccattgtcacattctaagagaaaaacccctgctctgtcattgtgtgttattctctca

SEQ ID NO: 15010 - DNA, 120 bp, synthetic construct
  misc_feature 1..120: note = Artificially Synthesized Probe
  source 1..120: mol_type = other DNA
ctaggtgttactctttttagccacctccctccacgctcttcccacttcctagaatatgcctctcccactcttcaaatcgtataagttactatggaaaaatataggtgtacatcatattaa

SEQ ID NO: 15011 - DNA, 120 bp, synthetic construct
  misc_feature 1..120: note = Artificially Synthesized Probe
  source 1..120: mol_type = other DNA
cacattagcaaactaattattttattttttgttactgaaattcaggcctattttcacaatggagactatcctggagaaccctttattttacatcattcaacatcttgtaagttatcactg

SEQ ID NO: 15012 - DNA, 120 bp, synthetic construct
  misc_feature 1..120: note = Artificially Synthesized Probe
  source 1..120: mol_type = other DNA
atctgagcctatggaggaaggagacctagtactctactttgggctttctctactggttaacattgtaaatagaattatttaagcctgtatgtactttgttgtcagcaacttctaggtctt

SEQ ID NO: 15013 - DNA, 120 bp, synthetic construct
  misc_feature 1..120: note = Artificially Synthesized Probe
  source 1..120: mol_type = other DNA
tgtctggtaaccagctaatattccacttttatcaggtttccaggtcaacggagccaaaaaattagccctcatctttttccacaaaggagacaacattgtattcactctctgctcacaata

SEQ ID NO: 15014 - DNA, 120 bp, synthetic construct
  misc_feature 1..120: note = Artificially Synthesized Probe
  source 1..120: mol_type = other DNA
ttcccctttggtgttgatgttttccttaaaagcttggttcttattggtagtctagtcatagtcacagtgagacaacaggaaaggttgattagatgttctgtggtccttagaagatcttgg

SEQ ID NO: 15015 - DNA, 120 bp, synthetic construct
  misc_feature 1..120: note = Artificially Synthesized Probe
  source 1..120: mol_type = other DNA
tgttctgacccatgattcacatttactgcatatgtcactttcaaacctgagactcaggcattctgagtaaatggaatctattcctttgatttaggctgtggcctcctttcttttgttttc

SEQ ID NO: 15016 - DNA, 120 bp, synthetic construct
  misc_feature 1..120: note = Artificially Synthesized Probe
  source 1..120: mol_type = other DNA
ccactgcgcctgtctgttcagttacctttctagtgtctgtttcccccaaagagaatgcaaatttcctgaaaactaatattatctctgccttatattctatagcatttccacggactgtct

SEQ ID NO: 15017 - DNA, 120 bp, synthetic construct
  misc_feature 1..120: note = Artificially Synthesized Probe
  source 1..120: mol_type = other DNA
gtctcttagtgaatggattttacacctcagtgaacaggtaagagggtttatctttgtgaagtagaagtctttctcatccccttaagaggctacccacttctgcatataaagttaaactat

SEQ ID NO: 15018 - DNA, 120 bp, synthetic construct
  misc_feature 1..120: note = Artificially Synthesized Probe
  source 1..120: mol_type = other DNA
aacagaagatttaaaataaaatcatttagctacttatgtgagtttagcagacaattcttggttgttttctttcctccctcaccctcctctctcctctctgactctgctttctcccatcct

SEQ ID NO: 15019 - DNA, 120 bp, synthetic construct
  misc_feature 1..120: note = Artificially Synthesized Probe
  source 1..120: mol_type = other DNA
aaatgtacttgctttctcatgcttaagacaggaataatttcagaactcctttgtctgtgttaatctgtgttggaagtgtttccctctggtaatagcaggtaccaggtctctatgcagaaa

SEQ ID NO: 15020 - DNA, 120 bp, synthetic construct
  misc_feature 1..120: note = Artificially Synthesized Probe
  source 1..120: mol_type = other DNA
tgaatgaataccaggcattcccaacaacctaaagaaacaattgcacatagccagtttgagagctgtgattgtatagaaagtttccatgggcaataagataaatgggtcaccctcatggat

SEQ ID NO: 15021 - DNA, 120 bp, synthetic construct
  misc_feature 1..120: note = Artificially Synthesized Probe
  source 1..120: mol_type = other DNA
attttacaggatatctcatttactcaaaacggtcattggtaagggggaaattatttttcctgaatctgctgtgatccaagaaatcgttgtttctttcagagcatcccgcgggtgttcagc

SEQ ID NO: 15022 - DNA, 120 bp, synthetic construct
  misc_feature 1..120: note = Artificially Synthesized Probe
  source 1..120: mol_type = other DNA
tatatttctcacaagaagtccacatttgcctcagccatgtgccgtataggtgaggactgggaggctcagtttagttaattaccttgttgttgttcacacaattggtaaatatttgagttg

SEQ ID NO: 15023 - DNA, 120 bp, synthetic construct
  misc_feature 1..120: note = Artificially Synthesized Probe
  source 1..120: mol_type = other DNA
tttttcttatcagcttttatttgtttacctcctaggtcccagggatgaaactgttgatgatttctggaggatgatttgggaacagaaagccacagttattgtcatggtcactcgatgtga

SEQ ID NO: 15024 - DNA, 120 bp, synthetic construct
  misc_feature 1..120: note = Artificially Synthesized Probe
  source 1..120: mol_type = other DNA
cttaataattttttaaaatgtagaacaagtgtgcagaatactggccgtcaatggaagagggcactcgggcttttggagatgttgttgtaaagatcaaccagcacaaaagatgtccagatt

SEQ ID NO: 15025 - DNA, 120 bp, synthetic construct
  misc_feature 1..120: note = Artificially Synthesized Probe
  source 1..120: mol_type = other DNA
tgcagcagagatagaatgtttagttcagaaaataaggaggtcattgtggccttagataatagttaaaatagagatcgtcatgcatgttatataattccattatatgaaaaatccacaata

SEQ ID NO: 15026 - DNA, 120 bp, synthetic construct
  misc_feature 1..120: note = Artificially Synthesized Probe
  source 1..120: mol_type = other DNA
tttctcaccaacattgtctgagggttttctttccttcacatccttgcaagcattcattcttggctatcttttatatataagttgttataactggagcatagtgataacttaatgtagttt

SEQ ID NO: 15027 - DNA, 120 bp, synthetic construct
  misc_feature 1..120: note = Artificially Synthesized Probe
  source 1..120: mol_type = other DNA
tgttgattttatatctcatgaccttactgaatttgttaatcagttctaatagttttttggtggagtatttaggtttttccaaatataagataatggaatgtgcaaacaagtataattgga

SEQ ID NO: 15028 - DNA, 120 bp, synthetic construct
  misc_feature 1..120: note = Artificially Synthesized Probe
  source 1..120: mol_type = other DNA
gcattttcattatattacactttgcttgttagtttgtttacacaatgtctgttgtcttcagtgtaaaataatgcattataagatatgataaccccaaatccaaaagcattcaacagatac

SEQ ID NO: 15029 - DNA, 120 bp, synthetic construct
  misc_feature 1..120: note = Artificially Synthesized Probe
  source 1..120: mol_type = other DNA
tgaggaaatcactaaggaaattttaaaatttttcaaaacaaatgaaaatggaaacacaacaaaccaaatcctgtgtgatacagtgaaagcagtactaagagaaaagtttgtaagagtaag

SEQ ID NO: 15030 - DNA, 120 bp, synthetic construct
  misc_feature 1..120: note = Artificially Synthesized Probe
  source 1..120: mol_type = other DNA
ggtcttcttaggtttccatggtattactaattgttatgtctatagagtgctgtgaaacaatcctatcaatagtttctggccaaacacttgtttgactaagccacaaaggcacctgctcca

SEQ ID NO: 15031 - DNA, 120 bp, synthetic construct
  misc_feature 1..120: note = Artificially Synthesized Probe
  source 1..120: mol_type = other DNA
agacatctttccctttggcaattgctattttgggaaacaacctatgggagaagcttagattcttatattggcttcacacctgacagcttttccatgatcatgcctctgcttttttttgct

SEQ ID NO: 15032 - DNA, 120 bp, synthetic construct
  misc_feature 1..120: note = Artificially Synthesized Probe
  source 1..120: mol_type = other DNA
acaagtccctggcccatgctatgcatttggtgattgtaagtgatggtaattactgaaaatgtctgtatttgacccagcaaaatcacatatatgcatatacccaagagaagcatcaactag

SEQ ID NO: 15033 - DNA, 120 bp, synthetic construct
  misc_feature 1..120: note = Artificially Synthesized Probe
  source 1..120: mol_type = other DNA
atcttgatccatcaggctttggtggaatacaatcagtttggagaaacagaagtgaatttgtctgaattacatccatatctacataacatgaagaaaagggatccacccagtgagccgtct

SEQ ID NO: 15034 - DNA, 120 bp, synthetic construct
  misc_feature 1..120: note = Artificially Synthesized Probe
  source 1..120: mol_type = other DNA
catgcaataatgaccaagtgactcaatcccccagaagacctgtacttataatggaagaactagcagacacagggtagtctcaaacagagtagtgttttattgttgttttcttgcttttct

SEQ ID NO: 15035 - DNA, 120 bp, synthetic construct
  misc_feature 1..120: note = Artificially Synthesized Probe
  source 1..120: mol_type = other DNA
atagcacagatagttgaacttatgattttagaggtgatgtaatatttggaatgaaacctacaaaggtggaatgatgaaagtggatgactgggaagtggagggaaagtcatgggaggtgaa

SEQ ID NO: 15036 - DNA, 120 bp, synthetic construct
  misc_feature 1..120: note = Artificially Synthesized Probe
  source 1..120: mol_type = other DNA
cagtttccaaaacatctggtccttcatgcagctcatggtggtgttcaagtggcctaaaattcagtgatgatattttctttcactcaattacgtagcaaagaatgaggtttgaaacagggt

SEQ ID NO: 15037 - DNA, 120 bp, synthetic construct
  misc_feature 1..120: note = Artificially Synthesized Probe
  source 1..120: mol_type = other DNA
atcttttctgactaattaggaactgtgggtgagaggaaagcaatctggaaggtgtaaacaaattaagaatgaactttcaaaacatgtgccaagtctcctaagaatgtgttgtctccaaag

SEQ ID NO: 15038 - DNA, 120 bp, synthetic construct
  misc_feature 1..120: note = Artificially Synthesized Probe
  source 1..120: mol_type = other DNA
agatgaccaaataaatcagatcagtgcatggttgacctagttaattttcataggagtccttatgaatgtagtttaaaatatggaattgatggtgatatggttaatcaaatcatttgacca

SEQ ID NO: 15039 - DNA, 120 bp, synthetic construct
  misc_feature 1..120: note = Artificially Synthesized Probe
  source 1..120: mol_type = other DNA
atacatactcagatacccaaattgtaggcaatgacaaatttgtatatttgtatggttagaaacttttcattcagataaactgaattattaggtgagtctgtgtcatatccccccactttt

SEQ ID NO: 15040 - DNA, 120 bp, synthetic construct
  misc_feature 1..120: note = Artificially Synthesized Probe
  source 1..120: mol_type = other DNA
aaataacagctacattttcacgctgttttcctcattttctcaagataaaagccaagatctttttgtgatatccagcaccctggacaatcaccccctcatgtgtctttcatcttcctccca

SEQ ID NO: 15041 - DNA, 120 bp, synthetic construct
  misc_feature 1..120: note = Artificially Synthesized Probe
  source 1..120: mol_type = other DNA
gttattgaaagggtcatgaataacattgactcatgccagccataaatattgaagaggtcatgataagcatgtggaaaagaggagcaaacctcaaagacctacactaaggaaaacagctgt

SEQ ID NO: 15042 - DNA, 120 bp, synthetic construct
  misc_feature 1..120: note = Artificially Synthesized Probe
  source 1..120: mol_type = other DNA
acaagagtacacctctactcattcactgcaggtgcgtgggatttggtagaatgtgctctcaaaatcataatgcttgacttctcggttcacatgttgtcttatctagttatcctcatatat

SEQ ID NO: 15043 - DNA, 120 bp, synthetic construct
  misc_feature 1..120: note = Artificially Synthesized Probe
  source 1..120: mol_type = other DNA
atttgattgccctctttttagtgaataattctactaggtattacttttctactgatgcagaagtgaaaacatttgtgaaacgtggtagagaggcagaagagtgaagaagagcatgtgttc

SEQ ID NO: 15044 - DNA, 120 bp, synthetic construct
  misc_feature 1..120: note = Artificially Synthesized Probe
  source 1..120: mol_type = other DNA
cattaaagcagcaagttccacaagggaaagaagacttgtgtgagaccacttgaggcccaggcttaaaagtgacacacatgtcttcttctgtatgttattagccaaataaataagtcataa

SEQ ID NO: 15045 - DNA, 120 bp, synthetic construct
  misc_feature 1..120: note = Artificially Synthesized Probe
  source 1..120: mol_type = other DNA
aagaagataaaattgaatttgataatgaagtggacaaagtaaagcaggatgctaattgtgttaatccacttggtgccccagaaaagctccctgaagcaaaggaacaggctgaaggttctg

SEQ ID NO: 15046 - DNA, 120 bp, synthetic construct
  misc_feature 1..120: note = Artificially Synthesized Probe
  source 1..120: mol_type = other DNA
gtgttaacttagcttgaaggatctgtttttaaaaatcataaactgtgtgcagactcaataaaatcatgtacatttctgaaatgacctcaagatgtcctccttgttctactcatatatatc

SEQ ID NO: 15047 - DNA, 120 bp, synthetic construct
  misc_feature 1..120: note = Artificially Synthesized Probe
  source 1..120: mol_type = other DNA
acttcacacaaaaacagggacaacgtctgtgaccaccggagatgaatattagtgaaagaactgactctcccgattcctctattaacctgtctctggctacattcaaacaaatcatatgtg

SEQ ID NO: 15048 - DNA, 120 bp, synthetic construct
  misc_feature 1..120: note = Artificially Synthesized Probe
  source 1..120: mol_type = other DNA
acccagagtccgagtccagcctagctgaggcctgcgcaccgccgggaaagacgcggggtccaagtgcagcctagctgaggcctgcgcaccgccgggaaagacgcggtgtccgagtccagc

SEQ ID NO: 15049 - DNA, 120 bp, synthetic construct
  misc_feature 1..120: note = Artificially Synthesized Probe
  source 1..120: mol_type = other DNA
cccagagtccgagtccagcctagctgaggcctgcgcaccgccgggaaagacgcggggtccgagtccagcctagctgaggcctgcgcaccgccgggaaagacgcggtgtccgagaccagcc

SEQ ID NO: 15050 - DNA, 120 bp, synthetic construct
  misc_feature 1..120: note = Artificially Synthesized Probe
  source 1..120: mol_type = other DNA
cgcggggtccgagtccagcctagctgaggcctgcgcaccgccgggaaagacccagagtccgagtccagcctagctgaggcctgcgcaccgccgggaaagacgcggggtccgagtccagcc

SEQ ID NO: 15051 - DNA, 120 bp, synthetic construct
  misc_feature 1..120: note = Artificially Synthesized Probe
  source 1..120: mol_type = other DNA
gaattttcttatgttcttaagaaactcctaagaagtataattttagtacctgcaaggtatctgtcacagagtcaccattactcgaccaggcctctgtttcacacagtcgggtcgttttta

SEQ ID NO: 15052 - DNA, 120 bp, synthetic construct
  misc_feature 1..120: note = Artificially Synthesized Probe
  source 1..120: mol_type = other DNA
ggaaagaactcagctccagaccgccagcaggcaaacatatggaaagatgggctcaactcagtttctggtttttcactaattcatggcttttttattaaatgcaatcttaatacagatgga

SEQ ID NO: 15053 - DNA, 120 bp, synthetic construct
  misc_feature 1..120: note = Artificially Synthesized Probe
  source 1..120: mol_type = other DNA
agtcaagatcactgcatgggagtgcattgcttcttgtcctaattgacagggaacatttggtggtgtctccaccacaagagacgcagcatggctgcgggaccagtgaagccataaagccca

SEQ ID NO: 15054 - DNA, 120 bp, synthetic construct
  misc_feature 1..120: note = Artificially Synthesized Probe
  source 1..120: mol_type = other DNA
tgcctgctggacaccaacaccagccctcaagtgccagcagtgacaagcccacctgagcagaaatgcagattctcgtccagcatcctcagagtccaatccactctaacaggatcccctttg

SEQ ID NO: 15055 - DNA, 120 bp, synthetic construct
  misc_feature 1..120: note = Artificially Synthesized Probe
  source 1..120: mol_type = other DNA
atgcaaacaaacaacagctattagaaatatcactttacaaactttttgttgagatactatgcattccaaagcgttcaccagtgagaagtacacagcttggtgctgcctgaagacgcagcc

SEQ ID NO: 15056 - DNA, 120 bp, synthetic construct
  misc_feature 1..120: note = Artificially Synthesized Probe
  source 1..120: mol_type = other DNA
gatagcgatgtccacttttcattcctggcactggtaagttggtccttccttctgtttttcttgatcagccttgccagaagtgtatattcacatcttttaaagaagcaatgattggttttg

SEQ ID NO: 15057 - DNA, 120 bp, synthetic construct
  misc_feature 1..120: note = Artificially Synthesized Probe
  source 1..120: mol_type = other DNA
tgattccctttcttagcttgttagctattctttttgtggctattctagaaataataacacgggaccttgatttatcatggtgcaacacacatcacatcccacatggtgtcagaaaaactg

SEQ ID NO: 15058 - DNA, 120 bp, synthetic construct
  misc_feature 1..120: note = Artificially Synthesized Probe
  source 1..120: mol_type = other DNA
accccactctgggtttttacccaaaagagtcaaaatcaagatctccaaagagatacttgcattcccacactaactgtggcattatttgcaatatccaagatgtggccacaacccaaatgt

SEQ ID NO: 15059 - DNA, 120 bp, synthetic construct
  misc_feature 1..120: note = Artificially Synthesized Probe
  source 1..120: mol_type = other DNA
ttttcctaagagtcatctgttgatggagtctctcaagttctgtctgtctggtcacgtcttgatttcatctttatacctgagaaacatttccagggagtagagaacttgaattgatggggt

SEQ ID NO: 15060 - DNA, 120 bp, synthetic construct
  misc_feature 1..120: note = Artificially Synthesized Probe
  source 1..120: mol_type = other DNA
cttagaagttcctgaattccagtttcatctcttcagcattatgagactgccagaaatcctgctctgcttttccatagctttctgatcagcctctgattcaactcaagaatttggcaaatg

SEQ ID NO: 15061 - DNA, 120 bp, synthetic construct
  misc_feature 1..120: note = Artificially Synthesized Probe
  source 1..120: mol_type = other DNA
atgcaaacagatcattatagccaagagaaggtcagttctgatcgttgttgattttcctggaatttgctaatgatgaatcgtgctgtgtgaaaatacactttaggctgatgcccagctgat

SEQ ID NO: 15062 - DNA, 120 bp, synthetic construct
  misc_feature 1..120: note = Artificially Synthesized Probe
  source 1..120: mol_type = other DNA
ggctgactgatttattgatgagaaacccagggaggcattggtttggggttctgtgacatcatgttgaggcatctgcatttcctatcacactgtactaaatcagttagaaaatatcttaat

SEQ ID NO: 15063 - DNA, 120 bp, synthetic construct
  misc_feature 1..120: note = Artificially Synthesized Probe
  source 1..120: mol_type = other DNA
ctagatggattgtccgttccattcgggcttcaaatcagaggctgtggtggctgtggtatctcaggactggtgcagtagggttctagcacagcttcaggcagacttcctcaacaacagtga

SEQ ID NO: 15064 - DNA, 120 bp, synthetic construct
  misc_feature 1..120: note = Artificially Synthesized Probe
  source 1..120: mol_type = other DNA
tgatagtgatggtgatggcagtggtggtggtggtgatagtgatggtgatggcaatggtggtgatggtgatggtgatggtgatcagtgatggtggtggtgatggcaatggtggcagtggtg

SEQ ID NO: 15065 - DNA, 120 bp, synthetic construct
  misc_feature 1..120: note = Artificially Synthesized Probe
  source 1..120: mol_type = other DNA
ttttgttatgtgtgtgcccagaagagcatctaaacagacatttacccgaatgttcttcaccatgattattttggggctttaggatcgtaaggaggtgattctgattttgtggcttgtacc

SEQ ID NO: 15066 - DNA, 120 bp, synthetic construct
  misc_feature 1..120: note = Artificially Synthesized Probe
  source 1..120: mol_type = other DNA
aatccaagggtaggtttatatcaaatcagcagacaaacttgacttctgggtaaaggctaaaatgaatcaacggagaactgacgagactgtttccccactgacgggtctgtaagagttggg

SEQ ID NO: 15067 - DNA, 120 bp, synthetic construct
  misc_feature 1..120: note = Artificially Synthesized Probe
  source 1..120: mol_type = other DNA
agtgtttgtttctccctgaaaacctgatttgacttcactcaaaatctccacacctgctgcaaacgtcagtttgataaacctgacgctgccctcccggctgggggcaggaatctctctacc

SEQ ID NO: 15068 - DNA, 120 bp, synthetic construct
  misc_feature 1..120: note = Artificially Synthesized Probe
  source 1..120: mol_type = other DNA
taacggggccgtcctccaacaatgagtgggcaaaggtgcagggctgaacgcagacagccgcctgctgctcatcaagggaacagcttcctgccgcatcttggggtctatgctgcctggtgg

SEQ ID NO: 15069 - DNA, 120 bp, synthetic construct
  misc_feature 1..120: note = Artificially Synthesized Probe
  source 1..120: mol_type = other DNA
acacacggagcagcttgaaaatccaatggtccctggtgtaatttcctcagagattacttggttgatgagaaaagcagtaagttttgttgtttggtttcatctatctggatttttggtgag

SEQ ID NO: 15070 - DNA, 120 bp, synthetic construct
  misc_feature 1..120: note = Artificially Synthesized Probe
  source 1..120: mol_type = other DNA
aattgccttgagctaaatacctaattggctgtataaattccccaaatggaattctttggcaccaaaaaaaaagaggaaggcagctaataaccactacagagcacaagacccgtctccata

SEQ ID NO: 15071 - DNA, 120 bp, synthetic construct
  misc_feature 1..120: note = Artificially Synthesized Probe
  source 1..120: mol_type = other DNA
aaatgtttcataatagccatgtattgcttcttaattagagaaaatagtaagttagcatgaaaaccccccaaaaagagaagagatctggggaggaggagggaggttggtttccacactgct

SEQ ID NO: 15072 - DNA, 120 bp, synthetic construct
  misc_feature 1..120: note = Artificially Synthesized Probe
  source 1..120: mol_type = other DNA
gcccctgcactggtgacccttagttcattcacaatcgcataatcccttgtgattttcctggcaaacaggaacactaaacctctttttcttcctaaaatatttggtttacaaagttaagca

SEQ ID NO: 15073 - DNA, 120 bp, synthetic construct
  misc_feature 1..120: note = Artificially Synthesized Probe
  source 1..120: mol_type = other DNA
aacctcatagatataatagagaaatgcgcacaaaaacgcatcgtatagcaaacaatattaagtgaatattcatccaaacagcactcaagaaatagtcccgccagcagctggaacccccac

SEQ ID NO: 15074 - DNA, 120 bp, synthetic construct
  misc_feature 1..120: note = Artificially Synthesized Probe
  source 1..120: mol_type = other DNA
ggttcatcttcttctaatatggattccagctgttctcatcttccttttttatttcaaaatgtcttgaggtccttctgtgtcagcccatctacctaactccgtcttgaagatgaaccacaa

SEQ ID NO: 15075 - DNA, 120 bp, synthetic construct
  misc_feature 1..120: note = Artificially Synthesized Probe
  source 1..120: mol_type = other DNA
aaaaaaaattgttaatatgctgttgtgataacttacatgtataggtttattcagagagaattcatatccttacagaattaaaccttctcacccagaagcactgtctcccctgcccagcgg

SEQ ID NO: 15076 - DNA, 120 bp, synthetic construct
  misc_feature 1..120: note = Artificially Synthesized Probe
  source 1..120: mol_type = other DNA
gaaccatatatatgcattactgtcacacaaattaactgaggaaaattgaaagcctcatgtctcctaagtactaagcattcaactgacatttgttgtgcactgaccatgtgcagggaaccg

SEQ ID NO: 15077 - DNA, 120 bp, synthetic construct
  misc_feature 1..120: note = Artificially Synthesized Probe
  source 1..120: mol_type = other DNA
atcattgcaatgacgagagagcctcttttggccactctgttgacctcgaacatccccccaagcagactacacactgtcaatgtgttcaaaaacagagatgacggctgttgcatggaacag

SEQ ID NO: 15078 - DNA, 120 bp, synthetic construct
  misc_feature 1..120: note = Artificially Synthesized Probe
  source 1..120: mol_type = other DNA
attgctctgcagagaacataacagcacggatgccatcggccatggccacccattgctctgcagagaacataacagcatggacgccattggccatggccacccatcgctctacaaagaaga

SEQ ID NO: 15079 - DNA, 120 bp, synthetic construct
  misc_feature 1..120: note = Artificially Synthesized Probe
  source 1..120: mol_type = other DNA
ctgttttccagggttgagggtggagtcagttagagaaaatctactacaccatattctgtgtatctctagcaaatgaggacttatctcattttattttatttaggggagacggggtcttac

SEQ ID NO: 15080 - DNA, 120 bp, synthetic construct
  misc_feature 1..120: note = Artificially Synthesized Probe
  source 1..120: mol_type = other DNA
gagagtcgcagtaaagccaccgtcaaaactccttccaagttcattatttacaccctgagtgttctcagcagggccaaaacttcacacctctgactgaattttcatccatttggaagggtt

SEQ ID NO: 15081 - DNA, 120 bp, synthetic construct
  misc_feature 1..120: note = Artificially Synthesized Probe
  source 1..120: mol_type = other DNA
aaatattgacactggcctcattccctgaattctgatttgtcaagaggtgtggcctgaccacccggatcttttaaagctcccccggtttttaaaagctctaatagtcagcaaaatgcaaaa

SEQ ID NO: 15082 - DNA, 120 bp, synthetic construct
  misc_feature 1..120: note = Artificially Synthesized Probe
  source 1..120: mol_type = other DNA
tgcaccacccctacctattactctatactgagccgcaaacccatgcacgcctcagtccaaatgtcatagcttctctttctcccactaccctgagggccacacacacatgactcggagaaa

SEQ ID NO: 15083 - DNA, 120 bp, synthetic construct
  misc_feature 1..120: note = Artificially Synthesized Probe
  source 1..120: mol_type = other DNA
ttctgatgttgatgcaagaaatgttccacccacctttggctggcaaagcctgcctagaaatatacaagaacagatagtagttccagtaaagcacagagtacctcaaaatagaagacatta

SEQ ID NO: 15084 - DNA, 120 bp, synthetic construct
  misc_feature 1..120: note = Artificially Synthesized Probe
  source 1..120: mol_type = other DNA
atggtgaaaaaaaatatcattctaggtgcattttcttccagtgttttccaaagcataattacgtactttttccaaagcactcaaattcattctgtagcctcggggctgtctcctgccact

SEQ ID NO: 15085 - DNA, 120 bp, synthetic construct
  misc_feature 1..120: note = Artificially Synthesized Probe
  source 1..120: mol_type = other DNA
tgtggggatccaggaaaacagaggatgagttgaaggttgggacacagaccccttcaggcaaatccacacacagctcagttttattgaagaaaatcaataacataaattatttcaaatagc

SEQ ID NO: 15086 - DNA, 120 bp, synthetic construct
  misc_feature 1..120: note = Artificially Synthesized Probe
  source 1..120: mol_type = other DNA
tcatccttaccatcgccatcattgccatgccatttagtaaacaatcacttcatcatcaccgtcatcatccttaccatcgccatcattgccatgccatttaataaataatccttcatcatc

SEQ ID NO: 15087 - DNA, 120 bp, synthetic construct
  misc_feature 1..120: note = Artificially Synthesized Probe
  source 1..120: mol_type = other DNA
ccatcgctatcattgccatgccaatgagtaaatatcaccagtgccagattctgtgctacacccttatgctcattatcattgaccttcagatcaatgtattatccccattttagagataag

SEQ ID NO: 15088 - DNA, 120 bp, synthetic construct
  misc_feature 1..120: note = Artificially Synthesized Probe
  source 1..120: mol_type = other DNA
cacattaaatcttactacaaagaaggcattattgctatgcttactttagagacaagcaaactgaggcttagaaagagtcagtacttggaagcactgaaaggctcagctctcacagtccaa

SEQ ID NO: 15089 - DNA, 120 bp, synthetic construct
  misc_feature 1..120: note = Artificially Synthesized Probe
  source 1..120: mol_type = other DNA
tgaatagtgctgcaatgagcatcagggtgcagacacctcttctgcccatttaatttcttctggatctataaccaaaagaggcgttgatggtagcactgtttttaatttcttgaggaacct

SEQ ID NO: 15090 - DNA, 120 bp, synthetic construct
  misc_feature 1..120: note = Artificially Synthesized Probe
  source 1..120: mol_type = other DNA
ttagatattaacaccttatagatctatggtttttcaacattttctcccgccctgtaggctgccttttcattttgatggtttcctttaccgcacggcagcttttcagtttgatatagtccc

SEQ ID NO: 15091 - DNA, 120 bp, synthetic construct
  misc_feature 1..120: note = Artificially Synthesized Probe
  source 1..120: mol_type = other DNA
gcatgtccacagagaaatatctttcatgctaattatgtttttgctaacaaaccatagaagtaataatgaggaaactgaattccctcaccgcacctttggctttgttacacaaagcacagc

SEQ ID NO: 15092 - DNA, 120 bp, synthetic construct
  misc_feature 1..120: note = Artificially Synthesized Probe
  source 1..120: mol_type = other DNA
ttctgttccttgaaaacaaatgagaacgacaacagcaagatgctcctcaatcattaaaaacaccaaagagcatctgttcgtgccccagcaagtgagagagaaaacctggccaaaaaaaaa

SEQ ID NO: 15093 - DNA, 120 bp, synthetic construct
  misc_feature 1..120: note = Artificially Synthesized Probe
  source 1..120: mol_type = other DNA
attcaccgaggtggagaacaggctcagtacatcttcccgctcatgttacagtgaaatgcgtgaccttaggtgtgtgtttccgtgagattttatagatcacatggatttttttttttttta

SEQ ID NO: 15094 - DNA, 120 bp, synthetic construct
  misc_feature 1..120: note = Artificially Synthesized Probe
  source 1..120: mol_type = other DNA
attgatttcaagctaaatgaataaagaaaaggaaaactctctacaaatcatttctctgatttctgaattgaaaagcaaccaagaagactctgacaattggcgggcgccccggccccaggg

SEQ ID NO: 15095 - DNA, 120 bp, synthetic construct
  misc_feature 1..120: note = Artificially Synthesized Probe
  source 1..120: mol_type = other DNA
aacacgataacatataaaacactcagaaaggcattaacccccatgcagtgcactattattactttacgccatttcagtcacaagagcaggtgctgggtgttattccagctcaagaatatc

SEQ ID NO: 15096 - DNA, 120 bp, synthetic construct
  misc_feature 1..120: note = Artificially Synthesized Probe
  source 1..120: mol_type = other DNA
cagcctcagaaaatctagagtgatctgaaatgagctcattcaaacttgacctcagctttgaaaaccacacagccatccaactgtctaacagtcaaccatgatagattggggggaaaaaaa

SEQ ID NO: 15097 - DNA, 120 bp, synthetic construct
  misc_feature 1..120: note = Artificially Synthesized Probe
  source 1..120: mol_type = other DNA
aatttaagggtttagaaagttaatttgataaatgggaaagtcaacccagcagataaaagggaaaacggtctttcaagagcatcttagtaaatgctgcaggttgcacagagcatgcccatg

SEQ ID NO: 15098 - DNA, 120 bp, synthetic construct
  misc_feature 1..120: note = Artificially Synthesized Probe
  source 1..120: mol_type = other DNA
taacgggtaatttattctcttagtggggattccagtccagtctacataagcatcattaaggcagtctcacggggaagaagtttgggagtcagatattagaacttcattgtgcagaaacac

SEQ ID NO: 15099 - DNA, 120 bp, synthetic construct
  misc_feature 1..120: note = Artificially Synthesized Probe
  source 1..120: mol_type = other DNA
tgttaatttagaaccagacacatcgtttctccactatttatgactttagttacaaagccacaccagatagcaccaaattcaaatcatatcaatgacgccgatgcgcacagctgtcccaac

SEQ ID NO: 15100 - DNA, 120 bp, synthetic construct
  misc_feature 1..120: note = Artificially Synthesized Probe
  source 1..120: mol_type = other DNA
acctgaaagagaaaagtgggtaatactgtaatggccaacatcttcccttttcataaaatcagactttgctgccatcatccactattaaaataataccgaagtgggtcaagagaggcaacc

SEQ ID NO: 15101 - DNA, 120 bp, synthetic construct
  misc_feature 1..120: note = Artificially Synthesized Probe
  source 1..120: mol_type = other DNA
aacacaacttataaaagtgggctctgacttgtgtacacgccgtacagagatgtaattcagtggctgtttaattagcaacttgtgtggcagacacgttcatattctcaatgacaaggagct

SEQ ID NO: 15102 - DNA, 120 bp, synthetic construct
  misc_feature 1..120: note = Artificially Synthesized Probe
  source 1..120: mol_type = other DNA
ctgttttatggaactggcaaaaaatagaataataacttttgacacctgggaggctgcggaaaagcacaatgggtttgaaaaacagatgaggtagcaactgagagatctacgctctgtgaa

SEQ ID NO: 15103 - DNA, 120 bp, synthetic construct
  misc_feature 1..120: note = Artificially Synthesized Probe
  source 1..120: mol_type = other DNA
gtgaggaagccatgccgaaagccaagaataggccaaaaatgaggcctctcgtgtaaaacagttagccaagttgtgaatgtaaaggaaaagttcttggagaaaattaaaagtgctactcca

SEQ ID NO: 15104 - DNA, 120 bp, synthetic construct
  misc_feature 1..120: note = Artificially Synthesized Probe
  source 1..120: mol_type = other DNA
aaatatggctgctcatcagcagtgcaccagtcacccaagagctgtgatgcagctgtacaaggaggtgggtgttgtttccatgcctgctgacacctcgtccattctgcagcccagggatca

SEQ ID NO: 15105 - DNA, 120 bp, synthetic construct
  misc_feature 1..120: note = Artificially Synthesized Probe
  source 1..120: mol_type = other DNA
ttcacaaatgagcccattcactagtttttcttgggcaatttctgaagcacacttttgggaattgatatgcaatgtttatatagactggattcagaacacgctacctcaaaatatggcagg

SEQ ID NO: 15106 - DNA, 120 bp, synthetic construct
  misc_feature 1..120: note = Artificially Synthesized Probe
  source 1..120: mol_type = other DNA
agcttcaaagaattagggagacactctggatttgaatattctaaagtcttccactttggggacaacgctagtgcttttagtacctaagttgcaatgggaggtgattgtttgctggaaaaa

SEQ ID NO: 15107 - DNA, 120 bp, synthetic construct
  misc_feature 1..120: note = Artificially Synthesized Probe
  source 1..120: mol_type = other DNA
gcccctctgccatcacttcccatgcccccaacactttccccagccctacacggccacaacctactttctgtctctaccgacttacctctcctggacttatttacttatttatttacttat

SEQ ID NO: 15108 - DNA, 120 bp, synthetic construct
  misc_feature 1..120: note = Artificially Synthesized Probe
  source 1..120: mol_type = other DNA
aaactggaaaaccagagaaatatgaagaaaataaaagtcactacccagagagagccactattcacagtgtggtgtatttctttgagctttttctgctatccacattttcgcacggctgtc

SEQ ID NO: 15109 - DNA, 120 bp, synthetic construct
  misc_feature 1..120: note = Artificially Synthesized Probe
  source 1..120: mol_type = other DNA
cttccagaacccttacagttttttctataataaccaaagttactccagagttatgaattaccaaggaattgacccccagggtcactttaaagtttccaatcacgacttcctcctgaggga

SEQ ID NO: 15110 - DNA, 120 bp, synthetic construct
  misc_feature 1..120: note = Artificially Synthesized Probe
  source 1..120: mol_type = other DNA
cgcaaagcgcagttttctaagactgggcaccactggcttcgctgtttcctagaccttcagtgcatcataaaaaaaaaaaatcaaatatcatctgtttctacaaatcaaggcctgaatatg

SEQ ID NO: 15111 - DNA, 120 bp, synthetic construct
  misc_feature 1..120: note = Artificially Synthesized Probe
  source 1..120: mol_type = other DNA
tcggtttcgcttctcagaccctcagaggcattcacctcggctccccctggatgcaccagtgcaggggaggcctgtcctgaaaggccccaggagggcggcaccccaggccagcgccctgcc

SEQ ID NO: 15112 - DNA, 120 bp, synthetic construct
  misc_feature 1..120: note = Artificially Synthesized Probe
  source 1..120: mol_type = other DNA
tcaaaaaaattttttaaaaaaggatgaaaaacttgccgaaggacagagcaaaacaaaatcagaaagcaagggttggtgcgagcgatgggcgcccagaacccgggcaacctcttctcccca

SEQ ID NO: 15113 - DNA, 120 bp, synthetic construct
  misc_feature 1..120: note = Artificially Synthesized Probe
  source 1..120: mol_type = other DNA
gcaaaggccaggtgtggtgtgaacgcgcagtgtctttcactcattcctgcaaagcacagtgccttcaatgctgcttcaccagccgacaaacgcctgttcatccgctaagatccctgtgga

SEQ ID NO: 15114 - DNA, 120 bp, synthetic construct
  misc_feature 1..120: note = Artificially Synthesized Probe
  source 1..120: mol_type = other DNA
caccccacccattgacgggagcctccaatccaagcagagattgtttttggtttgggggagtttttgtttgttttgttttgaaataacaatctcatgaaaaacagatttttttttttgatg

SEQ ID NO: 15115 - DNA, 120 bp, synthetic construct
  misc_feature 1..120: note = Artificially Synthesized Probe
  source 1..120: mol_type = other DNA
tccttggtgagaggcaaacacagcagcagcatttcacatgattaccagagctgcaaatgttatgcatatttcacccagccagtggatatgctaatttgactgctaagttatttgttctaa

SEQ ID NO: 15116 - DNA, 120 bp, synthetic construct
  misc_feature 1..120: note = Artificially Synthesized Probe
  source 1..120: mol_type = other DNA
atacatgtgagcatacacctgcagacacgtacacatatgcatgcacgtacatgggtgcacgtatgcacacgtacatgggtacactcatgcatgctgatcttgttctgattctgcttccct

SEQ ID NO: 15117 - DNA, 120 bp, synthetic construct
  misc_feature 1..120: note = Artificially Synthesized Probe
  source 1..120: mol_type = other DNA
atgcgggggcttcacctgtgtcagcaccactcacttggtacaaggaacacacacagatttcctcatctaaaaaatataacgaagcagagtgaagtaatctatacccagccttttcctccc

SEQ ID NO: 15118 - DNA, 120 bp, synthetic construct
  misc_feature 1..120: note = Artificially Synthesized Probe
  source 1..120: mol_type = other DNA
cacattttttcctaggaacgaacgcatcatcatagaaaaggaaggtgcagtgtttgaagagatgctctttttaaacatcatcctcatttttaacattctggagagagagcagggtgccca

SEQ ID NO: 15119 - DNA, 120 bp, synthetic construct
  misc_feature 1..120: note = Artificially Synthesized Probe
  source 1..120: mol_type = other DNA
caccccttcctcttccctgcgccccctccccttccctgcaggcctcccccttccctgcagcatcccccttccctgcgcccctccccttccctgcgccccctccaccttccctgagccgcc

SEQ ID NO: 15120 - DNA, 120 bp, synthetic construct
  misc_feature 1..120: note = Artificially Synthesized Probe
  source 1..120: mol_type = other DNA
agaagattctggaaacttcagcctcaatgcctcagagagcaggaagatgggtgccccatcctgaggactgcacggtggcctggatcttagacctacaaggcaggaccccaaaacagttat

SEQ ID NO: 15121 - DNA, 120 bp, synthetic construct
  misc_feature 1..120: note = Artificially Synthesized Probe
  source 1..120: mol_type = other DNA
acgtggttttaatcagctcttggtttttaatcggctctggttttttgtcctcgatttcctgaaatgggataataccttcaaaagaaggatgtttgctgagtcattcttcgggactaagaa

SEQ ID NO: 15122 - DNA, 120 bp, synthetic construct
  misc_feature 1..120: note = Artificially Synthesized Probe
  source 1..120: mol_type = other DNA
gtccgctgggctgcccaccacactgagaagcaagggcatcacatgtagaaatcatccgtaaattgaaaacttgggtcagcacattataaaaattgttaaaagtaaatttaacaaactctt

SEQ ID NO: 15123 - DNA, 120 bp, synthetic construct
  misc_feature 1..120: note = Artificially Synthesized Probe
  source 1..120: mol_type = other DNA
tacatttccagtgtgctgggaattactaccgtccactgtagatacaggttaattgacacagaacaaagaagaaaaactacttaaaactctgtaaaagtcccccagggaattagcaagtct

SEQ ID NO: 15124 - DNA, 120 bp, synthetic construct
  misc_feature 1..120: note = Artificially Synthesized Probe
  source 1..120: mol_type = other DNA
cgtgtttcggcagccctggattttttgaagttttatttattgaggatatgttgacccgcctggagctttcattatcgatctacttagtgtcatagagtcaagttctacccctgaaagtga

SEQ ID NO: 15125 - DNA, 120 bp, synthetic construct
  misc_feature 1..120: note = Artificially Synthesized Probe
  source 1..120: mol_type = other DNA
acaaaaaaacttagccaactcttgatttattagaaggagatcaggttcttcacaagatcaaaagaaggttagaaaactgacttggagaaatgggcaggaaacaagacaggtgcccaccag

SEQ ID NO: 15126 - DNA, 120 bp, synthetic construct
  misc_feature 1..120: note = Artificially Synthesized Probe
  source 1..120: mol_type = other DNA
cacaagaatggaggacttggaagtaacagtaccgaacactgatgattctactgagagaatggaaagagctcctggttacgaacaaaaagttacagatattagtcatgttaccatggacaa

SEQ ID NO: 15127 - DNA, 120 bp, synthetic construct
  misc_feature 1..120: note = Artificially Synthesized Probe
  source 1..120: mol_type = other DNA
ggttccatgtctctgctgttgtgtacacacaactttataacctgcactttttacttataacacattgtgaacaattccctgtccttagtatttctcatcatgaattttaatcactgctta

SEQ ID NO: 15128 - DNA, 120 bp, synthetic construct
  misc_feature 1..120: note = Artificially Synthesized Probe
  source 1..120: mol_type = other DNA
tggtgtccaagtcccccgttcactaccagagaaaaattaatgcagggctgtcaacaggctcctaaggttaaataacaatagttttaaaatcctgagctgtaacacaaaggcacatttaat

SEQ ID NO: 15129 - DNA, 120 bp, synthetic construct
  misc_feature 1..120: note = Artificially Synthesized Probe
  source 1..120: mol_type = other DNA
tactgcatctaatacccacacttcatttattttgcttaacatccgtcttctccttgaatgggagccctacaggcccggggtctacaggagccccatgaacagtggacttttggccaccaa

SEQ ID NO: 15130 - DNA, 120 bp, synthetic construct
  misc_feature 1..120: note = Artificially Synthesized Probe
  source 1..120: mol_type = other DNA
aatcacacacatgaaggtgagtgaggaatatccaggggacagccccatgctaggcaggaaattgcacacacagaggtcagtgaggaccatccagggaacagcctctgcaacaggcagtgg

SEQ ID NO: 15131 - DNA, 120 bp, synthetic construct
  misc_feature 1..120: note = Artificially Synthesized Probe
  source 1..120: mol_type = other DNA
gacatctgagaaggtgtatgtggcacctgtccaagctgattagaacaaggagagtcaggagtgaggaggatgcatggatcatcagggccaggatgacagaggaggaacaggggaagtcag

SEQ ID NO: 15132 - DNA, 120 bp, synthetic construct
  misc_feature 1..120: note = Artificially Synthesized Probe
  source 1..120: mol_type = other DNA
cagtcctcatctcttctttctagaaacccaagttaaagatcaaggtgacacagaaccagagcttagcagccaaaatcagaatagcacagatgcgtagtcaccccaaagcccatctgcttt

SEQ ID NO: 15133 - DNA, 120 bp, synthetic construct
  misc_feature 1..120: note = Artificially Synthesized Probe
  source 1..120: mol_type = other DNA
ctctctctctctctcacccagagtccaggctaagaccatctcactctcttcagtttttatcttttccaagatttcatttcttaaaaagattctacccttctttgcatccttttgaactcc

SEQ ID NO: 15134 - DNA, 120 bp, synthetic construct
  misc_feature 1..120: note = Artificially Synthesized Probe
  source 1..120: mol_type = other DNA
aatgctatttgcacttcaagttttaccccctatcctgggtcctgggccaagacctaaagagcagtgtggtttgtgatgttattaagtggatcggacagagactatggaaatgcgaacgtg

SEQ ID NO: 15135 - DNA, 120 bp, synthetic construct
  misc_feature 1..120: note = Artificially Synthesized Probe
  source 1..120: mol_type = other DNA
aagcaggaggcagcgtctggaataatccacatggtaagagcctggagttggagacgtgaataagagctcatggttagcttggtatagatacagatggtaacagaaatatttataaatatg

SEQ ID NO: 15136 - DNA, 120 bp, synthetic construct
  misc_feature 1..120: note = Artificially Synthesized Probe
  source 1..120: mol_type = other DNA
taacacagaaataggtttatgctacattaagttttaaaaaacaagatgtaaatgtggaagatagaaaaggcagccccgaaacttaccagtggtcatttgtgccgggcagcgggaatgttt

SEQ ID NO: 15137 - DNA, 120 bp, synthetic construct
  misc_feature 1..120: note = Artificially Synthesized Probe
  source 1..120: mol_type = other DNA
cacgggtgcgtcaaagagaaacaaaagaaggatacctactttccaaacacatcatccatcaacatgcatgcagctgtttactggaatttgctttttcgttacttaagctaatgaggtcat

SEQ ID NO: 15138 - DNA, 120 bp, synthetic construct
  misc_feature 1..120: note = Artificially Synthesized Probe
  source 1..120: mol_type = other DNA
gtctctccacagccatggctgtagtcaggaatgattcctaaatacgtttccacactttttccaagagttccaccttcatagtccagtctttctggacgttgtaacctctatcacacaaac

SEQ ID NO: 15139 - DNA, 120 bp, synthetic construct
  misc_feature 1..120: note = Artificially Synthesized Probe
  source 1..120: mol_type = other DNA
tttaaattttaaaaaataaatgaaaatcctccaataacatgcagcctcttctgtatgaagccaaaacttccttacaaggcacaaaggtgctttccccttgttccttcccatgccctcaac

SEQ ID NO: 15140 - DNA, 120 bp, synthetic construct
  misc_feature 1..120: note = Artificially Synthesized Probe
  source 1..120: mol_type = other DNA
acacatcccacacaccccggtttgttcccaccaggccttcactaacatgccactgcagaaaaaccttccctcccccccagtctgactagagtccactcatttttcaggtaccaagttgca

SEQ ID NO: 15141 - DNA, 120 bp, synthetic construct
  misc_feature 1..120: note = Artificially Synthesized Probe
  source 1..120: mol_type = other DNA
ggaggatatgaacattaatagagacgatatggatttcacagggtgggagaaggatatgaacattaatagagacgatacggatttcacggggtgggagaaggatatgaacattaatagaga

SEQ ID NO: 15142 - DNA, 120 bp, synthetic construct
  misc_feature 1..120: note = Artificially Synthesized Probe
  source 1..120: mol_type = other DNA
ctatctgtgtgagacactcagttggccatgacagttaaattactttttcataccgagaacagaattagtctataaataagtaaagaggtgctagggctgagtcagaagtgccgattccac

SEQ ID NO: 15143 - DNA, 120 bp, synthetic construct
  misc_feature 1..120: note = Artificially Synthesized Probe
  source 1..120: mol_type = other DNA
tcacaccgtcccttctagagcaggaaggtgtggaaaggagagtaaaattccactattgtgaaattcccccttcagcaatgaaacggactctgagaacttatttttcctgaaaattattat

SEQ ID NO: 15144 - DNA, 120 bp, synthetic construct
  misc_feature 1..120: note = Artificially Synthesized Probe
  source 1..120: mol_type = other DNA
ttttctccctgcatctaaatttaacaatgaggaaatctattagtaatcagcaagatgctgaagcagtaactccaaaatcagttgacgaatgatttctcaggagcagcacgctgggtgctg

SEQ ID NO: 15145 - DNA, 120 bp, synthetic construct
  misc_feature 1..120: note = Artificially Synthesized Probe
  source 1..120: mol_type = other DNA
cacatcggaatggtagactgtttaggagaaaggtccacgtcagaatggtggactgttttaagaggaaggtccacgtcagaatggactgtccaggatggtgcatgtgcagggtgtgttctg

SEQ ID NO: 15146 - DNA, 120 bp, synthetic construct
  misc_feature 1..120: note = Artificially Synthesized Probe
  source 1..120: mol_type = other DNA
gtcgtctgccctggagcagagtctgccctggaatggagtcctctgccctggagtggagtcgtctgccctggagtggagtcatctgccctggagcagagtctgccctggagtggagtcatc

SEQ ID NO: 15147 - DNA, 120 bp, synthetic construct
  misc_feature 1..120: note = Artificially Synthesized Probe
  source 1..120: mol_type = other DNA
gcatacacaaaaagtcagcttctgtacacttggctttcacagccctcaaatactgcatttttgatccatatttggttggaaagatccatgaataaatgagttcagacccatgttgtccca

SEQ ID NO: 15148 - DNA, 120 bp, synthetic construct
  misc_feature 1..120: note = Artificially Synthesized Probe
  source 1..120: mol_type = other DNA
gtatctcctcccttcctcctgagaggtcctacgggatggagtattaatagtgccgtgtttaattattattcagcataatcacacatattacggggatttttaaagatcctttcatgcaca

SEQ ID NO: 15149 - DNA, 120 bp, synthetic construct
  misc_feature 1..120: note = Artificially Synthesized Probe
  source 1..120: mol_type = other DNA
tcatcttggactttcggcctccaggactcagaaatgtctgttgtttgctaagccgcctggtttgtgggggtttgttagggagactgagccaattcatacagtggattccgccactttctt

SEQ ID NO: 15150 - DNA, 120 bp, synthetic construct
  misc_feature 1..120: note = Artificially Synthesized Probe
  source 1..120: mol_type = other DNA
ccatgggctggcctctccatttcctccttctgagaataccgtggagttgggattgtgtttgcctgtttacagggactacggtcagtgtccctcccaggccgctggtccttcctaacacct

SEQ ID NO: 15151 - DNA, 120 bp, synthetic construct
  misc_feature 1..120: note = Artificially Synthesized Probe
  source 1..120: mol_type = other DNA
gaaaaaaaaaaaaaaagaactgtgcacgatggacactggcctcggtgagtccacaacaggaagcaaacaaggattaaagtgcccggaattggaagacacaacatttcctacacagcctga

SEQ ID NO: 15152 - DNA, 120 bp, synthetic construct
  misc_feature 1..120: note = Artificially Synthesized Probe
  source 1..120: mol_type = other DNA
catatttacttctgaatattttcacattttaaaatcatctccattttgctttggaatgcgtggcatctctgctgtgcaggtgctgacacgccccagagcaagcattggctgtgtcggcag

SEQ ID NO: 15153 - DNA, 120 bp, synthetic construct
  misc_feature 1..120: note = Artificially Synthesized Probe
  source 1..120: mol_type = other DNA
ttgaatccaaaattattttttgtttctcttcaatactgatgctggtacatgaggaaaacagaacaagcataattggactgaatgagggaaggtggcaatttgcggaggctctgcaggagc

SEQ ID NO: 15154 - DNA, 120 bp, synthetic construct
  misc_feature 1..120: note = Artificially Synthesized Probe
  source 1..120: mol_type = other DNA
cagctgagaggaggaggctgaagcaagtgcaggaaagaacaaaaccaatgcaccactggaccatcacctttagagaaaaaggttaagaaatctgtatcacataaaacaacctccaaacac

SEQ ID NO: 15155 - DNA, 120 bp, synthetic construct
  misc_feature 1..120: note = Artificially Synthesized Probe
  source 1..120: mol_type = other DNA
atgcctccacactggaagttggagcgtggtggaccgtgcgttataataaagttgctattgtatgtgactttgatcctacaaagaggaaaaaacatgggtaaaaagtaagaaaagaccaaa

SEQ ID NO: 15156 - DNA, 120 bp, synthetic construct
  misc_feature 1..120: note = Artificially Synthesized Probe
  source 1..120: mol_type = other DNA
tggaatctgtgcaaactttaagtcccaacaaaactttgccaaactcacttgttgagcaagaagctcagaaatggagatttctaggaccctccgcatctggctgcaaatcccagacacaaa

SEQ ID NO: 15157 - DNA, 120 bp, synthetic construct
  misc_feature 1..120: note = Artificially Synthesized Probe
  source 1..120: mol_type = other DNA
gtttcacctcggctgtgcagaccctctgaagacgagacattctccatatgtttcttggctccaggcagctcatcgacagataacatcctgctagatcagcagagacgacgcctgcacgtt

SEQ ID NO: 15158 - DNA, 120 bp, synthetic construct
  misc_feature 1..120: note = Artificially Synthesized Probe
  source 1..120: mol_type = other DNA
ggctttctctggggtcagaccatggcactgaggacttcttgtagcattcaggtggctattgaaatcatacaaaaacaattaataggcaaccattagaaattaggcaataaagttttttca

SEQ ID NO: 15159 - DNA, 120 bp, synthetic construct
  misc_feature 1..120: note = Artificially Synthesized Probe
  source 1..120: mol_type = other DNA
tttgcctggtttcataaacttgatgatgttttcaagaaaataaacaataagaagttaagtaagtgctgccctgccttgtctattgtgcaccaggcacacatgaagacacaagggccttcc

SEQ ID NO: 15160 - DNA, 120 bp, synthetic construct
  misc_feature 1..120: note = Artificially Synthesized Probe
  source 1..120: mol_type = other DNA
ctggactgtgctgcaaactcgattccttgcatataaatgtgaacattaggctaaatgacccttacattaccagtttatctcaccagcgctttcagcctatttcttatttaggtctctgat

SEQ ID NO: 15161 - DNA, 120 bp, synthetic construct
  misc_feature 1..120: note = Artificially Synthesized Probe
  source 1..120: mol_type = other DNA
gtgtgtctacttgctgcttctgtccctgttaccaccaaggctatggctgcaagtttccaaggaaaaagcgcagcctccgtgggtcgtgatttctgtggcttctataatgcgtgtgtgcct

SEQ ID NO: 15162 - DNA, 120 bp, synthetic construct
  misc_feature 1..120: note = Artificially Synthesized Probe
  source 1..120: mol_type = other DNA
acagcaatattggctgtgtgcatttcattaaataggtttacccccaaaactgtccacttgccttttaaacatccttagggttgctgccttcaaaaacaagccttttgtttccacagagaa

SEQ ID NO: 15163 - DNA, 120 bp, synthetic construct
  misc_feature 1..120: note = Artificially Synthesized Probe
  source 1..120: mol_type = other DNA
aaggtctcttctgcccttaaaattccatgagcttttccttcagtgtggaagaaccaacaagttctcggggcctccatcgacctgtggggttagcacttcggtttggctttctccattagg

SEQ ID NO: 15164 - DNA, 120 bp, synthetic construct
  misc_feature 1..120: note = Artificially Synthesized Probe
  source 1..120: mol_type = other DNA
ttctcagcagtgaatattcagattccacagccatctggctgtcatttcacaagctctttgcaaaatctggctataattctaccaaggtacgaacgttagttaatctgttgaagacttagc

SEQ ID NO: 15165 - DNA, 120 bp, synthetic construct
  misc_feature 1..120: note = Artificially Synthesized Probe
  source 1..120: mol_type = other DNA
ctttttaaattgatttcctactcttactgggacataagaaagctatgcaaaattcttcagtgcatcagttatgggaaagaaggaaccaaagcgcagaagggatgtgcccagcgccatttt

SEQ ID NO: 15166 - DNA, 120 bp, synthetic construct
  misc_feature 1..120: note = Artificially Synthesized Probe
  source 1..120: mol_type = other DNA
ggaggcctgtctgccacacacgtagctcaattcagttttgcactttgttttccttcttgtggtaactaaaaacactctggcatgtaattcaaaaacagcattgagggtaactgcataatg

SEQ ID NO: 15167 - DNA, 120 bp, synthetic construct
  misc_feature 1..120: note = Artificially Synthesized Probe
  source 1..120: mol_type = other DNA
gtccaagataattcttattccagtgtaacccggggataccaaaagattgggtgcccctgctctagagtgaacacagaagcactgtctggggcacctgttgtcctggggttcaaagccgct

SEQ ID NO: 15168 - DNA, 120 bp, synthetic construct
  misc_feature 1..120: note = Artificially Synthesized Probe
  source 1..120: mol_type = other DNA
ttgctaaaaggaactagaagatataaaacctcagagcctctatccacccagtcttcatctgagaaaagcacaaataacagattctttcagtttgcctgtgtctctcaccactaagctgta

SEQ ID NO: 15169 - DNA, 120 bp, synthetic construct
  misc_feature 1..120: note = Artificially Synthesized Probe
  source 1..120: mol_type = other DNA
agttcttgtgagttgagcacgtctcacgtatgcaccaacatgcagatgcacacacagggcatgggcactccagaggggctcagcttatggttaacgctggggctgccttcatctcacgca

SEQ ID NO: 15170 - DNA, 120 bp, synthetic construct
  misc_feature 1..120: note = Artificially Synthesized Probe
  source 1..120: mol_type = other DNA
attctgtggcattcattacattcactactatacaaccaccactgccatctgtctctcaaactcctttcattttgcaaaattgaacttcattccctgtaaatgctgactccccagcccctg

SEQ ID NO: 15171 - DNA, 120 bp, synthetic construct
  misc_feature 1..120: note = Artificially Synthesized Probe
  source 1..120: mol_type = other DNA
agggggctcttcctacaccaaagcctctggctgcaagcacatttcttcatgactttctctttcttaaaaatgagtgtaaattttgcactcttctttgtaacatatgcctgtgtgcctttt

SEQ ID NO: 15172 - DNA, 120 bp, synthetic construct
  misc_feature 1..120: note = Artificially Synthesized Probe
  source 1..120: mol_type = other DNA
cagcattgtctgcataaatgattcaggctttttttaatgaaagaatcttatttttgaaactgaagttgacataaaagctcccgaagtgaatcagacggtggtggcttctccccaccatcc

SEQ ID NO: 15173 - DNA, 120 bp, synthetic construct
  misc_feature 1..120: note = Artificially Synthesized Probe
  source 1..120: mol_type = other DNA
tacttcccctttacttgaggtggctttgttttcttttcaatgtctaatctatttctctcataggcgtcgttaatgggctgggacctgacttcctactaagtgtaattacctcgtctttaa

SEQ ID NO: 15174 - DNA, 120 bp, synthetic construct
  misc_feature 1..120: note = Artificially Synthesized Probe
  source 1..120: mol_type = other DNA
gcatttgggggccccagctcctaacccatcacatcaggggtggggttctaatgcatgcatttggggggccctgcctcctaatccattacattgggggtagagctctaacacatgcatttg

SEQ ID NO: 15175 - DNA, 120 bp, synthetic construct
  misc_feature 1..120: note = Artificially Synthesized Probe
  source 1..120: mol_type = other DNA
ttggggggccccagctcctaagtcagcctgagaagatcagtgagaaaggtgaccatacattctggcaatacatactgttttttaaaaaataatttttctctagagactaggtcttactct

SEQ ID NO: 15176 - DNA, 120 bp, synthetic construct
  misc_feature 1..120: note = Artificially Synthesized Probe
  source 1..120: mol_type = other DNA
ttgggagtctataccacccttcctgtctacacacatacaggcttgggagtctacactaccttcccctatacatgaataggctttggagtctacaccacattccccatgcatatacacagg

SEQ ID NO: 15177 - DNA, 120 bp, synthetic construct
  misc_feature 1..120: note = Artificially Synthesized Probe
  source 1..120: mol_type = other DNA
gaatactgggttttaaagttcttgattgctctcagcttgttctgggcacagaggatttaaggaatatttgagatttgaacaaaactgaaaaaagaccaactctgctagtcgcggctctgg

SEQ ID NO: 15178 - DNA, 120 bp, synthetic construct
  misc_feature 1..120: note = Artificially Synthesized Probe
  source 1..120: mol_type = other DNA
agacaggctccagcaagctcaggatgatgaagacacatcctatcttcgaggacccagctcgcagagaacaaaatctgtgaacaataatcacaacatggcacacacaacacacgtcccaaa

SEQ ID NO: 15179 - DNA, 120 bp, synthetic construct
  misc_feature 1..120: note = Artificially Synthesized Probe
  source 1..120: mol_type = other DNA
aaagataagttatataaatagatgtttgataggtgaatggagatgattcaaaggtagataggtagaggatagacagaacaaaacctggtctcctcccctcagagaacactgcagctcccg

SEQ ID NO: 15180 - DNA, 120 bp, synthetic construct
  misc_feature 1..120: note = Artificially Synthesized Probe
  source 1..120: mol_type = other DNA
acgctttctcatcatgtagctgtatttctgggctcacacctttagaacccactgagatttctaaagctcctcctctagtgagcaacctgggatgtttgtgctcaaagaaaacagcgtttc

SEQ ID NO: 15181 - DNA, 120 bp, synthetic construct
  misc_feature 1..120: note = Artificially Synthesized Probe
  source 1..120: mol_type = other DNA
aattcttacataacaggtaacttcagtccagacacaaatactaaattagtagactccaaatgtattgttggattgtctctagcctatggccatgttctcttctttagatcctgaggccgc

SEQ ID NO: 15182 - DNA, 120 bp, synthetic construct
  misc_feature 1..120: note = Artificially Synthesized Probe
  source 1..120: mol_type = other DNA
cactgtaatattttaacgatccatatgaggtcataccatatgtacttttttgatacctgactttttctttctcagaatgacacacttccatctttccaggccaatacccagcctggcagg

SEQ ID NO: 15183 - DNA, 120 bp, synthetic construct
  misc_feature 1..120: note = Artificially Synthesized Probe
  source 1..120: mol_type = other DNA
acaaatggggggtttgcttattttacatgaattgctggactgctaggtgaaagtggaactgatattctttgagaccctactaagtgtcaacatgcagagaacacaacgtgtaagaacggt

SEQ ID NO: 15184 - DNA, 120 bp, synthetic construct
  misc_feature 1..120: note = Artificially Synthesized Probe
  source 1..120: mol_type = other DNA
aattttttttattttaaagcaagtataaactttttctgataattcattggcttctgcactgactcagaccttgatgctctaattgtggcctcaagactggcagctttggcctccccaggg

SEQ ID NO: 15185 - DNA, 120 bp, synthetic construct
  misc_feature 1..120: note = Artificially Synthesized Probe
  source 1..120: mol_type = other DNA
agaggaaatgcaaatcaatgcagcgaaacccagggcctgtcagcattaagacacccattccacctcccacaaacaaacccagtgttatgttaaagtttcctattattaatagtccattta

SEQ ID NO: 15186 - DNA, 120 bp, synthetic construct
  misc_feature 1..120: note = Artificially Synthesized Probe
  source 1..120: mol_type = other DNA
taatatgaagtttgggtgaggcggtgccaaaacccagctggtgcaagctaaaaaaatgaccaagatataaggccgtggaaatgcaacttgattacaacaaacacttagtggagctaatca

SEQ ID NO: 15187 - DNA, 120 bp, synthetic construct
  misc_feature 1..120: note = Artificially Synthesized Probe
  source 1..120: mol_type = other DNA
tgcaaacatctttgcacatgtgtgcaagtaagtttgtaaggaaaattcctagaagtgggatttgggggtaatagaattgtacattttgtgatggatacagccaatcgacctgtgagcagc

SEQ ID NO: 15188 - DNA, 120 bp, synthetic construct
  misc_feature 1..120: note = Artificially Synthesized Probe
  source 1..120: mol_type = other DNA
gaatggaactaaatatgcagcttttaaatacaaccacaccaaagggaactttgcaaattaccgggaactttgcaaattcccaggaactttgcaaattacctctcatcctgagaggtgaga

SEQ ID NO: 15189 - DNA, 120 bp, synthetic construct
  misc_feature 1..120: note = Artificially Synthesized Probe
  source 1..120: mol_type = other DNA
aattccctcctctaaaggtctccatcctggatcttgttagagatgctatttttgctgttggccacccttcgcggggtttggtaataaaagattgttaaagtggggttttttttgttttgt

SEQ ID NO: 15190 - DNA, 120 bp, synthetic construct
  misc_feature 1..120: note = Artificially Synthesized Probe
  source 1..120: mol_type = other DNA
gattgcattttccactctccaaacagaatctattagacatgatgcaagcagagattatttttaggaaggcttttcattacagtgatgtgaaatgtcaaggctgagactcagcaggctcta

SEQ ID NO: 15191 - DNA, 120 bp, synthetic construct
  misc_feature 1..120: note = Artificially Synthesized Probe
  source 1..120: mol_type = other DNA
cacacaatatagcgaagccaaacttttatatgtcactcccagaggcggtaggaacatcacatgcttccttttggagaccttggtttggagaagaaaaaaaaaaaacagcttttagagtag

SEQ ID NO: 15192 - DNA, 120 bp, synthetic construct
  misc_feature 1..120: note = Artificially Synthesized Probe
  source 1..120: mol_type = other DNA
tcaaaacacatataactaactgtacatgtatgtatgtgaaatctcaggaatttaggtattttaaggggaatacatctgacaataggaatgcagcgtttccacgggttgactggcgctggc

SEQ ID NO: 15193 - DNA, 120 bp, synthetic construct
  misc_feature 1..120: note = Artificially Synthesized Probe
  source 1..120: mol_type = other DNA
tgaataaataaattaatacataataaaggctgcgtccaaccagatgaggacagaaccgagcgccctccagcaccctctcccaccatccatcctcacagacggactctgcaccgtgagaaa

SEQ ID NO: 15194 - DNA, 120 bp, synthetic construct
  misc_feature 1..120: note = Artificially Synthesized Probe
  source 1..120: mol_type = other DNA
ctgtttccatttcttggcaaaaattaggaaacacaactaaataaatatccacggaataaaatggtgcatttattcaccaaagtcttatcacacgtggagatgaataagaacttcccgagc

SEQ ID NO: 15195 - DNA, 120 bp, synthetic construct
  misc_feature 1..120: note = Artificially Synthesized Probe
  source 1..120: mol_type = other DNA
ataaacatatgaattcccctcaaaatgttgttttgtttggtactgggtagtgatgtgaacaactgtggggttaacttaaggctctagttatgctacctcctccagagaagatccactttg

SEQ ID NO: 15196 - DNA, 120 bp, synthetic construct
  misc_feature 1..120: note = Artificially Synthesized Probe
  source 1..120: mol_type = other DNA
tccccatgcctgggtctgaatgtccttatgtggaagttacttatgaatcgatgaaactggaccagagactcttttccagctctgagagtctgtaattgatgtattcatttattcagcaaa

SEQ ID NO: 15197 - DNA, 120 bp, synthetic construct
  misc_feature 1..120: note = Artificially Synthesized Probe
  source 1..120: mol_type = other DNA
tgataggatcagattttcagttgtggcagttactctagccagaactggaaggtggcatggaaggggccaatacttctttctttcttttaaagtttgttctgccataatttaggccaaatt

SEQ ID NO: 15198 - DNA, 120 bp, synthetic construct
  misc_feature 1..120: note = Artificially Synthesized Probe
  source 1..120: mol_type = other DNA
cccggccaggttttacatctatatttcaacccctcagaacctgtggaggatacaagaggcataactacataagtatccaaatttttcacacagttgcatgtttttattttctcagaaggg

SEQ ID NO: 15199 - DNA, 120 bp, synthetic construct
  misc_feature 1..120: note = Artificially Synthesized Probe
  source 1..120: mol_type = other DNA
tttgcaagaacgaacatctctgtaaagttctgcttctgacgtcacagtttctctattccacacaactctgcctcaaagccttttttaagcacattccaggcacaagtgtgagccagaaaa

SEQ ID NO: 15200 - DNA, 120 bp, synthetic construct
  misc_feature 1..120: note = Artificially Synthesized Probe
  source 1..120: mol_type = other DNA
actgtgggctcctaagaaagcccaaacagcaaagtgagcactcaccttgtcttcatttcctctaagaggaagactgttgtaacctgataaaacagacagataaaggataggatgtgacca

SEQ ID NO: 15201 - DNA, 120 bp, synthetic construct
  misc_feature 1..120: note = Artificially Synthesized Probe
  source 1..120: mol_type = other DNA
gtaaaaaaaaaaaaaatcatagattcaaagagtacatgtatacgcaggtttgttacgtgggtgtattgagtgatgccgactgttgggtttatgatgatcctgtcacccaaacgaggaaca

SEQ ID NO: 15202 - DNA, 120 bp, synthetic construct
  misc_feature 1..120: note = Artificially Synthesized Probe
  source 1..120: mol_type = other DNA
gactctcccacccatctcaggtaatcctctcaaaaacatgaagaaccaggtattttgctcaaggtgtaaatccagagagattataggtgaagtctttccatttctcttgacttctaatat

SEQ ID NO: 15203 - DNA, 120 bp, synthetic construct
  misc_feature 1..120: note = Artificially Synthesized Probe
  source 1..120: mol_type = other DNA
acttgcatgattaatatgaagtcctttcctttcagaaaccaggtcagccttccttctgaaaattccttccgccaaacaaaccatttctaaacatgccctttgtgctgtatacagaacact

SEQ ID NO: 15204 - DNA, 120 bp, synthetic construct
  misc_feature 1..120: note = Artificially Synthesized Probe
  source 1..120: mol_type = other DNA
atttaaaattaaattttaaaaagaaagctccagaatcggttttgtaactattagttcatcccctgtcacctgccatggccttgaatcaccctcacaagacacagtcctagtcctggcact

SEQ ID NO: 15205 - DNA, 120 bp, synthetic construct
  misc_feature 1..120: note = Artificially Synthesized Probe
  source 1..120: mol_type = other DNA
tacatttatgaaggtcaacttaaactaatgtggaaagagctgccaggtgcttttatgtggtgtggagggttatctgccatgaatttagctgtttgctttctctgagaagtggaacatcat

SEQ ID NO: 15206 - DNA, 120 bp, synthetic construct
  misc_feature 1..120: note = Artificially Synthesized Probe
  source 1..120: mol_type = other DNA
aattaggtaatcccgcatgaacactaggacaaaacaaacccagaatgcagaaattattgtcacataaaatgatcagtgttaccacagagttcatcagaagatggggccttgggatgttga

SEQ ID NO: 15207 - DNA, 120 bp, synthetic construct
  misc_feature 1..120: note = Artificially Synthesized Probe
  source 1..120: mol_type = other DNA
ctgcataacacagcaatgttattttggctacaagcaaagctgaatcgtgtcactagaaaggatgccatgttcccctgtgttcagcttcgataatggtctcacagataattaattaatgcc

SEQ ID NO: 15208 - DNA, 120 bp, synthetic construct
  misc_feature 1..120: note = Artificially Synthesized Probe
  source 1..120: mol_type = other DNA
cttaatgttttcccacaaaataagtgtgtccataagtctctttatgacacagccttctgttaccagtgacaccgtgatcagagccgagggaaacatggcaccagttttaattatatgagt

SEQ ID NO: 15209 - DNA, 120 bp, synthetic construct
  misc_feature 1..120: note = Artificially Synthesized Probe
  source 1..120: mol_type = other DNA
attatcctaacctgtcatgtgtaattctggccccgaagccgcctggaaacattggctttatggtaaatcttcttaataaacaagattagcaggaaaggaggtgccggggactggaggttt

SEQ ID NO: 15210 - DNA, 120 bp, synthetic construct
  misc_feature 1..120: note = Artificially Synthesized Probe
  source 1..120: mol_type = other DNA
tgtcctatttctggggtagggggtgatggcgaatcggatactcaaatgttattttgtcaaatccgaatcatctctacgtgcttaggtttacatgatgtcaaaacacgtggttcattaagt

SEQ ID NO: 15211 - DNA, 120 bp, synthetic construct
  misc_feature 1..120: note = Artificially Synthesized Probe
  source 1..120: mol_type = other DNA
ttcccctccacccgtaactggatttttccacaaatctctctttattattgtttgattaaacaaaaatacacttttaactgctaaactgcgctgactacgggagagctaagggccctatta

SEQ ID NO: 15212 - DNA, 120 bp, synthetic construct
  misc_feature 1..120: note = Artificially Synthesized Probe
  source 1..120: mol_type = other DNA
aacttctggaaggaaagccctgttgacagctccaatacttgatcatttaaggaacagggcagccccaagccaaaaacgatgattaatttccagttttgaatgtttagtgcataacagaaa

SEQ ID NO: 15213 - DNA, 120 bp, synthetic construct
  misc_feature 1..120: note = Artificially Synthesized Probe
  source 1..120: mol_type = other DNA
caaaaattaagcgtggctttttgggaagcgaaatgcaagtgtcatctatctatttacatcttccgacacactggaaatctagcctgagaaatgatctttaaagggaagaatagagaagcg

SEQ ID NO: 15214 - DNA, 120 bp, synthetic construct
  misc_feature 1..120: note = Artificially Synthesized Probe
  source 1..120: mol_type = other DNA
tttgtggaggctgcttggatttctatttgtgcttatgtttatatttgtaatccttcaggtgtaaacaaaggcctgggtggagatgtacaaataggaaccttaaagaggacctcagtgatc

SEQ ID NO: 15215 - DNA, 120 bp, synthetic construct
  misc_feature 1..120: note = Artificially Synthesized Probe
  source 1..120: mol_type = other DNA
acacactcatcactggctctacttctggaactgacagatgtaaaagaggaaacaccattgtgggcaggaaagtgttaaggtccttggtgaaatgggaaactcttgagacgtgtggaggga

SEQ ID NO: 15216 - DNA, 120 bp, synthetic construct
  misc_feature 1..120: note = Artificially Synthesized Probe
  source 1..120: mol_type = other DNA
gttgccaaatgctcaggtgggcgctggtgaaacattttctattcgacccaaattccagggaggaaacagctctcctgaggggcatcttttttaccacaacgatgatgttttgctgtcagg

SEQ ID NO: 15217 - DNA, 120 bp, synthetic construct
  misc_feature 1..120: note = Artificially Synthesized Probe
  source 1..120: mol_type = other DNA
tccatgtctttgctgccatcttgccatttaaaaatggagtagaacggaagacctggcatgtaatgattgtgactgtggcttcctctttctctgatgagtcccaaagcacctcacttcacg

SEQ ID NO: 15218 - DNA, 120 bp, synthetic construct
  misc_feature 1..120: note = Artificially Synthesized Probe
  source 1..120: mol_type = other DNA
tggcacaaaacctggaactccttggtacagagaggccagacacacgtcaacctcacgtccagttcctgttgagccaaagctcatgagaacttttttgttttgatggctgttgctgctgga

SEQ ID NO: 15219 - DNA, 120 bp, synthetic construct
  misc_feature 1..120: note = Artificially Synthesized Probe
  source 1..120: mol_type = other DNA
acaacaacaaaaaccgaataaaatatagtgtcccaagacttacaaagaactttcacaaaatcacgtgatggtcctaccagttgcacagagagggcgaaatgaaaccaaggagcagagagg

SEQ ID NO: 15220 - DNA, 120 bp, synthetic construct
  misc_feature 1..120: note = Artificially Synthesized Probe
  source 1..120: mol_type = other DNA
actcaaccttaatattggcttttaactgtagagttttctgctttttaaactcaaatgttccacattttgggactgggtaaaggtgcccgtagctactcccagctcagtggttcaccaaaa

SEQ ID NO: 15221 - DNA, 120 bp, synthetic construct
  misc_feature 1..120: note = Artificially Synthesized Probe
  source 1..120: mol_type = other DNA
ggtggaaggcggggtcaggtgcacgggtttgcttaattgctccttttgggtctccaaaggcctaaaaagtcgacaaggctacagtaaatacaatcttgttttaaaagaaatccataaatt

SEQ ID NO: 15222 - DNA, 120 bp, synthetic construct
  misc_feature 1..120: note = Artificially Synthesized Probe
  source 1..120: mol_type = other DNA
aatttaaatgtgaaaaataccacaactgtaggcagaaggataaataagctgcaattcacagcatctttcaagcatctcaagttggtatagaggctcaagctaaacacagaccccagctgg

SEQ ID NO: 15223 - DNA, 120 bp, synthetic construct
  misc_feature 1..120: note = Artificially Synthesized Probe
  source 1..120: mol_type = other DNA
tcacacccacgtttagagcacgctatttgtctttggccatacgctgctgggtttggaaaccgggttctaatacacaaaatgtattacaaccagtcttgtgtaattaaaaacgtaagatgt

SEQ ID NO: 15224 - DNA, 120 bp, synthetic construct
  misc_feature 1..120: note = Artificially Synthesized Probe
  source 1..120: mol_type = other DNA
tggcgtcgtcgtcctcacataaaatgtgatggataaagtctctcttatttcatgacatcgtggctccctctcaggctgtggtttgtgaggaaaagtgaaaaaagggaaggagaaagactt

SEQ ID NO: 15225 - DNA, 120 bp, synthetic construct
  misc_feature 1..120: note = Artificially Synthesized Probe
  source 1..120: mol_type = other DNA
tagtgcatttaaaatagaattctctcttgaaaaatccaattttgctgacaaggtgaaggagcagctaacgaaagttaaattccagggaaacagaaaggcccagtggtgtgacgctgacat

SEQ ID NO: 15226 - DNA, 120 bp, synthetic construct
  misc_feature 1..120: note = Artificially Synthesized Probe
  source 1..120: mol_type = other DNA
ctgcagggatgcaatgtattctttttttcttgaaagtaaaaacgacaatgtgtgccaagtgttcaagagagagaggcctttacttgcaggagaaaattttctcaactctaccctctggaa

SEQ ID NO: 15227 - DNA, 120 bp, synthetic construct
  misc_feature 1..120: note = Artificially Synthesized Probe
  source 1..120: mol_type = other DNA
tctcagggatgccacttggcactgactacacactacacgcatgcagatacatgtacatgggtacacaggcatgcacacaccacacaacactcacccacactcacatcatacatatgcaca

SEQ ID NO: 15228 - DNA, 120 bp, synthetic construct
  misc_feature 1..120: note = Artificially Synthesized Probe
  source 1..120: mol_type = other DNA
acacacacacacacactctcctgggccttcagtgctgagtttttacttcacacctttcctggatgatcttaactaaagacttatgaaaattataagcaggtttttttttgctgaccttct

SEQ ID NO: 15229 - DNA, 120 bp, synthetic construct
  misc_feature 1..120: note = Artificially Synthesized Probe
  source 1..120: mol_type = other DNA
aggtcctcaacacctatgtcagaatcaacaagcatgtgcggtcaatggcgttcaggaggccgtctgcagctgagtaacaatcacaccaaattgtgaatattgaacaggtggaggagaaca

SEQ ID NO: 15230 - DNA, 120 bp, synthetic construct
  misc_feature 1..120: note = Artificially Synthesized Probe
  source 1..120: mol_type = other DNA
ggagctgtgtctccaacgggaaccttggagggcaggactttgatcccctcccgaatttccaaacaggagtttgaacagaaacatgtggactcagggaccagtgcttcgggcacatcctga

SEQ ID NO: 15231 - DNA, 120 bp, synthetic construct
  misc_feature 1..120: note = Artificially Synthesized Probe
  source 1..120: mol_type = other DNA
tgtttctcttgcaccagaatagctcaggggaaggaaaggcacagaaaataaacaacacacagcagaggaggccctgctcctgcccgaccgaaggcaacttctcccttgaagagaaaggtg

SEQ ID NO: 15232 - DNA, 120 bp, synthetic construct
  misc_feature 1..120: note = Artificially Synthesized Probe
  source 1..120: mol_type = other DNA
tgagcctttgcagactgagcagggttctgcatctgactctggctgaccggaggccttgaggcaagtcacccaacctcccagaactgcttcctcagcttgcaacagagtggtcagaacgga

SEQ ID NO: 15233 - DNA, 120 bp, synthetic construct
  misc_feature 1..120: note = Artificially Synthesized Probe
  source 1..120: mol_type = other DNA
gcctggtgtagccactgtggctttgtcatgcagctagtacaactgaagagctgacttgtaaactttatccaattttagtgactctaaggaaccacatgtggctactgtatggaacaaggc

SEQ ID NO: 15234 - DNA, 120 bp, synthetic construct
  misc_feature 1..120: note = Artificially Synthesized Probe
  source 1..120: mol_type = other DNA
acatcaccacacacagcagatcaggaccacgtgctcccacgtcaccacatgccacagatcaagaccacgtgctcctgcatcaccacagacagcagatcaggaccatgtgctcccacatca

SEQ ID NO: 15235 - DNA, 120 bp, synthetic construct
  misc_feature 1..120: note = Artificially Synthesized Probe
  source 1..120: mol_type = other DNA
catcactagttgttagggagatgcatgctaaaaccacattgagatccactcacatccactgggatggctgtaatcaaacagccaagagataagagaattacggtcgatgtggcgattccg

SEQ ID NO: 15236 - DNA, 120 bp, synthetic construct
  misc_feature 1..120: note = Artificially Synthesized Probe
  source 1..120: mol_type = other DNA
agtaccccctcagtgctggttgctcctcatccctttaaaaaattgtggggaagtagaaaaataccctcagtaagtgaagtcactgacaaaaaagtaaaaggcacaaccttggaaaatatc

SEQ ID NO: 15237 - DNA, 120 bp, synthetic construct
  misc_feature 1..120: note = Artificially Synthesized Probe
  source 1..120: mol_type = other DNA
gaagcttgggaagggcattctctggtcttctgtaatgcattcctttacagaaagggaaatgggaagaaaggtttcacgtccaggactctgggcctttgatcatttgagaaacgctgggtc

SEQ ID NO: 15238 - DNA, 120 bp, synthetic construct
  misc_feature 1..120: note = Artificially Synthesized Probe
  source 1..120: mol_type = other DNA
cgctggagaacttgcccaggctctccagtccttctgcgtaaagccatggctgttgttttatcttcacatatttatgtctttttttttttaaccagaagaaaatgaagtaaggaaaatgct

SEQ ID NO: 15239 - DNA, 120 bp, synthetic construct
  misc_feature 1..120: note = Artificially Synthesized Probe
  source 1..120: mol_type = other DNA
attgacatttgatggcaattactaacggatatttttagtgtgcctctagtgtgaataccgttttgacaacagtggagttacaccaaatactggagcggcattctgcactgcaacaacact

SEQ ID NO: 15240 - DNA, 120 bp, synthetic construct
  misc_feature 1..120: note = Artificially Synthesized Probe
  source 1..120: mol_type = other DNA
accccttctaaacgcaggtcctccgtctcagaaggagaaattgacataacagtcgttactaaatcttactctttaaaaagcactctcatttcatctctttctcatcccaccagctataat

SEQ ID NO: 15241 - DNA, 120 bp, synthetic construct
  misc_feature 1..120: note = Artificially Synthesized Probe
  source 1..120: mol_type = other DNA
ttggagacaggtttcctttttattccaggcaggaagaacattctataagacagttctagaaaaatggaatatgagttcttcaccaaaaggagttgggtatgaagtccagcagagacagta

SEQ ID NO: 15242 - DNA, 120 bp, synthetic construct
  misc_feature 1..120: note = Artificially Synthesized Probe
  source 1..120: mol_type = other DNA
tatcaaacatttattcttcttctcaacatgacgttattaatcggagctttaaaaccaatgttacacctctacactgctttcttcttccaaggaggggtgccaggctttgaaccagtggac

SEQ ID NO: 15243 - DNA, 120 bp, synthetic construct
  misc_feature 1..120: note = Artificially Synthesized Probe
  source 1..120: mol_type = other DNA
actcctacaagaaacaaattaagaaaaatggaagtatggaccatcaatgggaaaatgtcacgtttctttgcaaagccttgcctatccagcaccaaagagtccgtggaaagtaaacattcc

SEQ ID NO: 15244 - DNA, 120 bp, synthetic construct
  misc_feature 1..120: note = Artificially Synthesized Probe
  source 1..120: mol_type = other DNA
tgctcattttttcctcatgagaccaagtacacccaaaaaagggacagtaaaacaaaccaaaccccaaaccccaaaccagataccctttaagaaagtgtgctggtttgaggaaaggccagc

SEQ ID NO: 15245 - DNA, 120 bp, synthetic construct
  misc_feature 1..120: note = Artificially Synthesized Probe
  source 1..120: mol_type = other DNA
agagagtttttaaagcaaagccctcacatgtgatgctaattatctcttagcagtttctctttaaagtgtaaatgcgctccctctgggctccagaaatatttaatcacacatctcggtgcc

SEQ ID NO: 15246 - DNA, 120 bp, synthetic construct
  misc_feature 1..120: note = Artificially Synthesized Probe
  source 1..120: mol_type = other DNA
gggccactgagtgtgtgttgtggctgtgacaccagattcaagtgtctccttgcagaggctcttgattgatttctattgattcaaattacaaaaaactgcattttgcttttcaatgtagac

SEQ ID NO: 15247 - DNA, 120 bp, synthetic construct
  misc_feature 1..120: note = Artificially Synthesized Probe
  source 1..120: mol_type = other DNA
tttgtcaactgaagaaccttatcaaaaataatggccctatttccacagttcgaagatgcctattccccctcacattttaatacctctgaagctagaaaatcgctcacgattaacacgtgc

SEQ ID NO: 15248 - DNA, 120 bp, synthetic construct
  misc_feature 1..120: note = Artificially Synthesized Probe
  source 1..120: mol_type = other DNA
ttctagtgctggcttaatcacccacgtttatttagttcattcttgatgggggcagaaaatccagccagataaataaactggtgagcaggttatcctcaaataaaaaggtcacatgatcca

SEQ ID NO: 15249 - DNA, 120 bp, synthetic construct
  misc_feature 1..120: note = Artificially Synthesized Probe
  source 1..120: mol_type = other DNA
ctgtcagaagcagcctccgaaaggcttcttttcaaagtacttcacggaaagcagtactgcactgctgcaatttcatttgtttataccgaaatatggcaacactattcagattaaagcaaa

SEQ ID NO: 15250 - DNA, 120 bp, synthetic construct
  misc_feature 1..120: note = Artificially Synthesized Probe
  source 1..120: mol_type = other DNA
ccttcagaaggtggagaagctcatggaagccattacgaaaatgaggagaaacacagattttatgagtgtaataaaaatacaatgatctagaccataaactaatcatccggcactcggctc

SEQ ID NO: 15251 - DNA, 120 bp, synthetic construct
  misc_feature 1..120: note = Artificially Synthesized Probe
  source 1..120: mol_type = other DNA
tgacccaggatccttatttaatcttaatgcagttcattggaatgcgcagtttacaaaactgtatgcctgaattccagaaatgaccattactggcacttcctgtttggtgaagggtaagag

SEQ ID NO: 15252 - DNA, 120 bp, synthetic construct
  misc_feature 1..120: note = Artificially Synthesized Probe
  source 1..120: mol_type = other DNA
gtggagaaattcagtgattcggacagtgacccaaggaacaagaagtgcagacttcggctgttatttgacccaactgagtaagtttactgactgtagatttaaaaaccatattgttgtttg

SEQ ID NO: 15253 - DNA, 120 bp, synthetic construct
  misc_feature 1..120: note = Artificially Synthesized Probe
  source 1..120: mol_type = other DNA
cctacgcttcctatcaacaccgatggagaggaacacagggcctcttcactctaggtcctttttgagtgctaagtatttaattagcaaacaaacaaaaaaacaaatgacccaactaaaaat

SEQ ID NO: 15254 - DNA, 120 bp, synthetic construct
  misc_feature 1..120: note = Artificially Synthesized Probe
  source 1..120: mol_type = other DNA
aacggtaactacgcgaggagacgtgtattcattagcttgactgtggtcatcattcacgatgtctgcgtgtgtcagaacatcaggctgtacaccttaaacatttacaattaaaaacaactc

SEQ ID NO: 15255 - DNA, 120 bp, synthetic construct
  misc_feature 1..120: note = Artificially Synthesized Probe
  source 1..120: mol_type = other DNA
aaccgaaagaaaatgttatcaaaggcttgcatggcagaagtcctccaggacttgcttaaatgtacagacaagtgttcagtttttaaaaaaacaagcatggtaactgcatcccgctgaagc

SEQ ID NO: 15256 - DNA, 120 bp, synthetic construct
  misc_feature 1..120: note = Artificially Synthesized Probe
  source 1..120: mol_type = other DNA
ctcacgttcccggttaaatatgcgcctggtctccttgcggggagctgctgcactgggcggcctttccttttcaagatcaggacctgacataaatgcatcagatccagttgtgaagcaaga

SEQ ID NO: 15257 - DNA, 120 bp, synthetic construct
  misc_feature 1..120: note = Artificially Synthesized Probe
  source 1..120: mol_type = other DNA
acacaactctcatgttaattcctaagaattaacacaactctcatgcttccctttaatcaagtaacgtgccttaaaatcaacccatctgtgacgtagcagcctctgaagtcatttcccccc

SEQ ID NO: 15258 - DNA, 120 bp, synthetic construct
  misc_feature 1..120: note = Artificially Synthesized Probe
  source 1..120: mol_type = other DNA
cagctgaggcttcatcacagaatacttttagaaagcagaaactagaaattgaaagtgcacctttttcttggtaaaatgttgatgtgcaataagagtcaacacacatccgatgccagtggg

SEQ ID NO: 15259 - DNA, 120 bp, synthetic construct
  misc_feature 1..120: note = Artificially Synthesized Probe
  source 1..120: mol_type = other DNA
tgtatttttgtaaacaacacctactctggaaatgccgaggtcactgctgccggatctctcttttctgtttatagagacgtcttcatgtcactgtgccttctttatctgtgaggagtgtgt

SEQ ID NO: 15260 - DNA, 120 bp, synthetic construct
  misc_feature 1..120: note = Artificially Synthesized Probe
  source 1..120: mol_type = other DNA
gagctcaacgcctgggggtgtcaacggatgggtatgaggtgttaagactccttatttagaagcattgaacaaaacagtaaaacctcacagccaaactcgtgttcctaatttaaaatttat

SEQ ID NO: 15261 - DNA, 120 bp, synthetic construct
  misc_feature 1..120: note = Artificially Synthesized Probe
  source 1..120: mol_type = other DNA
atttttaggaatttcttgatgtaagtcaaattttggaaatcaaattcttgaaatgcatccagtgtccatatagagctggttcactgcaggaaagcaccatgtgtgcagtgagtggtgacc

SEQ ID NO: 15262 - DNA, 120 bp, synthetic construct
  misc_feature 1..120: note = Artificially Synthesized Probe
  source 1..120: mol_type = other DNA
tgctaagccagagagggcaaagagaaccctaactttgaatttttaagaatgtcaatcttggggcttactggtaagtattcaatgaagaacaacgcctgagagatgctgacattctaaaac

SEQ ID NO: 15263 - DNA, 120 bp, synthetic construct
  misc_feature 1..120: note = Artificially Synthesized Probe
  source 1..120: mol_type = other DNA
cccataagatgtaaacactgatcaaatgaattgcctccaacaattgcaactatccataataaacagtaagaaaaatggttcacgccttctattcactagccacaggaatctgggcacgct

SEQ ID NO: 15264 - DNA, 120 bp, synthetic construct
  misc_feature 1..120: note = Artificially Synthesized Probe
  source 1..120: mol_type = other DNA
ggctcataaaaatgaaagaacacatatttgggggcaccccatgccacacaaataagcacattttgggtaatgggttgaggtggatgaaaactccagtggtattaggactccgtgggtatt

SEQ ID NO: 15265 - DNA, 120 bp, synthetic construct
  misc_feature 1..120: note = Artificially Synthesized Probe
  source 1..120: mol_type = other DNA
ctgtaatcggagtcacgcgaggctgacgggaaagccaggaaagggaagtaaagggaataggaagagcctggggcagaagtgaatttaccaactccggtgcacagcgacatcaggaaatgt

SEQ ID NO: 15266 - DNA, 120 bp, synthetic construct
  misc_feature 1..120: note = Artificially Synthesized Probe
  source 1..120: mol_type = other DNA
tggcctaatcagattcaagacatgattcgtgacccagttattgagatcttcttttcagaaagagagattttaatttaaaaatgttcacctgccaaaagtcagccacggtggcgggcagcg

SEQ ID NO: 15267 - DNA, 120 bp, synthetic construct
  misc_feature 1..120: note = Artificially Synthesized Probe
  source 1..120: mol_type = other DNA
tgctagctccaatgggagaaggttggcttagaagaccataattattacatttatttcgaagattaagcacagaaaaaagaacttgaggacaaagccttgagaggcaagcgagatttgagc

SEQ ID NO: 15268 - DNA, 120 bp, synthetic construct
  misc_feature 1..120: note = Artificially Synthesized Probe
  source 1..120: mol_type = other DNA
ttttgattttttgaaatatgcatttgttgggggtgacagctatttacagagacccctgtctcttccttgcaaatagtaatgcatgaaaaggaaagccccgcctccttctgaaatgtgtgt

SEQ ID NO: 15269 - DNA, 120 bp, synthetic construct
  misc_feature 1..120: note = Artificially Synthesized Probe
  source 1..120: mol_type = other DNA
ttcttacccttcgcctcctactcatgactttccatttcattgcaacatactttttatttgtatgactgttatgttcccgacacaaactgcccggctgtgggaaaaggcctgtcatatctc

SEQ ID NO: 15270 - DNA, 120 bp, synthetic construct
  misc_feature 1..120: note = Artificially Synthesized Probe
  source 1..120: mol_type = other DNA
gctagtgaggtgtgttcctctgtctctctgaatacacagtgtaaagatggcctagtgatgtgccttatgctatcagaggataattactaaacaagtatctttagaaaccctaatctgcat

SEQ ID NO: 15271 - DNA, 120 bp, synthetic construct
  misc_feature 1..120: note = Artificially Synthesized Probe
  source 1..120: mol_type = other DNA
ctgcccacatctccacctgcctttcctaacatttaaagcaaattgcatgaaacgctttcttgaaaaccaccatttgacttctcaagtctcttttccaaatactaaggcttaatatgggaa

SEQ ID NO: 15272 - DNA, 120 bp, synthetic construct
  misc_feature 1..120: note = Artificially Synthesized Probe
  source 1..120: mol_type = other DNA
acaacccaaatttggaaaaaaaaaagaattgtggtatgaaataaaggaaagacacaaaatgtaccataaaattacttctccctcctggccttgccttctcacccaagctcctgcccagta

SEQ ID NO: 15273 - DNA, 120 bp, synthetic construct
  misc_feature 1..120: note = Artificially Synthesized Probe
  source 1..120: mol_type = other DNA
aaggaagtgattccttcttaagaatgaacacataaacagaaacctgggttcaggtggtgtagaccaagtacactaggccagttcttcactttgaattcagtctctcaaagctgaacatgc

SEQ ID NO: 15274 - DNA, 120 bp, synthetic construct
  misc_feature 1..120: note = Artificially Synthesized Probe
  source 1..120: mol_type = other DNA
acagccagcaaacggtctctttcataagaaacagggtcccattcactggaaatacttcaggaaaacgaacctgaaattctggacctgcctccaagccactgattgttacaaaaagcgtag

SEQ ID NO: 15275 - DNA, 120 bp, synthetic construct
  misc_feature 1..120: note = Artificially Synthesized Probe
  source 1..120: mol_type = other DNA
ctgcagaattttataccatgctggcctttaaatcacagacacacttggcaacacacagcaggtaaacagaaatatgaacgttaagcaatcgcccgcgtttcaaaatagaaagtttcatag

SEQ ID NO: 15276 - DNA, 120 bp, synthetic construct
  misc_feature 1..120: note = Artificially Synthesized Probe
  source 1..120: mol_type = other DNA
gaagggctacagctgttctctccttctcttcacccacagtgtggcgagcagggggcatgtctcagccctgtttgtgctacagctcttctagccccaccattcgacaggtcctgagttctt

SEQ ID NO: 15277 - DNA, 120 bp, synthetic construct
  misc_feature 1..120: note = Artificially Synthesized Probe
  source 1..120: mol_type = other DNA
gtgtggtggtggtgaagctgcacggactctgcttctctacgcaattctttcatttttcttggagattttacttacagtttttaaaacaacaaatcctagggcttggaaaacttagtgagt

SEQ ID NO: 15278 - DNA, 120 bp, synthetic construct
  misc_feature 1..120: note = Artificially Synthesized Probe
  source 1..120: mol_type = other DNA
agagtgaaaattggcagtggcaggaaattgtaatacaaatcatcagaaaaaaactggttgactctgacatctgaacaccccacacacactactccaaacattgattccagaaacccagtt

SEQ ID NO: 15279 - DNA, 120 bp, synthetic construct
  misc_feature 1..120: note = Artificially Synthesized Probe
  source 1..120: mol_type = other DNA
agttcatgtgcctggcgaatctctattttgtgattctcttactttttatgagatgttttgagagcaaataggatgatgccatccagttcccgagtcccctaaagggcagtttccttgacg

SEQ ID NO: 15280 - DNA, 120 bp, synthetic construct
  misc_feature 1..120: note = Artificially Synthesized Probe
  source 1..120: mol_type = other DNA
ttttaaatataaaaaaaaagagtatttcaaatttctcagatgttccatattttcacggattagatcctcttctctcatcctggacccagtggccatcctggaccacggacagaacaggga

SEQ ID NO: 15281 - DNA, 120 bp, synthetic construct
  misc_feature 1..120: note = Artificially Synthesized Probe
  source 1..120: mol_type = other DNA
acagaaaggcctttgaacttgtcatagttgaggcaaaggaataaatgatcggaccacgtttgtttcaatactctgagaagctacatgggcttgattctttgcagacctgggcacttgaag

SEQ ID NO: 15282 - DNA, 120 bp, synthetic construct
  misc_feature 1..120: note = Artificially Synthesized Probe
  source 1..120: mol_type = other DNA
caaatggcatggtcacaaggctggtttagtgtctcatgtcttaaatggtttcactggcatcccccacagacagatctctcagaaagtcgccccccaatgggatcggaagcatgttgggca

SEQ ID NO: 15283 - DNA, 120 bp, synthetic construct
  misc_feature 1..120: note = Artificially Synthesized Probe
  source 1..120: mol_type = other DNA
aaggagctgaaactaggagcagggggcagctcacacgccttatcaccaggacacagggtatcaccagaagaacagctctggcttgtggctgtgctgcctgagattaacgcccgttttgtg

SEQ ID NO: 15284 - DNA, 120 bp, synthetic construct
  misc_feature 1..120: note = Artificially Synthesized Probe
  source 1..120: mol_type = other DNA
actccgcttgtccttcgtttccgctgtcagctcagcaggtgacttattcccagtgctgctcttctcacagacacaaaaccaacagttccggtctcttccgatagttctggcagagacggc

SEQ ID NO: 15285 - DNA, 120 bp, synthetic construct
  misc_feature 1..120: note = Artificially Synthesized Probe
  source 1..120: mol_type = other DNA
aaaattaaaaagacgaaagagacacaaaacccaaaatgcaatgatgaatcttgactgcatcctggtggaaaaaacaaaacagacaacagataacagaccgtgttgtagagaaagcggcgg

SEQ ID NO: 15286 - DNA, 120 bp, synthetic construct
  misc_feature 1..120: note = Artificially Synthesized Probe
  source 1..120: mol_type = other DNA
gtttttatcaatgacttgacgacgtgaaaaacatgtttataaaacgagcagatggtgccgagctgagagggaggtgacgcagtgactcaggaaccacaagctctggaggctgaacgagaa

SEQ ID NO: 15287 - DNA, 120 bp, synthetic construct
  misc_feature 1..120: note = Artificially Synthesized Probe
  source 1..120: mol_type = other DNA
gcacttgcagttgtagttcagagatgatgcttttagacaatctttcccttcgagaagtagcctaatgagaaggactctgtagatctcttcctaaaaaagaatcctcagtctctggcagaa

SEQ ID NO: 15288 - DNA, 120 bp, synthetic construct
  misc_feature 1..120: note = Artificially Synthesized Probe
  source 1..120: mol_type = other DNA
gcaatgccctcagaagctgggagatgtgaaccccacatgactctcctccttgctgtcttcctgtccctgagccttcagctcttcgttgtctctgtcttgtctctctgcattgtttgtcct

SEQ ID NO: 15289 - DNA, 120 bp, synthetic construct
  misc_feature 1..120: note = Artificially Synthesized Probe
  source 1..120: mol_type = other DNA
cccaaaagcaagatggccaagagtatggagaagaaagtaggtaatacaagtttgctcagaataaacctatgtgttcatgaaaatatttctatctagggttctcccaggaggtgaacttgc

SEQ ID NO: 15290 - DNA, 120 bp, synthetic construct
  misc_feature 1..120: note = Artificially Synthesized Probe
  source 1..120: mol_type = other DNA
ggcccccagagcctgttagtagcccccgacacagggccggtgcttagtaaatatctgttagttggctaatgggatgtattgtattttgcttttcttctaaatataaaatttataaatcac

SEQ ID NO: 15291 - DNA, 120 bp, synthetic construct
  misc_feature 1..120: note = Artificially Synthesized Probe
  source 1..120: mol_type = other DNA
tcggagaactgctggcttatatttccattttctggcagtgatccctagctaggtagtaggtgctcagtttgtggaaataattgtaaagttaaagatgctgtaaaagcaaccactgttgat

SEQ ID NO: 15292 - DNA, 120 bp, synthetic construct
  misc_feature 1..120: note = Artificially Synthesized Probe
  source 1..120: mol_type = other DNA
ggccatggtgcgacgttgtgctacggtgcacaatgcatatcataccatgcaaccgttaagtgaaatatgtgcattgttaacacacattttacatatgtaaatataaactccggtgtttgg

SEQ ID NO: 15293 - DNA, 120 bp, synthetic construct
  misc_feature 1..120: note = Artificially Synthesized Probe
  source 1..120: mol_type = other DNA
tgaaaattcccttccacaaaaacccccatgccgccagcacagcccactcggttcttattcatctgtaccgttgagaacaagccctgattttaagaaagaacatttcaaaggaccaaaccc

SEQ ID NO: 15294 - DNA, 120 bp, synthetic construct
  misc_feature 1..120: note = Artificially Synthesized Probe
  source 1..120: mol_type = other DNA
tctgtggctacttttctcaagttgggcttacgtagagttctacaaataggtaggtcgaaaatggttcctggcaaaatcattctgggtcctagcttttctttgaaaaatgctcttttcata

SEQ ID NO: 15295 - DNA, 120 bp, synthetic construct
  misc_feature 1..120: note = Artificially Synthesized Probe
  source 1..120: mol_type = other DNA
tgtggtcatcctgcatgtgaacttggacaagtatagcaactctactcagacgtcttctggaattattaggaaattaacatgtaatttaaacagtatttgtggcttttccctggtagtggg

SEQ ID NO: 15296 - DNA, 120 bp, synthetic construct
  misc_feature 1..120: note = Artificially Synthesized Probe
  source 1..120: mol_type = other DNA
atcataaaaaagttagctcagaaaaaaaaccttgacatttaaattcttttattttatagatgagtgcatgtgtgagagagtgtggtggtgggacggcttagtttcttaaggcactgcaac

SEQ ID NO: 15297 - DNA, 120 bp, synthetic construct
  misc_feature 1..120: note = Artificially Synthesized Probe
  source 1..120: mol_type = other DNA
ttttctgaatttccttttactaatctgatactttctatcccataagactgcttctcagcctttgccccgtccccaccgccatccttctctacattttgtgctgatttttctgtaatgaac

SEQ ID NO: 15298 - DNA, 120 bp, synthetic construct
  misc_feature 1..120: note = Artificially Synthesized Probe
  source 1..120: mol_type = other DNA
atccttaggaagcgtttggaggtgtgtctttcgtcttttagagctgcttgctctataattttgggttttgaagggctcttggctgggagaactcagtctgacattttcatatttttaaac

SEQ ID NO: 15299 - DNA, 120 bp, synthetic construct
  misc_feature 1..120: note = Artificially Synthesized Probe
  source 1..120: mol_type = other DNA
atacacagaaccccaaaatttgtgtaacaaaagtgtgattgccatgaacactttgagggagaatgtgttcacaatgtattacatagcacaaatgtcgtcagcaccgtcttccggtcaaat

SEQ ID NO: 15300 - DNA, 120 bp, synthetic construct
  misc_feature 1..120: note = Artificially Synthesized Probe
  source 1..120: mol_type = other DNA
caccatgcaatactaaaactcctaaggagtcctaaggactcctaaaactcagtggactatttaaaaatgagcaaaagccggtccatctggcattatttctcatcaatcaaaccactcgtg

SEQ ID NO: 15301 - DNA, 120 bp, synthetic construct
  misc_feature 1..120: note = Artificially Synthesized Probe
  source 1..120: mol_type = other DNA
tggttaaaggatcagaagatagtttcactatttcttagtttaagaaagctcttcctgaaacaggaatcccgacccatacgaccatattcaacttgccatctcactctcagaaagcaatgc

SEQ ID NO: 15302 - DNA, 120 bp, synthetic construct
  misc_feature 1..120: note = Artificially Synthesized Probe
  source 1..120: mol_type = other DNA
ggtgcgtgttggttttgagaccgggaacgctactgaactatctgctttatttaaaactttttcatcattgaaaaataaattcactcactgagaattaagaatcccagcactttgggaggc

SEQ ID NO: 15303 - DNA, 120 bp, synthetic construct
  misc_feature 1..120: note = Artificially Synthesized Probe
  source 1..120: mol_type = other DNA
gggtcacctgcagaaagactaagaaagaagctgtttaataatggggatgatgacagaggcatcactttgtatttcaggctgtcattctcagagaagcgcaaagaattttaaatgaacaat

SEQ ID NO: 15304 - DNA, 120 bp, synthetic construct
  misc_feature 1..120: note = Artificially Synthesized Probe
  source 1..120: mol_type = other DNA
catgagctacaacgcctggcctcattaatttctttagctggagggcagaccatctgcaagtagataaacacagctttaaaaagtgatttcagacaacagtgagtagtaagaagatgcgga

SEQ ID NO: 15305 - DNA, 120 bp, synthetic construct
  misc_feature 1..120: note = Artificially Synthesized Probe
  source 1..120: mol_type = other DNA
aaagtaagtttgctcaaagtaccatagaaaattaactgcccatagctaaaccccaaatttaaaatgtaaagacaaccgaatcactaacctaacctgggacgccgtgatgtgcttgtccac

SEQ ID NO: 15306 - DNA, 120 bp, synthetic construct
  misc_feature 1..120: note = Artificially Synthesized Probe
  source 1..120: mol_type = other DNA
aatgtactgagccacggcagtgctgccatgaaggcgtttcggacaaatggttaccagtgtttcatggaatgattttcttcaccaatatttgtcattcaccatctaaaatcaagtgaacaa

SEQ ID NO: 15307 - DNA, 120 bp, synthetic construct
  misc_feature 1..120: note = Artificially Synthesized Probe
  source 1..120: mol_type = other DNA
gtttactattcaggtgtcttctttataccaggatctgcggtcatcacctttatagatgaatggaaaacactggagaactttggagaaatggcgtggaagatgaagagataatgctcaatc

SEQ ID NO: 15308 - DNA, 120 bp, synthetic construct
  misc_feature 1..120: note = Artificially Synthesized Probe
  source 1..120: mol_type = other DNA
agtgtgcaaaattcagctgaaaaccaaccttggattccaaacagatcataggaaaagagggtgcaagagaaagaaaacagttcatgaaatgcaacctttacgtaactaagccctgaagag

SEQ ID NO: 15309 - DNA, 120 bp, synthetic construct
  misc_feature 1..120: note = Artificially Synthesized Probe
  source 1..120: mol_type = other DNA
cttccaattgctttgaaacgaggagtttggaggagaagagaacagagagctgatatgtcaaacagtgttttcacttttcagggtgaagagttagaggtgagactatcagagatattttac

SEQ ID NO: 15310 - DNA, 120 bp, synthetic construct
  misc_feature 1..120: note = Artificially Synthesized Probe
  source 1..120: mol_type = other DNA
tgtaatttgcatggcatgtgtgtttccagtgatatgaagaaggagataacctgaagtgtcttcctccacagacacgtagaatgctggacaaatggcacagtcagcctttcacagaattaa

SEQ ID NO: 15311 - DNA, 120 bp, synthetic construct
  misc_feature 1..120: note = Artificially Synthesized Probe
  source 1..120: mol_type = other DNA
tgaggaaattccctggaatgcaggacagaaagatagagaaaataggaaagggatttaagggacatgggaataagaaggtacaacttatttccattagaggggagaatggaagagagtcaa

SEQ ID NO: 15312 - DNA, 120 bp, synthetic construct
  misc_feature 1..120: note = Artificially Synthesized Probe
  source 1..120: mol_type = other DNA
ttttagaaacgtcactgcaatactctgcagtatgttaggagattttcccacagtgggcgtcattatttttctttacggcagtatggttgcatgagttttgtaaccagccatattttgtgg

SEQ ID NO: 15313 - DNA, 120 bp, synthetic construct
  misc_feature 1..120: note = Artificially Synthesized Probe
  source 1..120: mol_type = other DNA
tttattaaactcgtgttaggtttacacatttacacaaagaatcagataactccatccaggccctgaactgctgtgattcaattcctctgatgctgtctataaacctgcagatgcaggagt

SEQ ID NO: 15314 - DNA, 120 bp, synthetic construct
  misc_feature 1..120: note = Artificially Synthesized Probe
  source 1..120: mol_type = other DNA
gcattttaagcagcaaatcagatttttaaaaaataaaaagtcaaatcactccccctcccacaaaaaaatagagttccacaccctcaataaaggcggatcatggaagggacactctctgcc

SEQ ID NO: 15315 - DNA, 120 bp, synthetic construct
  misc_feature 1..120: note = Artificially Synthesized Probe
  source 1..120: mol_type = other DNA
gttacgggctgaaccattccctagaatccatgtgctgcctccctaatcccctccaggttaccccgcaacataacctcatttgcaggtggggcctttacagagatgatggagttaaaatga

SEQ ID NO: 15316 - DNA, 120 bp, synthetic construct
  misc_feature 1..120: note = Artificially Synthesized Probe
  source 1..120: mol_type = other DNA
gcagtatctatcaaaataaacaataagcatccgcgatgactcaggatctggcttctaaaaactcacatttcacatggtccgtgtagtctggagtggcaaaagtttgaaattgcctacatt

SEQ ID NO: 15317 - DNA, 120 bp, synthetic construct
  misc_feature 1..120: note = Artificially Synthesized Probe
  source 1..120: mol_type = other DNA
tggtttctcatgggtggtttagaccatccccttggcgctgtcctcaggatagtgagcaggctttcctgagatggtgttgttaaaagtgtgcggcactccccatctgttctctccctcctg

SEQ ID NO: 15318 - DNA, 120 bp, synthetic construct
  misc_feature 1..120: note = Artificially Synthesized Probe
  source 1..120: mol_type = other DNA
cgtgcactgaactcggtgggtcggacccattcgctgtgcactgaactcggtgggtcggacccatccagcgtgcactgaactcggtgggttggacccattcactgtgcactgaactcggtg

SEQ ID NO: 15319 - DNA, 120 bp, synthetic construct
  misc_feature 1..120: note = Artificially Synthesized Probe
  source 1..120: mol_type = other DNA
cggtgggtcggacccattcactgtgcactgaactcggtgggtcggacccattcactgtgcactgaactcggtgggtcggacccatccagcgtgcactgaactcggtgggtcggacccatc

SEQ ID NO: 15320 - DNA, 120 bp, synthetic construct
  misc_feature 1..120: note = Artificially Synthesized Probe
  source 1..120: mol_type = other DNA
ccatccagcgtgcactgaactcggtgggtcagaccctttcactgtgcactgaactcggtgggtcagacccatctagcgtgcactgaactcggtgggtcggacccatccactgtgcactga

SEQ ID NO: 15321 - DNA, 120 bp, synthetic construct
  misc_feature 1..120: note = Artificially Synthesized Probe
  source 1..120: mol_type = other DNA
gtgctgggaaggggggactatgtacccctccatgtgcaggccttgcctatgccacgcagtcctcaatggtgagaaacagctttcctgcaaaaataggctcctccaaatgtgcgccacaaa

SEQ ID NO: 15322 - DNA, 120 bp, synthetic construct
  misc_feature 1..120: note = Artificially Synthesized Probe
  source 1..120: mol_type = other DNA
cactgtccatatcctcatcttcaacactcaagaggatggattctgaaaagcacttactcagcacggctttcccaagttaagttctatattatttaagtcgaatggagaagtatgaagcca

SEQ ID NO: 15323 - DNA, 120 bp, synthetic construct
  misc_feature 1..120: note = Artificially Synthesized Probe
  source 1..120: mol_type = other DNA
ttagttcatcccagaagaaaactggaatttttaaaggacctttctaagaaaatgaaggcaaagcaacacaaaaaccagaatcaaagcccagagacagggatcaggcagagtgtagagaat

SEQ ID NO: 15324 - DNA, 120 bp, synthetic construct
  misc_feature 1..120: note = Artificially Synthesized Probe
  source 1..120: mol_type = other DNA
tgtttatttcatcggatcgtggggttcagatgccacgttttgtccaacgtgccccaggagtggctgcatgtcaggaacatgtcgctgggaatctctgtggcttatctgaccatcctgcca

SEQ ID NO: 15325 - DNA, 120 bp, synthetic construct
  misc_feature 1..120: note = Artificially Synthesized Probe
  source 1..120: mol_type = other DNA
tcagggaaatatctcagtaacattcattttcaaaacagcattggttgatgaggaagatccagtttccctgagtttacaatctgtacgcacagagtctaagtcagccggactcatacttgg

SEQ ID NO: 15326 - DNA, 120 bp, synthetic construct
  misc_feature 1..120: note = Artificially Synthesized Probe
  source 1..120: mol_type = other DNA
gcctccagccttgatctccaagctctgcaatgaggctttttagtgaaaacatggttttctggctttttgtggtccagatccaccagtctatactattattaactcattaggcaaaaataa

SEQ ID NO: 15327 - DNA, 120 bp, synthetic construct
  misc_feature 1..120: note = Artificially Synthesized Probe
  source 1..120: mol_type = other DNA
aaaactaaatagcgggtgctcactcttacacaccagggactgtgtgtgggggctgcacgttccaggcagaagcacggcaaagatctcaggaagtaaatattcttgtttatctaaattaag

SEQ ID NO: 15328 - DNA, 120 bp, synthetic construct
  misc_feature 1..120: note = Artificially Synthesized Probe
  source 1..120: mol_type = other DNA
acaaacgccacacacacaccacacacatcacacatatacacacacatacgccacacacacacaccacacacatcacacatatacacacacatacaccacacacaccacacacatcacata

SEQ ID NO: 15329 - DNA, 120 bp, synthetic construct
  misc_feature 1..120: note = Artificially Synthesized Probe
  source 1..120: mol_type = other DNA
atctcgttttgaaagtgttctaaccactgtgttaggatagcccgtcctattgcctgatgaaaatatacctgtaccctgagtctgcaaagtgaaatgatacccagaaaaagtttataagag

SEQ ID NO: 15330 - DNA, 120 bp, synthetic construct
  misc_feature 1..120: note = Artificially Synthesized Probe
  source 1..120: mol_type = other DNA
gggcctctggtgagggtaaggggtctctaagaaaagggagagttccagttccttctttcccatacatcttcaggtacttgttagtttatagacagttttaaaatagtgagtgtgtttaaa

SEQ ID NO: 15331 - DNA, 120 bp, synthetic construct
  misc_feature 1..120: note = Artificially Synthesized Probe
  source 1..120: mol_type = other DNA
ggactgaggtccctgctgcaccacaaacttccgtttttattgtatttatttttctcccaaagtcaccaatagcaaacaaccacaaacttttcatgtgaacttgggaaaacctctaaaggt

SEQ ID NO: 15332 - DNA, 120 bp, synthetic construct
  misc_feature 1..120: note = Artificially Synthesized Probe
  source 1..120: mol_type = other DNA
agcgcagggtcttcttgaaggtcttaactttttcaaaggagggaaactgcgataaagatccaagaaaaatgtccctggcagagaggaagcccccgaaagcttggcgcagaatgctggaga

SEQ ID NO: 15333 - DNA, 120 bp, synthetic construct
  misc_feature 1..120: note = Artificially Synthesized Probe
  source 1..120: mol_type = other DNA
taagataacatgcttagagtgaggctttgggcctgtgcctgacacacaccaggtgattatttgctgttcctactacgatgattattagtttattcaaaatcaggtttgctatggtccctt

SEQ ID NO: 15334 - DNA, 120 bp, synthetic construct
  misc_feature 1..120: note = Artificially Synthesized Probe
  source 1..120: mol_type = other DNA
gaagccaggaaggagcctggattctgcctcatggcttgctggagaaagcactgaggggcatctcatgtggtctcattcactggtcctttaggctgattatagtttccaaattcataatgg

SEQ ID NO: 15335 - DNA, 120 bp, synthetic construct
  misc_feature 1..120: note = Artificially Synthesized Probe
  source 1..120: mol_type = other DNA
cacacatacttctttaaaacctcagttgaaggttacagcatcagctgccatcacaccagaactgccatcagacgagagcagccgctgcccgtatcacctgcgttcattatcagacttctg

SEQ ID NO: 15336 - DNA, 120 bp, synthetic construct
  misc_feature 1..120: note = Artificially Synthesized Probe
  source 1..120: mol_type = other DNA
actcaataaccaacaggtaattaaatatgaatgaagaagaaaggtagatgtaaccacataactcttttgattgtagatttagctgcgatgtcggcggcacttgcgaattccctccccact

SEQ ID NO: 15337 - DNA, 120 bp, synthetic construct
  misc_feature 1..120: note = Artificially Synthesized Probe
  source 1..120: mol_type = other DNA
cccagtgagaaggacgcatttgcaataatggaaaaagggcacggttttgcaggtcatctccatagtaaaatatcaatgattataatgtgcctctattcttgagaagaaagtattccagag

SEQ ID NO: 15338 - DNA, 120 bp, synthetic construct
  misc_feature 1..120: note = Artificially Synthesized Probe
  source 1..120: mol_type = other DNA
aaaactagagtaactaggcatttttaaagaagatggtggcgtcttccactgttgccctaaatggaaatgctccaccgcaaaactcaatgtgatgctagtgcctcacgacctaacaccctc

SEQ ID NO: 15339 - DNA, 120 bp, synthetic construct
  misc_feature 1..120: note = Artificially Synthesized Probe
  source 1..120: mol_type = other DNA
atacacatcacaaggcaaatgtctcatctcttaactcagcatctgatggagaaaattacagagtggaaatcactcagagaagagacctgtcattcttgaattctgccaaaagaagaccag

SEQ ID NO: 15340 - DNA, 120 bp, synthetic construct
  misc_feature 1..120: note = Artificially Synthesized Probe
  source 1..120: mol_type = other DNA
agccgagtcagcccacgatgagcgatgttggccaagcaatatggagtgagttcttcccatttcgcaagatgttttctcaaaacaaaaattaaagatatagacatgtttcatgtaagtgaa

SEQ ID NO: 15341 - DNA, 120 bp, synthetic construct
  misc_feature 1..120: note = Artificially Synthesized Probe
  source 1..120: mol_type = other DNA
tgctcctgataacatcagattgaaaccaggaaacagttgtgaaaataaagacattggaaggaaacacagaattttaatgagcatcttctctctggaacagcccatgtctaagaccggctt

SEQ ID NO: 15342 - DNA, 120 bp, synthetic construct
  misc_feature 1..120: note = Artificially Synthesized Probe
  source 1..120: mol_type = other DNA
tcttaccacatcaagatcttagttcaatgtatcgattcattcttatcgagcatgtaaaggtccccggtgggtgctgtgggtctattggacagacctggcctttgggaagccaaggctgtc

SEQ ID NO: 15343 - DNA, 120 bp, synthetic construct
  misc_feature 1..120: note = Artificially Synthesized Probe
  source 1..120: mol_type = other DNA
tgaaactcacacaccagctccagtttccatccaatttagtattttgttttgcaaaaaaaatctgcattgtatttcctcccactcaggaacatccgatctctggtttcagggtgcgtttta

SEQ ID NO: 15344 - DNA, 120 bp, synthetic construct
  misc_feature 1..120: note = Artificially Synthesized Probe
  source 1..120: mol_type = other DNA
caagatttcattcttaaccatcagtaattctcccaaagcagaaaagccacggagacgttacattttgagcaacaaagtttcagaacagctggctggatgaagaagggagcactattctgc

SEQ ID NO: 15345 - DNA, 120 bp, synthetic construct
  misc_feature 1..120: note = Artificially Synthesized Probe
  source 1..120: mol_type = other DNA
tgcctccttttatgccggtgtacgtgttgtgttaagagctgggctttgccatttttgacaggctaatgcatttcaccacagataatgccattcaccacagaggcgcattctctctcgtgc

SEQ ID NO: 15346 - DNA, 120 bp, synthetic construct
  misc_feature 1..120: note = Artificially Synthesized Probe
  source 1..120: mol_type = other DNA
ccatcaagtgtcttgaattctgcagagcagcccaggtttcagggctttgcttctgttttcttctctggaagtgcatgctttgcagacaccaatgtcctcagttttagttcagaaaatgtg

SEQ ID NO: 15347 - DNA, 120 bp, synthetic construct
  misc_feature 1..120: note = Artificially Synthesized Probe
  source 1..120: mol_type = other DNA
tttgatttcagtttcacacgaatcacctcctagtgatgcgtggactaatgctgtttaccgccggttcactttcattgcaaactcctcatctccaagaaatcatcaaccgagaaaagaaag

SEQ ID NO: 15348 - DNA, 120 bp, synthetic construct
  misc_feature 1..120: note = Artificially Synthesized Probe
  source 1..120: mol_type = other DNA
tccaattttttttttatttccaaatatctcactgcgtggtctctgtgattttaattaagtctgatctaatgactactgtctgatggggggagtggcttgctgtaccccaacgagcagcat

SEQ ID NO: 15349 - DNA, 120 bp, synthetic construct
  misc_feature 1..120: note = Artificially Synthesized Probe
  source 1..120: mol_type = other DNA
ccaatttaattgtgaacatcctacttctattactcgtgattacaccaatgcctgaagattaaactcacctagagaaagaacggtctcttaaagccccagagaatgaaccaaggcgtgacc

SEQ ID NO: 15350 - DNA, 120 bp, synthetic construct
  misc_feature 1..120: note = Artificially Synthesized Probe
  source 1..120: mol_type = other DNA
ggaaaaacaggtaaacatgtttgaaggtgtttgcattagaagctagtaattcaatctccttactgcttcaaaactattttaagaaaagctctcttactccccaggagcacaacgtgggcc

SEQ ID NO: 15351 - DNA, 120 bp, synthetic construct
  misc_feature 1..120: note = Artificially Synthesized Probe
  source 1..120: mol_type = other DNA
cacaggggactcatggctgtgatagaaaacccaagtgagatatggatacgttaatgaattaatacctgcttcatttaccaaagtaaatatcctttccttgtaaccgcaattgtctgagtc

SEQ ID NO: 15352 - DNA, 120 bp, synthetic construct
  misc_feature 1..120: note = Artificially Synthesized Probe
  source 1..120: mol_type = other DNA
gtgacatttttttcaggctgcttcttcaaacgtgattttccttttgctttgaagcaaagctatgcactgcaactgaaatgccagcctcaacacatttgaagttgccatttctttgtaaga

SEQ ID NO: 15353 - DNA, 120 bp, synthetic construct
  misc_feature 1..120: note = Artificially Synthesized Probe
  source 1..120: mol_type = other DNA
aggaagccgatgatttttgagacatcttcaaacacctacacgccaaatgatctcgcaactctggcacttttcagtagtagtggccaaactaagataacagataatacatcattcatgtac

SEQ ID NO: 15354 - DNA, 120 bp, synthetic construct
  misc_feature 1..120: note = Artificially Synthesized Probe
  source 1..120: mol_type = other DNA
aaatcatttgaaaatagcacatcgcagattgcagcgtgctcaagaggacagtcagaggcatcactttttccttcagtggtggctgtttttcaaatttatgtaacgtatttggcagctaat

SEQ ID NO: 15355 - DNA, 120 bp, synthetic construct
  misc_feature 1..120: note = Artificially Synthesized Probe
  source 1..120: mol_type = other DNA
gcgtacacagtgcctcttatgtcaggccgggcccgtttttatcttgtaatcataaaggccaccaaagcaattatcgccggtcttgactggaaaagctggtcattaattagcctccttttg

SEQ ID NO: 15356 - DNA, 120 bp, synthetic construct
  misc_feature 1..120: note = Artificially Synthesized Probe
  source 1..120: mol_type = other DNA
tgaggcccacacgcgcgcggtgaccaccctggttctgagggggcggcggggccacggcgtgtggcggacccggcagtggcacccaggctgtgcgcgcgggtgtgtggggttccgaggcgc

SEQ ID NO: 15357 - DNA, 120 bp, synthetic construct
  misc_feature 1..120: note = Artificially Synthesized Probe
  source 1..120: mol_type = other DNA
tgacttgactccctttttgtggagttaaaaaaaatcttcaaactcctgctagccatggcctttaagagaaagaaatgagtttaaaagtgagtttgaggcacagtcttgacccaggtgtgg

SEQ ID NO: 15358 - DNA, 120 bp, synthetic construct
  misc_feature 1..120: note = Artificially Synthesized Probe
  source 1..120: mol_type = other DNA
agatttagtccttttccaaggttgtgtgatataaccagttaacaggagcagttcattctctgagtcacgatgtgcagtattaaaatatgcttgcatcataaagacgtagggatacaggtg

SEQ ID NO: 15359 - DNA, 120 bp, synthetic construct
  misc_feature 1..120: note = Artificially Synthesized Probe
  source 1..120: mol_type = other DNA
catcagttttaaagaaatactgtgttttaagacatcagggaagatttatgatactgatgtccaaagggggaagcacccttgtgcaaactaattctaaccagcagattgcctccggtggga

SEQ ID NO: 15360 - DNA, 120 bp, synthetic construct
  misc_feature 1..120: note = Artificially Synthesized Probe
  source 1..120: mol_type = other DNA
ccctaaaaggcaattgtgctgagattttaactctaacttgggggttcgcccgattccctggagcaacgcttctctaaaaccacggagcaggccagtgttcggaactgcacaggtagttac

SEQ ID NO: 15361 - DNA, 120 bp, synthetic construct
  misc_feature 1..120: note = Artificially Synthesized Probe
  source 1..120: mol_type = other DNA
tccgacgccctagttgcccgttagagcccccatgcgcgccctccagccttcgaaagctctcttcctcgccccaccacctacgcgcctggtgatgctctcgtgggcccttcctgctccctc

SEQ ID NO: 15362 - DNA, 120 bp, synthetic construct
  misc_feature 1..120: note = Artificially Synthesized Probe
  source 1..120: mol_type = other DNA
gactatgaatggacatcagctttgtcagtcattggtacaacgccgaagccagggccttcgccttttctttcttttcagtgtttctccctttcatcgttcatactgggcaagttcagggta

SEQ ID NO: 15363 - DNA, 120 bp, synthetic construct
  misc_feature 1..120: note = Artificially Synthesized Probe
  source 1..120: mol_type = other DNA
ctgtctaaaagtggccgaaggaccccgtttcctctgactgcaggcccaggctgagttccgcatttatttttgtatttatagggcaaggccagagcgcttcataaagctccagggcaaaga

SEQ ID NO: 15364 - DNA, 120 bp, synthetic construct
  misc_feature 1..120: note = Artificially Synthesized Probe
  source 1..120: mol_type = other DNA
agagcaaacccctccaggactggaggcccgacctccgcggtgctgggagcgccctagggtctggctgcgccgcgctggcgacggggtaggctcggggaacgcgcgcaggccccgggatcg

SEQ ID NO: 15365 - DNA, 120 bp, synthetic construct
  misc_feature 1..120: note = Artificially Synthesized Probe
  source 1..120: mol_type = other DNA
caacatcaaagcaccgcattcctgatttgatcttaatttaatgacctgtctttctagtgctttgaggaaagatgggtgggaggtggcaccaattcagttcaatttgggtcactttaaaaa

SEQ ID NO: 15366 - DNA, 120 bp, synthetic construct
  misc_feature 1..120: note = Artificially Synthesized Probe
  source 1..120: mol_type = other DNA
ttgagaggtcagcctcctagtaaagcatagtagttggcattgagataatttaagaacaaagacacttccacagacaaatatggatgactctgagttgaaatgtattaaccaccagtagtt

SEQ ID NO: 15367 - DNA, 120 bp, synthetic construct
  misc_feature 1..120: note = Artificially Synthesized Probe
  source 1..120: mol_type = other DNA
ctcaccatctactcatgcatactggatcttagtagagccctcaccatctacccatgcatactgggtcttagtagagccctcaccatctacccatgcatactggatcttagtagagccctc

SEQ ID NO: 15368 - DNA, 120 bp, synthetic construct
  misc_feature 1..120: note = Artificially Synthesized Probe
  source 1..120: mol_type = other DNA
gatcttagtagagccctcaccatctacccatgcatactgggtcttagtagagccctcaccatctacccatgcatactggatcttagtagagccctcaccatctacccatgcatactgggt

SEQ ID NO: 15369 - DNA, 120 bp, synthetic construct
  misc_feature 1..120: note = Artificially Synthesized Probe
  source 1..120: mol_type = other DNA
aattctcatgctggctcatatgccgatgaatctgaagcttttgaaatccaaaaataggaactcaatgatgagatagacttgatatcccaccaatggcttgacatgcttacatgaaaccac

SEQ ID NO: 15370 - DNA, 120 bp, synthetic construct
  misc_feature 1..120: note = Artificially Synthesized Probe
  source 1..120: mol_type = other DNA
ggctccaattaaatgaaagaacagcaacagcctgacaaagctcacctttgtacctggattctactgagaaggaaaatcaaatgatcaccatcaagtgacattttttgattttatattgca

SEQ ID NO: 15371 - DNA, 120 bp, synthetic construct
  misc_feature 1..120: note = Artificially Synthesized Probe
  source 1..120: mol_type = other DNA
attaaaaaagaaacaaatctgaaatatcacttccaccattaagagtgcatttgaaaaggccatttcaaaagagtagtgccccagacatggtgagcactaagacagacagcacctctgagt

SEQ ID NO: 15372 - DNA, 120 bp, synthetic construct
  misc_feature 1..120: note = Artificially Synthesized Probe
  source 1..120: mol_type = other DNA
tgagctccgcgggtctccgccagagcctccaagcctccccccagtaataatattaataatagttactattctttgaatagtaattcaataatagtatcagtctttcaaaaagatggtggt

SEQ ID NO: 15373 - DNA, 120 bp, synthetic construct
  misc_feature 1..120: note = Artificially Synthesized Probe
  source 1..120: mol_type = other DNA
ataatctctggcaacacaaaaaggcaggcagcagctcagctcactgtttcatctgttgatcagtctacaggtccagggttttaaaaatggatttttgctaaatgaataccacaacatatg

SEQ ID NO: 15374 - DNA, 120 bp, synthetic construct
  misc_feature 1..120: note = Artificially Synthesized Probe
  source 1..120: mol_type = other DNA
aagatgaaggggagaaaaggaagtatcgaaagtttggaaaaatagagaaataagaagagctcctaaactgagcctgtggcaaagggagtatcctgaaattgaacgggctcattcttgaaa

SEQ ID NO: 15375 - DNA, 120 bp, synthetic construct
  misc_feature 1..120: note = Artificially Synthesized Probe
  source 1..120: mol_type = other DNA
aatgtggaaggcatccttaaagataataggattaagtaacacaaatataaagaggaaaaatgatcaccgatgaagagtgcaagagaccacgtgtgtgtgcttgggaatggagggcctgaa

SEQ ID NO: 15376 - DNA, 120 bp, synthetic construct
  misc_feature 1..120: note = Artificially Synthesized Probe
  source 1..120: mol_type = other DNA
caaaacacaacaaaacaaaaccctccattttccagacaggcaaatgaagcccagagtgacaaggtaacctgcttaaggtcacacagcaggaggcgaggcagggtatgaattgagtgaatc

SEQ ID NO: 15377 - DNA, 120 bp, synthetic construct
  misc_feature 1..120: note = Artificially Synthesized Probe
  source 1..120: mol_type = other DNA
cttccagatcaatgtggaccacatccctccagaatgttaggaactgagcaaatctcatgccagtgctttccggatcaacagggaccacatccctctagaatgccgggaactgagcgaatc

SEQ ID NO: 15378 - DNA, 120 bp, synthetic construct
  misc_feature 1..120: note = Artificially Synthesized Probe
  source 1..120: mol_type = other DNA
ccagaatgccagacagatgaaggacacagaaaacttaatagtaaaacatattttctgatacgcaggtacctgggaatctatagattcaggtttagtgctgtgggttgtccttttatacac

SEQ ID NO: 15379 - DNA, 120 bp, synthetic construct
  misc_feature 1..120: note = Artificially Synthesized Probe
  source 1..120: mol_type = other DNA
gccccaacttccgtaaaaccacacatgcatagtcacaagcggctccctgctttatgcattctaaagcaattcagcattccacatgaaaacgcagccgtgacggcactgtgtgattgataa

SEQ ID NO: 15380 - DNA, 120 bp, synthetic construct
  misc_feature 1..120: note = Artificially Synthesized Probe
  source 1..120: mol_type = other DNA
catagtgtctgaaatgagctgcttacttttatttccaagaaaatgacaaagacgattttgacccctgacaattctttcagtcctggtcctcctgcgggtagctgagagcctaagtgaggt

SEQ ID NO: 15381 - DNA, 120 bp, synthetic construct
  misc_feature 1..120: note = Artificially Synthesized Probe
  source 1..120: mol_type = other DNA
ccattcgatccccttggacgaggctttctggaacgtccagaataaagagaatcctcatttctcagcacacggacttctgatgtgagaagacagtgactgtgtgctcattaaaactcactc

SEQ ID NO: 15382 - DNA, 120 bp, synthetic construct
  misc_feature 1..120: note = Artificially Synthesized Probe
  source 1..120: mol_type = other DNA
gccgggttacacgcgagagccccacgcgccagaggttccggggcagccgggttacacgcgagagccccacgcgccggaggttccggggcagccgggttacacgcgagagccccacgcgcc

SEQ ID NO: 15383 - DNA, 120 bp, synthetic construct
  misc_feature 1..120: note = Artificially Synthesized Probe
  source 1..120: mol_type = other DNA
ttctcaattttgaaaaccctcattgagctcttagagtacaaactgtgtcccctcaagaggatatgttgagtcttaaccccaggacctcagcatgttatgtaacttggaaaaaggaccttc

SEQ ID NO: 15384 - DNA, 120 bp, synthetic construct
  misc_feature 1..120: note = Artificially Synthesized Probe
  source 1..120: mol_type = other DNA
gtccaaaagtttactcaacccaatgacgcatctttaattctattattgacaacatcgtggaatataacagaattgaggaatagccccacggcacgtttctagagaacccctttgcactta

SEQ ID NO: 15385 - DNA, 120 bp, synthetic construct
  misc_feature 1..120: note = Artificially Synthesized Probe
  source 1..120: mol_type = other DNA
agctctgcttggcagaattgagggatgtctccattttatccagggcgagctactataggaataacaatggaggcttaagatctgtagaaaaatctatgagtttaggaattgtgattcctg

SEQ ID NO: 15386 - DNA, 120 bp, synthetic construct
  misc_feature 1..120: note = Artificially Synthesized Probe
  source 1..120: mol_type = other DNA
gctttctgagcacttgaatctggtggcttctgtgtcatcttcactctgaatgagtgaaatgtgtgcttaaaatggccttgagaaaagcaccccctgcagggtgggagagaaataccgaca

SEQ ID NO: 15387 - DNA, 120 bp, synthetic construct
  misc_feature 1..120: note = Artificially Synthesized Probe
  source 1..120: mol_type = other DNA
gaaaaagggggctgtgaggaactcatacacctgagtcctcgtcctaagaagtcgcagttgttgggtgggccatggccacgaagactctgcgggaacactgcctggtcacacagactctgc

SEQ ID NO: 15388 - DNA, 120 bp, synthetic construct
  misc_feature 1..120: note = Artificially Synthesized Probe
  source 1..120: mol_type = other DNA
agacacaaagatggtcattcacagcatcaccaaaatcgatccacgaggctttgagaaaatgcatctctaaaaaaagcacatttggtgggtccaacaagcctcacttattcacggtcctga

SEQ ID NO: 15389 - DNA, 120 bp, synthetic construct
  misc_feature 1..120: note = Artificially Synthesized Probe
  source 1..120: mol_type = other DNA
gtagaaggagaggctatttttaaaacaattcatgttctctgctttcatgtgaaggaaataaaacaaggcactcatgaatgagctcttcaagcacggactttcctggagctcacaggaagg

SEQ ID NO: 15390 - DNA, 120 bp, synthetic construct
  misc_feature 1..120: note = Artificially Synthesized Probe
  source 1..120: mol_type = other DNA
aggacttctgaaggttgtgcctgactcacgtctccattctcgacccattaaagggggagcggagatcgtgcttcccaagggaccctgaggccttctctctaggtctgagaagtgggaagt

SEQ ID NO: 15391 - DNA, 120 bp, synthetic construct
  misc_feature 1..120: note = Artificially Synthesized Probe
  source 1..120: mol_type = other DNA
ggaaacgactccaatcgactggaaaatagagaggaaattcctttggaatttaggggaaagaataagacttttggctggggtgtcagatattcgcttataggagcaatttcttctcagctg

SEQ ID NO: 15392 - DNA, 120 bp, synthetic construct
  misc_feature 1..120: note = Artificially Synthesized Probe
  source 1..120: mol_type = other DNA
taggtacagatataaaacagaagacttcggggcaaaaggaagtcttagaaaaatataaaggaatagaaagaaacagctgttccccggcacagaaaattcctgctaagaacacacaacggg

SEQ ID NO: 15393 - DNA, 120 bp, synthetic construct
  misc_feature 1..120: note = Artificially Synthesized Probe
  source 1..120: mol_type = other DNA
gtgggtggtgcagacgagcagtgaatgaagatgaagctggagtggcagcttggcccagatcctggaggctttgcgtttgcactgaaatgtgtggacttgacgccagaagcaactcctgcg

SEQ ID NO: 15394 - DNA, 120 bp, synthetic construct
  misc_feature 1..120: note = Artificially Synthesized Probe
  source 1..120: mol_type = other DNA
cccggaaacccagactctcaccaatgcagatggtctcctagctatttttaatgagggaagatttgttggaagcacaaaattgaattaagtcacattcagaaattctccttcaaagaggaa

SEQ ID NO: 15395 - DNA, 120 bp, synthetic construct
  misc_feature 1..120: note = Artificially Synthesized Probe
  source 1..120: mol_type = other DNA
ctgaattgcgctggtttacgtgacatttaggctacccccacctgaaacacatttatttgcagacgcttgcttacaaatagcagcctgaaactgttcattttctcttgtaattcacaaata

SEQ ID NO: 15396 - DNA, 120 bp, synthetic construct
  misc_feature 1..120: note = Artificially Synthesized Probe
  source 1..120: mol_type = other DNA
ttctcgtgtccttaaaaataacctgctttttcccatactaaacaaaaataaactgacttttaaaaaacctgtgggggaaaggacggtttcctcaacaggtggttctgggagaactggata

SEQ ID NO: 15397 - DNA, 120 bp, synthetic construct
  misc_feature 1..120: note = Artificially Synthesized Probe
  source 1..120: mol_type = other DNA
tggctggacgcacacttggccagaacatacatgaactcagagctaaatgtgagacctaaaacatacagggcaagacctttatgacattggatttggccacgatttcctggatataacacc

SEQ ID NO: 15398 - DNA, 120 bp, synthetic construct
  misc_feature 1..120: note = Artificially Synthesized Probe
  source 1..120: mol_type = other DNA
caacgttgtgaacacatacaatgctaagaggcgtgcacctaaaaacggttaggacgatccattttctgttttgtgtcgtttacgtaactatgagattctgtattactgagaaaaaggctt

SEQ ID NO: 15399 - DNA, 120 bp, synthetic construct
  misc_feature 1..120: note = Artificially Synthesized Probe
  source 1..120: mol_type = other DNA
gccacacttgtctgcatcccggggcccttggctcagtggacaaaacagctttaaagttcaaggataactcaaattggattttagaaatacaaagtcttaaaacatttgtaccagactaag

SEQ ID NO: 15400 - DNA, 120 bp, synthetic construct
  misc_feature 1..120: note = Artificially Synthesized Probe
  source 1..120: mol_type = other DNA
tctgcatctgcccatctttgaatcttcatgtatttttaaaaaagaatgaatttaaaactctaatccacttggcccagatttgttttgggaggcaggtgggaacccatgagctgtcttgag

SEQ ID NO: 15401 - DNA, 120 bp, synthetic construct
  misc_feature 1..120: note = Artificially Synthesized Probe
  source 1..120: mol_type = other DNA
gaatcagagttgctctttaactgtgtctggctttaaggctcgtcttctacgccagacaaagtaaacttcctggaactgttttttgaaatgtggctactgtcctttcctcttctagaaaaa

SEQ ID NO: 15402 - DNA, 120 bp, synthetic construct
  misc_feature 1..120: note = Artificially Synthesized Probe
  source 1..120: mol_type = other DNA
agttgcatcgtgtgacaactgcctgctcataatgtgaactctgcggtgactagaaccgtatctggcatatggcagacattcagtacaaaacccatggacagaacaaataagtaagtccag

SEQ ID NO: 15403 - DNA, 120 bp, synthetic construct
  misc_feature 1..120: note = Artificially Synthesized Probe
  source 1..120: mol_type = other DNA
agcacagttaccctttcccgtcccacgcgcccagcacagttaccctttcccgtcccacacgcccagcacagttacccttttccaccccacgcgcccagcacagttacccttttccgcccc

SEQ ID NO: 15404 - DNA, 120 bp, synthetic construct
  misc_feature 1..120: note = Artificially Synthesized Probe
  source 1..120: mol_type = other DNA
tttcccgtcccacgcgcccagcacagttactcttttccgtcccatgcgcccagcacagttactcttttccgtcccatgcgcccagcacagttacccttccaccccatgcgcccagcacag

SEQ ID NO: 15405 - DNA, 120 bp, synthetic construct
  misc_feature 1..120: note = Artificially Synthesized Probe
  source 1..120: mol_type = other DNA
cagtcataggcttccagggtaggtactgtcaatgtttgttccaggaaaacccaattcagcttttcaaacaagatttatacacaccttcaggagcaagcatgcttgaatataatgagtcta

SEQ ID NO: 15406 - DNA, 120 bp, synthetic construct
  misc_feature 1..120: note = Artificially Synthesized Probe
  source 1..120: mol_type = other DNA
tgctgagctgctttagaaaatgagggtttgaagctgccctttggaaatgattaggttgttcaaaagtaattgagctttctcaaaaggcagctggggctaaaataaatggaagtctactta

SEQ ID NO: 15407 - DNA, 120 bp, synthetic construct
  misc_feature 1..120: note = Artificially Synthesized Probe
  source 1..120: mol_type = other DNA
tctgggcgagattcagggtttaactctggccttgcagttttagaggttgttataggctgaattgtgaccccccaaatccatccattgaagctctgatccccatgtgcctatatttggaga

SEQ ID NO: 15408 - DNA, 120 bp, synthetic construct
  misc_feature 1..120: note = Artificially Synthesized Probe
  source 1..120: mol_type = other DNA
ctgtatttatttcacacattcatttaaaaagttaatttgacatgtatttcatgaagcttcggtacacacgccacgttgctccccgattttatcttcatgcgtcttccttcaccagacggc

SEQ ID NO: 15409 - DNA, 120 bp, synthetic construct
  misc_feature 1..120: note = Artificially Synthesized Probe
  source 1..120: mol_type = other DNA
acttttaaacactattaaggcctctcggtattatacttcttttgaaacatctattagaataaggatctcacaggcagctgagaatcaacaggaatgtggccgtacacaataagctccacg

SEQ ID NO: 15410 - DNA, 120 bp, synthetic construct
  misc_feature 1..120: note = Artificially Synthesized Probe
  source 1..120: mol_type = other DNA
tcctgcaattcagatagtatctttattccaaggagctttgagtggtttctgcatcagttttcatttcttgttcccaaatctctgtgacatagggagacaggcctttctctaaaacccact

SEQ ID NO: 15411 - DNA, 120 bp, synthetic construct
  misc_feature 1..120: note = Artificially Synthesized Probe
  source 1..120: mol_type = other DNA
cagatttgttattatgtatacattgttaaatttaacactttccttggtggatcaggttcctgtagggcacagaacactaacctatcaatgacccagactcagaaaagccaccagagaacc

SEQ ID NO: 15412 - DNA, 120 bp, synthetic construct
  misc_feature 1..120: note = Artificially Synthesized Probe
  source 1..120: mol_type = other DNA
ataatgactactgattgcaacatatctttagtaagtaaaatgaaaggtgtgtcttactactgctggctgtttccggccaacaagcccaagactgagaattggtgaaggaaggcattgcct

SEQ ID NO: 15413 - DNA, 120 bp, synthetic construct
  misc_feature 1..120: note = Artificially Synthesized Probe
  source 1..120: mol_type = other DNA
tttaaacaggtgactggggtaaccagctacttaactgtatttagacggggcagtctccagagatttttgaaaaggaagaaggaagtaaattcagttacttggatacaagtaggacagaaa

SEQ ID NO: 15414 - DNA, 120 bp, synthetic construct
  misc_feature 1..120: note = Artificially Synthesized Probe
  source 1..120: mol_type = other DNA
caatgctctgtgctaaggctgtgcttgtgttatctgtggtgaagagaaccttgtaatgaatggaccactcactgagccaggctgtgcttgtgttatctgtggtggagagaaccttgtaat

SEQ ID NO: 15415 - DNA, 120 bp, synthetic construct
  misc_feature 1..120: note = Artificially Synthesized Probe
  source 1..120: mol_type = other DNA
ttaagatatgagattgggtctgcttttgaattttagaaagtagtaagagtctgctgttttcatgtttaaatgtgtgaggcacttcagtaccatcagaacgtgtgcagaagacggaggatg

SEQ ID NO: 15416 - DNA, 120 bp, synthetic construct
  misc_feature 1..120: note = Artificially Synthesized Probe
  source 1..120: mol_type = other DNA
tctgtgtatgtctcagcccaggtcatcacagatccagccagtgatctgctggatgagaagcttctgcacggactcgtccaccctctcactgtaaacattgctccagacgaacgcaaggct

SEQ ID NO: 15417 - DNA, 120 bp, synthetic construct
  misc_feature 1..120: note = Artificially Synthesized Probe
  source 1..120: mol_type = other DNA
tccctacactccacagtccacatggggccaagagcatggagatcatgggcctcccctagaccctacagtcctcacggggccctgagcaaggagatcatgggattccctacaacccacagt

SEQ ID NO: 15418 - DNA, 120 bp, synthetic construct
  misc_feature 1..120: note = Artificially Synthesized Probe
  source 1..120: mol_type = other DNA
gcgtctctgagctgtggggtgtccgggtgattctgaggcctgcgtccctgagctgtggggtgtccgggtgattctgaggcctgcgtccctgagctgtgggctgttgaggtgattctgagg

SEQ ID NO: 15419 - DNA, 120 bp, synthetic construct
  misc_feature 1..120: note = Artificially Synthesized Probe
  source 1..120: mol_type = other DNA
ggggtgtctgggggattctgaggcctgcatctctgagcagaggggtgtccgggcaattctgaggcctgcgtccctgagctgtgagctgcctgggtgattttgaggcctgcgtccctgagc

SEQ ID NO: 15420 - DNA, 120 bp, synthetic construct
  misc_feature 1..120: note = Artificially Synthesized Probe
  source 1..120: mol_type = other DNA
ttctgaggcctgcgtccctgaggtgcggggtgtctgggtgattctgaggcctgcgtccctgagctacaggctgttgaggtgattctgtggcctgtgtccctgagctgtggggtgtccggg

SEQ ID NO: 15421 - DNA, 120 bp, synthetic construct
  misc_feature 1..120: note = Artificially Synthesized Probe
  source 1..120: mol_type = other DNA
atgctcgatttagagaaaaaaggatgagttttggaagcagccctaccaatgttctttctcttgtttcttgttgtgtggttttggccaaacgatcaaaacaatcaaatctctgggtcttgg

SEQ ID NO: 15422 - DNA, 120 bp, synthetic construct
  misc_feature 1..120: note = Artificially Synthesized Probe
  source 1..120: mol_type = other DNA
ggtggaaagaaaaaaatccatgcggcgaacgccctggctgtggcagcgggtttatttttgaatgaaggcaccatgcatttaaattaaatgtcagatgtaatttagcacccaggcatcaag

SEQ ID NO: 15423 - DNA, 120 bp, synthetic construct
  misc_feature 1..120: note = Artificially Synthesized Probe
  source 1..120: mol_type = other DNA
cttttgtgctggcctcagggtcaacgcgcactctctcttctgcttccctgtttccagctggcttcttcacccgaaagcccatcctcgtcttatcaaatctgatcctctccccagccacaa

SEQ ID NO: 15424 - DNA, 120 bp, synthetic construct
  misc_feature 1..120: note = Artificially Synthesized Probe
  source 1..120: mol_type = other DNA
agacccttcatcgggaaagttgagaacttacaataggaagtgcagtttggtgcaagcttttcccttcctgccagcctcctgtgctatcagaacacagccccagacacaaagcccattaca

SEQ ID NO: 15425 - DNA, 120 bp, synthetic construct
  misc_feature 1..120: note = Artificially Synthesized Probe
  source 1..120: mol_type = other DNA
cttctccagcatgggcctgtctagcaaagcagtggcagtgctctgagctgggggcaggcggacatgccccgacactcggcttccaccaaacagggtggtccaagcactgagttctagaaa

SEQ ID NO: 15426 - DNA, 120 bp, synthetic construct
  misc_feature 1..120: note = Artificially Synthesized Probe
  source 1..120: mol_type = other DNA
ttgttattttaaaaattacaatttagtcctgggtacgaatgggagtatttcagcctttcttgagaagttcatcgaacttctagggcaggttcatgtttacagctgtgtcttcacgggggg

SEQ ID NO: 15427 - DNA, 120 bp, synthetic construct
  misc_feature 1..120: note = Artificially Synthesized Probe
  source 1..120: mol_type = other DNA
gggctggcattgtgtaggtaaatgctgcagtggtttacttggcatctgactaccctgacattttatgggtaggatttgtaccactgcacaaaaatagttttaaccaaaaatatacttgtg

SEQ ID NO: 15428 - DNA, 120 bp, synthetic construct
  misc_feature 1..120: note = Artificially Synthesized Probe
  source 1..120: mol_type = other DNA
agtggatggactatggtatgctatgcggctcacaagataaaagtttttttttaaaacctcccccaccccctaaagagatcattattgttacgacatagaaaaacctagccttgcagctga

SEQ ID NO: 15429 - DNA, 120 bp, synthetic construct
  misc_feature 1..120: note = Artificially Synthesized Probe
  source 1..120: mol_type = other DNA
gaagaaaagggccggtgtcgtaattgactggacaggtactaatgccgaccacatccaaatatggatgatgacgagcgtggtgttgcccacagtccaggcctgtccaggcgccattccccg

SEQ ID NO: 15430 - DNA, 120 bp, synthetic construct
  misc_feature 1..120: note = Artificially Synthesized Probe
  source 1..120: mol_type = other DNA
aggccattgctcaactggaggagtgacatcgctccttaactttcatacctaggtttatgtcatactttccaagttacacaagtcacatcaaataattccgacgtttcaagaaaaaggcaa

SEQ ID NO: 15431 - DNA, 120 bp, synthetic construct
  misc_feature 1..120: note = Artificially Synthesized Probe
  source 1..120: mol_type = other DNA
ctacatgcacgaccccaaacttcctaaaggctcatgacgcaaataaaaccacaagtcctgccctcgagagatcattatctgggcccagagcagctgctccacagaagtgcgaaggagaat

SEQ ID NO: 15432 - DNA, 120 bp, synthetic construct
  misc_feature 1..120: note = Artificially Synthesized Probe
  source 1..120: mol_type = other DNA
aagagcccacattgccaagtcaatcctaagccaaaagaacaaagctggaggcatcacactacctgacttcaaactatactacaaggctacagtaaccaaaacagcatggtactggtacca

SEQ ID NO: 15433 - DNA, 120 bp, synthetic construct
  misc_feature 1..120: note = Artificially Synthesized Probe
  source 1..120: mol_type = other DNA
tgctataaagacacatgcacacgtatgtttattgcagcattattcacgatagcaaagatttggaaccaacccaaatgtccaacaataatagactggattaagaaaatgtggcacatatac

SEQ ID NO: 15434 - DNA, 120 bp, synthetic construct
  misc_feature 1..120: note = Artificially Synthesized Probe
  source 1..120: mol_type = other DNA
cagtccaactcaaatttccagccacatacaccatgacctctggcgtgatgtgccctcctcatttttctctcccttcccttttccaacaaaagctcagccctggtgatgacagcacagact

SEQ ID NO: 15435 - DNA, 120 bp, synthetic construct
  misc_feature 1..120: note = Artificially Synthesized Probe
  source 1..120: mol_type = other DNA
gccacccaagcgtccaccaatggaagaaaagataaacatcatgtggtccacccacacatgggaatattactcagcactgaaaaggcagagattttggatgcaggctacaacatggatgaa

SEQ ID NO: 15436 - DNA, 120 bp, synthetic construct
  misc_feature 1..120: note = Artificially Synthesized Probe
  source 1..120: mol_type = other DNA
atcctttcacccatccatcatccactcttcttccatctatccaccatccctcatccgtacaacccatccatcatccattcttcctccatctgtccacccttcacccatccatccatcctt

SEQ ID NO: 15437 - DNA, 120 bp, synthetic construct
  misc_feature 1..120: note = Artificially Synthesized Probe
  source 1..120: mol_type = other DNA
catccattgatccacccataaacaaacactttcactgaagagacacgggaggaatcagaaaaagctattctcagagcttctatcctagagaattgctggcacttgcagagtgtgtttgga

SEQ ID NO: 15438 - DNA, 120 bp, synthetic construct
  misc_feature 1..120: note = Artificially Synthesized Probe
  source 1..120: mol_type = other DNA
ttggttttacaatgagactgactgccatgttatctgtgttcttaggataacccaatctttctctctccttctaccttgataatgatgcctgacactttgtacggtgtttgcctttgcgta

SEQ ID NO: 15439 - DNA, 120 bp, synthetic construct
  misc_feature 1..120: note = Artificially Synthesized Probe
  source 1..120: mol_type = other DNA
gccactgtgagtcacacactctgcagtgtggcgactaatattgatcttccaaacggtaaaaacaagaacaaactggaaagacaaactctacttcagattgcaactacttaagcatctttg

SEQ ID NO: 15440 - DNA, 120 bp, synthetic construct
  misc_feature 1..120: note = Artificially Synthesized Probe
  source 1..120: mol_type = other DNA
tgtcaacacataattactgtcaccgctgtgtgctgacgctggcatcaggttgcacgtgccagtcagcataaaaatatggccgtaatgttggcataatttttcatgatcatcttcattaac

SEQ ID NO: 15441 - DNA, 120 bp, synthetic construct
  misc_feature 1..120: note = Artificially Synthesized Probe
  source 1..120: mol_type = other DNA
gtcagtataacaactacccttgcttaatgataacgctaattaaatattcttagcagcatcatgtggagaaactggattttcaattaagcactttctgaggtgagggtctcagcaggtccc

SEQ ID NO: 15442 - DNA, 120 bp, synthetic construct
  misc_feature 1..120: note = Artificially Synthesized Probe
  source 1..120: mol_type = other DNA
attatagagctgagagcaaaacagggctctccaatttgggataatttgctatgcagatatagattcctggggtacctgcccccccattccctgtctccatctctgatataaaactaatcc

SEQ ID NO: 15443 - DNA, 120 bp, synthetic construct
  misc_feature 1..120: note = Artificially Synthesized Probe
  source 1..120: mol_type = other DNA
acacacatagacacaaacacagtttgtgagagccctggcccgcagaccatggtggctgcagtgtgagcccagcagagtcctgctcagtgctgcccagagacctggggcaggaagtggaaa

SEQ ID NO: 15444 - DNA, 120 bp, synthetic construct
  misc_feature 1..120: note = Artificially Synthesized Probe
  source 1..120: mol_type = other DNA
attagaagcacaaaccaagcacagccccttctgtgagtgggagtcatgcctagaaaacaaacaggagagaggcggctcccaacctccaggagatgaaaacctgttcttacaatgcgtggg

SEQ ID NO: 15445 - DNA, 120 bp, synthetic construct
  misc_feature 1..120: note = Artificially Synthesized Probe
  source 1..120: mol_type = other DNA
atcatagctattcttaaattaaaaaagaaatgttccaggagtcctcacagagatgcgctgaatagaatatgcaccatcctccatgatgtctttatacaacagggcaagggaatgcctagg

SEQ ID NO: 15446 - DNA, 120 bp, synthetic construct
  misc_feature 1..120: note = Artificially Synthesized Probe
  source 1..120: mol_type = other DNA
catggtctcttcttctgctacttacatgccagagtctctgaaagttcttgatgagaacagtgacacaatgaaagcaaagtcagggaagatgagaaggtggccttgcatcctaactgctgt

SEQ ID NO: 15447 - DNA, 120 bp, synthetic construct
  misc_feature 1..120: note = Artificially Synthesized Probe
  source 1..120: mol_type = other DNA
ctccctcctcttcctcttcacctcctccctgtcctccttctccctctcctcttcctccctctcctcctcctccatctcctcctcctccttctcctcttcctccctcctctctcttcttcc

SEQ ID NO: 15448 - DNA, 120 bp, synthetic construct
  misc_feature 1..120: note = Artificially Synthesized Probe
  source 1..120: mol_type = other DNA
atgcttgcatttttttcacattcaaacagatccacaaattcttgttagatacacaagaaacacatacaagtggaattggaaacacgcccatgtcggtcgctgagttacagaaggggccat

SEQ ID NO: 15449 - DNA, 120 bp, synthetic construct
  misc_feature 1..120: note = Artificially Synthesized Probe
  source 1..120: mol_type = other DNA
catgtacacgtgaatacaggtatcgaatgcctatgtaaacatgtacatgtgaatacaggtgttggatgcccacatacatgtgcattcaggtgttgaatgtccacataaacatgtacatgt

SEQ ID NO: 15450 - DNA, 120 bp, synthetic construct
  misc_feature 1..120: note = Artificially Synthesized Probe
  source 1..120: mol_type = other DNA
tcttgggaccctcaagcaaatgccacctagaagcaaaacctgacttaggtcaccaggtgcaggccttacatatagaggtagtagcgctacattgaggatgctggacacggcttatctcct

SEQ ID NO: 15451 - DNA, 120 bp, synthetic construct
  misc_feature 1..120: note = Artificially Synthesized Probe
  source 1..120: mol_type = other DNA
gatggcttggctagttgaattctgattcgatactttataattagggctcactagtgacgagcaaaagcccgtgaaactgtctttgtttatgatcccaccacgtatctctactattaaaga

SEQ ID NO: 15452 - DNA, 120 bp, synthetic construct
  misc_feature 1..120: note = Artificially Synthesized Probe
  source 1..120: mol_type = other DNA
tgatttgatatattacacatgggctagtgttattatcatctcctcaaagtggagggtctgctacattaccgcctggacatgtccggaccaaaacatattttcagaataacacacagttaa

SEQ ID NO: 15453 - DNA, 120 bp, synthetic construct
  misc_feature 1..120: note = Artificially Synthesized Probe
  source 1..120: mol_type = other DNA
gcatgggaagctgatcagggtcaacctatgaaatcacacatcccagttatgttgtctataatcttaacagaaacagcagaaataacctgagagagaggagccatctaaaaactcatacat

SEQ ID NO: 15454 - DNA, 120 bp, synthetic construct
  misc_feature 1..120: note = Artificially Synthesized Probe
  source 1..120: mol_type = other DNA
ttaatctagtatgaagtcatcttactaagaactccactaattctgagcatgcaggggccagcggagtccatactaaagttgaccgatcctggctataaaaagttctgcaaagaaaagtat

SEQ ID NO: 15455 - DNA, 120 bp, synthetic construct
  misc_feature 1..120: note = Artificially Synthesized Probe
  source 1..120: mol_type = other DNA
taaattcaggatgagtggctgaaacatttcccacatggttggagtttaagtctctcaaggtagagacactcatggtgtaagtgcagaggaggagaaggaagctgggatgggtgtgtttag

SEQ ID NO: 15456 - DNA, 120 bp, synthetic construct
  misc_feature 1..120: note = Artificially Synthesized Probe
  source 1..120: mol_type = other DNA
gtctcttcagtttccatttttccacttgtaacggctgttacagccgctgtttcatcgcgtcgtcataggagttgaacaaagctgtgtgtgtgtttccagaatgttggcacagcggcgaga

SEQ ID NO: 15457 - DNA, 120 bp, synthetic construct
  misc_feature 1..120: note = Artificially Synthesized Probe
  source 1..120: mol_type = other DNA
ccccacaggtaccgttcacgtatcctggctttagtcttgctggttttctcaccagcatttagtgctagttcagtatttatttaaatcaacatgttttgaaaaactgcctaagtatctgaa

SEQ ID NO: 15458 - DNA, 120 bp, synthetic construct
  misc_feature 1..120: note = Artificially Synthesized Probe
  source 1..120: mol_type = other DNA
gggatcaggtgagcaagggggctcatccgtggcctccaggccccaccttgatggaaactgcgacaggagggggtctggcctctgctgggagtgacatctgaagatgccatagaaagtctg

SEQ ID NO: 15459 - DNA, 120 bp, synthetic construct
  misc_feature 1..120: note = Artificially Synthesized Probe
  source 1..120: mol_type = other DNA
aaaaaagaaagtacaggaagctttcagcctccttggcaagacactgctgtctggagaccctgggagaagtgtgccatcaaccaacgtgaccagaacccatcctggtttagggaggagctc

SEQ ID NO: 15460 - DNA, 120 bp, synthetic construct
  misc_feature 1..120: note = Artificially Synthesized Probe
  source 1..120: mol_type = other DNA
tttcccaagctgtcaccgtaacagtcactacaggacagtcagaatggtaggatttgagctaaattgctagaattagagagcgtcacaaaaattctaggaggtcagcaactttaggtaatg

SEQ ID NO: 15461 - DNA, 120 bp, synthetic construct
  misc_feature 1..120: note = Artificially Synthesized Probe
  source 1..120: mol_type = other DNA
aagggcctggagtgtatgacgaagggggcatttcaaacccgtgggtacagaaaaaatccacccgataaacacaagtgggaaattgtgtaagaaaatgaagtgagattccaatattaaaaa

SEQ ID NO: 15462 - DNA, 120 bp, synthetic construct
  misc_feature 1..120: note = Artificially Synthesized Probe
  source 1..120: mol_type = other DNA
ccacagtttcgtatttgttaagtattttcagcaaatcatggaacacgatgcaacacccgattccatgtttgaaaacagaacagaacaaaattcaacaagaaataagcgcccgcgtccaca

SEQ ID NO: 15463 - DNA, 120 bp, synthetic construct
  misc_feature 1..120: note = Artificially Synthesized Probe
  source 1..120: mol_type = other DNA
tccccaaaatcctgaagatatgtacggaaaatatgtgcggcttttcctgccgaccaggcctccacgaagtgcttcgataaaataaaaccagcctgtcatggaggagtcccctttgcccgg

SEQ ID NO: 15464 - DNA, 120 bp, synthetic construct
  misc_feature 1..120: note = Artificially Synthesized Probe
  source 1..120: mol_type = other DNA
tgcagagcaaacacagtttctgctgaaaagaatgtggcagatgaacaaaaattgtaaggttttctaaaggtgtttcattacgtgagatggcagaggttggtctccatgtcacagatgacc

SEQ ID NO: 15465 - DNA, 120 bp, synthetic construct
  misc_feature 1..120: note = Artificially Synthesized Probe
  source 1..120: mol_type = other DNA
ttctttgaagcttcactgctttcggataagtatgaaaataggctctccctctctgagtcaaaggaggcaattatacaataggactatcaccctcactgtcactctccgctttgtttaaat

SEQ ID NO: 15466 - DNA, 120 bp, synthetic construct
  misc_feature 1..120: note = Artificially Synthesized Probe
  source 1..120: mol_type = other DNA
aagtccttccagccactttctgtgcttgctctgacatttgcccaaactaacgttgctgaggttgacctcatgtttattcagggaacttgattcattttcaagctattgataacaacaaag

SEQ ID NO: 15467 - DNA, 120 bp, synthetic construct
  misc_feature 1..120: note = Artificially Synthesized Probe
  source 1..120: mol_type = other DNA
ccttgaggttattttgtctctgcaagtattgatgcgaggacttgtggcgcttttctttcccggtgaactttcccaactgctgatgttacgtgcactaagcacatgattttcctattcatt

SEQ ID NO: 15468 - DNA, 120 bp, synthetic construct
  misc_feature 1..120: note = Artificially Synthesized Probe
  source 1..120: mol_type = other DNA
tgtcatcccggatttatcactataaagcaaaaccaaaaacggacctcaggtttctctgcaatatgtaggatccgtgaaacctccaacgtgaaatgagaagtaggtagcctcgaatctgca

SEQ ID NO: 15469 - DNA, 120 bp, synthetic construct
  misc_feature 1..120: note = Artificially Synthesized Probe
  source 1..120: mol_type = other DNA
aaaaatagaaaagaattatttctctaccttttggaatgtgaaattgcctctgagacgaacctgtgatttgtcacctctgggagatgacaaggatgcctctgtgacctttgtccccatgct

SEQ ID NO: 15470 - DNA, 120 bp, synthetic construct
  misc_feature 1..120: note = Artificially Synthesized Probe
  source 1..120: mol_type = other DNA
cttcaataccacccctgtgactagggtgctgccccctcctcctttcttctccaacttctagatttggcccctaaatgtgactgaataacgtggcaagcccttcagacatgacaaccccat

SEQ ID NO: 15471 - DNA, 120 bp, synthetic construct
  misc_feature 1..120: note = Artificially Synthesized Probe
  source 1..120: mol_type = other DNA
cactcctcctcctgggaacaccctcgtacggacgttctgtggaaatagatgttgtgttttcacctcttgtaccttgttcacttaaaatttaatcaacatcttattagagaaagaaagagg

SEQ ID NO: 15472 - DNA, 120 bp, synthetic construct
  misc_feature 1..120: note = Artificially Synthesized Probe
  source 1..120: mol_type = other DNA
gctgcatggatttttttaatgtcaaattccatatgaaacagcacaaatccccatttctgccccactgggttgagaaatctgtgggtgatagagtataggtaaaaacatcttagcctgcat

SEQ ID NO: 15473 - DNA, 120 bp, synthetic construct
  misc_feature 1..120: note = Artificially Synthesized Probe
  source 1..120: mol_type = other DNA
ttcaattgtcatagattccacgcttcagcgacgtcgtgcagcctctgtcctgggcctggcttttgtttcacttcacgtcatgtcatgcaggtttatccctgttgttgcagatggcaggtt

SEQ ID NO: 15474 - DNA, 120 bp, synthetic construct
  misc_feature 1..120: note = Artificially Synthesized Probe
  source 1..120: mol_type = other DNA
gccacctatacattttaaatattaactccttatccgttatgtggtatgcaaatatttcctccccggtgaccagtaggggatgcagagaccacacacccaccactcaccctacctttcgtg

SEQ ID NO: 15475 - DNA, 120 bp, synthetic construct
  misc_feature 1..120: note = Artificially Synthesized Probe
  source 1..120: mol_type = other DNA
catacagctcttaagaatgcttattagctcttaatatcagagaggattaacctcctacttcatgaaacaatttgctaaggctgggaatttttcttccatgtctgtgaggactgccttccc

SEQ ID NO: 15476 - DNA, 120 bp, synthetic construct
  misc_feature 1..120: note = Artificially Synthesized Probe
  source 1..120: mol_type = other DNA
aatagcaaattccagtaagcattaaggaaactccttctctgggagtctctgttcctctcccccacagtgcttcttatactgtgcatttgaaaggtgttttaaaaggacttgttgtttctt

SEQ ID NO: 15477 - DNA, 120 bp, synthetic construct
  misc_feature 1..120: note = Artificially Synthesized Probe
  source 1..120: mol_type = other DNA
tagcctctttgtgaagaggtgtgggaagatgtgcacacagtagagagcagactatcacaagccacaaaaatgtgtgtgtgtgtaatatatataaaggtcgaccattccttatctgaagtg

SEQ ID NO: 15478 - DNA, 120 bp, synthetic construct
  misc_feature 1..120: note = Artificially Synthesized Probe
  source 1..120: mol_type = other DNA
gagaacacatatgttcccacaacaatggggtttgtcagcttgcaggtgcccagccctttccgtgccctcttgagatgggttggggcagacagagtaggaatgcttcctggctgattacaa

SEQ ID NO: 15479 - DNA, 120 bp, synthetic construct
  misc_feature 1..120: note = Artificially Synthesized Probe
  source 1..120: mol_type = other DNA
ttagaacattaagcactgtgagctgagatcattggctagtgagcagcagagctgaggtccaactccaagtgtgtttgcccccaaactcacactctgtaaaagtccatgggcatcccagat

SEQ ID NO: 15480 - DNA, 120 bp, synthetic construct
  misc_feature 1..120: note = Artificially Synthesized Probe
  source 1..120: mol_type = other DNA
acgagaaaaagcaaaatagtacatcaaaaacatgaattttgtgggtactgttgcttaggataagtaagaaggtttcgaaagctgagtcagtccaaagaggaacgtgttgcgacaagccag

SEQ ID NO: 15481 - DNA, 120 bp, synthetic construct
  misc_feature 1..120: note = Artificially Synthesized Probe
  source 1..120: mol_type = other DNA
agccatgtgagggccacgtggagaacactgcagttccaccttcatcagataaagccaaccgttgttgtttaagcaaaggctgcggacagtgagcacagaacttcacaacacatcatggtc

SEQ ID NO: 15482 - DNA, 120 bp, synthetic construct
  misc_feature 1..120: note = Artificially Synthesized Probe
  source 1..120: mol_type = other DNA
atatatgcacacacatgtatgttttagtatcaaaatgacttcaccccaaatctccacgtgaagtagatgcgtctcctctccatcgtggctgttggcacagtgctgtgtacctgagtgtgt

SEQ ID NO: 15483 - DNA, 120 bp, synthetic construct
  misc_feature 1..120: note = Artificially Synthesized Probe
  source 1..120: mol_type = other DNA
gtcctgagttccagggacttctttcatcaagaggaaaaagaaaaactctttcaacactccctgtgcatagggtgctaatgagctgcaaattgaaattatttggagtttttcttaatggtg

SEQ ID NO: 15484 - DNA, 120 bp, synthetic construct
  misc_feature 1..120: note = Artificially Synthesized Probe
  source 1..120: mol_type = other DNA
ttcgatacgccattcaggtccccaaaacagcatgtgcagctctcgttaaatggaaaaggccctaatgtcatgggaaagtctaacaatttgttaaactttgttagtgtacaaaatgtggtg

SEQ ID NO: 15485 - DNA, 120 bp, synthetic construct
  misc_feature 1..120: note = Artificially Synthesized Probe
  source 1..120: mol_type = other DNA
gcgaggaagcccctgctgacgccatttacaactgcaaacctcccatttcctcccaggtccttaaagctccacatcataaaacggatgtgcgcgtgaaggaaacgtgggtgtccacagaga

SEQ ID NO: 15486 - DNA, 120 bp, synthetic construct
  misc_feature 1..120: note = Artificially Synthesized Probe
  source 1..120: mol_type = other DNA
agaagcgcacgagtcccagatggagggaagcaaatctcacccaactttaaatatttgtttctccaaagctacgtggtcacccgtgcatggtgacggtgatgtttgatttcaggtgacttt

SEQ ID NO: 15487 - DNA, 120 bp, synthetic construct
  misc_feature 1..120: note = Artificially Synthesized Probe
  source 1..120: mol_type = other DNA
agcagagccacactccacctcaggacgctgcactggatatgagtgagaaacaaactttcttgggttaagttgttaagatttcggggatgtgtttaaagtccctagtgttctttttactgt

SEQ ID NO: 15488 - DNA, 120 bp, synthetic construct
  misc_feature 1..120: note = Artificially Synthesized Probe
  source 1..120: mol_type = other DNA
cgtcacaccagcagctctgatttaaacccaaatcctttcacataaaacccttcacttgtgctcttaggagagggttttgcacacgtctggctctgcttcccttctgctgcattttgctgg

SEQ ID NO: 15489 - DNA, 120 bp, synthetic construct
  misc_feature 1..120: note = Artificially Synthesized Probe
  source 1..120: mol_type = other DNA
tgtttgtgtggtgtgtgtagtgagatgtgtgtatgtatcatgtgtgatgtgtatgtatggtgtatatgtgtgttatgtgcatggtgtgtgcctgtttgtacatgtgtgatatatgtgttg

SEQ ID NO: 15490 - DNA, 120 bp, synthetic construct
  misc_feature 1..120: note = Artificially Synthesized Probe
  source 1..120: mol_type = other DNA
ggagtgtggtagaggacttgggttaataagtgagatttttaacaggctccgctcagctggctctgtcggctcgagtctgagcccatccgtcagcgtcaattaggaagcctcagctcagaa

SEQ ID NO: 15491 - DNA, 120 bp, synthetic construct
  misc_feature 1..120: note = Artificially Synthesized Probe
  source 1..120: mol_type = other DNA
cacccatgtcacacacagcagacccacacacgttcacacacacaacacagtcacatatgcactcaaacatacatgcacacagcagacccatatatatgcatattcaaacacacaacacat

SEQ ID NO: 15492 - DNA, 120 bp, synthetic construct
  misc_feature 1..120: note = Artificially Synthesized Probe
  source 1..120: mol_type = other DNA
gacaacaacaagaattcagttttagttatgagaggcctataagacctctgagtaaagacataactctaggatctggtcagagctataaattcagggtcaattcactccatggctgccatt

SEQ ID NO: 15493 - DNA, 120 bp, synthetic construct
  misc_feature 1..120: note = Artificially Synthesized Probe
  source 1..120: mol_type = other DNA
ctcatccacccatctatatgctatccatcatccatccacctatatattagccattatctatccataatacacttatccatccatccaatcatccgctatccattatctttccataataca

SEQ ID NO: 15494 - DNA, 120 bp, synthetic construct
  misc_feature 1..120: note = Artificially Synthesized Probe
  source 1..120: mol_type = other DNA
tatgagcagctgcttctgattacaatcagtgaatcactaatctgcagtctgctacaaaacagctggactccatctattattcattcttgatgtggagatatccagaatggagagactaga

SEQ ID NO: 15495 - DNA, 120 bp, synthetic construct
  misc_feature 1..120: note = Artificially Synthesized Probe
  source 1..120: mol_type = other DNA
acagacagagaaattagaagtgttttttcctttttcctccttactctagagatgagcagatggactggctcaaaagtggcctggacttcaagccctcatagagaactgatgcatctcaag

SEQ ID NO: 15496 - DNA, 120 bp, synthetic construct
  misc_feature 1..120: note = Artificially Synthesized Probe
  source 1..120: mol_type = other DNA
tcccccccagacttcttccacaggaaatgaaagtgcatttccagctcatttaagccacttttattttttattttctgtcacactcagtcacactaatcctgactaatacacacgtgtttg

SEQ ID NO: 15497 - DNA, 120 bp, synthetic construct
  misc_feature 1..120: note = Artificially Synthesized Probe
  source 1..120: mol_type = other DNA
actgtagagagcttctggatgtctgtggcttaggggtgcttgaaaagttacagatgctcttttgtacactgagtcaaggctttggagaagcgcaagtgctttattcaccactttcacttt

SEQ ID NO: 15498 - DNA, 120 bp, synthetic construct
  misc_feature 1..120: note = Artificially Synthesized Probe
  source 1..120: mol_type = other DNA
aacattgttttcaaactcatgaagcatcaaaggcccttgtggttttctggagtttccattctctagagcttttcgacaacaccctgcatttgggttttcatcttgagccctcatattatc

SEQ ID NO: 15499 - DNA, 120 bp, synthetic construct
  misc_feature 1..120: note = Artificially Synthesized Probe
  source 1..120: mol_type = other DNA
aagtacatttcgtaagttctggttttcctccttcctgacattaattttccccacatgcagatggagctgggaccagcctctgggttaaaattcagcatcacgtcttactcagaggaagat

SEQ ID NO: 15500 - DNA, 120 bp, synthetic construct
  misc_feature 1..120: note = Artificially Synthesized Probe
  source 1..120: mol_type = other DNA
aaatgtattttgaagagtccataataaactgtcttctacaatgaggagctatttaaagtcaaaaacaaaaaggcaagggtcccgtcttgctgcgagtgttggggcaggtgctatctgaac

SEQ ID NO: 15501 - DNA, 120 bp, synthetic construct
  misc_feature 1..120: note = Artificially Synthesized Probe
  source 1..120: mol_type = other DNA
agcccttaaaaagaggcacatggtaaaaggctgctggtaacaagatacccctaagttctcaaggtatcatcctgcaaatcaacgatgaattaccaagggaagaatttacctttacaatgg

SEQ ID NO: 15502 - DNA, 120 bp, synthetic construct
  misc_feature 1..120: note = Artificially Synthesized Probe
  source 1..120: mol_type = other DNA
catgactgagagctcaaagttggtgactctggaggaagagggtgcaggtgctcattttactcttctttcaacttgtttgacagtgtggagtttgcaaaataaaattctgggataaaggga

SEQ ID NO: 15503 - DNA, 120 bp, synthetic construct
  misc_feature 1..120: note = Artificially Synthesized Probe
  source 1..120: mol_type = other DNA
aggcggcactaatccatgttggtctgttcaggaaggttgcctttgtaaactggagacagaatacttttgtttttgttttaaacatacatttgggaaggtggaagtcaagaaatgtagcgg

SEQ ID NO: 15504 - DNA, 120 bp, synthetic construct
  misc_feature 1..120: note = Artificially Synthesized Probe
  source 1..120: mol_type = other DNA
accaaaccaatttactcaatggagaaaatagccaactggtcaaagaactgtgatgagatggcgggattctccaggaggtgcgtgatgtggctggtgcccatccatcctgtatgatgataa

SEQ ID NO: 15505 - DNA, 120 bp, synthetic construct
  misc_feature 1..120: note = Artificially Synthesized Probe
  source 1..120: mol_type = other DNA
ccgaaagaaggagctggcggatttctcctctgccaacgtccttcgaaactctctgtagtactttctatccgccaatcaatgagccagcagcattccctgtgatcaatccatcaattccac

SEQ ID NO: 15506 - DNA, 120 bp, synthetic construct
  misc_feature 1..120: note = Artificially Synthesized Probe
  source 1..120: mol_type = other DNA
gcagaaacacacaacacaacgggaaaaacagggtgtcataaaaacagaaccgttaccaagttatgaaggcaaagagctggaactgggagagatgagaaataactgtgaggaaattaaaac

SEQ ID NO: 15507 - DNA, 120 bp, synthetic construct
  misc_feature 1..120: note = Artificially Synthesized Probe
  source 1..120: mol_type = other DNA
ttaaaccaatgataagatgctatcgtttgccctaaataattgcatgcacttaaatgaagtcctaacccttggtgttaagtgagtggatgatggcaggtttattggacttgccagatgcac

SEQ ID NO: 15508 - DNA, 120 bp, synthetic construct
  misc_feature 1..120: note = Artificially Synthesized Probe
  source 1..120: mol_type = other DNA
tctgaggtttatggacggctaggacattattaatgcccatgggggatgtagtgtctgatggaagaggtggtggaggggggaggctgttttgatgcagagtcatccgagatggctcagaag

SEQ ID NO: 15509 - DNA, 120 bp, synthetic construct
  misc_feature 1..120: note = Artificially Synthesized Probe
  source 1..120: mol_type = other DNA
agtggatggcacgggagaaagctcctctccactatgcctactccagttcctctcatagtggatggtacgggagaaagctcctctccactatgcctactccagttcctctcatagtggatg

SEQ ID NO: 15510 - DNA, 120 bp, synthetic construct
  misc_feature 1..120: note = Artificially Synthesized Probe
  source 1..120: mol_type = other DNA
gttctttactgaattggtatctgactgtgtgagttgactgaagcatgtatagtcgtatgtgtatctgagtgtgtttgaatgtatgtgcatgactgtgagtgcatgttcatcactgtcagt

SEQ ID NO: 15511 - DNA, 120 bp, synthetic construct
  misc_feature 1..120: note = Artificially Synthesized Probe
  source 1..120: mol_type = other DNA
tgtgaccacatggagtgtgtgtgactgtgtaactatgtgtgattgtgtggccatatgtgactgtgtgaccgcgtgactgtgtgactgtgactgtgtggccgtcactgttaccacatgtga

SEQ ID NO: 15512 - DNA, 120 bp, synthetic construct
  misc_feature 1..120: note = Artificially Synthesized Probe
  source 1..120: mol_type = other DNA
ttatctaaagtgcagagccccacatggtgggaagctcaaatgctcactaacaggtcggccttccttttcctgatggtttttcaaacttaccgtattgtacgtggctttaagtgaaacttg

SEQ ID NO: 15513 - DNA, 120 bp, synthetic construct
  misc_feature 1..120: note = Artificially Synthesized Probe
  source 1..120: mol_type = other DNA
gattactgatctatctgctcttattttccctgggggaagggaggagatttaaagtgcaaatggtacaaaaggggctcaaatgccgctttgtgtgcagattcaggagactttttttttttt

SEQ ID NO: 15514 - DNA, 120 bp, synthetic construct
  misc_feature 1..120: note = Artificially Synthesized Probe
  source 1..120: mol_type = other DNA
gcctcctcccatctctaaagtcatgctctgtgaacatcgttatgacagtgaaaaccacgacttttcccctgtaaaattaaatgtcactcttgatagcataatatctgaaacatcatcttc

SEQ ID NO: 15515 - DNA, 120 bp, synthetic construct
  misc_feature 1..120: note = Artificially Synthesized Probe
  source 1..120: mol_type = other DNA
tggcatgtgggagatggaggacagtggggagaagaaagaacactagagctgaaattcgaggaagaaaccggacatctggggcagaggaacgacccaaagccactgaggaaactgccaggt

SEQ ID NO: 15516 - DNA, 120 bp, synthetic construct
  misc_feature 1..120: note = Artificially Synthesized Probe
  source 1..120: mol_type = other DNA
aaatggactattttattcctagaaaaagatacacaggctaatgtaatgaatacactagcacccttagccagctgtaggaaaaaaatgcatggcagatactcgatggcctttctgtcctcc

SEQ ID NO: 15517 - DNA, 120 bp, synthetic construct
  misc_feature 1..120: note = Artificially Synthesized Probe
  source 1..120: mol_type = other DNA
gagtcaccaaaacaagtcttctgaaaactggccaaggtgtgatgtacgtttgcatcctaggaaattaaagaggtaaaaaaacccatctggaaaaccaagagctgcttgattctatgaacc

SEQ ID NO: 15518 - DNA, 120 bp, synthetic construct
  misc_feature 1..120: note = Artificially Synthesized Probe
  source 1..120: mol_type = other DNA
atatgtggccaatgtttacagagccctccctcactacatcatgtgtggccgatgtttacagagccctctctcattacatcttctgtgcccgatgtttacagagccctctctgactctatc

SEQ ID NO: 15519 - DNA, 120 bp, synthetic construct
  misc_feature 1..120: note = Artificially Synthesized Probe
  source 1..120: mol_type = other DNA
ctcactccctcatgggtgcagtatgtttacagatgtttacagagccctctttcattacatcatatgtgcccaatgtttacagagccctctctcattacatcatgtgtgcctgatgtttac

SEQ ID NO: 15520 - DNA, 120 bp, synthetic construct
  misc_feature 1..120: note = Artificially Synthesized Probe
  source 1..120: mol_type = other DNA
gtgaccagcctgggccaacccctgggttctgacaagatgtgctgtttaggactaaattcagctgcatataacagaaaacttctgacaaggttggtgtgaacacctgaggcttttcttccc

SEQ ID NO: 15521 - DNA, 120 bp, synthetic construct
  misc_feature 1..120: note = Artificially Synthesized Probe
  source 1..120: mol_type = other DNA
gtttaaataaattgccagataaaatttgcttgaaaatcttttatgggaggaaaagagaacattcataacaaacagagctcaggttatcccctctccacccaacaccagcatttccaggcc

SEQ ID NO: 15522 - DNA, 120 bp, synthetic construct
  misc_feature 1..120: note = Artificially Synthesized Probe
  source 1..120: mol_type = other DNA
gttctctaacgagggtgcattttatcagtcccttaacgaggctgtttgggttcctgcctcctatagagtggcggttaatgcttaatcagcaaatgcactgtttaaataataacaagaata

SEQ ID NO: 15523 - DNA, 120 bp, synthetic construct
  misc_feature 1..120: note = Artificially Synthesized Probe
  source 1..120: mol_type = other DNA
cggtgcccgctgaggagtctggatttttaaaatacgccagaaatgacttagggtctcagccaacagaaccaaggaaagttatatttatgtgggaattattttgtcaaaaaagttccaaaa

SEQ ID NO: 15524 - DNA, 120 bp, synthetic construct
  misc_feature 1..120: note = Artificially Synthesized Probe
  source 1..120: mol_type = other DNA
aaaaaaaaaaaatactagcacagtggaccctgaagcgccagcagcaaaccctctgagatgtgcgtccggagtggccatgccaccagctttttctgcccactgttttggaaaagtgttgat

SEQ ID NO: 15525 - DNA, 120 bp, synthetic construct
  misc_feature 1..120: note = Artificially Synthesized Probe
  source 1..120: mol_type = other DNA
tgaacccaaggtcactgcccttgtggttgagcaaaatgaagacagttcctcttcttaaatccggctctgtgcctatgaagacggaagcagcagcattccgcttgcaggtttttgaaaaaa

SEQ ID NO: 15526 - DNA, 120 bp, synthetic construct
  misc_feature 1..120: note = Artificially Synthesized Probe
  source 1..120: mol_type = other DNA
agactcaaacacctgagcaacaagtttcctggggtcacctaataacgattattttaacaacagtttccaaacaacaaacaaacccatggagcacgaaacctctggggaccttttgaagct

SEQ ID NO: 15527 - DNA, 120 bp, synthetic construct
  misc_feature 1..120: note = Artificially Synthesized Probe
  source 1..120: mol_type = other DNA
gaaagatgtgaagtgggttagaaaatgtcatttccatgctttttagagtcgtgactgtggatgactttataggagacccagttgtctgaaacatttcacacggcaatgaaactatttcca

SEQ ID NO: 15528 - DNA, 120 bp, synthetic construct
  misc_feature 1..120: note = Artificially Synthesized Probe
  source 1..120: mol_type = other DNA
aactgtgtagcagacttccacggctcatgatttattctcaaatttttctccaaatttttagcagcatcttctatttatcttccaagcattgctgacaagggaggtggccaggtttgcaaa

SEQ ID NO: 15529 - DNA, 120 bp, synthetic construct
  misc_feature 1..120: note = Artificially Synthesized Probe
  source 1..120: mol_type = other DNA
agtggctcagatcaggaacagacacgtactcaaagacggcgggtatgagaaagccttgtgagggaagggagccctttgtcggggggcctgaaaagaaacacggcctttgctggttctctg

SEQ ID NO: 15530 - DNA, 120 bp, synthetic construct
  misc_feature 1..120: note = Artificially Synthesized Probe
  source 1..120: mol_type = other DNA
ccacactcctgcagggagagccccagctactgtacacactcctgcagggagagccccagccactgtacacactcctgcagggagagcctcccagccaccacccacactcctgcagggaga

SEQ ID NO: 15531 - DNA, 120 bp, synthetic construct
  misc_feature 1..120: note = Artificially Synthesized Probe
  source 1..120: mol_type = other DNA
cgtcttggttattatcgaacactcttggagcttcccaagactgcagttttaaaagaaatggcggagttggcagtatttggaggtagtaatgaattttcatctttgttctcctataggaac

SEQ ID NO: 15532 - DNA, 120 bp, synthetic construct
  misc_feature 1..120: note = Artificially Synthesized Probe
  source 1..120: mol_type = other DNA
tctatttctagtttttcacggaactgaccaggcaattcagtcagtagctgtcaaaactggagtccagaacaggcacagatgggctggcccaaagttaattaaaaaccaagaagaggataa

SEQ ID NO: 15533 - DNA, 120 bp, synthetic construct
  misc_feature 1..120: note = Artificially Synthesized Probe
  source 1..120: mol_type = other DNA
cacggctaggggattcccttctgaacacagaatgtcttgcttatttcacacgtgtgctaatttgctgtacaccaccggcttatttaattgttgtgcatttattgtatttctccactagat

SEQ ID NO: 15534 - DNA, 120 bp, synthetic construct
  misc_feature 1..120: note = Artificially Synthesized Probe
  source 1..120: mol_type = other DNA
ggggtgtgaagtcacagttgatgctgaacacctggctgggccagacttgtgcccaagaaaccttataccaccaactggttttcaaaagaaaaaaattaaaagtaattcaaaactttgaga

SEQ ID NO: 15535 - DNA, 120 bp, synthetic construct
  misc_feature 1..120: note = Artificially Synthesized Probe
  source 1..120: mol_type = other DNA
agctaattgtgcgatttctgccggccacgtggttttgatccaaaagcatttgaaagctgctctgaagatgcagaaaagctgagtcccggcatcgctgctccttccaagcgactgttcaca

SEQ ID NO: 15536 - DNA, 120 bp, synthetic construct
  misc_feature 1..120: note = Artificially Synthesized Probe
  source 1..120: mol_type = other DNA
accaggggatgaacgaggaatcggcttctgctctgctgaacatcccactggttcatgtccacttgtttgggtgatcctaactgatctgctacctgagtttgaatctcagcgctattatta

SEQ ID NO: 15537 - DNA, 120 bp, synthetic construct
  misc_feature 1..120: note = Artificially Synthesized Probe
  source 1..120: mol_type = other DNA
gggctcaaatcccatcctggcctgctgggcatttgtttcatcaattaagagtcagtgagcaggaaacaacattgcatattcacacaaacacacgtgcatatccaaatacacatacacaca

SEQ ID NO: 15538 - DNA, 120 bp, synthetic construct
  misc_feature 1..120: note = Artificially Synthesized Probe
  source 1..120: mol_type = other DNA
ctggatacacggccaccaccccgcccctgacgccctggatacacggccaccaccccgtccctgacgccctggatacacggccaccaccccgtccctgacgccctggatacacggccacca

SEQ ID NO: 15539 - DNA, 120 bp, synthetic construct
  misc_feature 1..120: note = Artificially Synthesized Probe
  source 1..120: mol_type = other DNA
gctgctgtcttccaggtcctccctggtttaatttagcaaaactaccaatgccaagaactggttaaattttttaaagggaagaaagtatgacacatggagaaaaaggtgcagcccatttcc

SEQ ID NO: 15540 - DNA, 120 bp, synthetic construct
  misc_feature 1..120: note = Artificially Synthesized Probe
  source 1..120: mol_type = other DNA
ttctgatgtttccctggatgacaagatgttttctttattaaaatatcaaggtctttctacaaatctttcctgatacctcaactttgccagggtcctaagcgtgtgcttaggtacttgcag

SEQ ID NO: 15541 - DNA, 120 bp, synthetic construct
  misc_feature 1..120: note = Artificially Synthesized Probe
  source 1..120: mol_type = other DNA
aagtttgctcaactttaattttccagccagaattatgtaagctgaaccagccgagatgtctatggtgttggctgctgtttctgctgttaattgttggttctctccaattaggatataaac

SEQ ID NO: 15542 - DNA, 120 bp, synthetic construct
  misc_feature 1..120: note = Artificially Synthesized Probe
  source 1..120: mol_type = other DNA
atctgtttcttaaagtactttgatgttgatctttctgtgagactctggaagtggagatagctttgggtttattgggcgttcgatgttggggattggatggcctggctcagagatgttgaa

SEQ ID NO: 15543 - DNA, 120 bp, synthetic construct
  misc_feature 1..120: note = Artificially Synthesized Probe
  source 1..120: mol_type = other DNA
acacacccatgtctacacatgtgcactcagctccagaacacaggatgtggccacgcatacccagcacctccccacacacaaatacccagcgtccttcccatacctgcatacccagcactt

SEQ ID NO: 15544 - DNA, 120 bp, synthetic construct
  misc_feature 1..120: note = Artificially Synthesized Probe
  source 1..120: mol_type = other DNA
cgctgcttgtgggagggggaggctccgactgtctctcctttatccaccaatgtttccgccaccagcgagtgctgagcaagtatctgttgaataaatgaatgtgcaccaggaaagaaagca

SEQ ID NO: 15545 - DNA, 120 bp, synthetic construct
  misc_feature 1..120: note = Artificially Synthesized Probe
  source 1..120: mol_type = other DNA
caaccatgttcacaaggaagttcatgtcccccttaactcgagcttttatttcagtgaagcttcggggtcacctgcacggcctctcgtgagtagggggatttcctactcgctccacagaca

SEQ ID NO: 15546 - DNA, 120 bp, synthetic construct
  misc_feature 1..120: note = Artificially Synthesized Probe
  source 1..120: mol_type = other DNA
cttgacttcactattttcgaaatgctgaattttgctgcaaagttttcctaaagggcttggaaacggtccagaccgtgctgtcctggaagtctcctgggggctccttcttcaaacaagaga

SEQ ID NO: 15547 - DNA, 120 bp, synthetic construct
  misc_feature 1..120: note = Artificially Synthesized Probe
  source 1..120: mol_type = other DNA
tctaaagccacagcattttcttttcctgtggcaagttatccctttccttagaaaaaagtactgttggatgctgacaccaccacaaataatctagttccttggcaggtcctctcatgagta

SEQ ID NO: 15548 - DNA, 120 bp, synthetic construct
  misc_feature 1..120: note = Artificially Synthesized Probe
  source 1..120: mol_type = other DNA
ccagatctgagtgcagcaccagggtttcctcggggaccccgggtccgagtgcagcaccagggttttctcggggaccccgggtccgagtgccacactagagtttcctcggggaccccagat

SEQ ID NO: 15549 - DNA, 120 bp, synthetic construct
  misc_feature 1..120: note = Artificially Synthesized Probe
  source 1..120: mol_type = other DNA
aatatgtcaggggtgagattttaaaatgtgtgtgaatataaacattcagctctgtaacataattaacagcgccccaaggaaaatcccgcgtatgtcagtaggaagcgttcttgatgcgga

SEQ ID NO: 15550 - DNA, 120 bp, synthetic construct
  misc_feature 1..120: note = Artificially Synthesized Probe
  source 1..120: mol_type = other DNA
cacgtgcacgcacacacacacagagcaacgtcctgcagctcccatcttttctttttaaaatcatacatatttcattaagctccatgcagagtgtcttctgatttatggtaattgtcaaca

SEQ ID NO: 15551 - DNA, 120 bp, synthetic construct
  misc_feature 1..120: note = Artificially Synthesized Probe
  source 1..120: mol_type = other DNA
actggaaattaaaaattgaacattgtatattagcagggctctgaggaccagaatttgtttgcgttcacttagagacgatctgtaaattagcagcttcacaatcaggccctgtgatgttgc

SEQ ID NO: 15552 - DNA, 120 bp, synthetic construct
  misc_feature 1..120: note = Artificially Synthesized Probe
  source 1..120: mol_type = other DNA
ggtcatgaggatatgtggagatgggggtgtttacagtagtcattatgataaaatgaagtcatgagggtatgtggagatggaggtgtttacaggaatcattacggtaaaatgaggtcatga

SEQ ID NO: 15553 - DNA, 120 bp, synthetic construct
  misc_feature 1..120: note = Artificially Synthesized Probe
  source 1..120: mol_type = other DNA
aaaatgactgtcatacatcagcacatgccaccccaaaaatgactgtcgaagaacagaacatgccaccccaaaaatgactgtcaaaggctagaaaacaccactccaaaaatgactatcaga

SEQ ID NO: 15554 - DNA, 120 bp, synthetic construct
  misc_feature 1..120: note = Artificially Synthesized Probe
  source 1..120: mol_type = other DNA
aacgactgttggagaacagaacatgccaccccaaaaatgactgtcagagaacagaacatgacaccacaaaaatgactgttggagatcaaaacacaccacctcaaaatgactgttgttgga

SEQ ID NO: 15555 - DNA, 120 bp, synthetic construct
  misc_feature 1..120: note = Artificially Synthesized Probe
  source 1..120: mol_type = other DNA
agaaactgaagatataggagaagctctgaaaacaagttgattctcttctataagagagatctatgtttataaaggagtcctccatttgtaagggtggctcctctctgcacctggaagagg

SEQ ID NO: 15556 - DNA, 120 bp, synthetic construct
  misc_feature 1..120: note = Artificially Synthesized Probe
  source 1..120: mol_type = other DNA
tgtgaatccacttcggcttgtttatctcttgtgaatcggttttttgttacaggagtccacccctcgtaggaactcagaagaacagagacactactttttcttccccacacagagtagtag

SEQ ID NO: 15557 - DNA, 120 bp, synthetic construct
  misc_feature 1..120: note = Artificially Synthesized Probe
  source 1..120: mol_type = other DNA
ctccgtttcttcagcgggagacatcaccaagtccccacctcagacaataagccgtgtccctgcgactgaaatctatattatgcatatttttataaaaatgcagctgaaaatgttagaaaa

SEQ ID NO: 15558 - DNA, 120 bp, synthetic construct
  misc_feature 1..120: note = Artificially Synthesized Probe
  source 1..120: mol_type = other DNA
gagctgcctgggctgggctgatgcaaatattttaatgcaatttcatgcagatttccctttcagacgcaaattaggaatatttaccagtaaacaggcttttcttaggactgaggcactttt

SEQ ID NO: 15559 - DNA, 120 bp, synthetic construct
  misc_feature 1..120: note = Artificially Synthesized Probe
  source 1..120: mol_type = other DNA
atccttggtgtgacccagcattaccatcaaacgcactgttaccttcgcaagctcagctcagtcaccttacccaaggaaccccgtgaactctgacacctcaggctttttagatccactgtc

SEQ ID NO: 15560 - DNA, 120 bp, synthetic construct
  misc_feature 1..120: note = Artificially Synthesized Probe
  source 1..120: mol_type = other DNA
tctcctggttttgccataattggcttttataattacccagacgtaaccaccaggggaaaacctcactgggtaagggatacatgagacttctttgttataactttgcaattccctgtgaat

SEQ ID NO: 15561 - DNA, 120 bp, synthetic construct
  misc_feature 1..120: note = Artificially Synthesized Probe
  source 1..120: mol_type = other DNA
tggtgaaggttttgtttttctgatttccttgctcgatggagtgtcttcttaggatacatttctcggagtttgattactgagccaaaggggaagagtttttgtttgttggtttgcagatga

SEQ ID NO: 15562 - DNA, 120 bp, synthetic construct
  misc_feature 1..120: note = Artificially Synthesized Probe
  source 1..120: mol_type = other DNA
cagctgatatgttcctgctattgatttggccaaagtctgcattcaatgtccaggctcctcttggtaatccccaagcaaccgggtaggagctgtgtacagtagcaaacctctttgcacaga

SEQ ID NO: 15563 - DNA, 120 bp, synthetic construct
  misc_feature 1..120: note = Artificially Synthesized Probe
  source 1..120: mol_type = other DNA
agaagctagaacgcacccctaactctggacacaactgagaaggttggagccatggatctgcctttatccaaattatttttcttccaaacttttgagttttgctttttggtgattatcact

SEQ ID NO: 15564 - DNA, 120 bp, synthetic construct
  misc_feature 1..120: note = Artificially Synthesized Probe
  source 1..120: mol_type = other DNA
tttccagagttaaatagtccacttcacagataatctgagcagcaattcagatttccatgcattgaatcaatctacttcctagacagagcttcacaaggagcagtgatgccatttccatta

SEQ ID NO: 15565 - DNA, 120 bp, synthetic construct
  misc_feature 1..120: note = Artificially Synthesized Probe
  source 1..120: mol_type = other DNA
aatgggagctcgtgatggaagggtttgtctgttttagtcactgctgtagtttcagttcttaaaacctgcctgacgcatataaatacctaggaatgaatgaacgaacagctcactaaactg

SEQ ID NO: 15566 - DNA, 120 bp, synthetic construct
  misc_feature 1..120: note = Artificially Synthesized Probe
  source 1..120: mol_type = other DNA
gggcagaacttcttatccagaaactctcacatagaaattcacacttcagtatcaccaatccctgctgagggtaagctcacaattctaaaaaaagacttcatcaaccacaaaagaggaccc

SEQ ID NO: 15567 - DNA, 120 bp, synthetic construct
  misc_feature 1..120: note = Artificially Synthesized Probe
  source 1..120: mol_type = other DNA
aatccaagcagggagtgcctggacatcacaggtgcccagcagaggacaggaggagctgggaagatgaaacccagatcccctgatccaagcagggagtgcctggacattacaagtgcccag

SEQ ID NO: 15568 - DNA, 120 bp, synthetic construct
  misc_feature 1..120: note = Artificially Synthesized Probe
  source 1..120: mol_type = other DNA
ttctctgaccaggttacagagatggctctaacctgagtccatctagatttgtcccaaattcctggacaccattatccctctaggaatgacttagcaccaaccaccaccccacgtgatgag

SEQ ID NO: 15569 - DNA, 120 bp, synthetic construct
  misc_feature 1..120: note = Artificially Synthesized Probe
  source 1..120: mol_type = other DNA
gatattatggaagcattgcctctctgataccagcatggtaaggtttgcacacacaggggcttgatagattttcagtgatattatggaagcatttcctgttttatattgcctctcccaaat

SEQ ID NO: 15570 - DNA, 120 bp, synthetic construct
  misc_feature 1..120: note = Artificially Synthesized Probe
  source 1..120: mol_type = other DNA
tagctgtataattactgggaaatatgtttcattaaccagcattaggtgttgataaaagactccgtagaaggcaaagctgaatgtgtgtatttctgccatcagcaccgccagctattttgc

SEQ ID NO: 15571 - DNA, 120 bp, synthetic construct
  misc_feature 1..120: note = Artificially Synthesized Probe
  source 1..120: mol_type = other DNA
attacctactgcgctgaaagaacaagacagacagaaaacagtctgggctaaagcaaaactcctttaatactttatgatggggtagagccccaggggaggggaggacacaaatgtaagcct

SEQ ID NO: 15572 - DNA, 120 bp, synthetic construct
  misc_feature 1..120: note = Artificially Synthesized Probe
  source 1..120: mol_type = other DNA
caccatgcagacgtggaggacagaaataatctcaagggtgccgatgacagtaaaatgtagaaaaccagttataaaatggtgagctttagtatggatcgcctctgctcttaacatagttta

SEQ ID NO: 15573 - DNA, 120 bp, synthetic construct
  misc_feature 1..120: note = Artificially Synthesized Probe
  source 1..120: mol_type = other DNA
ccttgtttgtacttaagcactttccactgggcctcctgtgaggccaggaacgcgctgcagcagaacttccggaaagggcgtcagctgcggccaatagtgactcagaggatgatcttgttg

SEQ ID NO: 15574 - DNA, 120 bp, synthetic construct
  misc_feature 1..120: note = Artificially Synthesized Probe
  source 1..120: mol_type = other DNA
cccaagctgattgtgagcctctccaggacaggcaaggttcttcagggtctatgactgcactttgatgcttaggggcctgtgttctttcttcaacaaatacatccacgttgctgcaaagga

SEQ ID NO: 15575 - DNA, 120 bp, synthetic construct
  misc_feature 1..120: note = Artificially Synthesized Probe
  source 1..120: mol_type = other DNA
acttcctaaggagaaagtgctgtatctgctgcgtgtctgagactccagtgtgctctggtctcttatgctattaactcgccgatcagtgcttctgcttgtgttttgaacatcaaacatcag

SEQ ID NO: 15576 - DNA, 120 bp, synthetic construct
  misc_feature 1..120: note = Artificially Synthesized Probe
  source 1..120: mol_type = other DNA
cccacacctgtgtaactgaggactcacacctactccttttaagtctaaagtaaatacctgctgattctcagtgtccttttgttcctttttatgaactccatgacaatactgccaattttt

SEQ ID NO: 15577 - DNA, 120 bp, synthetic construct
  misc_feature 1..120: note = Artificially Synthesized Probe
  source 1..120: mol_type = other DNA
cacctggtcgcagggctgatcacaattcctgtaaaggaatcttttaaaaattagcaatgtccatactttcctatttcagcccattctctttccccatgtcgttttctgaaaagaactcta

SEQ ID NO: 15578 - DNA, 120 bp, synthetic construct
  misc_feature 1..120: note = Artificially Synthesized Probe
  source 1..120: mol_type = other DNA
ctaagcttctttggttctgggacctctaacatgtcttaacatcaaacacgtgcagtgacacttcagtcttcatttcagaaccaaagactctcactcagcaaatcctgagatcccgagatc

SEQ ID NO: 15579 - DNA, 120 bp, synthetic construct
  misc_feature 1..120: note = Artificially Synthesized Probe
  source 1..120: mol_type = other DNA
tgggagagggaggtttgaagagcagaagcacttaggcaggagaaaagacaaattaatgaacgtgtcaaatcctgctgttcaggttacagaaaagccaatgatttctgcataaagaagtat

SEQ ID NO: 15580 - DNA, 120 bp, synthetic construct
  misc_feature 1..120: note = Artificially Synthesized Probe
  source 1..120: mol_type = other DNA
tttttcactatgaacatatatttttcaaagtatgaagcatttttttagcggctaatgagcttcacatagacttttaaatgtccagaagcccagcatggaatgccacttgccctctggcct

SEQ ID NO: 15581 - DNA, 120 bp, synthetic construct
  misc_feature 1..120: note = Artificially Synthesized Probe
  source 1..120: mol_type = other DNA
acattagaggacctcaacgattatctgttgagggaatgaataagtgacttataggaagcatgagcaaattaactccctagtggcagcgttaaagcattactatctctaggatgatcatgc

SEQ ID NO: 15582 - DNA, 120 bp, synthetic construct
  misc_feature 1..120: note = Artificially Synthesized Probe
  source 1..120: mol_type = other DNA
gacgtttagggagataaactagatgtgcacctactgacatgtgtataacgttcagtgttttattaaacatgtatatatcacgggctcctggaaatgattcctctcaccaactcagatgac

SEQ ID NO: 15583 - DNA, 120 bp, synthetic construct
  misc_feature 1..120: note = Artificially Synthesized Probe
  source 1..120: mol_type = other DNA
aagggattctatcaatttacactcctgtcaccaacacacagagttcctagtgctccgtgtgctcattggtttaagctttaaacactttgccgatttggtagatttacgttgtatctcctt

SEQ ID NO: 15584 - DNA, 120 bp, synthetic construct
  misc_feature 1..120: note = Artificially Synthesized Probe
  source 1..120: mol_type = other DNA
gcatgatttcatatacagcacccttcctaaactatctaattccattagtttacctggatcttcttctgtctcttctgagtaaataatgaggccgtctgtgaataatgacaggcttgctcc

SEQ ID NO: 15585 - DNA, 120 bp, synthetic construct
  misc_feature 1..120: note = Artificially Synthesized Probe
  source 1..120: mol_type = other DNA
aaaattttgctttttaaacaaacagagagattctctgtctttgagattctccaacttcactgtcaggaatcgaggtgtagagcctttttcactccataggcttctggaatctgagtactg

SEQ ID NO: 15586 - DNA, 120 bp, synthetic construct
  misc_feature 1..120: note = Artificially Synthesized Probe
  source 1..120: mol_type = other DNA
tttaaaattttttattgtggactcaaatttcttggaattttacttgcaggtattctttatgagtagaaggggaaagaaaggattcctccagagaggatctgcctttccctctgccaggca

SEQ ID NO: 15587 - DNA, 120 bp, synthetic construct
  misc_feature 1..120: note = Artificially Synthesized Probe
  source 1..120: mol_type = other DNA
agatgtgtatataaaattgctaattattcagtgttttatggaatctgccgtgactcttgctgggactgtgaactagaaatggcaacgacaccttttctttgtgtggtgctgcgtgtggac

SEQ ID NO: 15588 - DNA, 120 bp, synthetic construct
  misc_feature 1..120: note = Artificially Synthesized Probe
  source 1..120: mol_type = other DNA
gcatttgaaaggcattttctccttggaaactgaaaggtcaatttgtcaaactccactcctcagggttccaagaaaggttcttcagcccttgttttccagccataacagggtaaataaatg

SEQ ID NO: 15589 - DNA, 120 bp, synthetic construct
  misc_feature 1..120: note = Artificially Synthesized Probe
  source 1..120: mol_type = other DNA
aagacgtgccttctgaaatggtaaatgtaaagctgaaccaggccttcacctccccgtttataaaatgtgggagaaatgaggtatcctgaagtgttcttctaagacaaggaaattagtatt

SEQ ID NO: 15590 - DNA, 120 bp, synthetic construct
  misc_feature 1..120: note = Artificially Synthesized Probe
  source 1..120: mol_type = other DNA
gggcccgagaacatgacaaagagaattcaatagcgactgatcaagctctatggtctagaaaccagaatggaaccgatcagatattaagcctcaaaaaaggacttcatgttttttaaatca

SEQ ID NO: 15591 - DNA, 120 bp, synthetic construct
  misc_feature 1..120: note = Artificially Synthesized Probe
  source 1..120: mol_type = other DNA
cgcacaacgacgaaattgccagatgaaacatttatctgaaggcagcctcgtcattaagcaacgcatcgctgtctaagaatttggaactccaagaaattgaactatgaacaaagaaaataa

SEQ ID NO: 15592 - DNA, 120 bp, synthetic construct
  misc_feature 1..120: note = Artificially Synthesized Probe
  source 1..120: mol_type = other DNA
atgaatggatcaaccgtggtgtatccatataataggatatcattcagggctaaaacggaatgagccgtcaaaccatgacacagggcttgcaggaaccttaaatgcctcttgctaagtgaa

SEQ ID NO: 15593 - DNA, 120 bp, synthetic construct
  misc_feature 1..120: note = Artificially Synthesized Probe
  source 1..120: mol_type = other DNA
tgaaactttcaggagaattttgaagagagatgattattttctgactctactgaccaggattctgttcaacatcttcatacgggatttttggtttttaaatactgggtgacggggccaagg

SEQ ID NO: 15594 - DNA, 120 bp, synthetic construct
  misc_feature 1..120: note = Artificially Synthesized Probe
  source 1..120: mol_type = other DNA
gtgtcaataaaggtctataaataaaacatcactctgggttttttatctttatcccaacaccctacactgcatgcttttagagacgccgttccactgggcctttttattcttaaccctgac

SEQ ID NO: 15595 - DNA, 120 bp, synthetic construct
  misc_feature 1..120: note = Artificially Synthesized Probe
  source 1..120: mol_type = other DNA
aactcagggagattttagttgaatttgcaaaatggttgctaacatatctacctgttcctgagcagaatttaaaaaagcaacctgtcctgaattagaggaggctggctttggtgtgctgtt

SEQ ID NO: 15596 - DNA, 120 bp, synthetic construct
  misc_feature 1..120: note = Artificially Synthesized Probe
  source 1..120: mol_type = other DNA
tgcagttattgatatgtagtcaggatgcaggcacctgcatttagcacgttgctttagtaggttaaatcccctccagaatcttccagaatccccaaaatctaaatgcccacatttgctacg

SEQ ID NO: 15597 - DNA, 120 bp, synthetic construct
  misc_feature 1..120: note = Artificially Synthesized Probe
  source 1..120: mol_type = other DNA
gtttagactttattaagcttttgagtctacatgtgaggcgaatggatgaatttaatttttatccatgcattacctccctctgtctatctaccactaaaccacagccacaggaagctgagg

SEQ ID NO: 15598 - DNA, 120 bp, synthetic construct
  misc_feature 1..120: note = Artificially Synthesized Probe
  source 1..120: mol_type = other DNA
tctgagaacagaggcctcgcatcttctgggaccccgaagacaggaagccccagggacccgtctgagagcagaggcctcgcgtcttctgggaccccaaagacaggaagccccagggacccg

SEQ ID NO: 15599 - DNA, 120 bp, synthetic construct
  misc_feature 1..120: note = Artificially Synthesized Probe
  source 1..120: mol_type = other DNA
atttatagagcacttactgggaacatgacaggtggcatttatagagcacttactgggaacatgcactgttgcagcactttatgtgaattcacacgtttaactctcaccacaatccagaag

SEQ ID NO: 15600 - DNA, 120 bp, synthetic construct
  misc_feature 1..120: note = Artificially Synthesized Probe
  source 1..120: mol_type = other DNA
tcttgctgaaggttgtgaaataaggatcagtgaaacggtgagaccattccttccacccttgtgtttccctggcatatgtgtcagccagctggtcaacacatgctgcgttagcaaatgctg

SEQ ID NO: 15601 - DNA, 120 bp, synthetic construct
  misc_feature 1..120: note = Artificially Synthesized Probe
  source 1..120: mol_type = other DNA
actagaagtcccacgcttctcctcccccaggttcacttgaccacaattctaaaatattaatagcatacagcgtgttaagtgatggcaatgaaagtctggttcactcttattttatcacaa

SEQ ID NO: 15602 - DNA, 120 bp, synthetic construct
  misc_feature 1..120: note = Artificially Synthesized Probe
  source 1..120: mol_type = other DNA
agcaattccacgagttaactaatacattttcataagcacatttgctgcctaggccaggtttctgtcgcttgctaataagaattaattgtgactcatgcaggattcttggggtaggggtga

SEQ ID NO: 15603 - DNA, 120 bp, synthetic construct
  misc_feature 1..120: note = Artificially Synthesized Probe
  source 1..120: mol_type = other DNA
tgatatggtactaatatctaatcaacagaacttacacgatttgtctacttctcccaagaacatttctagaacaaaataaatgcccacatgaggccctgcataccgacgtcatgtctctct

SEQ ID NO: 15604 - DNA, 120 bp, synthetic construct
  misc_feature 1..120: note = Artificially Synthesized Probe
  source 1..120: mol_type = other DNA
cgatggacagctttagagaagtgactcactttgactgacatttatagagtaagggtgagtcattctgattgacagttttagaggaggggtgaatcactccgattgacagttttagagaag

SEQ ID NO: 15605 - DNA, 120 bp, synthetic construct
  misc_feature 1..120: note = Artificially Synthesized Probe
  source 1..120: mol_type = other DNA
tgcaccgtgaatgctgttttcttctgatcctatcttgtggtgagagctattctgtggttctccagaatatcggccgctcattttagcatcaatgattcttatctgaatcaagtagtacta

SEQ ID NO: 15606 - DNA, 120 bp, synthetic construct
  misc_feature 1..120: note = Artificially Synthesized Probe
  source 1..120: mol_type = other DNA
gcaatttgactacaaatgtgcttatgttaattttctttgcacttaacttgcttggggttctctgagcttcttctttttcaccaggtggagggtgggtagggttgctggttttgaatatta

SEQ ID NO: 15607 - DNA, 120 bp, synthetic construct
  misc_feature 1..120: note = Artificially Synthesized Probe
  source 1..120: mol_type = other DNA
tacagcaaatgcagacacattctccccactttccctccctgccatggttctctagtacaagatgcttgaattttttctcactgagcttcactgctgccactggaggtctgaattgatttt

SEQ ID NO: 15608 - DNA, 120 bp, synthetic construct
  misc_feature 1..120: note = Artificially Synthesized Probe
  source 1..120: mol_type = other DNA
tttctcatctgtaaaaagtattctttctgcaatattctgtaaaaagtattttttctcttgtagaatgtctttctgcctgcccctctcacccgcatgtcaacccccttcactggggcaatt

SEQ ID NO: 15609 - DNA, 120 bp, synthetic construct
  misc_feature 1..120: note = Artificially Synthesized Probe
  source 1..120: mol_type = other DNA
tgttcagtagcaccatttgcaacccctgtgatgggaatcttcgtgactatgtgacatgttccccatctctctctctgttgttttattttcctttgacaatgtcaagctggaaattagaag

SEQ ID NO: 15610 - DNA, 120 bp, synthetic construct
  misc_feature 1..120: note = Artificially Synthesized Probe
  source 1..120: mol_type = other DNA
agcaaggtttccagcacgcaaattctgaattacagtcagataaagttaagtaaagcacgcaggtccccacctcaatagcgaggtttccagtatccaaattctgaattacaataagataaa

SEQ ID NO: 15611 - DNA, 120 bp, synthetic construct
  misc_feature 1..120: note = Artificially Synthesized Probe
  source 1..120: mol_type = other DNA
aacttggttataactcagccccggctcctttctgaagcctcagtgcagattcttttctctccccttcctagtgttattattaaattttataaggtctgtgctccttactttcaaagcaaa

SEQ ID NO: 15612 - DNA, 120 bp, synthetic construct
  misc_feature 1..120: note = Artificially Synthesized Probe
  source 1..120: mol_type = other DNA
caaacaccctcccccatgacactgcaaatctaatgccctccccacagtgacactgcaaatctaacactctcccccacaacactgcaaatctaacgcccccccatgacactgcaaatctaa

SEQ ID NO: 15613 - DNA, 120 bp, synthetic construct
  misc_feature 1..120: note = Artificially Synthesized Probe
  source 1..120: mol_type = other DNA
ggggagtcaggcagcctcagcgaatgtcctgaaaatgctcccacagaatgtttatatctttacagacacaaaatgctgctggggtaatactcttgggaagtatgcaaatgagttcttttt

SEQ ID NO: 15614 - DNA, 120 bp, synthetic construct
  misc_feature 1..120: note = Artificially Synthesized Probe
  source 1..120: mol_type = other DNA
gcttaaaaatttggccccaggaagcctttgcattcataactgtagctaccactattcactgctccaaaattcaaaggaggagttctcgagacccaagaacacacaacacacattccacta

SEQ ID NO: 15615 - DNA, 120 bp, synthetic construct
  misc_feature 1..120: note = Artificially Synthesized Probe
  source 1..120: mol_type = other DNA
cttcctctgccacttttctccacgttgtaagggttttaaaccaatgtttctaagggagcactgggcttcatttgacatttccagtaagtatcaaaagctgctatcacttcaattacagac

SEQ ID NO: 15616 - DNA, 120 bp, synthetic construct
  misc_feature 1..120: note = Artificially Synthesized Probe
  source 1..120: mol_type = other DNA
aggcattgtctacaacacagactacacagtccacagtccacaactcctgaatcctgcctagtatttatacagtaaacagagactctgaaataaacaccgtgccgaatggagcctgtgcag

SEQ ID NO: 15617 - DNA, 120 bp, synthetic construct
  misc_feature 1..120: note = Artificially Synthesized Probe
  source 1..120: mol_type = other DNA
tagtcttgtgaaacaaccaaagcaactgtctgaagcctcttcagctggcccatgcctcatgggagttttgtagctctttctgcgtttgagaagacactaaaaaaaaaaaagtaaaatcca

SEQ ID NO: 15618 - DNA, 120 bp, synthetic construct
  misc_feature 1..120: note = Artificially Synthesized Probe
  source 1..120: mol_type = other DNA
tctgtccctccactgaagtaacaagtaagctgacaaaaatggacagaagtgactgttctgggattctgtagtctaattttaaaaatcagcagtaaccagggggtgctaaattgagaaaga

SEQ ID NO: 15619 - DNA, 120 bp, synthetic construct
  misc_feature 1..120: note = Artificially Synthesized Probe
  source 1..120: mol_type = other DNA
aagctgagggagtttgtcactagtagacaagctctgtaagaaatgctaaaggtgacaggctgaaatgcaggtcattgaggctgaaattctaaacagtaaccagaagccatacaagaaaat

SEQ ID NO: 15620 - DNA, 120 bp, synthetic construct
  misc_feature 1..120: note = Artificially Synthesized Probe
  source 1..120: mol_type = other DNA
ctttgtatgtaagataagggatatatgctgtcggttagggactcacgtaggatccaaagttgaaagtaaaatgatgcattttgggatggtgaaaatgttacatacaggtggcagttgcac

SEQ ID NO: 15621 - DNA, 120 bp, synthetic construct
  misc_feature 1..120: note = Artificially Synthesized Probe
  source 1..120: mol_type = other DNA
tcaatggaaacactgttcttgtgtgttcagtatctgtgtgcatgttaatcttcctgtgagatcataaagctctgtaagggaaagggtccaattgtctcaccttgaaaattccaaacctag

SEQ ID NO: 15622 - DNA, 120 bp, synthetic construct
  misc_feature 1..120: note = Artificially Synthesized Probe
  source 1..120: mol_type = other DNA
tggtgatggcgggtggccattccctataagagagtggctcctctattattaacaaaataaaaattaaagaaggtttccattgagtttgctagttcttcactagcaatattcccagctggt

SEQ ID NO: 15623 - DNA, 120 bp, synthetic construct
  misc_feature 1..120: note = Artificially Synthesized Probe
  source 1..120: mol_type = other DNA
cttcctcccaagctcacagtctagctccaggtgcctgctctccttgttctgtgtctgtttctgcacaccctgcggggaggccaggctcacccaagaaaagagtcaaggctgcaccatgaa

SEQ ID NO: 15624 - DNA, 120 bp, synthetic construct
  misc_feature 1..120: note = Artificially Synthesized Probe
  source 1..120: mol_type = other DNA
caggggaaataaaggtgatgctcaaacccagaccaccgaatgctctgaacacacttgcttgctttcaggtggaaacattcacagtgtccctgggtacagcagacttcatatcacagagac

SEQ ID NO: 15625 - DNA, 120 bp, synthetic construct
  misc_feature 1..120: note = Artificially Synthesized Probe
  source 1..120: mol_type = other DNA
aaatgtaagcaaatccgcatttcgaagcagaaatcgctggtttaaatattctctcctttccctcaccatggaatgcacaaacgcttgaagatgcatgtgtgttagagtctcttccacaga

SEQ ID NO: 15626 - DNA, 120 bp, synthetic construct
  misc_feature 1..120: note = Artificially Synthesized Probe
  source 1..120: mol_type = other DNA
gcgaattttctatccaggcacatctcttcactgctgattaagctacctctttttgccaaacatactctatatttgtgctggatcacaggtaatttggtggagaaaagcaattccaaggaa

SEQ ID NO: 15627 - DNA, 120 bp, synthetic construct
  misc_feature 1..120: note = Artificially Synthesized Probe
  source 1..120: mol_type = other DNA
tcttgtgtttggatgagattttattcttcctacgtgctggcatttagtacactgttgtttatggctgtttgatgagaaaagcctagggacggctggtttaaggtaagaacattcacagtg

SEQ ID NO: 15628 - DNA, 120 bp, synthetic construct
  misc_feature 1..120: note = Artificially Synthesized Probe
  source 1..120: mol_type = other DNA
atctaggacttaagtattaatccctgggggggtgaattccataaattaaggaggggtacagtaagaggatgagatgtttaaagagaagcatatccatggaatcaaaatgcgatcagagca

SEQ ID NO: 15629 - DNA, 120 bp, synthetic construct
  misc_feature 1..120: note = Artificially Synthesized Probe
  source 1..120: mol_type = other DNA
tattgaagaggaaacaatttctaactaatcctgtgagtccagcattactctgacacgaaagccagacagacactacaagcaaacaaaactaagaaccagtatcccttataaatactgatg

SEQ ID NO: 15630 - DNA, 120 bp, synthetic construct
  misc_feature 1..120: note = Artificially Synthesized Probe
  source 1..120: mol_type = other DNA
ataaagctggacctgtaacttacatcatatacaaaacttaaaactgatcaaatatctgaatttacaagatgaaactataaagctctaggaagacttagggggaagcttcatgacactgga

SEQ ID NO: 15631 - DNA, 120 bp, synthetic construct
  misc_feature 1..120: note = Artificially Synthesized Probe
  source 1..120: mol_type = other DNA
tgcccatcaggggaagaacagataaaaaacatgtggtctatacacggcggggtattattcagccctaaaagtgaaggacattcatccaagctacaacacgggtaaaccttgaggatatta

SEQ ID NO: 15632 - DNA, 120 bp, synthetic construct
  misc_feature 1..120: note = Artificially Synthesized Probe
  source 1..120: mol_type = other DNA
aacaagcaaaaaccaaaaccatggaagtgaaattctcaattatattaaaatatgtatctgtaacactcttgaaggaaatatgccaaaatattcacagtagttatagtttattagagagat

SEQ ID NO: 15633 - DNA, 120 bp, synthetic construct
  misc_feature 1..120: note = Artificially Synthesized Probe
  source 1..120: mol_type = other DNA
gcggcgcagtccctactctggcgggaaacacaggatgtgaaagtattttatgaaacagtttcagtgaagaagaaagtgggtcattttctaatttgaaaaatccagagtcttctatttttc

SEQ ID NO: 15634 - DNA, 120 bp, synthetic construct
  misc_feature 1..120: note = Artificially Synthesized Probe
  source 1..120: mol_type = other DNA
gggctgggggtgtttaagaccagaagcagaaaactgacaactttgttgcctggaaaaaataaggtggacaatactggaactaatggcagaaacaaggttttggagcaatctacaatttat

SEQ ID NO: 15635 - DNA, 120 bp, synthetic construct
  misc_feature 1..120: note = Artificially Synthesized Probe
  source 1..120: mol_type = other DNA
acatgttatttgccctgttcaagttcaagcagtattttttttaataaagattattcccaatagatcttagtcttcatctgtaagaggctgttgagggcacgaccacctcgcagtgacctc

SEQ ID NO: 15636 - DNA, 120 bp, synthetic construct
  misc_feature 1..120: note = Artificially Synthesized Probe
  source 1..120: mol_type = other DNA
ggacctgaaaacaggatatggaggtagatttgtgggagagagttggaaagggagctagcactctttgagtacccactttgtgctaaatacttagtttttgactccatatgtatgaagatt

SEQ ID NO: 15637 - DNA, 120 bp, synthetic construct
  misc_feature 1..120: note = Artificially Synthesized Probe
  source 1..120: mol_type = other DNA
ttgctttgaaaacatgttctaggctggtgttttattatttatgaagcaacactgctgtcctggtttaactgccttcctgtgaaagaaaaggcttcctgttttgtttcctgagactcctct

SEQ ID NO: 15638 - DNA, 120 bp, synthetic construct
  misc_feature 1..120: note = Artificially Synthesized Probe
  source 1..120: mol_type = other DNA
tcatcaccatcatcttcatcaccactctcatcatcatttttaaaaaggattgcattctaaaaagttctgtgtttgaaagtatatttgttttctttggctgctgttgtaacaaatcaccac

SEQ ID NO: 15639 - DNA, 120 bp, synthetic construct
  misc_feature 1..120: note = Artificially Synthesized Probe
  source 1..120: mol_type = other DNA
catttgttagtaacatacctttggacactggcttcattcttcagtatcttccctttatagacttggctttctgggagctggatgtttacccagtaccacctagcactagtaaattactac

SEQ ID NO: 15640 - DNA, 120 bp, synthetic construct
  misc_feature 1..120: note = Artificially Synthesized Probe
  source 1..120: mol_type = other DNA
ggtgccgaagaaacagcaagagacctccttgtccaggtagccacaaaggaatttccttttgaaatgtatactcgttgaaatttttaatccaggataaattatgagagtctgtactgcaca

SEQ ID NO: 15641 - DNA, 120 bp, synthetic construct
  misc_feature 1..120: note = Artificially Synthesized Probe
  source 1..120: mol_type = other DNA
agttttgtattagacactggggccacactgttggaaataataatttagggataactgcacaatatacttgccacctttgccctatgaactccccaagagctcaggacacacattgagaaa

SEQ ID NO: 15642 - DNA, 120 bp, synthetic construct
  misc_feature 1..120: note = Artificially Synthesized Probe
  source 1..120: mol_type = other DNA
cccttgtaattcatcttgcttatgtgggtgttttctccatgagttcttcaagaaaagagctggattctgttcatctttgttcttacccctgagtatccaactcagagctttgtacatact

SEQ ID NO: 15643 - DNA, 120 bp, synthetic construct
  misc_feature 1..120: note = Artificially Synthesized Probe
  source 1..120: mol_type = other DNA
aacttatatcaaggtatggaaaacaccttttaccacttaaggtaaatgttcaatttccagagggcaaatcgtgcgctgcctcattcagcagcagaatttttctccccaatgattggcatt

SEQ ID NO: 15644 - DNA, 120 bp, synthetic construct
  misc_feature 1..120: note = Artificially Synthesized Probe
  source 1..120: mol_type = other DNA
tggggaaagggtggggggaaataacagggggtaggctcttcaatatttaaaagttccagacatccacagacttcttatgtcattttcctgatgggagggaaatgaatttccaatatttat

SEQ ID NO: 15645 - DNA, 120 bp, synthetic construct
  misc_feature 1..120: note = Artificially Synthesized Probe
  source 1..120: mol_type = other DNA
gtaaaatttaaaaagatgaaagcatagcaacaaagataaaataaatagcatgcttttagaagaccacgcggcatggaaagcagtctctagcgctgtctttcttccgttagggtggactgg

SEQ ID NO: 15646 - DNA, 120 bp, synthetic construct
  misc_feature 1..120: note = Artificially Synthesized Probe
  source 1..120: mol_type = other DNA
acactgctgtccactctcttgtccaccccatgattccaaccactggatccgagcatctgcaccctgtatccgtttctctaacccagatttccttcaagtttcaatcctgtactttcggat

SEQ ID NO: 15647 - DNA, 120 bp, synthetic construct
  misc_feature 1..120: note = Artificially Synthesized Probe
  source 1..120: mol_type = other DNA
gtctaaaacctcactgtcttttccatgtgaatttacctttttttttttccattgcatgtcctttaaataaccaccaggtacctactgtgtgccctgggcactggggatgcagagggtccc

SEQ ID NO: 15648 - DNA, 120 bp, synthetic construct
  misc_feature 1..120: note = Artificially Synthesized Probe
  source 1..120: mol_type = other DNA
aaacagatgcaagggtaggaaccacagctaatagtccatgaatctaataattagttaactgattaacgaaatgcatattcattaagcacacctgtagagagcctattgcgtacaggtgcc

SEQ ID NO: 15649 - DNA, 120 bp, synthetic construct
  misc_feature 1..120: note = Artificially Synthesized Probe
  source 1..120: mol_type = other DNA
cctgtacgtcgcatgcacatctacagactaaataccaaggagttttctaaaaaggccaatgacaggtcaggtggacctgaattgttaccactaattaggataaaagaggtttacagatgc

SEQ ID NO: 15650 - DNA, 120 bp, synthetic construct
  misc_feature 1..120: note = Artificially Synthesized Probe
  source 1..120: mol_type = other DNA
caggagggattgtttctctttctgtgtacaaccagaacctactacagggcccagtccacagcagatggctaatgaatgtctgctgaatggatagaaaaaaaaagaaaaatgttttaaatg

SEQ ID NO: 15651 - DNA, 120 bp, synthetic construct
  misc_feature 1..120: note = Artificially Synthesized Probe
  source 1..120: mol_type = other DNA
tcagtactgatggaaatcatgaccatattattacatcactgaggtttctctgcaaaacaggaacttgttgatcagggtattcattttatgcaggctgagatgcaaacttcataggcaggc

SEQ ID NO: 15652 - DNA, 120 bp, synthetic construct
  misc_feature 1..120: note = Artificially Synthesized Probe
  source 1..120: mol_type = other DNA
agtaacttgcagaaaggctcctcatataccaaagttgagtggataaacagccttttaccctaagagtgacctcagagtttgcaagaacccacacatttcttggtccttatacaaattcag

SEQ ID NO: 15653 - DNA, 120 bp, synthetic construct
  misc_feature 1..120: note = Artificially Synthesized Probe
  source 1..120: mol_type = other DNA
aattaattagcaatacttcggaaaggcacaagctatgatgtgaaggctttgagttaatataacaccagttccctatcatatcagcccattcttcaagggctttgcaaagcagcagttctc

SEQ ID NO: 15654 - DNA, 120 bp, synthetic construct
  misc_feature 1..120: note = Artificially Synthesized Probe
  source 1..120: mol_type = other DNA
cagagacgaggaggggaatgcagagtgcagggtcccccccaaaccccgagtcacagagacgaggaggggaatgcagagtgcagggtcccccccaaaccccgagtcacagagacgaggagg

SEQ ID NO: 15655 - DNA, 120 bp, synthetic construct
  misc_feature 1..120: note = Artificially Synthesized Probe
  source 1..120: mol_type = other DNA
aggaaaatggcatttcattagccatggagacagccgggaacccagcagccttctttattctggctcatattttctcatcattctcagggagttgtccaggtaacaatgaccttgtgtaaa

SEQ ID NO: 15656 - DNA, 120 bp, synthetic construct
  misc_feature 1..120: note = Artificially Synthesized Probe
  source 1..120: mol_type = other DNA
cctttaacaaagtgacatcagatgtttgggccctacttgcatttaagccatccagtgcattccacataaaaagcgtgcacctggaggaaactaaataatcacaaccaatcactctttttt

SEQ ID NO: 15657 - DNA, 120 bp, synthetic construct
  misc_feature 1..120: note = Artificially Synthesized Probe
  source 1..120: mol_type = other DNA
gaaagctcctccaagatgccaccgcatgtgaaatgcttggggttgaaatgtaacgaatctctcactactgacaagagaaaggccagaacacaaacacacttcctgcttccagatggatgg

SEQ ID NO: 15658 - DNA, 120 bp, synthetic construct
  misc_feature 1..120: note = Artificially Synthesized Probe
  source 1..120: mol_type = other DNA
gtcggcaacacagagattccatttcttcctgggattaggaagcacgaagtgtccagatctgcttctgaaatctcttcctcccttaaggtaaggtgctgtgtggagcttactggaacctaa

SEQ ID NO: 15659 - DNA, 120 bp, synthetic construct
  misc_feature 1..120: note = Artificially Synthesized Probe
  source 1..120: mol_type = other DNA
catttccagcttgtctcccaaagacaggcttctttgtgctttggtcacacggagaattatcagtgcagtctctgtctctctctctcatttccccctaaattgccacatgttgcaactccc

SEQ ID NO: 15660 - DNA, 120 bp, synthetic construct
  misc_feature 1..120: note = Artificially Synthesized Probe
  source 1..120: mol_type = other DNA
cctcatatgcaaacatgtctctttcatgccagttaaatgaagaaaaaggcaagacctaaatcctgaactcctaccgctataacacattcctctgcgctaaggaactgacattctaaaggt

SEQ ID NO: 15661 - DNA, 120 bp, synthetic construct
  misc_feature 1..120: note = Artificially Synthesized Probe
  source 1..120: mol_type = other DNA
ttggaaataaatcaaatttgtatttctcaacaaaacctgccctccatccctctatgaagaaaaatgcaagttgctcttctgcgctccaaatacaccgagacgaaaacaagcccaggtgaa

SEQ ID NO: 15662 - DNA, 120 bp, synthetic construct
  misc_feature 1..120: note = Artificially Synthesized Probe
  source 1..120: mol_type = other DNA
acaattcctgccacagagacactttaaaaagggcaatggccggcatttctgaggtttccttttcctaaccaggaacagattctctttgacaaatgggtcttgccacttgttatgaaccca

SEQ ID NO: 15663 - DNA, 120 bp, synthetic construct
  misc_feature 1..120: note = Artificially Synthesized Probe
  source 1..120: mol_type = other DNA
gactggtggtccccatgtgccacccgagctgtcaggcactcagtatgtttttaaagcctcactttttaattatatcatctaatacatggaaaattgtgtatcactactgtaaatgaaaag

SEQ ID NO: 15664 - DNA, 120 bp, synthetic construct
  misc_feature 1..120: note = Artificially Synthesized Probe
  source 1..120: mol_type = other DNA
ggtggcctctattgaggtgtgagctgcaactttccattttctgatcacgagctctaactcattttcccacaacatattatgggcggctcataagattttctatcaaaacgtaaatagatt

SEQ ID NO: 15665 - DNA, 120 bp, synthetic construct
  misc_feature 1..120: note = Artificially Synthesized Probe
  source 1..120: mol_type = other DNA
tgtgttgggtgttgctttgaaacccacagagaagacctaatgtatcacgttgttttcctcctctttaaatattattgacacagcgatacttcactacaggccattaatactggtctgctt

SEQ ID NO: 15666 - DNA, 120 bp, synthetic construct
  misc_feature 1..120: note = Artificially Synthesized Probe
  source 1..120: mol_type = other DNA
cttgttcctaaatcaatgccacgtccccagcttacagctccttgttcctaaatcaacactgtgtccccagcttacaaacgctgtgtcacactctacggtttctatctggttttattttca

SEQ ID NO: 15667 - DNA, 120 bp, synthetic construct
  misc_feature 1..120: note = Artificially Synthesized Probe
  source 1..120: mol_type = other DNA
ggtcatccatggaaatctgacttctacggcaaactcaagtttaagcaaaagtagactacccttcggaaatgcacactggaacgatagcaaaacatgaaatcgacgtaagtgtccatcagt

SEQ ID NO: 15668 - DNA, 120 bp, synthetic construct
  misc_feature 1..120: note = Artificially Synthesized Probe
  source 1..120: mol_type = other DNA
ataatctgtgcttgcaaagaaaaaaagtcattttgtttcaaatccagtgataaagaatggatcttttcttctcctagcaaaccattttcccttgccccaggggaccatgtatgacctgag

SEQ ID NO: 15669 - DNA, 120 bp, synthetic construct
  misc_feature 1..120: note = Artificially Synthesized Probe
  source 1..120: mol_type = other DNA
gcctggcttcagcttttacccggcagcctcagagctctacttttaattaagtgccttaccaaataattaatttgtactcctctgtggaataggaaaagagccatgaaataattaaagaat

SEQ ID NO: 15670 - DNA, 120 bp, synthetic construct
  misc_feature 1..120: note = Artificially Synthesized Probe
  source 1..120: mol_type = other DNA
aaaaaaaaaaaactctacttcaagttgtaattctgagattttgaagcacgtttggctggactccatccttcatgccccacgtaagagggttgtgttctgggtagagaagtcatctttgtg

SEQ ID NO: 15671 - DNA, 120 bp, synthetic construct
  misc_feature 1..120: note = Artificially Synthesized Probe
  source 1..120: mol_type = other DNA
ccttgcccaacctagtttttatttttttaattaactgcttgcctcactaataaaacttctcttttgccaaaggatgcttctcaggttgcattccccagtcaggggaataaccagaggatt

SEQ ID NO: 15672 - DNA, 120 bp, synthetic construct
  misc_feature 1..120: note = Artificially Synthesized Probe
  source 1..120: mol_type = other DNA
cagcaacccagaggtagagttcacgtgcaaagaatgggaagctggagccttaaataatttgcctaagttcaggcagcagcaaaagccagagccagaatctggaagcaggtacagctgatt

SEQ ID NO: 15673 - DNA, 120 bp, synthetic construct
  misc_feature 1..120: note = Artificially Synthesized Probe
  source 1..120: mol_type = other DNA
tgggagaaggtcatatgaaaaattagtgccacagagtttcggcccctaaaaagcttccagtttcacggtgaggggaaatgttgtaaactaaaacctctggtggggagagtcacttttgtt

SEQ ID NO: 15674 - DNA, 120 bp, synthetic construct
  misc_feature 1..120: note = Artificially Synthesized Probe
  source 1..120: mol_type = other DNA
agggcaggagatgtttggcttctgtcatgagctgacctgtgtcccccaaaatccacaggggaagccctgaaccctcatgtgactgtacttggggacagggcctctaaagaggtaaaggta

SEQ ID NO: 15675 - DNA, 120 bp, synthetic construct
  misc_feature 1..120: note = Artificially Synthesized Probe
  source 1..120: mol_type = other DNA
ctcctcgtttggaaaacttggtgactctctaaggtgataggaaaagcaaaaattgctctgttaatgcttccagtgcccaatttgggagtaaagaatgggttttatcaccaaaaagaagac

SEQ ID NO: 15676 - DNA, 120 bp, synthetic construct
  misc_feature 1..120: note = Artificially Synthesized Probe
  source 1..120: mol_type = other DNA
tgatggctgattttaaaacctcttagggtatgaagtgtgttgtagaaatgctaaatgctaatagatacataaacagtaagatggaagcgggagaaacacacacctccccctttcctcaca

SEQ ID NO: 15677 - DNA, 120 bp, synthetic construct
  misc_feature 1..120: note = Artificially Synthesized Probe
  source 1..120: mol_type = other DNA
ttcctcgtggaattactgagttcacatcccttttcctttttagagagacagatcctataggcagcatgaatggaaatgcaaagactccatcgatttttaccaacttttccaaggaaagtc

SEQ ID NO: 15678 - DNA, 120 bp, synthetic construct
  misc_feature 1..120: note = Artificially Synthesized Probe
  source 1..120: mol_type = other DNA
catttccaaaagtaaacctgtaacgcatcatgtctcaaagacaggaaaccccatggacaccccagctccatcatgcggtcatgacattttggaccaggagggcctcctgtgtggtcctct

SEQ ID NO: 15679 - DNA, 120 bp, synthetic construct
  misc_feature 1..120: note = Artificially Synthesized Probe
  source 1..120: mol_type = other DNA
tctactgattgcatgatgggaaaatatggaataattgcccattcttattttcattttcaggagaaagaaaacaggagtgagacaccaaaacgcagggctttgtttacagagaaggccgcg

SEQ ID NO: 15680 - DNA, 120 bp, synthetic construct
  misc_feature 1..120: note = Artificially Synthesized Probe
  source 1..120: mol_type = other DNA
tgtggtgagtaaatgtttactgttcaattttatcacgttgatatactcagacttcttctgaaatgagacacaggctttctcctttcacctttgtttccaagatgctcttcctgcctctag

SEQ ID NO: 15681 - DNA, 120 bp, synthetic construct
  misc_feature 1..120: note = Artificially Synthesized Probe
  source 1..120: mol_type = other DNA
ctttgagctttgttggaaacagcacacgaggtaacaccaaccaagcatttaaatttctgatttggatctatgagcattgctaatgacacactcactgcacacttgaaactcttggatttc

SEQ ID NO: 15682 - DNA, 120 bp, synthetic construct
  misc_feature 1..120: note = Artificially Synthesized Probe
  source 1..120: mol_type = other DNA
tctcacaacatagaaagaaggggaaatttacaaaagagcatgccagagtctatgtctcccggtgattgttaaaagttggtagaggcctcttctctatcatctttgtttcaaaatccctta

SEQ ID NO: 15683 - DNA, 120 bp, synthetic construct
  misc_feature 1..120: note = Artificially Synthesized Probe
  source 1..120: mol_type = other DNA
aaaaactacaacaataagagatcaaatattccataactcaccaaagacttcagaatcaacttgggtgagaagagcatccttttctgaatgtggatgaagctgccccgatcccgagtttgt

SEQ ID NO: 15684 - DNA, 120 bp, synthetic construct
  misc_feature 1..120: note = Artificially Synthesized Probe
  source 1..120: mol_type = other DNA
aagcacttccatgtttgtcctctcatatatgactcgtaaggccagtgaacacctgtaagaatctgaaggaaaatcaaccataaaggagaaaagttaatgttaccccctcaagcttaggag

SEQ ID NO: 15685 - DNA, 120 bp, synthetic construct
  misc_feature 1..120: note = Artificially Synthesized Probe
  source 1..120: mol_type = other DNA
cagccacccatccatccacccacccacccactcacccacccatccttgcatccacccaccagtttacctgttcatccatccatctatccctctatccatccatccaatcacccacccatt

SEQ ID NO: 15686 - DNA, 120 bp, synthetic construct
  misc_feature 1..120: note = Artificially Synthesized Probe
  source 1..120: mol_type = other DNA
atatcatcttttccctttttgctctctcatttgtctctctttttcttcccttgtatcttgcaaatccctcagataaaagtgggttgctgaaatgagaggctcagatagagcagagggaaa

SEQ ID NO: 15687 - DNA, 120 bp, synthetic construct
  misc_feature 1..120: note = Artificially Synthesized Probe
  source 1..120: mol_type = other DNA
caaatcacaaacatgtctgtctattacaattgtctaatggtcccaggtccaacactaagggaaacacatccattcactacagcctagtaattaagacaaaaatagacacggaagccgcga

SEQ ID NO: 15688 - DNA, 120 bp, synthetic construct
  misc_feature 1..120: note = Artificially Synthesized Probe
  source 1..120: mol_type = other DNA
ttcatttaaatcagattaataacgttaacaaacgccatggcaaagggcccagtggtgcttcttgaaatgcattttttgctttaaaacgatagcaaggtgcatttgcaaatgaacgccagc

SEQ ID NO: 15689 - DNA, 120 bp, synthetic construct
  misc_feature 1..120: note = Artificially Synthesized Probe
  source 1..120: mol_type = other DNA
cctgtatgatgtttctaacacacggctaaggtggccagagaagacaggcgtagcgtgcatgctctgatggaatttataaccgggagcatataaatccctgtttgtgacgtagaaaaccgt

SEQ ID NO: 15690 - DNA, 120 bp, synthetic construct
  misc_feature 1..120: note = Artificially Synthesized Probe
  source 1..120: mol_type = other DNA
atataagaaagtataaacagagtgaaattaattcattaacattaggaagtagaaactcactctaacgtgacccacgctagcatgagataccgtgtaactgtactgggtctggatccccca

SEQ ID NO: 15691 - DNA, 120 bp, synthetic construct
  misc_feature 1..120: note = Artificially Synthesized Probe
  source 1..120: mol_type = other DNA
tgctgcccgttattgctgccactgtcattatcactgtggctctgtgagttacacctgtgcttctcagctactgcaacttacctccttcagccaacactacacatacatgagctccaggga

SEQ ID NO: 15692 - DNA, 120 bp, synthetic construct
  misc_feature 1..120: note = Artificially Synthesized Probe
  source 1..120: mol_type = other DNA
tagaacacagcaggtattaggaaagaattggatgctattcaagccacagtaattataagggaaaacaagttcaaaagccttgagtgaaagcagcaggtaagagggaggaaacatggaaga

SEQ ID NO: 15693 - DNA, 120 bp, synthetic construct
  misc_feature 1..120: note = Artificially Synthesized Probe
  source 1..120: mol_type = other DNA
tatttactaaaacaggtggggctgtccatgggttagaatctacccacctctgtcctagtaagtattaaaataaaaaatgaggtgacctcacaaggtccctgtggagaggcagagaaatgg

SEQ ID NO: 15694 - DNA, 120 bp, synthetic construct
  misc_feature 1..120: note = Artificially Synthesized Probe
  source 1..120: mol_type = other DNA
tttagtcctcaatgggaaatgggaaagggctttgttttcagtgtgcatttatccctgataaacaaaaatcacggcacaaagcagaacggtggctgttttcttgtgactcattattaacaa

SEQ ID NO: 15695 - DNA, 120 bp, synthetic construct
  misc_feature 1..120: note = Artificially Synthesized Probe
  source 1..120: mol_type = other DNA
ttctatatttggtagataccaccattacctccaaacagagctgctaaccactggtatctatcagcagtttcaattcctcttgatgtgtgagggtcattttgtcttctatgacaatgccaa

SEQ ID NO: 15696 - DNA, 120 bp, synthetic construct
  misc_feature 1..120: note = Artificially Synthesized Probe
  source 1..120: mol_type = other DNA
gccgcgcctccttgtcagtgtgatggttggtaactagattggcaggtaaagccacaatgcagttgatgtaccctcatctgctctattattaaacatccaaaatacattgttaatatttta

SEQ ID NO: 15697 - DNA, 120 bp, synthetic construct
  misc_feature 1..120: note = Artificially Synthesized Probe
  source 1..120: mol_type = other DNA
gctcttccgtttacgttctattgtccgggtcttatttttgctttcaattccttttgtaatggaggtagcagttgttattgacaattaataggggcttcaaaggcagtcatgtttggaagg

SEQ ID NO: 15698 - DNA, 120 bp, synthetic construct
  misc_feature 1..120: note = Artificially Synthesized Probe
  source 1..120: mol_type = other DNA
aagtggcaggaagtcaaatggaactgaaagccacctcgtctcctggcttccactcagaagtggtggaggaaatactctcaaatgaaatcatgtgatcctgtttaaataaatggaaaatta

SEQ ID NO: 15699 - DNA, 120 bp, synthetic construct
  misc_feature 1..120: note = Artificially Synthesized Probe
  source 1..120: mol_type = other DNA
agccttaaagtttgaactttacatacattttagacatgaaaagtacaccaagaaagccaccatggtgagttttaggcagagaccctcttgtgaataattcgtctatgatccaagatggcc

SEQ ID NO: 15700 - DNA, 120 bp, synthetic construct
  misc_feature 1..120: note = Artificially Synthesized Probe
  source 1..120: mol_type = other DNA
ttcatatcctgtcctctgtctcctctaagtgtcccttaaacttaaggccaatcctatgatttccctctaaaagcattcttccgaattctaccccaaagaaaccagtgacatttctcaaca

SEQ ID NO: 15701 - DNA, 120 bp, synthetic construct
  misc_feature 1..120: note = Artificially Synthesized Probe
  source 1..120: mol_type = other DNA
ctcccaactcagctgcaaaacagctgataaaatgaggatgggctctatgtaagtaaacagtactcgatctaccagtttacgacatcatcaaagacatgtagagagaaaatacatacacag

SEQ ID NO: 15702 - DNA, 120 bp, synthetic construct
  misc_feature 1..120: note = Artificially Synthesized Probe
  source 1..120: mol_type = other DNA
ctgaaggtccacagataatgtgtttaatttgacaaaccagggacaagaatgatgaataaaacactacttgctgataaactggaccactgtggcctttaatattttcccagtcttcctggg

SEQ ID NO: 15703 - DNA, 120 bp, synthetic construct
  misc_feature 1..120: note = Artificially Synthesized Probe
  source 1..120: mol_type = other DNA
ctggtaaataaagtgacagataaagtcagaaaaacaatttaaatcatcgagtaaaaaaggtgggcggaagtcagacgcgggggctgtttacagcagcctcaggaagatgcattaattaca

SEQ ID NO: 15704 - DNA, 120 bp, synthetic construct
  misc_feature 1..120: note = Artificially Synthesized Probe
  source 1..120: mol_type = other DNA
atgagttgtttcttcagatgtgcttacccagtaattttttttttctgtaagtcgctcactgatgcaatcagccaacttctgtctcccaggtgctgtgctcagagaaataagaatttgctc

SEQ ID NO: 15705 - DNA, 120 bp, synthetic construct
  misc_feature 1..120: note = Artificially Synthesized Probe
  source 1..120: mol_type = other DNA
tgagacctcaatagaaactctgcactctgagacctgggcgagcgtccctggtcagcaatgctctgtgtggctgcacactgagaccccattaaaaactctgcatgctgaggcccaggtgag

SEQ ID NO: 15706 - DNA, 120 bp, synthetic construct
  misc_feature 1..120: note = Artificially Synthesized Probe
  source 1..120: mol_type = other DNA
ctgccctgagcaaaacattagaaagctgggatcaatttagtaaattcttccaggctcactctccatttctttaaaactccaaatcagaacatgtggcctgagcttaggaggaacaaaatt

SEQ ID NO: 15707 - DNA, 120 bp, synthetic construct
  misc_feature 1..120: note = Artificially Synthesized Probe
  source 1..120: mol_type = other DNA
gaattaaccccatctgacctggagataaaatgatagcctgagacttactggcagaaattaacaaaccagaaagcagcagagagcacagacatgagcagagttgactgtttaaaaatatga

SEQ ID NO: 15708 - DNA, 120 bp, synthetic construct
  misc_feature 1..120: note = Artificially Synthesized Probe
  source 1..120: mol_type = other DNA
aaaatactaaaagttcattgaatggcaaaggaatatctcactcagcgaagacacatgccatgtaagtacagaagtggatgggaagaccaaatgtcgtaaatacactctcaggtctcctaa

SEQ ID NO: 15709 - DNA, 120 bp, synthetic construct
  misc_feature 1..120: note = Artificially Synthesized Probe
  source 1..120: mol_type = other DNA
ctggagctggatggtgactacacagcacagtcaacaggctctgcactaagatgtgcacactttgtatatgttatactccagtagaaattcatgtataaagtaagatgagaaagttgaatt

SEQ ID NO: 15710 - DNA, 120 bp, synthetic construct
  misc_feature 1..120: note = Artificially Synthesized Probe
  source 1..120: mol_type = other DNA
gctatagaaagctgctccaccttatttgtctgccagatacagacaaatgaaaattgtaataagatacaagtttatggccctccccctttggcataaactaaagagaggtctgataacacc

SEQ ID NO: 15711 - DNA, 120 bp, synthetic construct
  misc_feature 1..120: note = Artificially Synthesized Probe
  source 1..120: mol_type = other DNA
gatatagcagagatattggaattatcagacaatgaatctcaaatacccatgatgaatatgagaagtgctctagtgagaaaacggacaatgtgtaggaacagatgggtgatttgagagctg

SEQ ID NO: 15712 - DNA, 120 bp, synthetic construct
  misc_feature 1..120: note = Artificially Synthesized Probe
  source 1..120: mol_type = other DNA
gtttgaggaacagcaaggaagccagggtacttggaagagatctactagttataaagggaagttcacagcaagaatacaaatgcatcatctgtattatcaataatagcttattgctttttt

SEQ ID NO: 15713 - DNA, 120 bp, synthetic construct
  misc_feature 1..120: note = Artificially Synthesized Probe
  source 1..120: mol_type = other DNA
catcattttgaattctttatgtaaaaatgtacctgctttaagcctcagcaaagaccaatgtcaaaagaaagatatctgtatcacaagaacgatcacaggcccagtagatcgtgcggctgg

SEQ ID NO: 15714 - DNA, 120 bp, synthetic construct
  misc_feature 1..120: note = Artificially Synthesized Probe
  source 1..120: mol_type = other DNA
aaagttcctagtgataaaagtaatgtgccatgtggaggggaacactttcctctaatctaagggagcaaatcccaggttttaatcccatggacagaaaaaagtgtcacctttactaacaac

SEQ ID NO: 15715 - DNA, 120 bp, synthetic construct
  misc_feature 1..120: note = Artificially Synthesized Probe
  source 1..120: mol_type = other DNA
tatctgagttacacaattttaaaagtcagcaactgaagaaatgtccagaaagtcttggttaaataaaaaacacttaagtggcacagaggcaggagggggaatcctgaagctggtgcgtct

SEQ ID NO: 15716 - DNA, 120 bp, synthetic construct
  misc_feature 1..120: note = Artificially Synthesized Probe
  source 1..120: mol_type = other DNA
aaattaaaatatggtgctatccacttaaaccctactgggctgaacttacacatatgcatgatattgacccctgaattgatcagagattgatgctgaaaccacccaaaagcctccatgact

SEQ ID NO: 15717 - DNA, 120 bp, synthetic construct
  misc_feature 1..120: note = Artificially Synthesized Probe
  source 1..120: mol_type = other DNA
tccaggagcagaacctgtgatcctggcgtcctgacactgcaatccttgcatcctggcactgccttgttctgtccaggagcagaacctatgatcctggcatcctgacactgccttgttctg

SEQ ID NO: 15718 - DNA, 120 bp, synthetic construct
  misc_feature 1..120: note = Artificially Synthesized Probe
  source 1..120: mol_type = other DNA
tcttccttcctggtgtgtgtaccgctagctttgcaccagttccgcccactcaccaaaaagtccatctaaatccatccatgcttatttttaatttaaccttaatcctgcaggatcagtaca

SEQ ID NO: 15719 - DNA, 120 bp, synthetic construct
  misc_feature 1..120: note = Artificially Synthesized Probe
  source 1..120: mol_type = other DNA
atcataaaatattggggaaatggtgccttttcatctctgcaatgtgagagctctatagcatcagaaactctccttatcttacagaccatgtagaaacatgtggggaaaagtcctacatgc

SEQ ID NO: 15720 - DNA, 120 bp, synthetic construct
  misc_feature 1..120: note = Artificially Synthesized Probe
  source 1..120: mol_type = other DNA
tcattgtcatcagcatctccatctgactggtggccctggaactcctcctttgtcctttcagttgggcatctcccatcattcccccagccatctccactcccgattctctgtgccgtcttc

SEQ ID NO: 15721 - DNA, 120 bp, synthetic construct
  misc_feature 1..120: note = Artificially Synthesized Probe
  source 1..120: mol_type = other DNA
gggcagggaatgatgcaggcacacattaattcactgctagtgacccccattttattaggaaagaaataaaatacatgtagggtaatgggcacattgtgatttatataacaagcgtgttcc

SEQ ID NO: 15722 - DNA, 120 bp, synthetic construct
  misc_feature 1..120: note = Artificially Synthesized Probe
  source 1..120: mol_type = other DNA
aggaaactgcctgatctccgttccagatgtaacccagttcttaggctattatgggactgtggggacattaaaggacaggaagcacagccctcccctcaaacatcagaacttcccaagact

SEQ ID NO: 15723 - DNA, 120 bp, synthetic construct
  misc_feature 1..120: note = Artificially Synthesized Probe
  source 1..120: mol_type = other DNA
gctcaccaggcgatggaaattgcgcctctgatccagaaaagtccctgtgcactaaagtcaagactgtttcaaagagattatattatcttagacagcaggattaaattaatatggcaatga

SEQ ID NO: 15724 - DNA, 120 bp, synthetic construct
  misc_feature 1..120: note = Artificially Synthesized Probe
  source 1..120: mol_type = other DNA
cacagtctctctcagtcctgggaggggattttttttcaatttcaagtcatgtcaataaaagtgattttcataaactaacctagaggaatttttatggctggggagacacaggcttacctg

SEQ ID NO: 15725 - DNA, 120 bp, synthetic construct
  misc_feature 1..120: note = Artificially Synthesized Probe
  source 1..120: mol_type = other DNA
gagaagtcactgacacacaggtttcggctaaaagttactattctgattagggcctgtgtgaagtaggaatgtgcctgtggagtgtgatgtgaacacagctctccgaaattttcccatgcg

SEQ ID NO: 15726 - DNA, 120 bp, synthetic construct
  misc_feature 1..120: note = Artificially Synthesized Probe
  source 1..120: mol_type = other DNA
ccttccatgattgcagctgatgtgcctgggggcgcgggcaccattaattcctgtatcttcccctctgtccaatccatcaccaaatcccactgctggcacctccaagacacctgcagactg

SEQ ID NO: 15727 - DNA, 120 bp, synthetic construct
  misc_feature 1..120: note = Artificially Synthesized Probe
  source 1..120: mol_type = other DNA
tctgtctggttcttgctgcttttttcagtctggaatcttcggaggctcttgctctgctctaatgcagaccttctcccacacactccctccacctggaagctcctcctgccttcgtattgg

SEQ ID NO: 15728 - DNA, 120 bp, synthetic construct
  misc_feature 1..120: note = Artificially Synthesized Probe
  source 1..120: mol_type = other DNA
attccgctcagcacctgtggacgcgggagcatctatcatcaatcctctgcaattctattttatgataaatacagaaatgacccttaacccacctttccctcctttttgctttttcctatt

SEQ ID NO: 15729 - DNA, 120 bp, synthetic construct
  misc_feature 1..120: note = Artificially Synthesized Probe
  source 1..120: mol_type = other DNA
gtcctcaggtctacgaatacgacattatctttttttccttgtttcctgctaatctgtttaatgggaaagtttccctcctcacaacccatatacagaatgcttccttagttgcaggcttta

SEQ ID NO: 15730 - DNA, 120 bp, synthetic construct
  misc_feature 1..120: note = Artificially Synthesized Probe
  source 1..120: mol_type = other DNA
tccatctgcccacagtgagacatcactgcagccacactccatctgcccacagtgagacaccactgcagccacactccatctgcccacggtgacacatcactgcagccacactccatctgc

SEQ ID NO: 15731 - DNA, 120 bp, synthetic construct
  misc_feature 1..120: note = Artificially Synthesized Probe
  source 1..120: mol_type = other DNA
tctgcacacggtgagacatcactgcagccacactccatctgcacacggtgacacatcactgcagccacactccatctgcacacggtgacacatcactgcagccacactccatctgcccac

SEQ ID NO: 15732 - DNA, 120 bp, synthetic construct
  misc_feature 1..120: note = Artificially Synthesized Probe
  source 1..120: mol_type = other DNA
aacattctatcaaactgacatttccttaaatcagactgaccttccacaatatggaataaatcaggtggtttaactctactgactaaagagtgttttccccaaccctgagccaggcggctt

SEQ ID NO: 15733 - DNA, 120 bp, synthetic construct
  misc_feature 1..120: note = Artificially Synthesized Probe
  source 1..120: mol_type = other DNA
actagtgacagggcccttcgatccatgtggaagtgcctaatgccacttttttgatgagcaaaaatggcagctaataatttaaggcaaaaaaggaacacaatccagtatgacagtttttcc

SEQ ID NO: 15734 - DNA, 120 bp, synthetic construct
  misc_feature 1..120: note = Artificially Synthesized Probe
  source 1..120: mol_type = other DNA
tggcaggcagctccgcctgcggccctggtgcaggatccactaggtgaagccagttgggctcctgagtctagtgaggacttggagaacatttatctctagctaaggggttgtaaatactcc

SEQ ID NO: 15735 - DNA, 120 bp, synthetic construct
  misc_feature 1..120: note = Artificially Synthesized Probe
  source 1..120: mol_type = other DNA
cacgacaaaacctaataccaattagctaatgaccattctacacacttacacacatatgtatgtgctcagaaagtgagacacactcagtgagagacacacactacatacaatcactcacac

SEQ ID NO: 15736 - DNA, 120 bp, synthetic construct
  misc_feature 1..120: note = Artificially Synthesized Probe
  source 1..120: mol_type = other DNA
taaacactcagcttaataaagaccaaggctgagaaacaagtaatccaggggaagaaaggcagaaagatggtgctgcgcatctggtaattgactgtaatctggcatacttctgggtgagag

SEQ ID NO: 15737 - DNA, 120 bp, synthetic construct
  misc_feature 1..120: note = Artificially Synthesized Probe
  source 1..120: mol_type = other DNA
tttccatgcctcagtttacctatgtgtcccacgtccctctgacatgacgttgtatgtttccatttatttcctctgaaaatcacataatatgctgctttgtttctctagcaaggaatggct

SEQ ID NO: 15738 - DNA, 120 bp, synthetic construct
  misc_feature 1..120: note = Artificially Synthesized Probe
  source 1..120: mol_type = other DNA
caaaaattacagtagggagtagttataggttgaaaggttagagctggggagaaaagcaggctatattttcctgttttcatgaaatttctcttcttacacctggcacctaagcagcctgct

SEQ ID NO: 15739 - DNA, 120 bp, synthetic construct
  misc_feature 1..120: note = Artificially Synthesized Probe
  source 1..120: mol_type = other DNA
ctgactgagcagagcaggccagagcgtggggacttcatccctcagtgtccctgtcactccttcaacatgaaggagaaagccatgaaacgacgcaggtggctgtctgatcaggcccactgg

SEQ ID NO: 15740 - DNA, 120 bp, synthetic construct
  misc_feature 1..120: note = Artificially Synthesized Probe
  source 1..120: mol_type = other DNA
gtctttaaatttaaaaggtctaattgtacatccacctttaatcagtgctaaaatatcaacacagattgaaacttcccttcccaagctgcctgccagaggatgtgataaccctgctgccga

SEQ ID NO: 15741 - DNA, 120 bp, synthetic construct
  misc_feature 1..120: note = Artificially Synthesized Probe
  source 1..120: mol_type = other DNA
tggacatcttgagtgagcaatggcaaccaacaacttataaactgctcagactttacattttgctctcacatcaaattattcccacttcatttgatctgaatgcagcctcgcggagtgtaa

SEQ ID NO: 15742 - DNA, 120 bp, synthetic construct
  misc_feature 1..120: note = Artificially Synthesized Probe
  source 1..120: mol_type = other DNA
gctcacggtggaggtgcccgtggtggtggaggtgctcatggtggtggaggtgctcgtggtggaggtgctcttagtatggaggtgctcatggtggtggaggtgctcgtggtggtggaggtg

SEQ ID NO: 15743 - DNA, 120 bp, synthetic construct
  misc_feature 1..120: note = Artificially Synthesized Probe
  source 1..120: mol_type = other DNA
ggtgctcatgtaggatctaaatgccattcagttgaaccttttggttctgctgaccagcgtgcatttaacccactcatcctcacccaaggactcttgtccaataatgcaaatacgtagaat

SEQ ID NO: 15744 - DNA, 120 bp, synthetic construct
  misc_feature 1..120: note = Artificially Synthesized Probe
  source 1..120: mol_type = other DNA
ataattttttaaataattgagcccttcagagtctctcaaaagtcataatatttggacaattcatgtctcaagacctgagcttgtcccaaggggcccataggtatggcagagcaggagaaa

SEQ ID NO: 15745 - DNA, 120 bp, synthetic construct
  misc_feature 1..120: note = Artificially Synthesized Probe
  source 1..120: mol_type = other DNA
cttcctactaaggtatgaagacactgccctttctattcagaggtgagggaaagagtggaaacagcattcgcttatggacaaagaggaaaagaaaaggctgtgaaaacaggcatggcagcc

SEQ ID NO: 15746 - DNA, 120 bp, synthetic construct
  misc_feature 1..120: note = Artificially Synthesized Probe
  source 1..120: mol_type = other DNA
aacacttgtcaaaatgccagaagtaattacctggctgttcagaatggagtcatggggtgcagctcctaccatctccgattccctaaagcctccatccaaaccgaaacttgtttacaacct

SEQ ID NO: 15747 - DNA, 120 bp, synthetic construct
  misc_feature 1..120: note = Artificially Synthesized Probe
  source 1..120: mol_type = other DNA
ttcatcagtctgacaggtgtctcattcacctgcacatggaggcaattttctcagcaagtggctgttttgaacatttccaaagcatcctccttcatttctaataagagtgcaacttccctt

SEQ ID NO: 15748 - DNA, 120 bp, synthetic construct
  misc_feature 1..120: note = Artificially Synthesized Probe
  source 1..120: mol_type = other DNA
gtcgatagttaaggctggctggattgtaagtatgtgttataaaggaattcacttcactttgccattacgcttttcaaaataagcacgtttgtctgctttatgagaggccagaagcctggg

SEQ ID NO: 15749 - DNA, 120 bp, synthetic construct
  misc_feature 1..120: note = Artificially Synthesized Probe
  source 1..120: mol_type = other DNA
gtagagtaagtgcctccttgagcaaaacccacttatttttaatattcactaataccctgtgctcatacccaaggtcataaattagcagaattcccgggaaagcattgcctacgataaaga

SEQ ID NO: 15750 - DNA, 120 bp, synthetic construct
  misc_feature 1..120: note = Artificially Synthesized Probe
  source 1..120: mol_type = other DNA
ttaaaaatcatgcatgaatgtaaacaattttgcacacgttcaagaagcaagaaacattctgactcacacagccacaggagttaacatggaggcactggtgcaagttagcaaattcaggtg

SEQ ID NO: 15751 - DNA, 120 bp, synthetic construct
  misc_feature 1..120: note = Artificially Synthesized Probe
  source 1..120: mol_type = other DNA
ctcaagtctccacaaaccttaaatcagactgcagaagtttagtacaactttgcaaagcactgtatttcaaccacaaattctcagccccctaaatcaccaccttgagcaaaggagttactg

SEQ ID NO: 15752 - DNA, 120 bp, synthetic construct
  misc_feature 1..120: note = Artificially Synthesized Probe
  source 1..120: mol_type = other DNA
taatcatataacaaagattactcaagctctatctgtaagtacatctcaaaaatgtgtgattcgcaatgcccagaaccctgggctctaaacagtgaaaccgtctggaagtcggccggtttt

SEQ ID NO: 15753 - DNA, 120 bp, synthetic construct
  misc_feature 1..120: note = Artificially Synthesized Probe
  source 1..120: mol_type = other DNA
ctttttaaaccatttaattcatctgaagaccccatatgcagtagaaactgattattgtgcctacagccatctcaaaatgaattaggaatccagggtccattcccaaagacagacagactg

SEQ ID NO: 15754 - DNA, 120 bp, synthetic construct
  misc_feature 1..120: note = Artificially Synthesized Probe
  source 1..120: mol_type = other DNA
aggtgatcaattcatatttgtgaccggttcaacattttggttgaatggttttctaaaattaagagaaagtcctcattaacacaagcagcactcatgtacccccgaaacaacgctgaggac

SEQ ID NO: 15755 - DNA, 120 bp, synthetic construct
  misc_feature 1..120: note = Artificially Synthesized Probe
  source 1..120: mol_type = other DNA
cggtaacgtgaccccaactgcataaccttccctaacttgaatatgtgcaggctctgacgtgggaagaagtctctatcccgaggccccactacaggtctaactccatgagtcactgttctg

SEQ ID NO: 15756 - DNA, 120 bp, synthetic construct
  misc_feature 1..120: note = Artificially Synthesized Probe
  source 1..120: mol_type = other DNA
cccacgacgcccatccacacccacgacgcccatccacacggatgcccatacactccgacacccatccacacccacgacgcccatccacacccacgacacccatccacacccatgacgccc

SEQ ID NO: 15757 - DNA, 120 bp, synthetic construct
  misc_feature 1..120: note = Artificially Synthesized Probe
  source 1..120: mol_type = other DNA
ctttggctttgaagcatactgtgaaattcttcgtggctcccttctccaccaggcgctccttacacagtgctcacctatctaattacagacctgcttagaaattccaggggccaattttca

SEQ ID NO: 15758 - DNA, 120 bp, synthetic construct
  misc_feature 1..120: note = Artificially Synthesized Probe
  source 1..120: mol_type = other DNA
acaggatcatcgactgcctagcatctgtgttgaagcgctttcacacacatcaataaccttattatcttcttcacatttttcaattttatactgtagagaggatgggagcactggagctta

SEQ ID NO: 15759 - DNA, 120 bp, synthetic construct
  misc_feature 1..120: note = Artificially Synthesized Probe
  source 1..120: mol_type = other DNA
ttcacacaaaccttcttcccctgatgaaagagggagtcttcacacaaaccttcttcccctgaggaaagggggagtcttcacacaaaccttcttcccctgatgaaggagggagtcttcaca

SEQ ID NO: 15760 - DNA, 120 bp, synthetic construct
  misc_feature 1..120: note = Artificially Synthesized Probe
  source 1..120: mol_type = other DNA
taaaccttcttcccctgatgaaagagggagtcttcacacaaaccttcttcccctgatgaaagagggagtcttcacacaaaccttcctcccctgatgaaagagggagtcttcacacaaacc

SEQ ID NO: 15761 - DNA, 120 bp, synthetic construct
  misc_feature 1..120: note = Artificially Synthesized Probe
  source 1..120: mol_type = other DNA
tcagaggtgtgatactcgaacaatgtgttcacatgggtcctatgaagaatatattaggagaaacaaaagctatttattgccgctaggagtcatctcccaattgggctggaaataacatga

SEQ ID NO: 15762 - DNA, 120 bp, synthetic construct
  misc_feature 1..120: note = Artificially Synthesized Probe
  source 1..120: mol_type = other DNA
accacaggaaagaaaacactgagctccatctgttcttagaccaaccgtccggttgagaatgaagaagatgaacaaatctctgacaaaagcttccatgtttcggaaatggttttaaataag

SEQ ID NO: 15763 - DNA, 120 bp, synthetic construct
  misc_feature 1..120: note = Artificially Synthesized Probe
  source 1..120: mol_type = other DNA
gatagatagatgagcagagagatggttgggtgggtgggtgaaagataggtgatggatgggtagagagatggttgggtgggtgaaggataggtgatagatggatgggtagagagatggttg

SEQ ID NO: 15764 - DNA, 120 bp, synthetic construct
  misc_feature 1..120: note = Artificially Synthesized Probe
  source 1..120: mol_type = other DNA
ttatagatgaataagttgaaacccttgtagttttaggtgctagctccaaatagtccaattctaatatcaatgccaccactagaatcacaacttcggcgttcttggctgagagccttctgc

SEQ ID NO: 15765 - DNA, 120 bp, synthetic construct
  misc_feature 1..120: note = Artificially Synthesized Probe
  source 1..120: mol_type = other DNA
tgctttattttcttaaagcattgagcaactgcatcactgtgcagattgtatcttctttgcaattactttgccattacatgggatttgggaaatcctttctgtgccagggaatgtcttgcc

SEQ ID NO: 15766 - DNA, 120 bp, synthetic construct
  misc_feature 1..120: note = Artificially Synthesized Probe
  source 1..120: mol_type = other DNA
cgtctctgactggagagacacattcggaagagtgaagtgatttttatttggtcctggtgagaaaaataagaataacgccaagcagggtatctagtattgacggtgtaggtcataagtaaa

SEQ ID NO: 15767 - DNA, 120 bp, synthetic construct
  misc_feature 1..120: note = Artificially Synthesized Probe
  source 1..120: mol_type = other DNA
tggtgtccagtacccaaatccagcatttacccaatgcttcacacttgaagtgcattgaaaagtctagagaaaagaatgggttcttcttgccaatctgaatccattaacagtagaaattag

SEQ ID NO: 15768 - DNA, 120 bp, synthetic construct
  misc_feature 1..120: note = Artificially Synthesized Probe
  source 1..120: mol_type = other DNA
ggctttgagtgatattactaacgcacagcactgtcgctgcagtggttaatctgcactgccctgatgtgtagacaaaattatccagggctttatagtcatcgaggccacagggaaaaccag

SEQ ID NO: 15769 - DNA, 120 bp, synthetic construct
  misc_feature 1..120: note = Artificially Synthesized Probe
  source 1..120: mol_type = other DNA
atgatgtcataagaaataatgggatttatgtgacagctacataaccactaacaaaacatattcagcataactagcacttccacaaaaccgcaggagagtctgagagtgacagcttgcgca

SEQ ID NO: 15770 - DNA, 120 bp, synthetic construct
  misc_feature 1..120: note = Artificially Synthesized Probe
  source 1..120: mol_type = other DNA
caccattttgctgagactctgtgaaggtgaatggggttgcttgggctcggggactggaagaagaaggacgtttatctcgtgaacgcgggacgctccttatgggagaggagtgggagacat

SEQ ID NO: 15771 - DNA, 120 bp, synthetic construct
  misc_feature 1..120: note = Artificially Synthesized Probe
  source 1..120: mol_type = other DNA
tcttcctccccccatcccatcagtggtcatgcttcacttcctctccccactcctccctcataaggatcattgtgttcatgaaataaacttattccttctttatttatttttattttccat

SEQ ID NO: 15772 - DNA, 120 bp, synthetic construct
  misc_feature 1..120: note = Artificially Synthesized Probe
  source 1..120: mol_type = other DNA
aatgaccgtactgccaaaagcaatctacaaattcaatccaatccccatcaaaataccaccatcattcttcacagaaccagaaaagacaatcctaaaattcatatggaaccaaaaaagagc

SEQ ID NO: 15773 - DNA, 120 bp, synthetic construct
  misc_feature 1..120: note = Artificially Synthesized Probe
  source 1..120: mol_type = other DNA
aaacaatcccactgtatacaaagaaagacctcacaccttccattgcaccaaaagagtttaaaacccagctcaccatgaaagccatggagactttaaaagaaatcccacctggtatttaag

SEQ ID NO: 15774 - DNA, 120 bp, synthetic construct
  misc_feature 1..120: note = Artificially Synthesized Probe
  source 1..120: mol_type = other DNA
gggatagtgccaaagatacaggcctgggatggaatccttcgtggaaaggaatgcagtttgaaccattcaggacacttgatggcaggtggctccttccagttcaaagtaagaggtaaaaag

SEQ ID NO: 15775 - DNA, 120 bp, synthetic construct
  misc_feature 1..120: note = Artificially Synthesized Probe
  source 1..120: mol_type = other DNA
gcacactgctctttgtaatgcccatgaagtcagatcatcccactcagcccatgatggttagcagcctggacacatttccttctggttcttagagacagattattattatttttttttttt

SEQ ID NO: 15776 - DNA, 120 bp, synthetic construct
  misc_feature 1..120: note = Artificially Synthesized Probe
  source 1..120: mol_type = other DNA
ctctatcaaactccatcccagctccatcctcagctccttcccaaccctactaagtgtcatcatactccatcccagctccatcctcagctttatctcaactccagtcagctccatcaaact

SEQ ID NO: 15777 - DNA, 120 bp, synthetic construct
  misc_feature 1..120: note = Artificially Synthesized Probe
  source 1..120: mol_type = other DNA
tagatcatcactgctccattctagctccatcctgctctgtcctcagattcatctcagctttttttctgagcttcatcccatctccatttccagttccttccctgatctatcttagctcta

SEQ ID NO: 15778 - DNA, 120 bp, synthetic construct
  misc_feature 1..120: note = Artificially Synthesized Probe
  source 1..120: mol_type = other DNA
tcagcataaagaggaagattttaagatcctggaagcatctcagctctttcaggtcttgggagcttcttctattttcaacctctgtgaaatctgtcctgtgtggtttccctagagttaata

SEQ ID NO: 15779 - DNA, 120 bp, synthetic construct
  misc_feature 1..120: note = Artificially Synthesized Probe
  source 1..120: mol_type = other DNA
tgtttccatgggcaggcatcacactgtgtagatcaacacacactttgcactcagatctaccctcatccttgaagctgcctttctacaattcttcaaatcctgcttcccaggcagaagtca

SEQ ID NO: 15780 - DNA, 120 bp, synthetic construct
  misc_feature 1..120: note = Artificially Synthesized Probe
  source 1..120: mol_type = other DNA
tctacttctagaaacttctgatcccaggctggctggggtgcttctcatgcatgtcccctagtgccctccatgctaatgacccatacactcttctgtcttttcctaataaatggcagaatt

SEQ ID NO: 15781 - DNA, 120 bp, synthetic construct
  misc_feature 1..120: note = Artificially Synthesized Probe
  source 1..120: mol_type = other DNA
tgaatgatgtcacccgtgtaaagagtcagtgagtgaatgacgtcacccctatgtgaaggggacagtgagtgaatgatgtcacccctgtgtgaagagtcagtgagtgaatgacgtcactct

SEQ ID NO: 15782 - DNA, 120 bp, synthetic construct
  misc_feature 1..120: note = Artificially Synthesized Probe
  source 1..120: mol_type = other DNA
aggagattttcatccttccccttaaacactggtttccactgcctctaaataacttaccaaagctgctgaaatcacctttcacttctctaaacaggttccctcatgtaattaacaagagcc

SEQ ID NO: 15783 - DNA, 120 bp, synthetic construct
  misc_feature 1..120: note = Artificially Synthesized Probe
  source 1..120: mol_type = other DNA
ttccaaatacagcaatgaacagcaagaccagccctgccctcgaggggttcacattctagagatgctggtgaatagaaatcaatcatgctatgatgggttgaattatgtcacctaaaaatt

SEQ ID NO: 15784 - DNA, 120 bp, synthetic construct
  misc_feature 1..120: note = Artificially Synthesized Probe
  source 1..120: mol_type = other DNA
tttagggcaatgaggggaactggcaaaagagaatgaaaaggactgtgacagaggcaagcagcgagctggcaagaattccaagaaggagaagggccgggcctcagattggtccagagagat

SEQ ID NO: 15785 - DNA, 120 bp, synthetic construct
  misc_feature 1..120: note = Artificially Synthesized Probe
  source 1..120: mol_type = other DNA
aaaccaaaccaaacaaaaaaaccctttgtaggtgaaggtgacagctggtccagtttgggagtggttacagcaatggaaaggtgaggctgcatccacgtaccacaggccttccctgcccag

SEQ ID NO: 15786 - DNA, 120 bp, synthetic construct
  misc_feature 1..120: note = Artificially Synthesized Probe
  source 1..120: mol_type = other DNA
aacaacaacaacaaaagttccctcccctggataaagaacaggttggagaccagaggagacagaagggaaacagctggtggcctccagattgtctcaatgagacatgagctcaagcagcat

SEQ ID NO: 15787 - DNA, 120 bp, synthetic construct
  misc_feature 1..120: note = Artificially Synthesized Probe
  source 1..120: mol_type = other DNA
ccatgcacctctccctgcacatggacacaagtactcattccacaagtagattctacattggcattaactgcatgaatgaatgaacacgagaatgtcaaaaacagcaaaaaatccaacatt

SEQ ID NO: 15788 - DNA, 120 bp, synthetic construct
  misc_feature 1..120: note = Artificially Synthesized Probe
  source 1..120: mol_type = other DNA
ggagccagaaattaaagaccagaatattcaaaagtaactgaatatacagggaaaattagaaagtcaccacacatgctcagggaaaggctcagataataccacaagtttacacctcaggct

SEQ ID NO: 15789 - DNA, 120 bp, synthetic construct
  misc_feature 1..120: note = Artificially Synthesized Probe
  source 1..120: mol_type = other DNA
acaaacagagaattctcctcttacatttgaaagcagcaagaaagaagcagttcatcacacaccaggctttccaaataatattatcagcagaaactttgcagaacagaaagcagtgaacca

SEQ ID NO: 15790 - DNA, 120 bp, synthetic construct
  misc_feature 1..120: note = Artificially Synthesized Probe
  source 1..120: mol_type = other DNA
cttttaaggactatttctatagtacacaacaagggatatctatttgcattaactataagcataaacatgacagtctttgttttcaagcatgtcaataatgtcttctttttttgtcgccca

SEQ ID NO: 15791 - DNA, 120 bp, synthetic construct
  misc_feature 1..120: note = Artificially Synthesized Probe
  source 1..120: mol_type = other DNA
gggatgaaccctgaaacatgatggtaactgaaataacctgggcataaaaggacaaattctgtgtgtctacccatgtgaggttcctagaatcctcaaattcagagagacacagagtagagt

SEQ ID NO: 15792 - DNA, 120 bp, synthetic construct
  misc_feature 1..120: note = Artificially Synthesized Probe
  source 1..120: mol_type = other DNA
tttcaaggctgcattctgtgtaattttacaattgagaaacaagccattttcctttaaagagtggctgctggaaggggaggggtcccagatgtcctctcttttcctgtacattttggatgt

SEQ ID NO: 15793 - DNA, 120 bp, synthetic construct
  misc_feature 1..120: note = Artificially Synthesized Probe
  source 1..120: mol_type = other DNA
gactgtgctcacaatgatcacgcagccattcctatttcatctctaaagccacagccatcatctgtcattccgaggcctgaacttccttagaaagcagttggacgtcatcctgaaaatgag

SEQ ID NO: 15794 - DNA, 120 bp, synthetic construct
  misc_feature 1..120: note = Artificially Synthesized Probe
  source 1..120: mol_type = other DNA
accagcccgatctgggacattttactatttactgcaaaacccaccaggagctagggagccaaatgtgaagggaaaatgagtcaactttgatataaactcttttgataagacaatactcaa

SEQ ID NO: 15795 - DNA, 120 bp, synthetic construct
  misc_feature 1..120: note = Artificially Synthesized Probe
  source 1..120: mol_type = other DNA
aaggatgagactgtactgctcactataaacactttttaaatgccagcagctaactaaagatctaggtacggaaggtctatatagcgtcacctttaaaaagtgtgccaaataggatcggga

SEQ ID NO: 15796 - DNA, 120 bp, synthetic construct
  misc_feature 1..120: note = Artificially Synthesized Probe
  source 1..120: mol_type = other DNA
tctgtatctcaggaccagtggagtcacagccagattccaacaggagagggtgacggggccagatttggttttgtcgagtcctctttgggttcaacgtgcacggcgggtgagaaagaaaga

SEQ ID NO: 15797 - DNA, 120 bp, synthetic construct
  misc_feature 1..120: note = Artificially Synthesized Probe
  source 1..120: mol_type = other DNA
ataaccccacaccacctgaaatcttcttaaatgataataaatccatcatgctacagatattcttttaagaccacaaagcaaagaggagcaagtgacaaggcagggcatgtccgccctcag

SEQ ID NO: 15798 - DNA, 120 bp, synthetic construct
  misc_feature 1..120: note = Artificially Synthesized Probe
  source 1..120: mol_type = other DNA
cccggtaccatctgccattttgctgcttgccttctccgaggtgcaagaaagttttgtcataagaaacacttgaaggaagaaacatttcagctgcagctgtctcccttgttagcattgaga

SEQ ID NO: 15799 - DNA, 120 bp, synthetic construct
  misc_feature 1..120: note = Artificially Synthesized Probe
  source 1..120: mol_type = other DNA
cccttcgtccagtcttcaagaatccctctagtttgtaaaaaggataaaaatgtaaatggcaaaggattactgtgtccatcagaaaatgtgagagagaaaatcatgcctggaaaagccgag

SEQ ID NO: 15800 - DNA, 120 bp, synthetic construct
  misc_feature 1..120: note = Artificially Synthesized Probe
  source 1..120: mol_type = other DNA
acaacacacaccacaccatgcaacacactatgtgccacacacaccacatatacaacacactgtgcaccatgcacacacaccacaaatacaatacacaccatgccacacactacacaccac

SEQ ID NO: 15801 - DNA, 120 bp, synthetic construct
  misc_feature 1..120: note = Artificially Synthesized Probe
  source 1..120: mol_type = other DNA
tccaagcaaagagcctggaaacgggaaagctcatcctgacttatgtaaagcagtcttgagaaaatggagtccatattttagtgtaagcttcaagtttctgctgcttacaacttacctaaa

SEQ ID NO: 15802 - DNA, 120 bp, synthetic construct
  misc_feature 1..120: note = Artificially Synthesized Probe
  source 1..120: mol_type = other DNA
taccgacacacacactcatacacacacatgcatatgcacaaactgacacatctacccaacacacacatatacacaaacacacatatgcagaaatcgacacactacctgacatactcatat

SEQ ID NO: 15803 - DNA, 120 bp, synthetic construct
  misc_feature 1..120: note = Artificially Synthesized Probe
  source 1..120: mol_type = other DNA
tatacacaaaccaatacacatctacccgacacacatacacacacatgcaaatacgcacagatacacatctacccaacacacacactcacacacatgtaaatatgcatagatacacatcta

SEQ ID NO: 15804 - DNA, 120 bp, synthetic construct
  misc_feature 1..120: note = Artificially Synthesized Probe
  source 1..120: mol_type = other DNA
tgtacatccaggcagacacgtccttctctttgaaacaccaattctatcacttgaagaaaacacaacacttgtacaaagcaaagcatcaaatgtcagattcattaacggggtgacctgaga

SEQ ID NO: 15805 - DNA, 120 bp, synthetic construct
  misc_feature 1..120: note = Artificially Synthesized Probe
  source 1..120: mol_type = other DNA
ggaaggagagtgtgggaggaaggcgaagtgtgtgcagtctatatttagaatgatgtctagccgagcatgaggtgtgagggcgctgagtatccgaatcacttacgtgctgttttctcctcc

SEQ ID NO: 15806 - DNA, 120 bp, synthetic construct
  misc_feature 1..120: note = Artificially Synthesized Probe
  source 1..120: mol_type = other DNA
actctggagtttacagaggttaaatatcaaattattggtaccagatcacaaaagtcgtgattatcagatccagaattggaactcaggtctaagggccatcaaagacatgatctccacccc

SEQ ID NO: 15807 - DNA, 120 bp, synthetic construct
  misc_feature 1..120: note = Artificially Synthesized Probe
  source 1..120: mol_type = other DNA
atttctgatggatattcaaaaccagaactgctgatgttttcttcctgcacttgccaacaggcatggaaccactaaccagtaagagaatctgaggagagaatgactaaccaaagactcttc

SEQ ID NO: 15808 - DNA, 120 bp, synthetic construct
  misc_feature 1..120: note = Artificially Synthesized Probe
  source 1..120: mol_type = other DNA
accatgaacaaaaagatcaccaacttccacatttaacatgaaacaaacaccagagacgtcatcttacctcttggtaaagtctatcatcgtcgtcctgcactccgtcatctgtaaaagaca

SEQ ID NO: 15809 - DNA, 120 bp, synthetic construct
  misc_feature 1..120: note = Artificially Synthesized Probe
  source 1..120: mol_type = other DNA
ttcaacataattgctctggtaggcttagtctgttaagaaagcttttagaggcaaaagttcaaacagataaaaatcattaatacagatccccatctccccagcagaaagcccacattgcac

SEQ ID NO: 15810 - DNA, 120 bp, synthetic construct
  misc_feature 1..120: note = Artificially Synthesized Probe
  source 1..120: mol_type = other DNA
ccagtgctcagagaagattgggatattggacttgaatctcaaatccacctgaccctgtaaccatcactagttcagttccccagaggtggaaaacccacagaatggaaggacagactcatc

SEQ ID NO: 15811 - DNA, 120 bp, synthetic construct
  misc_feature 1..120: note = Artificially Synthesized Probe
  source 1..120: mol_type = other DNA
cagagctgcgggaggagccaaaaagctcctgaaagggtaaatatgtggttacataaacaagaaagaccgtcttcttttctcctcttactttatctaaaaaacaactgattgttagcaagg

SEQ ID NO: 15812 - DNA, 120 bp, synthetic construct
  misc_feature 1..120: note = Artificially Synthesized Probe
  source 1..120: mol_type = other DNA
ctgccctaaagaaggttcatgggcccatttccgagctttgaaggaaaacctgactttcttttgtattcagtgttgaaatctctgtcctcataaaggtttatgtaaaatagctcatggcca

SEQ ID NO: 15813 - DNA, 120 bp, synthetic construct
  misc_feature 1..120: note = Artificially Synthesized Probe
  source 1..120: mol_type = other DNA
ttgatgactaagaccctctgatgtaaaggcctgaacgtccatgacaggcatttctgagacagcattatgtgtagtttagcatgggatgaagcggacagagtcctttaaagtcaatctgta

SEQ ID NO: 15814 - DNA, 120 bp, synthetic construct
  misc_feature 1..120: note = Artificially Synthesized Probe
  source 1..120: mol_type = other DNA
catgcattcactgatggaatgctaccttcaaagaaagcttccagcaacaaactcaggaaaatacatctcactttctcacaaacaaaaacatgcctaaaaccgcagcaaagcctgccttca

SEQ ID NO: 15815 - DNA, 120 bp, synthetic construct
  misc_feature 1..120: note = Artificially Synthesized Probe
  source 1..120: mol_type = other DNA
agttccattaaccgttcttctgcaaggccctgtgtttcctaagggggctgaaaagctggttgtgatattttgacaaatggtgagagaataaaaatcatgtgacttctcaataaagaaggt

SEQ ID NO: 15816 - DNA, 120 bp, synthetic construct
  misc_feature 1..120: note = Artificially Synthesized Probe
  source 1..120: mol_type = other DNA
ttctaacagcaaacaccgtcactgtcaacactgatgagtcctgcttaacacaaagacaggtgtgtcgacccaccctgaactttgcaaaatgatgcttattcccctctcaaacccacacag

SEQ ID NO: 15817 - DNA, 120 bp, synthetic construct
  misc_feature 1..120: note = Artificially Synthesized Probe
  source 1..120: mol_type = other DNA
gacaagtgaggcatgggcccagcatactgtaagtgcttaataaattataactattatcatgaaacaaggagaggatgagaaatcattttagttttccactcttttccccctttcccatcc

SEQ ID NO: 15818 - DNA, 120 bp, synthetic construct
  misc_feature 1..120: note = Artificially Synthesized Probe
  source 1..120: mol_type = other DNA
caacattgttctcacaccagcacagacacactaaaatgttttggaggccagagagacttgaccaatggatagaacaagcaaacagtttacagggaaaatacaccattaagatcctgtgaa

SEQ ID NO: 15819 - DNA, 120 bp, synthetic construct
  misc_feature 1..120: note = Artificially Synthesized Probe
  source 1..120: mol_type = other DNA
cgtgtctttccccctcactgacaccccatctcacgccacgtgtctttccccctcaatgacaccccatctcacgccaggtgtctttccccctcaatgacacaccatctcacgccacgtgtc

SEQ ID NO: 15820 - DNA, 120 bp, synthetic construct
  misc_feature 1..120: note = Artificially Synthesized Probe
  source 1..120: mol_type = other DNA
tgtctgggctgacctgctctccaagctggcaccaattatagtacagggaacccaatttccaaccaaaagacctccaaacttttataaagcaatgtcatcaatgtgtaaatcactgcctat

SEQ ID NO: 15821 - DNA, 120 bp, synthetic construct
  misc_feature 1..120: note = Artificially Synthesized Probe
  source 1..120: mol_type = other DNA
aatagaaagtaagcaacacaattctttgctgtttgttaagcctcattacagacacatcagatttaggtggcgtagtgtggcatcaagggcatgaatgataagaaaacagagtcatctgag

SEQ ID NO: 15822 - DNA, 120 bp, synthetic construct
  misc_feature 1..120: note = Artificially Synthesized Probe
  source 1..120: mol_type = other DNA
agcccagaaacaagtgggcatttctagaaggtcaaggagcatctatatggaaagaccttttctccttaagatctcggtgtcatctcctgcccctctaattccacccttgtgaacataacc

SEQ ID NO: 15823 - DNA, 120 bp, synthetic construct
  misc_feature 1..120: note = Artificially Synthesized Probe
  source 1..120: mol_type = other DNA
ttactgcacatctcctttgcaccagctacctttgaaggcgcagagataaatccatgagcaaagtccttgcttttgtgtgacttccatctatgttagaaggaacaggaaacaaataaaaac

SEQ ID NO: 15824 - DNA, 120 bp, synthetic construct
  misc_feature 1..120: note = Artificially Synthesized Probe
  source 1..120: mol_type = other DNA
gcagaccaacagacaccagcacgccagcaggccaccgactgatgggataagagcagactgacagacaccagcacgccagcaggccaccaaccagtgggacaagagcagaccgacagacac

SEQ ID NO: 15825 - DNA, 120 bp, synthetic construct
  misc_feature 1..120: note = Artificially Synthesized Probe
  source 1..120: mol_type = other DNA
gcaaacagctttgatttttactgagtgtgatgagaagcccgtggtgtgctctgagcagtgggatatcatctgattgacaaatttacaagaaccactctgcaggcctgagacaaggtcaga

SEQ ID NO: 15826 - DNA, 120 bp, synthetic construct
  misc_feature 1..120: note = Artificially Synthesized Probe
  source 1..120: mol_type = other DNA
gtaacctctacaaaccacacacacagcattttatgaacatgctgagttatctcagaagcatccactacctgccatttgaagatgaagagaaatgaggaagtatgttttgcagcatccagt

SEQ ID NO: 15827 - DNA, 120 bp, synthetic construct
  misc_feature 1..120: note = Artificially Synthesized Probe
  source 1..120: mol_type = other DNA
aattcagtaggagctcattatcgcattctctcctcatttgggcttccacagggagaaactgacataatcatatgccagcatgttgtctattttcactggaaacaacacaagtgtagtaaa

SEQ ID NO: 15828 - DNA, 120 bp, synthetic construct
  misc_feature 1..120: note = Artificially Synthesized Probe
  source 1..120: mol_type = other DNA
agcatcaccatgtaatcagcggtctccattaaccaccagcgttcaggttggaactggggagatttggaaaagtgacaggaaggatgacatcatatgcagaggatgcttatacagcggaga

SEQ ID NO: 15829 - DNA, 120 bp, synthetic construct
  misc_feature 1..120: note = Artificially Synthesized Probe
  source 1..120: mol_type = other DNA
tgtgccagtgattaggtggccaattctcttctaattttttttttttaagccaagaggcgtgcttgggtttagagcactgagcagcactgggatgcattcaaatatgaatgaatttcttca

SEQ ID NO: 15830 - DNA, 120 bp, synthetic construct
  misc_feature 1..120: note = Artificially Synthesized Probe
  source 1..120: mol_type = other DNA
gcaagtgctttctgaatgaatgagtgaacttgggaataaccacgcgaagcgttgcatggctggagagttgcacggccggcagcagaaacaagttcttccagcttccacatgagtttccga

SEQ ID NO: 15831 - DNA, 120 bp, synthetic construct
  misc_feature 1..120: note = Artificially Synthesized Probe
  source 1..120: mol_type = other DNA
acggtgtctgatgcatctcctaaagtgatttccaaaacgctttcgctgtcatcagagtcttgagctgaaagtatggcattacacaagtaccgtatctatatgaaaaaaaactacagcact

SEQ ID NO: 15832 - DNA, 120 bp, synthetic construct
  misc_feature 1..120: note = Artificially Synthesized Probe
  source 1..120: mol_type = other DNA
atacatctcccttcctgacctatgtcttcataaacacagttcatctgctcataagtgtgatgcccatgcaactgtcgtcaagatatctgagggcttatgtctgcaaaaatacgaatgtta

SEQ ID NO: 15833 - DNA, 120 bp, synthetic construct
  misc_feature 1..120: note = Artificially Synthesized Probe
  source 1..120: mol_type = other DNA
tggggaagacagtttggtggctgcttccaaaaccaaacattctcttactatgtgatccagtgattacactccttggtacttaaccagtagaagttaaagacttatatccacacaaaaacc

SEQ ID NO: 15834 - DNA, 120 bp, synthetic construct
  misc_feature 1..120: note = Artificially Synthesized Probe
  source 1..120: mol_type = other DNA
tgctttaaagctctttgaaaggagaccagatgtgaattatgaataagtgaaggaagagagtctctttttaaagcttttaccaggtaaacttttgtcatatgcgttcagcccgcagcctcg

SEQ ID NO: 15835 - DNA, 120 bp, synthetic construct
  misc_feature 1..120: note = Artificially Synthesized Probe
  source 1..120: mol_type = other DNA
catatttcataggtgatcagtattctctgtgtatttcataggtgatacctgcatggggttctcaattctctctgcgtatttcctatttgccgttttacatgaggcttttctaaagcgcac

SEQ ID NO: 15836 - DNA, 120 bp, synthetic construct
  misc_feature 1..120: note = Artificially Synthesized Probe
  source 1..120: mol_type = other DNA
gacgatgtttattgctttctgttcccaataatgaggacagaggtgaatggggctttttaagctgtgggagatgggataggagagagaaaagggaggttagagaaggaagaggacgaccca

SEQ ID NO: 15837 - DNA, 120 bp, synthetic construct
  misc_feature 1..120: note = Artificially Synthesized Probe
  source 1..120: mol_type = other DNA
aattttagtatttgttatctccaaaagggaagtcatgttttatcagaacccactgcaggatggtcttgggaaaaggctgttgggaaataaatgggtcggaaccttctccatatcacaaag

SEQ ID NO: 15838 - DNA, 120 bp, synthetic construct
  misc_feature 1..120: note = Artificially Synthesized Probe
  source 1..120: mol_type = other DNA
gaagagcatggtgcgtctgtcactgggaggggctggacagaggacagtcagcaaacaagaaacaccaagcggggctggctcaccatcgcctgtgctggaggggtcttcggaatctcccag

SEQ ID NO: 15839 - DNA, 120 bp, synthetic construct
  misc_feature 1..120: note = Artificially Synthesized Probe
  source 1..120: mol_type = other DNA
ttcaattctcttgggtttattcgaggatattacatggtaactcgacatttaactgactgaggaactcccaagctgttttccagcacagcagcaccacaaacaatctcaccagtaatggat

SEQ ID NO: 15840 - DNA, 120 bp, synthetic construct
  misc_feature 1..120: note = Artificially Synthesized Probe
  source 1..120: mol_type = other DNA
ctgtaaaaatgtgaaaagtccccacattgtacctctgacttgggcttcatcaaaatgtcatggacaggctgagtatgaataatttccagcttagagactttcgaatcctggacacacaag

SEQ ID NO: 15841 - DNA, 120 bp, synthetic construct
  misc_feature 1..120: note = Artificially Synthesized Probe
  source 1..120: mol_type = other DNA
actatagctatcatccaaattgcttaaatttgtccaaggactagctgaaatcaactattcttcccttaagaaagagaatatgtgagagagcaagagcgtgagaaagagcgagagcgagcg

SEQ ID NO: 15842 - DNA, 120 bp, synthetic construct
  misc_feature 1..120: note = Artificially Synthesized Probe
  source 1..120: mol_type = other DNA
caaggaaaaggaactggctctggagctgcctgggtttaaactaccaccaatgctacgagcttaatgacctttgcttcagcacactatttaagtaatctgtaaaacaaggataataataat

SEQ ID NO: 15843 - DNA, 120 bp, synthetic construct
  misc_feature 1..120: note = Artificially Synthesized Probe
  source 1..120: mol_type = other DNA
cattttcaaaccccctgttgtgaagatgttttcagtctcagttcaacataccaatgaagggaggtttcctaagacaatgtggaataatttttaagaccgtagctgcccaaacctggaaat

SEQ ID NO: 15844 - DNA, 120 bp, synthetic construct
  misc_feature 1..120: note = Artificially Synthesized Probe
  source 1..120: mol_type = other DNA
agcatcccaccaatatcatcttcaccatccatagcaggatccccaccatcatcaccccaatcatcaacaacagcatctccactatctccaccatcaataatagcatcccatcaccaccaa

SEQ ID NO: 15845 - DNA, 120 bp, synthetic construct
  misc_feature 1..120: note = Artificially Synthesized Probe
  source 1..120: mol_type = other DNA
caggcagtcagaccttaatgttatcttcccttgttccctgaagatcgctgttgttctgttccttttcagggtgccctgatttcatattgttcaaacacatgttttacagtttgtaccatt

SEQ ID NO: 15846 - DNA, 120 bp, synthetic construct
  misc_feature 1..120: note = Artificially Synthesized Probe
  source 1..120: mol_type = other DNA
ggagttgagtcatagacattaacaaccgtaattgaaagaatgctattagaaagggtcagaaaagcaatcctggttttggaagaatgtgattctcttcagctggaggaaatcagagctgct

SEQ ID NO: 15847 - DNA, 120 bp, synthetic construct
  misc_feature 1..120: note = Artificially Synthesized Probe
  source 1..120: mol_type = other DNA
ttaagtcctaaactacttgggatcaacaaatttgtagcgagttgacagtatcacggggtgccaatgtgaactcctggatatctgctaatgatgatgcattctgagagtctggaattatct

SEQ ID NO: 15848 - DNA, 120 bp, synthetic construct
  misc_feature 1..120: note = Artificially Synthesized Probe
  source 1..120: mol_type = other DNA
ctgctgagtccaaggacagacgtatctttagcctttaagcagcttccaaatacaggttataacagcttgcattgcattccccctaatttgagaatttctatgtcctcatcaagagttggt

SEQ ID NO: 15849 - DNA, 120 bp, synthetic construct
  misc_feature 1..120: note = Artificially Synthesized Probe
  source 1..120: mol_type = other DNA
agctaccatgaagatacgtgtgtaaatctttgaatgcacacatgctttcgtttgtcttgagtagaagtgggatggagggatcacaggcaagtaaacatttcacttttgaagaaactgtca

SEQ ID NO: 15850 - DNA, 120 bp, synthetic construct
  misc_feature 1..120: note = Artificially Synthesized Probe
  source 1..120: mol_type = other DNA
caaagtgctatgattataggcgtgagccactgcacctttagccactcatcagtcaatgggcacttagactggttccatatctttgcaattgtgaattgtgctgcaataaacatatatcta

SEQ ID NO: 15851 - DNA, 120 bp, synthetic construct
  misc_feature 1..120: note = Artificially Synthesized Probe
  source 1..120: mol_type = other DNA
atgacctgatgacccaaaagttactaccccttccctagatatttctgcataaaccactcttaaccctcatgtaattaaaagtagctataaatatgactgcaaagcttccctgagctgcta

SEQ ID NO: 15852 - DNA, 120 bp, synthetic construct
  misc_feature 1..120: note = Artificially Synthesized Probe
  source 1..120: mol_type = other DNA
gggttttgtaggtatatcatatcattggcaaacagcaatagtttgacttcctcttttccattttggatgccctttatttccttctgttttctgactgctctggctaggacttccagtact

SEQ ID NO: 15853 - DNA, 120 bp, synthetic construct
  misc_feature 1..120: note = Artificially Synthesized Probe
  source 1..120: mol_type = other DNA
attttcaaaaaaccaattttttgtttcatcttttgtatttgtttctttccttcaaattgatttagctctgttctgatctttgttattttcttcttccagctttgggtttagtttgttcat

SEQ ID NO: 15854 - DNA, 120 bp, synthetic construct
  misc_feature 1..120: note = Artificially Synthesized Probe
  source 1..120: mol_type = other DNA
cccctttaccttaactttatatgcatctttatgtgttaggtgactatgttgagatagcagatatttggtttgtgtctttttatccattctaccaatctgttatcttttaaatggaggatt

SEQ ID NO: 15855 - DNA, 120 bp, synthetic construct
  misc_feature 1..120: note = Artificially Synthesized Probe
  source 1..120: mol_type = other DNA
agtgggagaggcatgctaacaccgcttctaatccactgtcttgaaaaaaaatgcccatttttaatgtgctgcttttttagtttttagagatttttatacattctgaaattttttatctta

SEQ ID NO: 15856 - DNA, 120 bp, synthetic construct
  misc_feature 1..120: note = Artificially Synthesized Probe
  source 1..120: mol_type = other DNA
atcttcaatgcagtgttgaattgaagaggtaagagcagacatcctcgtctaatgccagattttaagtggaaagcattcagcccttcaccagttgatgtaatcttagatgtaggtttccgt

SEQ ID NO: 15857 - DNA, 120 bp, synthetic construct
  misc_feature 1..120: note = Artificially Synthesized Probe
  source 1..120: mol_type = other DNA
gaataacacttttagtcttgaagtccactctgtctaatattaacatgaccacaccagctttcctgcctttcgagtttccatcgtacacattttccatcctttaggtctaagttgccttct

SEQ ID NO: 15858 - DNA, 120 bp, synthetic construct
  misc_feature 1..120: note = Artificially Synthesized Probe
  source 1..120: mol_type = other DNA
attggtaagtaatgaatttctgactaaacctcctcagtaacagagtggacagggaatttatggtgttctgcatgatgagttcaaggactgtgaactggtgctaccacagtcaataaaaca

SEQ ID NO: 15859 - DNA, 120 bp, synthetic construct
  misc_feature 1..120: note = Artificially Synthesized Probe
  source 1..120: mol_type = other DNA
tatcttaacaaagaagaaaaatacctaagccaaaatgccaccaagtgctcattttctgaataaccgtttgacagctgtgctaaatgtctgtgtgctggaatgaccacggagctcattaat

SEQ ID NO: 15860 - DNA, 120 bp, synthetic construct
  misc_feature 1..120: note = Artificially Synthesized Probe
  source 1..120: mol_type = other DNA
tctcatggggcatcactaggatacctcccaatggctcatagcacgaattgctcaatatctaccaaagaccttcactctcaacgagttcctgcaatttgctacggtttgtttctaatgtgt

SEQ ID NO: 15861 - DNA, 120 bp, synthetic construct
  misc_feature 1..120: note = Artificially Synthesized Probe
  source 1..120: mol_type = other DNA
gacctccactgagcctggttcagactctcaacctaatttctatttcattttttaaagattattttatcaacgatagttacggttacagctattgctgactgggcactccatgaggagctt

SEQ ID NO: 15862 - DNA, 120 bp, synthetic construct
  misc_feature 1..120: note = Artificially Synthesized Probe
  source 1..120: mol_type = other DNA
tcctctgggaggactctacctttcgaggtctgtgggggttgcccagagttaacttaagtcatttcaatggctcgatggcaggaacataatagaaactgggcccacattgcttcccacaca

SEQ ID NO: 15863 - DNA, 120 bp, synthetic construct
  misc_feature 1..120: note = Artificially Synthesized Probe
  source 1..120: mol_type = other DNA
acctgtgaactctggcctaacaagtcgtcataaaaatcatgcctgcttttccatttacaaaatttactgagattcctaattccgtgtccttaagatgttgagtgggcttcgcatagtgaa

SEQ ID NO: 15864 - DNA, 120 bp, synthetic construct
  misc_feature 1..120: note = Artificially Synthesized Probe
  source 1..120: mol_type = other DNA
catggcttctgctgggtttgtgggtagaccaaggaaggtggcggcccagaagctggaaaaggcaggaaccaggttctcgcctgataaatgtgcattgttttaggccttaggttgatgtac

SEQ ID NO: 15865 - DNA, 120 bp, synthetic construct
  misc_feature 1..120: note = Artificially Synthesized Probe
  source 1..120: mol_type = other DNA
aggcctttgcttttttgcacatgaccaaaagggcccagagcatgctcctaaataaggaagataattcccataggagacgcctctaccagccaggtttaagaacacctgcgtgagtgactg

SEQ ID NO: 15866 - DNA, 120 bp, synthetic construct
  misc_feature 1..120: note = Artificially Synthesized Probe
  source 1..120: mol_type = other DNA
acatcacaccacttaacatatgaaatacgagccttaaatagatccttgcaattctccctccagctctgatgcggtgttgacatgaattctgttgacagctatgttatcaacctcacaata

SEQ ID NO: 15867 - DNA, 120 bp, synthetic construct
  misc_feature 1..120: note = Artificially Synthesized Probe
  source 1..120: mol_type = other DNA
atggacatttgcaatcccataaatattatttacctttgctctggcattcagttaagttccttgggaccagttcaaccctctcggttcttacttttaagtcttgtttggcagtatcagagc

SEQ ID NO: 15868 - DNA, 120 bp, synthetic construct
  misc_feature 1..120: note = Artificially Synthesized Probe
  source 1..120: mol_type = other DNA
tatatcccatgaaaatatccttcaaatacaaaggtagacttatggctctcttagaaatacgacactgaaggacatcatccccagcagagctccacaatgagggatatgaacagcccaggc

SEQ ID NO: 15869 - DNA, 120 bp, synthetic construct
  misc_feature 1..120: note = Artificially Synthesized Probe
  source 1..120: mol_type = other DNA
acttttctcactaattgctaatcaatgcaaatggaaccacctcataaatgtatctttaaattgtcgtattcatctttgcttcgcctctgtccatgcctggggacttgtttgtgatgctgc

SEQ ID NO: 15870 - DNA, 120 bp, synthetic construct
  misc_feature 1..120: note = Artificially Synthesized Probe
  source 1..120: mol_type = other DNA
catcttatgttttatatccaaccttcatggccacctgaagttctctgtgaagtcatcggtgctcatatacacagctggtatttgttgtccctgttcctgcctcaggagcatttagcatga

SEQ ID NO: 15871 - DNA, 120 bp, synthetic construct
  misc_feature 1..120: note = Artificially Synthesized Probe
  source 1..120: mol_type = other DNA
gagtggggagtgaggatgctgaaagccaacacggttccttatcatgcagcaggaatcagaacatgatccctttaatgaggaatgaaacaaatccattactataaaatcgcttgaaaatct

SEQ ID NO: 15872 - DNA, 120 bp, synthetic construct
  misc_feature 1..120: note = Artificially Synthesized Probe
  source 1..120: mol_type = other DNA
cgccaattgaagattaagtatggtatcaattaggccaaagaaaacctcaaaattaccaaagagtaaaagttgaacaaagtcacattctgactaaaatgcagtagaattagacactaattt

SEQ ID NO: 15873 - DNA, 120 bp, synthetic construct
  misc_feature 1..120: note = Artificially Synthesized Probe
  source 1..120: mol_type = other DNA
agagaatagcatccactacactgcatttacaaatgtggaaatcgctattaaaggatagcttataaatatcccaaatcacacaacagtgtaagcatattttaccaataatcgtggaagaca

SEQ ID NO: 15874 - DNA, 120 bp, synthetic construct
  misc_feature 1..120: note = Artificially Synthesized Probe
  source 1..120: mol_type = other DNA
ctgttttgtgggcagggataattgctcttgcctgggttcaacactcacaaagaaagaatttagaaatccaacctacagaatggtaagagctgtttttatttgtaaccatagctagtgcca

SEQ ID NO: 15875 - DNA, 120 bp, synthetic construct
  misc_feature 1..120: note = Artificially Synthesized Probe
  source 1..120: mol_type = other DNA
cagtgcacaacgcccccagtggaatttagagaggagtataaggagtttgaacacatccaaaatagaaattcaacacagctcaagttgaaaacattttggtgggtttttgtttggtttcct

SEQ ID NO: 15876 - DNA, 120 bp, synthetic construct
  misc_feature 1..120: note = Artificially Synthesized Probe
  source 1..120: mol_type = other DNA
aaataatttcttactgagaaatgagaattctcgacttatctgctttcgaccaaggccttgaagatgcaggatttttctaagagtctcatggaaaaacgaagaacccctgggcatgtctct

SEQ ID NO: 15877 - DNA, 120 bp, synthetic construct
  misc_feature 1..120: note = Artificially Synthesized Probe
  source 1..120: mol_type = other DNA
aaagatcatttggaattgctgatgtcacccctcacccatccccctgcagtggctgtgtgccccagagagagaacgcatgcacttgggagagagagcacagtgatagtgggacttggtatt

SEQ ID NO: 15878 - DNA, 120 bp, synthetic construct
  misc_feature 1..120: note = Artificially Synthesized Probe
  source 1..120: mol_type = other DNA
cttgtgtcacccgtcacccagctccaggaagctcggggagggggggagagagagagaccgtccgttcgtttgtctcggagaatgtaagagaaaaaaagtctgcctggtaatccacaaaat

SEQ ID NO: 15879 - DNA, 120 bp, synthetic construct
  misc_feature 1..120: note = Artificially Synthesized Probe
  source 1..120: mol_type = other DNA
aataattaaaaacaatcatgcaaaatctctggagttgaaaaacataactgacccattgcagaatgcctcagactctcttgacagcagagttgaccaagcaagacaaagaattagtgagct

SEQ ID NO: 15880 - DNA, 120 bp, synthetic construct
  misc_feature 1..120: note = Artificially Synthesized Probe
  source 1..120: mol_type = other DNA
caaataactccaacaacttttcagatataaagatataaatagaaacaacaaaaagttaaaaagtagggggatgaagctaaagtgtagagtttttattagttttctctgtgctggtttgtt

SEQ ID NO: 15881 - DNA, 120 bp, synthetic construct
  misc_feature 1..120: note = Artificially Synthesized Probe
  source 1..120: mol_type = other DNA
acaaactgaaattatatcaagtatcttctctgaccacaatggaataacactagaaatcaataacagggaaaattttggaaactatacaaacacatggaaattaaacaatatgcttctgaa

SEQ ID NO: 15882 - DNA, 120 bp, synthetic construct
  misc_feature 1..120: note = Artificially Synthesized Probe
  source 1..120: mol_type = other DNA
aagtctccaagcaaagaaaagcctgggacttgatcacttcactgctgaattttaccaaatatttaaagaagaatcttgctcaaactattccaaaagatagaggaggaggaaacacttcca

SEQ ID NO: 15883 - DNA, 120 bp, synthetic construct
  misc_feature 1..120: note = Artificially Synthesized Probe
  source 1..120: mol_type = other DNA
gctgaaaatagagctataatataatccagcaatcccactgctaggtttatacccaaaaggtaatcagtgtatcaaattgatatccacactcccatgtttattgcagcactgttaacaaca

SEQ ID NO: 15884 - DNA, 120 bp, synthetic construct
  misc_feature 1..120: note = Artificially Synthesized Probe
  source 1..120: mol_type = other DNA
tcctctacctgcccgccaccatatcttaggtattttgttcttcctaacaaaatcttaaaagacagcaattggaatggaataaggggtattgttactgtgaaagcaattatcatggggctt

SEQ ID NO: 15885 - DNA, 120 bp, synthetic construct
  misc_feature 1..120: note = Artificially Synthesized Probe
  source 1..120: mol_type = other DNA
gccttcccggaagtcagaagaaactgtgctcttagatataaaaaacaaacaaaacaatgcagaggtatgggagtttaagcatctcctatgaacttctgtccgtggcatatcttggagaaa

SEQ ID NO: 15886 - DNA, 120 bp, synthetic construct
  misc_feature 1..120: note = Artificially Synthesized Probe
  source 1..120: mol_type = other DNA
tacaaggaatcaccaccaccaccccttacccccagaagaggagtgtccaaaaagagacagttaaaatgcaaggtttaaatgagatccagaatcatgacataatacaaaaatgtccagatt

SEQ ID NO: 15887 - DNA, 120 bp, synthetic construct
  misc_feature 1..120: note = Artificially Synthesized Probe
  source 1..120: mol_type = other DNA
tcccacaagtctatcaatccagatacccagtgaagttatccttcaggaatcagggggaaataaagatatccccagaaaaaggaaaattgtgtttttcaccagaccaactctgaaagaatt

SEQ ID NO: 15888 - DNA, 120 bp, synthetic construct
  misc_feature 1..120: note = Artificially Synthesized Probe
  source 1..120: mol_type = other DNA
ccattaatcaacaggatctaatgaacatttatggaacactgtacccaacaagagcagagtatatgttcttttcaattgctcatagaacacaaaccatgatagacttaatgctgggccata

SEQ ID NO: 15889 - DNA, 120 bp, synthetic construct
  misc_feature 1..120: note = Artificially Synthesized Probe
  source 1..120: mol_type = other DNA
aagagaccaagctgagagaagaattttagagcttaaaggcagttctttcaaatcaacacaggcagacaaaaataaagaaaaaagagtgttaaaaaatgaataaaacctctgaaaagtatg

SEQ ID NO: 15890 - DNA, 120 bp, synthetic construct
  misc_feature 1..120: note = Artificially Synthesized Probe
  source 1..120: mol_type = other DNA
caatgatcaaaaagaacaaagaggggctttacataatgaaaaagggttcaattcaacaagaagacttaactaccctaaatatttatgcacccaacattggggcacccagattcataaaac

SEQ ID NO: 15891 - DNA, 120 bp, synthetic construct
  misc_feature 1..120: note = Artificially Synthesized Probe
  source 1..120: mol_type = other DNA
ttgaaccaggaagaaattcaaatcctgaacagatgaataatgactttcaaaattgaattgctaataaaaaaaaaacctaccaaccaaaaaagcccggaaccagacaaattcacagctgaa

SEQ ID NO: 15892 - DNA, 120 bp, synthetic construct
  misc_feature 1..120: note = Artificially Synthesized Probe
  source 1..120: mol_type = other DNA
atcaatgtataaaaaccagtagcatacaattcacttacccttagcaaaccaaaacaaaaactaaaaaactaatatcatttctacacatcaataatttccaagctgaaatccaaatcaaga

SEQ ID NO: 15893 - DNA, 120 bp, synthetic construct
  misc_feature 1..120: note = Artificially Synthesized Probe
  source 1..120: mol_type = other DNA
gccaaaccatatcagcatccaaaagaaatttaatatccagaatctgtaaggaacttaaattattcaacaagaaaaaagcagccccattaaaaaatgggtaggagacatgaacagacactt

SEQ ID NO: 15894 - DNA, 120 bp, synthetic construct
  misc_feature 1..120: note = Artificially Synthesized Probe
  source 1..120: mol_type = other DNA
ggttcactacctgggtggcaggattgttatcacaccaaactgtaacaacacacaattcacccatgcatatgtaccctcaaaccgaaaacaaaagtcaaaagaaaaataaaagagaaagtc

SEQ ID NO: 15895 - DNA, 120 bp, synthetic construct
  misc_feature 1..120: note = Artificially Synthesized Probe
  source 1..120: mol_type = other DNA
aggggcactttatcaagctaacaataaacatctacaaaaccccacatttcactgtacttaatggtgagtaaccatcaaaagctttcactgaagactaggaacaaagcaaggatgtttgct

SEQ ID NO: 15896 - DNA, 120 bp, synthetic construct
  misc_feature 1..120: note = Artificially Synthesized Probe
  source 1..120: mol_type = other DNA
aattagaaaaagggtgagagatgaaaagacatttcgacaaagaggatctactgatggcaaataaccacacgaagagatgctgaccatcatctcatcagggaaatgtcaattacacccaca

SEQ ID NO: 15897 - DNA, 120 bp, synthetic construct
  misc_feature 1..120: note = Artificially Synthesized Probe
  source 1..120: mol_type = other DNA
ggaagcaccggtgcatctgtgcacagtggggagcagtaaaagctctgcatcggacagaaatatcatccaactgtgtcccagaaggaggataaaagtaacaatattaaaattaaaaattta

SEQ ID NO: 15898 - DNA, 120 bp, synthetic construct
  misc_feature 1..120: note = Artificially Synthesized Probe
  source 1..120: mol_type = other DNA
gcctctcacgtatcactgtgtcctattatatcatatttattctcttctgtctcactttttaaaatttctggctgcaacaccctaaaactctctcagggtcattaatgggctgtggcttgc

SEQ ID NO: 15899 - DNA, 120 bp, synthetic construct
  misc_feature 1..120: note = Artificially Synthesized Probe
  source 1..120: mol_type = other DNA
cccaggcctggtcagggccagcacagactccttgacatggttttaactcacattttcacaatccctggaaaaatgcaaagcatttctataaagtagttaaggctttacatgtatatcaaa

SEQ ID NO: 15900 - DNA, 120 bp, synthetic construct
  misc_feature 1..120: note = Artificially Synthesized Probe
  source 1..120: mol_type = other DNA
aaaattgaaaacaccccaagcagacagcaaaagcatcagaccaccatgtctgcaccatccctcctcataatctgtttggcatcaagagtatgggaaatttcccctcaactcatagcttct

SEQ ID NO: 15901 - DNA, 120 bp, synthetic construct
  misc_feature 1..120: note = Artificially Synthesized Probe
  source 1..120: mol_type = other DNA
caatcagggatggaaaaagaacaaagaatgaagagggatgaagaccacttgcaagacagaaaattacctcaaaacatcaaatataagaatgattgatgttcaaggggaagctgagcaaga

SEQ ID NO: 15902 - DNA, 120 bp, synthetic construct
  misc_feature 1..120: note = Artificially Synthesized Probe
  source 1..120: mol_type = other DNA
agaatggctgtatggataaagaattaagacccaactataagctgcccacaataaaccagccatatctataaagatggacattgactgaaaggaatagaaaaatatatttcaggctgggca

SEQ ID NO: 15903 - DNA, 120 bp, synthetic construct
  misc_feature 1..120: note = Artificially Synthesized Probe
  source 1..120: mol_type = other DNA
atcaataacaagaagaaccccagaaactacataaacacatgggaattaaacctccttctaaatggccaatgagtcaatgaagaagttaagaaggaaatttaaaaatgtcttgaaacaaat

SEQ ID NO: 15904 - DNA, 120 bp, synthetic construct
  misc_feature 1..120: note = Artificially Synthesized Probe
  source 1..120: mol_type = other DNA
acattaacagaattaagaacaaaactacatgatcatttcaatagatgctaaaaaagcatttgataaaattcaacatccctttatgataaaacactcatcaaaatgggtatagaaagaaca

SEQ ID NO: 15905 - DNA, 120 bp, synthetic construct
  misc_feature 1..120: note = Artificially Synthesized Probe
  source 1..120: mol_type = other DNA
tccaggtataaattcacacgtttataaccaactcatttttcacaaaggcaccaagagcagatattggggaaaggacaatctcttcaataaatgttgctgagaaaactggatttccataca

SEQ ID NO: 15906 - DNA, 120 bp, synthetic construct
  misc_feature 1..120: note = Artificially Synthesized Probe
  source 1..120: mol_type = other DNA
tctcccaggctggagtgcaatggcacaatctccgctcactgcaacctccacctcctggattcaagcgattctcctgcctcagcctcccgagtagctgggattacaggcacctgccaccac

SEQ ID NO: 15907 - DNA, 120 bp, synthetic construct
  misc_feature 1..120: note = Artificially Synthesized Probe
  source 1..120: mol_type = other DNA
acatcgattctgtatcaatatagaaaagctttctagagagcccatttttctacactcggcacctccacaacaagcaggaagcagccggtgtgaccacacctcccaaaaccaccattacgg

SEQ ID NO: 15908 - DNA, 120 bp, synthetic construct
  misc_feature 1..120: note = Artificially Synthesized Probe
  source 1..120: mol_type = other DNA
aaaagcaagagagatcagattgttactgtgtctgtgtagaaagaagtagacataggagactccattttgttatgtactaagaaaaattcttctgccttgagattctgttaatctatgacc

SEQ ID NO: 15909 - DNA, 120 bp, synthetic construct
  misc_feature 1..120: note = Artificially Synthesized Probe
  source 1..120: mol_type = other DNA
ccattgcactgatgctggcttctcgtttcctgctccccctctttctgaacaccccccggcagacacagcgcttacatgggagtgcacgaaggacacccttccctcacgctgagctcagca

SEQ ID NO: 15910 - DNA, 120 bp, synthetic construct
  misc_feature 1..120: note = Artificially Synthesized Probe
  source 1..120: mol_type = other DNA
aacttattttattttagattcaggtcttgttaaccattgctccaggatgctttactttccttgtcttaaacgggaacttcccaggtcatgttattaagaagtgggtgcccaggaagcacg

SEQ ID NO: 15911 - DNA, 120 bp, synthetic construct
  misc_feature 1..120: note = Artificially Synthesized Probe
  source 1..120: mol_type = other DNA
aaaataccactggaacctccaggcaggtcagacgggcacttggggcttatgtgcattatttgatggaacaagcagtgtctttgtttcttaggatggccatttttatctttttgataagtg

SEQ ID NO: 15912 - DNA, 120 bp, synthetic construct
  misc_feature 1..120: note = Artificially Synthesized Probe
  source 1..120: mol_type = other DNA
ggaggcatattttgctaacagcaaagaagaaaaacatcattgaataattgagatacaattctcagtctaaggccatcaaactgtttgtggacaggaagtggaagcagaagctgagcctgg

SEQ ID NO: 15913 - DNA, 120 bp, synthetic construct
  misc_feature 1..120: note = Artificially Synthesized Probe
  source 1..120: mol_type = other DNA
tgaatcttatgattgattttacagctaacgttctacagctccccgttctcctaatcacagctctgaggtcctccccaaatgatcactgagtaagaaaacatcttgggaccttttttaagt

SEQ ID NO: 15914 - DNA, 120 bp, synthetic construct
  misc_feature 1..120: note = Artificially Synthesized Probe
  source 1..120: mol_type = other DNA
gttttggaagagtttgagaagatgggtattagttcttctggaagtgtctggtaggattcagcaatgaaaacatccgttcgtgggcattattttggctgagacattttattactgattcaa

SEQ ID NO: 15915 - DNA, 120 bp, synthetic construct
  misc_feature 1..120: note = Artificially Synthesized Probe
  source 1..120: mol_type = other DNA
cctcctaagttgtagtctctgcttagtactaggtacctcctgagtcatagtctctgctaagtactaagcactagtcactactatatatctcctaagtatcagtgtctacttagtactaac

SEQ ID NO: 15916 - DNA, 120 bp, synthetic construct
  misc_feature 1..120: note = Artificially Synthesized Probe
  source 1..120: mol_type = other DNA
aagctatgtatgtgttttgtgtgagctgacttgtgattgttttgtgtgtcagttgtgtgagttctgtaagctgtgtaagttgtgagtgtgtgtggttgtgagttgtgttagagtgaaagt

SEQ ID NO: 15917 - DNA, 120 bp, synthetic construct
  misc_feature 1..120: note = Artificially Synthesized Probe
  source 1..120: mol_type = other DNA
gacaataaacaccgcatgatgttaccctccagggatgacccaggattgtgtgaaaccaaaattcattaaaaatgaatattctgggccaggctgcattcactaattgattgattgattgat

SEQ ID NO: 15918 - DNA, 120 bp, synthetic construct
  misc_feature 1..120: note = Artificially Synthesized Probe
  source 1..120: mol_type = other DNA
ttcttcctttttgacctttttaaagacttatgcagaaagtgactgcaaccaaaagcatatggttttattgctaattcaaccttacagagctgacaggcaaggccgaccaatgtgtgggag

SEQ ID NO: 15919 - DNA, 120 bp, synthetic construct
  misc_feature 1..120: note = Artificially Synthesized Probe
  source 1..120: mol_type = other DNA
ggcttgtctcataaaatcacagcacatcgtttctgagggtaaagaattagagactccttgaaaatgggagagaatgagtgatgctttaacaagcttctaagatgaaatcctaaagctggg

SEQ ID NO: 15920 - DNA, 120 bp, synthetic construct
  misc_feature 1..120: note = Artificially Synthesized Probe
  source 1..120: mol_type = other DNA
ccctacacacgcacacacatcacacatatgtgcacatcgcacacatcacatatgtgcatatagatgacacacgtgcacacatgccacacgcatgcacccacgtcacatacatgcacatac

SEQ ID NO: 15921 - DNA, 120 bp, synthetic construct
  misc_feature 1..120: note = Artificially Synthesized Probe
  source 1..120: mol_type = other DNA
acactcagtggatgcacaacacacacacgagtttcctacacttgacactcagatgcatttatggtctactcttaccaaagtaaaaagcaacagatgaattgttgaagtatggtacatcag

SEQ ID NO: 15922 - DNA, 120 bp, synthetic construct
  misc_feature 1..120: note = Artificially Synthesized Probe
  source 1..120: mol_type = other DNA
acatcagctgactcttagcagcactgtgctatcactatttcatatcattttcaaccagtcataaatgtgtcctcctaaccatgttgccacaaaagacaattccagatgctttgctatctg

SEQ ID NO: 15923 - DNA, 120 bp, synthetic construct
  misc_feature 1..120: note = Artificially Synthesized Probe
  source 1..120: mol_type = other DNA
cccctcattacctcacatgcgtatagagcacagacacacaccttaataaagcccagagtatgctcagcacagtaagtgtgcaaatcctgaaacgctgtaaaactggacctgtgacttgaa

SEQ ID NO: 15924 - DNA, 120 bp, synthetic construct
  misc_feature 1..120: note = Artificially Synthesized Probe
  source 1..120: mol_type = other DNA
tagccaagtgctttaaatatgtgtcaagcactaatgctgggaggacttaaataaatacatgagccttttcttctaataaactggcagatccaccagatctacctgggccagtctcatttt

SEQ ID NO: 15925 - DNA, 120 bp, synthetic construct
  misc_feature 1..120: note = Artificially Synthesized Probe
  source 1..120: mol_type = other DNA
tgtccagtgctttaaaaatactctaatggtgaggaaggaaattgagaaaatgattcattagaagagcggaataactctttttaagagcaggctcgcagaagtcgagctgggcaacagatt

SEQ ID NO: 15926 - DNA, 120 bp, synthetic construct
  misc_feature 1..120: note = Artificially Synthesized Probe
  source 1..120: mol_type = other DNA
aactttctcatcctgcagtttacttcttagacatgtctactttctatagcaaaatagatctggacacgaataataaatgcgaagcatggtgttacagggaaaatcccgaggcatggccca

SEQ ID NO: 15927 - DNA, 120 bp, synthetic construct
  misc_feature 1..120: note = Artificially Synthesized Probe
  source 1..120: mol_type = other DNA
tatgtgtgtacagagaattacacaatcatgtagctttttgtggagtgaggggtgttgagccctctgtccattcaggatgctttggaaatgtttttaccaaactatgagtctcacagtttc

SEQ ID NO: 15928 - DNA, 120 bp, synthetic construct
  misc_feature 1..120: note = Artificially Synthesized Probe
  source 1..120: mol_type = other DNA
atcaaatctatctataacctaaacttatgcaaaaagaaacatggatgtgagtttattctgccaaaacgaggaataaggtccttcaagctaccagctttttgccgtctgggagcttgggtt

SEQ ID NO: 15929 - DNA, 120 bp, synthetic construct
  misc_feature 1..120: note = Artificially Synthesized Probe
  source 1..120: mol_type = other DNA
ctcatcacatgagctgagagtgggatgggtctcatcatagctaccttctatccattcttttttacctaaggctttcttgagaggcagttttcactttgcagcctgaatcctactctgctt

SEQ ID NO: 15930 - DNA, 120 bp, synthetic construct
  misc_feature 1..120: note = Artificially Synthesized Probe
  source 1..120: mol_type = other DNA
gttttccttgttgcttctgtatctgtttgttttggcctatttgttgttcatattgttaagctttagggaggaacatttggggatctggtttcacaaggtcccaggaagccagaagtctcc

SEQ ID NO: 15931 - DNA, 120 bp, synthetic construct
  misc_feature 1..120: note = Artificially Synthesized Probe
  source 1..120: mol_type = other DNA
gtttgtgtgtccatgtgtccatgagtacacatatgtgcatgtgtttgtgtccatgtgtctctggtatacacgtatttgtccacgtgtccctttgtgtacacatatgtgaatgtgtttgtg

SEQ ID NO: 15932 - DNA, 120 bp, synthetic construct
  misc_feature 1..120: note = Artificially Synthesized Probe
  source 1..120: mol_type = other DNA
aaggcctagaaaaagagtctatttgaataaagcccagagggcctatagaatccaaagtatgcactcccacaataccccaaaacaaaagcaaaacaaccatgacatttatcctacggacat

SEQ ID NO: 15933 - DNA, 120 bp, synthetic construct
  misc_feature 1..120: note = Artificially Synthesized Probe
  source 1..120: mol_type = other DNA
ttttaggaaacctgtgtctgttgcatttcgaatattctgacggggcttcccgttatttcaggagaagctaattccccacacagttagtgctcaggagggaggaatctaggagctcacttg

SEQ ID NO: 15934 - DNA, 120 bp, synthetic construct
  misc_feature 1..120: note = Artificially Synthesized Probe
  source 1..120: mol_type = other DNA
attcacacactgcacacatacagattcacacacattgcacacacacattcacacacagtgcacacatacatattcacaaaatgcacatatacattcacattgcacacacacatcacacac

SEQ ID NO: 15935 - DNA, 120 bp, synthetic construct
  misc_feature 1..120: note = Artificially Synthesized Probe
  source 1..120: mol_type = other DNA
ccaccttcatcttccagtgcaggactttggagcggcaaacggttattatttagaaggaggtcacatggtgaaagtccaagcctcctcaccttctagtcaaggcttgctgataacattgtc

SEQ ID NO: 15936 - DNA, 120 bp, synthetic construct
  misc_feature 1..120: note = Artificially Synthesized Probe
  source 1..120: mol_type = other DNA
aagtgtgcactgaaaactgccccattccgaaaagccagcttgcaccttcttgttcctggtagggttccagaacagcgatgctgcttctcacgtggggtccctggtccttgctggcacttt

SEQ ID NO: 15937 - DNA, 120 bp, synthetic construct
  misc_feature 1..120: note = Artificially Synthesized Probe
  source 1..120: mol_type = other DNA
cctctgcacatttctgtttggtcccagactctgggtgaagggatcacctggtgccatcatcagtctatcaccagccctcagagaagtgcctcagcaggaggcctggcagaactgtgtgag

SEQ ID NO: 15938 - DNA, 120 bp, synthetic construct
  misc_feature 1..120: note = Artificially Synthesized Probe
  source 1..120: mol_type = other DNA
aataattcaaagtacattgcctgaccccattaaaaaatggagttcaaatatgccaaatttttaaaacttcatccattggctgcacaaacaggaaagtgggctccagtggccctggctggt

SEQ ID NO: 15939 - DNA, 120 bp, synthetic construct
  misc_feature 1..120: note = Artificially Synthesized Probe
  source 1..120: mol_type = other DNA
ctcatatccttccatcatttaagtagattaaactcagaaacatttttagtgctgtgtacaaaccaagggcagcaaaaaacccaacctctatgccaggctgagcttctgttcttcctgact

SEQ ID NO: 15940 - DNA, 120 bp, synthetic construct
  misc_feature 1..120: note = Artificially Synthesized Probe
  source 1..120: mol_type = other DNA
gcacacagggcgggtgtgaaatatcgcagccacattgttgttgaaagccgttgccgggcctgaaaatcgcagctttttgaacgcacacactgaacctccccggctttgttttctaggaag

SEQ ID NO: 15941 - DNA, 120 bp, synthetic construct
  misc_feature 1..120: note = Artificially Synthesized Probe
  source 1..120: mol_type = other DNA
ggaagacattctgcagctctaattttaaaactatttggcattttcaaatccagttttcaagtccctggggtgggtaaaggatgcttcaagaagaaagtgctctgagccagagtaggaaca

SEQ ID NO: 15942 - DNA, 120 bp, synthetic construct
  misc_feature 1..120: note = Artificially Synthesized Probe
  source 1..120: mol_type = other DNA
agtgggtgctgctatcacaattgagggctgaacaccccaggggaaactgagtcctttcagggcagtaataagggaaggtttcgaccactgttagctgcagaagggccaacccctttacct

SEQ ID NO: 15943 - DNA, 120 bp, synthetic construct
  misc_feature 1..120: note = Artificially Synthesized Probe
  source 1..120: mol_type = other DNA
tgaggatttccatgtaggaactggaggcgtggggtaggcggacacaaaccttcagtcgctatggcaattgtgactaataagtaatttgtacttatatacaaaaatgaattcgtttgacat

SEQ ID NO: 15944 - DNA, 120 bp, synthetic construct
  misc_feature 1..120: note = Artificially Synthesized Probe
  source 1..120: mol_type = other DNA
agtcagaagtagggatataccttcaattagagtcctgaattttaggcattacttaccaaaaacactgagcaggtttgcccagaaaatacagtctgcatggaacttccacatcccctcact

SEQ ID NO: 15945 - DNA, 120 bp, synthetic construct
  misc_feature 1..120: note = Artificially Synthesized Probe
  source 1..120: mol_type = other DNA
agacagacatgggaggagccgcagacacggggagccgcagacacagggggagccgcaggcatgggggagccgcagacacagggggagccgcagacacaggaggagacacacgaggagccg

SEQ ID NO: 15946 - DNA, 120 bp, synthetic construct
  misc_feature 1..120: note = Artificially Synthesized Probe
  source 1..120: mol_type = other DNA
cacacacagggagcctgactgcagctttctggaggagaacgtggttgcatttcacatagaaacacaggtcattttgtttctgaagaattcattccgaatatttatttgctacttgacaaa

SEQ ID NO: 15947 - DNA, 120 bp, synthetic construct
  misc_feature 1..120: note = Artificially Synthesized Probe
  source 1..120: mol_type = other DNA
acacattctttcaccaccattaataatttaaaattgctaattgcacgtaatcgcaagtaatttttgttctttggtgagaatcgaggtactacgttatgtggggtgggtttgccagggctg

SEQ ID NO: 15948 - DNA, 120 bp, synthetic construct
  misc_feature 1..120: note = Artificially Synthesized Probe
  source 1..120: mol_type = other DNA
cagtcgtggtgaccgcatggccttgttggtagcttccttctttattaacttggccccatttattaaccaccagcttcctgagggatgaaaccatgcttccagcgtttccaggcccacaca

SEQ ID NO: 15949 - DNA, 120 bp, synthetic construct
  misc_feature 1..120: note = Artificially Synthesized Probe
  source 1..120: mol_type = other DNA
gtatggctcctatgagaaaacaggcgtctgcaggaggcctgagcctgccccaccagcctcagcacgtaacatgtctagaacattcctagagccagaaggatgtaggaacttccttccaga

SEQ ID NO: 15950 - DNA, 120 bp, synthetic construct
  misc_feature 1..120: note = Artificially Synthesized Probe
  source 1..120: mol_type = other DNA
agatcgcaccatttgggcaacaaactgaaattctctctcgaaaccaacaatcaatacaaaccaataagcccagaacccacaacttcctgatgtagatggacatgttgtgtccggaattgg

SEQ ID NO: 15951 - DNA, 120 bp, synthetic construct
  misc_feature 1..120: note = Artificially Synthesized Probe
  source 1..120: mol_type = other DNA
acagcagtttgctctcaagcagtttaaactcgtctaatgctttaactggcctgtcaaatcattgtttcacagaccgcataatatgaattgtgtcccttccatatctggaacaccaaatcc

SEQ ID NO: 15952 - DNA, 120 bp, synthetic construct
  misc_feature 1..120: note = Artificially Synthesized Probe
  source 1..120: mol_type = other DNA
gtggagtttctccaccgtcattaaaccccttttttgctgaggaacgtgttatcaattttaaaattttcccaaatgttgaacaatggaagtgttgtttgcagagagagctcaactgtctaa

SEQ ID NO: 15953 - DNA, 120 bp, synthetic construct
  misc_feature 1..120: note = Artificially Synthesized Probe
  source 1..120: mol_type = other DNA
tttgtgtgttttcatcaagaacatagtcaccaaaatccaagcggatgggcacagccatttgcatgtaactttacagtataagagacattgtcatatgcccacagtctgctatgaagacac

SEQ ID NO: 15954 - DNA, 120 bp, synthetic construct
  misc_feature 1..120: note = Artificially Synthesized Probe
  source 1..120: mol_type = other DNA
aggaaaacactcttgagagaagagaactgaggaaaggtagcgctgatgtcaggggaagacgcattcgacaacacgcatgaaaaaaaacacttcttgttacgttcatgccatgcttttgta

SEQ ID NO: 15955 - DNA, 120 bp, synthetic construct
  misc_feature 1..120: note = Artificially Synthesized Probe
  source 1..120: mol_type = other DNA
taaaacatttccagggttcgggcatcaagatcagatcacacgttaatcaatcacacgtttaagaacgcctgaaagacatgttcatagctatattcgatgtcgttggattttccaacatgg

SEQ ID NO: 15956 - DNA, 120 bp, synthetic construct
  misc_feature 1..120: note = Artificially Synthesized Probe
  source 1..120: mol_type = other DNA
atccaatggagtgagcaggtgcaggcgatgaatgtactatcaccaataattttggaacttctactacatatgtgtatctaccacatgctgcctgagctcgttgagctggacttttaaagc

SEQ ID NO: 15957 - DNA, 120 bp, synthetic construct
  misc_feature 1..120: note = Artificially Synthesized Probe
  source 1..120: mol_type = other DNA
atttatcaacagccatcgggaaacatgccctccagctctcacatgttctccaggctccctgggcaaatggagtcctaagtattttatattttttgagctactataaatgggattattatc

SEQ ID NO: 15958 - DNA, 120 bp, synthetic construct
  misc_feature 1..120: note = Artificially Synthesized Probe
  source 1..120: mol_type = other DNA
attatgagaggatgttgtgttttgttgtatgttttttatacatctaatgagatgatatatggtttttatccttccctcaatgtggcatatcacattaatagagttgcatatattgaacca

SEQ ID NO: 15959 - DNA, 120 bp, synthetic construct
  misc_feature 1..120: note = Artificially Synthesized Probe
  source 1..120: mol_type = other DNA
ctggagaatgttctctgtgtttcagaagaatgtgtatttgctaccattatatggtatattctgtatatatctgttatgtccatttggtctaaaagtatagtttaagactgatgtttcctt

SEQ ID NO: 15960 - DNA, 120 bp, synthetic construct
  misc_feature 1..120: note = Artificially Synthesized Probe
  source 1..120: mol_type = other DNA
taccatgaggcttacataaaaatatcttacagttatagcaagcttttctaagttggtaacagcttaactttgatcacatttttaaaatctctacacatttactccacccaccccacgcat

SEQ ID NO: 15961 - DNA, 120 bp, synthetic construct
  misc_feature 1..120: note = Artificially Synthesized Probe
  source 1..120: mol_type = other DNA
ttgaagttcatgaacttccttcaaacacttactttgaattatcgggccatttgtttatctccatttctttggagtctgctgctgggagattattgtggtttttggtggtgttgtgtctcc

SEQ ID NO: 15962 - DNA, 120 bp, synthetic construct
  misc_feature 1..120: note = Artificially Synthesized Probe
  source 1..120: mol_type = other DNA
tctcctgctgccttgctgatgtccatctctgacgaatgttgactatgtgactctctttaaaatattcagggaaaggagcatctgattctttaagaagtcagcagataaaatgtggatgct

SEQ ID NO: 15963 - DNA, 120 bp, synthetic construct
  misc_feature 1..120: note = Artificially Synthesized Probe
  source 1..120: mol_type = other DNA
tccctgtctgcaccaatgttcctgcactttgtaactcgattcttgacttcaaataaaagtgacttcttcatatagctttgccatttactcttagagccagctaacactaccagaacccta

SEQ ID NO: 15964 - DNA, 120 bp, synthetic construct
  misc_feature 1..120: note = Artificially Synthesized Probe
  source 1..120: mol_type = other DNA
gcaagcttttaaagcattcacaggtaagccatgtagttttaatcctaagagtagtacagttgcattgcttaatggtaggggtacattctgagtaattcctcattaggtgatcctgtcact

SEQ ID NO: 15965 - DNA, 120 bp, synthetic construct
  misc_feature 1..120: note = Artificially Synthesized Probe
  source 1..120: mol_type = other DNA
ttaaaacttttttgttaaaaaaaaaaaaactaagacacaaacacacaccctagcctaggcctacacagggcaggctcatcaatatcactgtcttccacctccacatcttgtcccacagga

SEQ ID NO: 15966 - DNA, 120 bp, synthetic construct
  misc_feature 1..120: note = Artificially Synthesized Probe
  source 1..120: mol_type = other DNA
tgtaagtttttcatgtaaattaaaggtttactctggcgtcaactattccctcctggcctggaatcacagacgttccatttcttccatctactcatttgggaataagtcacgtaattcccg

SEQ ID NO: 15967 - DNA, 120 bp, synthetic construct
  misc_feature 1..120: note = Artificially Synthesized Probe
  source 1..120: mol_type = other DNA
actagcagctgaggtgagctgtcgaatcctcattttctcacttttcattttcacatcatcaggcaccttgtctgagatggttgcttagttaaataaacagaaagatgagtttggattgct

SEQ ID NO: 15968 - DNA, 120 bp, synthetic construct
  misc_feature 1..120: note = Artificially Synthesized Probe
  source 1..120: mol_type = other DNA
ggcaacatttggaatgtccatggatagcattccatccaaacacaaacgtgcgccttactagttcctctgcttctgaagcggtaacggtgaaaatcctgggagctctcaggatccagtccc

SEQ ID NO: 15969 - DNA, 120 bp, synthetic construct
  misc_feature 1..120: note = Artificially Synthesized Probe
  source 1..120: mol_type = other DNA
ttaaaataactaacccccatcctacctaaccacataccccagttatgctgttccctcacctctccacatatattttggagaatatcacaataggatggtttgtggacagaatgaatttcc

SEQ ID NO: 15970 - DNA, 120 bp, synthetic construct
  misc_feature 1..120: note = Artificially Synthesized Probe
  source 1..120: mol_type = other DNA
ggtaatgttatgtaatttttaataattttgtgcacataacaaagtttatgtgccgtgaatctggaagaaaagaatgaagagcttgcgggggaggccacctctgaaggaatggccgagaaa

SEQ ID NO: 15971 - DNA, 120 bp, synthetic construct
  misc_feature 1..120: note = Artificially Synthesized Probe
  source 1..120: mol_type = other DNA
cagagcaggcaaaacgagcaccatttcctcccaagaaacacatttttcccactgtctgacagttgaaaatatttgtttactttgtagaaacctaggatgttttggcagcaagcaatttat

SEQ ID NO: 15972 - DNA, 120 bp, synthetic construct
  misc_feature 1..120: note = Artificially Synthesized Probe
  source 1..120: mol_type = other DNA
ggaaataaacacagccgagtgagtttcacacagcatttccaccgctgtaatgagaatgaaatacatatgcatgtttgagctgtgacagatgaactatgtagttgttcagattctgcatgt

SEQ ID NO: 15973 - DNA, 120 bp, synthetic construct
  misc_feature 1..120: note = Artificially Synthesized Probe
  source 1..120: mol_type = other DNA
ctcttgctggtttgagttatgtgaaccttcaacatcattagggaagcttctaccacacttagtactgataagcaaagtgcattcacacttcctgaggatttaatgagtggcaccatctaa

SEQ ID NO: 15974 - DNA, 120 bp, synthetic construct
  misc_feature 1..120: note = Artificially Synthesized Probe
  source 1..120: mol_type = other DNA
aactattttcataaaatactaagacatactttgcctttctcacgtgtactcttttatgagagaacttggaacagtccagaggctatgtggcaggaaatgacacagaatgagtgggaggca

SEQ ID NO: 15975 - DNA, 120 bp, synthetic construct
  misc_feature 1..120: note = Artificially Synthesized Probe
  source 1..120: mol_type = other DNA
aagaaaataaatatgaagacactgaaatcacctggagaatttttaggagatgctgatggcaggcctcatatgagacaaatcaattcagaatctttgaagggtaagccccagacaccatgg

SEQ ID NO: 15976 - DNA, 120 bp, synthetic construct
  misc_feature 1..120: note = Artificially Synthesized Probe
  source 1..120: mol_type = other DNA
cttggatttctacatgctagagaggcataagacacccatcaataccctaagatgtacacaggcttggtccagaaagatgggaaaacactaagcagggtcttccagggcataggtgaattc

SEQ ID NO: 15977 - DNA, 120 bp, synthetic construct
  misc_feature 1..120: note = Artificially Synthesized Probe
  source 1..120: mol_type = other DNA
gaggagaggaccagagaaaagcagccttaggaagtagctgtagacatcagtgaaaatggcaaagaaccttaaacattccctccttcataaaagcaatgagaaaaccacccaaaaatatca

SEQ ID NO: 15978 - DNA, 120 bp, synthetic construct
  misc_feature 1..120: note = Artificially Synthesized Probe
  source 1..120: mol_type = other DNA
tgtttctaggcatttaaggcaatctgtctggtcatctgaccactaaccaaactgagcagagacttggtggccacacatgatgaaaaaacacaaactttacagaattagttcagaatagtc

SEQ ID NO: 15979 - DNA, 120 bp, synthetic construct
  misc_feature 1..120: note = Artificially Synthesized Probe
  source 1..120: mol_type = other DNA
gccacacctagatacatcaaaatcagaccttcaaaacccaaagacaaagtaaatctaatgaaagcagtaagagagaagcaacttgtcacacatgttatggactagatatttgtcccctcc

SEQ ID NO: 15980 - DNA, 120 bp, synthetic construct
  misc_feature 1..120: note = Artificially Synthesized Probe
  source 1..120: mol_type = other DNA
ccatggtcagatggcttccatttgcaatagcttcacttcaaatgtttaaggaagaattaacatcattctttcacagtcttccaaaaaaaataaagaaagaatactcttcaattaacttga

SEQ ID NO: 15981 - DNA, 120 bp, synthetic construct
  misc_feature 1..120: note = Artificially Synthesized Probe
  source 1..120: mol_type = other DNA
tataaaaactaaccaatgagatacactatggtcatagaatacacatgctatgatacagactgaatgttgacatcctccccaaacgtacgtgctggaattctgatccccagtgtgacagca

SEQ ID NO: 15982 - DNA, 120 bp, synthetic construct
  misc_feature 1..120: note = Artificially Synthesized Probe
  source 1..120: mol_type = other DNA
cctcgcagagtggtgaggaccatggccgaatgcgttcatgctctgggctcctgtggaaggtagagcttgtgaatgaggaattggaaacagtgcacctcagtggcagagggcctcacaaat

SEQ ID NO: 15983 - DNA, 120 bp, synthetic construct
  misc_feature 1..120: note = Artificially Synthesized Probe
  source 1..120: mol_type = other DNA
tgtctgcccatgaaataatgctgcctgtagtagacaagaatggtaaaaacacagtgaacgtattttgttctgtgatgtacacatctacctggaggaagaaggttgtgaaattaactccca

SEQ ID NO: 15984 - DNA, 120 bp, synthetic construct
  misc_feature 1..120: note = Artificially Synthesized Probe
  source 1..120: mol_type = other DNA
acatgagcacgtgaatgtgtgtgcaggtttgtctgcgtgtgggtatctacatgtgagcatgtgtatgagtgtgcaagtgtgtgtgcaaatgtgtctgtgtctacacgtgagcatgtgaat

SEQ ID NO: 15985 - DNA, 120 bp, synthetic construct
  misc_feature 1..120: note = Artificially Synthesized Probe
  source 1..120: mol_type = other DNA
ataaagatgctcttatcctcaagaacaggtgccaggaatgtggacatagcctgacactcggcacaatattaattttctctgagatggttttccttaggagttaccttttgccattatttg

SEQ ID NO: 15986 - DNA, 120 bp, synthetic construct
  misc_feature 1..120: note = Artificially Synthesized Probe
  source 1..120: mol_type = other DNA
tgacacagttgaatatttacacaaccttccttcaatatggctcgctccatgtttgtccctgcgtgggcagcattccgtctgtgtcatctacattgatacccatatctacgtgccctgcca

SEQ ID NO: 15987 - DNA, 120 bp, synthetic construct
  misc_feature 1..120: note = Artificially Synthesized Probe
  source 1..120: mol_type = other DNA
tatggttggaaacattgttgacaagggcaactggggaagagacatattagatagacgtctatgaagtggtatgaagtactaagatatgaatgtcccgtgtgaatgttctccaaagagtga

SEQ ID NO: 15988 - DNA, 120 bp, synthetic construct
  misc_feature 1..120: note = Artificially Synthesized Probe
  source 1..120: mol_type = other DNA
taatttttaaattatcataattttaaaaattatcttctcatcacccctgcagggaccacctgcaacaaaaatttcacaacagtgacaggcagaggctgattctctccaggccgagccacg

SEQ ID NO: 15989 - DNA, 120 bp, synthetic construct
  misc_feature 1..120: note = Artificially Synthesized Probe
  source 1..120: mol_type = other DNA
cctttccaaccacaccttctaattaatttagtccccaattagtctttattcggcgaattgttcactttgagacaagcttcctgtggggtttcaaacattcaaattaccttctttggtgca

SEQ ID NO: 15990 - DNA, 120 bp, synthetic construct
  misc_feature 1..120: note = Artificially Synthesized Probe
  source 1..120: mol_type = other DNA
tccccttcccaggcaacctcatcaaatcattcagcttttcataaagaaaaatggcccaggacaattcctatcaattttggaacgttccaagcaaagcatttctcaagcataacagcctca

SEQ ID NO: 15991 - DNA, 120 bp, synthetic construct
  misc_feature 1..120: note = Artificially Synthesized Probe
  source 1..120: mol_type = other DNA
acacagcctccctcatacacacacacagcctccctcacacacactcacagtctccctcacacacacacacagcctccctcacacacactcacatagtctccctcacacacacacacagcc

SEQ ID NO: 15992 - DNA, 120 bp, synthetic construct
  misc_feature 1..120: note = Artificially Synthesized Probe
  source 1..120: mol_type = other DNA
atattcatccttatctccgtatttaaaggacttcatgatgtgggtgtcctttattctagtaaatactcagcaataaggcttgttgaagatgattgtgaccagaaggaaggagcccagaag

SEQ ID NO: 15993 - DNA, 120 bp, synthetic construct
  misc_feature 1..120: note = Artificially Synthesized Probe
  source 1..120: mol_type = other DNA
aaacactcatgtgtgcaaatatatgtgtacgtgtcaatccttatacagaaacacgtgcacagctgctaactcatacacgcacataagcacagccgctaacgtgtttaactgccaaactta

SEQ ID NO: 15994 - DNA, 120 bp, synthetic construct
  misc_feature 1..120: note = Artificially Synthesized Probe
  source 1..120: mol_type = other DNA
gcagcaaccaggcctttccacatgctacccagcccatgcacagacaggcttgtgggggaggggaatattctgggagacgttctgtagaatgagtctttttccaaaacaggaaggaaggca

SEQ ID NO: 15995 - DNA, 120 bp, synthetic construct
  misc_feature 1..120: note = Artificially Synthesized Probe
  source 1..120: mol_type = other DNA
ggagaaataagaaaaagagctcatttatcttggtaatttgttttaaacagtggtccttagagcactgttcccacaggccaaagtaatttcattcgcaagcgtcactgtccccaaaacaca

SEQ ID NO: 15996 - DNA, 120 bp, synthetic construct
  misc_feature 1..120: note = Artificially Synthesized Probe
  source 1..120: mol_type = other DNA
aatggagatgtccgtggaagtgtttaagaccatcagctagaagcctcatttgttgaaatctcacatagatttacaagtcctcacccctggcagtgacccacttggatgaaagactcactg

SEQ ID NO: 15997 - DNA, 120 bp, synthetic construct
  misc_feature 1..120: note = Artificially Synthesized Probe
  source 1..120: mol_type = other DNA
aacagcatattaaggtaaatggtatgcacgtgaaaactgatttatctcagctgcctggaaactatcagaacaaagttcttgaattgtgagcaagaagggatgggcagaaaaggcacccca

SEQ ID NO: 15998 - DNA, 120 bp, synthetic construct
  misc_feature 1..120: note = Artificially Synthesized Probe
  source 1..120: mol_type = other DNA
cattcacatgcacatacacattctcagatgcacacacatgcattctcacatatatacacattctcacacatgcacatgtacacattctcatctgcacatacatgcacacattctcacatg

SEQ ID NO: 15999 - DNA, 120 bp, synthetic construct
  misc_feature 1..120: note = Artificially Synthesized Probe
  source 1..120: mol_type = other DNA
caagaaaaaaatctccccagctatttttggaggagggaaaagtaattacagctcagaatcactgccctgttgaaaggaattctccagagggagaaaaagccctttatctgaactgatcaa

SEQ ID NO: 16000 - DNA, 120 bp, synthetic construct
  misc_feature 1..120: note = Artificially Synthesized Probe
  source 1..120: mol_type = other DNA
aacctgaagataagccgagaccctatatcgctggaaattcctttattttcaaggatttcgttacagttcagagcagccactgacaggcagcagaaggcaggggacagagtgacagtgcct

SEQ ID NO: 16001 - DNA, 120 bp, synthetic construct
  misc_feature 1..120: note = Artificially Synthesized Probe
  source 1..120: mol_type = other DNA
agaactgagaaatcaatgtctgctgtttctaagccccgcaataggtggtactttgagcagccttcatggactaagacactgcgtattattatcccattgacgccatgtggaaattaaggc

SEQ ID NO: 16002 - DNA, 120 bp, synthetic construct
  misc_feature 1..120: note = Artificially Synthesized Probe
  source 1..120: mol_type = other DNA
ctctcaccataagagccgacacgtgcagacgtcactcacacccacactctcaccataagagctgacacccgcagacgtcactcacacccacactctcaccataagagctgacacccgcag

SEQ ID NO: 16003 - DNA, 120 bp, synthetic construct
  misc_feature 1..120: note = Artificially Synthesized Probe
  source 1..120: mol_type = other DNA
actaacacccacattctcaccataagagctgacacctgcagacgtcactcaaactcacactctcaccataagagctgtcacgcacagacatcactcacacccacactgtcaccctaagag

SEQ ID NO: 16004 - DNA, 120 bp, synthetic construct
  misc_feature 1..120: note = Artificially Synthesized Probe
  source 1..120: mol_type = other DNA
acctgcagatgtcacttacacccacactctcaccataagagctgaggcccacagaggacactcacacccatactctcaccataagagctgatgcctgcagacgtcactcacgtacacact

SEQ ID NO: 16005 - DNA, 120 bp, synthetic construct
  misc_feature 1..120: note = Artificially Synthesized Probe
  source 1..120: mol_type = other DNA
ccataagagctgaggcccacagaggtcactcacacacatactctcaccataagagctgacacccgcagacatcactcacacacacactctcaccataagagctgaggcccacagaggtca

SEQ ID NO: 16006 - DNA, 120 bp, synthetic construct
  misc_feature 1..120: note = Artificially Synthesized Probe
  source 1..120: mol_type = other DNA
gaggtgacacctgcagacgtcacacccacactctcaccataagaggtgacgcccgcagacatcactcacacccacactctcaccatagagctgacgcccgcagacgttactcacacccac

SEQ ID NO: 16007 - DNA, 120 bp, synthetic construct
  misc_feature 1..120: note = Artificially Synthesized Probe
  source 1..120: mol_type = other DNA
ctcaccataagaagtgacacctgcaaacgtcactcacacccacactctcaccataagaagtgaaacctgcagacatcactcacacccacagtctcaccataagaggtgacacctgcagac

SEQ ID NO: 16008 - DNA, 120 bp, synthetic construct
  misc_feature 1..120: note = Artificially Synthesized Probe
  source 1..120: mol_type = other DNA
tcactcacacccacactctcaccaaaagagctgacgcccgcagacgtcactcacacccacagtctcaccataagaggtgacacctgcagacgtcactcacatccacactctcaccataag

SEQ ID NO: 16009 - DNA, 120 bp, synthetic construct
  misc_feature 1..120: note = Artificially Synthesized Probe
  source 1..120: mol_type = other DNA
tctcaccataagagctgacgcccgcagacgtcactcacaaccacactctcaccataagaggtgacacctgcaaacgtcactcacacccacactctcaccataagaggtgacgcccataga

SEQ ID NO: 16010 - DNA, 120 bp, synthetic construct
  misc_feature 1..120: note = Artificially Synthesized Probe
  source 1..120: mol_type = other DNA
acacatgcaaacgtcactcacacccacattctcaccataagaagtgacacctgcaaacgtcactcacacccacactctcaccataagaagtgacacctgcagacatcactcacacccaca

SEQ ID NO: 16011 - DNA, 120 bp, synthetic construct
  misc_feature 1..120: note = Artificially Synthesized Probe
  source 1..120: mol_type = other DNA
tcaccataagaggtgacacctgcagacgtcactcacacccacactctcaccataagagctgacacctgcagacgtcactcacacccacactctcaccataagaagtgacacctgcaaatg

SEQ ID NO: 16012 - DNA, 120 bp, synthetic construct
  misc_feature 1..120: note = Artificially Synthesized Probe
  source 1..120: mol_type = other DNA
gaaacctgcagacgtcactcacacccacactcaccataagaggtgacacatgcagacgtcacacacacccacactctcaccataattggtgacacctgcagacgtcactcacacccacac

SEQ ID NO: 16013 - DNA, 120 bp, synthetic construct
  misc_feature 1..120: note = Artificially Synthesized Probe
  source 1..120: mol_type = other DNA
tcactcacacccacactctcaccatagagctgacgcccgcagacgtcactcacaccgacactctcaccataagagctgacacctgcagacgtcactcacacccacactctcaccgtaaga

SEQ ID NO: 16014 - DNA, 120 bp, synthetic construct
  misc_feature 1..120: note = Artificially Synthesized Probe
  source 1..120: mol_type = other DNA
ccataagagctgacatctacagacatcactcacacagtcaactcagtcagtccttatgataacccttagtggcataaactgtcatggtccccattccatattcagaaactagagcccaga

SEQ ID NO: 16015 - DNA, 120 bp, synthetic construct
  misc_feature 1..120: note = Artificially Synthesized Probe
  source 1..120: mol_type = other DNA
agactgcatttccaggcaccaggatgagtttaaattcagctcccaaagaagaccagtgaacacaccaatgaacatacacttcacactgccacaccccaagataagacccagaaactcaca

SEQ ID NO: 16016 - DNA, 120 bp, synthetic construct
  misc_feature 1..120: note = Artificially Synthesized Probe
  source 1..120: mol_type = other DNA
gaatctggaatcgcataaaacgtggaaaaccagacttttctagcccaagaatgagtgagatgtaaaaatcaaagaggtcccacacgtaacccaccaagaaagaacaagtgaggctgtgtt

SEQ ID NO: 16017 - DNA, 120 bp, synthetic construct
  misc_feature 1..120: note = Artificially Synthesized Probe
  source 1..120: mol_type = other DNA
tgccgtccactcatcccaggtggggaaactgaggctgaggaagcaaaatgacttggtcacacacattttataatttacaattgtatatatatatgggtgtccattttcacacagctataa

SEQ ID NO: 16018 - DNA, 120 bp, synthetic construct
  misc_feature 1..120: note = Artificially Synthesized Probe
  source 1..120: mol_type = other DNA
cagttctccataatgactgtaccgatttagattcccaatagtgcacaagatttcccttttcaccacttcctcaccaacacttgctgtctttttaataatagccattctaacaggtgtgat

SEQ ID NO: 16019 - DNA, 120 bp, synthetic construct
  misc_feature 1..120: note = Artificially Synthesized Probe
  source 1..120: mol_type = other DNA
tttgccttgtcttccatttctttcaccatctcatagttttcagtgtacaggtctcaccgtctgggttaaattaattcctatctattgcagtcacacatttttttagtggcagcactcacc

SEQ ID NO: 16020 - DNA, 120 bp, synthetic construct
  misc_feature 1..120: note = Artificially Synthesized Probe
  source 1..120: mol_type = other DNA
gaatcctaaccaccacagcacaggacttctcaaagagaccgtcactgtgtctcctgccccaacaaggtgaacagttctgggatgctaatccccactcactcattccatccccatcctgga

SEQ ID NO: 16021 - DNA, 120 bp, synthetic construct
  misc_feature 1..120: note = Artificially Synthesized Probe
  source 1..120: mol_type = other DNA
actaggtcacaggatacagcacggattccttccggcaaaaggtgctcagtaaagtggattgcagcatcctgtgtctcccctaaaacatcctcaaacagaatggctgcaccaagatgtatg

SEQ ID NO: 16022 - DNA, 120 bp, synthetic construct
  misc_feature 1..120: note = Artificially Synthesized Probe
  source 1..120: mol_type = other DNA
acagttcagatgaggaaacagacccagaaggagcaagtagctggattctaggctatcaacaaaatgccaaaggcagaaaaaaccctgattttccaaaagggaaaaaaatgttggaataca

SEQ ID NO: 16023 - DNA, 120 bp, synthetic construct
  misc_feature 1..120: note = Artificially Synthesized Probe
  source 1..120: mol_type = other DNA
ctcaaaactcccatttgtgaaagtaagtggccttttaaagaatgctaaaacattacgggcactttagccccgcgtttcttactacacgaaacatggttacctacgagtgaaatggcagaa

SEQ ID NO: 16024 - DNA, 120 bp, synthetic construct
  misc_feature 1..120: note = Artificially Synthesized Probe
  source 1..120: mol_type = other DNA
ttgacaaaaacgaatcacacctgagcctcaaagctcttagcccttccctgcaaagaaaactctctcttagaattaccaaatatagctttcaatcccttcaatctaaatgtttcaggtgag

SEQ ID NO: 16025 - DNA, 120 bp, synthetic construct
  misc_feature 1..120: note = Artificially Synthesized Probe
  source 1..120: mol_type = other DNA
gagtggacattcacttgctaagcacaatgttgaagttatggctgaaagcttactttacatttgcctaagaccacacttgtcatacacacctaaaaccatctgctgtcttctgagttctat

SEQ ID NO: 16026 - DNA, 120 bp, synthetic construct
  misc_feature 1..120: note = Artificially Synthesized Probe
  source 1..120: mol_type = other DNA
aacttgagaaaggtatagataaccagattcgggaaagtcagagaacaccagattcaacccaaatatgaccacctcaggcttttaataattaaactgtcaaagctcaagggcaaagagaag

SEQ ID NO: 16027 - DNA, 120 bp, synthetic construct
  misc_feature 1..120: note = Artificially Synthesized Probe
  source 1..120: mol_type = other DNA
cacccagcctagcagccgtcatgggcccacagtgattgagccctcaatcaaagcttttttattattatggaaaattacaagttttttcacaatgagttttcacacacatataaatcaatg

SEQ ID NO: 16028 - DNA, 120 bp, synthetic construct
  misc_feature 1..120: note = Artificially Synthesized Probe
  source 1..120: mol_type = other DNA
aatacaaagatcagccagacagagcctgtgctgcaaggagcccacattttatttgaggggccagataggtcacaattcataacataacaaagcaaaaggtgaaaagagctaaaaaaaaaa

SEQ ID NO: 16029 - DNA, 120 bp, synthetic construct
  misc_feature 1..120: note = Artificially Synthesized Probe
  source 1..120: mol_type = other DNA
agtgatttcaggggtggttttgactctttctgtggaggtgacaggaggtgcctccatcacagacacaaatggtggcttcctggcttgctcggtagacgccaggctatgctcaccccaagg

SEQ ID NO: 16030 - DNA, 120 bp, synthetic construct
  misc_feature 1..120: note = Artificially Synthesized Probe
  source 1..120: mol_type = other DNA
ggtcattcttatgtataagttactgaaagtctttaagaagtgataaaaggtttactgaataaatgagaaactggatgggagggacgccatccccactctaaggagtctggactatgaggt

SEQ ID NO: 16031 - DNA, 120 bp, synthetic construct
  misc_feature 1..120: note = Artificially Synthesized Probe
  source 1..120: mol_type = other DNA
caccgtgaccatggctatttaaaaacccagcctcagcacagtagctgacaaacattaatgagcagtaatgtacacgtggtgttgtcgatgaacggataatgaaagcaatttatttgaaaa

SEQ ID NO: 16032 - DNA, 120 bp, synthetic construct
  misc_feature 1..120: note = Artificially Synthesized Probe
  source 1..120: mol_type = other DNA
cacccacacccaggatgacccacagaccccacatccaccctcacccaggacgacgcacagaccccacatccaccctcacccaggatgacgcacagaccccacatccaccctcacccagga

SEQ ID NO: 16033 - DNA, 120 bp, synthetic construct
  misc_feature 1..120: note = Artificially Synthesized Probe
  source 1..120: mol_type = other DNA
gctgtgaaaacctcttttgctctttcttgctgctcaggccatccacacctggcagaaatccccactgcccagttccactgaagccctgggctccaatattcagacctgagacccaaacag

SEQ ID NO: 16034 - DNA, 120 bp, synthetic construct
  misc_feature 1..120: note = Artificially Synthesized Probe
  source 1..120: mol_type = other DNA
tttatttgtaattaaagatggcctaattaaggcaatgtgacaattctgcccatcagacctcagaaaggcaaaggactttgtgggataactcaggttgctggtgaatgacatggactcatc

SEQ ID NO: 16035 - DNA, 120 bp, synthetic construct
  misc_feature 1..120: note = Artificially Synthesized Probe
  source 1..120: mol_type = other DNA
cagagcctctggaactaagtcacacccacgctggaaccactgcgagcccaatttcggaaaaaacaaaacatacaagtgaaactcagcccacagctctgaattcattctctgaccagagag

SEQ ID NO: 16036 - DNA, 120 bp, synthetic construct
  misc_feature 1..120: note = Artificially Synthesized Probe
  source 1..120: mol_type = other DNA
acaagcaaagagacagtcacatgtaagcttaataatgaggttcatattaaaggcagacagatgttcaattaaacatcagacttcacgctgacacgctgagagtgaggatctccatgcata

SEQ ID NO: 16037 - DNA, 120 bp, synthetic construct
  misc_feature 1..120: note = Artificially Synthesized Probe
  source 1..120: mol_type = other DNA
ccctttgtctctcctccctctcttcctacaaaagaaatcacatgacatcgattccctgatattcagatcaatcagctggagtgacaggaaacacgttcgctcccattggaaacagcacgt

SEQ ID NO: 16038 - DNA, 120 bp, synthetic construct
  misc_feature 1..120: note = Artificially Synthesized Probe
  source 1..120: mol_type = other DNA
tctcattcctgaatttttgtctttgcttctggttaccagagatccaaagctgcagtcgtttagctggtttctgtttccaggggtattgtgaatggaaataaaccatgaaaatgaccgaag

SEQ ID NO: 16039 - DNA, 120 bp, synthetic construct
  misc_feature 1..120: note = Artificially Synthesized Probe
  source 1..120: mol_type = other DNA
gataagctctattaatgttagtttttttccagagagtaaaaaataagctcttgaacccatccatggctatcagaatgaaggaaaagtcgtttgacctccttggcccagagcccatcagat

SEQ ID NO: 16040 - DNA, 120 bp, synthetic construct
  misc_feature 1..120: note = Artificially Synthesized Probe
  source 1..120: mol_type = other DNA
aagctttcattacaaactttcttgaaaaagaaaaaatggtattcctaccagcatcactggctgggctagcactgatcacagtgatgaccaggtagatgaagtagggtttccatacatgat

SEQ ID NO: 16041 - DNA, 120 bp, synthetic construct
  misc_feature 1..120: note = Artificially Synthesized Probe
  source 1..120: mol_type = other DNA
tcccactgtccagtagagaaagtaaaagggccaaggggaatctgctcattcaccaatctgtttattggtaaatatcagccctgattacacatttcccgttataaggataaaaacgtgaaa

SEQ ID NO: 16042 - DNA, 120 bp, synthetic construct
  misc_feature 1..120: note = Artificially Synthesized Probe
  source 1..120: mol_type = other DNA
aaggctgggagaaccagaataaatgaaagaaagcaacatgcaaaagtggaatacaaaaaaacttccacttccaaagatgctcatctgaagattcagagtttactaaataccacacaaaat

SEQ ID NO: 16043 - DNA, 120 bp, synthetic construct
  misc_feature 1..120: note = Artificially Synthesized Probe
  source 1..120: mol_type = other DNA
aagttctcggaaggaaaattcagcaactctcaaaaatgcacacaccaagtgacctaggaatttcacttctaggggaatgttctaaggaaatgattcatatgcggaaaaccgttcgttttc

SEQ ID NO: 16044 - DNA, 120 bp, synthetic construct
  misc_feature 1..120: note = Artificially Synthesized Probe
  source 1..120: mol_type = other DNA
acagcttgcattatctttaagtgcaggaaaaaatatatatattaagcaaacaaatcaaaaggcatgcatagtcctgacaggcagagttctccaggctgtgattcagcacccagggtccaa

SEQ ID NO: 16045 - DNA, 120 bp, synthetic construct
  misc_feature 1..120: note = Artificially Synthesized Probe
  source 1..120: mol_type = other DNA
cacatttggttgttttaggtttggagatggttttctgtgcaattaatgtgattcatccatctttgaaatgaagaattacactgcagtgcggccagttcccaccggatgaaagttgaagaa

SEQ ID NO: 16046 - DNA, 120 bp, synthetic construct
  misc_feature 1..120: note = Artificially Synthesized Probe
  source 1..120: mol_type = other DNA
tctacagatttctactatatgtaacatttaactgggaaaatgtaacagaaaataataaagggtggggctaaaatcccttcctgcttaaaaacacagagcatggtggcctgaggcgcagag

SEQ ID NO: 16047 - DNA, 120 bp, synthetic construct
  misc_feature 1..120: note = Artificially Synthesized Probe
  source 1..120: mol_type = other DNA
ctcggggatgtggtgggacagcacagctgaacattaaatccattgcaactacagttttccctgagaaaagcatcactgatatgggcaggtggcagaaaaattctgggtagaagagggtag

SEQ ID NO: 16048 - DNA, 120 bp, synthetic construct
  misc_feature 1..120: note = Artificially Synthesized Probe
  source 1..120: mol_type = other DNA
tgcggggtcaggggactcccccacagccctgtcacacgtcctgcacgcggggtcaggggactctcccacagccctgtcacacgtcctgagaggggggtcaggggactcccctacagccct

SEQ ID NO: 16049 - DNA, 120 bp, synthetic construct
  misc_feature 1..120: note = Artificially Synthesized Probe
  source 1..120: mol_type = other DNA
tgttaataaaatctccatgtgttatggaaaaatagttaaatgtaaaatgtatcggtcttcaccaaagaagagcaagggatggccagtaagtgcaggaagagacagccagcatcatcacgc

SEQ ID NO: 16050 - DNA, 120 bp, synthetic construct
  misc_feature 1..120: note = Artificially Synthesized Probe
  source 1..120: mol_type = other DNA
gtattagtaatagctgagatattatatataaaatacttgacaaaattcttaccagaaaaggctggttggctgttacgatcaaggggactttaatgggatggggagaagaccccgctccca

SEQ ID NO: 16051 - DNA, 120 bp, synthetic construct
  misc_feature 1..120: note = Artificially Synthesized Probe
  source 1..120: mol_type = other DNA
aatggtacagacgaaagacaaaaacaactccgaactcaaactcacacctcacgggtggagcagggttcctaagaaatagcacagacaaagatggagaagactccacattcaaactcacag

SEQ ID NO: 16052 - DNA, 120 bp, synthetic construct
  misc_feature 1..120: note = Artificially Synthesized Probe
  source 1..120: mol_type = other DNA
ggaggaccgtggccctcttctcacagctccactagacagtgccccagtagggactctgtgtgcaggttccaactccacatttcccttctgcactgccctagcagaggttctccatgaggg

SEQ ID NO: 16053 - DNA, 120 bp, synthetic construct
  misc_feature 1..120: note = Artificially Synthesized Probe
  source 1..120: mol_type = other DNA
ttggttatctacagcagtgccccactctaccggtaccaatttactgtattagtctgttttcatgctgttgataaagacatacccgagactgggtaatttatacaggaaagtgatttaatt

SEQ ID NO: 16054 - DNA, 120 bp, synthetic construct
  misc_feature 1..120: note = Artificially Synthesized Probe
  source 1..120: mol_type = other DNA
gaggtctgactgcacagagatcacaatcaatcaattgcttgcagacacatatgaaaaccctatcagtgggctttagagtggcaaatgagttggaaaaaagtgcacaataaacatattgca

SEQ ID NO: 16055 - DNA, 120 bp, synthetic construct
  misc_feature 1..120: note = Artificially Synthesized Probe
  source 1..120: mol_type = other DNA
gataaaactaaagtcatcaaaacagaaggacaaaagaactttaagtggtcaggaaagaaaggtgtgggtttgtgttcaattgcagaagagtctcagggtgagagtttatggaaaccccaa

SEQ ID NO: 16056 - DNA, 120 bp, synthetic construct
  misc_feature 1..120: note = Artificially Synthesized Probe
  source 1..120: mol_type = other DNA
caggagggattaagccagaagggtgtttgtgggagggaatgaaccttcccttcatcaaaaatcactgcaaactgtgtgcataacacccatctgtgtgtttaaaataaaaaatttcattta

SEQ ID NO: 16057 - DNA, 120 bp, synthetic construct
  misc_feature 1..120: note = Artificially Synthesized Probe
  source 1..120: mol_type = other DNA
ttagatattactcaaagtttacaaatgctggcatacagaaaagcacaagttcaggcctgctactgatgagctacgtgataccagaaaacggtttcaagtccgtttctaaatttccacagt

SEQ ID NO: 16058 - DNA, 120 bp, synthetic construct
  misc_feature 1..120: note = Artificially Synthesized Probe
  source 1..120: mol_type = other DNA
ccaaatgcccaaacatttaacctggaaaaaaatggatccttcaatccccaatcttatccaccatcaccaaatgtagatgtacaacctaccagcgatcaagttcaggcaacaaaaaacaga

SEQ ID NO: 16059 - DNA, 120 bp, synthetic construct
  misc_feature 1..120: note = Artificially Synthesized Probe
  source 1..120: mol_type = other DNA
ccagctgccctgcagatgtcagacccgccaggcccccaatcggtgagctaatgccttgaaatactgtctctgtctgtacacacacatatatctctatttacacacacatatatctattta

SEQ ID NO: 16060 - DNA, 120 bp, synthetic construct
  misc_feature 1..120: note = Artificially Synthesized Probe
  source 1..120: mol_type = other DNA
gaaccagacacaaactccaaatacatacgttattattaacccacacacagatgatacaaaacttctttttcaccctccaatgctcagtgctgagctcagctgtgatcgatctgaaggaat

SEQ ID NO: 16061 - DNA, 120 bp, synthetic construct
  misc_feature 1..120: note = Artificially Synthesized Probe
  source 1..120: mol_type = other DNA
ctccttattaaataaattaaaaataatgggatctgcgaaagatcaatacacaagaaaggtacatttgcaataacggctgccgccgtcacaaatgcaattctagactcagccaccagcctg

SEQ ID NO: 16062 - DNA, 120 bp, synthetic construct
  misc_feature 1..120: note = Artificially Synthesized Probe
  source 1..120: mol_type = other DNA
taagaagttattcccatgcagcgagtggcactaagtcgcagccgaaccaatttgcttcatgggaaacacatttgccttcaaagaacacgtaaagtggaatcagcagccagacggagttat

SEQ ID NO: 16063 - DNA, 120 bp, synthetic construct
  misc_feature 1..120: note = Artificially Synthesized Probe
  source 1..120: mol_type = other DNA
tcgggaaagagaccatgtcctgggaaggtctctcagccacagcagcctcccctagcttcttcctgaggcttaaggtcaccatgaggaggatacaaatgtctcattttatgatgagaaatg

SEQ ID NO: 16064 - DNA, 120 bp, synthetic construct
  misc_feature 1..120: note = Artificially Synthesized Probe
  source 1..120: mol_type = other DNA
aggtatgtctcaccccaggcagcccctctcggtagaattttagaaataacttccttccattaaggaagaacagggtgatgagaactcctcgagcacgcctgtcaacctcagtgtctagaa

SEQ ID NO: 16065 - DNA, 120 bp, synthetic construct
  misc_feature 1..120: note = Artificially Synthesized Probe
  source 1..120: mol_type = other DNA
accttttggaagtggaagtcatctttcagcgtcattttcatcagagtttctagcttttcacagcttagtgggggatgcttcccaatagtgtgatggctctaatgcttttcattataatct

SEQ ID NO: 16066 - DNA, 120 bp, synthetic construct
  misc_feature 1..120: note = Artificially Synthesized Probe
  source 1..120: mol_type = other DNA
ctcattgatgaggggagcagatttttgctgctgggggcctaagaaaggaagacgagctagcgtcaaagcttccagcattcaggacggggcgacaaggactgtaggcaactcacaaaaaca

SEQ ID NO: 16067 - DNA, 120 bp, synthetic construct
  misc_feature 1..120: note = Artificially Synthesized Probe
  source 1..120: mol_type = other DNA
gcgaggcgcgaggggagaggggcgaggggcgaggcgcgaggggcgaggcgcgaggggcgaggggcgaggggcgaggggcgaggcgcgaggggagaggggagaggggcgaggggtgaggcg

SEQ ID NO: 16068 - DNA, 120 bp, synthetic construct
  misc_feature 1..120: note = Artificially Synthesized Probe
  source 1..120: mol_type = other DNA
cccagagaacactgtaaaagccccaagacaaggaaaaagtacacgagcttgtgacatgatggtacaatggcctcaaggaaattgcagctttggaaagaaactttattttctgtcttttga

SEQ ID NO: 16069 - DNA, 120 bp, synthetic construct
  misc_feature 1..120: note = Artificially Synthesized Probe
  source 1..120: mol_type = other DNA
ctcccctgcagagaagatgccttgtgaggcctcttgaccaaaagaaacaggaaacaaatacagaataaaagtataacagtgaataaaaacagctacatgcacacacaactgtgcaaagca

SEQ ID NO: 16070 - DNA, 120 bp, synthetic construct
  misc_feature 1..120: note = Artificially Synthesized Probe
  source 1..120: mol_type = other DNA
ggtaagcaccctcaactcatttagctgactcttggttttcatctccatatctccacatgacacattcacgttgccatttctcagctttcagatttaggatgtatctattttctgactgct

SEQ ID NO: 16071 - DNA, 120 bp, synthetic construct
  misc_feature 1..120: note = Artificially Synthesized Probe
  source 1..120: mol_type = other DNA
tttaaaagaaaaaaagtgtgacaaggaaggttgggtttccagtgaaaggtgcatcaccagccagctcctactgcaccggaaccatcccattcaaggggtggtgtagctgaggtatttaaa

SEQ ID NO: 16072 - DNA, 120 bp, synthetic construct
  misc_feature 1..120: note = Artificially Synthesized Probe
  source 1..120: mol_type = other DNA
taagtccaacgggattgctttatggtggctcaagcccatttctctgagctccaaagccatcctgacatcattatgctgcatcattatgaagccaacacacatctaacaagaacacaagat

SEQ ID NO: 16073 - DNA, 120 bp, synthetic construct
  misc_feature 1..120: note = Artificially Synthesized Probe
  source 1..120: mol_type = other DNA
agccccatggttgccatgacacactgggtcccaggcattctagtgaagagctgttaccataagaggaactcaaaaagggaaatgctagtttaataactaaattcttaggaagaaatgtct

SEQ ID NO: 16074 - DNA, 120 bp, synthetic construct
  misc_feature 1..120: note = Artificially Synthesized Probe
  source 1..120: mol_type = other DNA
tgcacactgctgagactccaatatcccacgtgccaggggcttactccatatttggcagataaattaaagccccaaaatgcagagtcatcgatgagtctccttccaatgcagctgtccatg

SEQ ID NO: 16075 - DNA, 120 bp, synthetic construct
  misc_feature 1..120: note = Artificially Synthesized Probe
  source 1..120: mol_type = other DNA
tgaatcttgattcccccagagttctgaaattctgatgctgggatgatgcactttggaaaaaaccatgatggctggaaagggggaaatgaatatttgctttatgcctttagctagcacaaa

SEQ ID NO: 16076 - DNA, 120 bp, synthetic construct
  misc_feature 1..120: note = Artificially Synthesized Probe
  source 1..120: mol_type = other DNA
tgagccactagccaggaacacatgcggacagactttgatgggaggatgctgaggagacagagattctgtgtgtgcctttgaaggttctccagttcaggcattaaaacctcctgctgcagg

SEQ ID NO: 16077 - DNA, 120 bp, synthetic construct
  misc_feature 1..120: note = Artificially Synthesized Probe
  source 1..120: mol_type = other DNA
tcagatatttttaataactacttttctgaatccaaccaagatccggccctctatactcttaatacagtgaaacttatctgtgtgtggagcctgcacttggaaaactcggaaaaccttccc

SEQ ID NO: 16078 - DNA, 120 bp, synthetic construct
  misc_feature 1..120: note = Artificially Synthesized Probe
  source 1..120: mol_type = other DNA
gatacctggctaaacttcaaaaatgctcctgattttgtttttttgtattagatttgtgtttcggctcatttcgttcctctgctgttataaacagaccctggatgacagagctccaggatc

SEQ ID NO: 16079 - DNA, 120 bp, synthetic construct
  misc_feature 1..120: note = Artificially Synthesized Probe
  source 1..120: mol_type = other DNA
tgcaaattcccttaaagtccctcctcatcttcagaagatatccaatgactcaagtctatggagcttgtgtgcaaattcccttaaagtccctcttcatcttcagaagttgaaataggaaag

SEQ ID NO: 16080 - DNA, 120 bp, synthetic construct
  misc_feature 1..120: note = Artificially Synthesized Probe
  source 1..120: mol_type = other DNA
tccaaatgataagaaaaggtaaattgcataatataaataaggtgtttcctccgtgtttgcagaaatacaccaaacgtgtgaccacccttcgtgaccggactacagcaataactaagccag

SEQ ID NO: 16081 - DNA, 120 bp, synthetic construct
  misc_feature 1..120: note = Artificially Synthesized Probe
  source 1..120: mol_type = other DNA
ctcaaaaaatctggctttaaaaaataataataaagctagtgtttttttgagcagcttccatgaacttgccttccaaagttttctgaaaacttgagaagatggggtgtgcccccacagccc

SEQ ID NO: 16082 - DNA, 120 bp, synthetic construct
  misc_feature 1..120: note = Artificially Synthesized Probe
  source 1..120: mol_type = other DNA
ggtaaagtgaaataacaaaaccacgagtggctcttaacttctctgggaatgtccagccagagcctcggaatgtaactacgtggaaacagggtcctcgcagacctcattattgaaggacct

SEQ ID NO: 16083 - DNA, 120 bp, synthetic construct
  misc_feature 1..120: note = Artificially Synthesized Probe
  source 1..120: mol_type = other DNA
caggtaacacagccagtcagagggcagcatcagaactcactcgctgtccttgtctacactaagcactcaacttcaagttgggaaacctgggtaccaagcagccaaccaacgccaatggag

SEQ ID NO: 16084 - DNA, 120 bp, synthetic construct
  misc_feature 1..120: note = Artificially Synthesized Probe
  source 1..120: mol_type = other DNA
ccagggcccacctcagcaccctcctcaacaccagggcccatctcagcaccctcctcagcaccagggcccatccagcaccctcctcagctccagggcccatccagcgccctcctcagcacc

SEQ ID NO: 16085 - DNA, 120 bp, synthetic construct
  misc_feature 1..120: note = Artificially Synthesized Probe
  source 1..120: mol_type = other DNA
catttcctaaacagctcacttagcatctgaacccgaatgcacacaaaaaaataaaacattgtctttaaggaaataaaatgcagtgggcctaacatggcccccaattggccaagtcctctt

SEQ ID NO: 16086 - DNA, 120 bp, synthetic construct
  misc_feature 1..120: note = Artificially Synthesized Probe
  source 1..120: mol_type = other DNA
gctattcaggcctaagaaggaaagaaataaccttaaaatagaatcccatcccatcctcctggaccagatttcactacagtaattgcatctgtgaggaagagagctgcaaaggaaattaga

SEQ ID NO: 16087 - DNA, 120 bp, synthetic construct
  misc_feature 1..120: note = Artificially Synthesized Probe
  source 1..120: mol_type = other DNA
cccatacacgcaaatcctcgtcaaagaccctcaatgaagtatgcaggccacccatgcctcttcctcattcaattgataaatgagaaagtttcttaaggaaaaattaaacaaatcaggtga

SEQ ID NO: 16088 - DNA, 120 bp, synthetic construct
  misc_feature 1..120: note = Artificially Synthesized Probe
  source 1..120: mol_type = other DNA
atctcccagggagaaaccaaacaacatttcgcagaagtgaattatcagaagaaagaacagacaaacaaagatataagtgcaccagagaatgaaaagggatggtgctggaagtgaaattcc

SEQ ID NO: 16089 - DNA, 120 bp, synthetic construct
  misc_feature 1..120: note = Artificially Synthesized Probe
  source 1..120: mol_type = other DNA
gtactacatcgagatgctgtagctttcagtgtcccgctgtgttaagtcatggtgaactacatcgagatgctgtagctttcagtgtcccgctgtgttgtcatggtgtactacatcgagatg

SEQ ID NO: 16090 - DNA, 120 bp, synthetic construct
  misc_feature 1..120: note = Artificially Synthesized Probe
  source 1..120: mol_type = other DNA
gtcatgttgtactacatcaagatgctgtagctctcactgtcccactgtgttgtcacagtgtactacatcattgtcagactcactgttttcatttccatacacacttagattataagagtt

SEQ ID NO: 16091 - DNA, 120 bp, synthetic construct
  misc_feature 1..120: note = Artificially Synthesized Probe
  source 1..120: mol_type = other DNA
ttttcttgacatcaagcatttttggcctggaaagctccattttagaaaacggctgttttgcaaacattatataagctgtcaccagcaagaattccgtcactgcaagaattccttcactgc

SEQ ID NO: 16092 - DNA, 120 bp, synthetic construct
  misc_feature 1..120: note = Artificially Synthesized Probe
  source 1..120: mol_type = other DNA
ggcacagggtccagcacacattccttcttcttcaccaaaagccaatgagatcagcatagttgcaaagctgccttatgtttttaatgagaagagttatttacaaaaagagatggcttgaca

SEQ ID NO: 16093 - DNA, 120 bp, synthetic construct
  misc_feature 1..120: note = Artificially Synthesized Probe
  source 1..120: mol_type = other DNA
aaacaatcttatggtttccatgaaaatgaaagaaaaatgaagctgaatcgtggagtaaattgctagttttctccgcagcatgttctgggctgctttgggagccatatgctctgtttgatg

SEQ ID NO: 16094 - DNA, 120 bp, synthetic construct
  misc_feature 1..120: note = Artificially Synthesized Probe
  source 1..120: mol_type = other DNA
caacaccatctgattttctgaatttcaaatctggacacggaattgagccggaaaactctgaatgctgccagattctcatttcagatgcacacacatactcttacatgtctcaaagaaagt

SEQ ID NO: 16095 - DNA, 120 bp, synthetic construct
  misc_feature 1..120: note = Artificially Synthesized Probe
  source 1..120: mol_type = other DNA
tatcatttcctttaatcctcacaactcccctctaaggtggtaattaccttattttcacttttttagacgagaaagattaattcggaagaggctaaacagctccaaggtctccgagcagag

SEQ ID NO: 16096 - DNA, 120 bp, synthetic construct
  misc_feature 1..120: note = Artificially Synthesized Probe
  source 1..120: mol_type = other DNA
tctttgcaaacgtgttgtcaagaatgtctgcaaaataattcagttttgtagacattatccccaaggttcacaattggcactccaggagggtttgccatgttttctctgagattttgagtc

SEQ ID NO: 16097 - DNA, 120 bp, synthetic construct
  misc_feature 1..120: note = Artificially Synthesized Probe
  source 1..120: mol_type = other DNA
aattatttgcagaatgtaaaaagtattctcgcagacccacaaagatgtcagaaattaataataacactaaaggaaaatgaagattatcacatcattttacagtccatgagatatggacaa

SEQ ID NO: 16098 - DNA, 120 bp, synthetic construct
  misc_feature 1..120: note = Artificially Synthesized Probe
  source 1..120: mol_type = other DNA
tcattctggtatctgactgattattgaacaagctggacttagcggagtaatggtagaaaccaacctaataactttattttcttcccagcacttcctttaaacccaagtgggttctctttt

SEQ ID NO: 16099 - DNA, 120 bp, synthetic construct
  misc_feature 1..120: note = Artificially Synthesized Probe
  source 1..120: mol_type = other DNA
tttctctgaacaggctgctattttctccagtctttctgtggtacataatcttggagaataacgctaagcagccattcctgctttttttctggaaggtaaacacttttgaagtcaagtgac

SEQ ID NO: 16100 - DNA, 120 bp, synthetic construct
  misc_feature 1..120: note = Artificially Synthesized Probe
  source 1..120: mol_type = other DNA
tgcagacactgtaacattgccaagactgaacttgccttctccctctaatcaaacctgtttcacttcctttattcctcatctctgcaaacagtgcaataatatgaaccccaaaacatgaaa

SEQ ID NO: 16101 - DNA, 120 bp, synthetic construct
  misc_feature 1..120: note = Artificially Synthesized Probe
  source 1..120: mol_type = other DNA
ggaaaatagatcttagagagatcctggggcacataacttatcaatgcccattccaggccttgaatttatatctgtctgaccaactctcatgccctaatcacttgaaatactatcactgat

SEQ ID NO: 16102 - DNA, 120 bp, synthetic construct
  misc_feature 1..120: note = Artificially Synthesized Probe
  source 1..120: mol_type = other DNA
acccctttcaagaaggatagatatatgacagatatttattacttgtgaaaattgggttggtgacattcaccaaggacatcctttagaaggaaggtatcaacaacctctcctgacgcatgc

SEQ ID NO: 16103 - DNA, 120 bp, synthetic construct
  misc_feature 1..120: note = Artificially Synthesized Probe
  source 1..120: mol_type = other DNA
gaaagcatgcccccaaatactacagaaaaagcaattacccaactgtttcctggtcatatttatagatttttactcttcgcaataaatgaatgggaggcaaaaactactttaagtccaata

SEQ ID NO: 16104 - DNA, 120 bp, synthetic construct
  misc_feature 1..120: note = Artificially Synthesized Probe
  source 1..120: mol_type = other DNA
gcatttaataaatgctaacttgaattcatacagtagatgacaggagaagactcatggaaaggagaggcttagactgaaatttgaatgaagaaaaagcatgttgggagcagcagtgcagac

SEQ ID NO: 16105 - DNA, 120 bp, synthetic construct
  misc_feature 1..120: note = Artificially Synthesized Probe
  source 1..120: mol_type = other DNA
ctcagggagtgaaactataaagtggaagagccaggactcacccccagtttttgtttcttttccaagctagagtatttggaaatattgagaagtgagagagtattctgccaaatcatgtta

SEQ ID NO: 16106 - DNA, 120 bp, synthetic construct
  misc_feature 1..120: note = Artificially Synthesized Probe
  source 1..120: mol_type = other DNA
tgacctctagggggcagtctcatactagcatttttggcaaatgcatttctaccctcctcttaacctccacatagcagtttttgaatccttgtccagaacataatcattaaagtaatcgat

SEQ ID NO: 16107 - DNA, 120 bp, synthetic construct
  misc_feature 1..120: note = Artificially Synthesized Probe
  source 1..120: mol_type = other DNA
tcagtaagaatgagacaaataagttaacagtgatagtgccgcattataattgccattagagtagttatgctgtggatactatgggaacatagagaaggatcagttagcccaaactcaggg

SEQ ID NO: 16108 - DNA, 120 bp, synthetic construct
  misc_feature 1..120: note = Artificially Synthesized Probe
  source 1..120: mol_type = other DNA
ataaagcctagacttttgtcccaaactccacattcaaacatctaactgcgtatgcattattgctcatttggttatctatgagatgttttaaatttaacatgcccaaaactgaactccagg

SEQ ID NO: 16109 - DNA, 120 bp, synthetic construct
  misc_feature 1..120: note = Artificially Synthesized Probe
  source 1..120: mol_type = other DNA
actcttcttccagaaatccatatgtctaactctccaatctccttcacctttttgctgaaaaccctatcttttgaaaaacatctgccctgaaatccctacttcataccacaacttcctcct

SEQ ID NO: 16110 - DNA, 120 bp, synthetic construct
  misc_feature 1..120: note = Artificially Synthesized Probe
  source 1..120: mol_type = other DNA
tgggctgcttgcgatgaatgaagaaagggagaaacttaggcttttaacttgagtaatttgggtgcttggtgatgacactgaagaagagaaaattattggaccttacagtgattctagctg

SEQ ID NO: 16111 - DNA, 120 bp, synthetic construct
  misc_feature 1..120: note = Artificially Synthesized Probe
  source 1..120: mol_type = other DNA
tgggtgttctatccagttcgtaggcttgctatcagatttagcatcaccagattatttatcaggcatcatttgtattgcctcaaaaatcctaaagcaaatagtaacctgtcccaaggtgca

SEQ ID NO: 16112 - DNA, 120 bp, synthetic construct
  misc_feature 1..120: note = Artificially Synthesized Probe
  source 1..120: mol_type = other DNA
agatcaggatataatttttaagacaagacagaactctgtcctattctacacctttccagccttggtgattatagtgtcatgcatgacacagcttggcttattttctaggacaggtggaaa

SEQ ID NO: 16113 - DNA, 120 bp, synthetic construct
  misc_feature 1..120: note = Artificially Synthesized Probe
  source 1..120: mol_type = other DNA
aggagagtgtaaaatgtaaatgaatccttcctccaaactgttgccaaaaatgtgtttctaaaaatgaaattacatgcctgctcaaaatccctgttgcctccaggatacagtctgacctcc

SEQ ID NO: 16114 - DNA, 120 bp, synthetic construct
  misc_feature 1..120: note = Artificially Synthesized Probe
  source 1..120: mol_type = other DNA
ccaaaccagtctggattgttatcccctatgaaagtcatagtacctctgtaatcttatttgttcaaatgcccaatgttgaagtgtttgatggactacatattgtaattgaaggaggggcaa

SEQ ID NO: 16115 - DNA, 120 bp, synthetic construct
  misc_feature 1..120: note = Artificially Synthesized Probe
  source 1..120: mol_type = other DNA
catggagtcctaaaaacgtaattctgacttataacatgtccagtgccctcattatttgctcttcctgtctctatatatatccacctaggtcattaggctaccatgtatcttttccctcac

SEQ ID NO: 16116 - DNA, 120 bp, synthetic construct
  misc_feature 1..120: note = Artificially Synthesized Probe
  source 1..120: mol_type = other DNA
ggaagcaccactgaatatccatgaaggcaaagttacagattcttctatagacattctctggaatcgagttgatgggaatttccagcattatgaaatcacatgcataaactatgctgctgc

SEQ ID NO: 16117 - DNA, 120 bp, synthetic construct
  misc_feature 1..120: note = Artificially Synthesized Probe
  source 1..120: mol_type = other DNA
tccaatgaagtgccaccttgccagtgtaaacattttattcccaaaggcagatggtgatatatcccatggtaatcatatgaaataaaggatgactgggaaggatgcatgcaactgtataag

SEQ ID NO: 16118 - DNA, 120 bp, synthetic construct
  misc_feature 1..120: note = Artificially Synthesized Probe
  source 1..120: mol_type = other DNA
agagacccaaatgcagtaactgttagctggccttcagctagaagtcttctggatggatatattatttcaatatccagtgaaagcttaatgagagaagaaattctgccctccactaaaagg

SEQ ID NO: 16119 - DNA, 120 bp, synthetic construct
  misc_feature 1..120: note = Artificially Synthesized Probe
  source 1..120: mol_type = other DNA
tatgaaagtgtgctcaagtaccaaggttctcttagttatgagaagaggcttgatctcagaagttgcagtgcaaaggaagggaagcacttaaaatgcagcaatggtcaaatcaattctttg

SEQ ID NO: 16120 - DNA, 120 bp, synthetic construct
  misc_feature 1..120: note = Artificially Synthesized Probe
  source 1..120: mol_type = other DNA
aaggccactgtgttataggaaagactaactctacccattctagctctgcgactttgtgaaaatcgtcttctgtttgcactgcaagttccttatttctaacctggggttaataataatgct

SEQ ID NO: 16121 - DNA, 120 bp, synthetic construct
  misc_feature 1..120: note = Artificially Synthesized Probe
  source 1..120: mol_type = other DNA
taatctgggggcaagaagaaaacacgatatgtttgtcttggaaactatcagaaggagggtttgaaaagtttcaggtaaagaacactgctgctctcataccatcttgatgtttatccaggt

SEQ ID NO: 16122 - DNA, 120 bp, synthetic construct
  misc_feature 1..120: note = Artificially Synthesized Probe
  source 1..120: mol_type = other DNA
tgggcaccaagaaagataatttctccctaaattcccaaagaagggaatgtaattatcccaggttggaatagaaagccaatccagatccagtgaaacaaaacaaatggagttggcctctat

SEQ ID NO: 16123 - DNA, 120 bp, synthetic construct
  misc_feature 1..120: note = Artificially Synthesized Probe
  source 1..120: mol_type = other DNA
tttattagtatggacaaatgtgaaattcatttgaacaccaaatatgtgttctagtgattaattccctgaaagtattagattgctggctttcttttcatgagtgatgggagtgcggagatt

SEQ ID NO: 16124 - DNA, 120 bp, synthetic construct
  misc_feature 1..120: note = Artificially Synthesized Probe
  source 1..120: mol_type = other DNA
ggctcaaatcccacttcttcctagatgcctctctgatcccatctgcagggaatgacattttcttacacagagctttttatgaaacctccctttaactttttctgtgttacttttaacata

SEQ ID NO: 16125 - DNA, 120 bp, synthetic construct
  misc_feature 1..120: note = Artificially Synthesized Probe
  source 1..120: mol_type = other DNA
tcacttgctcagctgtctttgattcctcatattcacttattcatcaatgtctcagctattttggccatttctacctctgaaacagcttctgaatgtgttcacttttctatgtctcctctg

SEQ ID NO: 16126 - DNA, 120 bp, synthetic construct
  misc_feature 1..120: note = Artificially Synthesized Probe
  source 1..120: mol_type = other DNA
ctgagttctcagctcgaatataatctccctatacccttccctgattaccaaatcataccaaaagatgtgattcatgctcatggaaaagaggtgaggatattctacactaacaaggtcaca

SEQ ID NO: 16127 - DNA, 120 bp, synthetic construct
  misc_feature 1..120: note = Artificially Synthesized Probe
  source 1..120: mol_type = other DNA
tatgcaacaagaactgggagtgccttttctatttcaggtgtctattattgtagttctctctcgttgctttttactactcccctgactatactgactggctttcactgatatctgattaac

SEQ ID NO: 16128 - DNA, 120 bp, synthetic construct
  misc_feature 1..120: note = Artificially Synthesized Probe
  source 1..120: mol_type = other DNA
atgatattctctgctaggccagaaacttgggaccccattgattttcttctttcccttcctatagtcttctgtttacatggagttgagagagtaggtcgtaggtactatccataatgatta

SEQ ID NO: 16129 - DNA, 120 bp, synthetic construct
  misc_feature 1..120: note = Artificially Synthesized Probe
  source 1..120: mol_type = other DNA
aatgcagcaatataggaatgctaaaagctttgatgtaacaagaagacatttggaaatgcccttactcctagccctcgctccctctctaacttattctctttcatcttcattcggcatcta

SEQ ID NO: 16130 - DNA, 120 bp, synthetic construct
  misc_feature 1..120: note = Artificially Synthesized Probe
  source 1..120: mol_type = other DNA
gatgtgactcctggtgtaatatataacatcatggtacacagaataagaggcaaccttggaggatgtggcatgtttaccagggttgttgcaggtgtgcaaattctctttgatatttaagaa

SEQ ID NO: 16131 - DNA, 120 bp, synthetic construct
  misc_feature 1..120: note = Artificially Synthesized Probe
  source 1..120: mol_type = other DNA
attgcaagagtaacacatgagaattactcttaagtgatcttgaaagctatggattggacaaccgacccgaaggtcccagacatatggtggtaattcagggtatgggtaattattatttgg

SEQ ID NO: 16132 - DNA, 120 bp, synthetic construct
  misc_feature 1..120: note = Artificially Synthesized Probe
  source 1..120: mol_type = other DNA
ccagctttactccaggatttgacactggttagctgagtactactgggcaagttacctgatgtctttgggtatcaagtttctgagaaatttaaattagatgacctctgagattccttttga

SEQ ID NO: 16133 - DNA, 120 bp, synthetic construct
  misc_feature 1..120: note = Artificially Synthesized Probe
  source 1..120: mol_type = other DNA
aaagcattgagtggatatgaggagggggctaagctgagaaatgaagaacaggtaacatgatggtttgactaagagatgaccagggcttttagagaaaaatagtagaaatagcaagagact

SEQ ID NO: 16134 - DNA, 120 bp, synthetic construct
  misc_feature 1..120: note = Artificially Synthesized Probe
  source 1..120: mol_type = other DNA
agaggagcacacagttatcatagtgattgaaaacttgaagactttgcctctgggtctaaatcctggctctaccatttacccattagctatgggacctgttggaattacttaaattctttg

SEQ ID NO: 16135 - DNA, 120 bp, synthetic construct
  misc_feature 1..120: note = Artificially Synthesized Probe
  source 1..120: mol_type = other DNA
tctattttcagttagttgaaccttctagctcttaaccagaaagctgcactctttcataatgatttaagcattgctgtagatcctctacctttttctgagtgcaagctttcctcctctcgg

SEQ ID NO: 16136 - DNA, 120 bp, synthetic construct
  misc_feature 1..120: note = Artificially Synthesized Probe
  source 1..120: mol_type = other DNA
ataggtctggcttaccttgtaaaaaatgccagcagctaacaatgaaattctacccaacacaggctgggtatttctctgattttttgccttgggtttacagtattcctagagttaccagaa

SEQ ID NO: 16137 - DNA, 120 bp, synthetic construct
  misc_feature 1..120: note = Artificially Synthesized Probe
  source 1..120: mol_type = other DNA
attttaaacctctatttttcaatatcagaaccagaacaacctgagaaacttagagccttcaatatttccacacattccttttctctgcactggagcctaccctctggtcatgtggaaagg

SEQ ID NO: 16138 - DNA, 120 bp, synthetic construct
  misc_feature 1..120: note = Artificially Synthesized Probe
  source 1..120: mol_type = other DNA
aaaaacaagggctaagtcatgggctgtagatttctcaagacttgaatagttgttccttgtgacagtgaactaggatagatagaaatgctgacttaggctgtgataacgcagtacgttttg

SEQ ID NO: 16139 - DNA, 120 bp, synthetic construct
  misc_feature 1..120: note = Artificially Synthesized Probe
  source 1..120: mol_type = other DNA
tgtgaaaatgcaataattatttgaccttttaacaaaatggattttttaaaaatagaaccagggcctccagtcttcctagccggggaaagagtcggatctgctgggattcttctgtcttgg

SEQ ID NO: 16140 - DNA, 120 bp, synthetic construct
  misc_feature 1..120: note = Artificially Synthesized Probe
  source 1..120: mol_type = other DNA
taataattgcatatgggagctcaagttttttttttttttggtgctttagactggaaagaaagtcttcgttgaaggattaatagctgcaggactggattttgtaaacttctttccataaca

SEQ ID NO: 16141 - DNA, 120 bp, synthetic construct
  misc_feature 1..120: note = Artificially Synthesized Probe
  source 1..120: mol_type = other DNA
tttgcttttgatgtctcagtcataaattatttgcctagtccaatatccagaagagttttacctagtttttcttactagtatttttatagtttcaggttttatatttaagtccttaatcca

SEQ ID NO: 16142 - DNA, 120 bp, synthetic construct
  misc_feature 1..120: note = Artificially Synthesized Probe
  source 1..120: mol_type = other DNA
tacatatgtatacatgggacatgctggtgtgctgcacccactaactcgtcatctagaattaggtatatctcccaatgctatccctccccactccccccaccccacaacagtccccagagt

SEQ ID NO: 16143 - DNA, 120 bp, synthetic construct
  misc_feature 1..120: note = Artificially Synthesized Probe
  source 1..120: mol_type = other DNA
ttagatgtgaagtccttgcccatgcctatgtcctgaatggtaatgcctaggtttacttctagggtttttatggttttaggtctaacatttaagtctttaatccatcttgaattgattttt

SEQ ID NO: 16144 - DNA, 120 bp, synthetic construct
  misc_feature 1..120: note = Artificially Synthesized Probe
  source 1..120: mol_type = other DNA
tggtgagagagggcatccctgtcttgtgccagttttcaaagggaatgcttctggtttttgcccattcagtatgatattggctgtgggtttgtcatagatagctcttattattttgagata

SEQ ID NO: 16145 - DNA, 120 bp, synthetic construct
  misc_feature 1..120: note = Artificially Synthesized Probe
  source 1..120: mol_type = other DNA
ttatgaatgtgtttgctcttgcttttctagttcttttaattgtgatgttagggtgtcagttttggatctttcctgctttctcttgtgggcatttagtgctataaattgccctctacacac

SEQ ID NO: 16146 - DNA, 120 bp, synthetic construct
  misc_feature 1..120: note = Artificially Synthesized Probe
  source 1..120: mol_type = other DNA
tggtttattttgctcgttagttgatgcagtttcttcctagccttgatggtctttacaatttggcatgatttttcagtggctggtaccggttgttcttttccatgtttagtgcttccttca

SEQ ID NO: 16147 - DNA, 120 bp, synthetic construct
  misc_feature 1..120: note = Artificially Synthesized Probe
  source 1..120: mol_type = other DNA
tgcgttcctttggaggaggagagctgctctgctttttagagtttccagtttttctgctctgttttttccccatctttgtggttttatctacttttggtctttgatgatggtgatgtacag

SEQ ID NO: 16148 - DNA, 120 bp, synthetic construct
  misc_feature 1..120: note = Artificially Synthesized Probe
  source 1..120: mol_type = other DNA
atctgttgagacgatcatatggctaacagggctgggagaaaaatattgaaaaaaaaactttaagtttaataaaaaagtagaatatttttacttaaaaaacttataaaggcgaaattattt

SEQ ID NO: 16149 - DNA, 120 bp, synthetic construct
  misc_feature 1..120: note = Artificially Synthesized Probe
  source 1..120: mol_type = other DNA
tatagttagcttttcatttttcttccaaatcttcttgtttttacatgtctgttgacattttggatattggtttgaacatttctaaagtgccacttttgctaagaatcgtgaactcaatgt

SEQ ID NO: 16150 - DNA, 120 bp, synthetic construct
  misc_feature 1..120: note = Artificially Synthesized Probe
  source 1..120: mol_type = other DNA
aaggtctattgggaagcccttactctccgtttcatctcacactttataaatcattcttgtgacctttactctgttcaaataaatgttagccattgcagaattccaaagggtatttggcat

SEQ ID NO: 16151 - DNA, 120 bp, synthetic construct
  misc_feature 1..120: note = Artificially Synthesized Probe
  source 1..120: mol_type = other DNA
gattctcttttttcagggagtaaaatgtttgaacacaatccttttggtctgttctaggttgctgctgaaaacagtgctggcattggagtgtttagtgatccatttctcttccaaactgca

SEQ ID NO: 16152 - DNA, 120 bp, synthetic construct
  misc_feature 1..120: note = Artificially Synthesized Probe
  source 1..120: mol_type = other DNA
cctgtggctcttttctctcacagtacacatctaatctatcagtaaatcttaccagcacaatcatcaaagtgtattctgaatctcacactcattgctgacatcctgtccaacattattccc

SEQ ID NO: 16153 - DNA, 120 bp, synthetic construct
  misc_feature 1..120: note = Artificially Synthesized Probe
  source 1..120: mol_type = other DNA
gattagtgtcaagcatgccagaagtgggatagtagtgaaagatgtctcaatcagagtagaggacattttgactgggaaattgccagaatgcaatgtaagtatcacagaacactttctatg

SEQ ID NO: 16154 - DNA, 120 bp, synthetic construct
  misc_feature 1..120: note = Artificially Synthesized Probe
  source 1..120: mol_type = other DNA
ctctattgatcttattttatttactaggagaatagtgaatcttttttatggagtacagccagcccttctccaacccttggtagagttacacctccatcgcgtaccacacattcatcaagc

SEQ ID NO: 16155 - DNA, 120 bp, synthetic construct
  misc_feature 1..120: note = Artificially Synthesized Probe
  source 1..120: mol_type = other DNA
ttacacccttctctcactgttattgccatcatcaaaagcagaaatacctgcactagcagaacgagcatgtgatcaacatttagttatcagatacaagcagtagctaaaatatatacctac

SEQ ID NO: 16156 - DNA, 120 bp, synthetic construct
  misc_feature 1..120: note = Artificially Synthesized Probe
  source 1..120: mol_type = other DNA
gagcccaccacagctcaaggaggcctgcctgcctctgtaggctccacctctgggggcagggcacagacaaacaaaaagacagcagtaacctctgcagacttaaatgtccctgtctgacag

SEQ ID NO: 16157 - DNA, 120 bp, synthetic construct
  misc_feature 1..120: note = Artificially Synthesized Probe
  source 1..120: mol_type = other DNA
accaaatctacgtatgattggtatacctgaaagtgatggcgagaatggaatcaagttggaaaacactctgcaggatgttatccaggagaacttccccaatctagcaaggcaggccaacat

SEQ ID NO: 16158 - DNA, 120 bp, synthetic construct
  misc_feature 1..120: note = Artificially Synthesized Probe
  source 1..120: mol_type = other DNA
aagtcctgagtgacctacaaagagacttagactcccatacaataataatgggagactttaacaccccactgtcaacattagacagaaagttaacaaggatacccaggaattgaactcagc

SEQ ID NO: 16159 - DNA, 120 bp, synthetic construct
  misc_feature 1..120: note = Artificially Synthesized Probe
  source 1..120: mol_type = other DNA
gcttaccaaccaaaaagagtccaggaccagatggattcacagccgaattctaccagaggtacaaggaggaactggtaccattccttctgaaactattccaatcaatagaaaaagagggaa

SEQ ID NO: 16160 - DNA, 120 bp, synthetic construct
  misc_feature 1..120: note = Artificially Synthesized Probe
  source 1..120: mol_type = other DNA
caaacaaatgaaagaacattccatgctcatgggtaggaagaatcaatatcatgaaaatggccacactgcccaaggtaatttatagattctatgccatccccatcaagctaccaatgactt

SEQ ID NO: 16161 - DNA, 120 bp, synthetic construct
  misc_feature 1..120: note = Artificially Synthesized Probe
  source 1..120: mol_type = other DNA
caggtgctggagaagatgtggagaaataggaacatttttacactgttggtgggactgtaaactagttcaaccattgtggaagtcagtgtggcgattcctcagggatctagaactagaaat

SEQ ID NO: 16162 - DNA, 120 bp, synthetic construct
  misc_feature 1..120: note = Artificially Synthesized Probe
  source 1..120: mol_type = other DNA
tatatgttatgtatttattttctataattattttagtgcctgaaggaccaccacaaaactgcgtaacaggcaacatcacaggaaagtccttttcaattttatgggacccaccaactatag

SEQ ID NO: 16163 - DNA, 120 bp, synthetic construct
  misc_feature 1..120: note = Artificially Synthesized Probe
  source 1..120: mol_type = other DNA
tttttgggcagctttataaagtggcaagttctccaactttgtaagcaagcaggacctgggcatccacttgccagagatactttgagaggatcaagtattatatcattaggatcaagtatt

SEQ ID NO: 16164 - DNA, 120 bp, synthetic construct
  misc_feature 1..120: note = Artificially Synthesized Probe
  source 1..120: mol_type = other DNA
cagagtatatgggtgtagatgctggtaaatatatagttgtgttggtgggagcctgtggcaaatattttctaactggtttacctttttcagtgtagtgggaagcaagactattagttggga

SEQ ID NO: 16165 - DNA, 120 bp, synthetic construct
  misc_feature 1..120: note = Artificially Synthesized Probe
  source 1..120: mol_type = other DNA
ttggggtggctgcaggggaacaaaaacagtgttctcaggaaagagccagtttgtagttagagcaagaaggtaaaggaaacatttaaagcaaagtcgaagatttaaagtattgtgctgaca

SEQ ID NO: 16166 - DNA, 120 bp, synthetic construct
  misc_feature 1..120: note = Artificially Synthesized Probe
  source 1..120: mol_type = other DNA
ccagtgcagggactgggcccaagtcaaatatttcagtattcactccaccagatggtaagaacatagggaatgagtgagatatttttggtatgcttatgaacttcatgaattggtaaaaca

SEQ ID NO: 16167 - DNA, 120 bp, synthetic construct
  misc_feature 1..120: note = Artificially Synthesized Probe
  source 1..120: mol_type = other DNA
tccatctccacctaaaaactgctcttaagcatgtcctaggaaactagacagatttatggacactatcaaataaagcagagcccttgattttggtcttaatagagttttctcaaccaactc

SEQ ID NO: 16168 - DNA, 120 bp, synthetic construct
  misc_feature 1..120: note = Artificially Synthesized Probe
  source 1..120: mol_type = other DNA
ctccagatactcatagaaaaatgttgcattgacctcttatagagaatgttatgtgctattacattacagtggagttgatttcattacccctggggatgttacggtccatagtctactttg

SEQ ID NO: 16169 - DNA, 120 bp, synthetic construct
  misc_feature 1..120: note = Artificially Synthesized Probe
  source 1..120: mol_type = other DNA
ttggccaaatgtctaacttatttctcatttatttgtaaaatttgtaaatgtatcgacttgagaatgactcttaggtatttcctgtggacatcaccttcaaaactgatgctgaaccatgaa

SEQ ID NO: 16170 - DNA, 120 bp, synthetic construct
  misc_feature 1..120: note = Artificially Synthesized Probe
  source 1..120: mol_type = other DNA
aataaaactcatactagaggtgacctgtgcaaagggctttatctgtcttattccttcctctgtcctcaagtgcctagaacagtgatcatatgatcaatgctcagtgtgttgaatgatgaa

SEQ ID NO: 16171 - DNA, 120 bp, synthetic construct
  misc_feature 1..120: note = Artificially Synthesized Probe
  source 1..120: mol_type = other DNA
aaatgatcaaaagcccaggggatatttgttttttgcccgttactcctgtgaaactgggaagttccctagatgtcactcttagtgactttacaactagaacttgctttaagttcttggtac

SEQ ID NO: 16172 - DNA, 120 bp, synthetic construct
  misc_feature 1..120: note = Artificially Synthesized Probe
  source 1..120: mol_type = other DNA
agggtcctgtctgttagaaggaaaactaacaaacagaaaggacatccacaccaaaaacccatctgtacatcaccatcatcaaagaccaaaagtagataaaaccacaaagatggggaaaaa

SEQ ID NO: 16173 - DNA, 120 bp, synthetic construct
  misc_feature 1..120: note = Artificially Synthesized Probe
  source 1..120: mol_type = other DNA
acagacaagcaaatgctgagagattttgtcaccaccaggcctgctctaaaagagctcctgaaggaagcactaaacatggaaaggaacaactggtaccagccactgcaaaatcatgccaaa

SEQ ID NO: 16174 - DNA, 120 bp, synthetic construct
  misc_feature 1..120: note = Artificially Synthesized Probe
  source 1..120: mol_type = other DNA
agatgttctttgaaaccaactagaacaaagacacaacataccagaatatctgggacgcattcaaagcagtgtgtagagggaaatttatagcactaaatgcccacaagagaaagcaggaaa

SEQ ID NO: 16175 - DNA, 120 bp, synthetic construct
  misc_feature 1..120: note = Artificially Synthesized Probe
  source 1..120: mol_type = other DNA
aggcctttgacaaaattcaacaatccttcatgctaaaaactctcaataaattaggtattgatgggacgtatttcaaaataataagagccatccatgacaaacccacagccaatatcatac

SEQ ID NO: 16176 - DNA, 120 bp, synthetic construct
  misc_feature 1..120: note = Artificially Synthesized Probe
  source 1..120: mol_type = other DNA
gtgctgggaaaactggctagccatatgtagaaagctgaaactggatcccttccttacaccttatacaaaaattaattcaagatggattaaagacttaaatgtcagacctaaaaccataaa

SEQ ID NO: 16177 - DNA, 120 bp, synthetic construct
  misc_feature 1..120: note = Artificially Synthesized Probe
  source 1..120: mol_type = other DNA
catattctcactcatagatgggaattgaacaatgagatcacatggacacaggaaggggaacatcacactctggggcctgttgtggggtggggggaggggggagggatagcattgggagat

SEQ ID NO: 16178 - DNA, 120 bp, synthetic construct
  misc_feature 1..120: note = Artificially Synthesized Probe
  source 1..120: mol_type = other DNA
ggcagtgtttgatttacaacttgcagaggtagaatccacgcaagtaagaattacttggaagaaaccacgacaaccaaatggaattattaaccaataccgagtgaaagtgctagttccaga

SEQ ID NO: 16179 - DNA, 120 bp, synthetic construct
  misc_feature 1..120: note = Artificially Synthesized Probe
  source 1..120: mol_type = other DNA
tttttttccttttgtttctgttaggaagtacaggcaacactgatttttctttccactgtctttgttcacctcacttcatcaactgttcacctgtgagactctttcagcctccaggctagt

SEQ ID NO: 16180 - DNA, 120 bp, synthetic construct
  misc_feature 1..120: note = Artificially Synthesized Probe
  source 1..120: mol_type = other DNA
tttattagatcagactcatttctgatatttctgcttccccatgtagctggtgtttgggtttacctttcaggagattgatgtggggagacagatatgacagaagctttaaatccaaatggc

SEQ ID NO: 16181 - DNA, 120 bp, synthetic construct
  misc_feature 1..120: note = Artificially Synthesized Probe
  source 1..120: mol_type = other DNA
aaataaatttctccccataaaacaaaacagaaatcttctctgagataataggggcttcatgatgggagggaagatgtgacattggaatgaggacagagatcttgggacagtgatagtgac

SEQ ID NO: 16182 - DNA, 120 bp, synthetic construct
  misc_feature 1..120: note = Artificially Synthesized Probe
  source 1..120: mol_type = other DNA
caggaacaacaggaggtgggtatagtgggtatctacctgagaggccatgcactacactcccccagcctactattttatatttcaaacacttattagaataatccttccagatttaagtat

SEQ ID NO: 16183 - DNA, 120 bp, synthetic construct
  misc_feature 1..120: note = Artificially Synthesized Probe
  source 1..120: mol_type = other DNA
ctttggagccaggaaaaatgttccaatcctacctctgctgtcactagttttgtgaacttgaacagatgactgtaaaatggagataaaaatcatctatctctttggggggacaataaagca

SEQ ID NO: 16184 - DNA, 120 bp, synthetic construct
  misc_feature 1..120: note = Artificially Synthesized Probe
  source 1..120: mol_type = other DNA
tcaggtggattaggaatttatctctgaagactcctaattctttcacataaattccaagaattcctgggcagcataggcaaggcctttcatgttgacaaattgtgacattccctaactcaa

SEQ ID NO: 16185 - DNA, 120 bp, synthetic construct
  misc_feature 1..120: note = Artificially Synthesized Probe
  source 1..120: mol_type = other DNA
agttcattctatagtgctttgtacacagtagattttcaaagggtgactgattgatagtggaaacagctgtgtggtttgggcataaagtattgactgcaacaccagagcttctctgagtta

SEQ ID NO: 16186 - DNA, 120 bp, synthetic construct
  misc_feature 1..120: note = Artificially Synthesized Probe
  source 1..120: mol_type = other DNA
aataagcctccatatacctgccacctggattcagtaatcatcaataggctgccattcttgcctccggtttttaaataaattccagacttaacatcattttgttcctatatgcctaagcac

SEQ ID NO: 16187 - DNA, 120 bp, synthetic construct
  misc_feature 1..120: note = Artificially Synthesized Probe
  source 1..120: mol_type = other DNA
tttaattacagtatataaatgaccccatggctccagaaattgtgaacatagtagagccaatggtaggattatatgagggttcagcagagatgtcgtctgaccttcactcacttgctacat

SEQ ID NO: 16188 - DNA, 120 bp, synthetic construct
  misc_feature 1..120: note = Artificially Synthesized Probe
  source 1..120: mol_type = other DNA
actgatccatttttcttgtgcaaagaagactggagggcaacactgaaaattaagagtcccatgatttctgatgcagacattcccttaaatatttcaagtttggcctaattgctacttaag

SEQ ID NO: 16189 - DNA, 120 bp, synthetic construct
  misc_feature 1..120: note = Artificially Synthesized Probe
  source 1..120: mol_type = other DNA
cacatgattagtgtatctgctttcaccatcatgggagaaggaccaccaacagttctcagtgttaggacacgtcagcaaggtaaggatgtatttcctttgaaacaattaactgcaaatatt

SEQ ID NO: 16190 - DNA, 120 bp, synthetic construct
  misc_feature 1..120: note = Artificially Synthesized Probe
  source 1..120: mol_type = other DNA
ccggaatcatcacctcaagatgtcgaagtaattgatgttaccgcagatgaaataaggttgaagtggtcaccacccgaaaagcccaatgggatcattattgcttatgaagtgctatataaa

SEQ ID NO: 16191 - DNA, 120 bp, synthetic construct
  misc_feature 1..120: note = Artificially Synthesized Probe
  source 1..120: mol_type = other DNA
ttatagaggttgctggatgggttgggagaggatatcccatctaaaggaagtaaaacaagcaaggaattacttgtgttttagtttcggtgaaactagagtaagacagtttgtctgttaatc

SEQ ID NO: 16192 - DNA, 120 bp, synthetic construct
  misc_feature 1..120: note = Artificially Synthesized Probe
  source 1..120: mol_type = other DNA
aatatttataatataccaggccttactggggataaagtagtgtagaagaaaaggatttccttccctccttaagttttattagttggtgggtgtttcattgcctaatggcaccagctggaa

SEQ ID NO: 16193 - DNA, 120 bp, synthetic construct
  misc_feature 1..120: note = Artificially Synthesized Probe
  source 1..120: mol_type = other DNA
ctaacaatcagagtatagggtttaatgcccatcttcctaatatctggttctctgtcctaagttagggtagtctcaagttctgtgcattttccacctggatgaaaatggaagacaatggaa

SEQ ID NO: 16194 - DNA, 120 bp, synthetic construct
  misc_feature 1..120: note = Artificially Synthesized Probe
  source 1..120: mol_type = other DNA
cttgctttatctacctgatgatccagcactagttattccctaagggtaaatgaataaaaatgcaaaggatatcagccttgggtcaggaatacatatttacacactgactactggtggtag

SEQ ID NO: 16195 - DNA, 120 bp, synthetic construct
  misc_feature 1..120: note = Artificially Synthesized Probe
  source 1..120: mol_type = other DNA
gagaattcacagatgaggcgagaggcagaggtggatcctgagattcttaggtgccattctaggaactttggagtttaattttaatgaggagcttttggagaattatggaataggaacatt

SEQ ID NO: 16196 - DNA, 120 bp, synthetic construct
  misc_feature 1..120: note = Artificially Synthesized Probe
  source 1..120: mol_type = other DNA
agacgtggagggatagagcttggaaaggaggaaagagggaaggcagttaagggaaaatttgaagtcagatgataatgtagctctcttctcagtgtttttatttttgctatggaatgagaa

SEQ ID NO: 16197 - DNA, 120 bp, synthetic construct
  misc_feature 1..120: note = Artificially Synthesized Probe
  source 1..120: mol_type = other DNA
acttagagctagaaagttaagaaagcattgagggtagttgttgaggattttcctcaatgtaatgggttggcctggggaaacactagagaagatttagcacatttcagatagaaaggatag

SEQ ID NO: 16198 - DNA, 120 bp, synthetic construct
  misc_feature 1..120: note = Artificially Synthesized Probe
  source 1..120: mol_type = other DNA
tctgatgtttgatgtcgttgaataattttgatgagcctcagccattatccctttaaatatttcttcattttctctactattttagaccccctccggatatcatctatgtctcaactgcca

SEQ ID NO: 16199 - DNA, 120 bp, synthetic construct
  misc_feature 1..120: note = Artificially Synthesized Probe
  source 1..120: mol_type = other DNA
tctctgacacactacacatatgttactatacaaatgcaaaggcaccaggattaaccaatctatggcaaggcaaaactggctttagtatcagcttccttctcaggatttctgtctttgcat

SEQ ID NO: 16200 - DNA, 120 bp, synthetic construct
  misc_feature 1..120: note = Artificially Synthesized Probe
  source 1..120: mol_type = other DNA
tgtttctttcagtgcctgatagtgcaccagaaaatatcacttacaaaaatatttcttctggagagattgagctatcattccttcccccaagtagtcccaatggaatcatacaaaaatata

SEQ ID NO: 16201 - DNA, 120 bp, synthetic construct
  misc_feature 1..120: note = Artificially Synthesized Probe
  source 1..120: mol_type = other DNA
gacactgctaggaagggagacttttccctgcattgctctctttcttttcaaaataataaagtcttcaaatccctcttctctttttgcaggtctctccatgttttaacctctaccaaagca

SEQ ID NO: 16202 - DNA, 120 bp, synthetic construct
  misc_feature 1..120: note = Artificially Synthesized Probe
  source 1..120: mol_type = other DNA
aaggaacagggtaaagaacaagactcccttgttgaaaaattacagaaaatcgagaatggataaagatctgagaacatttgcctctttgggaattaggaactccttgccctcatgaagctc

SEQ ID NO: 16203 - DNA, 120 bp, synthetic construct
  misc_feature 1..120: note = Artificially Synthesized Probe
  source 1..120: mol_type = other DNA
catgcacacatgggaacacatacaactacagctgagattattcagagaagtaaaaaagaaaaaatattgaagtaagtcaggtagcattctgtccaaattattggaaatagtgatctgtat

SEQ ID NO: 16204 - DNA, 120 bp, synthetic construct
  misc_feature 1..120: note = Artificially Synthesized Probe
  source 1..120: mol_type = other DNA
ccctcaagacttctctgtaaaacagttgtctggtgtcacggtgaagttgtcatggcaaccacccctggagccaaatggaattatcctttattacacagtttatgtctggtaataattttt

SEQ ID NO: 16205 - DNA, 120 bp, synthetic construct
  misc_feature 1..120: note = Artificially Synthesized Probe
  source 1..120: mol_type = other DNA
ctaattcccctttaacccctttacatatttctctttaagactatattttttgttttctttgttgcctgattcctagtgactttgcctagtcgtgacgaaagtgggagtgtcttgactccc

SEQ ID NO: 16206 - DNA, 120 bp, synthetic construct
  misc_feature 1..120: note = Artificially Synthesized Probe
  source 1..120: mol_type = other DNA
tttctggctgggattttcagccctgcattatgagaataattgttttcttctatacagtgatcatgcttcccttcctagagcttccgtgtatatctagcataatgcataacacacctagac

SEQ ID NO: 16207 - DNA, 120 bp, synthetic construct
  misc_feature 1..120: note = Artificially Synthesized Probe
  source 1..120: mol_type = other DNA
caatgaaagtggggtgagggaatctcaaatccgtgatattgaaacagaaaaagttcccttgtcctgctctcggggcgtgcgaccggggtgtgtctcaattctctggtgcccccctgctca

SEQ ID NO: 16208 - DNA, 120 bp, synthetic construct
  misc_feature 1..120: note = Artificially Synthesized Probe
  source 1..120: mol_type = other DNA
tcccaaatctattcaggtgttgtcaccacttaatccttaccctaagatcttgggacactccagtgtgatggctttgcccttttatttctctcactcttttttcgtagtgcaaaatttttc

SEQ ID NO: 16209 - DNA, 120 bp, synthetic construct
  misc_feature 1..120: note = Artificially Synthesized Probe
  source 1..120: mol_type = other DNA
atcactaatcttttttggggactcttaccataatcagttttggggagaggaggcaggtatcataatgtaatacacatgggtttttagtcagtgagacatgggtttgaatcttggctctga

SEQ ID NO: 16210 - DNA, 120 bp, synthetic construct
  misc_feature 1..120: note = Artificially Synthesized Probe
  source 1..120: mol_type = other DNA
ttcccccctgcagttattgataaataacacgtatttttcaaatgatacacagtccttgaattcctagggcaaccaccattaaataaatggatttctattggagcactgtaagcttattgt

SEQ ID NO: 16211 - DNA, 120 bp, synthetic construct
  misc_feature 1..120: note = Artificially Synthesized Probe
  source 1..120: mol_type = other DNA
tcaactctttcctgatagtcatttttctgaatcactctgaagcttgagtgccaaggtcaagcccatggccactcatgatttgcaagtgggtcataaatttagaattgattgtcagtgtta

SEQ ID NO: 16212 - DNA, 120 bp, synthetic construct
  misc_feature 1..120: note = Artificially Synthesized Probe
  source 1..120: mol_type = other DNA
tgtcttttggagaagagctattttaactggggtgagatggtatctcactgtagttttgatttgcatttctctgatgatcaatgatgttgagcaccttttcataagcccccttgacatctg

SEQ ID NO: 16213 - DNA, 120 bp, synthetic construct
  misc_feature 1..120: note = Artificially Synthesized Probe
  source 1..120: mol_type = other DNA
ggcaatcttctcatcaagtttttgaaatgcagaacactgagagagtttgtgatttctttgcatgtcagacttagggaacaaaatgtctcagaaagctgaaggaactgaatcaagaatagt

SEQ ID NO: 16214 - DNA, 120 bp, synthetic construct
  misc_feature 1..120: note = Artificially Synthesized Probe
  source 1..120: mol_type = other DNA
agaaaaataaaacctatggcagttagagcataggttaagtgtgtgttttgggtggggattgggggggatacatgtcttaacccttgcctgacatggccatatgtcatgtttataatttgg

SEQ ID NO: 16215 - DNA, 120 bp, synthetic construct
  misc_feature 1..120: note = Artificially Synthesized Probe
  source 1..120: mol_type = other DNA
ggctgcataaatgtcttcttttcagaagtgtctgttcatatcctttgcccacgttttgatggggttgtttgtttttttcttgtaaattttgtttgagttctttgtagattctggatatta

SEQ ID NO: 16216 - DNA, 120 bp, synthetic construct
  misc_feature 1..120: note = Artificially Synthesized Probe
  source 1..120: mol_type = other DNA
ttcactcatgatttggctatctgtttgtctgttattggtatataagaatgcttgtgatttttgtacattgattttgtatcctgagactttgctgaagttgcctatcagcttaaggagact

SEQ ID NO: 16217 - DNA, 120 bp, synthetic construct
  misc_feature 1..120: note = Artificially Synthesized Probe
  source 1..120: mol_type = other DNA
ttctggtttatttgcatagaggtgtttatagtgttctctcatggtagtttgtatttctgtgggatcggtggtgatatcccctttagcattttttattgcgtctatttgattcttctctct

SEQ ID NO: 16218 - DNA, 120 bp, synthetic construct
  misc_feature 1..120: note = Artificially Synthesized Probe
  source 1..120: mol_type = other DNA
gtctcttttgatctttgttggtttaaagtctgttttatcagagactaggtttgcaacccctgccttttcttgttttccatttgcttggtagatcttcctccatccctttattttgagcct

SEQ ID NO: 16219 - DNA, 120 bp, synthetic construct
  misc_feature 1..120: note = Artificially Synthesized Probe
  source 1..120: mol_type = other DNA
gttggattactggttagtacagtttgaatacacagagtagagcttgttcagggagaagtgatgaagatggtggaaatcctcagaatcaaggcatatgcggaactattgaaataagggaac

SEQ ID NO: 16220 - DNA, 120 bp, synthetic construct
  misc_feature 1..120: note = Artificially Synthesized Probe
  source 1..120: mol_type = other DNA
cctatctgtgctttctctggtatatggatcttcacataaaaatcaaaatctatggagacagggtatgaattggaacccagaattggccatctcagagaagcaggtgtttacagaaaggaa

SEQ ID NO: 16221 - DNA, 120 bp, synthetic construct
  misc_feature 1..120: note = Artificially Synthesized Probe
  source 1..120: mol_type = other DNA
gacattccaccactgattatattttaaagcttgctatacattaagcactttgcatcaccttagctttttttaaaaatcatttttgtttctacaacacatggcaaactttcagtaaaaagg

SEQ ID NO: 16222 - DNA, 120 bp, synthetic construct
  misc_feature 1..120: note = Artificially Synthesized Probe
  source 1..120: mol_type = other DNA
tatattcctccaatagcccattttctgaagtattttactcaaattttggagccctaatgggatgataatatgtggctataaacccattgaagccagaggttatgtctttgtcaccttcat

SEQ ID NO: 16223 - DNA, 120 bp, synthetic construct
  misc_feature 1..120: note = Artificially Synthesized Probe
  source 1..120: mol_type = other DNA
taccttgctttgactcagactgtctctgagatgctagaacagctttaggaatgtgcaactgtttatgccttgctagtttgggattatttaatacataatcactagcctactgatgctagc

SEQ ID NO: 16224 - DNA, 120 bp, synthetic construct
  misc_feature 1..120: note = Artificially Synthesized Probe
  source 1..120: mol_type = other DNA
tcaactccctatcctactctcaaactttacaaactggctttctagtgaataatttcctggatctctggggccatgccttattctctttttttatactgtggtcacaactaatttctttgc

SEQ ID NO: 16225 - DNA, 120 bp, synthetic construct
  misc_feature 1..120: note = Artificially Synthesized Probe
  source 1..120: mol_type = other DNA
ttatagcagtgtcaaaaatgaatttcctacatacgaatttcctacacagggtttgctcaaagggagtgaacactttgagcttcaggattgctcagaagattgctcctttgattagagagc

SEQ ID NO: 16226 - DNA, 120 bp, synthetic construct
  misc_feature 1..120: note = Artificially Synthesized Probe
  source 1..120: mol_type = other DNA
aattgccttgattctgcattatctatggaacataatctgaggctttttttttacagttggtagatacttatgtacaagattttgctgtgaaaatcagggcaagaaggtagtgatgcaagg

SEQ ID NO: 16227 - DNA, 120 bp, synthetic construct
  misc_feature 1..120: note = Artificially Synthesized Probe
  source 1..120: mol_type = other DNA
aatcctgcctgtctccaatcacatactccgaatccatatttttctcactgtggtaagctttccaactatttttcagaaaacaaaacttatatttggaataacttggtgcttctgtggcag

SEQ ID NO: 16228 - DNA, 120 bp, synthetic construct
  misc_feature 1..120: note = Artificially Synthesized Probe
  source 1..120: mol_type = other DNA
atacagtgcttatgtaacagctagcaccagatttggtgatgggaaaacaagaagcaatatcattagctttcaaacaccagagggaggtgagttaaggatgtatgccaattaaaagaatgt

SEQ ID NO: 16229 - DNA, 120 bp, synthetic construct
  misc_feature 1..120: note = Artificially Synthesized Probe
  source 1..120: mol_type = other DNA
ttatagcaccaagcgatcctcccaaagatgtttattatgcaaacctcagttcttcatcaataattcttttctggacacctccttcaaaacctaatgggattatacaatattactctgttt

SEQ ID NO: 16230 - DNA, 120 bp, synthetic construct
  misc_feature 1..120: note = Artificially Synthesized Probe
  source 1..120: mol_type = other DNA
aattctgagttacctaatcccatttgtgactgacagcccaagtttagtcactagttagctctactgagtaacagcctctgtaattaagactttagtgcagctatagtgcaatgtaggcta

SEQ ID NO: 16231 - DNA, 120 bp, synthetic construct
  misc_feature 1..120: note = Artificially Synthesized Probe
  source 1..120: mol_type = other DNA
ttccttatcatctttccccttcctacagaactttgtagaatatgtcatgcatggcatatcatgttctgcctcctattaccgataactgttgcttctcttagttcccttatgccatgacaa

SEQ ID NO: 16232 - DNA, 120 bp, synthetic construct
  misc_feature 1..120: note = Artificially Synthesized Probe
  source 1..120: mol_type = other DNA
ttaatgttacaaatttgttacatgcctatgcacattaagtcacacagtcagcaggaatgacttctgggtgattcagataatttgttatgtattagccatcaaggtcataggtaatcagaa

SEQ ID NO: 16233 - DNA, 120 bp, synthetic construct
  misc_feature 1..120: note = Artificially Synthesized Probe
  source 1..120: mol_type = other DNA
tttttaagccttggggaaaaatgcaactaggagtcagtcaagagaatttaaaactttctcttactctacacatcagagagtacatcagtctgctatccctttgctacaactgtgagaagt

SEQ ID NO: 16234 - DNA, 120 bp, synthetic construct
  misc_feature 1..120: note = Artificially Synthesized Probe
  source 1..120: mol_type = other DNA
ctacacaggactctgcagcacatctcttctcactgtgtttgtgactaatatatccagagtattttccttaactccagaagtttctcgtatgcatcttctgaagaatcctatttatcccga

SEQ ID NO: 16235 - DNA, 120 bp, synthetic construct
  misc_feature 1..120: note = Artificially Synthesized Probe
  source 1..120: mol_type = other DNA
tggtgactggagagattttgagactagatcttgggaaagcttttagtattgattcttctggctacccacatgaccttggagaagtaacttaatggctgagctttagtttcctcatatgta

SEQ ID NO: 16236 - DNA, 120 bp, synthetic construct
  misc_feature 1..120: note = Artificially Synthesized Probe
  source 1..120: mol_type = other DNA
gaactagaaaaggacttggtccttccagtattcttttcttttacacagatgagtcaggtaagccagaatccacatttcttcaaacaatttcactgttgcagcgcctgctctctcttttta

SEQ ID NO: 16237 - DNA, 120 bp, synthetic construct
  misc_feature 1..120: note = Artificially Synthesized Probe
  source 1..120: mol_type = other DNA
ctacagtgccgttagcacctccacaaaatttgactttaatcaactgtacttcagactttgtatggctgaaatggagcccaagtcctcttccaggtggtattgttaaagtatatagtttta

SEQ ID NO: 16238 - DNA, 120 bp, synthetic construct
  misc_feature 1..120: note = Artificially Synthesized Probe
  source 1..120: mol_type = other DNA
ttttctcagagtaatcgcattcctaggataattgtgtacgtgtgttagagtgtggttgtctatatatggatcttgtctcctcagaatggtgatctgtaacataggctctcttagcatagc

SEQ ID NO: 16239 - DNA, 120 bp, synthetic construct
  misc_feature 1..120: note = Artificially Synthesized Probe
  source 1..120: mol_type = other DNA
tatgtgtgcatttgtggaggtagaataatgcttgaaccacttcaaatgttactgctatcccagtcaatccactgtggtccacagataataaaatcaataggtgacttaggtcactcacac

SEQ ID NO: 16240 - DNA, 120 bp, synthetic construct
  misc_feature 1..120: note = Artificially Synthesized Probe
  source 1..120: mol_type = other DNA
tctgtcaagaaaaaaaaaaagtctaaaaaaggcaattatgaggttcttcagggaaaagaaggtgcccaattcatccttgtatcataaactgagcacactctatggcacaaaataaatgct

SEQ ID NO: 16241 - DNA, 120 bp, synthetic construct
  misc_feature 1..120: note = Artificially Synthesized Probe
  source 1..120: mol_type = other DNA
ttttaagaagattagttgtgacatttggagagcatgagtcattgcataagccccctatgttcccatcatcccatctttaccatgtggcggacactgaaatatcattggtctaattcatca

SEQ ID NO: 16242 - DNA, 120 bp, synthetic construct
  misc_feature 1..120: note = Artificially Synthesized Probe
  source 1..120: mol_type = other DNA
aagaagccatgattgagctagattagatgaaaaggaccttgaaaaaattagtgaagaacctaactagaacattggccttctgacttctagtgaagagtggacatgactgcaggaaatgca

SEQ ID NO: 16243 - DNA, 120 bp, synthetic construct
  misc_feature 1..120: note = Artificially Synthesized Probe
  source 1..120: mol_type = other DNA
ttgtcacaacagggaggcacctgcatctatgttttgcataaaaatgttccataataaagtattgctaagatttttcctttccaattaagagagcagttatcaaacactgcctgggcctgg

SEQ ID NO: 16244 - DNA, 120 bp, synthetic construct
  misc_feature 1..120: note = Artificially Synthesized Probe
  source 1..120: mol_type = other DNA
gagtaccagctgtgtactacattgacccttctccaaaacattgggagattgaagggaggaaaaaaagagagatgatcctctttactgtatttccacaaatataaaacccccacctaatga

SEQ ID NO: 16245 - DNA, 120 bp, synthetic construct
  misc_feature 1..120: note = Artificially Synthesized Probe
  source 1..120: mol_type = other DNA
gcctgttcttgacaatccattggaccccaagcctcatagttttatacaattccttactccatctcttctacatacaatcaggtcttatcaattcaatttccatcagggctctgcaatttg

SEQ ID NO: 16246 - DNA, 120 bp, synthetic construct
  misc_feature 1..120: note = Artificially Synthesized Probe
  source 1..120: mol_type = other DNA
aaagcctttaatggcatttctggacttcatcccagacttgctgactcatagcctcaatgagtgaagcttaagaatccatgcacttaagaatctctctaggtaattccgatattctgtatg

SEQ ID NO: 16247 - DNA, 120 bp, synthetic construct
  misc_feature 1..120: note = Artificially Synthesized Probe
  source 1..120: mol_type = other DNA
gaatttgggaaccactcatttccaccgcaaactctttgcttgtaggaaccatgtcttatttgtctttatttactcacagttctaacagaaagccttggacattgtaggcattcaaatggt

SEQ ID NO: 16248 - DNA, 120 bp, synthetic construct
  misc_feature 1..120: note = Artificially Synthesized Probe
  source 1..120: mol_type = other DNA
agctggttcccttgtcacagtcagatatgttggaacagggcagtaaagatgaaggcccccaagcttggttctacatttttaacagcaattttatgcccaaatatatcatataaaccaata

SEQ ID NO: 16249 - DNA, 120 bp, synthetic construct
  misc_feature 1..120: note = Artificially Synthesized Probe
  source 1..120: mol_type = other DNA
caggttcaagcaattctcgtgcctcaggactcccaagtagctgagatcataggtgtgcaccaccacacctggctaatttttgtatttttagtagagacagggtttcaccatgtgggccag

SEQ ID NO: 16250 - DNA, 120 bp, synthetic construct
  misc_feature 1..120: note = Artificially Synthesized Probe
  source 1..120: mol_type = other DNA
ctatgttcaggttctaggtgtggggttcaagacccaagtttgagtgccaggtggcattggggatctttgccctgcacatccaaataactccattattataataaaaacatatttaatatg

SEQ ID NO: 16251 - DNA, 120 bp, synthetic construct
  misc_feature 1..120: note = Artificially Synthesized Probe
  source 1..120: mol_type = other DNA
ttagaaggagtgtaagcaggaaggttgaataactgaagtggacccctacttactctgctcttagtttgatgtgactgtcccagaagtttgaatctgttataatagaaaatcaggaacttg

SEQ ID NO: 16252 - DNA, 120 bp, synthetic construct
  misc_feature 1..120: note = Artificially Synthesized Probe
  source 1..120: mol_type = other DNA
tctctcaagtagtgacatcttgcaaaactgtacacaaatagtatatcagatggaaaacctttccatcagaataatccctcaagttgcctttgcatagacagacccaattcctgcccacca

SEQ ID NO: 16253 - DNA, 120 bp, synthetic construct
  misc_feature 1..120: note = Artificially Synthesized Probe
  source 1..120: mol_type = other DNA
cacaccaacaatgtatgagccatccaggttcacacataggtgtataatgatgtatcattctggttttgtgtttccctgatggctaacgttcaatagctaattgaatatattttttatgta

SEQ ID NO: 16254 - DNA, 120 bp, synthetic construct
  misc_feature 1..120: note = Artificially Synthesized Probe
  source 1..120: mol_type = other DNA
ttgggcagggcattgccaaaacaagattcaagcagccacatgtggacacctcttaaaagaatttggggaaacgagaccaaagaagtcaggtttgatttttagtgacaataacaaacatga

SEQ ID NO: 16255 - DNA, 120 bp, synthetic construct
  misc_feature 1..120: note = Artificially Synthesized Probe
  source 1..120: mol_type = other DNA
gctggttggccctctgccacttgactgtatgatctgatcacatgtaagtttcacaaacgattcatatttctctgctagtttgacgttgagaatttgctcataaacctccctaattttatc

SEQ ID NO: 16256 - DNA, 120 bp, synthetic construct
  misc_feature 1..120: note = Artificially Synthesized Probe
  source 1..120: mol_type = other DNA
caaacgccaagccattttcccatactctttgagtttgaggaactttttggagattgcttgagattctctgcgtagaaaatcatgccatttgtaaaaagggtcagttttgcttcttccttt

SEQ ID NO: 16257 - DNA, 120 bp, synthetic construct
  misc_feature 1..120: note = Artificially Synthesized Probe
  source 1..120: mol_type = other DNA
tttgtagcactaagtgaatatatttaaaaagagaaaatagaccaataatctaaattccctccacaaaagaaagcctagagatagaaaaggcagagaatccaaaccatgcagaaggcaggg

SEQ ID NO: 16258 - DNA, 120 bp, synthetic construct
  misc_feature 1..120: note = Artificially Synthesized Probe
  source 1..120: mol_type = other DNA
gtctctgacatcactgtatgatggttcggtgccttattactgctaagagagagaagaagactaggctctgtattcaacatttgtcagtatgggaaagaatgagatcatagtttctttctg

SEQ ID NO: 16259 - DNA, 120 bp, synthetic construct
  misc_feature 1..120: note = Artificially Synthesized Probe
  source 1..120: mol_type = other DNA
attccttttataaaaagtgaatttgggttactctgcataattctccttgaccccactgatgctttaatatctctcattaagtggactccaggcagccactctttgctttatccaagctcc

SEQ ID NO: 16260 - DNA, 120 bp, synthetic construct
  misc_feature 1..120: note = Artificially Synthesized Probe
  source 1..120: mol_type = other DNA
tactactaacctcagcttactgaatttcaaatattacaagtttcatggcatatgaaaatacaagtttgaggagggagctattttataaatgtaagacacgcataagttgcagccactatg

SEQ ID NO: 16261 - DNA, 120 bp, synthetic construct
  misc_feature 1..120: note = Artificially Synthesized Probe
  source 1..120: mol_type = other DNA
agttgtgtgtgcaccttaaaagctaaataggatgccatactcagaagcactattaggaactttgactgcagattaaacaggtaccaaacaatagttgaaagtagttggtgacatacttgg

SEQ ID NO: 16262 - DNA, 120 bp, synthetic construct
  misc_feature 1..120: note = Artificially Synthesized Probe
  source 1..120: mol_type = other DNA
ttttctaaagtagttgcactgtatgaaatacatacccaacagcaccgaatgagagttctaattacatttcattctcagcagaatttggtgttataatattagccctgcgaggtgacataa

SEQ ID NO: 16263 - DNA, 120 bp, synthetic construct
  misc_feature 1..120: note = Artificially Synthesized Probe
  source 1..120: mol_type = other DNA
taccatctttgttagccaatatgtgtcacacgagttcattgctgtgagacaaggaggcaacataactacacaattttctccctgtgcataaactgaagaacaaatgcacaatgaccaatc

SEQ ID NO: 16264 - DNA, 120 bp, synthetic construct
  misc_feature 1..120: note = Artificially Synthesized Probe
  source 1..120: mol_type = other DNA
tgtatatgtgccacattttctttatccagtctatcattgatgtgcatttgggttggttccaagtctttgctattgtgaatagtgctgcactaaacatacatgtgcatgtgtctttatagt

SEQ ID NO: 16265 - DNA, 120 bp, synthetic construct
  misc_feature 1..120: note = Artificially Synthesized Probe
  source 1..120: mol_type = other DNA
atatatctgtttggtaccagtaccatgctgttttggttactgtagccttgtaatatagtttgaagccaggtaccatgatgcctccagctttgttctttttgctaaggattgtctttgcta

SEQ ID NO: 16266 - DNA, 120 bp, synthetic construct
  misc_feature 1..120: note = Artificially Synthesized Probe
  source 1..120: mol_type = other DNA
gatcttattaatttttacaaaaatgcccatggcattttcattgggattgcatcagatctatatacatgcatgtatacatctatacatggggagaattgacatctcagcaatgagttacta

SEQ ID NO: 16267 - DNA, 120 bp, synthetic construct
  misc_feature 1..120: note = Artificially Synthesized Probe
  source 1..120: mol_type = other DNA
catctgaacctggagttttctattgtggcagattttgtattactttgacttctttaataaatatagaactactcatactttctttttaaaaaattttactttagggccgggcgcggtggc

SEQ ID NO: 16268 - DNA, 120 bp, synthetic construct
  misc_feature 1..120: note = Artificially Synthesized Probe
  source 1..120: mol_type = other DNA
tttctattcttacttgtgaattatttgtattgtatttaaactgtggctggtggacaacaaagtacgtctcttgtgaacaacctataatcaggtctttaatcttgtctgacaacctctgac

SEQ ID NO: 16269 - DNA, 120 bp, synthetic construct
  misc_feature 1..120: note = Artificially Synthesized Probe
  source 1..120: mol_type = other DNA
aggatttaaggggagtttagtcccaaactttggatctaactcctctgtttccaactactttagcagcctcatactttattctctgacacctcaagccaatagctgcgttttttttccttt

SEQ ID NO: 16270 - DNA, 120 bp, synthetic construct
  misc_feature 1..120: note = Artificially Synthesized Probe
  source 1..120: mol_type = other DNA
cacaccatcctttgagcctttgttctcattgtttctccttccatctcttccttctctctcgctttctcatatgggctcctgaacaatcccaattctttctttattctttcttatggatat

SEQ ID NO: 16271 - DNA, 120 bp, synthetic construct
  misc_feature 1..120: note = Artificially Synthesized Probe
  source 1..120: mol_type = other DNA
cttgggtaaatctccacaagccagtatgtctttctaatttcttcgtcactctcaatggttcaatttagtctccaggtgttataggagtggtctcaatagataattaagttggctttctaa

SEQ ID NO: 16272 - DNA, 120 bp, synthetic construct
  misc_feature 1..120: note = Artificially Synthesized Probe
  source 1..120: mol_type = other DNA
cagtccatattctcagctttgtagtagcactcaaaatcctgtttgtgtttcataacttgataaatactccaaaatttctctggattaagccaggctaccagagagagttgcacatgaacg

SEQ ID NO: 16273 - DNA, 120 bp, synthetic construct
  misc_feature 1..120: note = Artificially Synthesized Probe
  source 1..120: mol_type = other DNA
gtctgttgtttctctgtcacctactgtagtcacctaaactgctttcaaactttcactgcctttcaataacaccaaacctgataatcccccacacttttttcttatgactgccttacacta

SEQ ID NO: 16274 - DNA, 120 bp, synthetic construct
  misc_feature 1..120: note = Artificially Synthesized Probe
  source 1..120: mol_type = other DNA
aatttaaacttggtcatccaacttagtgtacttatccaggtcaatgagaagtcaatacaaaactaccttcacaatcctatcaggagagtttggcaatttctaataactgatattcagaag

SEQ ID NO: 16275 - DNA, 120 bp, synthetic construct
  misc_feature 1..120: note = Artificially Synthesized Probe
  source 1..120: mol_type = other DNA
actgtgtagcaaaatttgctagtaacaaacaccagctatcctaaaatctgaacattggaggaaaaaatagttgatcatagaggcatgggcatctagtcatccctccagatgggattagca

SEQ ID NO: 16276 - DNA, 120 bp, synthetic construct
  misc_feature 1..120: note = Artificially Synthesized Probe
  source 1..120: mol_type = other DNA
attttttccctctgaaacttttattgcatactctgttggcttggggaacaggcattctcatgcatgttgacaggagtaggtattggtaaaacctttctggagtgtgatttagcaatgtct

SEQ ID NO: 16277 - DNA, 120 bp, synthetic construct
  misc_feature 1..120: note = Artificially Synthesized Probe
  source 1..120: mol_type = other DNA
atatcactgtgcttcagataaagctaaaagtcatatatttggtttaaggactcagtttaatgtgattccacttacattgcctacttcgccccttcccattcatctccttgtagacccagc

SEQ ID NO: 16278 - DNA, 120 bp, synthetic construct
  misc_feature 1..120: note = Artificially Synthesized Probe
  source 1..120: mol_type = other DNA
ctcagctcccaaagatgttctgtgttccttatcatgcagctccctccttcttgagagccaacaatagagaaatttttgtacgttgaatccatctctttaaagctttgacttccttttctg

SEQ ID NO: 16279 - DNA, 120 bp, synthetic construct
  misc_feature 1..120: note = Artificially Synthesized Probe
  source 1..120: mol_type = other DNA
ctcaagcttctatctagtatttgatttctccttctgggtgtctgagaggaatttcaaagttaacctactcaaaagaaattgttaatcttcctccccaaagcttacccctcttacggtcac

SEQ ID NO: 16280 - DNA, 120 bp, synthetic construct
  misc_feature 1..120: note = Artificially Synthesized Probe
  source 1..120: mol_type = other DNA
actggtagcttgtaccagtcactcagtccttcttgttattctccaaatataccaggcatgcctccaactatacagtttcctctgcttcaaatttctctttctgaaatattgacatggcta

SEQ ID NO: 16281 - DNA, 120 bp, synthetic construct
  misc_feature 1..120: note = Artificially Synthesized Probe
  source 1..120: mol_type = other DNA
acgtcttctgattttgttctccgtggaaggtctgggagccagtaccctgtggatacaaaaggtgactatgtacaatacttattgatacttttattgtttacagctcccctgaatgtaaat

SEQ ID NO: 16282 - DNA, 120 bp, synthetic construct
  misc_feature 1..120: note = Artificially Synthesized Probe
  source 1..120: mol_type = other DNA
gttcagtcaactagtgcaacattgacatggataagacctgacactatccttggctactttcaaaattacaaaattaccactcaacttcgtgctcaaaaatgcaaagaatgggaatccgaa

SEQ ID NO: 16283 - DNA, 120 bp, synthetic construct
  misc_feature 1..120: note = Artificially Synthesized Probe
  source 1..120: mol_type = other DNA
ttacaaccttttcagtgacttcaaacttacacacacacacgtgtgaccacaataaccctgattgatctgtctgcaagtcgtttttcagcttgtgtttttcaactgcacaaaattctgagg

SEQ ID NO: 16284 - DNA, 120 bp, synthetic construct
  misc_feature 1..120: note = Artificially Synthesized Probe
  source 1..120: mol_type = other DNA
ttaactgtaagcattggagagatgagagagctgtacttggcccttttctcttctttatcagcacacaaccccaaggagattttaccttaattgctcttattctggtctatagctttgaag

SEQ ID NO: 16285 - DNA, 120 bp, synthetic construct
  misc_feature 1..120: note = Artificially Synthesized Probe
  source 1..120: mol_type = other DNA
ccctgtttcttttgactagaatgttcttccacctccttcttcacatgagcagcttcttataacgtagatctttacttaaatgatccctgatcagaatgaatttccctgaccactcaatct

SEQ ID NO: 16286 - DNA, 120 bp, synthetic construct
  misc_feature 1..120: note = Artificially Synthesized Probe
  source 1..120: mol_type = other DNA
tattctgagtatctcacttggggagtacctgcttctaattgccacactgagccaggaagtgaactttttaaatgcacagtctcttgcaagcacacttgacactattatacaagatgttta

SEQ ID NO: 16287 - DNA, 120 bp, synthetic construct
  misc_feature 1..120: note = Artificially Synthesized Probe
  source 1..120: mol_type = other DNA
tctcagagaactgcattttatcctaatgacataaagttgtactcaagcacttactaatataacatcttgtcaaaacctggatcttctctataaagagttattgattaatgggtagtttga

SEQ ID NO: 16288 - DNA, 120 bp, synthetic construct
  misc_feature 1..120: note = Artificially Synthesized Probe
  source 1..120: mol_type = other DNA
aaatgtacaactttaaaggagtgtgggtgtgaaattagtatgaaatggaatgggactctcataatgtgcgtctcctatagaccaccaagactggaagacagcaagaaaggaaaattcctg

SEQ ID NO: 16289 - DNA, 120 bp, synthetic construct
  misc_feature 1..120: note = Artificially Synthesized Probe
  source 1..120: mol_type = other DNA
ctaaatggtctttctgctctcattttctaccattcacctgaactcagcatttcaatacacctgcctgaccatgaatttcctctgctgaaaatctttgatcattttctacatgcctgcatg

SEQ ID NO: 16290 - DNA, 120 bp, synthetic construct
  misc_feature 1..120: note = Artificially Synthesized Probe
  source 1..120: mol_type = other DNA
atgtatagtgagacagagttataatagattgatggtccatgaaagaacaaaggggaagaacaatgtttaaatttagagtgctaagtgtgattacaaagaggagatatatgggtgaaatca

SEQ ID NO: 16291 - DNA, 120 bp, synthetic construct
  misc_feature 1..120: note = Artificially Synthesized Probe
  source 1..120: mol_type = other DNA
tcattcataagtctttatttctagcacagagtctacactcttagatcttgactaggacttgagcaaagcctcagggtggtagaaaagtaccaagagatggagaggtactaactgatatga

SEQ ID NO: 16292 - DNA, 120 bp, synthetic construct
  misc_feature 1..120: note = Artificially Synthesized Probe
  source 1..120: mol_type = other DNA
tggcttccccagtgatgttgatgctgctggcctggagacacattttgaggaccactgttgtagaaagttgttttataaacatgatgctattctcagaaaatatgtattctctgattccaa

SEQ ID NO: 16293 - DNA, 120 bp, synthetic construct
  misc_feature 1..120: note = Artificially Synthesized Probe
  source 1..120: mol_type = other DNA
ttgttgattcttaaacaaagtggcatggatgggggcattcaaatttttatatggactaggcaaaatgatggtctatccagactcacctttgagctaacacactcagcatcaagacacaga

SEQ ID NO: 16294 - DNA, 120 bp, synthetic construct
  misc_feature 1..120: note = Artificially Synthesized Probe
  source 1..120: mol_type = other DNA
gccaccatcagctccatttatttttgtagctgacattcataaatgtaattctgtagccacccttatgtgacactagtaatagtttactatatgctgtgataaaagggaaaatgctggata

SEQ ID NO: 16295 - DNA, 120 bp, synthetic construct
  misc_feature 1..120: note = Artificially Synthesized Probe
  source 1..120: mol_type = other DNA
agataccaaggatcacagtctatcacagccccttctacttcatggcgtttgtctttttgttcacaatagccatcctaacaaaagaagacattaacgctggtcttaacggccttacatttt

SEQ ID NO: 16296 - DNA, 120 bp, synthetic construct
  misc_feature 1..120: note = Artificially Synthesized Probe
  source 1..120: mol_type = other DNA
ctgtttatgcagggtatgtgtatgattccttgataccttagttgttgcagaaactgtgtacccaattctgtcttcatcattagcatctcttagctcatcaaatcgaatcctggagcattc

SEQ ID NO: 16297 - DNA, 120 bp, synthetic construct
  misc_feature 1..120: note = Artificially Synthesized Probe
  source 1..120: mol_type = other DNA
aagacagaaactttctccattctgatcctatttgcctcattccaagctcatctttccatttgccagataggcctctcagacttctggaggttctcaaactcaatgaatatgaatccaaat

SEQ ID NO: 16298 - DNA, 120 bp, synthetic construct
  misc_feature 1..120: note = Artificially Synthesized Probe
  source 1..120: mol_type = other DNA
atccttctcatctatcaaagactagtgcaattcccaccttcactgtgcatctttaccttgcaaccctgccccatctgtatcatcactttgctctctcattgtagattatatgttatttat

SEQ ID NO: 16299 - DNA, 120 bp, synthetic construct
  misc_feature 1..120: note = Artificially Synthesized Probe
  source 1..120: mol_type = other DNA
taattaattttctattgtcatagctccagatggtcctcctgaaaatgttcatgtagtagcaacatcaccttttagcatcagcataagctggagtgaacctgctgtcattactggaccaac

SEQ ID NO: 16300 - DNA, 120 bp, synthetic construct
  misc_feature 1..120: note = Artificially Synthesized Probe
  source 1..120: mol_type = other DNA
aaaaaataagttctaagagatgaggctagatccagaggctgactatacaacaagttacagagttagggttttatgttaagggcagtggggtgccagttggtgatacagatttctactgta

SEQ ID NO: 16301 - DNA, 120 bp, synthetic construct
  misc_feature 1..120: note = Artificially Synthesized Probe
  source 1..120: mol_type = other DNA
agtatttcctttgcaccctgcttgggttttgctgggcctgatgaacacagttttctaatagcatcttatgcattaaattgtatagcatagtgatttctcctcctttctctctgtctcttg

SEQ ID NO: 16302 - DNA, 120 bp, synthetic construct
  misc_feature 1..120: note = Artificially Synthesized Probe
  source 1..120: mol_type = other DNA
tgttccttttactctttgactgaacaaattgttatgagtagcttctgtgcatcaagacaaggatgaaaaacataaagctctgctgtcaggtagctcacaccctagtggtacacactggaa

SEQ ID NO: 16303 - DNA, 120 bp, synthetic construct
  misc_feature 1..120: note = Artificially Synthesized Probe
  source 1..120: mol_type = other DNA
ggctccaatgaatgggacccaggcccctttacagaggtcaatagttacccatctctgcacctctcaataatattttttcagcatgaaattaagcctagtcttaaggaaaattacaaaaag

SEQ ID NO: 16304 - DNA, 120 bp, synthetic construct
  misc_feature 1..120: note = Artificially Synthesized Probe
  source 1..120: mol_type = other DNA
gttattagcccaattttacatgcattgaaagactagactgtgtaggtggtttctcaaatactacaggagctataagtggccaatttgggatttgaggcctgtgtgattaggtaccaaaac

SEQ ID NO: 16305 - DNA, 120 bp, synthetic construct
  misc_feature 1..120: note = Artificially Synthesized Probe
  source 1..120: mol_type = other DNA
tctgtagtgatcactgcatttactgggaacattagtgctgcatatgtagaagggaagtcaagtgctgaaatgattgttactactttagaatcaggtaaggagaatttctcaaccttgcta

SEQ ID NO: 16306 - DNA, 120 bp, synthetic construct
  misc_feature 1..120: note = Artificially Synthesized Probe
  source 1..120: mol_type = other DNA
catcctaaaattccatttgttcctattcgtctgccaagtatcacaggtatctattttctgattatgctttttacttctcaatccctcctacctgtgaggaaagatatgatgaatgtactc

SEQ ID NO: 16307 - DNA, 120 bp, synthetic construct
  misc_feature 1..120: note = Artificially Synthesized Probe
  source 1..120: mol_type = other DNA
cagccacttataaaactaaacatgaaattactgtgtgacccagtagtcacactcttgggcactgatcacagagaattgaaaaattatgctcacacaaacatctgtcaccaagattgattg

SEQ ID NO: 16308 - DNA, 120 bp, synthetic construct
  misc_feature 1..120: note = Artificially Synthesized Probe
  source 1..120: mol_type = other DNA
tctggtttaccgagaagatgatcctactgctgtccagattcacaacctcagtattatacagaaaaccaacacattcgtcattgcaatgctagaaggactaaaaggtggacatacatacaa

SEQ ID NO: 16309 - DNA, 120 bp, synthetic construct
  misc_feature 1..120: note = Artificially Synthesized Probe
  source 1..120: mol_type = other DNA
gaagacggtgactaagagaataaagtaacctgggttcaaatactggcgtctgtgccagggcagctttatcaaatctgagcccagttttcttatgtgaaaaattggtaataggaataataa

SEQ ID NO: 16310 - DNA, 120 bp, synthetic construct
  misc_feature 1..120: note = Artificially Synthesized Probe
  source 1..120: mol_type = other DNA
ctgaaggaataggatttcatcttagagagggaaaaaaagaggatcttgaatatggatttacagaaggccagagttacctagctacagagagaaggaacagatgttagagtagatgaaggg

SEQ ID NO: 16311 - DNA, 120 bp, synthetic construct
  misc_feature 1..120: note = Artificially Synthesized Probe
  source 1..120: mol_type = other DNA
caaaccatgaaacccaaaaaagatgattaagaggaatttagggccattcgaatgatcacggtgccctctcttcttgagagtgaaaaccagcaggtaataattatgccatctctctaaaaa

SEQ ID NO: 16312 - DNA, 120 bp, synthetic construct
  misc_feature 1..120: note = Artificially Synthesized Probe
  source 1..120: mol_type = other DNA
gtgtacagatagcaatacatgcatcacttttatgctttagtaaaacttcccatttcagatgctattcccatccccatgccaggttggttaatcttgacttttactccttacctaaggcag

SEQ ID NO: 16313 - DNA, 120 bp, synthetic construct
  misc_feature 1..120: note = Artificially Synthesized Probe
  source 1..120: mol_type = other DNA
tggaggaaaagtgaattcccatcaccagatgaacggttgaataaatatgatgcagctgcaccatgatatataatatagtcattaagaagaatgagttagctctgtacctggtcacttgga

SEQ ID NO: 16314 - DNA, 120 bp, synthetic construct
  misc_feature 1..120: note = Artificially Synthesized Probe
  source 1..120: mol_type = other DNA
tttggaggggtgaacaagtgagttactcttgattgagggatgctctttctctacctgataaatcatcctttataacagttcctgtagattcacatgtaacagagaagaacagggttacct

SEQ ID NO: 16315 - DNA, 120 bp, synthetic construct
  misc_feature 1..120: note = Artificially Synthesized Probe
  source 1..120: mol_type = other DNA
catccatccatctgcctgtcctttcatctttccaataagcactggatgtccgccacgtatagtgacctgatttttctggcactaggaatagaaagataaactgaaaattattcttacatt

SEQ ID NO: 16316 - DNA, 120 bp, synthetic construct
  misc_feature 1..120: note = Artificially Synthesized Probe
  source 1..120: mol_type = other DNA
atctaaacaaatccttgaaggaggtgagctgattcagttgttcaaactgctaactgctcacgagtttaccaaatttttagcccctgcctcatcaaattcaatgggtcaaagtacgagata

SEQ ID NO: 16317 - DNA, 120 bp, synthetic construct
  misc_feature 1..120: note = Artificially Synthesized Probe
  source 1..120: mol_type = other DNA
ccaacacccagattctttcagtatttaagtggctaggccaggattccaacattacagaacaggatttcataacattacattacaaatatgggatttagacctgggttcaaatcttggctc

SEQ ID NO: 16318 - DNA, 120 bp, synthetic construct
  misc_feature 1..120: note = Artificially Synthesized Probe
  source 1..120: mol_type = other DNA
tcaacttactggtttcatacagattattcatgggaaggcaacatgttccgtcagttatctgagaggcaaagttgagacattcagggtaatggaaatgagaaagaaaagctataaaagggg

SEQ ID NO: 16319 - DNA, 120 bp, synthetic construct
  misc_feature 1..120: note = Artificially Synthesized Probe
  source 1..120: mol_type = other DNA
atcaattactgttgtcatatttgctttctaccagactattgagtgtcgtggttctatggagattagagtcactttcataggtcaagaaacaaacaacatcccctagaagtggtcctggtc

SEQ ID NO: 16320 - DNA, 120 bp, synthetic construct
  misc_feature 1..120: note = Artificially Synthesized Probe
  source 1..120: mol_type = other DNA
aaatgtttaagtttagtgaaagggactaatgaaagtacaagtgagagatggccaggtagaacttcactggatggataagtatgagtctgtggaagagcagtttgcatttagggaaacctt

SEQ ID NO: 16321 - DNA, 120 bp, synthetic construct
  misc_feature 1..120: note = Artificially Synthesized Probe
  source 1..120: mol_type = other DNA
ctaagtccccaagtagcccccagttcattactatgggtgatgtttctgctcccacaacctatctttgctgtaccattttctcttcttgatagttttaattatttctagcagctctctttt

SEQ ID NO: 16322 - DNA, 120 bp, synthetic construct
  misc_feature 1..120: note = Artificially Synthesized Probe
  source 1..120: mol_type = other DNA
aaggatttggagaagtgacatcattctctactgttaatgctctgtgggtccatgcataacagtgaatcagaaagtgtacttgataatcagggaacattttgtcctctcttagtgacactt

SEQ ID NO: 16323 - DNA, 120 bp, synthetic construct
  misc_feature 1..120: note = Artificially Synthesized Probe
  source 1..120: mol_type = other DNA
actctgtgcccagtacatctctcagaccgtggaatagttttgtataaaacaaaaacccctgtactcaagggggcttacattctggaggaaaggacagagaataaatagtaagaataataa

SEQ ID NO: 16324 - DNA, 120 bp, synthetic construct
  misc_feature 1..120: note = Artificially Synthesized Probe
  source 1..120: mol_type = other DNA
atgttttaaaacgattgtccttgcttgtatgttgaaaataggtggaacaaggacaaaggtggatacaggcagacttgctaagtttttaattcatgcaagacaggatggtggcctagatca

SEQ ID NO: 16325 - DNA, 120 bp, synthetic construct
  misc_feature 1..120: note = Artificially Synthesized Probe
  source 1..120: mol_type = other DNA
accttccatcaggaagtgtagaatatctgattgttacacgtgatgctaaaattgatcagtaggcttggtggcagcaacagcatgatccttcattggaaagttggttttgaccacttataa

SEQ ID NO: 16326 - DNA, 120 bp, synthetic construct
  misc_feature 1..120: note = Artificially Synthesized Probe
  source 1..120: mol_type = other DNA
tggccttagcaactacagtaatggagtgtccatcaactgagaggtgggaggatacagttgaaaggagggaagtgtacatgttcagttttggacatatcaatttaacattttaagtatact

SEQ ID NO: 16327 - DNA, 120 bp, synthetic construct
  misc_feature 1..120: note = Artificially Synthesized Probe
  source 1..120: mol_type = other DNA
ttaacttgaaggagagaggacagtaaacaactaagaactgaaagaagttgtctcccaagacttacatggaatcgctacttctagcacatgcaacctatcaccaaacagtgagcaaagaaa

SEQ ID NO: 16328 - DNA, 120 bp, synthetic construct
  misc_feature 1..120: note = Artificially Synthesized Probe
  source 1..120: mol_type = other DNA
ctataccacataactatttgcagatttagccagaagacagtgagagagttatcattcgaggcactttgaatgctataatgtgtaaaatatgggcctttccctaaggagtatggactggcc

SEQ ID NO: 16329 - DNA, 120 bp, synthetic construct
  misc_feature 1..120: note = Artificially Synthesized Probe
  source 1..120: mol_type = other DNA
gaaaactaaacctaattttatatactttgtgtgaaactcccttcttggactttactccgcttgttttagaattcgacagaagcagaaagaaggtggcacatactctcctcaggatgcaga

SEQ ID NO: 16330 - DNA, 120 bp, synthetic construct
  misc_feature 1..120: note = Artificially Synthesized Probe
  source 1..120: mol_type = other DNA
gttgtcacttgttaaagttggtctttatctaatagatggactttgcaagtatatttccagcatatctaaaaatacctaatatgtgctatagagggaagtgtcatctgataagcaaagtcc

SEQ ID NO: 16331 - DNA, 120 bp, synthetic construct
  misc_feature 1..120: note = Artificially Synthesized Probe
  source 1..120: mol_type = other DNA
accgaccccctccccaacactggtaggcattttcattttgttaaaagaatacttagtagcccgtgaaaaatcctgaataagtatatcttcagcaaatgtaataacgtgaaaaagcactct

SEQ ID NO: 16332 - DNA, 120 bp, synthetic construct
  misc_feature 1..120: note = Artificially Synthesized Probe
  source 1..120: mol_type = other DNA
gttttgaggtgtttgaagatctaaatccgttcaaagtcaatcagagactgatggtagattctaggagtgagaatcaagaagtctgatttagctccctaaattgttggcagacttccacca

SEQ ID NO: 16333 - DNA, 120 bp, synthetic construct
  misc_feature 1..120: note = Artificially Synthesized Probe
  source 1..120: mol_type = other DNA
tttgggctcatctgtttcacacttaccgaattaggaaatgatccttgggttttgttatctaataaacatacagaacaacattttgtgatggctcctgcaaaacaccaccacttagcccac

SEQ ID NO: 16334 - DNA, 120 bp, synthetic construct
  misc_feature 1..120: note = Artificially Synthesized Probe
  source 1..120: mol_type = other DNA
attaaaaaatgatgataggacaggtttatgtaaatgtctaaggtcatacagctaataagcaggagagctacaagctagcccaggtctttctctgaggtatgaagatacacgtgtgtgtgt

SEQ ID NO: 16335 - DNA, 120 bp, synthetic construct
  misc_feature 1..120: note = Artificially Synthesized Probe
  source 1..120: mol_type = other DNA
catgtcctgagaatttgctgtgttctcatgttgtgttagatttgatagcaaattaagtttgcacctagattcctgtacaggcttctcattctgttatcaacatgacgcaagagttgagct

SEQ ID NO: 16336 - DNA, 120 bp, synthetic construct
  misc_feature 1..120: note = Artificially Synthesized Probe
  source 1..120: mol_type = other DNA
attgatcacattacacataaaatatcaattttcaaccagcactcaaagttaacctctgggccattccagactcagaggcggtttggttgagcaactctgctgaatgtctttcttcatcat

SEQ ID NO: 16337 - DNA, 120 bp, synthetic construct
  misc_feature 1..120: note = Artificially Synthesized Probe
  source 1..120: mol_type = other DNA
ggggatcatacctctgagctttttgacatcagcaagaatattgcattcacttctcatctaaaaggccatttcatcttgtttaaataaaaataaataacaattgagggccgggcgcggtgg

SEQ ID NO: 16338 - DNA, 120 bp, synthetic construct
  misc_feature 1..120: note = Artificially Synthesized Probe
  source 1..120: mol_type = other DNA
acttaacatcactggttaagtagaagaaaagtttctcagtttgtcccataccactggtaatgctggttgaagctgctcagctataggttatcatctgtggctctctattaggactatatt

SEQ ID NO: 16339 - DNA, 120 bp, synthetic construct
  misc_feature 1..120: note = Artificially Synthesized Probe
  source 1..120: mol_type = other DNA
gtatctccttggatcacttcattcgaaactagcactcctgaaatagcattgttgattttcatgcacatcaatttctgtgagtttctagtgcttatttaagcaaacagtttttcctattag

SEQ ID NO: 16340 - DNA, 120 bp, synthetic construct
  misc_feature 1..120: note = Artificially Synthesized Probe
  source 1..120: mol_type = other DNA
tagtaagccaagtgttaatcctgccccagccctgaagtatatatgagcccaaacacttgtatccttaatgcagggacttaaatagccataatacaacatagaagatgatttgtccttgga

SEQ ID NO: 16341 - DNA, 120 bp, synthetic construct
  misc_feature 1..120: note = Artificially Synthesized Probe
  source 1..120: mol_type = other DNA
tagtaggaaactatctccttgcatgcgaatgttgagtgcccaggcgatgtgggttaggcaccaatgacatctgcacaaacttttaaaaatctgaatttcacagcacttaataaatttacg

SEQ ID NO: 16342 - DNA, 120 bp, synthetic construct
  misc_feature 1..120: note = Artificially Synthesized Probe
  source 1..120: mol_type = other DNA
ttcccttccccaaatcaaagattcttctcatttggtagccctttcagccatctccatatccatctagaataaggaattctttcttgctttctttaaatcactctagggtattgtggggca

SEQ ID NO: 16343 - DNA, 120 bp, synthetic construct
  misc_feature 1..120: note = Artificially Synthesized Probe
  source 1..120: mol_type = other DNA
ggcatagcacattttacattattgatttattataattttctgactttaatctacacttctttcagaattagctgtccactctgactcacaatgcatttaacacaatctctattgcaggtt

SEQ ID NO: 16344 - DNA, 120 bp, synthetic construct
  misc_feature 1..120: note = Artificially Synthesized Probe
  source 1..120: mol_type = other DNA
cttcctgcaacatgttgaagagctttgcacaaacaacaacctaaagtttcaagaagaattttcggtatgttactagcagttgtcacaacattgcaagacctccagtcgtttcatgtgtca

SEQ ID NO: 16345 - DNA, 120 bp, synthetic construct
  misc_feature 1..120: note = Artificially Synthesized Probe
  source 1..120: mol_type = other DNA
tatttcctgcagccttttggttatgcttcttaagaaatattggtctggacttaacaaaatcaatagtgccataaaattcttcctagcatttagacagcaagaattctcaatttttcagga

SEQ ID NO: 16346 - DNA, 120 bp, synthetic construct
  misc_feature 1..120: note = Artificially Synthesized Probe
  source 1..120: mol_type = other DNA
tgtgcaccctgataaggataacactgcccagtgtaacattaccatctaaacaatcaacctagtgtttgagcattgcttaccaaagccagagctgcttaagtctagaaatggaaactttta

SEQ ID NO: 16347 - DNA, 120 bp, synthetic construct
  misc_feature 1..120: note = Artificially Synthesized Probe
  source 1..120: mol_type = other DNA
acatggttgccacatcttaaggcttcccaaagtgcaaagaaattatctccgaaagagcaaaacccagctgaccaactttattcaggatatttttggtgaaagcctaggtaaactcattac

SEQ ID NO: 16348 - DNA, 120 bp, synthetic construct
  misc_feature 1..120: note = Artificially Synthesized Probe
  source 1..120: mol_type = other DNA
ggggaatagctacacttcttaaaaattgaattcttctttctagaaagacgtagacctagagaaggatgtgatcatagaatgtcgaattgtaaaggacatgcataggaagaaacagaccaa

SEQ ID NO: 16349 - DNA, 120 bp, synthetic construct
  misc_feature 1..120: note = Artificially Synthesized Probe
  source 1..120: mol_type = other DNA
gtttgtcaggctggttaaatttctaagaccaggacatttttcaacgcatccttttattctttcttttagagagttaacctaggttggatgcaatgtaagtataaaagttatggacattcc

SEQ ID NO: 16350 - DNA, 120 bp, synthetic construct
  misc_feature 1..120: note = Artificially Synthesized Probe
  source 1..120: mol_type = other DNA
atcatttccttttaagagctgctaactttctgggtgaataaggttaattcataggcatttaggctatgtctggagataacaaacccaaatctctagcctgggttagaaaccaagccgtaa

SEQ ID NO: 16351 - DNA, 120 bp, synthetic construct
  misc_feature 1..120: note = Artificially Synthesized Probe
  source 1..120: mol_type = other DNA
atacaaaatctgtgttataatgacatcttgtagctgaggtaaccaaggagcagagaagcttagcaatttacccaagcccatatgtatggtaggcagatcatctagaattcagacccaatc

SEQ ID NO: 16352 - DNA, 120 bp, synthetic construct
  misc_feature 1..120: note = Artificially Synthesized Probe
  source 1..120: mol_type = other DNA
tacaaggacatattaatagtcattgtctctgggtggtagaaatatgggagaagaaataactttttaaaatttaccgccatctgtgaaattggaatgttatattatgaactcctttgtatt

SEQ ID NO: 16353 - DNA, 120 bp, synthetic construct
  misc_feature 1..120: note = Artificially Synthesized Probe
  source 1..120: mol_type = other DNA
ttgaccattcaccttgaaactctaaaaaattcctgtcagcctcttttggcattgattcatccacttcttcctaagacgggattctatctctaaacaactctgctttacagttgttgggtt

SEQ ID NO: 16354 - DNA, 120 bp, synthetic construct
  misc_feature 1..120: note = Artificially Synthesized Probe
  source 1..120: mol_type = other DNA
cagacaattttagtaggtgtagctgaaccacacagattatgtaagcaaagtaattttcgcaaacccccagtgtccccttgaaatatggtaggttgtcagcatacaactatgagcaaatga

SEQ ID NO: 16355 - DNA, 120 bp, synthetic construct
  misc_feature 1..120: note = Artificially Synthesized Probe
  source 1..120: mol_type = other DNA
tggaaaggctggaagattttgatgaaggatagactgtgaaagaggtaggaagaagtgatattgcagccccataatctgccaccaactgtacaaatgagtttagaaaggttttcaagagag

SEQ ID NO: 16356 - DNA, 120 bp, synthetic construct
  misc_feature 1..120: note = Artificially Synthesized Probe
  source 1..120: mol_type = other DNA
ggcatatacaaatatatcaccatcaatgcccaacacattttctttagcataataaagcaattgagggtgtttgcaggagtaaatataaactgcacattttacattttttttccctagagc

SEQ ID NO: 16357 - DNA, 120 bp, synthetic construct
  misc_feature 1..120: note = Artificially Synthesized Probe
  source 1..120: mol_type = other DNA
ggtagtagattctacattttcctggctgataatccagaggaaaatctctgagctaatttaaggactgcaatgaaaagtggcatccatgggtaaaggtcataatgaaagttgacctgtgga

SEQ ID NO: 16358 - DNA, 120 bp, synthetic construct
  misc_feature 1..120: note = Artificially Synthesized Probe
  source 1..120: mol_type = other DNA
ctccgggatcactgcttctctctcatcactcttctgtcataattattgatgatgtcaaaattcatataaaatattgacccatagccctgctcatcactttctggacctcttctcttgcag

SEQ ID NO: 16359 - DNA, 120 bp, synthetic construct
  misc_feature 1..120: note = Artificially Synthesized Probe
  source 1..120: mol_type = other DNA
ccctctcacttggacactacatgacctctccctttgcctctcaagaacatgggttgaggaattctcccttctgcatcatcattttttctcttttagcagctaaacaaatctattgtaatt

SEQ ID NO: 16360 - DNA, 120 bp, synthetic construct
  misc_feature 1..120: note = Artificially Synthesized Probe
  source 1..120: mol_type = other DNA
gccttcgtggcattcctacctgaatatctaatagtgatttcaaacataatatgtccaatgtgagttttttattttccctgcaaatctgttcatactaaaacctcaaaaacacaggcagta

SEQ ID NO: 16361 - DNA, 120 bp, synthetic construct
  misc_feature 1..120: note = Artificially Synthesized Probe
  source 1..120: mol_type = other DNA
ctcaccatctccattgatatcacccatgccaccaatatttcttggctgaattgttacaataaccctctaactattctccctcctttcaccttttaaactcccataggttggtctatggaa

SEQ ID NO: 16362 - DNA, 120 bp, synthetic construct
  misc_feature 1..120: note = Artificially Synthesized Probe
  source 1..120: mol_type = other DNA
aataaacgagggtaggaatttcagtgtctttggtcagtgatgaacccccagctcctaaaatagtgcctggaatgtaatagtcactcacaaatattgattcagtggagaatgtgcatattt

SEQ ID NO: 16363 - DNA, 120 bp, synthetic construct
  misc_feature 1..120: note = Artificially Synthesized Probe
  source 1..120: mol_type = other DNA
gccacagtttaagtagataagtaatttcttagaggaagagtgtacatatatctgcacaaccaataaatacatggcagaaacatcatggagtgggtttagagagctggttctgggctcaac

SEQ ID NO: 16364 - DNA, 120 bp, synthetic construct
  misc_feature 1..120: note = Artificially Synthesized Probe
  source 1..120: mol_type = other DNA
gccatcagtattggccagaggacaacaagccagttactgtctttggagatatagtgattacaaagctaatggaggatgttcaaatagattggactatcagggatctgaaaattgaaaggg

SEQ ID NO: 16365 - DNA, 120 bp, synthetic construct
  misc_feature 1..120: note = Artificially Synthesized Probe
  source 1..120: mol_type = other DNA
ggttcgagcaagcagggcacatgacaccacacctatgattgttcactgcaggtgagaaagtgatcagaaatggcctttgaacccattggtctttttattattaaaattccattggttatt

SEQ ID NO: 16366 - DNA, 120 bp, synthetic construct
  misc_feature 1..120: note = Artificially Synthesized Probe
  source 1..120: mol_type = other DNA
atttgatgtgtacaaaacagaacatttgactcaatctccaaattcacccctgctctgttgttcctatcttggtaaaaagcaagtttttctgtttgagccagaagccctggagtcatcctt

SEQ ID NO: 16367 - DNA, 120 bp, synthetic construct
  misc_feature 1..120: note = Artificially Synthesized Probe
  source 1..120: mol_type = other DNA
ctggactataaactctgtaagtgcagggactttgcattgttcactgctatgatccaggtgcccagaacagtgtttgacactcaaaatatatttaacaattcaatggctgtgtggcatgta

SEQ ID NO: 16368 - DNA, 120 bp, synthetic construct
  misc_feature 1..120: note = Artificially Synthesized Probe
  source 1..120: mol_type = other DNA
taggagaactaatgcccacatgccatagtcaccctgcagcattgttactgatggctcatcttaacttgttatactgataggcatgtaggcagtaacataaaattgatttatctttatcgt

SEQ ID NO: 16369 - DNA, 120 bp, synthetic construct
  misc_feature 1..120: note = Artificially Synthesized Probe
  source 1..120: mol_type = other DNA
tggagaactcttcaaccctttttgattcaaacctgtaataccatgtcatggaacattaatcctccttggaagatgctgttccagaccagagatatccaaactttttggacaaatgtccct

SEQ ID NO: 16370 - DNA, 120 bp, synthetic construct
  misc_feature 1..120: note = Artificially Synthesized Probe
  source 1..120: mol_type = other DNA
aattaagggtttgctctcttgggtaggatagaggatggaactgacggtttccttctagagtctagagtcaatcttcaaacagtaaaagctgaaaaaacttccatgctctgcaactttgta

SEQ ID NO: 16371 - DNA, 120 bp, synthetic construct
  misc_feature 1..120: note = Artificially Synthesized Probe
  source 1..120: mol_type = other DNA
acaacacattgtagccccaggaaatttgaaaggcctttatgagagaactctctgtagtgagctaatatcctaagatacttttagtgcctcaaggaagtggaaatttactggtgtgaactc

SEQ ID NO: 16372 - DNA, 120 bp, synthetic construct
  misc_feature 1..120: note = Artificially Synthesized Probe
  source 1..120: mol_type = other DNA
tactatgtgcccggcactattataggtaatcagaatatagcagtgaatatgacagagttctgcctttataaaactgacgttccagtaatgagatgttcttggaaacattttgtaatccac

SEQ ID NO: 16373 - DNA, 120 bp, synthetic construct
  misc_feature 1..120: note = Artificially Synthesized Probe
  source 1..120: mol_type = other DNA
aggcacagtatatctttttacaccagtgcattctggatctcttatcaaataagggaagtaatcagcccatctgttttgttaactattcagcacttcagaagatggactctttggacgcca

SEQ ID NO: 16374 - DNA, 120 bp, synthetic construct
  misc_feature 1..120: note = Artificially Synthesized Probe
  source 1..120: mol_type = other DNA
aaccccctgacactgcagggattacttggcctttatacaacacacagtagctcttcagggacacttagggctatttaatttgcattgtgatcttcagtttgagaaccttaaaagaaaaat

SEQ ID NO: 16375 - DNA, 120 bp, synthetic construct
  misc_feature 1..120: note = Artificially Synthesized Probe
  source 1..120: mol_type = other DNA
cagaatctgctgtcatctgagtgcctgagcaacttacataaccatcagcttttagacgaacttacacatttcctatttgacagaaatctcttccacaatttggtcactacatttgacttg

SEQ ID NO: 16376 - DNA, 120 bp, synthetic construct
  misc_feature 1..120: note = Artificially Synthesized Probe
  source 1..120: mol_type = other DNA
agatacacaatgggatgaaggaggttttttcacatttggttcacaactaggcagtatgtgtgcaagtgacagctgaaagcaaacctgtttctaaatgtggcttatgaatgttctaatcag

SEQ ID NO: 16377 - DNA, 120 bp, synthetic construct
  misc_feature 1..120: note = Artificially Synthesized Probe
  source 1..120: mol_type = other DNA
tgccttgcccgctgtacttgccctgtgggcatggattttgtggttctcttaggatttcatagttgcagacaggtatgagttaatgggagcccccataacaagtctccctgaggctcccgt

SEQ ID NO: 16378 - DNA, 120 bp, synthetic construct
  misc_feature 1..120: note = Artificially Synthesized Probe
  source 1..120: mol_type = other DNA
cactctgtggtactgagccgtgattcaagtttctttatctgcagcaatgcaaagaacattcattcattgggcacttcagagtaacagcttggctcttgtattaaaagatgttatttcact

SEQ ID NO: 16379 - DNA, 120 bp, synthetic construct
  misc_feature 1..120: note = Artificially Synthesized Probe
  source 1..120: mol_type = other DNA
aattcttctaataagccttcataaagcatgctcagccacaggtaaggctgtctgatgatggctgtgaataacttcagcaagccacccacttactcatgtcaattaaaacatcttctttga

SEQ ID NO: 16380 - DNA, 120 bp, synthetic construct
  misc_feature 1..120: note = Artificially Synthesized Probe
  source 1..120: mol_type = other DNA
tgtgcacctggtctctaggctgcggagggaggaagacctgccacacgctgtccactctgacagctgccaggcgatgtacacctagtctctaggctgcagaaggaggaagacctgccacac

SEQ ID NO: 16381 - DNA, 120 bp, synthetic construct
  misc_feature 1..120: note = Artificially Synthesized Probe
  source 1..120: mol_type = other DNA
atttagccataggtctcaatctccacccccttacgtaaaatcccagagataacccccaccacaggcactgaagaaagcagaagtaagttcctgggataggaaggagaggacagaactcat

SEQ ID NO: 16382 - DNA, 120 bp, synthetic construct
  misc_feature 1..120: note = Artificially Synthesized Probe
  source 1..120: mol_type = other DNA
aaatgataggaaaaggcattgaactgccccctggtcctacagtctaaaatggaagcacaaagcagaatgtcagctctgaaggctctgacctcggggaaattaagcacatcctgccaacta

SEQ ID NO: 16383 - DNA, 120 bp, synthetic construct
  misc_feature 1..120: note = Artificially Synthesized Probe
  source 1..120: mol_type = other DNA
tgtacatcatccccacccaagaaagctgtggcagagcacgaaagtgaagggcaaatatggacctttgcaaaatgctaatgtctcaggaagccactggagtagaaattctatgagaagaga

SEQ ID NO: 16384 - DNA, 120 bp, synthetic construct
  misc_feature 1..120: note = Artificially Synthesized Probe
  source 1..120: mol_type = other DNA
aaataaaaacaggtaaagcttatcaagtattctctaagctgtgtcagcttaaggccatgcctggtattttaagagggaaaagtgtccggaagaaacaatgtcagcaattgcttcagcagc

SEQ ID NO: 16385 - DNA, 120 bp, synthetic construct
  misc_feature 1..120: note = Artificially Synthesized Probe
  source 1..120: mol_type = other DNA
taaataagctcttggccagaactattacttcaggaaaaatgaggtggtggagaatatgtggacagtgtctgtactttgtgtgtctcttcttaaactaccaagtgtccacagacaccacaa

SEQ ID NO: 16386 - DNA, 120 bp, synthetic construct
  misc_feature 1..120: note = Artificially Synthesized Probe
  source 1..120: mol_type = other DNA
cagcacgatttaaatctaaagctgaatattttgttttcagttttcaagattaggatgacatctgcaggtcattaagcacccgccaagcagtcaccaaaaccagggatgaaaaaggaacag

SEQ ID NO: 16387 - DNA, 120 bp, synthetic construct
  misc_feature 1..120: note = Artificially Synthesized Probe
  source 1..120: mol_type = other DNA
tagactagagataaaacaaagatcttgcccgaagcccaaactcctctaaagtcccacagtggtttagctgtatggactgtccaacaggtttacaggaacagaaatattcctataaatgaa

SEQ ID NO: 16388 - DNA, 120 bp, synthetic construct
  misc_feature 1..120: note = Artificially Synthesized Probe
  source 1..120: mol_type = other DNA
cgacttcttccaattccttagaaatataggcttataagcaacatgtcacaacttctactacgaatcagctaatctcatcttagaactcgactacgcagcagatgatgcctgtttcaactg

SEQ ID NO: 16389 - DNA, 120 bp, synthetic construct
  misc_feature 1..120: note = Artificially Synthesized Probe
  source 1..120: mol_type = other DNA
cctggcgctgggctccacatctagctcttttgaaatgttttgaaataagtttggcaaaagagagaatcatctgggagagtaatctgtgtcagtttggacaagaacaaaggaggatattta

SEQ ID NO: 16390 - DNA, 120 bp, synthetic construct
  misc_feature 1..120: note = Artificially Synthesized Probe
  source 1..120: mol_type = other DNA
aaataacatgaaaaaaaaggtagtgagtaaaagatgtgaatatctagcaaaaaggagagccgctgaatgtctccactttggggaattctgagttaatgagaaccccactgtggcaccgag

SEQ ID NO: 16391 - DNA, 120 bp, synthetic construct
  misc_feature 1..120: note = Artificially Synthesized Probe
  source 1..120: mol_type = other DNA
cccatcttgaccttcatggacttgaccttcatctcacctctgcacgacacgaacaaaactcacacacagagacaaataacacacacaccacagttcaggtgttccaggtgcctaggtaca

SEQ ID NO: 16392 - DNA, 120 bp, synthetic construct
  misc_feature 1..120: note = Artificially Synthesized Probe
  source 1..120: mol_type = other DNA
tacagcccgacaggtttgcgatgaggttcaggtactgtggagacaccaggtcgttgtagtggtaacctgggacgtggagaaaagcaagacgcactcaattcccctggaggatgtgtgagg

SEQ ID NO: 16393 - DNA, 120 bp, synthetic construct
  misc_feature 1..120: note = Artificially Synthesized Probe
  source 1..120: mol_type = other DNA
agaccttctgtctttgcccactagctacagaagaaattccaaacatggtagcctgggccatcactccacagatgaaagagatcttcctaagttcagatcctagtcttcgccttcaagaca

SEQ ID NO: 16394 - DNA, 120 bp, synthetic construct
  misc_feature 1..120: note = Artificially Synthesized Probe
  source 1..120: mol_type = other DNA
tgtctgacttttcccagaggctgaaacagtgagctgaaacatctggccctattttcacagctactcttgggaagtcctacagaattatcaatcttgaacatccatagagccaagaaagca

SEQ ID NO: 16395 - DNA, 120 bp, synthetic construct
  misc_feature 1..120: note = Artificially Synthesized Probe
  source 1..120: mol_type = other DNA
tttaaagatctgatcctgtaactaaatgaagaaaggtagggagtagcaagaaattacacttagtaactccctcttcattctctggagaagagaacatggcctttctaccaggagactggc

SEQ ID NO: 16396 - DNA, 120 bp, synthetic construct
  misc_feature 1..120: note = Artificially Synthesized Probe
  source 1..120: mol_type = other DNA
agagattcctattaaaccaaagtgagagcgacagggctgtagggctcaagaggaatcacagtttaaggaaataatttcacagttcataagcacagtgggaaagaaaatgctggaactctt

SEQ ID NO: 16397 - DNA, 120 bp, synthetic construct
  misc_feature 1..120: note = Artificially Synthesized Probe
  source 1..120: mol_type = other DNA
aaatcaaaattcatatattagaactgcatgcattctttaatcactcccaccttcaccctaaagctcagtgatttgagggtcagcgtgtttacagccccacgatacctgtcaaacaaatgt

SEQ ID NO: 16398 - DNA, 120 bp, synthetic construct
  misc_feature 1..120: note = Artificially Synthesized Probe
  source 1..120: mol_type = other DNA
gtcacattatacacagaaacacataccacacacaatcacattatatacacagaaacacatacgccacctacacagaacattatatagagacacaccacgccacacataacacatcacaca

SEQ ID NO: 16399 - DNA, 120 bp, synthetic construct
  misc_feature 1..120: note = Artificially Synthesized Probe
  source 1..120: mol_type = other DNA
gaaaacagctctaaccatctcacccaatgacatgaaccctaataaatccaaagttgatttcatttttcttcaacatacgcaatcttttgacagacgctgacacagcccaacacaccctta

SEQ ID NO: 16400 - DNA, 120 bp, synthetic construct
  misc_feature 1..120: note = Artificially Synthesized Probe
  source 1..120: mol_type = other DNA
ctcctgacagaaaccagccccaacctgactgaaaccagccccaacctgactgaaacctgccaactcctgactgagacctgtcttctcctgaaggggacctgccctgtcctaactgaaacc

SEQ ID NO: 16401 - DNA, 120 bp, synthetic construct
  misc_feature 1..120: note = Artificially Synthesized Probe
  source 1..120: mol_type = other DNA
tggttccacttcacgctgttgtcttcaaatttacaccatcgtcctgacctctccctgcagctcacttcgtggctctcaccacccactccaggcttttcccttttccatgctcaaacagga

SEQ ID NO: 16402 - DNA, 120 bp, synthetic construct
  misc_feature 1..120: note = Artificially Synthesized Probe
  source 1..120: mol_type = other DNA
ggattaggtgagctcattggctattttgcatatttgaggtatgtatacatggacaactcaaatggctgaaaagaatttcagctaggcagaaaccttactttttggtgtgtatctcagagc

SEQ ID NO: 16403 - DNA, 120 bp, synthetic construct
  misc_feature 1..120: note = Artificially Synthesized Probe
  source 1..120: mol_type = other DNA
gatgcttccagagcattcctggccaaagcccgaggagagagaaaccgcagctaaggaatcagaatctcttcaagcaaccatatttgccaaattgtaactgtaaattacacctggtcattt

SEQ ID NO: 16404 - DNA, 120 bp, synthetic construct
  misc_feature 1..120: note = Artificially Synthesized Probe
  source 1..120: mol_type = other DNA
ggtcaagaatccttcagggctgatgtgaaattttccactttctgtcacctgaaccccatcctggagcaaaacagaatgaaaacagtattagaaataagactaagaagcagaagttatctg

SEQ ID NO: 16405 - DNA, 120 bp, synthetic construct
  misc_feature 1..120: note = Artificially Synthesized Probe
  source 1..120: mol_type = other DNA
tgttgtgtcgctgggaatgctggcaaacactggggtgactggaaggcagatgtagagaatccaggagaacgagtcaattacatcaaaaaacttcagaagaacaaaatcccctgccctcca

SEQ ID NO: 16406 - DNA, 120 bp, synthetic construct
  misc_feature 1..120: note = Artificially Synthesized Probe
  source 1..120: mol_type = other DNA
catctggggtctgtgccttgggagctgacttgattagactgtgttacttaaataaccaccccagaaagggcagttagaaacaacccttttctaaaataatcttaattaaccaagggaaaa

SEQ ID NO: 16407 - DNA, 120 bp, synthetic construct
  misc_feature 1..120: note = Artificially Synthesized Probe
  source 1..120: mol_type = other DNA
gagggctctgggaagcaaagtcagagcaaaagctattcgtctgtttcaatatattcctcgactgtttccagaaaattctatcctccatgcaaatagattccttcaagaggctacttaaaa

SEQ ID NO: 16408 - DNA, 120 bp, synthetic construct
  misc_feature 1..120: note = Artificially Synthesized Probe
  source 1..120: mol_type = other DNA
gacaccaggccgacttacaacgattcctctcaatcctcaccctaaactaatatttgcaaatgcttaaaaaatgccatctggtatagctgtgtatgatgatagtggttattatcactggat

SEQ ID NO: 16409 - DNA, 120 bp, synthetic construct
  misc_feature 1..120: note = Artificially Synthesized Probe
  source 1..120: mol_type = other DNA
tctccccaaccagcacctctgtattctgtggctggattacaaaagtgggtcgagctgtcacaattaaacagaaattctcaattaatttctcccggtttgacatggtttttgcttgatttt

SEQ ID NO: 16410 - DNA, 120 bp, synthetic construct
  misc_feature 1..120: note = Artificially Synthesized Probe
  source 1..120: mol_type = other DNA
agaaaaaagtccatacaattatgaatgtgtttcatgtgtgagtttgtgtggaaacagaactctcccatgctggcagtgggagcacaccctggcccagcccacctgcagggacgtggccgt

SEQ ID NO: 16411 - DNA, 120 bp, synthetic construct
  misc_feature 1..120: note = Artificially Synthesized Probe
  source 1..120: mol_type = other DNA
aaaattaactcaaagatggattaaagacttaaacataaaacctgaaaccataaaaaccctagaagaaaacctaggcaataacattcaggacacaggcatgggcaaagactttgtgactaa

SEQ ID NO: 16412 - DNA, 120 bp, synthetic construct
  misc_feature 1..120: note = Artificially Synthesized Probe
  source 1..120: mol_type = other DNA
aagtaaaatttaaaaatatatatattctgctagaaacttaatccatagatatttttacaagcacataaaatgtcatatgtccaaataaatttttgtttgggtcagacgtggtggctcatg

SEQ ID NO: 16413 - DNA, 120 bp, synthetic construct
  misc_feature 1..120: note = Artificially Synthesized Probe
  source 1..120: mol_type = other DNA
acttgcctcaaatatgcttacatttttttgtatatagataggaaagaaactactaagcattttgggaagaggggaagggaataggagttgagcggatgacgaaaagagccaggaggaaga

SEQ ID NO: 16414 - DNA, 120 bp, synthetic construct
  misc_feature 1..120: note = Artificially Synthesized Probe
  source 1..120: mol_type = other DNA
atatgcacatggaaaggctcggagaaaaatggtgggaaaagacacacctgccaatacgaatcaagtagaagctgctgtatttatcttacaacaaatttaccttgaagcaaaaagcactga

SEQ ID NO: 16415 - DNA, 120 bp, synthetic construct
  misc_feature 1..120: note = Artificially Synthesized Probe
  source 1..120: mol_type = other DNA
catgctcagactagtatactaaatagggctgctgttcctgagaaagacacaacaattcagatcaaaaggagtgaaatttggaactctcaagccataaagagctggctaaatattcctgtc

SEQ ID NO: 16416 - DNA, 120 bp, synthetic construct
  misc_feature 1..120: note = Artificially Synthesized Probe
  source 1..120: mol_type = other DNA
aaacatgaaaatattggataaaaatctagatttgtggtttcttttacataatccaagcccttagcaaaatagagacctcgttaccacatggcaacagctggctgtggctgagtagctgtc

SEQ ID NO: 16417 - DNA, 120 bp, synthetic construct
  misc_feature 1..120: note = Artificially Synthesized Probe
  source 1..120: mol_type = other DNA
ggcagccctgacctaacaggcaattctgaaaaggggaccgtgtatttgcacatctcattcactcaggtacttatccttagtattcacgtgttcaatctatctacatgttttaaagtgttt

SEQ ID NO: 16418 - DNA, 120 bp, synthetic construct
  misc_feature 1..120: note = Artificially Synthesized Probe
  source 1..120: mol_type = other DNA
gctctgccatatttagctgtgagatttcaactgcgggcatcaattttttcgtatataaaatgtaggtgtgatggactggggccaaatttatgcttccctgacttttaaatgcacacaaca

SEQ ID NO: 16419 - DNA, 120 bp, synthetic construct
  misc_feature 1..120: note = Artificially Synthesized Probe
  source 1..120: mol_type = other DNA
ttacttcaggattttcttttaaggattcctttcaaaaggtcactttgaaagtgctccactccaacttaggaccctcagtgatttggccccaggtgccttccggcaatctgacctcattcc

SEQ ID NO: 16420 - DNA, 120 bp, synthetic construct
  misc_feature 1..120: note = Artificially Synthesized Probe
  source 1..120: mol_type = other DNA
caaccagaaaatggaaacctttttagtctaaaccatgacatgaaaataaatgacaacacacgctgagttctctgtgtccaaaaggaaaccacagatgcccaaaggtgtaattcagccaca

SEQ ID NO: 16421 - DNA, 120 bp, synthetic construct
  misc_feature 1..120: note = Artificially Synthesized Probe
  source 1..120: mol_type = other DNA
gtacacctgaacggggtgaattgtctggcacgggaacaatgcctcgataaagctattataaaaaacaagaataatcactgacagccaaattggagtaaggagtaaaagtatgacaaagtc

SEQ ID NO: 16422 - DNA, 120 bp, synthetic construct
  misc_feature 1..120: note = Artificially Synthesized Probe
  source 1..120: mol_type = other DNA
agttctaactgcccctgacatagctccagcaagaactgagctagaagaaacttaaaaaaaaaaactgtgtatttttgtcgtattacaaaaccatcacacagggagatcctttcaccttac

SEQ ID NO: 16423 - DNA, 120 bp, synthetic construct
  misc_feature 1..120: note = Artificially Synthesized Probe
  source 1..120: mol_type = other DNA
tttcagcaaatccgccaaccacaggatttcacagtcgcagtgaagtgtgtttgagtccagtcgcctgtgggaaggaagatgcagccggtgagacatggggtggctgggcttgtccatcca

SEQ ID NO: 16424 - DNA, 120 bp, synthetic construct
  misc_feature 1..120: note = Artificially Synthesized Probe
  source 1..120: mol_type = other DNA
gaaaagtgttgtctccgcacacggggaagaagttgtctgggggacagaggagttccaggtagcaaacacaggctacagggcaagggttggaagaggctggcagctggatgtgagacagcc

SEQ ID NO: 16425 - DNA, 120 bp, synthetic construct
  misc_feature 1..120: note = Artificially Synthesized Probe
  source 1..120: mol_type = other DNA
cagctgtcagcataatccaggctgttaccagtctgccctaaacttgtcttggctactttctagagcatttatctggtgatttctttctcctctctgttatctatcaaatatggaagtatt

SEQ ID NO: 16426 - DNA, 120 bp, synthetic construct
  misc_feature 1..120: note = Artificially Synthesized Probe
  source 1..120: mol_type = other DNA
tctcaaaaaaaagggtaaagatcagcctccttagtatgctgtagaaagacacagaatatagcacagaggttctttccacactggttttatttctaccagtaaaatatgcgctggaattaa

SEQ ID NO: 16427 - DNA, 120 bp, synthetic construct
  misc_feature 1..120: note = Artificially Synthesized Probe
  source 1..120: mol_type = other DNA
actcactagacttcctacattgtatgaacaatacataaaattatcaaatgattcaataaatacaactgaacactaggcacagatgtccaccctagtgactggataagggcgagggaggcc

SEQ ID NO: 16428 - DNA, 120 bp, synthetic construct
  misc_feature 1..120: note = Artificially Synthesized Probe
  source 1..120: mol_type = other DNA
agcacacattttcagtgactacttcttcaggaggccaaaatgagcaaagaagcagcatgccagcgttcacaggtcttcataactccacagaaaggaggactcctcagaacgcacgcctga

SEQ ID NO: 16429 - DNA, 120 bp, synthetic construct
  misc_feature 1..120: note = Artificially Synthesized Probe
  source 1..120: mol_type = other DNA
atcatccaaaatttcagcaaacatctacttggtgattcacagatgcccttcctcattcagcctcgtttctcccctgacttgccctttccttccttaaaaataacactggactcacccagc

SEQ ID NO: 16430 - DNA, 120 bp, synthetic construct
  misc_feature 1..120: note = Artificially Synthesized Probe
  source 1..120: mol_type = other DNA
ctaactagaactacaagggaaagaaaggttttctccaaaataatgtcaccacaattgaagaaattcagcttcatgtgttcacagtcataaggaggaacagtgaacgaggcaaagagccct

SEQ ID NO: 16431 - DNA, 120 bp, synthetic construct
  misc_feature 1..120: note = Artificially Synthesized Probe
  source 1..120: mol_type = other DNA
tcttagaaaacagaagcaacagaggcatactggaagagccacacaattggcctggctcttgtctttgtgtaaaatggtggaaaatctcaataggagaatcctatttcctaacatgtgaac

SEQ ID NO: 16432 - DNA, 120 bp, synthetic construct
  misc_feature 1..120: note = Artificially Synthesized Probe
  source 1..120: mol_type = other DNA
ttaaagaatacacaggacaactgaatcaaactaacatgtgtgaatgtgtgtttataaagacattggaacgtaatttgttttcatgagaataggtgagtattggctggccgtggtggctca

SEQ ID NO: 16433 - DNA, 120 bp, synthetic construct
  misc_feature 1..120: note = Artificially Synthesized Probe
  source 1..120: mol_type = other DNA
agatgaggtcggaagagggttattgaaaagagatcagtgaaaacagagcatccccaacaactccactttgaacgtgtttgctgagtgcatactaagttgctcttaataattcaaaaccag

SEQ ID NO: 16434 - DNA, 120 bp, synthetic construct
  misc_feature 1..120: note = Artificially Synthesized Probe
  source 1..120: mol_type = other DNA
ctaaaagcacacgacacacacttcgtcacctttccaattttatagcaagtatgtgtgtgactgagactaaaccagtacttcccaggaagctcattttctaaactgcaaaactgatctcaa

SEQ ID NO: 16435 - DNA, 120 bp, synthetic construct
  misc_feature 1..120: note = Artificially Synthesized Probe
  source 1..120: mol_type = other DNA
tccacagttactaccttttgatacagcggagaaaaaattccttctctcctatagaagggagtttgtatctttatcctgctgtctcttagattttctattttagccaggactgtggccagt

SEQ ID NO: 16436 - DNA, 120 bp, synthetic construct
  misc_feature 1..120: note = Artificially Synthesized Probe
  source 1..120: mol_type = other DNA
gtgtctgaatggtggaacaccagtaacccattacagaatttctaaaaacagtaattatggggagaaaaattacataaactacctaagcaccctatctctggcaacccactggaaaatgtc

SEQ ID NO: 16437 - DNA, 120 bp, synthetic construct
  misc_feature 1..120: note = Artificially Synthesized Probe
  source 1..120: mol_type = other DNA
cagccccagtgcctcaggtgtttggtcattagggtatcataggtaaggtcaggacattagggtatgataacataaaatgtttataaccttctaaggaatctgattatcctatgccaatgt

SEQ ID NO: 16438 - DNA, 120 bp, synthetic construct
  misc_feature 1..120: note = Artificially Synthesized Probe
  source 1..120: mol_type = other DNA
cagcatttgaacaggtaagaaaggctgtcccggaaggccgagccacgcatcacagcttagagcaaaaatcaactctgaccacatctgatccagaaaccaagctgctcctccagagcagag

SEQ ID NO: 16439 - DNA, 120 bp, synthetic construct
  misc_feature 1..120: note = Artificially Synthesized Probe
  source 1..120: mol_type = other DNA
caccatgctctaaggcagagcaccaaaaaagacttctactatgaagagggtaaaacaaacggtcccctttactgcaaagggggttatcttagaagacaaagtgaaaccataaaaaaagaa

SEQ ID NO: 16440 - DNA, 120 bp, synthetic construct
  misc_feature 1..120: note = Artificially Synthesized Probe
  source 1..120: mol_type = other DNA
tttgcacacacaggcgaactcataaacactagtagcaggcatttgcttgtttcctctgcatttccacgtctgatccttagcttactggtcatcattgacataaagcttacaataaatgta

SEQ ID NO: 16441 - DNA, 120 bp, synthetic construct
  misc_feature 1..120: note = Artificially Synthesized Probe
  source 1..120: mol_type = other DNA
agtttgtgtgtgaaaagtccttcataaacagcaaaactctgtaaatatccattgtgaacatcccctgcaattccagtgggtcttatcagctcattcactgagcacacaaagcatggatct

SEQ ID NO: 16442 - DNA, 120 bp, synthetic construct
  misc_feature 1..120: note = Artificially Synthesized Probe
  source 1..120: mol_type = other DNA
acaagtcactgcagaaccacagaatagttgaaggttagaactaaaaggaagcttggagatccaagttttaatctaattccctccagggacttttgccattagattccctttcacagtaaa

SEQ ID NO: 16443 - DNA, 120 bp, synthetic construct
  misc_feature 1..120: note = Artificially Synthesized Probe
  source 1..120: mol_type = other DNA
tgaagctaatggcagaaatatcattttaagctcctcattaaggtacaggatttcaactcgaatgtgccttcctgaagtaaatcacggcgatgatgttgtggttctttgtcattcgtgttg

SEQ ID NO: 16444 - DNA, 120 bp, synthetic construct
  misc_feature 1..120: note = Artificially Synthesized Probe
  source 1..120: mol_type = other DNA
tttaccacaggggtgagtacatccatgcacttggggtgaatgtcaggaagtctcacgtggcccactgaagtctgtgaaggattaggacttcataatgtactcgcttctgtacttaacata

SEQ ID NO: 16445 - DNA, 120 bp, synthetic construct
  misc_feature 1..120: note = Artificially Synthesized Probe
  source 1..120: mol_type = other DNA
gtaagacataacacgcccactaataccattaatgagatcaaattacgttagtcaggacctgcctggccctcagctaaagaaacctggcctcaatcctttggctgtgagggtcatttcttg

SEQ ID NO: 16446 - DNA, 120 bp, synthetic construct
  misc_feature 1..120: note = Artificially Synthesized Probe
  source 1..120: mol_type = other DNA
caggtgaaggtagggggcaactccaggtgaaggtaggggacaactccaggtgaaggggggcaactccaggtgaagggagggcaactccaggtgaagggggggacagctccaggtgaagtg

SEQ ID NO: 16447 - DNA, 120 bp, synthetic construct
  misc_feature 1..120: note = Artificially Synthesized Probe
  source 1..120: mol_type = other DNA
gtgaagggggggacagctccaggtgaagcgggggacagctccaggtgaaggaaggacaactccaggtgaagcgggggacaactccaggtgaaagagggacaactccaggtgaaggggggg

SEQ ID NO: 16448 - DNA, 120 bp, synthetic construct
  misc_feature 1..120: note = Artificially Synthesized Probe
  source 1..120: mol_type = other DNA
gggagcaaccattatcacatgacattaataagagcagatgatgcatcatccgtcagtgtattctgaggatgtaatgagaggatgcacacacgagctagttagtaaccaactaaaaattaa

SEQ ID NO: 16449 - DNA, 120 bp, synthetic construct
  misc_feature 1..120: note = Artificially Synthesized Probe
  source 1..120: mol_type = other DNA
tattcactgggtcacagtcctgcctccatgtgatatcaagtcctccagggagcaagtgcagtaacaactgtttaagtcacaaatcggacacggtctcactgcaagccacagaatcttaca

SEQ ID NO: 16450 - DNA, 120 bp, synthetic construct
  misc_feature 1..120: note = Artificially Synthesized Probe
  source 1..120: mol_type = other DNA
gtgatatgtctgacttttgtgtaaataatcaacccacacttttcacccaaatttttggaagcacgaggttgccaaaagtcttccaaaaatggaacaaaagaaatccctgcggaggggcta

SEQ ID NO: 16451 - DNA, 120 bp, synthetic construct
  misc_feature 1..120: note = Artificially Synthesized Probe
  source 1..120: mol_type = other DNA
ccattgttctgcaattagttaagagggggaaacatgcttcttacaacccagcaggacgctttagccgacaaagctcctggatttaaaagaggttcgccctttcatgttccagcagctcct

SEQ ID NO: 16452 - DNA, 120 bp, synthetic construct
  misc_feature 1..120: note = Artificially Synthesized Probe
  source 1..120: mol_type = other DNA
atgcctaagggacagccggagccagcttggagcttccctttctttatctcaaacactctgaaggttccaaagtcagggccattgaacaagatgcgctcctgactgcgctcccactccgca

SEQ ID NO: 16453 - DNA, 120 bp, synthetic construct
  misc_feature 1..120: note = Artificially Synthesized Probe
  source 1..120: mol_type = other DNA
agaacatctgggttcctccagttttgcactattataaatagccctgcaatgacaagctttcggtacatcccatctgtgatgcgtgttaatatacttatgaaacaggttcctagaaatggc

SEQ ID NO: 16454 - DNA, 120 bp, synthetic construct
  misc_feature 1..120: note = Artificially Synthesized Probe
  source 1..120: mol_type = other DNA
ccactctaccagcacccgctccaccagcacccactctccaccagcacccactctccaccagcacccgctccaccagcacccgctccaccagcacccactctccaccagcacccgctccac

SEQ ID NO: 16455 - DNA, 120 bp, synthetic construct
  misc_feature 1..120: note = Artificially Synthesized Probe
  source 1..120: mol_type = other DNA
tcataacagtaaaccttgttttactgggttcaactttttataatcagcctatagagagactgtggaagacaactgtttggagggtcaagttgaaatgtcaggagcctggttcatgtcaga

SEQ ID NO: 16456 - DNA, 120 bp, synthetic construct
  misc_feature 1..120: note = Artificially Synthesized Probe
  source 1..120: mol_type = other DNA
ttttggagtatgttgtatattttttcttaaaaagaatactcctttaattaaaagtaaatgaatgagtcacacaggtggcccctggttcctagacctggtgatcttggggcccgagtcccc

SEQ ID NO: 16457 - DNA, 120 bp, synthetic construct
  misc_feature 1..120: note = Artificially Synthesized Probe
  source 1..120: mol_type = other DNA
cacccatccacatccaggatactgtttttttcaactacctcatttattgctcttacatctgcacttgattactatggatttacacgtcacacccgcagcacccttgcgtaggtagttgag

SEQ ID NO: 16458 - DNA, 120 bp, synthetic construct
  misc_feature 1..120: note = Artificially Synthesized Probe
  source 1..120: mol_type = other DNA
acttcttccatgggtgttaaaaaataaaatcagtatttttcctgccttccagtcagaaaaacttggccagttttgcgttcctgaaaacttcttccaaggccatttcattctgccccagaa

SEQ ID NO: 16459 - DNA, 120 bp, synthetic construct
  misc_feature 1..120: note = Artificially Synthesized Probe
  source 1..120: mol_type = other DNA
atgacacagacatagttttttccaggcaaacaatatagccctcacccagctgctccaagcaagtgttggtcttttctaatttgacggcaggtggtggagtgttggccaaagacaaggcaa

SEQ ID NO: 16460 - DNA, 120 bp, synthetic construct
  misc_feature 1..120: note = Artificially Synthesized Probe
  source 1..120: mol_type = other DNA
aaccacacaaccaggaaacaatgggtccacacacaaacggaaaagacttcacacacccctgaatctttgtaaactcctattgacaaaagaaaaacttgcaacaatagactcacctaattt

SEQ ID NO: 16461 - DNA, 120 bp, synthetic construct
  misc_feature 1..120: note = Artificially Synthesized Probe
  source 1..120: mol_type = other DNA
aaaactactctactaacctactacgcaaacctactctactcacctattccactaacctaccacccaactctactaacctactccactaacctaaaactcaaacctactccactaatctac

SEQ ID NO: 16462 - DNA, 120 bp, synthetic construct
  misc_feature 1..120: note = Artificially Synthesized Probe
  source 1..120: mol_type = other DNA
tggattctcaccacagtcctccagtttcagcccccacggccagctgttaatccctgaacattttcaagttcaagttctcaggagacagcactggctgggctaagcctgaccatcagtgac

SEQ ID NO: 16463 - DNA, 120 bp, synthetic construct
  misc_feature 1..120: note = Artificially Synthesized Probe
  source 1..120: mol_type = other DNA
ttgaaggtgagaagagaggcagaagggaggtgtattttaaggagctggctgagatggtggtggcttggcaagtccagagtctgcagggagtgcctcgctccacgctttctcacaccacct

SEQ ID NO: 16464 - DNA, 120 bp, synthetic construct
  misc_feature 1..120: note = Artificially Synthesized Probe
  source 1..120: mol_type = other DNA
tcagaattcaaacaactgaacgggaatagtttcaacaacggtacgggttaattgaggtggttcctgttcagaaagacccagtgtgctctttgagttgagcaaaacaaatggatgaatcat

SEQ ID NO: 16465 - DNA, 120 bp, synthetic construct
  misc_feature 1..120: note = Artificially Synthesized Probe
  source 1..120: mol_type = other DNA
taagcgagaaataatgaacccgagaggtgttgacaatggatgggctgaagatgaactatcaggaagtttctgagcgagcggacacaaaatagaacatgtaagaagaataaaattaagcca

SEQ ID NO: 16466 - DNA, 120 bp, synthetic construct
  misc_feature 1..120: note = Artificially Synthesized Probe
  source 1..120: mol_type = other DNA
atggatgaatagatggatgagtggttatggatgaatggacagatggactaatgaatggatacattgatggatggctgactggaaaatggatgagtagttatggatgaatggacagatgga

SEQ ID NO: 16467 - DNA, 120 bp, synthetic construct
  misc_feature 1..120: note = Artificially Synthesized Probe
  source 1..120: mol_type = other DNA
aatttaatgacaaggacttcagataaactgcagcctttgttttccactgctgaaacacagacactgtcgcattttgtctccaaagccatgtttctttcccacaacaattctcagtgaaga

SEQ ID NO: 16468 - DNA, 120 bp, synthetic construct
  misc_feature 1..120: note = Artificially Synthesized Probe
  source 1..120: mol_type = other DNA
ttagttctaatagtttttaatggaatctttaggattttctatatataggaatgaacagaggcaggcagcaaaagcaaaaacaagcaatggggaaaggattccctatttaataaatggtgc

SEQ ID NO: 16469 - DNA, 120 bp, synthetic construct
  misc_feature 1..120: note = Artificially Synthesized Probe
  source 1..120: mol_type = other DNA
gaatactatgcagccataaaaaatgatgagttcatgtcctttatagggacatggatgaaattggaaatcatcattctcagtaaactatcgcaagaacaaaaaaccaaacaccgcatattc

SEQ ID NO: 16470 - DNA, 120 bp, synthetic construct
  misc_feature 1..120: note = Artificially Synthesized Probe
  source 1..120: mol_type = other DNA
ggcagaaagtgttgtctcaaaagggaaaatcagatgtttcttaaacacataggtctggtcggttagacaaaattgccattctcaaatgcagtgaacactctgcttccttgtaatttcctg

SEQ ID NO: 16471 - DNA, 120 bp, synthetic construct
  misc_feature 1..120: note = Artificially Synthesized Probe
  source 1..120: mol_type = other DNA
agctggtaaagctgacaacggccctcttgtttccactctcctgccgtaaacagggtctttttcaaggtctatttagggccacgcatttcacactttttgtgcttttgttggtgattttgc

SEQ ID NO: 16472 - DNA, 120 bp, synthetic construct
  misc_feature 1..120: note = Artificially Synthesized Probe
  source 1..120: mol_type = other DNA
acaaacgctagatggtttggctctcagggcataccgaaaatcaaaccatttgcagaaaaaacaaattgtaagaatcaaaatgcagtcactcagcaaagaaacatgagcacttacacaggc

SEQ ID NO: 16473 - DNA, 120 bp, synthetic construct
  misc_feature 1..120: note = Artificially Synthesized Probe
  source 1..120: mol_type = other DNA
acgtactacacacgcctgaatgcttctgtgtgtgtgcatctgagaacaaagcccagctaatgtttctcctgaatgacagcaatgtgagtaatttgtttcactttgttcctgtttattttt

SEQ ID NO: 16474 - DNA, 120 bp, synthetic construct
  misc_feature 1..120: note = Artificially Synthesized Probe
  source 1..120: mol_type = other DNA
gatgcataaacaaactgcctttaatccccaaatgataacaaaatgcttcctgtgagaagaggagggagagagttttaaaactatctgtggtagtacttgctacagcccacattagaagct

SEQ ID NO: 16475 - DNA, 120 bp, synthetic construct
  misc_feature 1..120: note = Artificially Synthesized Probe
  source 1..120: mol_type = other DNA
cctcagttgttgaaaacgatgagccttagtaaagcactgctccaatcctgcccaacacatcttaaaagcaagaccttaaagaaccaaactgtttccatataactgtaccaagtacaaagc

SEQ ID NO: 16476 - DNA, 120 bp, synthetic construct
  misc_feature 1..120: note = Artificially Synthesized Probe
  source 1..120: mol_type = other DNA
taagcaatggatgagagagctgtggcctaatacacgtataactggaatcttcaaaaagaggagacaaagatggggacagaaaacatatctgaagatgaaacacccccagattttccaaat

SEQ ID NO: 16477 - DNA, 120 bp, synthetic construct
  misc_feature 1..120: note = Artificially Synthesized Probe
  source 1..120: mol_type = other DNA
aaacttggggccagagagaaatataccgctcggatatttcaggtttgggcccagatcactgaaataagttaaaaattgcaaaaaagttattcacatgaatgttttggtctcccagtacat

SEQ ID NO: 16478 - DNA, 120 bp, synthetic construct
  misc_feature 1..120: note = Artificially Synthesized Probe
  source 1..120: mol_type = other DNA
tcaacttcttctaaactcctgtacatgttgatgttttgacccccccatgaatcaaaaatgttcttaatggtgtctaaaatgatgactcctttccagaaggttttcagttgactttgccca

SEQ ID NO: 16479 - DNA, 120 bp, synthetic construct
  misc_feature 1..120: note = Artificially Synthesized Probe
  source 1..120: mol_type = other DNA
tgacttatctcagcttttgacatgccttcctcactaagcttaatcatttatagcttttgatttaaagtaagggacatgcaactcttcctttcactagtacactgaaaggccactgtaggg

SEQ ID NO: 16480 - DNA, 120 bp, synthetic construct
  misc_feature 1..120: note = Artificially Synthesized Probe
  source 1..120: mol_type = other DNA
gtatctacgccaggataatctaacccacgaaacagcggacagtctactcatggtttttgttcgtttttgtcagcttcagtttacattgcatgagtaatcattccactgagacatctttta

SEQ ID NO: 16481 - DNA, 120 bp, synthetic construct
  misc_feature 1..120: note = Artificially Synthesized Probe
  source 1..120: mol_type = other DNA
tccagccttgatcctgaggagctactggcccacatagagagataccactaacatataaaatgtcctgatcggctatttaagcatcaaacatggtaaagttggtcttctcttaaattgaat

SEQ ID NO: 16482 - DNA, 120 bp, synthetic construct
  misc_feature 1..120: note = Artificially Synthesized Probe
  source 1..120: mol_type = other DNA
actatttccttgacatatgaaaaaacacagaggaggaaggcaagatctaacaatagaagagctcaattactctgacttcctaacaagagaaagcactttccagacacgtggcactcatgt

SEQ ID NO: 16483 - DNA, 120 bp, synthetic construct
  misc_feature 1..120: note = Artificially Synthesized Probe
  source 1..120: mol_type = other DNA
ataataaagtctttgactctgttgtgccaacaaacatgagcatcatctgttctatggaaggcaaacactgacactagcacctgcaggactgtcccagcagacgcatctgcacatcccgca

SEQ ID NO: 16484 - DNA, 120 bp, synthetic construct
  misc_feature 1..120: note = Artificially Synthesized Probe
  source 1..120: mol_type = other DNA
ggttgagaggaggaaaggaaggggcgtacaacggcatactttatctttaatactagctttgaactaccattgtgatgaacttctattgtgttgggtacagaatgattctgtattcaaaaa

SEQ ID NO: 16485 - DNA, 120 bp, synthetic construct
  misc_feature 1..120: note = Artificially Synthesized Probe
  source 1..120: mol_type = other DNA
aatgggtatgttcatttctccagtaaagtgtttagttctataagggattcgatcaacttaacagctaccagtctacctgcctcacagaatcaacgtgactcaacagcgacatttcgaagt

SEQ ID NO: 16486 - DNA, 120 bp, synthetic construct
  misc_feature 1..120: note = Artificially Synthesized Probe
  source 1..120: mol_type = other DNA
tttttttacaacttttgcagactctttgctggtgccaaaaagtcctctggctcagctaagaaacgtgaaaactatttttggcatgcagaaaagtcgctacaggactaaattagagtcggc

SEQ ID NO: 16487 - DNA, 120 bp, synthetic construct
  misc_feature 1..120: note = Artificially Synthesized Probe
  source 1..120: mol_type = other DNA
caggatggaggtctgcggcgccacggcgggcacggcctccagcagcagatgcatgcagcgcacggtggtgcggaagcacaggcagcggctcggacaccctgcgcccggcttctgggccac

SEQ ID NO: 16488 - DNA, 120 bp, synthetic construct
  misc_feature 1..120: note = Artificially Synthesized Probe
  source 1..120: mol_type = other DNA
cgttctaataacaattagcgcacaaaactattggtataaacatttttccaaaaagagaaaactattgcatttcgttagaaatcgcgtcctgggccgaggctcgtctttcttctctgcagt

SEQ ID NO: 16489 - DNA, 120 bp, synthetic construct
  misc_feature 1..120: note = Artificially Synthesized Probe
  source 1..120: mol_type = other DNA
caggtttttttaatttttaaaatcatggtgaaaattggttccagttgagtgcagaggccagtgctctcagcacagccctttcagctcttaaagggactggggccaaagtccagggttcca

SEQ ID NO: 16490 - DNA, 120 bp, synthetic construct
  misc_feature 1..120: note = Artificially Synthesized Probe
  source 1..120: mol_type = other DNA
gacagcagctggctcccaaagtcccctgggtgcggctgctccgggttttaaggtggcatggaagagccgtgggccaaattatctttgctccctgaagtctgtacacagcaggaaaaccac

SEQ ID NO: 16491 - DNA, 120 bp, synthetic construct
  misc_feature 1..120: note = Artificially Synthesized Probe
  source 1..120: mol_type = other DNA
gttctggaactggacagaggtgccagctgcacgttgtggatgtgctaagcgccacttgattgtgcgctttcacgtggaaatctctccctatgtgtgtgttaccacaataaacagaaaact

SEQ ID NO: 16492 - DNA, 120 bp, synthetic construct
  misc_feature 1..120: note = Artificially Synthesized Probe
  source 1..120: mol_type = other DNA
aagtcaaaagaataattatattcggtggcacgtggaaattacatgaaattcacattttggtgtccacagacagtttcactggcacgcgtcatgcccgttcctatgttgtctttcctagga

SEQ ID NO: 16493 - DNA, 120 bp, synthetic construct
  misc_feature 1..120: note = Artificially Synthesized Probe
  source 1..120: mol_type = other DNA
agccaaggcctcagtccacatgctaccattttctagtgggtgctacagaaataaatcccgtaaacctaatttttattttttatgactgcactgcacgtgcataagaatgaagtcagacca

SEQ ID NO: 16494 - DNA, 120 bp, synthetic construct
  misc_feature 1..120: note = Artificially Synthesized Probe
  source 1..120: mol_type = other DNA
atttctggctacactggtgtttctgttatgtggcagtggtgtgctaggtccatggcagagccgcatagtctattaggcgtgtggttcctctcattcattcactgagccagcatttaaaca

SEQ ID NO: 16495 - DNA, 120 bp, synthetic construct
  misc_feature 1..120: note = Artificially Synthesized Probe
  source 1..120: mol_type = other DNA
tcagccacagaacagctttgttttttcctggggtaataactggctctttttttaaaaatgcacattttccatgtactcagggagactaaaactccttgacagaactgcaggaggcatctt

SEQ ID NO: 16496 - DNA, 120 bp, synthetic construct
  misc_feature 1..120: note = Artificially Synthesized Probe
  source 1..120: mol_type = other DNA
cagtgatgatttctgtctgcagaacttgcaacttagtatttaggccacggtggccttctgggcctgcccctgggagccgctggtcatgagtgaggcccccagccaggtagttgttttttg

SEQ ID NO: 16497 - DNA, 120 bp, synthetic construct
  misc_feature 1..120: note = Artificially Synthesized Probe
  source 1..120: mol_type = other DNA
caggtctttctggatcaaagctcatgctatatgaggtctttgtttagctttgtttcaaaggggtcacttctaaatgtatgtgtgtgcgtttatttatttaatggatagacgcagggcctg

SEQ ID NO: 16498 - DNA, 120 bp, synthetic construct
  misc_feature 1..120: note = Artificially Synthesized Probe
  source 1..120: mol_type = other DNA
ttctacatttcaaattcgactgatttgtggccaagattgcagcaataagggtcacagcaaggagattaaatttcccgaataagatgagcacagaaacacgcaatctgttctgaattgacc

SEQ ID NO: 16499 - DNA, 120 bp, synthetic construct
  misc_feature 1..120: note = Artificially Synthesized Probe
  source 1..120: mol_type = other DNA
caaggtacctgggggatacagaccatgatattaccagggagaaaggcagtgactggaccctggaaatcagcattcagtgtaagagctggcccaagtgcgatgaaaatgaccaccatgaag

SEQ ID NO: 16500 - DNA, 120 bp, synthetic construct
  misc_feature 1..120: note = Artificially Synthesized Probe
  source 1..120: mol_type = other DNA
caggccaaatgagaaatgcaatacttttgctgtttcccatcttccagcaaagggagcatagagtttactcaacaggacggagagctgcctggtactaacgggcatgcatatttgtggatg

SEQ ID NO: 16501 - DNA, 120 bp, synthetic construct
  misc_feature 1..120: note = Artificially Synthesized Probe
  source 1..120: mol_type = other DNA
tcggcctccctagtagctgggactacaggcgtgtgccaccatgcccggctaaatctttgtatttttagtagagatggttttcagcatgttggtcacactggtctcaaactcctgacctca

SEQ ID NO: 16502 - DNA, 120 bp, synthetic construct
  misc_feature 1..120: note = Artificially Synthesized Probe
  source 1..120: mol_type = other DNA
tacttgggattgcatcatggtcacctctaaaatcctccctattcaaacagtctgaccctgcaaaggggcggatggcaatgtgaatttcaagtcaactctaccaagtctaaaaattacagg

SEQ ID NO: 16503 - DNA, 120 bp, synthetic construct
  misc_feature 1..120: note = Artificially Synthesized Probe
  source 1..120: mol_type = other DNA
agaaatggcgaggctcttaggacaccgtggacaactggaaggccacggtggatgggggcccagaaacagatgttctgccccaccccatgcagtcagggaatttgttttttctttcttttt

SEQ ID NO: 16504 - DNA, 120 bp, synthetic construct
  misc_feature 1..120: note = Artificially Synthesized Probe
  source 1..120: mol_type = other DNA
gatcacgggcatgagccgcctgtcctctagtgttctttctgatggtcatttgattttattttctcatttttctgatggtcattttatatattaatttttttggcatgtgctgattattct

SEQ ID NO: 16505 - DNA, 120 bp, synthetic construct
  misc_feature 1..120: note = Artificially Synthesized Probe
  source 1..120: mol_type = other DNA
tccatcatatggatgaaccacagtttgttaatggacacttgagaaaatagatatatattttccccctaacatttctctcttagaaaaaaaagtgaaattcttggccgggcgcaggggctc

SEQ ID NO: 16506 - DNA, 120 bp, synthetic construct
  misc_feature 1..120: note = Artificially Synthesized Probe
  source 1..120: mol_type = other DNA
gctcctaaaatgacacactgcctggagcacaggttcacagctgtctgccaggggcccaaattgaacaacagcagtgagctccagagtccatgtctgcagacaacgaggtacagaaggaat

SEQ ID NO: 16507 - DNA, 120 bp, synthetic construct
  misc_feature 1..120: note = Artificially Synthesized Probe
  source 1..120: mol_type = other DNA
tcgtgacttgagcacatctgcttctttctcctggcttcttgggttatttgcagtgtcctctctctctttacttcctaagctttaaaaattaaaggtctgtgattccaactatatgacact

SEQ ID NO: 16508 - DNA, 120 bp, synthetic construct
  misc_feature 1..120: note = Artificially Synthesized Probe
  source 1..120: mol_type = other DNA
cctctctcacaggctagtataataaaggctcggacaagtcctgtgctgagaacaccaggtcagctttgttgagctccacatggcttatctccattattattaccattattattaacaact

SEQ ID NO: 16509 - DNA, 120 bp, synthetic construct
  misc_feature 1..120: note = Artificially Synthesized Probe
  source 1..120: mol_type = other DNA
tcttttcctttttaaatttcattgcaatagcagacagcctgggccctttctagatgaggtacatgtttagccaggtgctcggaggagggaaaacggggggaaatcagccttaatcctgaa

SEQ ID NO: 16510 - DNA, 120 bp, synthetic construct
  misc_feature 1..120: note = Artificially Synthesized Probe
  source 1..120: mol_type = other DNA
accacacctggcccagaggctgctctaaaacaaaaaaagaaaagtattgtttgggaaatttcaaaaggagagagaaaaccagagtgatccccacgtcctatcaccggcttctaaagccga

SEQ ID NO: 16511 - DNA, 120 bp, synthetic construct
  misc_feature 1..120: note = Artificially Synthesized Probe
  source 1..120: mol_type = other DNA
gccaccgtgcctggccagaaatccatctttatggtcactgatttgagttctctaagcagattaatgaatccctcattttcttttgcttattgattctttcatgtttagcctggttttcag

SEQ ID NO: 16512 - DNA, 120 bp, synthetic construct
  misc_feature 1..120: note = Artificially Synthesized Probe
  source 1..120: mol_type = other DNA
attctggtttccacctctccctctgctatcgtctgtcccctgatccagagaggtctgctatgtgaatacaaaaggcttgcactgatgcctgcgatttgcagaaagacaggaattccacgc

SEQ ID NO: 16513 - DNA, 120 bp, synthetic construct
  misc_feature 1..120: note = Artificially Synthesized Probe
  source 1..120: mol_type = other DNA
gagttccattttaggaagggggaagttaagtcttgggctggagttcagggtagagattgggaccagatgtgttactttggaaccaaagagctgaggacaaaacctccaaggggtgggaag

SEQ ID NO: 16514 - DNA, 120 bp, synthetic construct
  misc_feature 1..120: note = Artificially Synthesized Probe
  source 1..120: mol_type = other DNA
aaaagggacatcagagttttcactttccatcaagtcattcacacccttcatcttccgactttctggactggactttttccaatacaatggaggcagtgttgcttttttctcctccaaagt

SEQ ID NO: 16515 - DNA, 120 bp, synthetic construct
  misc_feature 1..120: note = Artificially Synthesized Probe
  source 1..120: mol_type = other DNA
tttctggtttgggcatgttctgcagtctgctttgtctgctgatatttgcattctttctgtgtcaatatcaaacacaaataagcagaacgctttccaaggaaatgtacatgtgtacccaca

SEQ ID NO: 16516 - DNA, 120 bp, synthetic construct
  misc_feature 1..120: note = Artificially Synthesized Probe
  source 1..120: mol_type = other DNA
taatccgacttggaacatccaccttttcacccattccacaaatatttacgagagctggctctatgccaggccttgtttaggtgctggggatgcaacggcgaataaaagacaaaaacccct

SEQ ID NO: 16517 - DNA, 120 bp, synthetic construct
  misc_feature 1..120: note = Artificially Synthesized Probe
  source 1..120: mol_type = other DNA
taaatgacctttgacaatgtgtgtttcttgatttcaaagcaaaaagtcacataacccaaatacgactcttccacacgcagctctctcccgcagggtgtgcaagtgatgtgtttactttag

SEQ ID NO: 16518 - DNA, 120 bp, synthetic construct
  misc_feature 1..120: note = Artificially Synthesized Probe
  source 1..120: mol_type = other DNA
actttttagaaagatcttattttacttcctttgcttcgagtcaccaagcccggaatcttactgatcacagctcatgacagaaggaaacaactcaacagcgaatcatcagtgagtaaaaga

SEQ ID NO: 16519 - DNA, 120 bp, synthetic construct
  misc_feature 1..120: note = Artificially Synthesized Probe
  source 1..120: mol_type = other DNA
taacccaggtttctggacctgtcctacatcactttctgcccccagaatcactcactgccttttgataacgcctcattttacacatcggccagcacagaagtcaggatggaatcacagtga

SEQ ID NO: 16520 - DNA, 120 bp, synthetic construct
  misc_feature 1..120: note = Artificially Synthesized Probe
  source 1..120: mol_type = other DNA
gatcacggtcttctcccaagagacaaggggaggagaaaaatcctagacgctaaaatctgtatgaattagctgctttatgcttttctcaaattactgtttctttccaagagaggatcccaa

SEQ ID NO: 16521 - DNA, 120 bp, synthetic construct
  misc_feature 1..120: note = Artificially Synthesized Probe
  source 1..120: mol_type = other DNA
atcagatggttagcatcagccaagatttgtttttattaatatccaaataatgattcgagctcctacaaaataaaaatgaggctccacgcaggcagggcgggggtgagttaaattgtgcat

SEQ ID NO: 16522 - DNA, 120 bp, synthetic construct
  misc_feature 1..120: note = Artificially Synthesized Probe
  source 1..120: mol_type = other DNA
tgtccagtgcccagcagactgggaaggagaagaaaacactgtctctccaacatagtgggtctcaatcatttggtctattaaaaaatacactattacaaaattttgagatttcaccaccca

SEQ ID NO: 16523 - DNA, 120 bp, synthetic construct
  misc_feature 1..120: note = Artificially Synthesized Probe
  source 1..120: mol_type = other DNA
ctgaaaccatatcaacgagcttttcatcctcagttacattaaaatccattaatcttgagctgacatccatgacaatggcagagtaaggaactctagaacccatcccttcacaaaagcagt

SEQ ID NO: 16524 - DNA, 120 bp, synthetic construct
  misc_feature 1..120: note = Artificially Synthesized Probe
  source 1..120: mol_type = other DNA
accctggggagaacagaagaatccaatattcagcgtcaccatgttaaactattcaaaatatccagttttccacaaaaattatgaggcacgcaaaaaaaaaaaaagaaagtatggcccata

SEQ ID NO: 16525 - DNA, 120 bp, synthetic construct
  misc_feature 1..120: note = Artificially Synthesized Probe
  source 1..120: mol_type = other DNA
ttagtctcccttgcaacttgaatgagtattttactaatgggtatggttttgtaacatcatatactggtcacttgaaaaacatgagtttactgagtttgcagatcttccagacattgccac

SEQ ID NO: 16526 - DNA, 120 bp, synthetic construct
  misc_feature 1..120: note = Artificially Synthesized Probe
  source 1..120: mol_type = other DNA
acacgtcaatcaagcacacacaggcttttcttggaggtggtcattgtactctggtggacttcccatctcatcacacacaatagtaaagagatgtgtgctcaagagttgaaatttaataaa

SEQ ID NO: 16527 - DNA, 120 bp, synthetic construct
  misc_feature 1..120: note = Artificially Synthesized Probe
  source 1..120: mol_type = other DNA
ggagcccccaccaatatctctgtgcacgtcctttgtggggcatgagatcacattcacacttgctttaattattttccctcagtctctatttagttctgcaacttgtgtttgttacttaat

SEQ ID NO: 16528 - DNA, 120 bp, synthetic construct
  misc_feature 1..120: note = Artificially Synthesized Probe
  source 1..120: mol_type = other DNA
acgttatagaatatgatccattttctcactaatgtccttcctctggaccaggacccaatctgggatcacatactgtgatcattttgcatacggtgccatgaaagaaaacaggaaaataag

SEQ ID NO: 16529 - DNA, 120 bp, synthetic construct
  misc_feature 1..120: note = Artificially Synthesized Probe
  source 1..120: mol_type = other DNA
ggggtgctctctgaaccttttctagttctgagggctgcctgactggagagttgttctttgctcagatagactcttgtttaatttaccgaaaatttctcttttaatggtattatgtatcgg

SEQ ID NO: 16530 - DNA, 120 bp, synthetic construct
  misc_feature 1..120: note = Artificially Synthesized Probe
  source 1..120: mol_type = other DNA
atttataatatggatgacattttaaccagaaataaatactcgagaaaattggtcaccaagagtctggaatcactcgtcgaggctaccagtgaggacttgcttcagtgtttgtgctctgtc

SEQ ID NO: 16531 - DNA, 120 bp, synthetic construct
  misc_feature 1..120: note = Artificially Synthesized Probe
  source 1..120: mol_type = other DNA
aaaacacagagacaaggctaaaccaccaccttctatctcaggagatgagccttacaccaaaataagaagttattgtgtaattgaaagtcaatcaatgcaattcattatattaacacccca

SEQ ID NO: 16532 - DNA, 120 bp, synthetic construct
  misc_feature 1..120: note = Artificially Synthesized Probe
  source 1..120: mol_type = other DNA
ttggaagccttaacatagtaaagatgggaattctccccaagttggttcagtgcaaattagtcaaaatctcagtagcatttctttgtagatatagataaattgatctaaacttatacagaa

SEQ ID NO: 16533 - DNA, 120 bp, synthetic construct
  misc_feature 1..120: note = Artificially Synthesized Probe
  source 1..120: mol_type = other DNA
ccaacctagttaaaaaagaagcaaatgacttgaagtgacacctgaccagagcatctacactcacatgaaaagctgctaccatcattagctataaagaaaatgcaagttgcaaccacaatg

SEQ ID NO: 16534 - DNA, 120 bp, synthetic construct
  misc_feature 1..120: note = Artificially Synthesized Probe
  source 1..120: mol_type = other DNA
taatttaagaaggaaaataaatgaaaagtaaacacgggtaatcgagttttaaatgtagagactctggaaaagcagataagtcgttattttgcatcggggcatggcagcgagaactcggca

SEQ ID NO: 16535 - DNA, 120 bp, synthetic construct
  misc_feature 1..120: note = Artificially Synthesized Probe
  source 1..120: mol_type = other DNA
acttaaaattgtaagtggataaatgggtcacatgagggagctcctgtgtggagatggagcagttctgtatcttgatggtggtattgttacacaaatctacacatgggctaaaaatgcaaa

SEQ ID NO: 16536 - DNA, 120 bp, synthetic construct
  misc_feature 1..120: note = Artificially Synthesized Probe
  source 1..120: mol_type = other DNA
cattatacaaagctggagtttaacagaggcgaggggaaaacacacaggggtggatggtttctggatctcaaagactgagacttcagaatgaagagttaggattagccttttttttttttt

SEQ ID NO: 16537 - DNA, 120 bp, synthetic construct
  misc_feature 1..120: note = Artificially Synthesized Probe
  source 1..120: mol_type = other DNA
caagctagacgtgtcttctattgcctttatgaacatttagtaccaaatgacaatgttcccgcccacagtcggcacgcctagaaagacactgaggagacagtaatgtacagacgacatatt

SEQ ID NO: 16538 - DNA, 120 bp, synthetic construct
  misc_feature 1..120: note = Artificially Synthesized Probe
  source 1..120: mol_type = other DNA
tttgctaaccatgcttctagagtgtccccaagctgatgatctgtgttgctacttggctggtcagccgtgctttcaaactttgttcttagataattgaaatcataagaagcatttcctctg

SEQ ID NO: 16539 - DNA, 120 bp, synthetic construct
  misc_feature 1..120: note = Artificially Synthesized Probe
  source 1..120: mol_type = other DNA
ctctaaaagggaagggagagaaggccagttagacttgtcagaggtcagtgctgaggatacacacagaatgtaagatgctgtttgtctgttcatgtgctttttattaaaacataggcagga

SEQ ID NO: 16540 - DNA, 120 bp, synthetic construct
  misc_feature 1..120: note = Artificially Synthesized Probe
  source 1..120: mol_type = other DNA
gccctccccactgccatatgtgcaagaaataaaagctaaagatgtctgaccatacacactacatcaaataaaccgcttcactgtctgcctttttgtttttgcggaattgtgtttttttgt

SEQ ID NO: 16541 - DNA, 120 bp, synthetic construct
  misc_feature 1..120: note = Artificially Synthesized Probe
  source 1..120: mol_type = other DNA
atgtggccggtgccattcgctttgtatttctgtcttctttatggcttatttcattccacggtagaaatccaggagcagagaaagcctgaatgtgaaaattctctctctgcgaattttaaa

SEQ ID NO: 16542 - DNA, 120 bp, synthetic construct
  misc_feature 1..120: note = Artificially Synthesized Probe
  source 1..120: mol_type = other DNA
aaatattgaaaaagccaaatacagttaaggaaattgtgcctatttcaacagcagcagcactgggactgagaagtccattcagaaaaatacagattcctctctttgcagatctgagcagct

SEQ ID NO: 16543 - DNA, 120 bp, synthetic construct
  misc_feature 1..120: note = Artificially Synthesized Probe
  source 1..120: mol_type = other DNA
atgctaaaagtcgaacagtcttcacttttaaataaacaatcggctatgttgagcatttgagacatagttaagtacacacacttaggtagggaggtggctttgtgatcaggcacaccagtc

SEQ ID NO: 16544 - DNA, 120 bp, synthetic construct
  misc_feature 1..120: note = Artificially Synthesized Probe
  source 1..120: mol_type = other DNA
aatggcgagaccgtggtctgtccaccatggccagaatgcaccttccagaaagcaagttgttccacatcacaggcatttacacatgaatgtgttcccctaatttatttttattaattatta

SEQ ID NO: 16545 - DNA, 120 bp, synthetic construct
  misc_feature 1..120: note = Artificially Synthesized Probe
  source 1..120: mol_type = other DNA
gagtttgaatctagccaagtcacttgccttcaggggaactcagatgaacctacagattctacaatacatcattaatgatgtccaggacccagtaaaaaccatgagctatgaaaagaaaca

SEQ ID NO: 16546 - DNA, 120 bp, synthetic construct
  misc_feature 1..120: note = Artificially Synthesized Probe
  source 1..120: mol_type = other DNA
gcctggataacaatcaagatcccattatatggtccctaaaagaaaccctccttaaaaataaaggcacacataggttgaaagtaatagaataaaaagagatccactgtgcaaactctgatc

SEQ ID NO: 16547 - DNA, 120 bp, synthetic construct
  misc_feature 1..120: note = Artificially Synthesized Probe
  source 1..120: mol_type = other DNA
tgagcgccacactcagcctgcaaactctgatcttaagaaagctggagcggctgtaataatcagacaaaatagactctgagatgagaaatattactagcaatactagagacattgacaaga

SEQ ID NO: 16548 - DNA, 120 bp, synthetic construct
  misc_feature 1..120: note = Artificially Synthesized Probe
  source 1..120: mol_type = other DNA
ttatacatttgtccaaaccatagaatgtacaacaccaacagtgaactctcgaggaaactatggactttgggtgaaaatgctgtgttaatgcagatttcatcaactgtaacaaatgtacaa

SEQ ID NO: 16549 - DNA, 120 bp, synthetic construct
  misc_feature 1..120: note = Artificially Synthesized Probe
  source 1..120: mol_type = other DNA
atggagcctcagctcttttcttcctcaactggattttcacaaaggtgtcaaggcaattcaacagagaaagaagtcttttaaacaaatggtgatggatcaacagaatatccatattgggga

SEQ ID NO: 16550 - DNA, 120 bp, synthetic construct
  misc_feature 1..120: note = Artificially Synthesized Probe
  source 1..120: mol_type = other DNA
aagtctgacaacatccaatgttgtaagtacatggagcaactaaaactctcacacacccccatgtgtagatatgaatgatatgaccacactggaaagaggtttggcagttttctagaaagt

SEQ ID NO: 16551 - DNA, 120 bp, synthetic construct
  misc_feature 1..120: note = Artificially Synthesized Probe
  source 1..120: mol_type = other DNA
gtagagggtggtggcttcataagtttcattgcattgtgtatttactttgtggatgtttgaaatttccatgataaggagttaaacaaacacacacacaagacaccagcgatgagcaggagt

SEQ ID NO: 16552 - DNA, 120 bp, synthetic construct
  misc_feature 1..120: note = Artificially Synthesized Probe
  source 1..120: mol_type = other DNA
ttaagcaatctctcttctattcctgttcctccatatgccaaatggagctgtcacctgcctcacatagttcagatcagtatttagacaatgttttgtcatctttggtgataattggggcag

SEQ ID NO: 16553 - DNA, 120 bp, synthetic construct
  misc_feature 1..120: note = Artificially Synthesized Probe
  source 1..120: mol_type = other DNA
ccgtcattcctcacttttgggttttttttttttctcctcttgtagcaatgggctttcaaggactggagctggctccgagcttctctgaaatcaagtatcttcagaattcaaattcctttt

SEQ ID NO: 16554 - DNA, 120 bp, synthetic construct
  misc_feature 1..120: note = Artificially Synthesized Probe
  source 1..120: mol_type = other DNA
taaaaaaccaccaagtcttcatgacactttcacccagcaaatactcttttggcaggcaacctgattccactgcttctagcaataacttcaacaccacaaaacttggtttctaggaaatgg

SEQ ID NO: 16555 - DNA, 120 bp, synthetic construct
  misc_feature 1..120: note = Artificially Synthesized Probe
  source 1..120: mol_type = other DNA
tatagacaagctcacatcacacccatttgaggagaacatccactgccactgaaaccctgctctttatcctttatcttctcttgagatatggattcttttttatttgtaagtccagactct

SEQ ID NO: 16556 - DNA, 120 bp, synthetic construct
  misc_feature 1..120: note = Artificially Synthesized Probe
  source 1..120: mol_type = other DNA
gccaattttctttcacattggggtgattcaaaagataacaatgtcttctcattccctggctcaaaaaatcctcccaagaattttcaccgcatagacagtgtgtgtgctaaatcaagggat

SEQ ID NO: 16557 - DNA, 120 bp, synthetic construct
  misc_feature 1..120: note = Artificially Synthesized Probe
  source 1..120: mol_type = other DNA
tggagcttccgtctcttttctgtatataaatcgcttccccaaccccatgccaaagagaactccaaataacaacacaagcttagcttttgctttagaagtttctagaatttagttgatgct

SEQ ID NO: 16558 - DNA, 120 bp, synthetic construct
  misc_feature 1..120: note = Artificially Synthesized Probe
  source 1..120: mol_type = other DNA
agctccaaaggggatcccaggcaagtgatgagcagtggggaaaccctctctccagtcagcttgtcatgtcatacaggctttcctgacctcagcaatgcggatatgaggggcaggaataca

SEQ ID NO: 16559 - DNA, 120 bp, synthetic construct
  misc_feature 1..120: note = Artificially Synthesized Probe
  source 1..120: mol_type = other DNA
ttttgtgttctccttctcttaccagcctttctttccctctcacgtttctctccctttctgaccatgagcagggctgcagtgcagctgctgatggtcaagatgaagatggggaatgtgcca

SEQ ID NO: 16560 - DNA, 120 bp, synthetic construct
  misc_feature 1..120: note = Artificially Synthesized Probe
  source 1..120: mol_type = other DNA
ttgggggagtctttgtgtaagtcagaccttattcattttcattccaacaacactcgcagccattggatcctaattatcacatctaataaggctgatggctaatcagcttgcctttttaag

SEQ ID NO: 16561 - DNA, 120 bp, synthetic construct
  misc_feature 1..120: note = Artificially Synthesized Probe
  source 1..120: mol_type = other DNA
acaccaggaattagatcaaaaaagaaattccacttaagactaaaataagtctccagttgagagcagtctaggacatattcgaatggccagaagtttgtttcaatggggcctctgcgtttg

SEQ ID NO: 16562 - DNA, 120 bp, synthetic construct
  misc_feature 1..120: note = Artificially Synthesized Probe
  source 1..120: mol_type = other DNA
tggaaaaaagtgtgaaaacagaggagttgataccaaattaaaacgacttttggaaatatcatgtacgtatggaacaagtgcaaagggaaccactgactcagcgtcagaaatgccttgtgg

SEQ ID NO: 16563 - DNA, 120 bp, synthetic construct
  misc_feature 1..120: note = Artificially Synthesized Probe
  source 1..120: mol_type = other DNA
cctcatggagtttctattctagaccatgcgggaggataggagcatatggacagtaaacaaggtaagtgagaaaaatatgtcgtacgtcagatgacaccctatatcatatggtgacaagta

SEQ ID NO: 16564 - DNA, 120 bp, synthetic construct
  misc_feature 1..120: note = Artificially Synthesized Probe
  source 1..120: mol_type = other DNA
tcagtgtatagatgacatggctggagccatcagtgtatagagaacatgagctagagccaccagtgtatacaggatgtaggctggagtcatcagtgtataaatgacctagttaaaaccata

SEQ ID NO: 16565 - DNA, 120 bp, synthetic construct
  misc_feature 1..120: note = Artificially Synthesized Probe
  source 1..120: mol_type = other DNA
aatacttgcccccaccccatggtcccacctcaatgcctgacagaagccccactcctcaggtttatgcacatgatttgcctttttcactgctttctttttcttttctagacacagggtctt

SEQ ID NO: 16566 - DNA, 120 bp, synthetic construct
  misc_feature 1..120: note = Artificially Synthesized Probe
  source 1..120: mol_type = other DNA
aatcaagccaagtcagagatcccctcagcaagacccagggatctctgaagaaatgaaaatgaagcgaagaaagacaaaattagaaatatttattccatccgtcatctctttgcttgtctc

SEQ ID NO: 16567 - DNA, 120 bp, synthetic construct
  misc_feature 1..120: note = Artificially Synthesized Probe
  source 1..120: mol_type = other DNA
atccgagcaaaagataattttggataaaaaaatggaatgttctaactccgcctgagagatggaaagagaaacagagatgagtctgatgaaacagaactcaaatcaccctcttcctgaccc

SEQ ID NO: 16568 - DNA, 120 bp, synthetic construct
  misc_feature 1..120: note = Artificially Synthesized Probe
  source 1..120: mol_type = other DNA
aattaaagatggaaagaaggaaggctgaatggatgaaagccctctgaagcttactgtagagtggaacgatgaagacacagttgcatttctgtgtaagtcaaattctcttttttaccgtgc

SEQ ID NO: 16569 - DNA, 120 bp, synthetic construct
  misc_feature 1..120: note = Artificially Synthesized Probe
  source 1..120: mol_type = other DNA
agggaatgaaacagattgagtccctgaccatgtggggctgacccctcagggagagacagacgacaccatggacacagaacagcaggaggtgacaaatgctctgaagaaaaatacactcaa

SEQ ID NO: 16570 - DNA, 120 bp, synthetic construct
  misc_feature 1..120: note = Artificially Synthesized Probe
  source 1..120: mol_type = other DNA
tactggaaggtttagggcacagggacacaatctgacagatattttggaagtatcaacggtcaatggaagcaaacgtcagggctggacaaccaggtcagaggtgacaaagacttacgtgat

SEQ ID NO: 16571 - DNA, 120 bp, synthetic construct
  misc_feature 1..120: note = Artificially Synthesized Probe
  source 1..120: mol_type = other DNA
gacttaaatctttctgcacttccatttctttgtccataaacggagaaaatacttctatctgtgttgggtggttgtgttaaatgagaggagtcctacaaagtgtggagtttaatggccagc

SEQ ID NO: 16572 - DNA, 120 bp, synthetic construct
  misc_feature 1..120: note = Artificially Synthesized Probe
  source 1..120: mol_type = other DNA
gaaatggcctccaagcatttctcaagacttacgagatgttcaaacctacacagtcagagacaaagagctagctataagtggggtctttttcccctcctcaaaattcatcctgcagaagta

SEQ ID NO: 16573 - DNA, 120 bp, synthetic construct
  misc_feature 1..120: note = Artificially Synthesized Probe
  source 1..120: mol_type = other DNA
tatatgactaacagtgcttacctcatatgaggtgggatagacagaaagacgaaaagagaaattttcatttctgaatctcctgctgtagatggtggtccttcccaggagaatgttacttgt

SEQ ID NO: 16574 - DNA, 120 bp, synthetic construct
  misc_feature 1..120: note = Artificially Synthesized Probe
  source 1..120: mol_type = other DNA
caataaaaggaacaaacgactgacacacgcaatgacagaatgaatcccagaggcatttatgccaagtgaatgtagccagtctcaaaagctgcacaatgtatgtttccatttatacgacat

SEQ ID NO: 16575 - DNA, 120 bp, synthetic construct
  misc_feature 1..120: note = Artificially Synthesized Probe
  source 1..120: mol_type = other DNA
cagcctgaggattctaaggtgagcaggtcagatgaaagtgctgctctcagggtgccagtatccttgtcaggcaagaatacacaaggttccagatacacaaggttgttcagtagagatccg

SEQ ID NO: 16576 - DNA, 120 bp, synthetic construct
  misc_feature 1..120: note = Artificially Synthesized Probe
  source 1..120: mol_type = other DNA
gaagccccaggaggctcaacccacaggcacaatataatctgacttacatcttttaaaagagcactcttcttagattatagacagaaagagtgaatgcaggaaaaccaagacaaagacatt

SEQ ID NO: 16577 - DNA, 120 bp, synthetic construct
  misc_feature 1..120: note = Artificially Synthesized Probe
  source 1..120: mol_type = other DNA
aaaaaaatggtagacaggggaaatggaccagatgttgaatctagtttggttatagtcattgctggggattaatatagtaagaggagggtccttctctcctgaattgatgtctatcagggg

SEQ ID NO: 16578 - DNA, 120 bp, synthetic construct
  misc_feature 1..120: note = Artificially Synthesized Probe
  source 1..120: mol_type = other DNA
tttgattttttaaaatactgcattaaaacattgtgtatcttgatgactgtggatttttgtaggcactgccttaaattttgcatcccaggcgagggcctcactgcctcatgctagttctga

SEQ ID NO: 16579 - DNA, 120 bp, synthetic construct
  misc_feature 1..120: note = Artificially Synthesized Probe
  source 1..120: mol_type = other DNA
tgtgatcctctgctttagcaggacagcgtagggacttactagaggcaaaccataaaaagcatatgcctcctagtaaagtaatgctgggaaatatgacgagtcaattactctttatcatta

SEQ ID NO: 16580 - DNA, 120 bp, synthetic construct
  misc_feature 1..120: note = Artificially Synthesized Probe
  source 1..120: mol_type = other DNA
gctacactattttgcacacctaccaacagttcacatgggttcagttccaatttttccatattcttatcaacatttttctgtctttcttcttttgggtaacagtcatcgtaatgggtgtga

SEQ ID NO: 16581 - DNA, 120 bp, synthetic construct
  misc_feature 1..120: note = Artificially Synthesized Probe
  source 1..120: mol_type = other DNA
aagtaataacacacaagaatctaatcttgccggaaagggcactgtaaaagtgaattgcaagagaagctcacaggaattagatgacttctgtgtctcccctttgacagtaatggatgcatc

SEQ ID NO: 16582 - DNA, 120 bp, synthetic construct
  misc_feature 1..120: note = Artificially Synthesized Probe
  source 1..120: mol_type = other DNA
ccctccctggactctgtcagtaattcctagcaatgccttcactctaaaaaatccagctacaacaaaagattcagatgctgcagaatttattttgatttggaggtttcagctccaaatcaa

SEQ ID NO: 16583 - DNA, 120 bp, synthetic construct
  misc_feature 1..120: note = Artificially Synthesized Probe
  source 1..120: mol_type = other DNA
ccatgccagcccagcatttttttttaaaggcacagttctcataggtataagaaggcaacgaaattcatcctgcaagatggatgtagccaaagactcttctttaattacaacaaactggag

SEQ ID NO: 16584 - DNA, 120 bp, synthetic construct
  misc_feature 1..120: note = Artificially Synthesized Probe
  source 1..120: mol_type = other DNA
tcatgtctttaaaacagagcctaaaataactccaaataaataaaagggcaggtatcaaatagcccatgtaatgacaaataaccacgctagaaatctgcgtccagcaggtcagggacactc

SEQ ID NO: 16585 - DNA, 120 bp, synthetic construct
  misc_feature 1..120: note = Artificially Synthesized Probe
  source 1..120: mol_type = other DNA
gtgagccaagatcacgccattgcactacagcctgggtgacatagtgagactctgtctcaaaaaaaaaaaaaaaaaagaatacacatttctccaaagaagagctatagacagatgaaagca

SEQ ID NO: 16586 - DNA, 120 bp, synthetic construct
  misc_feature 1..120: note = Artificially Synthesized Probe
  source 1..120: mol_type = other DNA
attgaaaaaagaagatgacgctgagtgctggcaaatgccagccacgaagagaaacaatgatatagagactaaaagcattcctgcattcctcacctcaggagaagtaaaatgcaatattct

SEQ ID NO: 16587 - DNA, 120 bp, synthetic construct
  misc_feature 1..120: note = Artificially Synthesized Probe
  source 1..120: mol_type = other DNA
gggagtttctagaagattctacatccgggagtggggggaggaaaactgtggaggttggtgtctcagaaatcttaaaggatgttaaaaaagaaaaccatgattcactgaatttaaaatagg

SEQ ID NO: 16588 - DNA, 120 bp, synthetic construct
  misc_feature 1..120: note = Artificially Synthesized Probe
  source 1..120: mol_type = other DNA
tgccgcgagtgggcaaacatctcacacgtgtacacaaatatatttggacacgggtgcttactgcagcattggcggtaaagtggaaggtataaccaaaatgcctataaataaataactaag

SEQ ID NO: 16589 - DNA, 120 bp, synthetic construct
  misc_feature 1..120: note = Artificially Synthesized Probe
  source 1..120: mol_type = other DNA
ttaatgatgaaaacgtaagacttttataatgtaaaagagaagcagtcagaattatggggactacacacaggatcccaaagtcctgaaatggtcactagggaattctggggacagatcact

SEQ ID NO: 16590 - DNA, 120 bp, synthetic construct
  misc_feature 1..120: note = Artificially Synthesized Probe
  source 1..120: mol_type = other DNA
gacaaataattactctatttggtgtcccacaaatacagttagacatggcctctatcctcaagggttttgcatggatggggtgagaaagaaaaggagacatacacagataattccttacgt

SEQ ID NO: 16591 - DNA, 120 bp, synthetic construct
  misc_feature 1..120: note = Artificially Synthesized Probe
  source 1..120: mol_type = other DNA
tagccaacaacaaaacaaaaactaatgtgataccctgcaggtttcacattattgggaagccctgtaccagtctgtctcacccaatcaacagcagttttaaagaatgtatgctcatagttg

SEQ ID NO: 16592 - DNA, 120 bp, synthetic construct
  misc_feature 1..120: note = Artificially Synthesized Probe
  source 1..120: mol_type = other DNA
aggactgagacatgcattaagatatctttacccttctgagggcgtgatcatcattccaattccaccgggcttttacaaggattagaagtaatacatgtaatacaccaggcacatagtatg

SEQ ID NO: 16593 - DNA, 120 bp, synthetic construct
  misc_feature 1..120: note = Artificially Synthesized Probe
  source 1..120: mol_type = other DNA
tccagagtgtctatttggaaacaataaaagaactttgctacccctgaagtttatcccagcctcagtggtttatattttgacttgcattaaaaacgacctctcctcctgatgagaactgtt

SEQ ID NO: 16594 - DNA, 120 bp, synthetic construct
  misc_feature 1..120: note = Artificially Synthesized Probe
  source 1..120: mol_type = other DNA
tttaacagagtgaaatctttgaaaagttccaaagcaaaacaagagacaaatcaagccactgcaatgggctgggacatagaattcgggatttcatattctccactgtgtactcagctccta

SEQ ID NO: 16595 - DNA, 120 bp, synthetic construct
  misc_feature 1..120: note = Artificially Synthesized Probe
  source 1..120: mol_type = other DNA
taaagaagggtcttgagggaagagtaggattttcttcagtagaaatgacattccagagaagggataagaaagtacaagacccgtttaaagtatggcaagctcatttggagtagtgaaagg

SEQ ID NO: 16596 - DNA, 120 bp, synthetic construct
  misc_feature 1..120: note = Artificially Synthesized Probe
  source 1..120: mol_type = other DNA
ttagtctgttttcagtgggtctggaattccaaatatattttttctcaaggcaggctacatctgtctgtatgtattctgagaaggacaggagaggtgggaaaaaggccttcgtgttatttt

SEQ ID NO: 16597 - DNA, 120 bp, synthetic construct
  misc_feature 1..120: note = Artificially Synthesized Probe
  source 1..120: mol_type = other DNA
ctctgtgccctgtagaaacatctagcaaagcctatttgatactgactcctcttccttgttggtctttggtctttgtaactggataggatagcactttactcaaaataggcaatgaataaa

SEQ ID NO: 16598 - DNA, 120 bp, synthetic construct
  misc_feature 1..120: note = Artificially Synthesized Probe
  source 1..120: mol_type = other DNA
tctccactttgaaacatggactgtagcaggtgtaaatggactgacagcatttaaaatctatctgctttatgtatcatctacaggcagtggcaagtcaactgtactttttagaaagtcatg

SEQ ID NO: 16599 - DNA, 120 bp, synthetic construct
  misc_feature 1..120: note = Artificially Synthesized Probe
  source 1..120: mol_type = other DNA
gcccctgtgctaaatagcttatagaaattatttctaatatagcaaccacacgagctattattatcgatttcacagatgtcaaaccttgccccagagccactaagctaataaacggtggca

SEQ ID NO: 16600 - DNA, 120 bp, synthetic construct
  misc_feature 1..120: note = Artificially Synthesized Probe
  source 1..120: mol_type = other DNA
gagctgacattctaacaagaggacagtgataatacaataaatacgtataacttatggtgtgttatataggaataaatgctaaggagacagagaaagcagggaaggaggctgagagcaccc

SEQ ID NO: 16601 - DNA, 120 bp, synthetic construct
  misc_feature 1..120: note = Artificially Synthesized Probe
  source 1..120: mol_type = other DNA
atccaacaaaataagacctttcactacaccaggcatatgtctacatgagagaacatgagaacatgaccagcagaggagctaattgccatttaaattctagagacggagtcaaaacatctt

SEQ ID NO: 16602 - DNA, 120 bp, synthetic construct
  misc_feature 1..120: note = Artificially Synthesized Probe
  source 1..120: mol_type = other DNA
ctccagcctgggagacagagcaagactctgtctcaaacaaacaaacaaacaaacaaaaatccacaggtgcaggggccgggtttggtggcttacgcctgtaatcccagcactttgggaggc

SEQ ID NO: 16603 - DNA, 120 bp, synthetic construct
  misc_feature 1..120: note = Artificially Synthesized Probe
  source 1..120: mol_type = other DNA
catcatacattataagttgccttccgtaccacgcctgttgatgaagaagccctagtaattcaagaacttaaattcttttcctagggaggttaccataaactcttacttctctggtcagag

SEQ ID NO: 16604 - DNA, 120 bp, synthetic construct
  misc_feature 1..120: note = Artificially Synthesized Probe
  source 1..120: mol_type = other DNA
cttttagttaaggaatgagaaaaaggttccaggggtgcccccaaattcagtatgtctgggagtccattaaaaagggggtccccgggacaagtcagatctaggaatttggggtaaaaatga

SEQ ID NO: 16605 - DNA, 120 bp, synthetic construct
  misc_feature 1..120: note = Artificially Synthesized Probe
  source 1..120: mol_type = other DNA
ccaattcagaaaattcgagggtatgagtaaaagaggggtccttgggtgcccccaactcagagatctagggggttaaggtgagaagagggtccccaagcgcccccaattcagggagtttga

SEQ ID NO: 16606 - DNA, 120 bp, synthetic construct
  misc_feature 1..120: note = Artificially Synthesized Probe
  source 1..120: mol_type = other DNA
tgataggagactctcttttattgtattgggcccagtattttgaactagtttaaagattggcaaactgcggcctgcgggtcaaattctgcctgcttgggtttgtaaataaagctttattgg

SEQ ID NO: 16607 - DNA, 120 bp, synthetic construct
  misc_feature 1..120: note = Artificially Synthesized Probe
  source 1..120: mol_type = other DNA
gccaaagtccatgctcttgatcactagatgggtggttttcaaacatttttgaccacagcatacagcaggaaatacattttacctaggggctcagtccacacaaacatatctataactaaa

SEQ ID NO: 16608 - DNA, 120 bp, synthetic construct
  misc_feature 1..120: note = Artificially Synthesized Probe
  source 1..120: mol_type = other DNA
agatagatagatagatagcgcctactatttgctaggtgctagggacacaggtgtaaataaaatagataaaattcccatggccataggaaaagtgatacagtagtggcttggtgggagaag

SEQ ID NO: 16609 - DNA, 120 bp, synthetic construct
  misc_feature 1..120: note = Artificially Synthesized Probe
  source 1..120: mol_type = other DNA
agacaagcacagagtagcaaaagacaagccaacaggtggcaaattcttagagtcctgcttttgtgcggcacatttttgtaaattaaggtgacatttacataccataaaatgagccatttt

SEQ ID NO: 16610 - DNA, 120 bp, synthetic construct
  misc_feature 1..120: note = Artificially Synthesized Probe
  source 1..120: mol_type = other DNA
taaatacaagaattttttttttttttgtagagacagggtcttgatctcctgatgtcaagtgatcctccttccttggcatcccagagtactggggctacagggatgagccaccatgcatag

SEQ ID NO: 16611 - DNA, 120 bp, synthetic construct
  misc_feature 1..120: note = Artificially Synthesized Probe
  source 1..120: mol_type = other DNA
atgcataagcacacatctgaaatatctaccagccacctcagcttcctgtgaattatgagccacatttatctatgcctagcattacaactttccatctgattacagatgacttttctacct

SEQ ID NO: 16612 - DNA, 120 bp, synthetic construct
  misc_feature 1..120: note = Artificially Synthesized Probe
  source 1..120: mol_type = other DNA
aatcattttcaggatggccaactcatcctggtttccttgggactttcccacttctaaaactcaaagttgcagttccccaaaatgtaaaaagtggaattcccatgggatccagcaattcca

SEQ ID NO: 16613 - DNA, 120 bp, synthetic construct
  misc_feature 1..120: note = Artificially Synthesized Probe
  source 1..120: mol_type = other DNA
atgcccagaatcaccgatttgaaaccccagcatcaaatgattccaaggatgggtctctgtcacctcaaatagtctgtgagtaaaaaacataatttaagatgaggcattgagaaaaagtgg

SEQ ID NO: 16614 - DNA, 120 bp, synthetic construct
  misc_feature 1..120: note = Artificially Synthesized Probe
  source 1..120: mol_type = other DNA
tgcttaatagtttctccatcattttgccataagaactcattttatcttcatgataatttttgcattattagtcccatttacatataagggaactgaatgtattcactatctactgctgtg

SEQ ID NO: 16615 - DNA, 120 bp, synthetic construct
  misc_feature 1..120: note = Artificially Synthesized Probe
  source 1..120: mol_type = other DNA
gatgtgcacagcacggtattattaactctaggcataatattgtgctgcatatcttagaacttattcctctcatatagctgaaacttcatacctgttgaacagcaactccctatgggagag

SEQ ID NO: 16616 - DNA, 120 bp, synthetic construct
  misc_feature 1..120: note = Artificially Synthesized Probe
  source 1..120: mol_type = other DNA
cctcctctgcgcccttttgcagcatgcttgtatatgcagatattatttctggaaagataaaaaaatacactacggatatacataacagtagaagggaggcttaactttcatcgaagaacc

SEQ ID NO: 16617 - DNA, 120 bp, synthetic construct
  misc_feature 1..120: note = Artificially Synthesized Probe
  source 1..120: mol_type = other DNA
gaacacggaatcatttccatagcaaatacctgtgaccccgaacagccatcgaaggggcaagctgaatacacaccaagcacatttaaaagaaaaaataattttttttttcagccaaaggta

SEQ ID NO: 16618 - DNA, 120 bp, synthetic construct
  misc_feature 1..120: note = Artificially Synthesized Probe
  source 1..120: mol_type = other DNA
aggtttataaaaaacagagaaacaaaaaatttcagtaacagaagctgtcaagcatactagctgccttctttatgaaaatagagataaaaatgttcaattctgggcgggcacagtggctcc

SEQ ID NO: 16619 - DNA, 120 bp, synthetic construct
  misc_feature 1..120: note = Artificially Synthesized Probe
  source 1..120: mol_type = other DNA
ttcccatctttataaacgacattggcttcatctgcattattttaaggacatcactgtgtgaactgtaccgcttttattattatgactgttttaatagacacaggaggctgggcactgtgg

SEQ ID NO: 16620 - DNA, 120 bp, synthetic construct
  misc_feature 1..120: note = Artificially Synthesized Probe
  source 1..120: mol_type = other DNA
gagccactgtgcccggcccctcaaatttttaatagacacaattggcaagaaacgtcacgtgcacaagcaagtggtaagaaacttcaaaccattttctacaagcctttaaaaaattataac

SEQ ID NO: 16621 - DNA, 120 bp, synthetic construct
  misc_feature 1..120: note = Artificially Synthesized Probe
  source 1..120: mol_type = other DNA
acctggccactcctgttctcggccatagcagtgttacttggtactgtcaatgtccactgcattctgtcaaatgtgtgtcatttaaagaccacaagacataacaaaaattaattcgttaaa

SEQ ID NO: 16622 - DNA, 120 bp, synthetic construct
  misc_feature 1..120: note = Artificially Synthesized Probe
  source 1..120: mol_type = other DNA
tagggaaatccaggcacatatatgtattcagtaactcaatgatataaatttcagggcttgtgtctgtgtgttattggaaaagcatttgaggctggctgtcatggttcatggctgcaatct

SEQ ID NO: 16623 - DNA, 120 bp, synthetic construct
  misc_feature 1..120: note = Artificially Synthesized Probe
  source 1..120: mol_type = other DNA
agccaatcagataatgcctcattaccctgtgactataaaacctgccccaactcccagttcaaagagacagatttgagtgttttctcccattttcttgccaattggctcacattaaacctt

SEQ ID NO: 16624 - DNA, 120 bp, synthetic construct
  misc_feature 1..120: note = Artificially Synthesized Probe
  source 1..120: mol_type = other DNA
aagtcagtctttcttccctgcttctgttcaattcattctgacctcctccacccacccaggcagtgaatgctgcttactgatggagagggggccagaaacagaaatgataaggataccaga

SEQ ID NO: 16625 - DNA, 120 bp, synthetic construct
  misc_feature 1..120: note = Artificially Synthesized Probe
  source 1..120: mol_type = other DNA
acataggcttgtagctactatattggacagggtcaatttccaattttttccctgagttagtaagtcacctcgtccatgcgtaattcatcactcttttatcagctggacttttgagactta

SEQ ID NO: 16626 - DNA, 120 bp, synthetic construct
  misc_feature 1..120: note = Artificially Synthesized Probe
  source 1..120: mol_type = other DNA
attaggagatgaatgttgccaaatgaatgcttctctttccgcagctgttgcctttatgcaatgccatttctatcttcagttctttctccattaaaatgtgagccatggcctggaatgaac

SEQ ID NO: 16627 - DNA, 120 bp, synthetic construct
  misc_feature 1..120: note = Artificially Synthesized Probe
  source 1..120: mol_type = other DNA
gtgtatgtgagtgtatacgtgtgtgtcatactgtatgtaactgtgtatgtgtgcctgtgtgaattaagtgcacgtgtgattgtgcatctatatgaaggtgtatgtgagtgcatatgtgta

SEQ ID NO: 16628 - DNA, 120 bp, synthetic construct
  misc_feature 1..120: note = Artificially Synthesized Probe
  source 1..120: mol_type = other DNA
atataattgtgtgtctgtatgaggctgtgtaaccatgtgtgtgcatatacgtgtgtgggaatgaatatatgtagtcatgtgtccatatgagggtgtgtgtgagcacgtgcgtgcatatgt

SEQ ID NO: 16629 - DNA, 120 bp, synthetic construct
  misc_feature 1..120: note = Artificially Synthesized Probe
  source 1..120: mol_type = other DNA
acaaaggaacactccttgtccttttctcctggcacagcacaagattctgttgctacatctttatttactgagcatctagtatgtgctgcacctggcactgttttgtcttttttgttttga

SEQ ID NO: 16630 - DNA, 120 bp, synthetic construct
  misc_feature 1..120: note = Artificially Synthesized Probe
  source 1..120: mol_type = other DNA
tctcttcacaatggtaagtttgcatttgtttgtgtgattctaggcctcctcttattttcttgaacaggcctcatctggctttgttcatctttatgtctccagcatccagcacaatccctg

SEQ ID NO: 16631 - DNA, 120 bp, synthetic construct
  misc_feature 1..120: note = Artificially Synthesized Probe
  source 1..120: mol_type = other DNA
cacctgagtgaccagatgtcccagctccaggtgccttgccagatggccagaaccacacctcttgaagagtgacaggtgccagtggtatgggagaagggcatgcgttttcttttctttttt

SEQ ID NO: 16632 - DNA, 120 bp, synthetic construct
  misc_feature 1..120: note = Artificially Synthesized Probe
  source 1..120: mol_type = other DNA
cctgatgaccaaagctactgagcatcttgtccaggatttgtagccctttccaggctccttttttgtgaactgcctgtttacatttttcatcataaaacactgggttgtttacatttgtct

SEQ ID NO: 16633 - DNA, 120 bp, synthetic construct
  misc_feature 1..120: note = Artificially Synthesized Probe
  source 1..120: mol_type = other DNA
tttggcaacaaggattcctttctctaacttcaccccaaagcaattatcatactttaaggaagtaaacatcccctcttcatttcttcatgtcgtctgagacacagtcagtggtggagttct

SEQ ID NO: 16634 - DNA, 120 bp, synthetic construct
  misc_feature 1..120: note = Artificially Synthesized Probe
  source 1..120: mol_type = other DNA
atctgtagcttggtctggatctgctgttttgggctgctcgctttgtcctgctgattgatctactttgtgtgtgtaaactccgtaggctcattcaagttcactttacttatttttaaaatt

SEQ ID NO: 16635 - DNA, 120 bp, synthetic construct
  misc_feature 1..120: note = Artificially Synthesized Probe
  source 1..120: mol_type = other DNA
aaaaaaaggaattaacacactgagaattaaacaacctgaaggagtggtggtacaaacaccactccaaagccctcaaacagtagagtccaattaatgactatgcaaaaacccagggtagcc

SEQ ID NO: 16636 - DNA, 120 bp, synthetic construct
  misc_feature 1..120: note = Artificially Synthesized Probe
  source 1..120: mol_type = other DNA
cctttaggccctttgagttttcatgttaatattacctttaagagaagataaatgtgtggtcccatgagagtttctttcccctgggaggcttcaaaatattttctcacccacagaattgtg

SEQ ID NO: 16637 - DNA, 120 bp, synthetic construct
  misc_feature 1..120: note = Artificially Synthesized Probe
  source 1..120: mol_type = other DNA
tgtcaggttggtgagcccgagtggataaagtacccaggaatcatccatgtagatagggtgcggatatgatcatagtgatttattaacattaggctataatcattttactgtcagagctaa

SEQ ID NO: 16638 - DNA, 120 bp, synthetic construct
  misc_feature 1..120: note = Artificially Synthesized Probe
  source 1..120: mol_type = other DNA
aaagatagcatcacacacaaaggagtttggggatgctacctttatgggtccaaagggtggaatattcatctaaatccctagaaaactggccgggcacagttcacatctgtagtttcagca

SEQ ID NO: 16639 - DNA, 120 bp, synthetic construct
  misc_feature 1..120: note = Artificially Synthesized Probe
  source 1..120: mol_type = other DNA
cccagcctactgaagtaattagttaaaatgacgtcatgaggttaggtcccaatccaatgtgaccagtgtctttataaaaggaggaaatagagacgaacctgcacacacggagaatgtcat

SEQ ID NO: 16640 - DNA, 120 bp, synthetic construct
  misc_feature 1..120: note = Artificially Synthesized Probe
  source 1..120: mol_type = other DNA
tcaaaaaaaaaaaaaaaaagtagcatcccatcataggtggatgtgcaatttccttccaacacagctgcctactctaccattgccatctaccacctccccagtagaccaggttcagttgaa

SEQ ID NO: 16641 - DNA, 120 bp, synthetic construct
  misc_feature 1..120: note = Artificially Synthesized Probe
  source 1..120: mol_type = other DNA
attaaatatgtgactcttgttaatgatttacatgcaagggtgtttaagggtaaatggatgaatagctttggctcacttggaaatgcatcaaaaaatcagatggagccaggcgcggtggct

SEQ ID NO: 16642 - DNA, 120 bp, synthetic construct
  misc_feature 1..120: note = Artificially Synthesized Probe
  source 1..120: mol_type = other DNA
gacagcaggatagatgtgtgataaaatatggtaaaacgctagcagttgtagaatctaggtgttggataagaaagtatttggtatacaatccttttgactattaaaatttggcggggcggg

SEQ ID NO: 16643 - DNA, 120 bp, synthetic construct
  misc_feature 1..120: note = Artificially Synthesized Probe
  source 1..120: mol_type = other DNA
tccctctgattcatgagcctcagccactcagttcctctctgtggaagcggtcaccattgtcagttttttgtgtgtccttttgggaaataaattatgcataaatataaaatgaaattttta

SEQ ID NO: 16644 - DNA, 120 bp, synthetic construct
  misc_feature 1..120: note = Artificially Synthesized Probe
  source 1..120: mol_type = other DNA
tagaaattagtcggtgtaactaggcattaataaaaacacactctgtccacaataaagccagccttttggttactgaaatacttggcatctcattctgaaggaccagcaggcaaatgcctt

SEQ ID NO: 16645 - DNA, 120 bp, synthetic construct
  misc_feature 1..120: note = Artificially Synthesized Probe
  source 1..120: mol_type = other DNA
acacctttcaagatagctattctttaaaaaatagcaaaacacaacacgtgttggggaggatatggagaagctggaacccttgtgcagtgctggtggaaatgtaaaatggtgccgccactg

SEQ ID NO: 16646 - DNA, 120 bp, synthetic construct
  misc_feature 1..120: note = Artificially Synthesized Probe
  source 1..120: mol_type = other DNA
taaatggtgtgttatgtagagggaggtaaacaaacctcccgtagtcataaaaattaaaaatattacacctcagattttaggctcaatgctgtctcccaccccgtgtggctacttttgttt

SEQ ID NO: 16647 - DNA, 120 bp, synthetic construct
  misc_feature 1..120: note = Artificially Synthesized Probe
  source 1..120: mol_type = other DNA
agacaaaataataattgtagatagcatttagaggtttctgattatgtgcagaagcattgtgctccacgtgtatgatcctgtaaaacctcacgacagcaatgtgaagtgggtcctatcatc

SEQ ID NO: 16648 - DNA, 120 bp, synthetic construct
  misc_feature 1..120: note = Artificially Synthesized Probe
  source 1..120: mol_type = other DNA
ccattaatataccaattattgctggtcactcttacctatatgatatcattgactgctcatggtagccctttgaggtaggtgccatcatgatcccaagtaataatgatggtgacgataatc

SEQ ID NO: 16649 - DNA, 120 bp, synthetic construct
  misc_feature 1..120: note = Artificially Synthesized Probe
  source 1..120: mol_type = other DNA
tctcatcatcgagactaacaccaccctaatatgttatattctattttccaaatttttatgagcatatactacccctgtcttacagtgagttgaaatatatatatattttgaggccgggtg

SEQ ID NO: 16650 - DNA, 120 bp, synthetic construct
  misc_feature 1..120: note = Artificially Synthesized Probe
  source 1..120: mol_type = other DNA
ctgctattttgtattctgtatgaatgagcaggaaagcacacatctccatgcctcacagggctgttataaagattcaataagaggatgcttcataaacccttagcacagtgcttagcaaat

SEQ ID NO: 16651 - DNA, 120 bp, synthetic construct
  misc_feature 1..120: note = Artificially Synthesized Probe
  source 1..120: mol_type = other DNA
ctataaaatgcggtgttctaagtgttccatgacctgttgtcatagtgacatcataggagctgtcacttatcatcattgtcatttttgttgtcttcatcattgttaagttggggaggaagg

SEQ ID NO: 16652 - DNA, 120 bp, synthetic construct
  misc_feature 1..120: note = Artificially Synthesized Probe
  source 1..120: mol_type = other DNA
aatttttttgtatgttttagtagaaacggggtttcaccgtgttagccaggatggtcttgatctcctgacctcgtgatccgcccgccttggcctcccaaagtgctgggattacaggcgtga

SEQ ID NO: 16653 - DNA, 120 bp, synthetic construct
  misc_feature 1..120: note = Artificially Synthesized Probe
  source 1..120: mol_type = other DNA
ctatttcttgcctaagttctatcccttcctgtttcatttttttctagtgtcctgctgtctcttccctgagtgcttgtatgtttgctttgtgttcttcctttctagctgtgtttgcttcat

SEQ ID NO: 16654 - DNA, 120 bp, synthetic construct
  misc_feature 1..120: note = Artificially Synthesized Probe
  source 1..120: mol_type = other DNA
cagtgaaatacaacactttctcctgcctggcttcctttgactcctaattcctgacttggttcaggaaggacagacctccacctctggcctagagcttttaaaaattcttttcttttttct

SEQ ID NO: 16655 - DNA, 120 bp, synthetic construct
  misc_feature 1..120: note = Artificially Synthesized Probe
  source 1..120: mol_type = other DNA
agaggcgtggttatgattagcaaaatggatgttgcaagtaactttttcattggattggctagaagtgtcatagagagaccccatcccgctttctttggcatgaacagagtataaaaatct

SEQ ID NO: 16656 - DNA, 120 bp, synthetic construct
  misc_feature 1..120: note = Artificially Synthesized Probe
  source 1..120: mol_type = other DNA
aaaaaaaaaaaaagaggctagagttgctggagagagcttacttaggacatctaacccagctttagtctttcccagggctgggttgccatgaagcccacagggaactttctttcagattcc

SEQ ID NO: 16657 - DNA, 120 bp, synthetic construct
  misc_feature 1..120: note = Artificially Synthesized Probe
  source 1..120: mol_type = other DNA
catttttcccttctggcatgaagggactgattaatgaacagtgtctgttctggctaattactgctgggcaacaaatcaccaccaaaactggtggctaaaaaaaatcagtcattttgttat

SEQ ID NO: 16658 - DNA, 120 bp, synthetic construct
  misc_feature 1..120: note = Artificially Synthesized Probe
  source 1..120: mol_type = other DNA
gtagtatcacccctggttgaagacgctaatttataggggagagtcacatagaagggcatctactcctctgcaagggagagtagaacctaccattttaagattctgtttaggctgggcaca

SEQ ID NO: 16659 - DNA, 120 bp, synthetic construct
  misc_feature 1..120: note = Artificially Synthesized Probe
  source 1..120: mol_type = other DNA
aagaaagaaaaagatttagtttaggacccagaaatgagcaaaaacgaatgagactgagaaagtggactgtgacatttgggaaggaaaatggccgagtaagacaatgaactgtgccagttg

SEQ ID NO: 16660 - DNA, 120 bp, synthetic construct
  misc_feature 1..120: note = Artificially Synthesized Probe
  source 1..120: mol_type = other DNA
tgcatcaattatcaataaggatgcctttggtcgtaagtgacaaaagtctgaccccaaatggcttaagcaacaaacaaacaaaaagataatctgttggaccatgcaactacagttcagggc

SEQ ID NO: 16661 - DNA, 120 bp, synthetic construct
  misc_feature 1..120: note = Artificially Synthesized Probe
  source 1..120: mol_type = other DNA
gtgcagtgattgagatcaaggaatgctggccatgtcaaaagcagaaaaatgtctggcagggtatgcacccagcagacaatgattcctctgtgtgagtcaggaaggttgtgtgtgtgtgtg

SEQ ID NO: 16662 - DNA, 120 bp, synthetic construct
  misc_feature 1..120: note = Artificially Synthesized Probe
  source 1..120: mol_type = other DNA
gtttttaaatgaagaatttctataaaagcattcttataaatgcttccctgccccccctcagcctagggtaatagttaccagcacacactggtgtctgaccacctcagtgttggaatcctg

SEQ ID NO: 16663 - DNA, 120 bp, synthetic construct
  misc_feature 1..120: note = Artificially Synthesized Probe
  source 1..120: mol_type = other DNA
aataaatcacgggagtacaaattaaaagttcagacattacagaagcccttggactcaattgtatgatgcatgatagagaaaaattatttttggcccagtctccatcatcgctcccctgga

SEQ ID NO: 16664 - DNA, 120 bp, synthetic construct
  misc_feature 1..120: note = Artificially Synthesized Probe
  source 1..120: mol_type = other DNA
gccaatattagtcctttaattgatgcacagttgcaaatattttctcctattctgtaggttgtctttactctgttaattgtttcttttgctgtgcagaagctcttaagtcccaattgtcca

SEQ ID NO: 16665 - DNA, 120 bp, synthetic construct
  misc_feature 1..120: note = Artificially Synthesized Probe
  source 1..120: mol_type = other DNA
tttcttgcttgtgcctgattgctctggctaggacttctagtactatgttgaatagcagtggtgaaagtggatatccttgtcttgtttcagttcttagagggaatgcttccaacttttccc

SEQ ID NO: 16666 - DNA, 120 bp, synthetic construct
  misc_feature 1..120: note = Artificially Synthesized Probe
  source 1..120: mol_type = other DNA
agatctttctccatccctttactttgagcctctgagtgtcattacatgtgagatgggtctcttgaaggcagcagcaggttgggtcttatttattattattttttatcaaatttgtcactc

SEQ ID NO: 16667 - DNA, 120 bp, synthetic construct
  misc_feature 1..120: note = Artificially Synthesized Probe
  source 1..120: mol_type = other DNA
tatgtcatttcaaacatttcagtctgatgaggacccattgctagagaactggtgagattctttggaggtgttgaaacactctggctttttctactgccagatttcttgcactgattcctt

SEQ ID NO: 16668 - DNA, 120 bp, synthetic construct
  misc_feature 1..120: note = Artificially Synthesized Probe
  source 1..120: mol_type = other DNA
atttttgtttggtggtgcagtgcaggatgcagtccagtagatcgcacttaaaagttagaaccagcaggtaggctggtgccaagtaggcatgcataccctgatggaggtagcaggaagaga

SEQ ID NO: 16669 - DNA, 120 bp, synthetic construct
  misc_feature 1..120: note = Artificially Synthesized Probe
  source 1..120: mol_type = other DNA
tgtcagtcaaaacaaatcactggaccaattctgtctcaaaggaaagagaaacaaattccacctcagaatgggaggagtagcagagaatctgcagctctgtttaatctaccacatatacat

SEQ ID NO: 16670 - DNA, 120 bp, synthetic construct
  misc_feature 1..120: note = Artificially Synthesized Probe
  source 1..120: mol_type = other DNA
tcatcctgagcccagggaaagaagtggaactagccttgagggatattttgggctgactgctttatgtcctttactgcagttaaccattccttctatttcctcattcattcaagaaaaatt

SEQ ID NO: 16671 - DNA, 120 bp, synthetic construct
  misc_feature 1..120: note = Artificially Synthesized Probe
  source 1..120: mol_type = other DNA
ctactcctaaagctgcctgctaaattttgcaactcctcctaacttcaggcaagttagttaaggactctgtgcttctgttttcacataattctccctgattaaaaaaaccgttagacctag

SEQ ID NO: 16672 - DNA, 120 bp, synthetic construct
  misc_feature 1..120: note = Artificially Synthesized Probe
  source 1..120: mol_type = other DNA
aaaaatttaaaaataaaatggcccttctatgagggtgaggcaccttggattgtcccttatgttacagatcacgtggattgcaggagcagtgacaaaggactttaaactgacagacaagca

SEQ ID NO: 16673 - DNA, 120 bp, synthetic construct
  misc_feature 1..120: note = Artificially Synthesized Probe
  source 1..120: mol_type = other DNA
tataccaccttttcttgacttataccctttaagtattatcttttgcctttctattgtggtgaggatttagctcccttcctctcccgtcttctcatttctccttccccattctctcaacat

SEQ ID NO: 16674 - DNA, 120 bp, synthetic construct
  misc_feature 1..120: note = Artificially Synthesized Probe
  source 1..120: mol_type = other DNA
tccctttttcccactcctgggttggatcccctattttctggggtctttgccttcttttttggattattccttgatttagctggatatcattcattggtaggttttgcaaagtagttatgt

SEQ ID NO: 16675 - DNA, 120 bp, synthetic construct
  misc_feature 1..120: note = Artificially Synthesized Probe
  source 1..120: mol_type = other DNA
ccacactctccatcaagcaggctaaatcttagggcctttgcacgtgcttctagaaggttctttctcttgttctttgcagggctgactcttctttgtcacttagctctctgctaaatattt

SEQ ID NO: 16676 - DNA, 120 bp, synthetic construct
  misc_feature 1..120: note = Artificially Synthesized Probe
  source 1..120: mol_type = other DNA
catttacatatcttctttggaaaaagaaatctgttcaaatagtttgcccatataaaaatgtggttgctctttctgtgctagcatgactagtaaaaagaaaagtaaaagccaggcacggcg

SEQ ID NO: 16677 - DNA, 120 bp, synthetic construct
  misc_feature 1..120: note = Artificially Synthesized Probe
  source 1..120: mol_type = other DNA
acagttgtgtaatattccactgcatgcttggaccacagtttctttagccaaccctttgtcattgaacctgtaagctgtttccattctgttacaaaacagtgttgcaaagaacgtcttgaa

SEQ ID NO: 16678 - DNA, 120 bp, synthetic construct
  misc_feature 1..120: note = Artificially Synthesized Probe
  source 1..120: mol_type = other DNA
accttggtaagtactctaaaggaggtaaaacctactgtcttcattggagtgcctcaaatttgggagaagatacatgagatggtgaagaaaaatagtgccaagtccatgggcttgaagaag

SEQ ID NO: 16679 - DNA, 120 bp, synthetic construct
  misc_feature 1..120: note = Artificially Synthesized Probe
  source 1..120: mol_type = other DNA
ctccccatctgagagctgtcagtcatagaatcttctggttgtgtctctccctgactccctccttttagcatgggtgaggtttgaaaaaatcttttcatacatgtgtttatttattaaatt

SEQ ID NO: 16680 - DNA, 120 bp, synthetic construct
  misc_feature 1..120: note = Artificially Synthesized Probe
  source 1..120: mol_type = other DNA
tgccgtacttaaaattagctgtcctaatcactgcagagaggtctacctgttttctttaaaatgagggttttgttcctatctttaagccaaaggcatttttttctttgccggcatatgtgg

SEQ ID NO: 16681 - DNA, 120 bp, synthetic construct
  misc_feature 1..120: note = Artificially Synthesized Probe
  source 1..120: mol_type = other DNA
ccagcccagaggaaaactcagtaagagaaggataaagaaattccttgtgacatcattttggcacctggatccagccatatctgaaagccaaagaccttttgaacttttcagttatattga

SEQ ID NO: 16682 - DNA, 120 bp, synthetic construct
  misc_feature 1..120: note = Artificially Synthesized Probe
  source 1..120: mol_type = other DNA
gaaatccttatcactgctggtggtgaaaatgtgccccccattcctgttgagaccttggttaagaagaagatccccatcatcagtaacgccatgttagtaggagataaactgaagtttctg

SEQ ID NO: 16683 - DNA, 120 bp, synthetic construct
  misc_feature 1..120: note = Artificially Synthesized Probe
  source 1..120: mol_type = other DNA
tcttggaaataaaatccaacctccttactatagctctatacaatctctcgcctgctgacctttcattcactctgcaccaactctatgggctttcttgatgttcctgcagctctctgggct

SEQ ID NO: 16684 - DNA, 120 bp, synthetic construct
  misc_feature 1..120: note = Artificially Synthesized Probe
  source 1..120: mol_type = other DNA
tgtcttctttaaagcatcagaacatgaaattagtctctgtatgttttatttttgcctctcttcccccatgagggaagggctcactccagagtggggatactggattctactaatgtactt

SEQ ID NO: 16685 - DNA, 120 bp, synthetic construct
  misc_feature 1..120: note = Artificially Synthesized Probe
  source 1..120: mol_type = other DNA
agtccacatcaggcacagaatgcaccatgctcttcaccttccagctcacagaatcctcaccacagctgaaggatcacatggaagttttatcatccccatacagatggcaaaagttacaca

SEQ ID NO: 16686 - DNA, 120 bp, synthetic construct
  misc_feature 1..120: note = Artificially Synthesized Probe
  source 1..120: mol_type = other DNA
tctatttgtttctagaaagtaggaggcaatgaatcccaaatgtctcattgggtcttatttggagaaggcctttgtcagaaactttagtggagaaagttctacttgccaggaactcaagga

SEQ ID NO: 16687 - DNA, 120 bp, synthetic construct
  misc_feature 1..120: note = Artificially Synthesized Probe
  source 1..120: mol_type = other DNA
accttcatttgttgatgtcttgtgggtgggcccagcagttcaacgtaccacattcataattcttcatctttcacaagatttccaatttcactttccagttgaatgagaaaccattggaca

SEQ ID NO: 16688 - DNA, 120 bp, synthetic construct
  misc_feature 1..120: note = Artificially Synthesized Probe
  source 1..120: mol_type = other DNA
ccttccaataagtcctgataataaagcacttcagggtcccatgtcttgatttttggcttgatagaaatactttgtcctttatttagtgtgatggggagggcttggactctgaaatcagtt

SEQ ID NO: 16689 - DNA, 120 bp, synthetic construct
  misc_feature 1..120: note = Artificially Synthesized Probe
  source 1..120: mol_type = other DNA
atatccaaaccacatcaatggccctcctcaactatttggcgggcttttactttttaatgagttagtacagttggtcctcactatctgccaattccatatttgcaaatttgcctcatcgct

SEQ ID NO: 16690 - DNA, 120 bp, synthetic construct
  misc_feature 1..120: note = Artificially Synthesized Probe
  source 1..120: mol_type = other DNA
cctcatcaaggaaatacaaatggttgatcatgtcaagtgagggaagctcgaatacaggagaggaatgtatgtattttctataatgattctcaccctggtctcactgttctcttaatgttc

SEQ ID NO: 16691 - DNA, 120 bp, synthetic construct
  misc_feature 1..120: note = Artificially Synthesized Probe
  source 1..120: mol_type = other DNA
cttgtgaatcatgcttctatgtatatgggtccatggcatggttcagggtccatggcaaaaacgcactcaacgcccagaaaagaaaccatgggtgtataaatatctcttcacgcccctgct

SEQ ID NO: 16692 - DNA, 120 bp, synthetic construct
  misc_feature 1..120: note = Artificially Synthesized Probe
  source 1..120: mol_type = other DNA
aaaaaaaaaaaaagaaggtagagcccagagtgggcactgccttcccaatgacaggggcatgaaaatatgttgtggatgggagggagggactgggagcccacatacctcagctcctcctgg

SEQ ID NO: 16693 - DNA, 120 bp, synthetic construct
  misc_feature 1..120: note = Artificially Synthesized Probe
  source 1..120: mol_type = other DNA
aactagatgcccccagacagtgacaaggaaaacaaagatactttgaagaccatgtcctcggacagattcagagtccacgacagaaaggcactcaacacccaggaaagaaaaacagagttt

SEQ ID NO: 16694 - DNA, 120 bp, synthetic construct
  misc_feature 1..120: note = Artificially Synthesized Probe
  source 1..120: mol_type = other DNA
tctgcttgctggtgggtttcctgctgaactcctctctgggtcagtgcgtctcactgtccacctgtccctgcatccccttctgtgcctcgctggtcatctttctcccttggcaatccactt

SEQ ID NO: 16695 - DNA, 120 bp, synthetic construct
  misc_feature 1..120: note = Artificially Synthesized Probe
  source 1..120: mol_type = other DNA
tgggtatggaggtttcttgaagacctagaacatagaagaatgcctagttaaaaaaaaaaatcaatgaaactacgagttttaggccaaatctgagaaaagaccaaagatgactatgtttgg

SEQ ID NO: 16696 - DNA, 120 bp, synthetic construct
  misc_feature 1..120: note = Artificially Synthesized Probe
  source 1..120: mol_type = other DNA
gttgtaaagccccttcccacagggatattattaataattgcgtaacgtgttcacctctcggaaaggagcaaaactttgctcagatcccagaattaacctgatttttttttttttttctga

SEQ ID NO: 16697 - DNA, 120 bp, synthetic construct
  misc_feature 1..120: note = Artificially Synthesized Probe
  source 1..120: mol_type = other DNA
tgctaaaaactaaaaaaaaaattcctactgaaaaaactgtcatcatttcacatttctggctacgttagtgcaaaagggaataaataaaggtgagatttctgtgacagtgtggatatggta

SEQ ID NO: 16698 - DNA, 120 bp, synthetic construct
  misc_feature 1..120: note = Artificially Synthesized Probe
  source 1..120: mol_type = other DNA
acattctggctttgtcctcacatggtgtcaggggctagctaattccctggggcttctttcataagtgcactaatctctgtcctgagggtagagccctcgtaacctgattgactcccaaaa

SEQ ID NO: 16699 - DNA, 120 bp, synthetic construct
  misc_feature 1..120: note = Artificially Synthesized Probe
  source 1..120: mol_type = other DNA
cttctttgtaaagtagctctgagtcttgcagtgtctatccctaatcatgggaaaacatcaaacaaacccatacagcgggacatctgacaaagtaccaagtgtcaaggatcatggattgaa

SEQ ID NO: 16700 - DNA, 120 bp, synthetic construct
  misc_feature 1..120: note = Artificially Synthesized Probe
  source 1..120: mol_type = other DNA
acccaacaacaacaaaaccagcaaacaagaaaactaaacaggctttaaggaaagagcaatctaattatctgattatatgactggcactaagatgggaatgactctggcctaatttcttca

SEQ ID NO: 16701 - DNA, 120 bp, synthetic construct
  misc_feature 1..120: note = Artificially Synthesized Probe
  source 1..120: mol_type = other DNA
ctagtggctactgtgttagagcagttctagaacaaaggagtccctttaaaactattttgaagtcatcgtctataaggcaatatgaaagctgatctgaatgatttctccttttccaggaaa

SEQ ID NO: 16702 - DNA, 120 bp, synthetic construct
  misc_feature 1..120: note = Artificially Synthesized Probe
  source 1..120: mol_type = other DNA
ttttgtctacacactagacatctaaagcaaccaaccatagttaacaagcagtgctcttaccaaaaggtaactctttctagaatctggcacaccatttaatatcagtatgagcatatggtg

SEQ ID NO: 16703 - DNA, 120 bp, synthetic construct
  misc_feature 1..120: note = Artificially Synthesized Probe
  source 1..120: mol_type = other DNA
agctgagaccatgccactgtactccagcctggcaacagagcgacactcgtctcaaaaaaaaaaaaaaaaaaaaaaagtctcttttggccaggtgtggtggctcacacctgaaatctcagc

SEQ ID NO: 16704 - DNA, 120 bp, synthetic construct
  misc_feature 1..120: note = Artificially Synthesized Probe
  source 1..120: mol_type = other DNA
tatgtcgtccaataactcacaactatgtaatttatttcctttttacagataaagaaatgggggctcagagcagtcaagaacatgccccaagttattcgtcagtgaggcggaaattgtggt

SEQ ID NO: 16705 - DNA, 120 bp, synthetic construct
  misc_feature 1..120: note = Artificially Synthesized Probe
  source 1..120: mol_type = other DNA
cgaaaaaccattagctcaaagacacttgcaaacttgtatcaggttgttttccttggtctgtattaagtttgaagcaaaggggattttcacataccaagacgaagcagaagtcttccacca

SEQ ID NO: 16706 - DNA, 120 bp, synthetic construct
  misc_feature 1..120: note = Artificially Synthesized Probe
  source 1..120: mol_type = other DNA
ctatccagggttagctctgttcctccttcttgtggcatctgtgtttctctttctgctctgcctctccccatctcctagtccaaacatccaaagaaattaattacctccaggagatcgaga

SEQ ID NO: 16707 - DNA, 120 bp, synthetic construct
  misc_feature 1..120: note = Artificially Synthesized Probe
  source 1..120: mol_type = other DNA
caacctaatagggaccaaccatggaaggccagtagtaaaggagtttgaagttccctttcagaaaccaattaacaaccccaaagagacagtgtgtaacataaaagagctgccataaaaata

SEQ ID NO: 16708 - DNA, 120 bp, synthetic construct
  misc_feature 1..120: note = Artificially Synthesized Probe
  source 1..120: mol_type = other DNA
catgaatcaccacacctggccttgaaacattatttttaaagcctaaattccagttggtatggtaccaaaatttagtttaacttcaaaattcacagtactgccgagaaatgggcgggtcct

SEQ ID NO: 16709 - DNA, 120 bp, synthetic construct
  misc_feature 1..120: note = Artificially Synthesized Probe
  source 1..120: mol_type = other DNA
aaatttctcaatgtaaaatctatattttagaaccactctacaatataagcaaataatgtcttttttactgatcacatgccttttttgttgggtggggggggttctttttttttttttttt

SEQ ID NO: 16710 - DNA, 120 bp, synthetic construct
  misc_feature 1..120: note = Artificially Synthesized Probe
  source 1..120: mol_type = other DNA
tgcttttttcagtgtcatataagtagaatcacactgtacatagtattttgagtctgacctctgtcaactggcataatgcatttgagaattatccatgttgctgtactggcagtgcattct

SEQ ID NO: 16711 - DNA, 120 bp, synthetic construct
  misc_feature 1..120: note = Artificially Synthesized Probe
  source 1..120: mol_type = other DNA
caagtgaggtaaccttgttcccaggaataaagagaaccagatgactataaacatttccctaaactgaaatgcactgttgtatgttcacctgcaatgaatggtgtaagctgaatataagat

SEQ ID NO: 16712 - DNA, 120 bp, synthetic construct
  misc_feature 1..120: note = Artificially Synthesized Probe
  source 1..120: mol_type = other DNA
tgggggcagggtgaattaacatttgtgatgcaaggagaagagcaatctatacttaccactgtctatttgacattgtttggggactactgctacactctaagtcattttaccttataacgc

SEQ ID NO: 16713 - DNA, 120 bp, synthetic construct
  misc_feature 1..120: note = Artificially Synthesized Probe
  source 1..120: mol_type = other DNA
tagaacttcgattagtaaaaacatgtttgatgtcttttcccactcttgttttttgtttctcccatgctgaattctgtgtaatttcttttgaactatcttgtagtttactttttttttttt

SEQ ID NO: 16714 - DNA, 120 bp, synthetic construct
  misc_feature 1..120: note = Artificially Synthesized Probe
  source 1..120: mol_type = other DNA
tagtctcttttagaacttctaaatcaatggacccttaacttataggagccacctggacgttagcaacatctacattaaacatgctgagcttttaaaagagggctgttagacatgctgagt

SEQ ID NO: 16715 - DNA, 120 bp, synthetic construct
  misc_feature 1..120: note = Artificially Synthesized Probe
  source 1..120: mol_type = other DNA
ttgtccaccatcccacctaattgcacctggatcttcctatttataggcaattggaacaagctcagtgttaccctgtaatgattaaaacccaaatatagaactgctatagcataaatgacc

SEQ ID NO: 16716 - DNA, 120 bp, synthetic construct
  misc_feature 1..120: note = Artificially Synthesized Probe
  source 1..120: mol_type = other DNA
gaattcagttaactatagcagttgtatatgaagcatttcaaagaagttaatgacatcacagtattaaatccatctgacatggaaaccaactctaactacatcatagtttttttttttttt

SEQ ID NO: 16717 - DNA, 120 bp, synthetic construct
  misc_feature 1..120: note = Artificially Synthesized Probe
  source 1..120: mol_type = other DNA
ctgcatatgaaccaagtgttgggctatatgactccactgtcctaagctatttggggttggaaggaagaggggtgaagtagaaaggcaacaagctaatacaagaggagaaaaagtagatga

SEQ ID NO: 16718 - DNA, 120 bp, synthetic construct
  misc_feature 1..120: note = Artificially Synthesized Probe
  source 1..120: mol_type = other DNA
gtcatgatatatacaatttactgaaaataactgaattcggctttaaaataatctgacaaggatagctagtggccttgcacagtggcaggacagatctattaggagcagcaaagtacaggg

SEQ ID NO: 16719 - DNA, 120 bp, synthetic construct
  misc_feature 1..120: note = Artificially Synthesized Probe
  source 1..120: mol_type = other DNA
aaaaaaaaaaaaaaaaggcaatatttctcaccatcaggaatctaatataaagatcaagacgttatagatgcatctgcaatgtgaatttttaaacttgggtacatgtgtatggagggtcca

SEQ ID NO: 16720 - DNA, 120 bp, synthetic construct
  misc_feature 1..120: note = Artificially Synthesized Probe
  source 1..120: mol_type = other DNA
cattattcaaactttacagacgatgaaacaggctcacagttgacaggtaatttttgcagaaatcacaaagtcaaattggcttctggagtctgctgctctatcatgatgcctccatgtcac

SEQ ID NO: 16721 - DNA, 120 bp, synthetic construct
  misc_feature 1..120: note = Artificially Synthesized Probe
  source 1..120: mol_type = other DNA
agacagtgaaattaaagaagaagaacatatttagacagagtaacagaccaagtttagtttcgggagaattaagcagctgctctaaagactgtgtgtatgtgctggcggaagacacagact

SEQ ID NO: 16722 - DNA, 120 bp, synthetic construct
  misc_feature 1..120: note = Artificially Synthesized Probe
  source 1..120: mol_type = other DNA
gcaatttttcaggattaggtatttcagattgctgcatacttcttgaaacacacttgctgaaatctgcttggtagacatcctcaatcactgcccttatacctttacctctgcagcttcgta

SEQ ID NO: 16723 - DNA, 120 bp, synthetic construct
  misc_feature 1..120: note = Artificially Synthesized Probe
  source 1..120: mol_type = other DNA
agatactgggtacggctgaactaaaactccaactaattgtaaatgtgaaagcaaagaagctatattggttatgcagttctacacattcagtgccgcttgagtgtttctaagttccttgct

SEQ ID NO: 16724 - DNA, 120 bp, synthetic construct
  misc_feature 1..120: note = Artificially Synthesized Probe
  source 1..120: mol_type = other DNA
acctgttctgatctactaatgtaaagaagaacttctggctaaaggagtttaataaagtaagccagtcatgaagcatgccatgtatagcaactggtgacagggaaacattctgagagctat

SEQ ID NO: 16725 - DNA, 120 bp, synthetic construct
  misc_feature 1..120: note = Artificially Synthesized Probe
  source 1..120: mol_type = other DNA
tacagtagtgtataggcacattcgttcttaggtcagggattcctaacctagagctcacagaaactgtacgcaagtatacatccacttttaagttaacacttttcacatttctcaaagacc

SEQ ID NO: 16726 - DNA, 120 bp, synthetic construct
  misc_feature 1..120: note = Artificially Synthesized Probe
  source 1..120: mol_type = other DNA
ctgctgttatctcatactgagaatgctagttctatacctttgctctcaggctgtgaggaaggggtgctagtccaaaaggctatgggattagatttaaaaaggctaaaattaaatcctaga

SEQ ID NO: 16727 - DNA, 120 bp, synthetic construct
  misc_feature 1..120: note = Artificially Synthesized Probe
  source 1..120: mol_type = other DNA
tctgaaccaaatacaaactttggaggagaaaccactgcttttgttgttgtttcagatgtgctagacacttcaacttctgaagctgcatctgctacatcatcaccctgaataacatctgtc

SEQ ID NO: 16728 - DNA, 120 bp, synthetic construct
  misc_feature 1..120: note = Artificially Synthesized Probe
  source 1..120: mol_type = other DNA
gactcatcaaagtggaaaagattttttctcacagggctacttgccaatggagaagcatgtactgagctactactgacactatcatccaaagcatcttcccttaaatcatagttatcccat

SEQ ID NO: 16729 - DNA, 120 bp, synthetic construct
  misc_feature 1..120: note = Artificially Synthesized Probe
  source 1..120: mol_type = other DNA
ccatcagcagacacagggatggaaaatccttctttggttgacttaaattctgtattagaagaaccctgaaacataaatgaaggtgaattttcttgatccacatgcccaaaatagtcatga

SEQ ID NO: 16730 - DNA, 120 bp, synthetic construct
  misc_feature 1..120: note = Artificially Synthesized Probe
  source 1..120: mol_type = other DNA
ttacctttgtgggagtaacattagctgctggtctgagaagatactgggaattatatgctggtgactgactataatatactgaagggccagtagttgcaactaaaaaaaaaaaagaaaaga

SEQ ID NO: 16731 - DNA, 120 bp, synthetic construct
  misc_feature 1..120: note = Artificially Synthesized Probe
  source 1..120: mol_type = other DNA
aaatattaaataaaaaaaaaatcttagtctgaagtttaagtagggactttaattgactactgactctaaactgtgcggctctaataaatctactaaaagtaatctaacttttaaaagcac

SEQ ID NO: 16732 - DNA, 120 bp, synthetic construct
  misc_feature 1..120: note = Artificially Synthesized Probe
  source 1..120: mol_type = other DNA
gatttacatgcttgtataagaacagaagaccttttatgcctgtacacagaagaaatggaaatcatgacccaaaaggcaccaaataactgactgcacacatcactaaaaaagccccaggaa

SEQ ID NO: 16733 - DNA, 120 bp, synthetic construct
  misc_feature 1..120: note = Artificially Synthesized Probe
  source 1..120: mol_type = other DNA
gctcatctgaggtgtggattaagtgttctttaagcctttatatacacgtgatcacatacggctcgttttttctgcttgggattataaaaatctccgtaacaccaaatacagcttttgaag

SEQ ID NO: 16734 - DNA, 120 bp, synthetic construct
  misc_feature 1..120: note = Artificially Synthesized Probe
  source 1..120: mol_type = other DNA
ccaaatcacctccccaaattagcttttcacttaaccctgtgttcaaacaaaatacaactaattctcaaggtgatgttcaaatgctccaccaggaaagggaaaaaagtagtagctgcagag

SEQ ID NO: 16735 - DNA, 120 bp, synthetic construct
  misc_feature 1..120: note = Artificially Synthesized Probe
  source 1..120: mol_type = other DNA
taactgtaatttttaacattcagtgtgatgagaactggcttcgataattctctcattttaaagataagaagccaaacggtcacaaaggaagtgactggcccaagatcattaattaatggc

SEQ ID NO: 16736 - DNA, 120 bp, synthetic construct
  misc_feature 1..120: note = Artificially Synthesized Probe
  source 1..120: mol_type = other DNA
acatttgaaacacatgtaatccacagctaatctgggaatgaactcatagaccagagtatgattagtacattgtagcagttcaatcactcgggaaccttctctgtgtcaggaactcttata

SEQ ID NO: 16737 - DNA, 120 bp, synthetic construct
  misc_feature 1..120: note = Artificially Synthesized Probe
  source 1..120: mol_type = other DNA
agtacagctagagaaattaagtgacttaccttaatggcctttacttcttggcgaatcattttcagtaaagaattctgatcttctgcccatcgaggtggtgttttgggagaatactaaaaa

SEQ ID NO: 16738 - DNA, 120 bp, synthetic construct
  misc_feature 1..120: note = Artificially Synthesized Probe
  source 1..120: mol_type = other DNA
ttactttcttgaccactgaaagatttgaatcactgtcatctaaaatctttattaggtagcccctggtctttctcagataatttttgcattcttcttgttcttcaggagaaagggcatcat

SEQ ID NO: 16739 - DNA, 120 bp, synthetic construct
  misc_feature 1..120: note = Artificially Synthesized Probe
  source 1..120: mol_type = other DNA
ctggctaaaatttcaagtcaaaaccaaatggtacctcaatagtcatttgttcaacttccaaatactgtaataactaaaccaccttaataccagtgaactcactgcaacctctgccgtgca

SEQ ID NO: 16740 - DNA, 120 bp, synthetic construct
  misc_feature 1..120: note = Artificially Synthesized Probe
  source 1..120: mol_type = other DNA
ttgcccaatgtacaagcagagcaggttgaaggccatgtttttcctgggctcttagagtgtttatttcatgctgaactagaagtctcaattttgctgagtttccaggtctaaaaaatagtt

SEQ ID NO: 16741 - DNA, 120 bp, synthetic construct
  misc_feature 1..120: note = Artificially Synthesized Probe
  source 1..120: mol_type = other DNA
ttaagtcattaaagcaatggaacaccactatataatccatcagtacagtaaagaaatctgtttttctacaagaaagtcaatattgaaaaggttatgcgcagtcaggagttcgagaccagc

SEQ ID NO: 16742 - DNA, 120 bp, synthetic construct
  misc_feature 1..120: note = Artificially Synthesized Probe
  source 1..120: mol_type = other DNA
gatctcaggtgatctgcccgcctcggcctcccaaagtgctgggattacagatatgagccactgtgtcgggcttaatcccaacactttggggggcttaggcaggaggatcacttgagccta

SEQ ID NO: 16743 - DNA, 120 bp, synthetic construct
  misc_feature 1..120: note = Artificially Synthesized Probe
  source 1..120: mol_type = other DNA
gactagaaaacagagcatcatataatgcagactgcccgcttttgttggcaaaagtttcaacaaccacttttaaaaaatcttgcttgccacgacttaagtttagcaacatgtgccctgaaa

SEQ ID NO: 16744 - DNA, 120 bp, synthetic construct
  misc_feature 1..120: note = Artificially Synthesized Probe
  source 1..120: mol_type = other DNA
attatatttcaattgaactttttaaaaaaaccctccttcgagttaattctgctgggcaattaggtttggttaccactacacagttgtgtctcagcacacttacagaggcaccctcgggat

SEQ ID NO: 16745 - DNA, 120 bp, synthetic construct
  misc_feature 1..120: note = Artificially Synthesized Probe
  source 1..120: mol_type = other DNA
agaatgtgctatttcttcgcatctcttccatacctattgctcttaactgatacggcgaaaagaaataattttgacaaattatctcctggacagactgagattttatcataagatatgcct

SEQ ID NO: 16746 - DNA, 120 bp, synthetic construct
  misc_feature 1..120: note = Artificially Synthesized Probe
  source 1..120: mol_type = other DNA
taataggggatagcactggaataaatgggacaaccaggaaattaaagagatcctaatgcaataacctatgaaaaaaaaaaaaaaagcatgatgaatagaatggcgaagggaagacgtgac

SEQ ID NO: 16747 - DNA, 120 bp, synthetic construct
  misc_feature 1..120: note = Artificially Synthesized Probe
  source 1..120: mol_type = other DNA
ttcaaacgttttcctccttcttttaaagacaggggatatatgtgtgtttacttggagatgcataaaacatttcctgaagaacacacaagaaagcaataacattagtttctttgggggtgg

SEQ ID NO: 16748 - DNA, 120 bp, synthetic construct
  misc_feature 1..120: note = Artificially Synthesized Probe
  source 1..120: mol_type = other DNA
tcaactacctagctgcaatgcagatgtacttactagaaccacagtattcctctgattaagagtctgaaaatcttgccataaaagttagccaattcttacatacccaaatgccagcacata

SEQ ID NO: 16749 - DNA, 120 bp, synthetic construct
  misc_feature 1..120: note = Artificially Synthesized Probe
  source 1..120: mol_type = other DNA
cattaattttcactaatccattccttatgaacacagaagtttctactgagcaaatattagcacttaacatgtgaactgtctatcaacggtgtttttaaaagatttacaggccgggctcaa

SEQ ID NO: 16750 - DNA, 120 bp, synthetic construct
  misc_feature 1..120: note = Artificially Synthesized Probe
  source 1..120: mol_type = other DNA
agcaaaaaatccttctctaaaattaatcatttttctaagcctggtttaatgcttttttggaagactgcttatttcttttcctttcaaaagttatgcaggctcattaaaaaaaaaaaaaaa

SEQ ID NO: 16751 - DNA, 120 bp, synthetic construct
  misc_feature 1..120: note = Artificially Synthesized Probe
  source 1..120: mol_type = other DNA
atcatgttcccaaaaatggcagagtaaaaagatcaaactcttcaaatttgtctacaaacaaatcatggcaatgcaggctttcgacaagagtgcactcaacatccctgtttcaccagcctc

SEQ ID NO: 16752 - DNA, 120 bp, synthetic construct
  misc_feature 1..120: note = Artificially Synthesized Probe
  source 1..120: mol_type = other DNA
ttaacctctcaaatgatgtcttattcccagttatttccagccctccaatcacaggataaatataagatcagtgattataggcgcacatttcaaaataaaccaggataaagttgggagact

SEQ ID NO: 16753 - DNA, 120 bp, synthetic construct
  misc_feature 1..120: note = Artificially Synthesized Probe
  source 1..120: mol_type = other DNA
agccaccgcgccccgctgagctgagttttctagaggcttcatgacatgtaatagttttacagactgaaagaggaagtaaatgagaatctagctatgttctattaagcgagacattaaaaa

SEQ ID NO: 16754 - DNA, 120 bp, synthetic construct
  misc_feature 1..120: note = Artificially Synthesized Probe
  source 1..120: mol_type = other DNA
tcacaaggcaggtaacaaagggcccatgagtcctgattaactgatctgacaaaccatctgtcacccacagccctaagccacactgtgaaactgcctagggtggcaccagctttttatctt

SEQ ID NO: 16755 - DNA, 120 bp, synthetic construct
  misc_feature 1..120: note = Artificially Synthesized Probe
  source 1..120: mol_type = other DNA
ctgctcttaccctaccaatttaggtcactatgtactttttcaagaaaattacctactccctgcactcagtgaaatgaacttctttccttataccagatggggaaataaattaacttccaa

SEQ ID NO: 16756 - DNA, 120 bp, synthetic construct
  misc_feature 1..120: note = Artificially Synthesized Probe
  source 1..120: mol_type = other DNA
aaatttagagcaatgaacttactgcaaaaagaaaaactacaatttatactaaagcattctcctcaaagtcaacgcacctttccagtaattctctactttcctgcacatctctagtggaaa

SEQ ID NO: 16757 - DNA, 120 bp, synthetic construct
  misc_feature 1..120: note = Artificially Synthesized Probe
  source 1..120: mol_type = other DNA
ttaaacaagtcatgctcccaaaaagcaccattccactatgtctagttttatgatgatgccaccaaaaacaccatcctatataccttattcgtcccttctgagagttgcttacaacccaga

SEQ ID NO: 16758 - DNA, 120 bp, synthetic construct
  misc_feature 1..120: note = Artificially Synthesized Probe
  source 1..120: mol_type = other DNA
gaaccctcccaactggtttctgtgtgcttagatttgggaaatcataaccccaagctaactgatttcatttgcattatctcaaccatcaaactggtgctgcctaaaacaaaataccatttt

SEQ ID NO: 16759 - DNA, 120 bp, synthetic construct
  misc_feature 1..120: note = Artificially Synthesized Probe
  source 1..120: mol_type = other DNA
ttcaatgctttttcagcttcaaaaatctggacatgattgttcatagcagttgaacaatagccaaaacctagaaataaccaaaatgcccctcaaaagtgaatggttaaggctgggcacagt

SEQ ID NO: 16760 - DNA, 120 bp, synthetic construct
  misc_feature 1..120: note = Artificially Synthesized Probe
  source 1..120: mol_type = other DNA
caaaaggggcagcatgaggaagatctctgtggtaatagagtagttctgtatcttgacggcagtggtggtatgaatctacacgtgataaaatgaaagaaaactatacatacacattgtacc

SEQ ID NO: 16761 - DNA, 120 bp, synthetic construct
  misc_feature 1..120: note = Artificially Synthesized Probe
  source 1..120: mol_type = other DNA
ggttatgtcttaagttttctccctttatgttttgtttgtttacctttagtttataaattgcaggacttcctgggaaaagttttgctgctctttccacccagtattctgctcttccatcag

SEQ ID NO: 16762 - DNA, 120 bp, synthetic construct
  misc_feature 1..120: note = Artificially Synthesized Probe
  source 1..120: mol_type = other DNA
taagtaaatatcctctaggttccttgacagtattaccatcagagaaatgaggccagacctaaactaagggattaaagtctcacagtaaaaaggtacaagagttaacagtcacagtgctgc

SEQ ID NO: 16763 - DNA, 120 bp, synthetic construct
  misc_feature 1..120: note = Artificially Synthesized Probe
  source 1..120: mol_type = other DNA
aaaaaaaaaaaaagcctgcctccctcttaatttcctgctttaatccactcccagtcaggaaatcagaatcaccaagcttcttatccctaggatagagccttagagcatcacatattgtgt

SEQ ID NO: 16764 - DNA, 120 bp, synthetic construct
  misc_feature 1..120: note = Artificially Synthesized Probe
  source 1..120: mol_type = other DNA
cagacaacagaagttaagaattttcatcagccttggaaatcttggaaaccctgtggtaccactctctcacttaacaaacaaaagaaaccagctttctttggggaggaaaggtattccaga

SEQ ID NO: 16765 - DNA, 120 bp, synthetic construct
  misc_feature 1..120: note = Artificially Synthesized Probe
  source 1..120: mol_type = other DNA
ccatccatgtgatacagagtatacagctactcaaacatcttatttttgaaattccaagaccccagtgaatgtccaaaacgatgaatagtaccaaaccaggttgccatcaatcgaaacatg

SEQ ID NO: 16766 - DNA, 120 bp, synthetic construct
  misc_feature 1..120: note = Artificially Synthesized Probe
  source 1..120: mol_type = other DNA
ggcgtcagccacggagcccggccagttcccccttttcaaaatgaagaaatagattcaaggtacaatgccaaaacataatagaaaaataattccattaccttctttgcttccaactatgtt

SEQ ID NO: 16767 - DNA, 120 bp, synthetic construct
  misc_feature 1..120: note = Artificially Synthesized Probe
  source 1..120: mol_type = other DNA
attatacaggacaatgaggaaaagtctagatactgaaccatgagttccccaatcttcttcccctggaacataagggtaaggaaatctctcaaaaggcagaacaaacaaaagaggagaata

SEQ ID NO: 16768 - DNA, 120 bp, synthetic construct
  misc_feature 1..120: note = Artificially Synthesized Probe
  source 1..120: mol_type = other DNA
cagctgtgtagcaaagaggaagaaaacccaatccaggttggagaagtcggttagtaagggtattccaggtagacaatcaatcaatcaatcaatgttttaagctgaaattgaacggattat

SEQ ID NO: 16769 - DNA, 120 bp, synthetic construct
  misc_feature 1..120: note = Artificially Synthesized Probe
  source 1..120: mol_type = other DNA
cagagtgctcagattacagacgaagaatatttttaagaagggcaaaagcacatgtgagggagtagaaaaatggcaaaacaagaggagactaacaaatgaaagcacaatggaagactagaa

SEQ ID NO: 16770 - DNA, 120 bp, synthetic construct
  misc_feature 1..120: note = Artificially Synthesized Probe
  source 1..120: mol_type = other DNA
catttgtggaaaaggttaaaaattgcaagccatactaacgatttgtaagaactttagaattttttttttttaagcaaagtcagctaccaaagtgttccgggcagggaggggggcgaggga

SEQ ID NO: 16771 - DNA, 120 bp, synthetic construct
  misc_feature 1..120: note = Artificially Synthesized Probe
  source 1..120: mol_type = other DNA
gccgccgcctcaacagagcgcgccagggagcagcgcccgtcgggagccatgacgcctgagccatcgaggccgccgccgggccgggtcgaggccgccgcctccacagagcgcgccagggag

SEQ ID NO: 16772 - DNA, 120 bp, synthetic construct
  misc_feature 1..120: note = Artificially Synthesized Probe
  source 1..120: mol_type = other DNA
gcgccagggagcagcgcccgtcgggagccatgacgcctgagccatcgaggccgccgcagggccaggtcgaggccggcgcctcaacagagcgcgccagggagcagcgcccgtcgggagcca

SEQ ID NO: 16773 - DNA, 120 bp, synthetic construct
  misc_feature 1..120: note = Artificially Synthesized Probe
  source 1..120: mol_type = other DNA
tcatctaacgttttacatggattgttgataaatggccatctggcttttatttgaatgcctccaaagacagaggactcactactgccatatgaagtagctcattccatttggcagacagtt

SEQ ID NO: 16774 - DNA, 120 bp, synthetic construct
  misc_feature 1..120: note = Artificially Synthesized Probe
  source 1..120: mol_type = other DNA
gctaacacttgtttgctaacatttcacatacattatctcctttaaaccctaacaacacagtgagacagttactgttatctccatgtcagatgacgagactgaagctacaagatcacagag

SEQ ID NO: 16775 - DNA, 120 bp, synthetic construct
  misc_feature 1..120: note = Artificially Synthesized Probe
  source 1..120: mol_type = other DNA
tgcaaatactcattcagaagccaatggatgatcttcagcacattgcagttatttcagaactcggcctacatgcttaattcgatcactctgcttcactctcaaactttcattgtaggcatt

SEQ ID NO: 16776 - DNA, 120 bp, synthetic construct
  misc_feature 1..120: note = Artificially Synthesized Probe
  source 1..120: mol_type = other DNA
tatctggtgaggaccactgtaaactgcaggaggataggagattagcatatctggctccttgagacccataactatattttatttagaattatctctctggtacttcacatcgtgtcacaa

SEQ ID NO: 16777 - DNA, 120 bp, synthetic construct
  misc_feature 1..120: note = Artificially Synthesized Probe
  source 1..120: mol_type = other DNA
tgggcgacatacttacttttatgcaggactgttgtgaggataaaatcaggtaatgtggaaaagcacctagcacaaaatcagaaactgtaggcttgcaatatgatagctcttatgctcaca

SEQ ID NO: 16778 - DNA, 120 bp, synthetic construct
  misc_feature 1..120: note = Artificially Synthesized Probe
  source 1..120: mol_type = other DNA
cctgaggaatgaatgaatagattaaaccaattttccgagtcttttcgatagagtaccttgattctgctaaataggcaagaacacttgcaggggataaagagagattggctgttgggagaa

SEQ ID NO: 16779 - DNA, 120 bp, synthetic construct
  misc_feature 1..120: note = Artificially Synthesized Probe
  source 1..120: mol_type = other DNA
cagttcccaggaatttgcccgggtgatagtactctagtgcccctgcgtttgtgtccggcagatagcacccagagcccccgcacctgtcaccttgtgatggctttaaagctcctgcacctg

SEQ ID NO: 16780 - DNA, 120 bp, synthetic construct
  misc_feature 1..120: note = Artificially Synthesized Probe
  source 1..120: mol_type = other DNA
ttatgtccctttgctaagtgacctcagactcctgtactacaatttttttgtgcctgcttgttatcatttatcaagagctgtgttcaggactcagcctggatactcacacactgtaagaat

SEQ ID NO: 16781 - DNA, 120 bp, synthetic construct
  misc_feature 1..120: note = Artificially Synthesized Probe
  source 1..120: mol_type = other DNA
tattgtgtgtgtcaaaacgacagtgtctcaacagaaatcctttttctcccacaattgaaagacaaataaatggacgccctgtcattcctggaccagcttaattctgtagactattttatt

SEQ ID NO: 16782 - DNA, 120 bp, synthetic construct
  misc_feature 1..120: note = Artificially Synthesized Probe
  source 1..120: mol_type = other DNA
acaggaagcaaggaaatgctcctgatagatttatctgtgtattattaaggatgatcagttccagtgtcgttaacaagaatgggtgagtgcttagtgagattcgtatttccctttcgtggt

SEQ ID NO: 16783 - DNA, 120 bp, synthetic construct
  misc_feature 1..120: note = Artificially Synthesized Probe
  source 1..120: mol_type = other DNA
aaacccaataactatgcttgataggattgttccttaaataagtatagacaggcccacagagggctcaattaacaagttaaatgcttggcttctgggagtccatttggtgcaattttggct

SEQ ID NO: 16784 - DNA, 120 bp, synthetic construct
  misc_feature 1..120: note = Artificially Synthesized Probe
  source 1..120: mol_type = other DNA
atgtcaccacacaactcatagtgtcttacgccatttgtctcttatttggcatccacctcctgcttagggacacatatatgggtgtctaaccaataaaagatgtttgcttgtagaataaca

SEQ ID NO: 16785 - DNA, 120 bp, synthetic construct
  misc_feature 1..120: note = Artificially Synthesized Probe
  source 1..120: mol_type = other DNA
ctggctaattagcaactcccctagattttttgcttttctattgtattgcaagaacagaaacatacttttcccctttgttgaaagatctccagtggcttcccatcttttataagggcctgc

SEQ ID NO: 16786 - DNA, 120 bp, synthetic construct
  misc_feature 1..120: note = Artificially Synthesized Probe
  source 1..120: mol_type = other DNA
caaaaagccacgcagacatgtgggagggagggaggcgacggagattccaagattgtggcttattttagttcccagcacctcatggataatgaaccagaccaggagtcagaaaacccaagc

SEQ ID NO: 16787 - DNA, 120 bp, synthetic construct
  misc_feature 1..120: note = Artificially Synthesized Probe
  source 1..120: mol_type = other DNA
gggtggaccccaccttgtatgtcatttggttatcttccctgtctttactgattgttcattataaagtgggagaaataatcacagtccctacctcataagatcataggagagtggagagaa

SEQ ID NO: 16788 - DNA, 120 bp, synthetic construct
  misc_feature 1..120: note = Artificially Synthesized Probe
  source 1..120: mol_type = other DNA
gtgtgagccaccgagctggctgcaaaaattcttaaacaggacataaaagaactaagcataaagggaacaatgataaattgggctatattaaaattaagaacctccttgttcaaaagacac

SEQ ID NO: 16789 - DNA, 120 bp, synthetic construct
  misc_feature 1..120: note = Artificially Synthesized Probe
  source 1..120: mol_type = other DNA
aatggccaaagttgtttatctcgttttcttgcaagtcagctttctcaggcatgggaaactcatattataaacccctcagctacaaattccaacatatgtgttttcacttcctgcccatta

SEQ ID NO: 16790 - DNA, 120 bp, synthetic construct
  misc_feature 1..120: note = Artificially Synthesized Probe
  source 1..120: mol_type = other DNA
gtttatttaatcttatttgtagagacagagtctcactctgttgccctggctggaatgcagtggcacgaccatagctcactgcagcctcaaactcctgggctcaagtgatcctctcacctc

SEQ ID NO: 16791 - DNA, 120 bp, synthetic construct
  misc_feature 1..120: note = Artificially Synthesized Probe
  source 1..120: mol_type = other DNA
ttgaaatgtaggtgggagaaggcatgccccctcagcttttgcattctgcacacctgcaaaattagtgccatgtgtatgctgccaaggtttatgacttttaccttccacatcacacctgtg

SEQ ID NO: 16792 - DNA, 120 bp, synthetic construct
  misc_feature 1..120: note = Artificially Synthesized Probe
  source 1..120: mol_type = other DNA
agcattctgatctcaacgacttcagtaaccattaagaagttccagactttccctagttctggggtcttcttttaagccctcaccagaactgtagaactgtctttaatgctccattctttt

SEQ ID NO: 16793 - DNA, 120 bp, synthetic construct
  misc_feature 1..120: note = Artificially Synthesized Probe
  source 1..120: mol_type = other DNA
ggcctgtccacaaagcttggccagatgcttcccagatttcagcatttgaggacaacattcatgaatttagccatactggcattccagagatgctattaaaaattttttttctccaaatag

SEQ ID NO: 16794 - DNA, 120 bp, synthetic construct
  misc_feature 1..120: note = Artificially Synthesized Probe
  source 1..120: mol_type = other DNA
ccttgatagcttgaactcagtcatgtgggaagcgtttgtaccatagaaattgcaagtgctaccaatcaaggctttattttcatggaaagccagttgttaagttaatcctctaccagcaaa

SEQ ID NO: 16795 - DNA, 120 bp, synthetic construct
  misc_feature 1..120: note = Artificially Synthesized Probe
  source 1..120: mol_type = other DNA
gggcagataacttctcttaaatctcatttcttagagtctgagaatacctcagtaggcggttgtgagaattcaaggagataatgcatataatggtttctagcacaatgcccaacactttta

SEQ ID NO: 16796 - DNA, 120 bp, synthetic construct
  misc_feature 1..120: note = Artificially Synthesized Probe
  source 1..120: mol_type = other DNA
ttggtctatacctaggtggtcctatttggaaagaagaggtggcctggagaggtgataaatccatccaaggtaggggctggacataatttctgaataaatcagccaacaaatattcaccga

SEQ ID NO: 16797 - DNA, 120 bp, synthetic construct
  misc_feature 1..120: note = Artificially Synthesized Probe
  source 1..120: mol_type = other DNA
atccttcctccccatcactcagcctcccacacagccatgagccagcagatgtggacacatatgcaaattcagtcaggctggttccttccttaggatccccattagtcttcagaataaaaa

SEQ ID NO: 16798 - DNA, 120 bp, synthetic construct
  misc_feature 1..120: note = Artificially Synthesized Probe
  source 1..120: mol_type = other DNA
atgtgttcttttttctgcccttcctcctttcatttcagggtttcaaagccagaggagataaaagaaatttgttccccttgcaaagatgaaaatcagatttgccctggttttggtcaatcg

SEQ ID NO: 16799 - DNA, 120 bp, synthetic construct
  misc_feature 1..120: note = Artificially Synthesized Probe
  source 1..120: mol_type = other DNA
caggctgctttcttgaagcaaaagactacaccccacaatgtggggtgaaagaggaggaagcaggtctatagagtaagaataaagcagatattcaggaaaagcaaagaaagaagtaaaaca

SEQ ID NO: 16800 - DNA, 120 bp, synthetic construct
  misc_feature 1..120: note = Artificially Synthesized Probe
  source 1..120: mol_type = other DNA
gtttttattattattattggctacttggtgcctgtgccaccctgtgtgactggtcccagttccaataagctgggccttgttcctgggttatagctctgctatgtccttcactactccaga

SEQ ID NO: 16801 - DNA, 120 bp, synthetic construct
  misc_feature 1..120: note = Artificially Synthesized Probe
  source 1..120: mol_type = other DNA
taattctagtctagtctgttgctgctgactctcgctcatggtgactgacttgagcaactagcagaaacggggttcaaactcaggtctgtttcatgttagcatggatggatttaatcactc

SEQ ID NO: 16802 - DNA, 120 bp, synthetic construct
  misc_feature 1..120: note = Artificially Synthesized Probe
  source 1..120: mol_type = other DNA
attttcaaagtacaacattattactattcccacccttgttccttcactcctgggccctaccttcttcacttgtccgtttccctcctttcagttgaaaacaaagggattggataaacttat

SEQ ID NO: 16803 - DNA, 120 bp, synthetic construct
  misc_feature 1..120: note = Artificially Synthesized Probe
  source 1..120: mol_type = other DNA
acatggacacgcacttcactgattcctacttctcagcggaattttaactctgcaggagtgatgagtgatataaattttgcaacatgaagcaaccagacttcttgtaataccaaactaagg

SEQ ID NO: 16804 - DNA, 120 bp, synthetic construct
  misc_feature 1..120: note = Artificially Synthesized Probe
  source 1..120: mol_type = other DNA
acaagggcaggatggagggagtagtccaccctgggtgcaagcaatcggggtgccttgtctgcagagggtgtctaacaattctaaagccaactaaaaagtctgtctgctttttatttttat

SEQ ID NO: 16805 - DNA, 120 bp, synthetic construct
  misc_feature 1..120: note = Artificially Synthesized Probe
  source 1..120: mol_type = other DNA
taccactctctaacatgctatatcttttgcctattttattgcttattggcagtctttccttctggaacagatgttccacgagagttgtattttccactgccacaagagtgcctggtatat

SEQ ID NO: 16806 - DNA, 120 bp, synthetic construct
  misc_feature 1..120: note = Artificially Synthesized Probe
  source 1..120: mol_type = other DNA
gcagagagaaaaggcagaaaatggaagtgtgtaaaccggaatccaggagtccatggtaatataaacaaatacatagatgagtggatgaacagagaagcgaaagcttttccttacaggaga

SEQ ID NO: 16807 - DNA, 120 bp, synthetic construct
  misc_feature 1..120: note = Artificially Synthesized Probe
  source 1..120: mol_type = other DNA
tgaaatgagaataaggtaatcataatatatcaatgtcaatttctcatttttgttaactgaacaatggttatgtaagagaatgtccccttgttttaggaaattgtgttagtctgttttcac

SEQ ID NO: 16808 - DNA, 120 bp, synthetic construct
  misc_feature 1..120: note = Artificially Synthesized Probe
  source 1..120: mol_type = other DNA
ctgagaacaatggtgatgatgaaaataacagcactgccgcaacacttaccccatgccaggcactgtcctaaatgctttagaacagtattcaaaattgaacaagtgttcggtcacttgttc

SEQ ID NO: 16809 - DNA, 120 bp, synthetic construct
  misc_feature 1..120: note = Artificially Synthesized Probe
  source 1..120: mol_type = other DNA
aatacaaggaattagtaaggcattttctcctctccctgcaggagactgaacctgtggcacccgccaccaaatctgccggcctattcacagtccctgccatttctctcgttaagatgaact

SEQ ID NO: 16810 - DNA, 120 bp, synthetic construct
  misc_feature 1..120: note = Artificially Synthesized Probe
  source 1..120: mol_type = other DNA
ctaaacatgatatatcagcttttgccttttaatttctcaatctcttaaagagaatccagctttagtatgattagcatatgatcaaacttccatatttgccttgggaataatggactaagg

SEQ ID NO: 16811 - DNA, 120 bp, synthetic construct
  misc_feature 1..120: note = Artificially Synthesized Probe
  source 1..120: mol_type = other DNA
gctttaaacaccatctgtattgtaacaactcccaaatttatatccctagccctaacctttccactaagcttcagacttgtacatctccattcagtgtctccactgggatgtttcatacac

SEQ ID NO: 16812 - DNA, 120 bp, synthetic construct
  misc_feature 1..120: note = Artificially Synthesized Probe
  source 1..120: mol_type = other DNA
ctgaaagaagatgctggctgtacaaacttgctggacccactgctggtgaggctctgagaattaattacttttatacaaccataattacatcatgaatagcacaatcctacaggattatac

SEQ ID NO: 16813 - DNA, 120 bp, synthetic construct
  misc_feature 1..120: note = Artificially Synthesized Probe
  source 1..120: mol_type = other DNA
tacaggttgtctttatttttcaaaaccccggaagccccaccaaatggagcttttggcccttttctcccaggtccctcctcccagcaccatgactcacgttgaagatattactgatgacca

SEQ ID NO: 16814 - DNA, 120 bp, synthetic construct
  misc_feature 1..120: note = Artificially Synthesized Probe
  source 1..120: mol_type = other DNA
gagactccctcctccctctgggagttaatgatgatgatgctacaaccacagcaacagtgatgataatgatttattataagagcattttgtaaaacaggcttgtaacagcatcacctcttt

SEQ ID NO: 16815 - DNA, 120 bp, synthetic construct
  misc_feature 1..120: note = Artificially Synthesized Probe
  source 1..120: mol_type = other DNA
tgcctctggagccacggtaagggcaaagtgagttgatatacgtcaagcacaataaaggagttggttattgctattatcttctagggagagtcctgcagatttcaaaatacattaaaaata

SEQ ID NO: 16816 - DNA, 120 bp, synthetic construct
  misc_feature 1..120: note = Artificially Synthesized Probe
  source 1..120: mol_type = other DNA
ccacttcagggttccatttattttcatttttgttccaatagccatttgctaagttatcagtatgtgaggaaaacaaacaacaacgttgaataagataggcccctcccctgaagggactca

SEQ ID NO: 16817 - DNA, 120 bp, synthetic construct
  misc_feature 1..120: note = Artificially Synthesized Probe
  source 1..120: mol_type = other DNA
agacagagtctcgctctgtcgcccaggctagagtgcagtggcacgatctcggctcactgcaaactccgcctccaaggttcacgccattctcctgcctcagcctcccgagtggctgggact

SEQ ID NO: 16818 - DNA, 120 bp, synthetic construct
  misc_feature 1..120: note = Artificially Synthesized Probe
  source 1..120: mol_type = other DNA
tctattaagtgccaatgcccttttaaaatgtgtatagcttgatgtgtaatcatcacccaggtgaacacagagaacattttctgcaccccatggggctattttgtgttccttcctaatcaa

SEQ ID NO: 16819 - DNA, 120 bp, synthetic construct
  misc_feature 1..120: note = Artificially Synthesized Probe
  source 1..120: mol_type = other DNA
ccataaacttatactgattatgtaactttacaaaatcataatcgacaataacaggaaagaaaggatgcaggaggaatgtaggcctggattccttgtgatacacagagtagggctgtccag

SEQ ID NO: 16820 - DNA, 120 bp, synthetic construct
  misc_feature 1..120: note = Artificially Synthesized Probe
  source 1..120: mol_type = other DNA
tgagctttataacagcctacatttcctaagcgtttaccatgtgcctacgctgttttaatcactttacatagactatcttgtttcgttctcacaaccacactttgacatgggtgctgttac

SEQ ID NO: 16821 - DNA, 120 bp, synthetic construct
  misc_feature 1..120: note = Artificially Synthesized Probe
  source 1..120: mol_type = other DNA
agacaatgtttttcgaaaaggtggaaggggaagcataggttttgagttcacatagctctgttcgatcccagctctatcatttcctattagattaaacctcactaaattgccaccagttga

SEQ ID NO: 16822 - DNA, 120 bp, synthetic construct
  misc_feature 1..120: note = Artificially Synthesized Probe
  source 1..120: mol_type = other DNA
tcagttggagactgcatgccccacttcagatatgcaaatccaaccttttattaaacacgattgttaaagtgcatctgccattttgtagcaatgctatatgcatagggtccagacttattg

SEQ ID NO: 16823 - DNA, 120 bp, synthetic construct
  misc_feature 1..120: note = Artificially Synthesized Probe
  source 1..120: mol_type = other DNA
tggacttgatactctctaaggcttttacagctctggaatattccaaagaagttagtggaagatggggagaggagagttgcctggataagggcagagttggggccctaaagattaggaagt

SEQ ID NO: 16824 - DNA, 120 bp, synthetic construct
  misc_feature 1..120: note = Artificially Synthesized Probe
  source 1..120: mol_type = other DNA
aaagccttcaggaaaagtttatgaaagcctcatgacttgcagaaagaagtctaacctggtagttcagcagcgagagataaggcaatactcaccattgttgtaacagcaggcacacagata

SEQ ID NO: 16825 - DNA, 120 bp, synthetic construct
  misc_feature 1..120: note = Artificially Synthesized Probe
  source 1..120: mol_type = other DNA
ttaagccactaagtttggggtggctgttatgcagcaataggtaattgatactctctgcttcccctaagcatatcataggccccttaactccaagcccagaatgaacatatcattgttcat

SEQ ID NO: 16826 - DNA, 120 bp, synthetic construct
  misc_feature 1..120: note = Artificially Synthesized Probe
  source 1..120: mol_type = other DNA
caacaacttaatgaaacaagtactatcatcctctgacagaagtagaaacagaggcagaaagaggttgactaatctgcccaaggtctctaagatacagaggcaagatttgaatcagtctag

SEQ ID NO: 16827 - DNA, 120 bp, synthetic construct
  misc_feature 1..120: note = Artificially Synthesized Probe
  source 1..120: mol_type = other DNA
cttggcctccctaagtgctcagccagggtgttttttttttttttaattaactattacagaactttcaaagcatatatgaaaacagagagaacagcacgatgaccctacgtgcccatctcc

SEQ ID NO: 16828 - DNA, 120 bp, synthetic construct
  misc_feature 1..120: note = Artificially Synthesized Probe
  source 1..120: mol_type = other DNA
cgatctaatcagatctgacaagtcaatcaagacaatttcaaattatcaagaagactctgaggagtgaattttcatccactatcgtcaactgtagcaatggaccctgcctggagattgaca

SEQ ID NO: 16829 - DNA, 120 bp, synthetic construct
  misc_feature 1..120: note = Artificially Synthesized Probe
  source 1..120: mol_type = other DNA
actgggttatatgacaaatgactcaacgccactgtaaaatggggccatgatgcataatggttaagtgtaaggaaactaaatccagggtggctaaatttaaatacgctgtgctattgctag

SEQ ID NO: 16830 - DNA, 120 bp, synthetic construct
  misc_feature 1..120: note = Artificially Synthesized Probe
  source 1..120: mol_type = other DNA
aaagtcacaccattgtggacatctgtcttatttacagttgtctcatcacagtctgggaatatttttagctgaatataaaataaccatcatcctaccctccccttcagccataccttctgg

SEQ ID NO: 16831 - DNA, 120 bp, synthetic construct
  misc_feature 1..120: note = Artificially Synthesized Probe
  source 1..120: mol_type = other DNA
ataaaaataaaaaaaatccttgccactaaggagagagaaggggaagcagagaagcagagaattatgaagaccatttggtagagggaatttgaggaacaccaaagaggatgcctctcactg

SEQ ID NO: 16832 - DNA, 120 bp, synthetic construct
  misc_feature 1..120: note = Artificially Synthesized Probe
  source 1..120: mol_type = other DNA
gaaggtggaaagtggatactttattgaccattacagttgtccactgaaatactcatgaggtagtgagcaccctgtcactagaggaatgcagaaatgtcttgaaaacaattcctatgtaga

SEQ ID NO: 16833 - DNA, 120 bp, synthetic construct
  misc_feature 1..120: note = Artificially Synthesized Probe
  source 1..120: mol_type = other DNA
atgttagcacacgcatagaaaaaagttggctgcaaaccactaaaacattggttaattttgctttatacattttcagagctaactgttactaagtacttgctaggcaccattctaagcact

SEQ ID NO: 16834 - DNA, 120 bp, synthetic construct
  misc_feature 1..120: note = Artificially Synthesized Probe
  source 1..120: mol_type = other DNA
gccccattttctgactacatttcccgatattctgtctttaaatcttcaaggcaggtcacctgctacagaaagcacaagggatctaggatagataagtcaaaaaccaaatacagtaaaatg

SEQ ID NO: 16835 - DNA, 120 bp, synthetic construct
  misc_feature 1..120: note = Artificially Synthesized Probe
  source 1..120: mol_type = other DNA
caactcccctttctgctccccttgacaagggttccttgtgttccccttttagtttccttcacagcacttactagcatctgacgaagtctatatttttacttgtgtatttaggtttttttt

SEQ ID NO: 16836 - DNA, 120 bp, synthetic construct
  misc_feature 1..120: note = Artificially Synthesized Probe
  source 1..120: mol_type = other DNA
tgctaatcactttgcaattctgcctcccaagttactaaatcacccagtctcaatttccttatgagtcaagtaagatgtactctggtctcctcacagggttattacaaacgtgaaaatttg

SEQ ID NO: 16837 - DNA, 120 bp, synthetic construct
  misc_feature 1..120: note = Artificially Synthesized Probe
  source 1..120: mol_type = other DNA
ttgtgaggattaaaacaaaatgtatctgatacttggagtggcggctgccatagttagtgctgtgtataatcatcctccatgccacactgacttccatggtaaggatatgtgataaagtgt

SEQ ID NO: 16838 - DNA, 120 bp, synthetic construct
  misc_feature 1..120: note = Artificially Synthesized Probe
  source 1..120: mol_type = other DNA
caaatcccttcatcagaaagtcccagaaggagggacaagcctaaattcctctgtaggccttggtcttttgaatgagggcaaattacttcccttccttgtttcactcatttgtaaaatggc

SEQ ID NO: 16839 - DNA, 120 bp, synthetic construct
  misc_feature 1..120: note = Artificially Synthesized Probe
  source 1..120: mol_type = other DNA
gtaacttgtccaagctagtaagtggccaagctagaatttcagccctactctgaaaaagcaagtactttggccatttttcttaactgtatctctgcagggtatagatttgatctccaagaa

SEQ ID NO: 16840 - DNA, 120 bp, synthetic construct
  misc_feature 1..120: note = Artificially Synthesized Probe
  source 1..120: mol_type = other DNA
tatttctcttaaaaaaaaacaccatgcggacttttctaagtgttactttgccatacgtacgtggcaggggagttataaggagtaaatgagcaaatacacgcaaattacccagcacggtgc

SEQ ID NO: 16841 - DNA, 120 bp, synthetic construct
  misc_feature 1..120: note = Artificially Synthesized Probe
  source 1..120: mol_type = other DNA
aacatacattaagtggcactaattacacagtaactataaggtaactaacatgaaaccacagaactgtaactctgccacagctgcatgaacttgggcttttctggttgagcccattttcaa

SEQ ID NO: 16842 - DNA, 120 bp, synthetic construct
  misc_feature 1..120: note = Artificially Synthesized Probe
  source 1..120: mol_type = other DNA
cccaaaagcgccaatcctgtttgccatatctctgccttcttcaggtttcaccggctcctagcaaagaaaaaaaaatagtccttttagctaatagtgtggcatacatatagtaagtaaaaa

SEQ ID NO: 16843 - DNA, 120 bp, synthetic construct
  misc_feature 1..120: note = Artificially Synthesized Probe
  source 1..120: mol_type = other DNA
aagagcaaaattactcaagctaccaatccaggactaaatgccctgaaggaaataaagcctacccttgacattcagacagagaaacctgagtaagagaacttaggttgaagatctcaatgc

SEQ ID NO: 16844 - DNA, 120 bp, synthetic construct
  misc_feature 1..120: note = Artificially Synthesized Probe
  source 1..120: mol_type = other DNA
tgggcacgttgggacagaaatgcttgacttctggggtccacttttctgggatgttttctgaaagaaaaatgtagagaatttggggatacatacaattctatcttgaagactttccaagaa

SEQ ID NO: 16845 - DNA, 120 bp, synthetic construct
  misc_feature 1..120: note = Artificially Synthesized Probe
  source 1..120: mol_type = other DNA
ctccagacagcgtggtggctcgtgcctgtaatcccagcactttgggaggcttaggtgggtggatcaccagaggtcaggagttcgagaccagcctggccaacatggcgaaacctcatctct

SEQ ID NO: 16846 - DNA, 120 bp, synthetic construct
  misc_feature 1..120: note = Artificially Synthesized Probe
  source 1..120: mol_type = other DNA
ggcagggaaattccttgaaccagggaggtggaggttgcagtgagccaagatcgtgccactgccctccagcctgggcgacagagcgagactccgtctcaaaataaataaataaataaataa

SEQ ID NO: 16847 - DNA, 120 bp, synthetic construct
  misc_feature 1..120: note = Artificially Synthesized Probe
  source 1..120: mol_type = other DNA
cagtgcctggcctagaatagatgttctgttagtaggtgctgtagttatttcctgaatatgtgaaattataccaatagtctacccccttcctggagtttgaggtacatagaatttgaataa

SEQ ID NO: 16848 - DNA, 120 bp, synthetic construct
  misc_feature 1..120: note = Artificially Synthesized Probe
  source 1..120: mol_type = other DNA
gcctctaaatcaatcaatcaatcataactgctgaaaatgatctaagtgaaccaacggcatggaatacgtgctctttctctgtcctgggacatactgcacagaggactcaatcttagctca

SEQ ID NO: 16849 - DNA, 120 bp, synthetic construct
  misc_feature 1..120: note = Artificially Synthesized Probe
  source 1..120: mol_type = other DNA
tgtggctgtgtttaggctaatgaaatgatcacattcaagcttctatcagctaagacacttcagaaaaaggctaagacagggcaaccaaaaaaaagaaagtctttccccaaaagagatggc

SEQ ID NO: 16850 - DNA, 120 bp, synthetic construct
  misc_feature 1..120: note = Artificially Synthesized Probe
  source 1..120: mol_type = other DNA
agagtgcaaggttaatccccccacccacttttagaaaaagtgacacttaccatagtacattgaaatggcagaccattgaaatggcagacggtctaaaacagtaaaacacaggagtattta

SEQ ID NO: 16851 - DNA, 120 bp, synthetic construct
  misc_feature 1..120: note = Artificially Synthesized Probe
  source 1..120: mol_type = other DNA
caccacacccggccgagtattcacttttatgagcatcaagctcaaatgagagtatatttaaattattttaggttgaaatttctcaaaattgaaaatctgagaacccacctctacaaaaac

SEQ ID NO: 16852 - DNA, 120 bp, synthetic construct
  misc_feature 1..120: note = Artificially Synthesized Probe
  source 1..120: mol_type = other DNA
caagactaagtaaattttctgctataatgtggaaaccatggaaacaaatctgtattttgagttggtaggtaggaaaagacaccatgctggctgttaggcaaggcctgagatgacaggaaa

SEQ ID NO: 16853 - DNA, 120 bp, synthetic construct
  misc_feature 1..120: note = Artificially Synthesized Probe
  source 1..120: mol_type = other DNA
aaggtttgcagcacaagaaaaatactcacagaccatgcctcaaggttttaagtcaaggtctctaaatttcttatgggcaagattctggttgttccaagatgcccaggcagaaataatgtt

SEQ ID NO: 16854 - DNA, 120 bp, synthetic construct
  misc_feature 1..120: note = Artificially Synthesized Probe
  source 1..120: mol_type = other DNA
cagggtacatcccaaaattctgttaggctggtatttgttgtattttttccatctatacttgggccagaaagtatcttagagttcctattagcataagagcaatcatcgtggctcactctg

SEQ ID NO: 16855 - DNA, 120 bp, synthetic construct
  misc_feature 1..120: note = Artificially Synthesized Probe
  source 1..120: mol_type = other DNA
gatcatgtcacagcactgcaggcctgggagacaaagtacaatccctgtctctttatttaagagaaaaaaaaaaaagtatgagaggccaagcaaagcattacttagacaacaaaaggaagc

SEQ ID NO: 16856 - DNA, 120 bp, synthetic construct
  misc_feature 1..120: note = Artificially Synthesized Probe
  source 1..120: mol_type = other DNA
aatttttgtcaaagtccaagcatacaaagaagttcatctgagcattatctatatggcaatgaactaaacttcaaatatacgtaaacttgaaaagagcacatatggctgggcaaggtggct

SEQ ID NO: 16857 - DNA, 120 bp, synthetic construct
  misc_feature 1..120: note = Artificially Synthesized Probe
  source 1..120: mol_type = other DNA
gctgaaacacaaaacacagatattacctgcaatgcacaagaagtcataggtagcttacaggatgacacatgctttggtaaccatggggcataaacctctattagcatactcaaattcaaa

SEQ ID NO: 16858 - DNA, 120 bp, synthetic construct
  misc_feature 1..120: note = Artificially Synthesized Probe
  source 1..120: mol_type = other DNA
aaaaaaaaggaaacaatttgtcaagcagggtaaaaacaatgaaaggactgatgaaagggagtacccaagggaggaaagaaccaaaaaagtcatcggcaggttgtttgggtagacattctg

SEQ ID NO: 16859 - DNA, 120 bp, synthetic construct
  misc_feature 1..120: note = Artificially Synthesized Probe
  source 1..120: mol_type = other DNA
cagagtggaaccttgtctcaaactcttatgactcaactacaaaaaagcagcttaggttggtggtctggctcaggatctcttgcaaggttgaaatcataaagaactctttttgggctgggc

SEQ ID NO: 16860 - DNA, 120 bp, synthetic construct
  misc_feature 1..120: note = Artificially Synthesized Probe
  source 1..120: mol_type = other DNA
tacaggcgtgagccactgcccatctatctacgcatctatccaatctatgtacctatctaacctatctatgtgtttctctattatgtagttattttcagaaagggtctcattctgtcacca

SEQ ID NO: 16861 - DNA, 120 bp, synthetic construct
  misc_feature 1..120: note = Artificially Synthesized Probe
  source 1..120: mol_type = other DNA
gagaaaatagactggtagttgcctagggcagggacttgggggtggagagaaatggaaaatgactaatggaatactggagtttctcaggtaaaaagatttttccaaaattattgtggtgat

SEQ ID NO: 16862 - DNA, 120 bp, synthetic construct
  misc_feature 1..120: note = Artificially Synthesized Probe
  source 1..120: mol_type = other DNA
tgatcttgggagccaccatctcagccccaagactgcctaccttccatgtttcttccatatgaatgagaaataaatgactgtcttatttaaggtggtatttttcaagtctctgttacctat

SEQ ID NO: 16863 - DNA, 120 bp, synthetic construct
  misc_feature 1..120: note = Artificially Synthesized Probe
  source 1..120: mol_type = other DNA
tgcagtgagctgagaacgcgccactgcactccagcctgggcaacacagtgagactctgtcaaaaaaaaaaaaggattggcatggtggctcacgcctgtaatcccagcactttgggaggcc

SEQ ID NO: 16864 - DNA, 120 bp, synthetic construct
  misc_feature 1..120: note = Artificially Synthesized Probe
  source 1..120: mol_type = other DNA
tgtctcaccaaataaagatttaataaactttacatctctcataaggcctaatctgcatgggcttttgcccaaagtcaaacaaccaggaccctatgggatgcaaagaaacgtcaacaggaa

SEQ ID NO: 16865 - DNA, 120 bp, synthetic construct
  misc_feature 1..120: note = Artificially Synthesized Probe
  source 1..120: mol_type = other DNA
agttcaacatgcccacaatatttgttccagtattgacttaaatcttctgttatggtttgaaaagtttccttatagatggggaataaatcattgcctgtccttgggccctctccagcccca

SEQ ID NO: 16866 - DNA, 120 bp, synthetic construct
  misc_feature 1..120: note = Artificially Synthesized Probe
  source 1..120: mol_type = other DNA
agcattctttacaagtacatggtttgtcaagaaaggaaatcacgcttagctctcccagacgtgtcattttccaggctaggtttagtctcagaaataacttataagtttggagtagaggtt

SEQ ID NO: 16867 - DNA, 120 bp, synthetic construct
  misc_feature 1..120: note = Artificially Synthesized Probe
  source 1..120: mol_type = other DNA
tggaaatctagtcacctcagcattatttactgaaaagactattttccccccaactggatggtcctggcacacttgagaaatcaactaattagcaactgagggtttactttggattaatcc

SEQ ID NO: 16868 - DNA, 120 bp, synthetic construct
  misc_feature 1..120: note = Artificially Synthesized Probe
  source 1..120: mol_type = other DNA
acaaatgaagaaactgagtatggaaaggctaatttgttcaacgtcagtcgcactgctagccagtaagaggcagaattggacactgaagtaaattaagcaatccgtttcagagtacacatt

SEQ ID NO: 16869 - DNA, 120 bp, synthetic construct
  misc_feature 1..120: note = Artificially Synthesized Probe
  source 1..120: mol_type = other DNA
ttttagatgtgtgtatcttttttctgtacacaccagaggaagaaataataacaatgtcacatatgtttgagtcactctgaaatcatcaactcttggttctttggttctagcatgtcttac

SEQ ID NO: 16870 - DNA, 120 bp, synthetic construct
  misc_feature 1..120: note = Artificially Synthesized Probe
  source 1..120: mol_type = other DNA
tggtgtgtccatcatatgttcttcagatgctacagtggctactgactatgcttcagtaggtaaattaaaaccatgcattaatgagcaactctccgcatttcacatagcagtctttggtaa

SEQ ID NO: 16871 - DNA, 120 bp, synthetic construct
  misc_feature 1..120: note = Artificially Synthesized Probe
  source 1..120: mol_type = other DNA
tatttccagccacatgtcattaatagactaattcctctgctgaaaaagagtcatgacacttcttacttcttacagcagtgaacagactcaggagctctgttctgtccagaattccaatag

SEQ ID NO: 16872 - DNA, 120 bp, synthetic construct
  misc_feature 1..120: note = Artificially Synthesized Probe
  source 1..120: mol_type = other DNA
atgtcaggatttaattcacaccttacttgggatgctagccagtttgaaccagtcaacatgtaaaaggaaaatacagatgtaacaaaagttggactggaaaaacacgtggcttaatcctct

SEQ ID NO: 16873 - DNA, 120 bp, synthetic construct
  misc_feature 1..120: note = Artificially Synthesized Probe
  source 1..120: mol_type = other DNA
ttcaagtgtgaacacaacagacaaaaagtctggattgcattcaatcctacaactggtaatgtcacagcttcactgcccaacgtggtagctactagccacattgtgactttctttttttaa

SEQ ID NO: 16874 - DNA, 120 bp, synthetic construct
  misc_feature 1..120: note = Artificially Synthesized Probe
  source 1..120: mol_type = other DNA
tacagcacgtccaccatcacagaaagacaacgctgttctaaacatgtctcccacagctgctggattggtcaaagaagacatatccacaatttaatgtcacaaatttttccagaaaatggt

SEQ ID NO: 16875 - DNA, 120 bp, synthetic construct
  misc_feature 1..120: note = Artificially Synthesized Probe
  source 1..120: mol_type = other DNA
taaaaaaatcaggtattttaaagataaattctaagtgctcccatccatcttttacgcttccttcttagtcactctgccacctactactgcagtataatggtgatcttctccttgccaggc

SEQ ID NO: 16876 - DNA, 120 bp, synthetic construct
  misc_feature 1..120: note = Artificially Synthesized Probe
  source 1..120: mol_type = other DNA
aaccactgtcttctatgggccattccttgttctagctactagagatacagctttatctggaaaacactcagggaaaacagcacaatgtaattaagtgctgtaacaaaagcttatcttctc

SEQ ID NO: 16877 - DNA, 120 bp, synthetic construct
  misc_feature 1..120: note = Artificially Synthesized Probe
  source 1..120: mol_type = other DNA
aaagaattcagaaaggagatttttgaaaataagggtggaaagatggggcgatggttagaccagaggatatggtatgtcatgcagagcaatctgcattctattctgtaaggaagggaaagc

SEQ ID NO: 16878 - DNA, 120 bp, synthetic construct
  misc_feature 1..120: note = Artificially Synthesized Probe
  source 1..120: mol_type = other DNA
aggtgtccagcaacaggagaaaaccttttcatatagccacaggcaagagtagatggcagtgaattgagaaaacgtgggcactgagatatgtggtggaaaatgttctttcaagaagtcagc

SEQ ID NO: 16879 - DNA, 120 bp, synthetic construct
  misc_feature 1..120: note = Artificially Synthesized Probe
  source 1..120: mol_type = other DNA
tttaaaaaaaataagcgttgaaagtatggcagagactgcctgcttatctgcctcaatagctttccccttcatagtcacatggctgccagttataaagactacatttcccagcattcactg

SEQ ID NO: 16880 - DNA, 120 bp, synthetic construct
  misc_feature 1..120: note = Artificially Synthesized Probe
  source 1..120: mol_type = other DNA
aaatggagaatacataaaagggggtaattacagtgataaactaaaggtaaggagcagtgaaagggtaggcagtagcatcaatagatgttaagccccagtgggggcttaaagaattttgct

SEQ ID NO: 16881 - DNA, 120 bp, synthetic construct
  misc_feature 1..120: note = Artificially Synthesized Probe
  source 1..120: mol_type = other DNA
taccatagtgtaatggcgggatacatagatatacaaaacagggcttgacagaggtgtacaatattcaccaatagacactggtatatgtatagactgtctctagaatagtacacaggagct

SEQ ID NO: 16882 - DNA, 120 bp, synthetic construct
  misc_feature 1..120: note = Artificially Synthesized Probe
  source 1..120: mol_type = other DNA
ggctactctaaattcttctttatccctgaactcctacagcacttcgtctttcagtgctgtttcatgcctatgtgagcttgaatcactgaatactttgttctggtacagagaagactgtat

SEQ ID NO: 16883 - DNA, 120 bp, synthetic construct
  misc_feature 1..120: note = Artificially Synthesized Probe
  source 1..120: mol_type = other DNA
aaatgaagttgaaaacatagagctgtttattttgtttactgactgcatgggaaattcctgatgaaagggccaaactaccatccatccatctgtccataatgaacttgagcctggtatagg

SEQ ID NO: 16884 - DNA, 120 bp, synthetic construct
  misc_feature 1..120: note = Artificially Synthesized Probe
  source 1..120: mol_type = other DNA
tcaggatttgactttgtttggcctaattccaaacttacattgcctctaagacaatgcgtatctagtaaaactgacaaagaaaaatgaaccattaggtacctcccagtgagctggctaaga

SEQ ID NO: 16885 - DNA, 120 bp, synthetic construct
  misc_feature 1..120: note = Artificially Synthesized Probe
  source 1..120: mol_type = other DNA
gtatgtgcattttattgtatgcaaattaaacctccatgaaggtaattaaacctcaggtgattccaatttggggaactggattccaagtttgggaacagtggagtctaggaaccactgttc

SEQ ID NO: 16886 - DNA, 120 bp, synthetic construct
  misc_feature 1..120: note = Artificially Synthesized Probe
  source 1..120: mol_type = other DNA
acacacacacacacaaaattagccgggcatggtggcacgcacctgtagtcccagctacttgggaggctgaggcaggagaatcgcttgcaccctggtaggcagagattgcagtgagccgag

SEQ ID NO: 16887 - DNA, 120 bp, synthetic construct
  misc_feature 1..120: note = Artificially Synthesized Probe
  source 1..120: mol_type = other DNA
taagttagttgaagggctacatgtctggcacttgaggtaagtgcttctctctcactgaaatctcatggcgcttccttaccattccctttctacagaagaaaaaaactgaattacaaagga

SEQ ID NO: 16888 - DNA, 120 bp, synthetic construct
  misc_feature 1..120: note = Artificially Synthesized Probe
  source 1..120: mol_type = other DNA
aaccatatacttgaagtcaaaacaagcaacttttttaaatcatgggactgaatccttgtgctttagagcagctataagcttcagaaattaaaaatcttggccagggtagctcacgcccgt

SEQ ID NO: 16889 - DNA, 120 bp, synthetic construct
  misc_feature 1..120: note = Artificially Synthesized Probe
  source 1..120: mol_type = other DNA
atcatgtcattccctttctaaagaatatctaaatgacttctaatctcagaacaaatccaaagaatttcccatgtcctaaaggccctatatgatttggcccctgcccacctctctaacctc

SEQ ID NO: 16890 - DNA, 120 bp, synthetic construct
  misc_feature 1..120: note = Artificially Synthesized Probe
  source 1..120: mol_type = other DNA
tatttggatgaagcatcaataaactgagaccaacacccagaacgagcagcttcagtgcctgattttcagtcacatgactatcgtaattatgaacataccaaggccttcacttaatactac

SEQ ID NO: 16891 - DNA, 120 bp, synthetic construct
  misc_feature 1..120: note = Artificially Synthesized Probe
  source 1..120: mol_type = other DNA
aatcactagtaaccacaatgcaattaaacccaaggtgctgtctacagaaggccagcagcttcaaattagctctcttagaagctgatcagtctttcttctcagagttaacatatatctctc

SEQ ID NO: 16892 - DNA, 120 bp, synthetic construct
  misc_feature 1..120: note = Artificially Synthesized Probe
  source 1..120: mol_type = other DNA
ctagcactagactttaactcaaaccaaggtgcaccttatatatttaatgtccccaagagccatcagtgctccacaaaagtagatggaaccaattaagacaagttatccagagatccttca

SEQ ID NO: 16893 - DNA, 120 bp, synthetic construct
  misc_feature 1..120: note = Artificially Synthesized Probe
  source 1..120: mol_type = other DNA
actggactttaatcaatatgaaacagtgattgtcgtttctcgttaaacgtaaaaagcaaaatggagttgtaaagagtttctttcccatttcaactccgacagccacgcgcgctttcagcg

SEQ ID NO: 16894 - DNA, 120 bp, synthetic construct
  misc_feature 1..120: note = Artificially Synthesized Probe
  source 1..120: mol_type = other DNA
gaacttaacattggttcacggccttactaccctgaacgcatctgacctcggaagctaagccaggtacttggatgggagaacttaacgttgtgccctgactcatgccaccataccatttta

SEQ ID NO: 16895 - DNA, 120 bp, synthetic construct
  misc_feature 1..120: note = Artificially Synthesized Probe
  source 1..120: mol_type = other DNA
atgaatataaaagtgaacattactgcgtttctgaacaactaaggcaaaactcagaaacacaactcttgagaacgtttagagctccatggctgcccttggcacacactcagttaaagagct

SEQ ID NO: 16896 - DNA, 120 bp, synthetic construct
  misc_feature 1..120: note = Artificially Synthesized Probe
  source 1..120: mol_type = other DNA
attcctgtggtagaacagcacgcagtcaccacgtggtacttttgaagtttttagcaacagggcaaatgcctacgttatatcttagcttcaaaaaagcaaactcctggctgggcatggtgg

SEQ ID NO: 16897 - DNA, 120 bp, synthetic construct
  misc_feature 1..120: note = Artificially Synthesized Probe
  source 1..120: mol_type = other DNA
tcttccacatgagggcgtaaatatcctacattttaatctttctacctttatgcacctctgcagcttagagaatatgtaagccatctgaatcatcagcagctggatagcaagacctggaaa

SEQ ID NO: 16898 - DNA, 120 bp, synthetic construct
  misc_feature 1..120: note = Artificially Synthesized Probe
  source 1..120: mol_type = other DNA
tagccgttgcctcctcatccgtcagcctcacaccagtgattaaaacaaaaccctgtacattgaacacacagaaccacaaataataacgatggcaggtatcttttgttaagtaacttatgc

SEQ ID NO: 16899 - DNA, 120 bp, synthetic construct
  misc_feature 1..120: note = Artificially Synthesized Probe
  source 1..120: mol_type = other DNA
taatgtgtttcacaaagatgtccatttgaaaaatttaactgaaacatgctgacatttgaagagagtaaatttcaccatctggatgcccagcagcctgtttccctgtgatgccagatccac

SEQ ID NO: 16900 - DNA, 120 bp, synthetic construct
  misc_feature 1..120: note = Artificially Synthesized Probe
  source 1..120: mol_type = other DNA
ggacacagattctccagcttaggtccaggtaaaatacccaagcaaacaaaaaccaatcaaacaaccttggataaaaatacaagaatccagacttgctgggacaaatacagtacccaggtt

SEQ ID NO: 16901 - DNA, 120 bp, synthetic construct
  misc_feature 1..120: note = Artificially Synthesized Probe
  source 1..120: mol_type = other DNA
ttcttgccgcttgtattcaacactgtattgaaagttccagagagggcggttaggcgagaaaaacaaatgaaagtcctgcagtgggacgggaagtgaaaagataaaaataaaagtaaaaga

SEQ ID NO: 16902 - DNA, 120 bp, synthetic construct
  misc_feature 1..120: note = Artificially Synthesized Probe
  source 1..120: mol_type = other DNA
aatggaagccagaagacagaggaatgacatatataccaagtgctaaaaagtcaaccaagaaaatgtatcttcagtgaaattatccttcaaaatgaagacaaagacattcaaatatggaaa

SEQ ID NO: 16903 - DNA, 120 bp, synthetic construct
  misc_feature 1..120: note = Artificially Synthesized Probe
  source 1..120: mol_type = other DNA
ctctgtcttcatacggcctcttttgtgtgtgtgcagagttagtaagcaagctccctggtgtctcttttgttttttgaaaatttatgatgatacagtttcctaccttaaccattttcagtg

SEQ ID NO: 16904 - DNA, 120 bp, synthetic construct
  misc_feature 1..120: note = Artificially Synthesized Probe
  source 1..120: mol_type = other DNA
cagaccaaataattctgaagtttgtttcaggtttaaccatcttcataaaaatactttgaggaaagctgcatccacagacttcaactatgtgattacttctttgtccattctcctctctcg

SEQ ID NO: 16905 - DNA, 120 bp, synthetic construct
  misc_feature 1..120: note = Artificially Synthesized Probe
  source 1..120: mol_type = other DNA
agctcaagcgatccttttgccttggtctcccaaagtgatgggatgacaagtgtgcaccactgcgcccaggctttgcccatttttgaatcaggttgttcgttgttaagttttagttcttta

SEQ ID NO: 16906 - DNA, 120 bp, synthetic construct
  misc_feature 1..120: note = Artificially Synthesized Probe
  source 1..120: mol_type = other DNA
caatggactatcaaatcagaaagtatagattataatagatcaaaaaaagatctaaccatatgttgtctatcagaggcacatcatggattcaaagacacaggcaggttgaaaataaaagga

SEQ ID NO: 16907 - DNA, 120 bp, synthetic construct
  misc_feature 1..120: note = Artificially Synthesized Probe
  source 1..120: mol_type = other DNA
tgtaaggtaatgagaagataaaataatgaacaacgcagtctcttattctcatcccatattcaccattccccatgctcttcattccttctaacagattgaagtgactgtgtggcatcaacc

SEQ ID NO: 16908 - DNA, 120 bp, synthetic construct
  misc_feature 1..120: note = Artificially Synthesized Probe
  source 1..120: mol_type = other DNA
ttcagaatttgaggcctttattcttcggaactgttgaggacaagaaaaagaagtatgaagaaatgttccagtccagaggagagagaagagatgttacagctggatgtagctcatctttcc

SEQ ID NO: 16909 - DNA, 120 bp, synthetic construct
  misc_feature 1..120: note = Artificially Synthesized Probe
  source 1..120: mol_type = other DNA
gttttgtaagactgtgttcttggtttttagcgatgctagggcaccacatcggtaacatgctcagtggttcagagaaataccaatgatgacagattgggagcaaattaacaaaatgttaac

SEQ ID NO: 16910 - DNA, 120 bp, synthetic construct
  misc_feature 1..120: note = Artificially Synthesized Probe
  source 1..120: mol_type = other DNA
taaaaaaactcatcttacaacatacctcaagataaactccaaagaatttggaagaaggtaaacattaaaaactagaagaattctgttctgtgaaagataatgtcaagagaacaaaggaca

SEQ ID NO: 16911 - DNA, 120 bp, synthetic construct
  misc_feature 1..120: note = Artificially Synthesized Probe
  source 1..120: mol_type = other DNA
gtgataatgatgtattcaagtaggatcatcagttttaacacatggactgctctggtggaggatgaggatgatgggggagctgtgcgtgtgtggagtcatggtgtatatgggaaatctgta

SEQ ID NO: 16912 - DNA, 120 bp, synthetic construct
  misc_feature 1..120: note = Artificially Synthesized Probe
  source 1..120: mol_type = other DNA
agctttgattaaacatgacctttcagggaatgcattttaatcgatgcatgtatcggtctgaggttacaggacattttacttacccattcgtccatcttgaggtggactaatcatggagat

SEQ ID NO: 16913 - DNA, 120 bp, synthetic construct
  misc_feature 1..120: note = Artificially Synthesized Probe
  source 1..120: mol_type = other DNA
ctttctcatggagctgtccactaagcacattccccatccacctgaagctcatgacctcactcctacccccaagaagacagaatcttgtgaaatcaggagcttttgtctctgtaccttcag

SEQ ID NO: 16914 - DNA, 120 bp, synthetic construct
  misc_feature 1..120: note = Artificially Synthesized Probe
  source 1..120: mol_type = other DNA
ctgtgtacgcatcggtgtgttcacatctgcatttggctgcctacacgcatgtttgctctttggattctcctttaaaccagttttcacatttaactggtgtattaggccattcttgcactg

SEQ ID NO: 16915 - DNA, 120 bp, synthetic construct
  misc_feature 1..120: note = Artificially Synthesized Probe
  source 1..120: mol_type = other DNA
tccaaaggaactgctacacacatccactccagggtgacaaggcgtttcgggaggtgaaaagttggttttagacactttccttgaaatttgcattctggtgtggcacaggggttggcaaac

SEQ ID NO: 16916 - DNA, 120 bp, synthetic construct
  misc_feature 1..120: note = Artificially Synthesized Probe
  source 1..120: mol_type = other DNA
atgtctggtctttgcccctcacttaggaactttgattcattacattctggttcctcagcaataatttccaacagtagcacctagtgaagtgtcaatcaatttagcctgccagtcttttct

SEQ ID NO: 16917 - DNA, 120 bp, synthetic construct
  misc_feature 1..120: note = Artificially Synthesized Probe
  source 1..120: mol_type = other DNA
aagttgttgcttcctgtttcccagagtccttggcttttctgacccatttcttttcctgggctgacaaagtttactactgtcttcttcagcactgtttgtcatttcatgagacagcaagtg

SEQ ID NO: 16918 - DNA, 120 bp, synthetic construct
  misc_feature 1..120: note = Artificially Synthesized Probe
  source 1..120: mol_type = other DNA
tccatcgactccagtctgttaaacacatagtgaaaggctttgagtgagcccaggacttacctctaacaacgtcagttgaaatacacacatgacgagatgatgtgtaaatgtctaaatctt

SEQ ID NO: 16919 - DNA, 120 bp, synthetic construct
  misc_feature 1..120: note = Artificially Synthesized Probe
  source 1..120: mol_type = other DNA
ctcactcttttccaacagctccagcaagagtcccaggggtgactccaattagtccagcctggctggagtgaattctaattttaggtggcctcagcactcattttgaagacaggtttaact

SEQ ID NO: 16920 - DNA, 120 bp, synthetic construct
  misc_feature 1..120: note = Artificially Synthesized Probe
  source 1..120: mol_type = other DNA
ggaagagtgatgacgaaaatgccagcgtcagtgcacacagtgtgactcagcaacatgcatctctattttgttctctttctggcatgattttacttacttgaaactgaactttttattgtg

SEQ ID NO: 16921 - DNA, 120 bp, synthetic construct
  misc_feature 1..120: note = Artificially Synthesized Probe
  source 1..120: mol_type = other DNA
gaaaagagaaaagaaagaaaaacaggccagcaagagaaatatggacaagttacttggtcacgttttccagtctagcaaccctggactgatctccacgatggccagtagcagagaccacct

SEQ ID NO: 16922 - DNA, 120 bp, synthetic construct
  misc_feature 1..120: note = Artificially Synthesized Probe
  source 1..120: mol_type = other DNA
gactacataaaagacgaagatgcaacaatgagcaaggactattttccaaatggtgaaatgagcaggaatgttctcaaaatgttaactgtaatggacagaacaaaaactcaatgggggccg

SEQ ID NO: 16923 - DNA, 120 bp, synthetic construct
  misc_feature 1..120: note = Artificially Synthesized Probe
  source 1..120: mol_type = other DNA
ttaaaggaggaatttgcaaatgtttctgcaaagggctagctagtaaatgtaggaggctttgctgtccacataaggtctccgttgcaatgcgtttacaatcttctagaaatgtaaaagcca

SEQ ID NO: 16924 - DNA, 120 bp, synthetic construct
  misc_feature 1..120: note = Artificially Synthesized Probe
  source 1..120: mol_type = other DNA
ggtttcaaatggctagattttccagatattgaaatgtaatgctttaagtccccattttggttaatcctagcaactctggatgtttcttcctaagatgcaacacccattcacagcagtgcc

SEQ ID NO: 16925 - DNA, 120 bp, synthetic construct
  misc_feature 1..120: note = Artificially Synthesized Probe
  source 1..120: mol_type = other DNA
ccccaagagagtgactagagtctaggatcccactgtccagtctgtaatcatggcttatgcccatcctccaggtttgctgggaggattaggagacaacatacacaaaatataacaaaatct

SEQ ID NO: 16926 - DNA, 120 bp, synthetic construct
  misc_feature 1..120: note = Artificially Synthesized Probe
  source 1..120: mol_type = other DNA
ggctgacaggacagggtgggtgtgacaggagcagggagtgggtaataggatggggtaaaggggtgacagaatggggttgagaggtgacagaatgtggtgggggtatgatatggtttggct

SEQ ID NO: 16927 - DNA, 120 bp, synthetic construct
  misc_feature 1..120: note = Artificially Synthesized Probe
  source 1..120: mol_type = other DNA
ctggaggcattttgctcctgccctcaatgtctgtggaactttgaacttgaaaaagatgatttagggcatctggcagaagaaatttctaagcagcaaagcgttcaagatgtgacctggctt

SEQ ID NO: 16928 - DNA, 120 bp, synthetic construct
  misc_feature 1..120: note = Artificially Synthesized Probe
  source 1..120: mol_type = other DNA
aaaggataaatttaagatttaatggctgccctgctgggttctggacttgcatggggcctgcagcccctttgttttggtcaatttctcccatttggaatgggaacatttacccaatgcctg

SEQ ID NO: 16929 - DNA, 120 bp, synthetic construct
  misc_feature 1..120: note = Artificially Synthesized Probe
  source 1..120: mol_type = other DNA
ccaggttcccttgtctttaaagctgggttcctgactttaccgactacataaccttcaaagttttttaaaaaggacttgtttttcaaaatgggatggttgagcagagaagccttcaagctg

SEQ ID NO: 16930 - DNA, 120 bp, synthetic construct
  misc_feature 1..120: note = Artificially Synthesized Probe
  source 1..120: mol_type = other DNA
catgcatgctgtctagacagcttgaactgggtttctgagagtaccaacataaggaggaaagagagtcctgtgatttcctcagaggaagaaaagagctatttcgtatgagttgagtgttca

SEQ ID NO: 16931 - DNA, 120 bp, synthetic construct
  misc_feature 1..120: note = Artificially Synthesized Probe
  source 1..120: mol_type = other DNA
cagagacttgagacactgggtgtggcctcagaagagggtagattttaataataaaacaaagtttaaaagggacagtgagtgtttatcttgcagagaatatgcctcttgaactgagccaga

SEQ ID NO: 16932 - DNA, 120 bp, synthetic construct
  misc_feature 1..120: note = Artificially Synthesized Probe
  source 1..120: mol_type = other DNA
aacatattgtaacaaatgccaatatttatgttacgttgatattagagcataaatgttacaataccacctcacgtcacacagctgcgggaaaactccaccctgcgtttgtgatgctcacct

SEQ ID NO: 16933 - DNA, 120 bp, synthetic construct
  misc_feature 1..120: note = Artificially Synthesized Probe
  source 1..120: mol_type = other DNA
ccttggaggatgtggctgggcataacttgagacggcaacagcctcgggaaagcctgagatactgtgggtgattcaggctgtttcagaagcaaggaagctcccagaggaggacagtcttgg

SEQ ID NO: 16934 - DNA, 120 bp, synthetic construct
  misc_feature 1..120: note = Artificially Synthesized Probe
  source 1..120: mol_type = other DNA
taaaaattcaacccacagaaatattttggcagaaaatatttgctgatcaaatatcttcaaaggaacttgcctccagaacacagaaaacacatggtctcaggatagcgcacctggctcatc

SEQ ID NO: 16935 - DNA, 120 bp, synthetic construct
  misc_feature 1..120: note = Artificially Synthesized Probe
  source 1..120: mol_type = other DNA
atcacggaaccaagcacaccccccacagctccacggtctcgggatagcgcacctggctcatcacggaaccaagcacaccccccacagctccacggtctcgggatagcgcacctggctcat

SEQ ID NO: 16936 - DNA, 120 bp, synthetic construct
  misc_feature 1..120: note = Artificially Synthesized Probe
  source 1..120: mol_type = other DNA
taggctgacaagcattaagtcaccactatgtagtcacaagtacatgtcgagttatttaaaaagcaaatgtaaggaccttaagaaaggacacaggtttaagaaacagcgtctcgtaggtcg

SEQ ID NO: 16937 - DNA, 120 bp, synthetic construct
  misc_feature 1..120: note = Artificially Synthesized Probe
  source 1..120: mol_type = other DNA
agtgagcgcatagagtcaagacagtcatctaagcccatccacctacctaccagtggctccccaaatcccactgaaatgatagtaaaatttaggaaaaaaatactctatttgtggtagaaa

SEQ ID NO: 16938 - DNA, 120 bp, synthetic construct
  misc_feature 1..120: note = Artificially Synthesized Probe
  source 1..120: mol_type = other DNA
tcacattgcagagggccggcgataagccaggtgccggaattttcaaagtgctaagatgcattcactttcaacaaagaattctgaagtctgtgaaaatgtgcttcaagaaaaagacatttt

SEQ ID NO: 16939 - DNA, 120 bp, synthetic construct
  misc_feature 1..120: note = Artificially Synthesized Probe
  source 1..120: mol_type = other DNA
tagcgttaggtcttgttttgtgttcctgtcaaacattctgaaattattgttaagacccagtcacaacaccgtcagatccattccaacaacactgaatttgtcagacacatggtccttttc

SEQ ID NO: 16940 - DNA, 120 bp, synthetic construct
  misc_feature 1..120: note = Artificially Synthesized Probe
  source 1..120: mol_type = other DNA
gccgtggtggcatctctacacaccccatcttcctcttcaagttatatccttctggtcttttgtccctttcactgattttccataattgtattgttttattattggtagacaatactgagc

SEQ ID NO: 16941 - DNA, 120 bp, synthetic construct
  misc_feature 1..120: note = Artificially Synthesized Probe
  source 1..120: mol_type = other DNA
tcaacagagctaaaaattagtttttgaaaatacagtcatccttcagtatatgagggtaaattggttccaggaccccaagtgtgctgaaatccaggcatactaaagttccacagttggcct

SEQ ID NO: 16942 - DNA, 120 bp, synthetic construct
  misc_feature 1..120: note = Artificially Synthesized Probe
  source 1..120: mol_type = other DNA
aaccagaacagacctgatttaccaaaatgtggaaagagcattacaagaaaaaaaacttacaggtccagctctcatatgaacataggtgcaaaaaaccccatgcaaaatagtagcaaactg

SEQ ID NO: 16943 - DNA, 120 bp, synthetic construct
  misc_feature 1..120: note = Artificially Synthesized Probe
  source 1..120: mol_type = other DNA
caatagtagcagtccaaatcattgaatacctaacagagatactaacactgttgcacaaagcctccctaaagaacagtaagtccacaataacaatcccaacaggattctgtgtctgtggaa

SEQ ID NO: 16944 - DNA, 120 bp, synthetic construct
  misc_feature 1..120: note = Artificially Synthesized Probe
  source 1..120: mol_type = other DNA
ccaaccaatacggtggtgccctattctgtgcgttcaatcgtaatggagcattataatgacaaacaaatcaatatataaagatatctcaggtggtgacacacactgcgaagcagaataatc

SEQ ID NO: 16945 - DNA, 120 bp, synthetic construct
  misc_feature 1..120: note = Artificially Synthesized Probe
  source 1..120: mol_type = other DNA
agggaagaccagcattcggaagacactgcggaagaaagagcccacacggtctgtgatggtttagagaaagagaagcaggaacaacttctacatgttaaacaattttacttacacacacac

SEQ ID NO: 16946 - DNA, 120 bp, synthetic construct
  misc_feature 1..120: note = Artificially Synthesized Probe
  source 1..120: mol_type = other DNA
gccgagaagacaccatttttatgaaaaggtaaatcacaataacacacatagaataggtaccaaactcctggtcactgtcatctctgggaaacaggatctggggacttacacttttttttt

SEQ ID NO: 16947 - DNA, 120 bp, synthetic construct
  misc_feature 1..120: note = Artificially Synthesized Probe
  source 1..120: mol_type = other DNA
tatatatgacccctatacaaatccaaactctatcaccctcttaaggtgcctgtattgtgctgcagaaatctatttaacccactttcatttccaggaacacagcacgattcaacaacctag

SEQ ID NO: 16948 - DNA, 120 bp, synthetic construct
  misc_feature 1..120: note = Artificially Synthesized Probe
  source 1..120: mol_type = other DNA
agtgatatcttaatctaaaatttttaactattcaaaatgaacctcaagcttgattttctcactagtcaacttggagcccagggctgaccaggcactatgagccttcacactcctgtcatt

SEQ ID NO: 16949 - DNA, 120 bp, synthetic construct
  misc_feature 1..120: note = Artificially Synthesized Probe
  source 1..120: mol_type = other DNA
agcaagaaaattcctcttatgcaccatcacagctaggagtcatgcagtaaaagattaacagagccgactcataaaaatcgaaaagttcttacaagggaggaggattaacagacatgacag

SEQ ID NO: 16950 - DNA, 120 bp, synthetic construct
  misc_feature 1..120: note = Artificially Synthesized Probe
  source 1..120: mol_type = other DNA
tggtccaatggacactttcaaacaccaattccttgacttcactgggatgtccagttcatcaacatctcttttttacctgacatcttctttacctccttcaacaaatgctctttccaacaa

SEQ ID NO: 16951 - DNA, 120 bp, synthetic construct
  misc_feature 1..120: note = Artificially Synthesized Probe
  source 1..120: mol_type = other DNA
cacttttgtttttaaatacacacctgaaatcaacaactccactcccaggttacacacccaacagaaatgtgtacctaagatcaccgaagacaggagcaagaagattcacagtagcattat

SEQ ID NO: 16952 - DNA, 120 bp, synthetic construct
  misc_feature 1..120: note = Artificially Synthesized Probe
  source 1..120: mol_type = other DNA
gcggcccccactccccggtggcccctcctccgaatacccctacctccgcggcctctcacccccccatgccccccccgctccatgcgccgtttctccccctcggccccccacgcgcccccg

SEQ ID NO: 16953 - DNA, 120 bp, synthetic construct
  misc_feature 1..120: note = Artificially Synthesized Probe
  source 1..120: mol_type = other DNA
cccaccttgttgactttggttgtggttgggggatgggctttgatttgggtggcagtgtctgtgcttgggaaaaaatgtcagagaaaagacaggaagcggattgaatgcaacagtgttggg

SEQ ID NO: 16954 - DNA, 120 bp, synthetic construct
  misc_feature 1..120: note = Artificially Synthesized Probe
  source 1..120: mol_type = other DNA
tttagtctctggaataaaagggcagcagacctggagaaaagggatgcaaattgtcccatacacctattgggaacctcatcaaagagaagactgcagaagacagatgattgatgtttttat

SEQ ID NO: 16955 - DNA, 120 bp, synthetic construct
  misc_feature 1..120: note = Artificially Synthesized Probe
  source 1..120: mol_type = other DNA
ggcttgggctgtgctcctgttgggtttccattaaccaggggaccagctgggctgctgtgatttcactttcgcagaaaatgaaactgaagccgtggtcacgtgacaggacatgtagtatat

SEQ ID NO: 16956 - DNA, 120 bp, synthetic construct
  misc_feature 1..120: note = Artificially Synthesized Probe
  source 1..120: mol_type = other DNA
gagaggacaaaacaagaagttttgtcggggtctttgctggaggttcctgcttttgaaaattttcagtttcatttcctagagagagctcacggtttttcttccccttgggaatgagaagtg

SEQ ID NO: 16957 - DNA, 120 bp, synthetic construct
  misc_feature 1..120: note = Artificially Synthesized Probe
  source 1..120: mol_type = other DNA
catgcaaagcaaatgcacttgagactcctaattcaccacttgtaagaggccaggaatttggtgactctgtacatgatgcttttgaacatttatcgaaaaccaagaaatacagtgatgctg

SEQ ID NO: 16958 - DNA, 120 bp, synthetic construct
  misc_feature 1..120: note = Artificially Synthesized Probe
  source 1..120: mol_type = other DNA
agttccaaatgatataaagttgagtcaggttgagtttagtagtgtgggcccactagcagagattatgcatttcatgttgcagctggtagagttaggaaggcctctgagtctttgtttggt

SEQ ID NO: 16959 - DNA, 120 bp, synthetic construct
  misc_feature 1..120: note = Artificially Synthesized Probe
  source 1..120: mol_type = other DNA
attcccttaaaccacagccgaatccacagtaaagccctaactctcctgtagccacaattccacacaggctgacagagttgaggaggctgcagagaagatcttgaagctagcagagactgg

SEQ ID NO: 16960 - DNA, 120 bp, synthetic construct
  misc_feature 1..120: note = Artificially Synthesized Probe
  source 1..120: mol_type = other DNA
caaagatgcaggggtggggattcccattcacctcccctatttggcctttgtggaagacgggtggatcttgggaatgaaaatgaatgatcgtaagcttaatcaaatggtgatttctcagcc

SEQ ID NO: 16961 - DNA, 120 bp, synthetic construct
  misc_feature 1..120: note = Artificially Synthesized Probe
  source 1..120: mol_type = other DNA
taggcatccttcaacccaatcaaattgacacctgatattaaccatcacaccgtctatccatccctctaccctatctgtccacctaccctatctatctatccacctatccatctgtcctat

SEQ ID NO: 16962 - DNA, 120 bp, synthetic construct
  misc_feature 1..120: note = Artificially Synthesized Probe
  source 1..120: mol_type = other DNA
atgacaataaaaatgtaaatgctggttggcaaatgacccacatgttacaggaggacataaaatagcacgaagtttcctcaccctgggccaggactgtcacattccccagagcaacactgt

SEQ ID NO: 16963 - DNA, 120 bp, synthetic construct
  misc_feature 1..120: note = Artificially Synthesized Probe
  source 1..120: mol_type = other DNA
tgtgtgtcttatgtatgtagacgtttagaggatttgttatcaattttgagtcctgctaaggaacttcacgaattcttgagctcttggctacgccaacactgagtactcaaagggaaaaag

SEQ ID NO: 16964 - DNA, 120 bp, synthetic construct
  misc_feature 1..120: note = Artificially Synthesized Probe
  source 1..120: mol_type = other DNA
gacggggatgctgacagctgtgaaagactaagcctgatgggacatcttgacttcataacaacccacctggcgggtgctaatccattcccgaggggagtaaacaagcctctcaagagtaaa

SEQ ID NO: 16965 - DNA, 120 bp, synthetic construct
  misc_feature 1..120: note = Artificially Synthesized Probe
  source 1..120: mol_type = other DNA
agggtgaatctctccatgcactcgtggggaggatttctgtttttccttcctaacactcgcttctctctgagatctgacccttccttcatctgccgttacagattctgagaacaataactc

SEQ ID NO: 16966 - DNA, 120 bp, synthetic construct
  misc_feature 1..120: note = Artificially Synthesized Probe
  source 1..120: mol_type = other DNA
agcctcttaggcgttagacaccaagagaatgcgtccttgttaagattcccagttggagcactaggcgaggctttcgaggggagcgtcctggacatgttcaaggagaatggttggaagaga

SEQ ID NO: 16967 - DNA, 120 bp, synthetic construct
  misc_feature 1..120: note = Artificially Synthesized Probe
  source 1..120: mol_type = other DNA
tccctttttatgcctaatttggaactctgtcagagtgggaaagtggcagtacggatggtgttccttgaaaacattgaaggcaaatgaataaaccctttgccatctggggcaaacaataaa

SEQ ID NO: 16968 - DNA, 120 bp, synthetic construct
  misc_feature 1..120: note = Artificially Synthesized Probe
  source 1..120: mol_type = other DNA
atttgtaaaatgtagagttgacacagaagatgtgaaaagaatgaagacattttctagggaatcttgaacaagagaaaaccgacatgaacaagagaacaataaaagaggccaggcgcggtg

SEQ ID NO: 16969 - DNA, 120 bp, synthetic construct
  misc_feature 1..120: note = Artificially Synthesized Probe
  source 1..120: mol_type = other DNA
aacacagattagtggttggctgggaggagtggggaggagggagtcattgctgtgggatttctttctgggatgaagaaaatgggaactagggccaggcccggtggcttctcacctgtaatc

SEQ ID NO: 16970 - DNA, 120 bp, synthetic construct
  misc_feature 1..120: note = Artificially Synthesized Probe
  source 1..120: mol_type = other DNA
ctaacagggtgtcctttgtgcattcttcctctggagaggctactgggcttggctgctgggttgtacttcctgtggtgagggaagaggagactgccggagccaggggtcatttgggttgga

SEQ ID NO: 16971 - DNA, 120 bp, synthetic construct
  misc_feature 1..120: note = Artificially Synthesized Probe
  source 1..120: mol_type = other DNA
tgcctgaacacaaggtcttggatggcgctcgccacgtgggggtgtagtggaagccctgctcagtttagtctctggtttttggaagttgaaatcctgactttttctctttttcttttcttt

SEQ ID NO: 16972 - DNA, 120 bp, synthetic construct
  misc_feature 1..120: note = Artificially Synthesized Probe
  source 1..120: mol_type = other DNA
catggaaggtttagcactgcagagatgtctgctgtcacccagaatgacacgggaacttaaccaactaattaatgtataacagtagtatagctctgaatgggtttggtgggttttgttttt

SEQ ID NO: 16973 - DNA, 120 bp, synthetic construct
  misc_feature 1..120: note = Artificially Synthesized Probe
  source 1..120: mol_type = other DNA
accacttacacacccccaagacaaacaccccattcacaccactcacacaccctgcaacatacaccccactcacaacactcacacaccccccaacatacatacaccccactcacacacaca

SEQ ID NO: 16974 - DNA, 120 bp, synthetic construct
  misc_feature 1..120: note = Artificially Synthesized Probe
  source 1..120: mol_type = other DNA
tctctagattccttaccacaggcatctgtatgacatagatgctgtatgaacagttgctacacggtgcggtgttgctctttgtgttctttgttattgttgtctcgttattttctgttttct

SEQ ID NO: 16975 - DNA, 120 bp, synthetic construct
  misc_feature 1..120: note = Artificially Synthesized Probe
  source 1..120: mol_type = other DNA
gtaaatacttctaagcctcaccccccgtaaaattataaataccgctatggttatgtagttcgagattctgggtcaaagaagactatgaaactgttcaatggaaaagcagacagcaggagg

SEQ ID NO: 16976 - DNA, 120 bp, synthetic construct
  misc_feature 1..120: note = Artificially Synthesized Probe
  source 1..120: mol_type = other DNA
aagaaaaaaaaaaaagcctttgaattgcaaataatggaaagcccagctccacctttctaatcccattgaggaagtttattatggacacacctgatgagccccgagcctgtaggtgaggct

SEQ ID NO: 16977 - DNA, 120 bp, synthetic construct
  misc_feature 1..120: note = Artificially Synthesized Probe
  source 1..120: mol_type = other DNA
atgggggccttgcgtgtaccaggcagtgtcctacaactctccgtgtgctttgtcccatttggtcaccctcagtgatgctctgatgtggacacatctgctgtctccactttaaagatgggg

SEQ ID NO: 16978 - DNA, 120 bp, synthetic construct
  misc_feature 1..120: note = Artificially Synthesized Probe
  source 1..120: mol_type = other DNA
gctttgtgtacactgagcatgggtttcctctgaatttaaaaaggaggagaaaatcggaatttctggccctggttctggcaggaagtgtggccatgtgtgatagagaaggggttgcagtgt

SEQ ID NO: 16979 - DNA, 120 bp, synthetic construct
  misc_feature 1..120: note = Artificially Synthesized Probe
  source 1..120: mol_type = other DNA
ctgagggtgcggtgggagctgctactcattttttagtctcatccttctcatttcaaattttatgtacgaaatatttttatagaggtgcataaaacgtggaaagcctgtgtgtgctttcta

SEQ ID NO: 16980 - DNA, 120 bp, synthetic construct
  misc_feature 1..120: note = Artificially Synthesized Probe
  source 1..120: mol_type = other DNA
tgctgccccttaaaccattgagtcggagtcaccctggcccattttgtcaccttggctctggtgtttggggtctttcaggcagttgatgctgtagctgagccagccaatgcagttaaaggg

SEQ ID NO: 16981 - DNA, 120 bp, synthetic construct
  misc_feature 1..120: note = Artificially Synthesized Probe
  source 1..120: mol_type = other DNA
gccgctgtaagaagcatcccctgtaggggtcaatgtggaggctgggccaggcgcggtagctcacacctataatcccagcactttgggaagcccaggcgggtgcatcacctgagttcagga

SEQ ID NO: 16982 - DNA, 120 bp, synthetic construct
  misc_feature 1..120: note = Artificially Synthesized Probe
  source 1..120: mol_type = other DNA
ggtggaggagtcaccgtgttcttccacgccatcatctctcttcatttcccattcaatcctgacctccataaagtcttcatcagaggaggagaagaatttggggagtcaaaatgggacagc

SEQ ID NO: 16983 - DNA, 120 bp, synthetic construct
  misc_feature 1..120: note = Artificially Synthesized Probe
  source 1..120: mol_type = other DNA
gcgcccagcctttaaataatttttatccagtgagttgatgacattcttcgggttctggaagatgaatatttcagacagctcttcctggccatgcattttggtgtcatattccatcatgga

SEQ ID NO: 16984 - DNA, 120 bp, synthetic construct
  misc_feature 1..120: note = Artificially Synthesized Probe
  source 1..120: mol_type = other DNA
tctgggttgtgtctctggttggttaaagatgtgttggcttctcctttgagctcagtgtgacttacctactcacttgcaggaggaaacatgcaaaggactttttgtttgtttgttttctga

SEQ ID NO: 16985 - DNA, 120 bp, synthetic construct
  misc_feature 1..120: note = Artificially Synthesized Probe
  source 1..120: mol_type = other DNA
tatataaatacatttaaatatggaattctatatatataaatatggaattcctgctctgataaatgccatggcattgatggctcggttaaaagggcacgtggtggctgggcgtggtggctc

SEQ ID NO: 16986 - DNA, 120 bp, synthetic construct
  misc_feature 1..120: note = Artificially Synthesized Probe
  source 1..120: mol_type = other DNA
gaccctgtcattgacatcttgggttttctaattattttacagtcaacctcactgggttttctgcaatgaggtctgcactcatatcgtttgcaatggagcctaagaacagtcacgaattca

SEQ ID NO: 16987 - DNA, 120 bp, synthetic construct
  misc_feature 1..120: note = Artificially Synthesized Probe
  source 1..120: mol_type = other DNA
catctgaaaaaacacgtggtaccattgccggacggaaaaagcacggactttttgcctgtggactgcccagtgaggagtaaactgaaaacaggcctgattgtcctttttgtagtggaaaaa

SEQ ID NO: 16988 - DNA, 120 bp, synthetic construct
  misc_feature 1..120: note = Artificially Synthesized Probe
  source 1..120: mol_type = other DNA
ctctgcactctctctgcgtgtgttgatttgaacgtgagaatgacattaggtagcctttcctgaccagcatgtcttatcacgacatctgcctctcagttttacacatttatttatttgttg

SEQ ID NO: 16989 - DNA, 120 bp, synthetic construct
  misc_feature 1..120: note = Artificially Synthesized Probe
  source 1..120: mol_type = other DNA
acagagttagtgccggggcttaaagtatgaggaatcattaatatcttttgactgtaggagattcaccatgtattgtttataggctcaacccttacgtttaaaaagttgttttggggccgg

SEQ ID NO: 16990 - DNA, 120 bp, synthetic construct
  misc_feature 1..120: note = Artificially Synthesized Probe
  source 1..120: mol_type = other DNA
ctcctacattgtgcacccggagtcccggtgggctctgcagtgactccattcctgattctaatgacagaactaacacacgctcttttaacattttaagacatcaaaactgtcaagaatagg

SEQ ID NO: 16991 - DNA, 120 bp, synthetic construct
  misc_feature 1..120: note = Artificially Synthesized Probe
  source 1..120: mol_type = other DNA
ttgagccagttctctgttacaggacatttggttggttgtgcagtttcgttttttcagcgtgctttcataagcatccttagctttctctgtcccataacttcattgagatagattcctaca

SEQ ID NO: 16992 - DNA, 120 bp, synthetic construct
  misc_feature 1..120: note = Artificially Synthesized Probe
  source 1..120: mol_type = other DNA
agatggtatctcactgttttttttttttaagagacagagtctggctctgtcacccaggctggagtgcagtggtgtgatctcagctcactgcagcctctgcctcctcggcacaagcgattc

SEQ ID NO: 16993 - DNA, 120 bp, synthetic construct
  misc_feature 1..120: note = Artificially Synthesized Probe
  source 1..120: mol_type = other DNA
aatatttgtcatctacacgttggatagggggatttaaggaactcaaacaagtgaacagaaaaactcagatctaaaaatggacaaatgagttgagtagtcatctaaaaagaagacacacaa

SEQ ID NO: 16994 - DNA, 120 bp, synthetic construct
  misc_feature 1..120: note = Artificially Synthesized Probe
  source 1..120: mol_type = other DNA
agggctagccaaaggttggctagtggatacaaaagtatggctagataggacgagtaagttctagggtcctagagcagtatggaacgactgtaatttacaatttattacgtttttcaaata

SEQ ID NO: 16995 - DNA, 120 bp, synthetic construct
  misc_feature 1..120: note = Artificially Synthesized Probe
  source 1..120: mol_type = other DNA
gtctttctcttattaatgtgctagaatgtattcattcattcactggatgaatacttgaagagcaccttccttgtgccaggaagtactactcaaggcacagcgtgtacagcactgctcaaa

SEQ ID NO: 16996 - DNA, 120 bp, synthetic construct
  misc_feature 1..120: note = Artificially Synthesized Probe
  source 1..120: mol_type = other DNA
gtttttcataacttctgttacttctagggagccttgctttatttcttttccattgtcaacattttgggtctccagtactgtgttccagaatcagcattatttaagggccttcgctgagcc

SEQ ID NO: 16997 - DNA, 120 bp, synthetic construct
  misc_feature 1..120: note = Artificially Synthesized Probe
  source 1..120: mol_type = other DNA
ggctcaccgcaacctctgcctcctgggttcaagtgattctcctgcctcagcctcccaagtagctgggattacaggtgtgcgccaccacgcctggctaatttaggatttttagtagagacg

SEQ ID NO: 16998 - DNA, 120 bp, synthetic construct
  misc_feature 1..120: note = Artificially Synthesized Probe
  source 1..120: mol_type = other DNA
ctcaagtagtatttaaatcatttttgaattcgggactgtttctgtccctccagcattggtttcctccattttccctcactgatctcactgcgtctcttttctccgtccctatttctctta

SEQ ID NO: 16999 - DNA, 120 bp, synthetic construct
  misc_feature 1..120: note = Artificially Synthesized Probe
  source 1..120: mol_type = other DNA
ctctgacccctataattggccgtgacccacatgtgctgttgtaacagcaaggtcataaattaatatgtggcccacttctcttctcaggttattaatattgtcgtctgttttttttttttt

SEQ ID NO: 17000 - DNA, 120 bp, synthetic construct
  misc_feature 1..120: note = Artificially Synthesized Probe
  source 1..120: mol_type = other DNA
aagataaaaatcaaaggtagctttatataattatccaaaatcatttgctcctgcaaatttgtgacctctgataccctgaggggtcagcagacagaatgcagaaccactgaaatgtgccag

SEQ ID NO: 17001 - DNA, 120 bp, synthetic construct
  misc_feature 1..120: note = Artificially Synthesized Probe
  source 1..120: mol_type = other DNA
ttgattctgttgtttgcagagaactacggggaccattttcctcccaaaaaatacatgtccaaacatggtctttcccaccttcttgacattgtagcttgaatacagtaacaaaggccatag

SEQ ID NO: 17002 - DNA, 120 bp, synthetic construct
  misc_feature 1..120: note = Artificially Synthesized Probe
  source 1..120: mol_type = other DNA
gtggtgcagagatcggcaattccttctttcccgtctctgtgcagttttcacccacttgagttcatgagtttcagtttgaaagtgatgtaaggtttaatgtttagactgatcatttgtttg

SEQ ID NO: 17003 - DNA, 120 bp, synthetic construct
  misc_feature 1..120: note = Artificially Synthesized Probe
  source 1..120: mol_type = other DNA
acaaacaaaaaacctttgcaatactaaaattaaacaaagcaaaaatacgtgacgcatgttgaagaaacttttaggtgtctgctgctgtgaaggctccagggttgacggacacttggagaa

SEQ ID NO: 17004 - DNA, 120 bp, synthetic construct
  misc_feature 1..120: note = Artificially Synthesized Probe
  source 1..120: mol_type = other DNA
aaaagaaaaagaaaagaaaaagaccacacattaatccaggactgtggggctcctcccaggaggaggtggccctgacccctgacctgtatgcttcctgggaaatgtgcttctggggaggac

SEQ ID NO: 17005 - DNA, 120 bp, synthetic construct
  misc_feature 1..120: note = Artificially Synthesized Probe
  source 1..120: mol_type = other DNA
gatgaaactggaaataattcagtccaaacagtcttccaagggacccttgctgctacgaaaaggtggctccgagaagtttttacaaagaacatgctcacatcttcaggtgcctcattcaca

SEQ ID NO: 17006 - DNA, 120 bp, synthetic construct
  misc_feature 1..120: note = Artificially Synthesized Probe
  source 1..120: mol_type = other DNA
tggaggtactggaggtgatggtggtaaaggtgatggtggaggtactggaggtgatggtggtggacgtgatggtggaggtaatggaggtgatggtggtggtggtggtggtggaggtactgg

SEQ ID NO: 17007 - DNA, 120 bp, synthetic construct
  misc_feature 1..120: note = Artificially Synthesized Probe
  source 1..120: mol_type = other DNA
aggtgatggtggtggacgtgatggtggaggtaatggaggtgatggtggtggtggtggtggaggtaatggaggtgatggtggtggtggtgatggtggaggtactagaggtgatggcggtcg

SEQ ID NO: 17008 - DNA, 120 bp, synthetic construct
  misc_feature 1..120: note = Artificially Synthesized Probe
  source 1..120: mol_type = other DNA
aagaaaaaaatgaccagggaactcttctagaaaagagatgtgataagtaaatgcagaaaagagacgtgataagtaagtacagcgtgtgtcccaggaggatctaggatccagtcaggacag

SEQ ID NO: 17009 - DNA, 120 bp, synthetic construct
  misc_feature 1..120: note = Artificially Synthesized Probe
  source 1..120: mol_type = other DNA
aattttcaaagtataacatgagagataagtcctttcagaataaaaagccggttgtgcagtaggaggaccagtagtggcccctggttgggtctctgattctagaaagccaacctgggctgc

SEQ ID NO: 17010 - DNA, 120 bp, synthetic construct
  misc_feature 1..120: note = Artificially Synthesized Probe
  source 1..120: mol_type = other DNA
tgttggtgacaggaacctcatgacacacaagtggagaacacacagacatgcccctcatgctgaattaaggcctgaggctcaaggaaaattagtttttatgtgatatgagagttttatatg

SEQ ID NO: 17011 - DNA, 120 bp, synthetic construct
  misc_feature 1..120: note = Artificially Synthesized Probe
  source 1..120: mol_type = other DNA
aagcttaaaattgggggaaacagtaaaacagcaggaaagtaaaaatgatgaaagaattttcatcccatagagcactggagcgctgcatccgaaagctctgaaaccacccccctttgattt

SEQ ID NO: 17012 - DNA, 120 bp, synthetic construct
  misc_feature 1..120: note = Artificially Synthesized Probe
  source 1..120: mol_type = other DNA
tttcctttccctttttcgttaactctttgttgagatattgttcgtatgccatacggtacatctgtcaaaagttccagttcagcaggttttggggtagtcacagatatgtacagtcatcac

SEQ ID NO: 17013 - DNA, 120 bp, synthetic construct
  misc_feature 1..120: note = Artificially Synthesized Probe
  source 1..120: mol_type = other DNA
ttttccatggccaaatattccccgtttatccatgtgtccattgacggccatctatgttgcttcttcggctattataaatctgctgatacaaacattagtgtacatatttatgtgtgggtg

SEQ ID NO: 17014 - DNA, 120 bp, synthetic construct
  misc_feature 1..120: note = Artificially Synthesized Probe
  source 1..120: mol_type = other DNA
gctcactacagcctcaacctcctgggctgaagtggtcctcccactttagcctcccgagtagcagggactacaggcatgtgccaccatgttcagctaattaaaaaaaaaatttctgtgggc

SEQ ID NO: 17015 - DNA, 120 bp, synthetic construct
  misc_feature 1..120: note = Artificially Synthesized Probe
  source 1..120: mol_type = other DNA
tatgtggtgatctacttgcctatccttgtgtcagtaccacactgtttggactaccattgctttctagtaagttttgaaattgggatgtgtgagtcctcctactttgttcttatttttcaa

SEQ ID NO: 17016 - DNA, 120 bp, synthetic construct
  misc_feature 1..120: note = Artificially Synthesized Probe
  source 1..120: mol_type = other DNA
catccctgagataaattacacttgatcgtggtgtatagttcctttaacatggggctggataaggttttcttttatccttttaaatgtcagaaagtatctattataaattaaccttgtggt

SEQ ID NO: 17017 - DNA, 120 bp, synthetic construct
  misc_feature 1..120: note = Artificially Synthesized Probe
  source 1..120: mol_type = other DNA
cttgaaacaacccttctgaaagtcccctttaaggcccccagttttcagatcaggaaacaaatggagaaggcaatgcgacttacctaaggtctcaaagattataagtagtaaaaactaaaa

SEQ ID NO: 17018 - DNA, 120 bp, synthetic construct
  misc_feature 1..120: note = Artificially Synthesized Probe
  source 1..120: mol_type = other DNA
catctatctctgccaccatcacacgggcagtaccctgttagtaacatgcagcattagtgtggtgcttttgttacagctgagaagccaatattgataacactgttattaactaaagtccat

SEQ ID NO: 17019 - DNA, 120 bp, synthetic construct
  misc_feature 1..120: note = Artificially Synthesized Probe
  source 1..120: mol_type = other DNA
atgtctgcatcctctggtgcagtttcttctgttgtaggtattcctagggcaggggctttttaaagaagattctgtgtattctatttaaaaaatatactcaggccatgtgaggtggttcat

SEQ ID NO: 17020 - DNA, 120 bp, synthetic construct
  misc_feature 1..120: note = Artificially Synthesized Probe
  source 1..120: mol_type = other DNA
tttcaaagcattgccatggaaaatggcatttgttgctgtattgggttactttattggtgttcttattttccaggggaaaaaagtctttcaccccaggatgaacaatgtgctgtggaggaa

SEQ ID NO: 17021 - DNA, 120 bp, synthetic construct
  misc_feature 1..120: note = Artificially Synthesized Probe
  source 1..120: mol_type = other DNA
tgtatggagaagtccgatgcagtgccagttacacatccttcatgtgtgtgacctgttttctctttcttgaagctcttgagctctttctgttactcatattctgaaataataacgtgtctt

SEQ ID NO: 17022 - DNA, 120 bp, synthetic construct
  misc_feature 1..120: note = Artificially Synthesized Probe
  source 1..120: mol_type = other DNA
tattcaccgttttgttttggaggttttgcttttcctggcatcatgtgctgcttcctccaggttcctttcacttgttgatttgttttgattttcctcctatgtctggacattcttgtttgt

SEQ ID NO: 17023 - DNA, 120 bp, synthetic construct
  misc_feature 1..120: note = Artificially Synthesized Probe
  source 1..120: mol_type = other DNA
ccaggcctcatgtgtcatttaccactggttcagctcgttttcaacttctaaaattttgttcctgttatcctgttcgccattcctcctcctgtccttgtcagtttatgacttttttttttt

SEQ ID NO: 17024 - DNA, 120 bp, synthetic construct
  misc_feature 1..120: note = Artificially Synthesized Probe
  source 1..120: mol_type = other DNA
tgaagaggtgtatgactatttgtatcagccttcttacagaaagttcattaagttgcaccaggatctaaagtcaggagaggtcacccttgcagagattgatgtcatcttcaaggactttgt

SEQ ID NO: 17025 - DNA, 120 bp, synthetic construct
  misc_feature 1..120: note = Artificially Synthesized Probe
  source 1..120: mol_type = other DNA
gccaaaaagcaaaacactttgtcggctgcccaactgcatctcccagttccacccaaaagcggtaaatcagttgtttctgttagagttaagaggtgactcttttgcttttttttttttgag

SEQ ID NO: 17026 - DNA, 120 bp, synthetic construct
  misc_feature 1..120: note = Artificially Synthesized Probe
  source 1..120: mol_type = other DNA
aagctgtaaatggctcaggttccttttccttaaaatcttgcccccttcagctttttcttccagtagatttttactggaggacaaggagagttcctgcccacagagaggtttttttttttt

SEQ ID NO: 17027 - DNA, 120 bp, synthetic construct
  misc_feature 1..120: note = Artificially Synthesized Probe
  source 1..120: mol_type = other DNA
ggactctctggtccacactgatgcacatccttcagtgagtaatttatctgaggggaatgatctgagtgtttcatagttaattgtgaacatgttatttacagctgagccttggtttctttt

SEQ ID NO: 17028 - DNA, 120 bp, synthetic construct
  misc_feature 1..120: note = Artificially Synthesized Probe
  source 1..120: mol_type = other DNA
ttttgttgaatagagcattgcttagcaacgttagggcagtgactgtggaaatggtggcacacctgtgtggtaggtttgtacacagccgttttcaatgatatttaaaaagcttttcttcat

SEQ ID NO: 17029 - DNA, 120 bp, synthetic construct
  misc_feature 1..120: note = Artificially Synthesized Probe
  source 1..120: mol_type = other DNA
agctatcttcatttttctgctagaaagtcagcagagtttccaaacaaaaccctctgttgtgatttttcctaaacttctcttattgtacttggggaccacagaaggacactgaggacttgg

SEQ ID NO: 17030 - DNA, 120 bp, synthetic construct
  misc_feature 1..120: note = Artificially Synthesized Probe
  source 1..120: mol_type = other DNA
cactgagaaggaggttggtcacccagcaaatagcccttagaaagacacttgaattgcctctctcactctgtaaatcagcaagaatccaaataactaagatttagatggacaaaacagaag

SEQ ID NO: 17031 - DNA, 120 bp, synthetic construct
  misc_feature 1..120: note = Artificially Synthesized Probe
  source 1..120: mol_type = other DNA
aaaaaaaaaattaaaacaaatgataccatttatctctacaatgactctttccctgatgagagtgccatcttctcaggtgggttgtgtagatgaggagggaggccttgtgagcgcagatca

SEQ ID NO: 17032 - DNA, 120 bp, synthetic construct
  misc_feature 1..120: note = Artificially Synthesized Probe
  source 1..120: mol_type = other DNA
gtgccagaaccaggcaccctggtcacctggtctcccacaatgggtattccctgggagccccattcccttcctcctctcagcaaacatctctgcagtgtactttgtggttttttttttttt

SEQ ID NO: 17033 - DNA, 120 bp, synthetic construct
  misc_feature 1..120: note = Artificially Synthesized Probe
  source 1..120: mol_type = other DNA
catgcctcttgacccacccttcgtttgccatcttgtttcccttaaaaagaaatagtagcttctgttctgttgactttatcctatcaacagtacctcgtcctgttgggataaacattactc

SEQ ID NO: 17034 - DNA, 120 bp, synthetic construct
  misc_feature 1..120: note = Artificially Synthesized Probe
  source 1..120: mol_type = other DNA
caggaggtgaccaggagagtgagtaggtaacggctgggaaatgtgaaggttcaagagcgtattcttgaatctgatgttatgttgcatcagttttgaattttatacaaagagaagtaactt

SEQ ID NO: 17035 - DNA, 120 bp, synthetic construct
  misc_feature 1..120: note = Artificially Synthesized Probe
  source 1..120: mol_type = other DNA
ttaatgttataggaaagtctctgtacgtgaagaggttgcacgacaaaatgaagatgcagttaaacgtgaaaaatgtgcctctgaaaacaattcgactgatcgaccctcaggtggatgaga

SEQ ID NO: 17036 - DNA, 120 bp, synthetic construct
  misc_feature 1..120: note = Artificially Synthesized Probe
  source 1..120: mol_type = other DNA
tctgggataaaagtactcttctgttaattagcagtgtcttcaatatttctgttcaattcaggcttcatgctgtatgcccagtctgaatcccagctgtgctctgaatctaggaaattcatc

SEQ ID NO: 17037 - DNA, 120 bp, synthetic construct
  misc_feature 1..120: note = Artificially Synthesized Probe
  source 1..120: mol_type = other DNA
cctgaattatcagctcagagattgtgaggcctctctcttctgcaatccgagttttattggcgacacactgaggggcttcaagaagttcgtggtgaccttcatgatctttatggcaagaga

SEQ ID NO: 17038 - DNA, 120 bp, synthetic construct
  misc_feature 1..120: note = Artificially Synthesized Probe
  source 1..120: mol_type = other DNA
tgcctctttagaaaagaaagactcatatcggaaagccatcgccaggttctttccgaaaccgtatgacgacagcaggctgcttctggatgaaataacacgggcacaggatctttttctgga

SEQ ID NO: 17039 - DNA, 120 bp, synthetic construct
  misc_feature 1..120: note = Artificially Synthesized Probe
  source 1..120: mol_type = other DNA
aaaatggtctttgctgcagcaaaggcttcaaatagaaagccttccccgcaagacattgcacaggctgtccttaggaacttcagtggcaaggatgacatccaagctttggacatctttctg

SEQ ID NO: 17040 - DNA, 120 bp, synthetic construct
  misc_feature 1..120: note = Artificially Synthesized Probe
  source 1..120: mol_type = other DNA
gtaacagcaccatacacagtgttcacaccaacaaataaagtaccacgtcccaggactgggccaagggcactagggacgcacagatgaatctgtagcccttgtcctttgttagcattaggg

SEQ ID NO: 17041 - DNA, 120 bp, synthetic construct
  misc_feature 1..120: note = Artificially Synthesized Probe
  source 1..120: mol_type = other DNA
aggagaattgctgacatctgggggaaggggacagcaccaaccacgaactccatctgaaagcatgagtcgtactataacaggaaatggcatttgtgctgagccctaagggatcatgagaat

SEQ ID NO: 17042 - DNA, 120 bp, synthetic construct
  misc_feature 1..120: note = Artificially Synthesized Probe
  source 1..120: mol_type = other DNA
cacttgaataacttcccttttctttcagaaactgtttaacgaatacagccaaatgtaaaatcctcatttttcagacagattttgaagatggaatccgtagcgcccagctcattgcctcag

SEQ ID NO: 17043 - DNA, 120 bp, synthetic construct
  misc_feature 1..120: note = Artificially Synthesized Probe
  source 1..120: mol_type = other DNA
acctttttgaagcattggatgccatatttcagttcgtggcttaaatctcaacaagaaactggctttggccattggtcatctgaagggaatggcattgcgcacagaactctttgttgaaat

SEQ ID NO: 17044 - DNA, 120 bp, synthetic construct
  misc_feature 1..120: note = Artificially Synthesized Probe
  source 1..120: mol_type = other DNA
acagtctgaaattagaatattattgttaacctcaagaggattctttccagatgcaattagatttcttaccactgattaccatgaaaacatgaatcctgggatgggaggctgcgtgcacct

SEQ ID NO: 17045 - DNA, 120 bp, synthetic construct
  misc_feature 1..120: note = Artificially Synthesized Probe
  source 1..120: mol_type = other DNA
aagacacaaagacagttgtgggtggcttcactcttcacagggctgtggcagtctgtccacatcgatgacctccggagatccaccctcatggtttctgatgtgaccaggctgcagcatgtc

SEQ ID NO: 17046 - DNA, 120 bp, synthetic construct
  misc_feature 1..120: note = Artificially Synthesized Probe
  source 1..120: mol_type = other DNA
catgctgaacgtctgtttctgcctttgtacagcctctttcttgcgggtatccaagatgcgcctcagtgtctttttaaagaagcaagaagagagccagtttcaccctctggagtggttggc

SEQ ID NO: 17047 - DNA, 120 bp, synthetic construct
  misc_feature 1..120: note = Artificially Synthesized Probe
  source 1..120: mol_type = other DNA
cctgctgtttgaagaatggtaacagcaaaaccaggacccagcagtatattcactgccatggttatttttctgtcacccatgagactaaccttgattatcttggatgtggccgtgtattga

SEQ ID NO: 17048 - DNA, 120 bp, synthetic construct
  misc_feature 1..120: note = Artificially Synthesized Probe
  source 1..120: mol_type = other DNA
agagattttctgattctactttttctctagttatccttcgtttctctccttgtcacgccttctgaagggattttaggagatcagaaatattttcatttccctccgttcctccttgtggac

SEQ ID NO: 17049 - DNA, 120 bp, synthetic construct
  misc_feature 1..120: note = Artificially Synthesized Probe
  source 1..120: mol_type = other DNA
cgtccgcccatctatccatccacctgtctatcagacactcagatctagtgtacaaaaacatcaacaggaacaaatacttagttccagataaacatgtgccttcttgtttagtttgatctg

SEQ ID NO: 17050 - DNA, 120 bp, synthetic construct
  misc_feature 1..120: note = Artificially Synthesized Probe
  source 1..120: mol_type = other DNA
tggaaatgtcaagttattgctgtcgctgtagtgtggtaaatagtagactagttgttttgttaatgctcaagaaggaacaaaatgtcaaaaggtggcagaccgccactctggttcctctga

SEQ ID NO: 17051 - DNA, 120 bp, synthetic construct
  misc_feature 1..120: note = Artificially Synthesized Probe
  source 1..120: mol_type = other DNA
tctcaaaaaaaaagaataggaagtttacgaagctctgagaaatttctgttttatctccaccctcctcatttccctgctttcagagcactggttctagccagacccagcatggcgtgacac

SEQ ID NO: 17052 - DNA, 120 bp, synthetic construct
  misc_feature 1..120: note = Artificially Synthesized Probe
  source 1..120: mol_type = other DNA
ctgacagtgaaaagcagatgggtggctagaattgcaaggtgaattttggagtttttagttttcacactttgtttgtgcagtaagcgtccaatttacgtcaccgcgtcattttaaagtttc

SEQ ID NO: 17053 - DNA, 120 bp, synthetic construct
  misc_feature 1..120: note = Artificially Synthesized Probe
  source 1..120: mol_type = other DNA
gtagccatgcaacatacaactcagtcttatctagatgtttctctttggggctagcttggctgtttctgacctaaatttgacactgtttccgccttcctttattttattccactggaaaaa

SEQ ID NO: 17054 - DNA, 120 bp, synthetic construct
  misc_feature 1..120: note = Artificially Synthesized Probe
  source 1..120: mol_type = other DNA
agtccaccgcccaggggctcctaaaacacggagctttctgtgaacatgagaagacctccaatttccttgacatagcttctttttaaatgttgagtttctcttgaaaaaaattaaatacgt

SEQ ID NO: 17055 - DNA, 120 bp, synthetic construct
  misc_feature 1..120: note = Artificially Synthesized Probe
  source 1..120: mol_type = other DNA
ggatttcccacggggaaaacataccatttttgtaatttaaaaatatattctaaaagcttttttgaatcccagtttctgcagatggctctgtggtcctgcactaggaaactgaaagcggcg

SEQ ID NO: 17056 - DNA, 120 bp, synthetic construct
  misc_feature 1..120: note = Artificially Synthesized Probe
  source 1..120: mol_type = other DNA
gagttacaggggctggtgaccgagcacgtcttcttactagacaaggtgagtacttgggctggcctcagcacatgcacggatccacccttttccgaaaggaagaacagcactgacagtgat

SEQ ID NO: 17057 - DNA, 120 bp, synthetic construct
  misc_feature 1..120: note = Artificially Synthesized Probe
  source 1..120: mol_type = other DNA
ctttggagcacaggaaggtttactaaaaggaggccagcatggatgctggatgtgttgactctgacctatcaaaacatcagcggcttagacacagtatcagctgatttcccacccaggatg

SEQ ID NO: 17058 - DNA, 120 bp, synthetic construct
  misc_feature 1..120: note = Artificially Synthesized Probe
  source 1..120: mol_type = other DNA
ttttagttgttttggatatgtaccttgaaggggaattcctggatcatttgataactctgtttaactttatgcagaggcactgtattgttttccacgggggctgcagcatctttcttacat

SEQ ID NO: 17059 - DNA, 120 bp, synthetic construct
  misc_feature 1..120: note = Artificially Synthesized Probe
  source 1..120: mol_type = other DNA
agcagacatttagaaatatagttatctctggggagggacggagggatgtgaagttgtaactatatgcataatgttttgtttctctaaaaaatgatctatcgcagcagcttgggaggctga

SEQ ID NO: 17060 - DNA, 120 bp, synthetic construct
  misc_feature 1..120: note = Artificially Synthesized Probe
  source 1..120: mol_type = other DNA
cataaatatctggtatctcaagattattctctccccaagacatacacatacagatttcagacaacaaattcagaggaactaagccagaaagtcttaacaaaggtcctcaccagaggccca

SEQ ID NO: 17061 - DNA, 120 bp, synthetic construct
  misc_feature 1..120: note = Artificially Synthesized Probe
  source 1..120: mol_type = other DNA
tcaaagtgtttccagaaagggatgcatgtaaatatcatctgctgaggttttgaagactagctctaacgggtgagaggagtgacttgaatctttcaatttaaaagtaaaatgccagccagg

SEQ ID NO: 17062 - DNA, 120 bp, synthetic construct
  misc_feature 1..120: note = Artificially Synthesized Probe
  source 1..120: mol_type = other DNA
aatgtcctagatgtctcctaagtttctattcccctgaacatgggctctatttccttggaaaggatgttgacatccaagaatagtatcacctgtggtacttgtatggatctaatattgcag

SEQ ID NO: 17063 - DNA, 120 bp, synthetic construct
  misc_feature 1..120: note = Artificially Synthesized Probe
  source 1..120: mol_type = other DNA
ctccacattgcaactaacctctagacatgaccatttatcactgtgggcacagcattaaggaataatagccacaatcagctgcaaaaactattaaaatgttcctcgctattccgagtatat

SEQ ID NO: 17064 - DNA, 120 bp, synthetic construct
  misc_feature 1..120: note = Artificially Synthesized Probe
  source 1..120: mol_type = other DNA
gttccgtgcagaaaagaagaaaggtttcaaagacgcggcttctgccttcagcaacgtatattttggcatttacttgcatatacatacaaaacagaacagcctaggagaatatactgccaa

SEQ ID NO: 17065 - DNA, 120 bp, synthetic construct
  misc_feature 1..120: note = Artificially Synthesized Probe
  source 1..120: mol_type = other DNA
gccaaggtgagggcactcacctcagagcttctttaattaggcatcacttctaattgaatttcactcaaggaaagtagaacattcttgtggcctttgctttcagcgaattaaacgtagttc

SEQ ID NO: 17066 - DNA, 120 bp, synthetic construct
  misc_feature 1..120: note = Artificially Synthesized Probe
  source 1..120: mol_type = other DNA
aaaaaaaaaaaaaaaagaggcttcaaggcctctcagtggtcctttccagatacccagaaattaacaaattcttattgtccaggggatacaaaaatggtactaagaaccccggcactgttt

SEQ ID NO: 17067 - DNA, 120 bp, synthetic construct
  misc_feature 1..120: note = Artificially Synthesized Probe
  source 1..120: mol_type = other DNA
aaatggaaaatcctctttctgctcagaagtttctaagaccagtgaaggagtcagaagaacagatggtgattccgttgcttctgtcattaagctggctgctaaatatgcgttgagtttaat

SEQ ID NO: 17068 - DNA, 120 bp, synthetic construct
  misc_feature 1..120: note = Artificially Synthesized Probe
  source 1..120: mol_type = other DNA
gatacatcttaatgttaagtttttttcctgtcagcaatgtgaagctgtgagcaaattcattggcgaatgcaagatcctttcacctcctgatatcagccgttttgcaacatcgctcgtgga

SEQ ID NO: 17069 - DNA, 120 bp, synthetic construct
  misc_feature 1..120: note = Artificially Synthesized Probe
  source 1..120: mol_type = other DNA
ctgggaaccacatcagagacgcattcaaaggcccaccacaaaacaaagtttttgacacaaagctcttctgaaatatatgaaatatagaaccgggagactgactcatataacccatgacat

SEQ ID NO: 17070 - DNA, 120 bp, synthetic construct
  misc_feature 1..120: note = Artificially Synthesized Probe
  source 1..120: mol_type = other DNA
agcatctagcctagagccctccatacacagtatctgtacttgctgagcaagaggctggtgggttgagctgacacgtggtagttagttattagtattacttacttggttgagatatgtctg

SEQ ID NO: 17071 - DNA, 120 bp, synthetic construct
  misc_feature 1..120: note = Artificially Synthesized Probe
  source 1..120: mol_type = other DNA
agtccaaatgaatataaggaagtcagtttggaagctcttctagtattcttggtattagatcatgaagtgccacaggctagtgtgatagatggagggatggaaaaagtgctgaatacaaga

SEQ ID NO: 17072 - DNA, 120 bp, synthetic construct
  misc_feature 1..120: note = Artificially Synthesized Probe
  source 1..120: mol_type = other DNA
aaaatgaaggagacagacatagtcttatgaaataccagacttcagaatccaggtacaaatccgatcccacaatcccatgctgagatgaatgtggttctaaatgctcctttcagagagtga

SEQ ID NO: 17073 - DNA, 120 bp, synthetic construct
  misc_feature 1..120: note = Artificially Synthesized Probe
  source 1..120: mol_type = other DNA
agattatacagaatccacttcaaattaacactctgtgtctctggtccacatctgggagtagagaggctgacatcttcattattttacctgtgtcttcattgtagctagggaagaaagagc

SEQ ID NO: 17074 - DNA, 120 bp, synthetic construct
  misc_feature 1..120: note = Artificially Synthesized Probe
  source 1..120: mol_type = other DNA
ccatgctgggagcacgtgtcgtccacacagagcgtgcgtgtcaaaggatcaatcaccatcacagttgtgtgctgatttattaaatgtttatatgtccacagttatgttaaaaaaaaaaag

SEQ ID NO: 17075 - DNA, 120 bp, synthetic construct
  misc_feature 1..120: note = Artificially Synthesized Probe
  source 1..120: mol_type = other DNA
gtcatgaagtcagtccgaggaattcctgggaatccagcaagtgcaggcagtgtttttctctccattactttttacagcagaatgtaatgtacgaggtagagaaataaactatcacatata

SEQ ID NO: 17076 - DNA, 120 bp, synthetic construct
  misc_feature 1..120: note = Artificially Synthesized Probe
  source 1..120: mol_type = other DNA
actattccagtgctttggttttgaataggatgtagcagaagactcagggctagagatcttcatacatatcaaactgtatgattgccagaagcgtaaagtcacagacgaaatacacaccca

SEQ ID NO: 17077 - DNA, 120 bp, synthetic construct
  misc_feature 1..120: note = Artificially Synthesized Probe
  source 1..120: mol_type = other DNA
gaccagattaagctacaaatacaagtctcgcagccagtctcaaagtctgtaaccccaataacattttttaggtaaataaaaattgttactgggtggtcttcccttctccaggaagcagag

SEQ ID NO: 17078 - DNA, 120 bp, synthetic construct
  misc_feature 1..120: note = Artificially Synthesized Probe
  source 1..120: mol_type = other DNA
gcactgttaacgcttaacttgtgtctcttttgatggtggtgtctggataagtaaaataatgtgtcaggaaaataaaccctcagtactcttcagtccctaaatatggcatcaaaagggagc

SEQ ID NO: 17079 - DNA, 120 bp, synthetic construct
  misc_feature 1..120: note = Artificially Synthesized Probe
  source 1..120: mol_type = other DNA
atgggtaacctgccagcagatgccattagctgtgccttctgtgtgtcctcacctgactgccaaagcccaccctgtagttaaaagcatcctgtacgttggactgctagccactcctaactg

SEQ ID NO: 17080 - DNA, 120 bp, synthetic construct
  misc_feature 1..120: note = Artificially Synthesized Probe
  source 1..120: mol_type = other DNA
aaggctgtttttaattcattctcacagccatttcctctggcagagtgactgcctgtgcatggtctgtgcctttagtggctgaatgaataaatgaatgggatatgcacaaatacctgttgc

SEQ ID NO: 17081 - DNA, 120 bp, synthetic construct
  misc_feature 1..120: note = Artificially Synthesized Probe
  source 1..120: mol_type = other DNA
cagcaagttttcttgtagagtaaaagcagattgacatcttgtgggtttgattcttaggaatgatgttgatgcatggccatgcctgctgaagcgggaagtccatggaaccgatttgttcct

SEQ ID NO: 17082 - DNA, 120 bp, synthetic construct
  misc_feature 1..120: note = Artificially Synthesized Probe
  source 1..120: mol_type = other DNA
aatgttgtgctgtctctcctgtgatcttctatagacacaaaaatagttcttttcttaccacagaatcccatttcctgctttttgtcattaccagggcacctgaggactggctttttggtt

SEQ ID NO: 17083 - DNA, 120 bp, synthetic construct
  misc_feature 1..120: note = Artificially Synthesized Probe
  source 1..120: mol_type = other DNA
catagttgccaatctaaaggccaaaatggtatctcattttcagttgtatttccccatttaccgtgaggctgaacatgttttttatatttatcacccatttgtatatcatcctctgaattg

SEQ ID NO: 17084 - DNA, 120 bp, synthetic construct
  misc_feature 1..120: note = Artificially Synthesized Probe
  source 1..120: mol_type = other DNA
cccggcctgtcctctctcttcttgtgctttcacatacttgttttattcaccagtttatgtttaggtgtaaagtaaggatttaacttgatgttttcctgactagatcatcaaactccagtc

SEQ ID NO: 17085 - DNA, 120 bp, synthetic construct
  misc_feature 1..120: note = Artificially Synthesized Probe
  source 1..120: mol_type = other DNA
atgctgaggagactgttttaaatgctctcttctttggtttttcagcctgagagacactctcgtaagttacatgcaaactaaagaaagtgaaattcttcctgaaatggcatctcagttccc

SEQ ID NO: 17086 - DNA, 120 bp, synthetic construct
  misc_feature 1..120: note = Artificially Synthesized Probe
  source 1..120: mol_type = other DNA
ttggttttctcacgcataaaatggagagtggattaatcgccaaagattcttctgatctgacattttgaaattgtgagagaaactagatgactgtaaacttggtcacaggcctggttctgg

SEQ ID NO: 17087 - DNA, 120 bp, synthetic construct
  misc_feature 1..120: note = Artificially Synthesized Probe
  source 1..120: mol_type = other DNA
ttttattttacttgtcacacctgtcttaataaactggagttttgctgctaaagaactcttctctctgggggcagagcttctatttatggcacatagacatcagctaggcttttgggaatc

SEQ ID NO: 17088 - DNA, 120 bp, synthetic construct
  misc_feature 1..120: note = Artificially Synthesized Probe
  source 1..120: mol_type = other DNA
gactttgtgcatgtgttaaccgagacggccctgagctatttcagttactcctgtatgttcaggcaattccaatttagaaacaaacttccagtgataaatattgggaagaaaatgtcagct

SEQ ID NO: 17089 - DNA, 120 bp, synthetic construct
  misc_feature 1..120: note = Artificially Synthesized Probe
  source 1..120: mol_type = other DNA
aaacttactataagggtcctaccttccccagtattccttcatgatcactgctacctgtgccctgaagcgcaacagaacctcaacccagaggacagccacttcctcagaacccacgatctt

SEQ ID NO: 17090 - DNA, 120 bp, synthetic construct
  misc_feature 1..120: note = Artificially Synthesized Probe
  source 1..120: mol_type = other DNA
gatatcctgatactctgattttggttttgattttggtttggtgtaaactgtaaaagtgtgtgtgtgccctttttacctgttctttgttttgtggtatgcgtgtagggtgagcgtaatgtt

SEQ ID NO: 17091 - DNA, 120 bp, synthetic construct
  misc_feature 1..120: note = Artificially Synthesized Probe
  source 1..120: mol_type = other DNA
ttaaagaccttttagatgtggaatcggttgggggcgaatcttctaatacttgagctttctaaagactccttgtccagctggaacagtttgcaaagtggagcctggtgctgtctgatgttt

SEQ ID NO: 17092 - DNA, 120 bp, synthetic construct
  misc_feature 1..120: note = Artificially Synthesized Probe
  source 1..120: mol_type = other DNA
actgctaccctgttctggtgtagcttgttgtaagtctgattggcaataggattttctatggggattaacagagataatgtaaaatgtgttaatttgaccctacctttgggattcagtgcc

SEQ ID NO: 17093 - DNA, 120 bp, synthetic construct
  misc_feature 1..120: note = Artificially Synthesized Probe
  source 1..120: mol_type = other DNA
tgatgggcagtggttctagttggttagcagaagtagtatttccaaagttactccattcgacaagctgagtgaagttctgatgttgcacatacatgtggtttaatattgcccattagaatg

SEQ ID NO: 17094 - DNA, 120 bp, synthetic construct
  misc_feature 1..120: note = Artificially Synthesized Probe
  source 1..120: mol_type = other DNA
tttccccagtcagtctgctagtattggatcatgccctttttgttcagtcacatttctaggcccttgcaattcctggtcttttccaagagccaatcatacctattcaataaagtctcaaaa

SEQ ID NO: 17095 - DNA, 120 bp, synthetic construct
  misc_feature 1..120: note = Artificially Synthesized Probe
  source 1..120: mol_type = other DNA
tggggaatgaaggattttagttgtggccctgcttgtcctgagggcccttcaggacttgtcttcttcctaaaaagaaggttttactatgggctttcctttgtcaaataaattaattgttaa

SEQ ID NO: 17096 - DNA, 120 bp, synthetic construct
  misc_feature 1..120: note = Artificially Synthesized Probe
  source 1..120: mol_type = other DNA
tgtatctctatacagtcgtcatatatcttaaagacaaaggcacataccttcttagagtcagacaatacaagcaggttccagcatcccattggaaggatatccagtagtctcttttgctca

SEQ ID NO: 17097 - DNA, 120 bp, synthetic construct
  misc_feature 1..120: note = Artificially Synthesized Probe
  source 1..120: mol_type = other DNA
acactgttgctggcttgaaatgtcaggaatctttaagtgtttatatgcaggccatttctgtgagggtgacgcaagttgctattcagttgcaagtaattgcaccaattatttggtagaatg

SEQ ID NO: 17098 - DNA, 120 bp, synthetic construct
  misc_feature 1..120: note = Artificially Synthesized Probe
  source 1..120: mol_type = other DNA
ggaagccttctcactggccaaataggagcttttgtgttatatacctttcaatcttaaccaagtatctggagaatactttcagggcacaggagttactatggattttataatagtggcacc

SEQ ID NO: 17099 - DNA, 120 bp, synthetic construct
  misc_feature 1..120: note = Artificially Synthesized Probe
  source 1..120: mol_type = other DNA
tggtttcgagcaaacacatatgacaagaagaataaagtaaggagagtgaaaaactgccaatatggcttttgtttccacagctgaaagggtgaagcaagagaatctgaacctcgtctgtat

SEQ ID NO: 17100 - DNA, 120 bp, synthetic construct
  misc_feature 1..120: note = Artificially Synthesized Probe
  source 1..120: mol_type = other DNA
agttggatagtgcatactgttggagcttccttgatgttaaatctcttggagaccttaaacaaggtggatggccacccaggggactgaaggcaatatcttaagtgttttatatagcttttt

SEQ ID NO: 17101 - DNA, 120 bp, synthetic construct
  misc_feature 1..120: note = Artificially Synthesized Probe
  source 1..120: mol_type = other DNA
ctgggagcgtgtccctttctgttgtaattcagtaggtcagaattagaggaaagagtatgttggataaaacagacaatagaggaccacccttacatacattctgtggctgtagttcaaatt

SEQ ID NO: 17102 - DNA, 120 bp, synthetic construct
  misc_feature 1..120: note = Artificially Synthesized Probe
  source 1..120: mol_type = other DNA
gccagaacacaggggctacaggtcccacgcaagtctgaaatccaggatgggcagtcaaatcttaaagcgccaaaatgatctcctttgtctccatgtctcacatccaggtcatgctgatgc

SEQ ID NO: 17103 - DNA, 120 bp, synthetic construct
  misc_feature 1..120: note = Artificially Synthesized Probe
  source 1..120: mol_type = other DNA
tctctcaaggtcaaagttccacaaatctctggggcaggggcaaaatgctgccagtctctttgctaaaacaacgagtcacctttgctccatttcccaacaagtttttcatctccatctgga

SEQ ID NO: 17104 - DNA, 120 bp, synthetic construct
  misc_feature 1..120: note = Artificially Synthesized Probe
  source 1..120: mol_type = other DNA
cagagagccaaatcatgaatgaactctcattcacaattgctacaaagataataaaatacctaggaatacagctaacaaggaaagtgaaggatctcttcaaggaggactacaaaccactgc

SEQ ID NO: 17105 - DNA, 120 bp, synthetic construct
  misc_feature 1..120: note = Artificially Synthesized Probe
  source 1..120: mol_type = other DNA
agaagacatttatgtggctagcaaacatgaaaaaaagctcaacatcactaatcattagagaaatgcaaatcaaaagtgcaatgagataccatctcatgctggtcagaatggcgattatta

SEQ ID NO: 17106 - DNA, 120 bp, synthetic construct
  misc_feature 1..120: note = Artificially Synthesized Probe
  source 1..120: mol_type = other DNA
caggaagaagagggttcatatgtttgtgcataaatgtataccttgtgtttctgcatccaaaatggagggcacattttagaggccacttcagtttccatttggattagcatggtcagtaaa

SEQ ID NO: 17107 - DNA, 120 bp, synthetic construct
  misc_feature 1..120: note = Artificially Synthesized Probe
  source 1..120: mol_type = other DNA
tgggggcctcttgatagtttattatgcctgaaaaactggtgccatgggctatcggaacattggactgattctaagaaattgatgtcagggttccagtatcttcttgatattgaaaaaatg

SEQ ID NO: 17108 - DNA, 120 bp, synthetic construct
  misc_feature 1..120: note = Artificially Synthesized Probe
  source 1..120: mol_type = other DNA
tctttctagtaaaatgagttcttctatcgctatgtaatttggaaggagttccccaagagggaattatttgcttcgacgatattttcctcctgcgtgtgctatgactcttctgcaaggaaa

SEQ ID NO: 17109 - DNA, 120 bp, synthetic construct
  misc_feature 1..120: note = Artificially Synthesized Probe
  source 1..120: mol_type = other DNA
aaaaaaaatatagccacctgtatagtttcatctgctattagtgttagagcagcctttggctgctgcgtcaacaaaatactttttctctgaagggctgagtttggagtgtccaggaatctt

SEQ ID NO: 17110 - DNA, 120 bp, synthetic construct
  misc_feature 1..120: note = Artificially Synthesized Probe
  source 1..120: mol_type = other DNA
tggtaactctccttcaatagcttcaacttcagatgtcttgttttaaatgtctctcctcccttctcccttgtctgcaccagattaagaatgtgttcagggtcaaaaatgtgttgcttatga

SEQ ID NO: 17111 - DNA, 120 bp, synthetic construct
  misc_feature 1..120: note = Artificially Synthesized Probe
  source 1..120: mol_type = other DNA
gaattttgtttttggtttacaatgaatatagggtaaaaagttaaccagtatgcaggtgtctcaggatctggagagaaatgattgattttctcctgcatttgtgcttcatctgataggcaa

SEQ ID NO: 17112 - DNA, 120 bp, synthetic construct
  misc_feature 1..120: note = Artificially Synthesized Probe
  source 1..120: mol_type = other DNA
cagaattgtaactgtgcaagaaccacacagtgtgttatgtatgattacttttccttgcctgcccaatattttgttttccccaaagtggtgaaatctgttttttccagcacagtgggtatc

SEQ ID NO: 17113 - DNA, 120 bp, synthetic construct
  misc_feature 1..120: note = Artificially Synthesized Probe
  source 1..120: mol_type = other DNA
ttctgggacccttcttgtgactttggtgcttgtggacagtcttattttgtccctttgcttcatttttagctttgcctttttctgacccttttattgagctttctttgttctcatgtgttc

SEQ ID NO: 17114 - DNA, 120 bp, synthetic construct
  misc_feature 1..120: note = Artificially Synthesized Probe
  source 1..120: mol_type = other DNA
tcctaagaccagcgtttgaccttctctagagaatcagcatgctgttttgggagtacagagggaggattagaggtataacaagttttaaattagcctttcaaccagtcttctctttttttt

SEQ ID NO: 17115 - DNA, 120 bp, synthetic construct
  misc_feature 1..120: note = Artificially Synthesized Probe
  source 1..120: mol_type = other DNA
gcttcctgaaacttttgggacgttctgtggtattttagttacttcttagctttctttagtactggcctaggttttttgtttcttattcctgcatttaccgttgtccatcagtgttccagc

SEQ ID NO: 17116 - DNA, 120 bp, synthetic construct
  misc_feature 1..120: note = Artificially Synthesized Probe
  source 1..120: mol_type = other DNA
ccactcaaacgtaaacttatttttgtgttaagtttagccagatacagtctctggaaatggttgaaaggaagtcaaaatattttttgggggccaagagaaaaactccccctttgccctctg

SEQ ID NO: 17117 - DNA, 120 bp, synthetic construct
  misc_feature 1..120: note = Artificially Synthesized Probe
  source 1..120: mol_type = other DNA
tgtttattcctagacaggtagttcctgagttattaggaaagttcatttttagcaggtcgtgaagtctcatgtcctgtgaagagaaaatagggggaggaagggagaaaagcaacaacaaac

SEQ ID NO: 17118 - DNA, 120 bp, synthetic construct
  misc_feature 1..120: note = Artificially Synthesized Probe
  source 1..120: mol_type = other DNA
attgtcataaggtaagaatagtcacaaatactccccaagttttatagaaatcaggtagagaaaaacaaatatgccccaaatttggttcataagagtatactttactaaattgttaaaagc

SEQ ID NO: 17119 - DNA, 120 bp, synthetic construct
  misc_feature 1..120: note = Artificially Synthesized Probe
  source 1..120: mol_type = other DNA
atgtataaacaatttataaaattttaatcttgaacataagatataacttccataagtcttttatagactttataacctttattaaggagtcggttaatgcctcaagataaccttgttaat

SEQ ID NO: 17120 - DNA, 120 bp, synthetic construct
  misc_feature 1..120: note = Artificially Synthesized Probe
  source 1..120: mol_type = other DNA
gagctgaaaatgagttggagaacattattactttgctccttttaaaaggggagaaaaaactgaaaatggtgagatgtaataaatgtcaaacttctaaaacaaaattaaaaaataatttaa

SEQ ID NO: 17121 - DNA, 120 bp, synthetic construct
  misc_feature 1..120: note = Artificially Synthesized Probe
  source 1..120: mol_type = other DNA
aaaatctctaataatttattaagagtagatcccttaagaaatcaatcccttactgttctaataaattctttagtatataaatggttttttttaaatatcaaacccaatctccagaaagac

SEQ ID NO: 17122 - DNA, 120 bp, synthetic construct
  misc_feature 1..120: note = Artificially Synthesized Probe
  source 1..120: mol_type = other DNA
acagccaaagaggtcaggtcacccaatacaggaaaacagagctttagacctaagaagaatctgcccatgactcttgaaactctgcaaagaaaacagaacaccccaactgcggtgagtggc

SEQ ID NO: 17123 - DNA, 120 bp, synthetic construct
  misc_feature 1..120: note = Artificially Synthesized Probe
  source 1..120: mol_type = other DNA
ctgagacaggtttcaggtaatttagaaagtttattttgccaaagttgaggacacgtgcctgtgacacacctcaggaggtcctgacgacatgtgcccaaggtggtcagagcacagtttggt

SEQ ID NO: 17124 - DNA, 120 bp, synthetic construct
  misc_feature 1..120: note = Artificially Synthesized Probe
  source 1..120: mol_type = other DNA
aaggtagaaggtaaagaagaaggtaaagtacctgaaagccagaactggtttaaaccaaaaacagcatttattgctcactctgccttcggttctaccttgattaggtagtagaagggaaaa

SEQ ID NO: 17125 - DNA, 120 bp, synthetic construct
  misc_feature 1..120: note = Artificially Synthesized Probe
  source 1..120: mol_type = other DNA
tcacattctgaagtactgaggcttagaactccaatagatcttttttgtggggaacacaattcaacctaacattcaggaaggatgaggctcacaccatttgtaatcaggacttctctgtag

SEQ ID NO: 17126 - DNA, 120 bp, synthetic construct
  misc_feature 1..120: note = Artificially Synthesized Probe
  source 1..120: mol_type = other DNA
agaagaagtagagataatgtgccttttaggggaaggagagccaactccttgtccaggacatgacagctatttttaaaacgtccttatcagttagcagtgtggggttttttttgtttgttt

SEQ ID NO: 17127 - DNA, 120 bp, synthetic construct
  misc_feature 1..120: note = Artificially Synthesized Probe
  source 1..120: mol_type = other DNA
gaggtgaggattattggggccctctttgaggccactttccaatgtttttgtagtctcagatctgaagttaggatggtttctctaatactacttttacttttttaaactttaaagttcagg

SEQ ID NO: 17128 - DNA, 120 bp, synthetic construct
  misc_feature 1..120: note = Artificially Synthesized Probe
  source 1..120: mol_type = other DNA
gccaaaatttgatggctgtaaccactgttctcccttttgtcacctttttaagaaggttagctctgaagcttgactataacgtcagtggtgctgactttctcacaaacatcctaaatctct

SEQ ID NO: 17129 - DNA, 120 bp, synthetic construct
  misc_feature 1..120: note = Artificially Synthesized Probe
  source 1..120: mol_type = other DNA
tctttgtgcagaggtataagagtgagccagctcatggagcttgccactaagtggaaataaggaagaatcatctgaggcagccatggacatttgaaaatattaaaactaagcagaactgaa

SEQ ID NO: 17130 - DNA, 120 bp, synthetic construct
  misc_feature 1..120: note = Artificially Synthesized Probe
  source 1..120: mol_type = other DNA
atgacaaacccacagccaatatcatactgaatgggcaaaaactggaagcattccctttgaaaaccggcacaagacagggatgccctctctcaccgctcctattcaacatagtgttggaag

SEQ ID NO: 17131 - DNA, 120 bp, synthetic construct
  misc_feature 1..120: note = Artificially Synthesized Probe
  source 1..120: mol_type = other DNA
ggattaaagatttaaacgttaaacctaaaaccataaaaaccctagaagaaaacctaggcattaccattcaggacataggcgtgggcaaggacttcatgtccaaaacaccaaaagcaatgg

SEQ ID NO: 17132 - DNA, 120 bp, synthetic construct
  misc_feature 1..120: note = Artificially Synthesized Probe
  source 1..120: mol_type = other DNA
ttggtgagggtgagcaacatcacaaaccctacctggcattttctgagccattattatgtaccagcttttgtgctaagtgctgtacctgtattaaactgttttatttccagtattcttgaa

SEQ ID NO: 17133 - DNA, 120 bp, synthetic construct
  misc_feature 1..120: note = Artificially Synthesized Probe
  source 1..120: mol_type = other DNA
actgtattttttatacctgtgccatgccagccatgccaagcaacttagtaactgcaccatgaatagaatttgtaccctgcatactacttgctgtctttaaaaatatactcggggttccta

SEQ ID NO: 17134 - DNA, 120 bp, synthetic construct
  misc_feature 1..120: note = Artificially Synthesized Probe
  source 1..120: mol_type = other DNA
ttgtgggggcttctgtgctaaagagtatctgccagttaatccttagcaaagcaagatggatacagaataaacaaattgccactgtgacatatgcaagtttgtctttctcctaggatattg

SEQ ID NO: 17135 - DNA, 120 bp, synthetic construct
  misc_feature 1..120: note = Artificially Synthesized Probe
  source 1..120: mol_type = other DNA
aagttaagtttctctttaagtgccaggattgagtggatttgggattcctgtatttaaccttagttcccaaactgagatttttgtcttactcctgtgttcctttgcttctttcctgcagag

SEQ ID NO: 17136 - DNA, 120 bp, synthetic construct
  misc_feature 1..120: note = Artificially Synthesized Probe
  source 1..120: mol_type = other DNA
tttccttgccttcccaccatctcattaaccctgttcctgaatttggtgtttgcctgtactgttgagcttatttacttttattgtactttctgactccttctttccaggaaagattcgaag

SEQ ID NO: 17137 - DNA, 120 bp, synthetic construct
  misc_feature 1..120: note = Artificially Synthesized Probe
  source 1..120: mol_type = other DNA
catgaaagaaatgtagcacaaaatggagaagtcgttcaaccttgaccctgtcagagttcttatttgaaagccacattgctgctagtgttcttattgtgttttggattctgtttcttgccc

SEQ ID NO: 17138 - DNA, 120 bp, synthetic construct
  misc_feature 1..120: note = Artificially Synthesized Probe
  source 1..120: mol_type = other DNA
tgtaatctgtcctcaaggagaattgatgtaaacctggggaaatctgtgtgtgtgtgtagaagccatgcctacaaataagatagaatgtgctcaattctactagaggaataccaagagtct

SEQ ID NO: 17139 - DNA, 120 bp, synthetic construct
  misc_feature 1..120: note = Artificially Synthesized Probe
  source 1..120: mol_type = other DNA
tggcgtgttaccttttagcagttagttaacatctctgtgcccgagtttcttcctatgtagaaggggctagttaattctagtgcctaccttataaggttgttgggtggattaaatgagtta

SEQ ID NO: 17140 - DNA, 120 bp, synthetic construct
  misc_feature 1..120: note = Artificially Synthesized Probe
  source 1..120: mol_type = other DNA
ttttctcattttttcttttcctgattgagtccattagattcacggctggaccagtatcaggagaatagaagtagggcgagtttccctgtttatctctgttaccatgtgcattcgtacaca

SEQ ID NO: 17141 - DNA, 120 bp, synthetic construct
  misc_feature 1..120: note = Artificially Synthesized Probe
  source 1..120: mol_type = other DNA
ttttctttatccactcattggttgataggcatttaggctggttccatattgttgaaattgcaagttgttttgctatcaacatgtgtgtacaaatgtccttttcatataatgacttctttt

SEQ ID NO: 17142 - DNA, 120 bp, synthetic construct
  misc_feature 1..120: note = Artificially Synthesized Probe
  source 1..120: mol_type = other DNA
ggtgaccatgaccttatagtgtagtttgaagtcaggtaatgtactgctgccagatttgttctttttgcttagtcttgctttggctatgtgggctctttgcttttccatatgaattttagg

SEQ ID NO: 17143 - DNA, 120 bp, synthetic construct
  misc_feature 1..120: note = Artificially Synthesized Probe
  source 1..120: mol_type = other DNA
atttggctagctagtattttgttgagtatttttgcatttatgttcatcagggatattggtctgtagttttctttttttgttatgatctttcctggttttggtattagggtaatactggct

SEQ ID NO: 17144 - DNA, 120 bp, synthetic construct
  misc_feature 1..120: note = Artificially Synthesized Probe
  source 1..120: mol_type = other DNA
tgtagcctgtcatgttggagaatgttccaggctgaagaaaagaatatatattctgtacttcttaggcggaaagttctatagatatctgttaagtccatttgctccagagtatagtttaat

SEQ ID NO: 17145 - DNA, 120 bp, synthetic construct
  misc_feature 1..120: note = Artificially Synthesized Probe
  source 1..120: mol_type = other DNA
tatttaggtgtattgtgagttttgtatcaagatttagaactcattttagcatttcttgtaggactggcttggtagtggcgaattctctcagcatttgtttgtctgaaaatgactgtatct

SEQ ID NO: 17146 - DNA, 120 bp, synthetic construct
  misc_feature 1..120: note = Artificially Synthesized Probe
  source 1..120: mol_type = other DNA
actgtttcattggaaagatctggaacccaagggctgctgttcagattcttttgtccaatggggtgatcccttgatggggtgttcttcgccttcccctaaggatgaggattcttgagagct

SEQ ID NO: 17147 - DNA, 120 bp, synthetic construct
  misc_feature 1..120: note = Artificially Synthesized Probe
  source 1..120: mol_type = other DNA
aagcaggcctctcaggcctcgcccctccctgcctgcctgcaccttcggctgtgggttcttcatttgtatctgcacttcccatttgtcccccaccggattctgctcaggaaaatttgtgct

SEQ ID NO: 17148 - DNA, 120 bp, synthetic construct
  misc_feature 1..120: note = Artificially Synthesized Probe
  source 1..120: mol_type = other DNA
taactggatcaccactagtggtcatttatgtttgcagatttttgctagcagggaatcactggatgaaaggattaatgtgtctgtgatttttgttagatggtttcagattgccgtctgtag

SEQ ID NO: 17149 - DNA, 120 bp, synthetic construct
  misc_feature 1..120: note = Artificially Synthesized Probe
  source 1..120: mol_type = other DNA
catttccaaagtgcttttgccagctcagctttcaccatcaatgcgtatgagtgtctttgcatcccagcagaatttcattacactgacttcagtgtgtgtgtagtgatatcttgtaatatt

SEQ ID NO: 17150 - DNA, 120 bp, synthetic construct
  misc_feature 1..120: note = Artificially Synthesized Probe
  source 1..120: mol_type = other DNA
taaaacctttgacttgagtctgctggtaaagcttctgaatattgagtttgctgagaaataaaaatcaaaacttctttaagctggtaaagtgaggggcccaccagcagtgatctcctgatg

SEQ ID NO: 17151 - DNA, 120 bp, synthetic construct
  misc_feature 1..120: note = Artificially Synthesized Probe
  source 1..120: mol_type = other DNA
taggactgagcattgaacttccagctatgcaactcgcagggcacaatttcaagtgtggaaaccatctgtaggcaagctcttttaaaaacatgaattttagacaccgtaaattctaatgca

SEQ ID NO: 17152 - DNA, 120 bp, synthetic construct
  misc_feature 1..120: note = Artificially Synthesized Probe
  source 1..120: mol_type = other DNA
ttatggcagcaacactgaaggagcacagtttctctctctaggaagaagaggattagcagacataattgtgtgcgtcaagagaaatttgtaatcaaaaaatgaaagtaagacgaatggccc

SEQ ID NO: 17153 - DNA, 120 bp, synthetic construct
  misc_feature 1..120: note = Artificially Synthesized Probe
  source 1..120: mol_type = other DNA
ggtttttagtgaccactggagaaagataacatgatagaaatttacagttaagtacgcaacctcaataccttttatgcagaaaatagtgggtttccaaagagctgtaagcgctgcgcacac

SEQ ID NO: 17154 - DNA, 120 bp, synthetic construct
  misc_feature 1..120: note = Artificially Synthesized Probe
  source 1..120: mol_type = other DNA
caattcatctacccaagctgtttctcccacagtgaaaggggatccctgctactaaccatctcttcagaccatagcaaggattacatgagatgctcagagagatccctggcattttttttt

SEQ ID NO: 17155 - DNA, 120 bp, synthetic construct
  misc_feature 1..120: note = Artificially Synthesized Probe
  source 1..120: mol_type = other DNA
aaaaagtatacttttgtcaattatttccaccatattgtattcagatgaggttaattcaaaatttcaggtggttgaaatgttccctgacatagccggacatggtggggcactcgtgtagtc

SEQ ID NO: 17156 - DNA, 120 bp, synthetic construct
  misc_feature 1..120: note = Artificially Synthesized Probe
  source 1..120: mol_type = other DNA
agccccattctcactgcttcccaggcagactgtgaggacttcacttaagcttcaaagtctcttcttcacggacatagctaaacataaaagcattaactacaaccaatttgtactaacata

SEQ ID NO: 17157 - DNA, 120 bp, synthetic construct
  misc_feature 1..120: note = Artificially Synthesized Probe
  source 1..120: mol_type = other DNA
aggttgcagtgagccaagatcacgccactgcactccagcctgggtgacagagtgagactccgtctcaaaaaaaaaaaaaaaaaaaaaaaagaggccgggcgcagtggctcacgcctgtaa

SEQ ID NO: 17158 - DNA, 120 bp, synthetic construct
  misc_feature 1..120: note = Artificially Synthesized Probe
  source 1..120: mol_type = other DNA
aactcctgggctcaagcaatactcctgtatcaccctcccaaagtgctgggattacaagcataagccactgtgcccagccaagaatatttttgagaaaacagtcttgaaagcaagtctgag

SEQ ID NO: 17159 - DNA, 120 bp, synthetic construct
  misc_feature 1..120: note = Artificially Synthesized Probe
  source 1..120: mol_type = other DNA
cagcttttccgttcactttgatcctttcttgcaaaaactgctcctgtagaaatcattaaattgaccaatgaagtgacaagttcatctgtctcaacagaatattttatctgtctcccaaca

SEQ ID NO: 17160 - DNA, 120 bp, synthetic construct
  misc_feature 1..120: note = Artificially Synthesized Probe
  source 1..120: mol_type = other DNA
ggtacatgcaaccaaagctaaaagcaacttctgaatctaaggagtataaaacactgttcacagcactatcagaaaataagccttcaacctagtagaaagagcaaagacatagggactgaa

SEQ ID NO: 17161 - DNA, 120 bp, synthetic construct
  misc_feature 1..120: note = Artificially Synthesized Probe
  source 1..120: mol_type = other DNA
aatcccaacactttgggagcccgaggcaggcggatcacaaaggcaggagattgagaccatcctggctaacacggtgaaactctgtctctactaaaaatacaaaaaattagccgggcatag

SEQ ID NO: 17162 - DNA, 120 bp, synthetic construct
  misc_feature 1..120: note = Artificially Synthesized Probe
  source 1..120: mol_type = other DNA
aggtcagaaatcttgaattctgcatctcaagattcataaatgacttaagttttctatcctaaggaggcttccagaaggaaagacaatcacacaaacagatgagtgggctgagggaatggc

SEQ ID NO: 17163 - DNA, 120 bp, synthetic construct
  misc_feature 1..120: note = Artificially Synthesized Probe
  source 1..120: mol_type = other DNA
aagtaaaatcatttgtggaaactaaaggagaaaaacaagatagtcctctaacacctctgtgctagagcccttcttgcttattctaagcccatctccttttactcctcacaactgttgcac

SEQ ID NO: 17164 - DNA, 120 bp, synthetic construct
  misc_feature 1..120: note = Artificially Synthesized Probe
  source 1..120: mol_type = other DNA
tttttccaaaattagagtgcaggcatacaaaatgccttgcatacccacaattttcatatgaaatcaatccttgtcctacatgttcagagtagggtcctgatccgtcttagctcatctccc

SEQ ID NO: 17165 - DNA, 120 bp, synthetic construct
  misc_feature 1..120: note = Artificially Synthesized Probe
  source 1..120: mol_type = other DNA
cacacaatcaatcaagagacctacccacaacgggcttgatacttctccatcaaggttttaaaccaaaaggcattcaaaagcccaaccagacagaaagagcagaagaaccggaaatgttaa

SEQ ID NO: 17166 - DNA, 120 bp, synthetic construct
  misc_feature 1..120: note = Artificially Synthesized Probe
  source 1..120: mol_type = other DNA
atcggaggggggaagccagactggacgagcccaaagataaataaaggggttggctttactttttgaaagtcttgggaagaaaaaagaaataaggaaattcactatactgtaaattaccag

SEQ ID NO: 17167 - DNA, 120 bp, synthetic construct
  misc_feature 1..120: note = Artificially Synthesized Probe
  source 1..120: mol_type = other DNA
ccctcctcaagcatctacattttaataataccacctaccagtggtagctacttcctgcagttgctactgttagtattataccccgacagttacctaaacacatctttatacctagttaac

SEQ ID NO: 17168 - DNA, 120 bp, synthetic construct
  misc_feature 1..120: note = Artificially Synthesized Probe
  source 1..120: mol_type = other DNA
cttcatctccagccacattgatctgctagtctctaaatgtcttcccatttctggggctttgcacttgctcttgcctctgcttggaacttttcccagcttttctatttttgtttttctttc

SEQ ID NO: 17169 - DNA, 120 bp, synthetic construct
  misc_feature 1..120: note = Artificially Synthesized Probe
  source 1..120: mol_type = other DNA
tatgattttcttccaagcagttaatgcagcctgtcattatttgttaatctgtgtacttgactaaccttggctggtgtgttcccttctatgtgcccatggtagatgctctgtaaatactag

SEQ ID NO: 17170 - DNA, 120 bp, synthetic construct
  misc_feature 1..120: note = Artificially Synthesized Probe
  source 1..120: mol_type = other DNA
aaaaaaaaagaatcttggcccataaaagaatgttggcctataaacacataaacattagccattgctactactgtcattatgatttggtccacaaatagaaccagggctagggaccgggca

SEQ ID NO: 17171 - DNA, 120 bp, synthetic construct
  misc_feature 1..120: note = Artificially Synthesized Probe
  source 1..120: mol_type = other DNA
caaaacaaaacgaaaacagctcaaatatctccgagctttttctaagcctttattgagcactactgtgggtcaggctctgggcttgactttgtaatcgcaagaggggcagaaacgggctgc

SEQ ID NO: 17172 - DNA, 120 bp, synthetic construct
  misc_feature 1..120: note = Artificially Synthesized Probe
  source 1..120: mol_type = other DNA
tcctccccgcgggctggaggtggagtggccgggccggaaccagtgcgcaaagcagatggcgagcgcggaggtcggttcggccccgccgcgcctcaaggcagcagccaccctggggaaggt

SEQ ID NO: 17173 - DNA, 120 bp, synthetic construct
  misc_feature 1..120: note = Artificially Synthesized Probe
  source 1..120: mol_type = other DNA
gaagtcttaggtccacaaaaccacagtttcagttatgtgggctcaaggaacccaggagtggctctgatttgcccaatgccgtgagaagatgtcgaggagcagcttctgcttttgatacta

SEQ ID NO: 17174 - DNA, 120 bp, synthetic construct
  misc_feature 1..120: note = Artificially Synthesized Probe
  source 1..120: mol_type = other DNA
ggggcaaaagctccagcgttctggacaagtgctgagcaatgtgtgacccagacgtacagagaggattagcaggaggtagggactgcaggtagggcctgttatgtccatcattgcatgcgt

SEQ ID NO: 17175 - DNA, 120 bp, synthetic construct
  misc_feature 1..120: note = Artificially Synthesized Probe
  source 1..120: mol_type = other DNA
ctcggtaaaatgttttataaaggcagtttctgccctctccccgcgtcccccacccccctccacggacctacttacccagcctctgagccgcagtgccctcctctgtaaagtgggtatatc

SEQ ID NO: 17176 - DNA, 120 bp, synthetic construct
  misc_feature 1..120: note = Artificially Synthesized Probe
  source 1..120: mol_type = other DNA
aaaaaaaaaagaaagttaaggacaaacggcaaactcacactgcctgacgcagggcctggtttctcttccttgaaggccttttacagatgtcagctttcactggcctccatgcacaacctc

SEQ ID NO: 17177 - DNA, 120 bp, synthetic construct
  misc_feature 1..120: note = Artificially Synthesized Probe
  source 1..120: mol_type = other DNA
ttactgtcctcatttacagataactcctttacatagcttgtatcaggacagggttctgaatattttgcatgcattaactcatttcacactcagaacccctatgaggggctaacagcattc

SEQ ID NO: 17178 - DNA, 120 bp, synthetic construct
  misc_feature 1..120: note = Artificially Synthesized Probe
  source 1..120: mol_type = other DNA
ctctgaccttatctcccaaagaacatctgccaccagcagccatccaaaaatgaaatgccaccttcttggaaagtcaaagtcaaacccctactgatacctaatctggaccaggttcagcaa

SEQ ID NO: 17179 - DNA, 120 bp, synthetic construct
  misc_feature 1..120: note = Artificially Synthesized Probe
  source 1..120: mol_type = other DNA
aggctgcagtgagctgtgattgatcgggggacagtcagcaaaattatggactggatgttggtcaacagtactaattaactggccagttaatagtattaactaactaatggacaattacat

SEQ ID NO: 17180 - DNA, 120 bp, synthetic construct
  misc_feature 1..120: note = Artificially Synthesized Probe
  source 1..120: mol_type = other DNA
aacccaagtatacaaaaagtcagccctccacatatttggtttcagttccctcaaacactgtattgagtactgtatttcctatctgcatttgattataaaaatctgaccaggcacggtgtc

SEQ ID NO: 17181 - DNA, 120 bp, synthetic construct
  misc_feature 1..120: note = Artificially Synthesized Probe
  source 1..120: mol_type = other DNA
tgaataacaagaagcaaaacagctaaataagcaccaatcttttcatgtttttcctacctcaactgagcatccaagttactctgtctccagagccaaagcaagacagaagcagggacttaa

SEQ ID NO: 17182 - DNA, 120 bp, synthetic construct
  misc_feature 1..120: note = Artificially Synthesized Probe
  source 1..120: mol_type = other DNA
gaagatgggaataaaatatagcctccaaccaactacatcaataaaccagatttaggatcagagaattccaaggctaaggagcctttcaagatcactaaattcacactcctccactctgct

SEQ ID NO: 17183 - DNA, 120 bp, synthetic construct
  misc_feature 1..120: note = Artificially Synthesized Probe
  source 1..120: mol_type = other DNA
acagtgaggagaaactgctcaacacaatcaaaaatgaacatgatagggacaatggaactcaaaaaccgcacagaggaaagctcagaaagcaagccacatgtttttgcactaaaatagcag

SEQ ID NO: 17184 - DNA, 120 bp, synthetic construct
  misc_feature 1..120: note = Artificially Synthesized Probe
  source 1..120: mol_type = other DNA
aaatcaggaaaaaaatttagaaataaaagaggcattttaggaattaaggctaattaagatggattagagtgaataacaacaaataataatgctttaacataaatgcaaagaaaagcaact

SEQ ID NO: 17185 - DNA, 120 bp, synthetic construct
  misc_feature 1..120: note = Artificially Synthesized Probe
  source 1..120: mol_type = other DNA
gaacactttttgagtagctagcaaattttgatttcttgacaggagggggtggggagcggcacaaggtcttcctcataataattcactgagctatacattttttgtatggttttctgtatc

SEQ ID NO: 17186 - DNA, 120 bp, synthetic construct
  misc_feature 1..120: note = Artificially Synthesized Probe
  source 1..120: mol_type = other DNA
tcctgcaccaagatcctcacatggtactacttaattaaaatagtccccaaacataaacaacctaaaaaagtctaactttccccacaaaggtttgcgtcgacttctcaatcaagggtgcta

SEQ ID NO: 17187 - DNA, 120 bp, synthetic construct
  misc_feature 1..120: note = Artificially Synthesized Probe
  source 1..120: mol_type = other DNA
gaggccgaagtgggcggatcacctgaagtcaggagttcgagaccagcctgtccaacatggagaaaccctgtctctactaaaaatacaaaaaaaaattagccaggcttggtggtgcatgcc

SEQ ID NO: 17188 - DNA, 120 bp, synthetic construct
  misc_feature 1..120: note = Artificially Synthesized Probe
  source 1..120: mol_type = other DNA
gtcatgctggtgatggtcaggaaagggctgttgttctcataatgtactttaaaagtatcctggaaggaaggaaacaaatagttcaaagttttggcaacagagaatgcaccattagtttaa

SEQ ID NO: 17189 - DNA, 120 bp, synthetic construct
  misc_feature 1..120: note = Artificially Synthesized Probe
  source 1..120: mol_type = other DNA
atttcactcttctatgtggtaaatactacctctcaataaggcccaacacaccttgcttcccaaaagtccatgaaaaggacaagatctattttgttagctcttacaactagtttattcgct

SEQ ID NO: 17190 - DNA, 120 bp, synthetic construct
  misc_feature 1..120: note = Artificially Synthesized Probe
  source 1..120: mol_type = other DNA
gcataataagtacattaaaaagccctatgcttagacacgactcaggtactaaaatgtccatagtgtcgatagtggttgtgaactgacctcaaatcttcctttttgccaaatggtctccat

SEQ ID NO: 17191 - DNA, 120 bp, synthetic construct
  misc_feature 1..120: note = Artificially Synthesized Probe
  source 1..120: mol_type = other DNA
cctctctctccccaaaaacaaccccaccgtgcaacaatatacatagggagctatgttttgagacatggaggaatataagtatgtttactacaaatcctcatacatttagaaggaaacact

SEQ ID NO: 17192 - DNA, 120 bp, synthetic construct
  misc_feature 1..120: note = Artificially Synthesized Probe
  source 1..120: mol_type = other DNA
gttttcatattcaaaaaattatgttaataaaaagttcttaaaagtttaaaacaacccaaaacgaacagccctaactatgtatcaaactgacatttgaaacataaaaaacaggctgggcgc

SEQ ID NO: 17193 - DNA, 120 bp, synthetic construct
  misc_feature 1..120: note = Artificially Synthesized Probe
  source 1..120: mol_type = other DNA
tccaccaaagaaaaaaagaggtaggttaattatggtaacctgataaccgctgaatctaagtgacgtgtgtgggagtttatactagtctttgtactttggcatgtttgcgatttgccatag

SEQ ID NO: 17194 - DNA, 120 bp, synthetic construct
  misc_feature 1..120: note = Artificially Synthesized Probe
  source 1..120: mol_type = other DNA
gggagcttgactgtgaagaatctcccactaaaggaagaacaaggcaagagaagtaagagagactgaggatactgaaaacagtagtagcagttcaaagtcacaacaaaattttgaaccaaa

SEQ ID NO: 17195 - DNA, 120 bp, synthetic construct
  misc_feature 1..120: note = Artificially Synthesized Probe
  source 1..120: mol_type = other DNA
tatctatattaacatggaaagatgtccatgtacaatgtaaataacgaaaatctgtttacaaatgacaaagaataactccatttaaaaacatacatagacccggggagggtggcttacgcc

SEQ ID NO: 17196 - DNA, 120 bp, synthetic construct
  misc_feature 1..120: note = Artificially Synthesized Probe
  source 1..120: mol_type = other DNA
catattacaactgtgacgttcactactcaaaatataagtagcggaatcttctcctcaggacagtcttaaccaattcttagtttcaagtcccaaatgtgcttctcatcccactctctgtcc

SEQ ID NO: 17197 - DNA, 120 bp, synthetic construct
  misc_feature 1..120: note = Artificially Synthesized Probe
  source 1..120: mol_type = other DNA
aaagctcttctctagctggatctaatgggagaacattgtgtgaatgacttggttttttactcatgtactcaaactgatttactgagaaccccatataggtcagtttctgtggcaggaaga

SEQ ID NO: 17198 - DNA, 120 bp, synthetic construct
  misc_feature 1..120: note = Artificially Synthesized Probe
  source 1..120: mol_type = other DNA
taaagctaactctcagatcttacagcctcggggctggtgagatgcctacttcatacactcagtggaaaatcaagataatcaccaagaaaaattgagataatcaccacgcattaaaatgtg

SEQ ID NO: 17199 - DNA, 120 bp, synthetic construct
  misc_feature 1..120: note = Artificially Synthesized Probe
  source 1..120: mol_type = other DNA
cagtggctcacacctgtaatcccagcactttgggaggccaagacgggcagatcacctgaggtcaggagttggagaacagtctggccaatatggagaaatcccatctctactaaaaataca

SEQ ID NO: 17200 - DNA, 120 bp, synthetic construct
  misc_feature 1..120: note = Artificially Synthesized Probe
  source 1..120: mol_type = other DNA
ccaatcatagataggagaatacttgctgaggcaaacagcttggagttctcacataaagctctgtggaaccaggagggagaactgatctgatatagaaagtaactactttcttcctataaa

SEQ ID NO: 17201 - DNA, 120 bp, synthetic construct
  misc_feature 1..120: note = Artificially Synthesized Probe
  source 1..120: mol_type = other DNA
aaccctgtaataaagcaggcacttcctaagcaactctcctagtttatgatcccatatgatcccaaccctgacataacctttaacaagagacaaggtatattgtttgtcagcttacctttt

SEQ ID NO: 17202 - DNA, 120 bp, synthetic construct
  misc_feature 1..120: note = Artificially Synthesized Probe
  source 1..120: mol_type = other DNA
ccaaatatacttcccaaaggcctctttcttgatgcttttctcatttacattcaaataagcatactcaaagaaatgtatttagtgatgtaatagaaaagtctcagggctgggcgcagtggc

SEQ ID NO: 17203 - DNA, 120 bp, synthetic construct
  misc_feature 1..120: note = Artificially Synthesized Probe
  source 1..120: mol_type = other DNA
aaagagtagttatctccaatcataagactgtggagcagactgcaagggagaagggtatacatatcccactgatctctctgccaacccaccctcaactgaaaaaaacaaaaattagactat

SEQ ID NO: 17204 - DNA, 120 bp, synthetic construct
  misc_feature 1..120: note = Artificially Synthesized Probe
  source 1..120: mol_type = other DNA
aggaaaaatcattagatgggtccttggtggtaaaaagagaagcaaccactggctcctagtcagtaaccaccatggtcccttctgctagctcctaaaattctacaagggtttgaaaataac

SEQ ID NO: 17205 - DNA, 120 bp, synthetic construct
  misc_feature 1..120: note = Artificially Synthesized Probe
  source 1..120: mol_type = other DNA
gacagactacagcctccttgcctgctatatgaggatttataccttaaatggttgctatgagggctaaatgagaatatatttaaaatacccaccataatatctgacacacagtagagtccc

SEQ ID NO: 17206 - DNA, 120 bp, synthetic construct
  misc_feature 1..120: note = Artificially Synthesized Probe
  source 1..120: mol_type = other DNA
tctatgtctagaaagaagcacctacaacggaccagatactgaattaagagaatgaaattcactttaattcatttatttgtcctctacttgagccacctcgtcgggccgtgagaaatgaag

SEQ ID NO: 17207 - DNA, 120 bp, synthetic construct
  misc_feature 1..120: note = Artificially Synthesized Probe
  source 1..120: mol_type = other DNA
ggaccctgtctccggggcaaccgggaagccgacccggcgcctgattgctaaagccctctcagagctgctcgggatatccttctgttcgtagtgcgagtgtacttactttttttttttttt

SEQ ID NO: 17208 - DNA, 120 bp, synthetic construct
  misc_feature 1..120: note = Artificially Synthesized Probe
  source 1..120: mol_type = other DNA
attaggtatctactaataggatccattgagaaaggcacatcacttctgtggtattgccacaaaattattgaaaatccattacctcaatctagtcataaatatcagacaaggccaggcaca

SEQ ID NO: 17209 - DNA, 120 bp, synthetic construct
  misc_feature 1..120: note = Artificially Synthesized Probe
  source 1..120: mol_type = other DNA
agaaagtaaaagaataaaagaatggctactccattgacagagcagcccgaggactgctggttgcccatctttatggttatttcttgatgatatgctatacaaggggtggattattcatgc

SEQ ID NO: 17210 - DNA, 120 bp, synthetic construct
  misc_feature 1..120: note = Artificially Synthesized Probe
  source 1..120: mol_type = other DNA
ttatgtctagctaagggattgtaaatacaccaatcggcagtctgtatctagctcaaggtttgtaaacacaccaatcagcaccctgtgtctagctcagggtttgtgaatgcaccagttgac

SEQ ID NO: 17211 - DNA, 120 bp, synthetic construct
  misc_feature 1..120: note = Artificially Synthesized Probe
  source 1..120: mol_type = other DNA
aagaccctgtctcaaaaaacaaaacaaggctgggcatggtggctcatgcttgtaatcacagcactttggaaggccaaggcaggaggattgcttgaccccaaggagtttgagaccagtctg

SEQ ID NO: 17212 - DNA, 120 bp, synthetic construct
  misc_feature 1..120: note = Artificially Synthesized Probe
  source 1..120: mol_type = other DNA
gaaacaaaaatactgagcccaccaaatgcacatggaagaatgttcagaacagttccttcacactccaaatttctgttattatctatattagtcaaaactcagccaggcacagtggttcgc

SEQ ID NO: 17213 - DNA, 120 bp, synthetic construct
  misc_feature 1..120: note = Artificially Synthesized Probe
  source 1..120: mol_type = other DNA
tccttccaattctgtggcattagggaataaattccaatatgaatttttggagggtacaaaaacatgtaaatcagagcaccagctaatgagaagtaggaaccaggagggcatgttccttcc

SEQ ID NO: 17214 - DNA, 120 bp, synthetic construct
  misc_feature 1..120: note = Artificially Synthesized Probe
  source 1..120: mol_type = other DNA
tgttttcatgtagtatactgcaaaaacatgtggcttgctttctgagctttcccctgctcggtttttgagctcccttgtccctatcatgctcaattttgattctgttgagtagtttctcct

SEQ ID NO: 17215 - DNA, 120 bp, synthetic construct
  misc_feature 1..120: note = Artificially Synthesized Probe
  source 1..120: mol_type = other DNA
tgtaagatgttcacataagggaatgctgggtgaaagatgccagatgcaaattggcagctgcgcagacactcctagatcaggcaagaattctctctattattttttcaattcctatatatc

SEQ ID NO: 17216 - DNA, 120 bp, synthetic construct
  misc_feature 1..120: note = Artificially Synthesized Probe
  source 1..120: mol_type = other DNA
agagaaatgtgagcacatgtacccccagctacatagacaaaaatatacgcagaagcattgcctgtaataccaaaaagcgaaaacatcctagatgaaaagaaaggtaaagacttctgtgag

SEQ ID NO: 17217 - DNA, 120 bp, synthetic construct
  misc_feature 1..120: note = Artificially Synthesized Probe
  source 1..120: mol_type = other DNA
gtctcactctgttgcccaggctggagtgcagtggcacaagcttggctcactgcaacctccaactcctgggttcaagcaattctcctgtctcagcctcccaagtagctgggattacagaca

SEQ ID NO: 17218 - DNA, 120 bp, synthetic construct
  misc_feature 1..120: note = Artificially Synthesized Probe
  source 1..120: mol_type = other DNA
agtagaataccaaattccagcatgaaagcatgaggagctccatgacctattctccagtaagacttgtgaaaactataaagacccaactacttaaaacctctagaaacgagctggtcacag

SEQ ID NO: 17219 - DNA, 120 bp, synthetic construct
  misc_feature 1..120: note = Artificially Synthesized Probe
  source 1..120: mol_type = other DNA
tctgccctgggcgggccaggtgttccttgccctcattcccgtaaacccacaaccttccagtgcaggcgttagggccattatgaacatgtcacagtgctgcagagattttgtttatggcca

SEQ ID NO: 17220 - DNA, 120 bp, synthetic construct
  misc_feature 1..120: note = Artificially Synthesized Probe
  source 1..120: mol_type = other DNA
ttaagcaatcagctgcttaatttaacttaattaaattaaactgcagggtgttgtcagggaaagacaggacaacacctctatcaaggcaactgtcatcccaagacagctatggatttaccc

SEQ ID NO: 17221 - DNA, 120 bp, synthetic construct
  misc_feature 1..120: note = Artificially Synthesized Probe
  source 1..120: mol_type = other DNA
catctctactaaaaatacaaaaaaaattagccaggcgtggtggcgggcgcctgtagtcccagctacctgggaggctgaggcaggagaatggcgtgaacccgggagcagaggttgcagtga

SEQ ID NO: 17222 - DNA, 120 bp, synthetic construct
  misc_feature 1..120: note = Artificially Synthesized Probe
  source 1..120: mol_type = other DNA
aaggaagccagaatatttttccccaaaacataaaggatgttgaattaaagataagaaacatgtgggggagctctctgccttccctgtttgcctagagcaggacaaagaaaaaaggtcttt

SEQ ID NO: 17223 - DNA, 120 bp, synthetic construct
  misc_feature 1..120: note = Artificially Synthesized Probe
  source 1..120: mol_type = other DNA
ctaaaaatacaaaaattagccgggtgtggtggtgtgcccctgtaatcccagttactcaggaggctgaggcaggagaattgcttgaaccagggaggcagaggttgcagtgagccgtgatca

SEQ ID NO: 17224 - DNA, 120 bp, synthetic construct
  misc_feature 1..120: note = Artificially Synthesized Probe
  source 1..120: mol_type = other DNA
ggcactgtgagagcacatgttcccttttctatgtctgatttggctctatgcaaagagaagtttggtcttttctctgaagatccaggacaattcatagatgagttggagaaattaactcca

SEQ ID NO: 17225 - DNA, 120 bp, synthetic construct
  misc_feature 1..120: note = Artificially Synthesized Probe
  source 1..120: mol_type = other DNA
ggagtacattttataacccattctgcccctgatacccgtaggaaactacaaaaagcagctatgggtccccaaattcctatggaacagcttttggatatggcatttttagttttttgtttt

SEQ ID NO: 17226 - DNA, 120 bp, synthetic construct
  misc_feature 1..120: note = Artificially Synthesized Probe
  source 1..120: mol_type = other DNA
taagaatattaacttccttctgggctgcttattctgttttgtcccattataatgggcctctgtcaccccaaaactgtatgatcacagggtagatggacaagcccatagagagcattttac

SEQ ID NO: 17227 - DNA, 120 bp, synthetic construct
  misc_feature 1..120: note = Artificially Synthesized Probe
  source 1..120: mol_type = other DNA
gatcacctgaggtcaggagttcaagaccagcctgggcaacatggtgaatccccgtctctactaaaaatacaaaaaattagccgggcgtggtggcatatgcctgtagtcccagctactcag

SEQ ID NO: 17228 - DNA, 120 bp, synthetic construct
  misc_feature 1..120: note = Artificially Synthesized Probe
  source 1..120: mol_type = other DNA
cccaatcatatttcccctccacctcttccctcatactgtcatgtcattttactcacgtgatatgactggcttcctccacatcatgtgactgtaaagctaacatttgcattttaaagcctt

SEQ ID NO: 17229 - DNA, 120 bp, synthetic construct
  misc_feature 1..120: note = Artificially Synthesized Probe
  source 1..120: mol_type = other DNA
acaggaacttatccattcacctactgaaagacatcttggttgcttccaagttttggcaattatgaataaatgaatacacatccatgtgcaggtttttgtgtgacacaaattttcaactcc

SEQ ID NO: 17230 - DNA, 120 bp, synthetic construct
  misc_feature 1..120: note = Artificially Synthesized Probe
  source 1..120: mol_type = other DNA
ctcctaggctcaagtgatcctcctgcctcagcctcccaaaatgctgggattataggcataagccactgtgcccagctagctaacttttgttttgagacagaatctcactatgttgcccag

SEQ ID NO: 17231 - DNA, 120 bp, synthetic construct
  misc_feature 1..120: note = Artificially Synthesized Probe
  source 1..120: mol_type = other DNA
attttttactgtgtcccaggtttctttaagaacaaagtgatacatgatgtagggattaaaagcaaaagcatcattgaacttcaccttccctccaaccagttgtcccaaaatcccctgccc

SEQ ID NO: 17232 - DNA, 120 bp, synthetic construct
  misc_feature 1..120: note = Artificially Synthesized Probe
  source 1..120: mol_type = other DNA
catatctcctgaagctcttcattgttggctgcttcctccacccacttctgcagcaagggaggcagcttacacatgttcttgaaactgagctgcagagcctcaaagcagctgatggtcatt

SEQ ID NO: 17233 - DNA, 120 bp, synthetic construct
  misc_feature 1..120: note = Artificially Synthesized Probe
  source 1..120: mol_type = other DNA
aaataaacatttaaaaaaagagcccccagggtgagccccacacgggcctggatatatcccagggtgatcctcttctgcttcaggagcttggcaaattacagagctttgatgtcctgggac

SEQ ID NO: 17234 - DNA, 120 bp, synthetic construct
  misc_feature 1..120: note = Artificially Synthesized Probe
  source 1..120: mol_type = other DNA
tcaccatgttgctcaggcttgatgtgtcatttttcaaaaatcaagccagtcccctatttatgaacaattagtttgcttccatgcttttgccattcaaacagccctcaactgtacctcttt

SEQ ID NO: 17235 - DNA, 120 bp, synthetic construct
  misc_feature 1..120: note = Artificially Synthesized Probe
  source 1..120: mol_type = other DNA
ttaatagtagtagtagtagtgtagtaccatcatccccattccccattcctcaagctggaagccattcttttcttcacttctggtggagatggggacaaaagctttgtttctttttttttt

SEQ ID NO: 17236 - DNA, 120 bp, synthetic construct
  misc_feature 1..120: note = Artificially Synthesized Probe
  source 1..120: mol_type = other DNA
gcctggctaatacagagagaaccccatctacacacatgcacctgtgactgtaaagactacgtgactgttgctactacattattattattattaacagaggacactattaagaatccagca

SEQ ID NO: 17237 - DNA, 120 bp, synthetic construct
  misc_feature 1..120: note = Artificially Synthesized Probe
  source 1..120: mol_type = other DNA
aatttttgtatttttagtagagacggggtttcgccatgttggccaggctggtctcgaacccctgacctcgtggtccgcccgcctcggcctcccaaagtgctgggattacatgcttgagcc

SEQ ID NO: 17238 - DNA, 120 bp, synthetic construct
  misc_feature 1..120: note = Artificially Synthesized Probe
  source 1..120: mol_type = other DNA
catttacaactctatgacttttacccaatgtaccatgccatttgtatctgttttcacaaccccttcctatcaatcactctaaaacaccgtttctcaatcttggcaacgtagacatcctgg

SEQ ID NO: 17239 - DNA, 120 bp, synthetic construct
  misc_feature 1..120: note = Artificially Synthesized Probe
  source 1..120: mol_type = other DNA
tgggtgaccttggataataagacctactgatggtttttgaccaggaaaataccactttaggaatccagcaaacacttaccaaaagcttcagcatttccttagtgtcaggatctacttcaa

SEQ ID NO: 17240 - DNA, 120 bp, synthetic construct
  misc_feature 1..120: note = Artificially Synthesized Probe
  source 1..120: mol_type = other DNA
tatggattaaaggtctcagattcagctgaggtccctttggaagccaagaacccatagctttatcatttgaggattagccagaagcccaaatatccagaaagtttacctcaggaacataat

SEQ ID NO: 17241 - DNA, 120 bp, synthetic construct
  misc_feature 1..120: note = Artificially Synthesized Probe
  source 1..120: mol_type = other DNA
aaaaaaagaaagaaaaaagttgacaactaaaagcaacgtagcttcaaagcaagaggtctgacggtggctaccttcgacccagggtcaccgcggccagtcatgacacaggcctaagttcac

SEQ ID NO: 17242 - DNA, 120 bp, synthetic construct
  misc_feature 1..120: note = Artificially Synthesized Probe
  source 1..120: mol_type = other DNA
gtgaccataaggcagactttacctccaaattctggtcccctgtcctgtgttttaacttgtgttaagatcagactcggctttctctttccctttattcagaattttgcacgatagtatcta

SEQ ID NO: 17243 - DNA, 120 bp, synthetic construct
  misc_feature 1..120: note = Artificially Synthesized Probe
  source 1..120: mol_type = other DNA
agtgtcattagattgcaatgcatatgtcaactgaattttcatgaatctgtgtattttttggacacttgatacacaagtataagatgtggcccctgcccttgatggccaaacacatttggg

SEQ ID NO: 17244 - DNA, 120 bp, synthetic construct
  misc_feature 1..120: note = Artificially Synthesized Probe
  source 1..120: mol_type = other DNA
agcaattttgaaatctaaatttcatctaaatggccagctccattagatgatattgcaggcctaggaataatctataggttgtacagctttgccctctggcatctcagccacactcttgaa

SEQ ID NO: 17245 - DNA, 120 bp, synthetic construct
  misc_feature 1..120: note = Artificially Synthesized Probe
  source 1..120: mol_type = other DNA
ttatataacaaggatcctcatccttccagtttctaataacacattcctgattttcttctgagccctcaccagcaatttctttaatacgcatattctaggcatggcgtctcacgcccgtaa

SEQ ID NO: 17246 - DNA, 120 bp, synthetic construct
  misc_feature 1..120: note = Artificially Synthesized Probe
  source 1..120: mol_type = other DNA
atcacatttggaaagcgttatctaattggccacattttaaacgtggtggcttgcgtttcctttagtaccagggtacaatgagaatggaacaaaaacctctttgagtgtaaccaaaacagg

SEQ ID NO: 17247 - DNA, 120 bp, synthetic construct
  misc_feature 1..120: note = Artificially Synthesized Probe
  source 1..120: mol_type = other DNA
cagcgatgtgactgctcaatggagagaaggaaagtcaatcgtaggaagaacacagtacaggtattggttgtattagttgtgcaacattaacctttgatgttttgctctgcaatattttct

SEQ ID NO: 17248 - DNA, 120 bp, synthetic construct
  misc_feature 1..120: note = Artificially Synthesized Probe
  source 1..120: mol_type = other DNA
caaagaacattaactcccaaaagaaagccaaatgtatcctttacttctgaaatatttgtgggagattttacaggcatcctctagagatactgcgtgttcagttccacaccactgcagtca

SEQ ID NO: 17249 - DNA, 120 bp, synthetic construct
  misc_feature 1..120: note = Artificially Synthesized Probe
  source 1..120: mol_type = other DNA
ttctctgctcattcataaaaagcaactcctcatctgttgaagttttatcatgagattgaagcaattcagtcacaccttcaggttccacttctaattctacttttctttccatttctacca

SEQ ID NO: 17250 - DNA, 120 bp, synthetic construct
  misc_feature 1..120: note = Artificially Synthesized Probe
  source 1..120: mol_type = other DNA
ataaatgagcattggcttcaacttaaagtcacccagctacatttagtccctgataagagaatcagcctgtcctttgaagctttgaagccaggcattgacttctctctagctatgaaagtc

SEQ ID NO: 17251 - DNA, 120 bp, synthetic construct
  misc_feature 1..120: note = Artificially Synthesized Probe
  source 1..120: mol_type = other DNA
cccaaggagatggggagaaatgggggaatactggttggtggagcagttagaccacacacatagcatttatctattaagtttgccatcagatcttgtgagacttattcactatcatgagaa

SEQ ID NO: 17252 - DNA, 120 bp, synthetic construct
  misc_feature 1..120: note = Artificially Synthesized Probe
  source 1..120: mol_type = other DNA
atggaaagagagctgtcagtcaggccatgtgtttgtattggtttgactgacacattctttccatacaggcaggctacaattgataaccaattatttgagggttgattacataatggaacc

SEQ ID NO: 17253 - DNA, 120 bp, synthetic construct
  misc_feature 1..120: note = Artificially Synthesized Probe
  source 1..120: mol_type = other DNA
gctcatcgtgacttttgctcatcccccaaagactgccttcagaatcctatcatttctatgtatagtcattaccacaggctatataaatgtctacccatttggtaaaacaaaaggtagatc

SEQ ID NO: 17254 - DNA, 120 bp, synthetic construct
  misc_feature 1..120: note = Artificially Synthesized Probe
  source 1..120: mol_type = other DNA
aaccttgttttaaaaatgcactattttgatatatttttggtttgacagaagacagctgctgaaactctttctctctcatcactcctgttcagccgatgtctcacccaagcccatgtagtc

SEQ ID NO: 17255 - DNA, 120 bp, synthetic construct
  misc_feature 1..120: note = Artificially Synthesized Probe
  source 1..120: mol_type = other DNA
ggttatgtttactacttagtgaattttaggcacagggtgcacagtgcatgtatacacttgaagggttctctgatgcttttgcttacacaaactaaattaatagccccccttctgctatac

SEQ ID NO: 17256 - DNA, 120 bp, synthetic construct
  misc_feature 1..120: note = Artificially Synthesized Probe
  source 1..120: mol_type = other DNA
ctgttgtaggacactcagatctctattatagtccactgtggtctgttcattacccaaggaaatggtttctccacagttcttgttctcagtttcttactaagttgtcagtcacattgctta

SEQ ID NO: 17257 - DNA, 120 bp, synthetic construct
  misc_feature 1..120: note = Artificially Synthesized Probe
  source 1..120: mol_type = other DNA
ataacctcacctgggaagtaagaaatatatgtattttggtatgttaatgtatgggtgacagaacaagctgcagaggagactaataatttatttttaaaatatcaaaatataggctgggca

SEQ ID NO: 17258 - DNA, 120 bp, synthetic construct
  misc_feature 1..120: note = Artificially Synthesized Probe
  source 1..120: mol_type = other DNA
tgggtttgtctgatgtttccttacagttcagttcaggttatgtattttggttccgaatacctcagaaacaacatcgtgtcatcctcagtgtgtcatatttgttcccgttactgattatgt

SEQ ID NO: 17259 - DNA, 120 bp, synthetic construct
  misc_feature 1..120: note = Artificially Synthesized Probe
  source 1..120: mol_type = other DNA
taggggtgtggggcctatcaacaaatgttttctaaaggaggtgatagctgagcagtctttaaaatgagtagaagttagcaaggcagaaaaaagattatattcccagcagaagtgacatca

SEQ ID NO: 17260 - DNA, 120 bp, synthetic construct
  misc_feature 1..120: note = Artificially Synthesized Probe
  source 1..120: mol_type = other DNA
acctgtgcatcccacctgcttctaggaccttgttccatgcattacttccttgctttcctttattctccacttcattcattattgctttatcaccttctcttcaaaactttcagaatcctt

SEQ ID NO: 17261 - DNA, 120 bp, synthetic construct
  misc_feature 1..120: note = Artificially Synthesized Probe
  source 1..120: mol_type = other DNA
attgaccccatggctttcaccattaccaaaacacagggagttgtggacatccaagaccaagacagtataaatgtgcccttgaatgaatcatacttcattttgttaatttgtgtggatcac

SEQ ID NO: 17262 - DNA, 120 bp, synthetic construct
  misc_feature 1..120: note = Artificially Synthesized Probe
  source 1..120: mol_type = other DNA
gccaatgagagaataatgaactcctcagagttgttgggggggttaatgatgacccatgcaaagtgcttatgtatcatgtatataaaaggcgttgaacaaatgtttttatccccagcagta

SEQ ID NO: 17263 - DNA, 120 bp, synthetic construct
  misc_feature 1..120: note = Artificially Synthesized Probe
  source 1..120: mol_type = other DNA
gccattcttcgtttcttaatttgtcagcactttctcatccattgagtcagatgaagagtgtaatagcagctcacaccataaaagggttgagaactactgactttaaatgcctttctggtt

SEQ ID NO: 17264 - DNA, 120 bp, synthetic construct
  misc_feature 1..120: note = Artificially Synthesized Probe
  source 1..120: mol_type = other DNA
ttgctgttgttttgctcggaaatgaacattgtgataatgagtggataaacccattcctcaaaagaaatggaggcttcgtggagctgcttttcataatatatgacagcccctggattaatg

SEQ ID NO: 17265 - DNA, 120 bp, synthetic construct
  misc_feature 1..120: note = Artificially Synthesized Probe
  source 1..120: mol_type = other DNA
tgttgagtggataaattatgaaaaatctcactgacatgatttttgaatcatacattcattattcatcattctgtccctggttgcgggatgtggccttagactgctgcctagttagcgaca

SEQ ID NO: 17266 - DNA, 120 bp, synthetic construct
  misc_feature 1..120: note = Artificially Synthesized Probe
  source 1..120: mol_type = other DNA
tagagcccagggatacagctgaacaccccacaatgtataggacagcctccacaagaaaaaattaacccaaaatgtcagtaatgctgaggctaagaaaccctgttatatacaaactgttag

SEQ ID NO: 17267 - DNA, 120 bp, synthetic construct
  misc_feature 1..120: note = Artificially Synthesized Probe
  source 1..120: mol_type = other DNA
gatacaggaattttcctgtggtggaggcaagttggtcaatgctgcatgatgagaggccatatttatgtaatttcttaggaacgatttatgaaaattcatccagacaggcactaatgaaca

SEQ ID NO: 17268 - DNA, 120 bp, synthetic construct
  misc_feature 1..120: note = Artificially Synthesized Probe
  source 1..120: mol_type = other DNA
tattgtgtgtcagaagatgataaatgccctgtaaaaaattaagcagaagaatggcatagaaagagcttgggtgttggtggtggagcatttgctattttggaatagccaagaaaggcattc

SEQ ID NO: 17269 - DNA, 120 bp, synthetic construct
  misc_feature 1..120: note = Artificially Synthesized Probe
  source 1..120: mol_type = other DNA
tattcttcacctaacttaaatttcattgtcaatcataattgcctataccttcagctccctaattccctaatctggcaaaccataactctggttaaatccagctctctgcctactccatgc

SEQ ID NO: 17270 - DNA, 120 bp, synthetic construct
  misc_feature 1..120: note = Artificially Synthesized Probe
  source 1..120: mol_type = other DNA
acagtccctcatcacttatttaagattgcaaccctacccccttagaaactcctgctctacttactcctttgctcttttctcacagtattctaccccatctaaataatttactgacttcac

SEQ ID NO: 17271 - DNA, 120 bp, synthetic construct
  misc_feature 1..120: note = Artificially Synthesized Probe
  source 1..120: mol_type = other DNA
ctctgcagttactcaagtccatgggtgctccctttatctttatcaagaactggaaggaactccctgctgttttagaaaaagagaaaactataattttacaagaaaaaattgaaagaagaa

SEQ ID NO: 17272 - DNA, 120 bp, synthetic construct
  misc_feature 1..120: note = Artificially Synthesized Probe
  source 1..120: mol_type = other DNA
tgctcttgcctcagtatggcaactgattatgagttcaggttaagagcaacaccagggaatacagaaacccacgttaagttggccattctgacatgaatctatacttgaaaatgaaaacaa

SEQ ID NO: 17273 - DNA, 120 bp, synthetic construct
  misc_feature 1..120: note = Artificially Synthesized Probe
  source 1..120: mol_type = other DNA
agggggaatggtaacagggttcagaagtggaaacacggttttaacaaaattccagtcactttatacagaggcagagtcacatatcccaagagctggttcttcttttatttggttaaaaag

SEQ ID NO: 17274 - DNA, 120 bp, synthetic construct
  misc_feature 1..120: note = Artificially Synthesized Probe
  source 1..120: mol_type = other DNA
tctagaatgcaagaaacactattatcacagttatcaccctattttaatgatttacaagtagtttatgcgctttccatcactataaagtatgggccagttgaaaattggccgggcatggcg

SEQ ID NO: 17275 - DNA, 120 bp, synthetic construct
  misc_feature 1..120: note = Artificially Synthesized Probe
  source 1..120: mol_type = other DNA
tcctaaacatggcttcctttctagaggctcgggccataaaaatcttatgtctttgggaaaatatccacagtttagctgtggtccacaaagtgactttgtttctttgatcctagtgttaca

SEQ ID NO: 17276 - DNA, 120 bp, synthetic construct
  misc_feature 1..120: note = Artificially Synthesized Probe
  source 1..120: mol_type = other DNA
aaaatctccacatatctcagactgacacagaacaagctgttttattcctcagatatacatgtctctacaatgaaactgcacacaaggtcctacttattgcttgccccagagagtactgtt

SEQ ID NO: 17277 - DNA, 120 bp, synthetic construct
  misc_feature 1..120: note = Artificially Synthesized Probe
  source 1..120: mol_type = other DNA
caggtgcaactgaccacaaccatctcatggtaaatacctaagccttgagagccttaaacgctattctaaatattctgaaggaatctcctttcccaacaaccacttcatatgcctaatatt

SEQ ID NO: 17278 - DNA, 120 bp, synthetic construct
  misc_feature 1..120: note = Artificially Synthesized Probe
  source 1..120: mol_type = other DNA
caaacaaagcatttcctaaaattaatatcaagctaatttataaaaaagaagacagaaaacagaccaaagtctactttgtctgacttaagagcctcctgcggaccgggcgtggtggctcat

SEQ ID NO: 17279 - DNA, 120 bp, synthetic construct
  misc_feature 1..120: note = Artificially Synthesized Probe
  source 1..120: mol_type = other DNA
taaaccaaacatctctcgcaacctctcttcactgatggcttcaggtctgtcgatcttattcccaagaatcagtataggcacattagcaatggtttcatctgtcattagtgactgaaaaaa

SEQ ID NO: 17280 - DNA, 120 bp, synthetic construct
  misc_feature 1..120: note = Artificially Synthesized Probe
  source 1..120: mol_type = other DNA
attactcagttactccctctgcattctaagtaatcactacttaaagcaatcactgagctcaacaaattgccaagagtttcatcagagactgcagaaaagctgcactctgatacctgtatc

SEQ ID NO: 17281 - DNA, 120 bp, synthetic construct
  misc_feature 1..120: note = Artificially Synthesized Probe
  source 1..120: mol_type = other DNA
tggccaacatagtgaaaccctgtgtctctactaaaaatacaaaaattagccaggcttggagaatcacctgaacccgggaggtggaggtggcagtgagccgagatcatgccactgcactcc

SEQ ID NO: 17282 - DNA, 120 bp, synthetic construct
  misc_feature 1..120: note = Artificially Synthesized Probe
  source 1..120: mol_type = other DNA
cgcaagtttaatataagagataaggcagtctttccaaacttgttgtagacatgtacacaaatatactaagtgctatgaagtatagctgagagcactccaactgagaatggcttcccaagg

SEQ ID NO: 17283 - DNA, 120 bp, synthetic construct
  misc_feature 1..120: note = Artificially Synthesized Probe
  source 1..120: mol_type = other DNA
ggccttgcgtgactagaatgagatttcatgcactagaactaatggccacatttttgttaagttaaaataaaacaaagtgactgtaagagtaagagaatcttaccttgaacgtggcgaaat

SEQ ID NO: 17284 - DNA, 120 bp, synthetic construct
  misc_feature 1..120: note = Artificially Synthesized Probe
  source 1..120: mol_type = other DNA
cagttctagtattctactcaccacaaatccaacatttatttttccttctctattcttcctgctgaaaatgttaatctcttcagacaattatttgctatgaattcaaataactgctccaat

SEQ ID NO: 17285 - DNA, 120 bp, synthetic construct
  misc_feature 1..120: note = Artificially Synthesized Probe
  source 1..120: mol_type = other DNA
gctaaatgggattaaacaacaattcctggccccatgagagctctagtaattatttggctaacagcattcttacaattgttctttgactagccttttggagctttacccattgcatgcaca

SEQ ID NO: 17286 - DNA, 120 bp, synthetic construct
  misc_feature 1..120: note = Artificially Synthesized Probe
  source 1..120: mol_type = other DNA
aacagagcgagactccatctcaaaaaaaaaaaaaaaaaattacccaggcatggtggcaggtgcctgtaatcccagctactcaggaggctgaggcaggagaatcacttgaacccaggaggc

SEQ ID NO: 17287 - DNA, 120 bp, synthetic construct
  misc_feature 1..120: note = Artificially Synthesized Probe
  source 1..120: mol_type = other DNA
tggtaataatccccaatatactttctgctttataaaagaagtctgaattaggctatttaagatacagaacactgttaacatcccagaaagtctcctctagccccttcccagtcaatcccc

SEQ ID NO: 17288 - DNA, 120 bp, synthetic construct
  misc_feature 1..120: note = Artificially Synthesized Probe
  source 1..120: mol_type = other DNA
ccacaccagaatagatcacatatgcttttgattaattaaaaaatatgagttgaaatgaatgtgagctgcaggaaaggttgagatagcatctgttttcccctagtatccagaacaatgtct

SEQ ID NO: 17289 - DNA, 120 bp, synthetic construct
  misc_feature 1..120: note = Artificially Synthesized Probe
  source 1..120: mol_type = other DNA
ccttttccaacctcactaattgttttatagataaaatactttgttttgttctatcctcattctttgttctttgaacatttactggactaaataattacagtattatctactttttggtcc

SEQ ID NO: 17290 - DNA, 120 bp, synthetic construct
  misc_feature 1..120: note = Artificially Synthesized Probe
  source 1..120: mol_type = other DNA
cagaaggcagaggttgcagtgagccgagatcgtgccattgctctccagcgtgggcaacagagcaagactccatctcaaaaaaaaaaaaactttcaatttttttggtattttttgtttctt

SEQ ID NO: 17291 - DNA, 120 bp, synthetic construct
  misc_feature 1..120: note = Artificially Synthesized Probe
  source 1..120: mol_type = other DNA
tgtcacaatccctcagacaaaaactttttaattcctcaagctagagaagggagtactagctgataaaaaggtatgagtactaattcaagatctaaatattctccctgggagcgaggtcac

SEQ ID NO: 17292 - DNA, 120 bp, synthetic construct
  misc_feature 1..120: note = Artificially Synthesized Probe
  source 1..120: mol_type = other DNA
aggaatatacttactgggatgtaatgttgggacatgttgtccaagtctgtcatcttttagcatgtgtagcaatgttgtttttcctgcattatccaatccaagaaataccagtttaccagt

SEQ ID NO: 17293 - DNA, 120 bp, synthetic construct
  misc_feature 1..120: note = Artificially Synthesized Probe
  source 1..120: mol_type = other DNA
agcgtgagccacacgcccagccaaactttattttttacatgtttaatggtctaacctccacaaaattacatgtgagccaccacacctgactgaaataaacaaacttttaaagacattagg

SEQ ID NO: 17294 - DNA, 120 bp, synthetic construct
  misc_feature 1..120: note = Artificially Synthesized Probe
  source 1..120: mol_type = other DNA
gtaatcctagcactttgggaggctgaggtgggcagatcactcgagctcaggagtttaagaccagcctggccaacatggcaaagccccatctttacaaaaaatacaaaaattagctggtgt

SEQ ID NO: 17295 - DNA, 120 bp, synthetic construct
  misc_feature 1..120: note = Artificially Synthesized Probe
  source 1..120: mol_type = other DNA
aaggggataactgtagagaacaaaggaccaacattacctaaaaactgtagcacactgctgaaaccactgtaaatccaatcaaatatgaaggacatatccaaatctgatagggtctgaaaa

SEQ ID NO: 17296 - DNA, 120 bp, synthetic construct
  misc_feature 1..120: note = Artificially Synthesized Probe
  source 1..120: mol_type = other DNA
tttgaggagcagagcaagcattacaatagctactatggggaatgaatcaagttaaaagactgccaaaaaaagccaaggactcagttggaattgaaactcaaacattcacagcagtgccaa

SEQ ID NO: 17297 - DNA, 120 bp, synthetic construct
  misc_feature 1..120: note = Artificially Synthesized Probe
  source 1..120: mol_type = other DNA
atgcccaactaagaataaaagttacttagctgcaaacagatacctgagcccagaaaacaggttacacaacaccatgaacacactattaagacatgtgaagagcaaaggtcaagaacaagg

SEQ ID NO: 17298 - DNA, 120 bp, synthetic construct
  misc_feature 1..120: note = Artificially Synthesized Probe
  source 1..120: mol_type = other DNA
gcgcgatctcctctcactgtaagctccacctcccaggttcacgccattctcctgcctcagcctcccgagtagctgggactacaggagcctgccaccacgcctggctaattttttatattt

SEQ ID NO: 17299 - DNA, 120 bp, synthetic construct
  misc_feature 1..120: note = Artificially Synthesized Probe
  source 1..120: mol_type = other DNA
tgggagaaaataagggacctaatagtctaaagaggcaaatatgacatcagagtatgattgtagaatcaatgcactaataactttgggatgcaaagcatggtaatgctatggtgaaatggg

SEQ ID NO: 17300 - DNA, 120 bp, synthetic construct
  misc_feature 1..120: note = Artificially Synthesized Probe
  source 1..120: mol_type = other DNA
actgcattccaacctgggcaacatagtgagaccctgtctttaaaaaaaaaaaaaaaagaaggatgaactgggcatgatggctcatacctgtaatcccagcactttgggaggccaaggtgg

SEQ ID NO: 17301 - DNA, 120 bp, synthetic construct
  misc_feature 1..120: note = Artificially Synthesized Probe
  source 1..120: mol_type = other DNA
gttcgagaccagcctggccaacatagtgaaaccccgagttgggatgagtatttaaagtgagcgagcgtagaaatactatgctcagccaagtgagtacttaacgaaatgagtgtagaaggc

SEQ ID NO: 17302 - DNA, 120 bp, synthetic construct
  misc_feature 1..120: note = Artificially Synthesized Probe
  source 1..120: mol_type = other DNA
tggtgacagacacaagtctactgaaaggtataatagtagataatcatgttgctttgctatactggcaccaccatttatttgtcatctgtaaaatgacagctagtgccttactcatagtag

SEQ ID NO: 17303 - DNA, 120 bp, synthetic construct
  misc_feature 1..120: note = Artificially Synthesized Probe
  source 1..120: mol_type = other DNA
cagtacagttttctcaacagtgtatcttttttccacttaactgggactttgggctacggaaaacgttaaccagtactagtaaggaagctcaatttgcctctacactaattgggagcgctg

SEQ ID NO: 17304 - DNA, 120 bp, synthetic construct
  misc_feature 1..120: note = Artificially Synthesized Probe
  source 1..120: mol_type = other DNA
ccagccgcctggtctccccacacccgcccgcccgaagggattttaggggcctgcgtgccgagaaaggaacaccccatgcctccctaggggaaattacttttggcattttttttttttgag

SEQ ID NO: 17305 - DNA, 120 bp, synthetic construct
  misc_feature 1..120: note = Artificially Synthesized Probe
  source 1..120: mol_type = other DNA
aattcaccagtgatttacacaatgtagctacgtaccagataatgtgttggatgctggttattcagcttttattcagctggttattcagttgttttatagacggtcttggccaggcgcggt

SEQ ID NO: 17306 - DNA, 120 bp, synthetic construct
  misc_feature 1..120: note = Artificially Synthesized Probe
  source 1..120: mol_type = other DNA
gctttaaacaagactgttttgacaccaatgttcttttctaatggattggcattgccttctttaaatgcatcaagagctgtttagggattctcagcaaagcctatcattggctctgctgga

SEQ ID NO: 17307 - DNA, 120 bp, synthetic construct
  misc_feature 1..120: note = Artificially Synthesized Probe
  source 1..120: mol_type = other DNA
actgacaaaaaaaaaaaaaaaattctggcttgtaagccattggggaggtcaggtcttaagtgtgagctgacagactctccttgtttggtgccctgcaaataaacaccctcatgtaaagcc

SEQ ID NO: 17308 - DNA, 120 bp, synthetic construct
  misc_feature 1..120: note = Artificially Synthesized Probe
  source 1..120: mol_type = other DNA
attatttgtttaaataatcacaccaccagcagacatttcataagcttcctgaggttatggcccctatatacttttttccctcctgaacctattttcagggcctggcacaaaataggtact

SEQ ID NO: 17309 - DNA, 120 bp, synthetic construct
  misc_feature 1..120: note = Artificially Synthesized Probe
  source 1..120: mol_type = other DNA
cgaaggaatgatatcatgagaaaataacatacaaaaaggaatagatataggaaaagcaccaggcaagtattatagtttaactgaatcgatttggcctagcccactgggggccttgactcc

SEQ ID NO: 17310 - DNA, 120 bp, synthetic construct
  misc_feature 1..120: note = Artificially Synthesized Probe
  source 1..120: mol_type = other DNA
ttcatgattgattgcatgtggctagcaaaagcaaagaggtagcaaagtccaaagttttacctgaattagtaagtctacttctctctatctctagtgcaaagaccttactgcaggccacca

SEQ ID NO: 17311 - DNA, 120 bp, synthetic construct
  misc_feature 1..120: note = Artificially Synthesized Probe
  source 1..120: mol_type = other DNA
cagctcaaatgtcatctcctgtcctaaccatcctacccaaaccgggtccttccttgctattttctgcctcagcactgattcctcaatagcacttaccaatttaaaagtttaaaatatata

SEQ ID NO: 17312 - DNA, 120 bp, synthetic construct
  misc_feature 1..120: note = Artificially Synthesized Probe
  source 1..120: mol_type = other DNA
acaggcgcctgtaatcccagctacttgggaggctgaggcagaagaatcgcttgaacccgggaggcagaggttgtagtgagctgagatagcaccactgcactccagcccaggcgacagagt

SEQ ID NO: 17313 - DNA, 120 bp, synthetic construct
  misc_feature 1..120: note = Artificially Synthesized Probe
  source 1..120: mol_type = other DNA
gtgtgaataagacacagtccttggtctctactcactgacggtctaacagggaaacagacatggttaccttggaattcacaggctatgtatagacttatggtccattgaaaaaagataaac

SEQ ID NO: 17314 - DNA, 120 bp, synthetic construct
  misc_feature 1..120: note = Artificially Synthesized Probe
  source 1..120: mol_type = other DNA
gtgtcaggtaggatatttagagaagccctcttcaattaaagtaatatttgaacaagggcctaaaggagtgagtttgagttccctagatgtcttggggaagagtatcccaagtaacagaaa

SEQ ID NO: 17315 - DNA, 120 bp, synthetic construct
  misc_feature 1..120: note = Artificially Synthesized Probe
  source 1..120: mol_type = other DNA
agtaaagcaagttgatcctatttatcacctgaaaatgcaacagtcatgagcaggcaggcaaaggagctctggtgtgagcctaagtccacttctgcatatcagcaaattttattagaaatg

SEQ ID NO: 17316 - DNA, 120 bp, synthetic construct
  misc_feature 1..120: note = Artificially Synthesized Probe
  source 1..120: mol_type = other DNA
ccacaacgcctggccaagagcaattgttataattgctatcaccaataattttttcatatttctgtggccacacttaaatgagtcatcaaatgatttgatattgtgtggataatacttaat

SEQ ID NO: 17317 - DNA, 120 bp, synthetic construct
  misc_feature 1..120: note = Artificially Synthesized Probe
  source 1..120: mol_type = other DNA
cactgtgccaaggtcaaaacaaatcaagatcattcaaaaggagctgaataaaaagagataattaaactaatgcaggtttgagatcaggtatttgcctctttgaagagtgaccctgatttt

SEQ ID NO: 17318 - DNA, 120 bp, synthetic construct
  misc_feature 1..120: note = Artificially Synthesized Probe
  source 1..120: mol_type = other DNA
accacgcccgagcaaatacatttttagtaaagttctgaggcaaatgatgaaaacagggttagtataaaatttagtatttagttatttgaatttttactgaccttttttaggcctgacaca

SEQ ID NO: 17319 - DNA, 120 bp, synthetic construct
  misc_feature 1..120: note = Artificially Synthesized Probe
  source 1..120: mol_type = other DNA
gcatttggtattaaatgaattaggtaagatgtacttcacactgaggtttcgaaaccgcgtggcatgacattttaatccacagtacaaatctgtaaaggagggctttatcgtcagcacaga

SEQ ID NO: 17320 - DNA, 120 bp, synthetic construct
  misc_feature 1..120: note = Artificially Synthesized Probe
  source 1..120: mol_type = other DNA
caacagaggacgatgacttctatggtctcaggtaatcttcacaaaacccgaggagaggaactgtcagtcccaccccacgaaagcggctactgaatctcagattgccccacgatcctggct

SEQ ID NO: 17321 - DNA, 120 bp, synthetic construct
  misc_feature 1..120: note = Artificially Synthesized Probe
  source 1..120: mol_type = other DNA
cagggctgggggcgcaaactggtcccagggtggtggtggctgaggtggctgaggcttggtggtcacccagccagcgaaggcctcgaactcagggttgggggccagtgccacgtcccaagg

SEQ ID NO: 17322 - DNA, 120 bp, synthetic construct
  misc_feature 1..120: note = Artificially Synthesized Probe
  source 1..120: mol_type = other DNA
tcattcttaaccctaatcttagtcttgtatgagtctagaccccatctctaactcagaggcttttctaaaattccccagtttatttcatcaattgattatctatccgtctagccagccagc

SEQ ID NO: 17323 - DNA, 120 bp, synthetic construct
  misc_feature 1..120: note = Artificially Synthesized Probe
  source 1..120: mol_type = other DNA
cccacccacccatccactcatccatccatccactcacccaccaaacctttcatccatccatccactcacctaccaaacctttcatccatccatccatccacccaccaatcctttcatcca

SEQ ID NO: 17324 - DNA, 120 bp, synthetic construct
  misc_feature 1..120: note = Artificially Synthesized Probe
  source 1..120: mol_type = other DNA
attcatgcttttctccatactcacgatgaatctataatcaactctaaactcaacccacccaactccacccatgcccacaccctaacctcagagtcaactaaaatcccaaccctgtctccc

SEQ ID NO: 17325 - DNA, 120 bp, synthetic construct
  misc_feature 1..120: note = Artificially Synthesized Probe
  source 1..120: mol_type = other DNA
tgtgtttctgagtccaattctctgggggccttggtctcgctgtgtgtccttggatctctgtcatcctctctccctgggtctgggtctctgaggtctttgcgtttccctgttttctgtttc

SEQ ID NO: 17326 - DNA, 120 bp, synthetic construct
  misc_feature 1..120: note = Artificially Synthesized Probe
  source 1..120: mol_type = other DNA
ccatgtccacttcgagaccttgtaagttaagggcttctactttgggtcgtgtttggtggtccttatgccaccaaaaatgtgccagtgtttaaaagcagctgtgccagtttttaaaactca

SEQ ID NO: 17327 - DNA, 120 bp, synthetic construct
  misc_feature 1..120: note = Artificially Synthesized Probe
  source 1..120: mol_type = other DNA
atacttattaaaaatctcgttgagttaaatgtgaggattagtcatacagccatcctgccaacatcagaaagcgtgtaaaccgttctagtgtgttgctgtggttggtactgactgagcaga

SEQ ID NO: 17328 - DNA, 120 bp, synthetic construct
  misc_feature 1..120: note = Artificially Synthesized Probe
  source 1..120: mol_type = other DNA
tccgtggggttagtgaggattctgtgggtaatgtttgaaacctttggtgatgctcttgagaaccagggctcacagcctatgcacagtaaccatgtgtgaactgaattttttttttttttt

SEQ ID NO: 17329 - DNA, 120 bp, synthetic construct
  misc_feature 1..120: note = Artificially Synthesized Probe
  source 1..120: mol_type = other DNA
ttttatctaaagactgaaattggcttaaagttgggctttccaaattcaaaaatctgccccagattagatttagattgagagggttagtgtccttttcgccagggggatggcgtgataatt

SEQ ID NO: 17330 - DNA, 120 bp, synthetic construct
  misc_feature 1..120: note = Artificially Synthesized Probe
  source 1..120: mol_type = other DNA
taaaaactaaacaccaaaaccagttttcttgggtaaagttttctaagatggaaaatttaagcagcaagatgtgtcaagttgtagatgttggccaggaaaaagccagcagcagccaggcag

SEQ ID NO: 17331 - DNA, 120 bp, synthetic construct
  misc_feature 1..120: note = Artificially Synthesized Probe
  source 1..120: mol_type = other DNA
aaatgaacagtgtctgctgtgatagatgataaaattcctactgaaaataggacggtggggccagtgaacagtatctgctgtgatagatgataaaatcctactgaaaataggatggtgggg

SEQ ID NO: 17332 - DNA, 120 bp, synthetic construct
  misc_feature 1..120: note = Artificially Synthesized Probe
  source 1..120: mol_type = other DNA
catgcccgtaaatgccattgggaagatttgttaataaaattatctggaaagatttgttgagtaccttttctgtgccagataggttaggttataagcatattacaggtagcctttcactca

SEQ ID NO: 17333 - DNA, 120 bp, synthetic construct
  misc_feature 1..120: note = Artificially Synthesized Probe
  source 1..120: mol_type = other DNA
cgtggtctgtttctagtacaaaagaatcctggaaaaaaatgtaagcaattgaggcggatgtggcagccaaaagaatggtgatgagcaaagttcacaagaagagtctttttccgttatgaa

SEQ ID NO: 17334 - DNA, 120 bp, synthetic construct
  misc_feature 1..120: note = Artificially Synthesized Probe
  source 1..120: mol_type = other DNA
taggcgggcagatcacaaggtcaggagtttgaggccatcttgcctaacactgtgaaaccccgtctctactaaaaatacaaaaaaattagccaggcatggtggcaggcacctgtagtccca

SEQ ID NO: 17335 - DNA, 120 bp, synthetic construct
  misc_feature 1..120: note = Artificially Synthesized Probe
  source 1..120: mol_type = other DNA
tctgaacggtattgattcagagtaatcaatattctgaactttgttgttttctgatgcatggggacggatcgttaatttgcaggttgttagaacaccagtgacttctctgtggctgagtgc

SEQ ID NO: 17336 - DNA, 120 bp, synthetic construct
  misc_feature 1..120: note = Artificially Synthesized Probe
  source 1..120: mol_type = other DNA
aagagtcaacatggggttttctggcaaaatctctcttgttttagtgggtactgtattgatactgattcctcgggtgggtaagtccttcttctccacatgatgaaaataagtaactttaat

SEQ ID NO: 17337 - DNA, 120 bp, synthetic construct
  misc_feature 1..120: note = Artificially Synthesized Probe
  source 1..120: mol_type = other DNA
acagcatggtggctagagttaacattatacagcatgctggctatcgttaacattatacagcatggtggccagagttaacattatacagcatggtggccagagttaacattatacagcacg

SEQ ID NO: 17338 - DNA, 120 bp, synthetic construct
  misc_feature 1..120: note = Artificially Synthesized Probe
  source 1..120: mol_type = other DNA
tgttcagttccaccctacaggtagggcaggacgccttgcccggcaggtgtttggcttgtgtgtgtcttgtaagcatgtgatgcctactcattgctcttccatagttttatgtaataacat

SEQ ID NO: 17339 - DNA, 120 bp, synthetic construct
  misc_feature 1..120: note = Artificially Synthesized Probe
  source 1..120: mol_type = other DNA
tgagtttggaggaggttcttcagaatgagtcagagacagacacacacctgcctcttgtttgaggtgacttgtcctatacttttctgggttgcttttctgacctgtggacgatggagacct

SEQ ID NO: 17340 - DNA, 120 bp, synthetic construct
  misc_feature 1..120: note = Artificially Synthesized Probe
  source 1..120: mol_type = other DNA
ctctgtaatttgcttagagctccactgctcatgctttgtcttcagtatgtgagaagtaaccacagaaaaaagagcattgaaacttagaaaatcaaaagacagacaagaatcacattcgtt

SEQ ID NO: 17341 - DNA, 120 bp, synthetic construct
  misc_feature 1..120: note = Artificially Synthesized Probe
  source 1..120: mol_type = other DNA
ttgggtgttgtgtctgatacccacagatgttttttggcagctttcaaagtgtgtgggttatttggctttcagtaaaacagtttgcagctctttcattgcctgaccctgttctttaatgta

SEQ ID NO: 17342 - DNA, 120 bp, synthetic construct
  misc_feature 1..120: note = Artificially Synthesized Probe
  source 1..120: mol_type = other DNA
ggaatatggtggccctccgtacccattggttccacatgtgtggtttcagccaactatgtattgaaaataaaattgcatccttacaaatatgcagactttttttccttgtcattgttccct

SEQ ID NO: 17343 - DNA, 120 bp, synthetic construct
  misc_feature 1..120: note = Artificially Synthesized Probe
  source 1..120: mol_type = other DNA
atgatcttgtgttatttctaatgatcttacacatcaagggatctttataattcattcctttgagtggtttgtggttcacacagagcttgtcagtcacttaggctccttgttgggcgaggt

SEQ ID NO: 17344 - DNA, 120 bp, synthetic construct
  misc_feature 1..120: note = Artificially Synthesized Probe
  source 1..120: mol_type = other DNA
agccaggttacaaagccttgatttcttactggaaatttgcttagtgatcatatagaggtagtctgggtttttcccccagaagtgattaaactgagaaatccagaaattatatggtggtaa

SEQ ID NO: 17345 - DNA, 120 bp, synthetic construct
  misc_feature 1..120: note = Artificially Synthesized Probe
  source 1..120: mol_type = other DNA
aggcccatgttcttcccgttacctttctctggtgttaactgttagcatcatttctgctgtttttatacaacaggtgctttttgtatggattcaagtgaaataaaaactagcacggctgta

SEQ ID NO: 17346 - DNA, 120 bp, synthetic construct
  misc_feature 1..120: note = Artificially Synthesized Probe
  source 1..120: mol_type = other DNA
aaaaaccctacactaaaaatgatgagtttattttactgtatctttatgctttaattttcaaaaatgaaaaggaaagaaaaaatgcttgtagcatcactattctcccccaaaaccccctgc

SEQ ID NO: 17347 - DNA, 120 bp, synthetic construct
  misc_feature 1..120: note = Artificially Synthesized Probe
  source 1..120: mol_type = other DNA
ccgctgatgtgaagggtggccggccccttgggaccaccatctggaaggtgtctcttttttcccttagtggagtgacatttatatacacttaatatatataaatttgtatacatttaattt

SEQ ID NO: 17348 - DNA, 120 bp, synthetic construct
  misc_feature 1..120: note = Artificially Synthesized Probe
  source 1..120: mol_type = other DNA
ataaagtccctccaattaaaccaaacgctggggaagaatctgtcatgaatcttgacaaattgagatttgctgatggaagcataagaacatcggaactgcgactcagcatgcagaaggtaa

SEQ ID NO: 17349 - DNA, 120 bp, synthetic construct
  misc_feature 1..120: note = Artificially Synthesized Probe
  source 1..120: mol_type = other DNA
aagaatttctgtgtattttctaaaaagtccattgctttagtcctattctgaaataggtgtctaacacctatgtggtgttagacacaggagaacaggttccctgctgacattttcagaggc

SEQ ID NO: 17350 - DNA, 120 bp, synthetic construct
  misc_feature 1..120: note = Artificially Synthesized Probe
  source 1..120: mol_type = other DNA
taattcctctagcgccgctgggttagggtctccatgaccgagctggtctcggcaaatggcgcccatatatgggggctcgaatctaggtcgaagggtcaccggagcgatggagaacatgga

SEQ ID NO: 17351 - DNA, 120 bp, synthetic construct
  misc_feature 1..120: note = Artificially Synthesized Probe
  source 1..120: mol_type = other DNA
cttcctttagtgcagtaaaacagggaccaaaagaaccgtacgctgattttatagctcggttacaggagtctcttaaaaaggtgatcgcagattcggctgctcaggatatagtgctgcagt

SEQ ID NO: 17352 - DNA, 120 bp, synthetic construct
  misc_feature 1..120: note = Artificially Synthesized Probe
  source 1..120: mol_type = other DNA
cagggaaagaaatttaaaggtttggtagatgcaggagcggacatttcaatcatttctctacagcactggccgtctgtgtggccaattcaacctgctcaatttaacatagttggagttggt

SEQ ID NO: 17353 - DNA, 120 bp, synthetic construct
  misc_feature 1..120: note = Artificially Synthesized Probe
  source 1..120: mol_type = other DNA
gaaatattactccaatgttatgatcatttgcaaaattcaatttctggtgctggtttaattatagctcctaacaaaatccagattactactctttactcctacttgggaaccttagtaaat

SEQ ID NO: 17354 - DNA, 120 bp, synthetic construct
  misc_feature 1..120: note = Artificially Synthesized Probe
  source 1..120: mol_type = other DNA
atttgctaatttttccaactccacattcacctactggtgttattgttcaagagcaagattttgtagaatggctttttcttccacatactaattcatggactctagagaaggctctagatt

SEQ ID NO: 17355 - DNA, 120 bp, synthetic construct
  misc_feature 1..120: note = Artificially Synthesized Probe
  source 1..120: mol_type = other DNA
tcatcttttacaggaggagttaatcctcgaagattggaacctaattctctttgggaaatggatgtcacacatgttccctcgtttgggagactagcttatgtacatgcatgtgtggacacc

SEQ ID NO: 17356 - DNA, 120 bp, synthetic construct
  misc_feature 1..120: note = Artificially Synthesized Probe
  source 1..120: mol_type = other DNA
gctttctgatctcagtatttaccatgataaatctgcttctataattgaggcataccgccctcaaaaacctatctgtaaacaggattggacccagtcagagaaaatgaacgtacatgtttg

SEQ ID NO: 17357 - DNA, 120 bp, synthetic construct
  misc_feature 1..120: note = Artificially Synthesized Probe
  source 1..120: mol_type = other DNA
tcccagggaataaactgaaaaactaacagaaacaaaacaagaatgtagtaaggtgtctggataagagatttgtatctaaaaatcagtagctttacaatgtgccagcagtagtctgctcag

SEQ ID NO: 17358 - DNA, 120 bp, synthetic construct
  misc_feature 1..120: note = Artificially Synthesized Probe
  source 1..120: mol_type = other DNA
aaaagctgacgcctagttcccagcatacctacagtaaacttcaggtccactgcatagcacgtctctcatcacagtaaaactatgaaggaactcagtgtacaaggagcttctacaagatag

SEQ ID NO: 17359 - DNA, 120 bp, synthetic construct
  misc_feature 1..120: note = Artificially Synthesized Probe
  source 1..120: mol_type = other DNA
tcagccccacccctgcattttctctgcattttctttcgttgccccaaaagtaaatccaaaaaatgcctttttcccccctggtaactttgatccctgggttctcgccatcttctggatcac

SEQ ID NO: 17360 - DNA, 120 bp, synthetic construct
  misc_feature 1..120: note = Artificially Synthesized Probe
  source 1..120: mol_type = other DNA
ctgtggaggaaaatgccagtttattaacaagtaagtcactgtttcagacctgccctgtggatgaaatgccagtttattaatgagtaagtcaccatttcagacctgcgctgtggaggaaat

SEQ ID NO: 17361 - DNA, 120 bp, synthetic construct
  misc_feature 1..120: note = Artificially Synthesized Probe
  source 1..120: mol_type = other DNA
ttttactgatttaccctccactagaatatgctgatggctgtgatcactgctcagaacttgctcttgtctccttgtatgtattaagagtttcctgcaaagtatatgaatccgtgtttgcca

SEQ ID NO: 17362 - DNA, 120 bp, synthetic construct
  misc_feature 1..120: note = Artificially Synthesized Probe
  source 1..120: mol_type = other DNA
atgagttctagggcatctgtctcttagatcatgttaatgtctgctgtgttttttctgtattgctctgttagagtaataagaaacgtgatggtgtttctggcctcaggtgcggattgatga

SEQ ID NO: 17363 - DNA, 120 bp, synthetic construct
  misc_feature 1..120: note = Artificially Synthesized Probe
  source 1..120: mol_type = other DNA
tagtgtgtctgtgattcaggcagtaggtcattttcaggacttctcatgaaggccatttcttgatagtgtatagaaatcacacttcactcgcttagcacaagtctatttttaatgtttccg

SEQ ID NO: 17364 - DNA, 120 bp, synthetic construct
  misc_feature 1..120: note = Artificially Synthesized Probe
  source 1..120: mol_type = other DNA
caagagatggctttttgtacatttttgtgcttaacttaccactgactcttcttttcaaggtcactctggaatatagacccgtgatcgacaaaactttgaacgaggctgactgtgccaccg

SEQ ID NO: 17365 - DNA, 120 bp, synthetic construct
  misc_feature 1..120: note = Artificially Synthesized Probe
  source 1..120: mol_type = other DNA
ccctgggatgtatacacccccacctgaaacaatagccctaaagtatgtcaatgattgttatttgggttttcagctcaggttacagaaatatgtacaagatcgcatctttttaagttttgc

SEQ ID NO: 17366 - DNA, 120 bp, synthetic construct
  misc_feature 1..120: note = Artificially Synthesized Probe
  source 1..120: mol_type = other DNA
ctctagtatatggtttggattggctgaagcaaactgaacaaaacttgtggtcaaaaataacatgcctagagagcctcattatatctctccctccctgtttccacatcagttgtttgacat

SEQ ID NO: 17367 - DNA, 120 bp, synthetic construct
  misc_feature 1..120: note = Artificially Synthesized Probe
  source 1..120: mol_type = other DNA
caatgaagtaaatgaaaaaaatcctcagtgacactgcctcctgcctgccaagaaaggctctcactaaactggtgattgaggttatagagaaagaaactgctttcacccttttataggaaa

SEQ ID NO: 17368 - DNA, 120 bp, synthetic construct
  misc_feature 1..120: note = Artificially Synthesized Probe
  source 1..120: mol_type = other DNA
ctacttgaaaggtttcaataagccttaacatttttcaggttgtaccaaggcaccgccactgcctagttatattatgcacccatttcaagagtaaaaaaactacacctccctcaacatcag

SEQ ID NO: 17369 - DNA, 120 bp, synthetic construct
  misc_feature 1..120: note = Artificially Synthesized Probe
  source 1..120: mol_type = other DNA
gtatttctatggcataaaataattgtgattcttgagcaagaacactgagtcatatcttaacagaagccttctgctttaaggaagaaaaacccgagacattttgcagtctctagacttgtg

SEQ ID NO: 17370 - DNA, 120 bp, synthetic construct
  misc_feature 1..120: note = Artificially Synthesized Probe
  source 1..120: mol_type = other DNA
cttcagctctacctagaagataaaatcagcacttaaaaatctgtattatggggaggaaacagctcactccctaaaattcctagaccacagtatttaacagccaggttttttctgcagatg

SEQ ID NO: 17371 - DNA, 120 bp, synthetic construct
  misc_feature 1..120: note = Artificially Synthesized Probe
  source 1..120: mol_type = other DNA
attgggtaaaacactgttggagaataggacattcacacagggcctaaatatcaccccacagattagagggggagaaaaatacctttacaatagagaaaaaccataactaaatgagcaacc

SEQ ID NO: 17372 - DNA, 120 bp, synthetic construct
  misc_feature 1..120: note = Artificially Synthesized Probe
  source 1..120: mol_type = other DNA
cttaagggatacatgtcaagtagttaggggtgtcatgtcatgatgtctacaagtacctcaaatggttcaggggaaaatacacacgcgtgcatgttttgtacatacatatacagtgaaaga

SEQ ID NO: 17373 - DNA, 120 bp, synthetic construct
  misc_feature 1..120: note = Artificially Synthesized Probe
  source 1..120: mol_type = other DNA
attctatcactaaattctggagaggaggaggaaaggtgtatgttcttagacactaacagtgaaaactcccaaaacaagctgagaacaaatttttaaaacattgactaagttgcctacctt

SEQ ID NO: 17374 - DNA, 120 bp, synthetic construct
  misc_feature 1..120: note = Artificially Synthesized Probe
  source 1..120: mol_type = other DNA
atatatattttagaaggccaagaagtctgaaagcacgaaacctccgtgcattcagcaacaactgctctattacagcacacctcagttcactatttagtcacctgcttattaacacctgtt

SEQ ID NO: 17375 - DNA, 120 bp, synthetic construct
  misc_feature 1..120: note = Artificially Synthesized Probe
  source 1..120: mol_type = other DNA
tcatttacaaaaacaggaaggcagccagatctggcctgcagactgcagtttgacaatatctgttttaaagacacagaaacctgggttatttcacttccctaaaatctcattttcttctca

SEQ ID NO: 17376 - DNA, 120 bp, synthetic construct
  misc_feature 1..120: note = Artificially Synthesized Probe
  source 1..120: mol_type = other DNA
caatagacgaatttcactaacatgtaagtcaaatattactaagtgggtagtttggtagttaggttacttaggtaagaaacacggaaatgtagacaggtagagaggttagaaagatcctaa

SEQ ID NO: 17377 - DNA, 120 bp, synthetic construct
  misc_feature 1..120: note = Artificially Synthesized Probe
  source 1..120: mol_type = other DNA
agatcagcacgtgcattaagatggaatcctgggcagacttctctccaagtcaaaacaacagtctgtgcagagccactcatttattactaagagagccaaattatttacgaatttgcctta

SEQ ID NO: 17378 - DNA, 120 bp, synthetic construct
  misc_feature 1..120: note = Artificially Synthesized Probe
  source 1..120: mol_type = other DNA
ccctgaggagaaagtgaatggaataaggaacacagtagcctgtatataactcacctcaggaaagtaaaggctatacacaggatgtgttatttttgatttggtttccaatagagctctctc

SEQ ID NO: 17379 - DNA, 120 bp, synthetic construct
  misc_feature 1..120: note = Artificially Synthesized Probe
  source 1..120: mol_type = other DNA
gccctgcaaatgctaacaatagacatctttgttttctaccattcccaaggacaagtgtgttattaaccccttatacttttatcctttgccctttacctcttcctctttttttggcctctc

SEQ ID NO: 17380 - DNA, 120 bp, synthetic construct
  misc_feature 1..120: note = Artificially Synthesized Probe
  source 1..120: mol_type = other DNA
cactaccatcatctttctcactttgggaatctctattggtttcttcttcttcagaatcactgcccttatctgaaacttcttcttcatcttcctttactgcagcttcctaaaagggaaagg

SEQ ID NO: 17381 - DNA, 120 bp, synthetic construct
  misc_feature 1..120: note = Artificially Synthesized Probe
  source 1..120: mol_type = other DNA
aactaacaaggtatgatgcagtaagtaaaggcaatatcttcagcaaaatactagctcactttaagaatcaagaacagcaaattaaatgcaaagaaagcagaaacaggcgggacgcagtgg

SEQ ID NO: 17382 - DNA, 120 bp, synthetic construct
  misc_feature 1..120: note = Artificially Synthesized Probe
  source 1..120: mol_type = other DNA
ggtaaaataatgtttgctttcttcctaagaccaaaaataagacaaggttcctactatcatcactctgaatcagtattacactgacagttctagccagcacagtgaggcagaaaggaagaa

SEQ ID NO: 17383 - DNA, 120 bp, synthetic construct
  misc_feature 1..120: note = Artificially Synthesized Probe
  source 1..120: mol_type = other DNA
cattgttcaactcccacttatgagtgagaacatggcggtgtttggatttctgttcttgtgttagtttgctgagaatgatggtttccaacgtcatccatgtccctgcaaaggacatgaact

SEQ ID NO: 17384 - DNA, 120 bp, synthetic construct
  misc_feature 1..120: note = Artificially Synthesized Probe
  source 1..120: mol_type = other DNA
agttagaatggcaatcattcaaaagtcaggaaacaacagctgctggagaggatgtggagaaacaggaacacttttacactgttggtgggactgtaaactagttcaaccattgtggaagtc

SEQ ID NO: 17385 - DNA, 120 bp, synthetic construct
  misc_feature 1..120: note = Artificially Synthesized Probe
  source 1..120: mol_type = other DNA
agattgtcttggctatgcgggctcttttttggttccatatgaaatttaaagtagttttttccaattctgtgaagaaagtcaatggtagcttgattgggatagcattgaatctataaatta

SEQ ID NO: 17386 - DNA, 120 bp, synthetic construct
  misc_feature 1..120: note = Artificially Synthesized Probe
  source 1..120: mol_type = other DNA
ttctttttttgttgtgtctctgccaggttttggtatcaggatgatgctggcctcataaaatgagttagggaggattccctctttttctgttgtttggaatagtttcagaaggaatggtac

SEQ ID NO: 17387 - DNA, 120 bp, synthetic construct
  misc_feature 1..120: note = Artificially Synthesized Probe
  source 1..120: mol_type = other DNA
aagaatgtgtattctgtcgatttgggctggagagttctgtagatgtctattaggtccgcttggtccagagctgagttcaagtcctggatatccttgttaattttctgtctaatattgaca

SEQ ID NO: 17388 - DNA, 120 bp, synthetic construct
  misc_feature 1..120: note = Artificially Synthesized Probe
  source 1..120: mol_type = other DNA
cggttatgtgtctcagggttgctcttctcgaggaatatctttgtggtgttctctgtatttcctgaatttgaatgttgaccttgctaggttggggaagttctcctggataatgtcctgaag

SEQ ID NO: 17389 - DNA, 120 bp, synthetic construct
  misc_feature 1..120: note = Artificially Synthesized Probe
  source 1..120: mol_type = other DNA
cgcagtagccttgctgagctcagcatcatctattttacaacaaagtgccattacaatttactgaggaaagaatgaccttttcaatgaatggtgatggtataagtggttcgtatcccctac

SEQ ID NO: 17390 - DNA, 120 bp, synthetic construct
  misc_feature 1..120: note = Artificially Synthesized Probe
  source 1..120: mol_type = other DNA
ttccactgctaggtggaaaatgactgcccacaaaatgccatgtataagaataagcatagcaccctttattcatattaggttaagaactacaaacaatccaaacgtcgaaccaccacaaaa

SEQ ID NO: 17391 - DNA, 120 bp, synthetic construct
  misc_feature 1..120: note = Artificially Synthesized Probe
  source 1..120: mol_type = other DNA
cagcacagatggactgctccttttcaaatacttcctggggggcggcaagaagagaaatacaaaatctgtcaacctatatttatctttcagacaaacaaagcaatctttcaaactgcattt

SEQ ID NO: 17392 - DNA, 120 bp, synthetic construct
  misc_feature 1..120: note = Artificially Synthesized Probe
  source 1..120: mol_type = other DNA
actccagggcagttccattccattcttttttctaccaattactccagaaatgtcaatagttcaagaccaaatttttgctcatttttcaggctgggaagtccaaaggatatgggtagtcta

SEQ ID NO: 17393 - DNA, 120 bp, synthetic construct
  misc_feature 1..120: note = Artificially Synthesized Probe
  source 1..120: mol_type = other DNA
actaaaaatacaaaaaattggctggacatggtggtgcacacctgtggtcccagctactcaggaggctgaggtgggagaatcatttgagcctaggaggcggacgttgcagtgagccgagac

SEQ ID NO: 17394 - DNA, 120 bp, synthetic construct
  misc_feature 1..120: note = Artificially Synthesized Probe
  source 1..120: mol_type = other DNA
gaaatgggagagagaagggatccatgacaaaaacatcatttagctctacaggtatacatacattaggctacatacagggatgagcctcaaaacgaatcatctcgaagtggtgggatttta

SEQ ID NO: 17395 - DNA, 120 bp, synthetic construct
  misc_feature 1..120: note = Artificially Synthesized Probe
  source 1..120: mol_type = other DNA
aaaatacccaaacccacacaacacctgcattcgcacactaagcttcaaacccaggtttctgaaaacacagtataatgtgagacctaccataacacagttctctcacagtgacataaaaat

SEQ ID NO: 17396 - DNA, 120 bp, synthetic construct
  misc_feature 1..120: note = Artificially Synthesized Probe
  source 1..120: mol_type = other DNA
ggtatcaacaaagggtatggtatcccttcttcaccctggaagtctccattatcaaaaatcaaatctgggccacatattcatctacatttttcattttgcacagctgtatgtgcacaagca

SEQ ID NO: 17397 - DNA, 120 bp, synthetic construct
  misc_feature 1..120: note = Artificially Synthesized Probe
  source 1..120: mol_type = other DNA
tcctattagaatacaagctcaataagcagagggtatgtcttaccactgcttccctagcacctagaggagtgcacagcattcaatatttgctgtataaataaatggtacaatgtctgtgtc

SEQ ID NO: 17398 - DNA, 120 bp, synthetic construct
  misc_feature 1..120: note = Artificially Synthesized Probe
  source 1..120: mol_type = other DNA
tattaagtacagtgttttgagaatcctgagtcaaataaatgagaaccaatctatcaaaagggaagcaatgctcaacagagaaacctcccacttaccctgtgattttatatccatggtcac

SEQ ID NO: 17399 - DNA, 120 bp, synthetic construct
  misc_feature 1..120: note = Artificially Synthesized Probe
  source 1..120: mol_type = other DNA
cttggcaaaatggttacttaggagcgtgttctttaattttccaggtgtttggtgctagttatttttcactttcaaagacacagattagatcatgaggcatgtaaaatctctgcttttaga

SEQ ID NO: 17400 - DNA, 120 bp, synthetic construct
  misc_feature 1..120: note = Artificially Synthesized Probe
  source 1..120: mol_type = other DNA
tgagaaagcttcatgcagttttctagggatgccaaagttggagcacgaaactccctttcttagaaagaacaggaaaaaaagaaacagggctggactttttacatgttcaggagtatacaa

SEQ ID NO: 17401 - DNA, 120 bp, synthetic construct
  misc_feature 1..120: note = Artificially Synthesized Probe
  source 1..120: mol_type = other DNA
gcagtgagctatgattaccctactggactccagccctggtagatgctgtctataattaattaataaaaattacatgacatatgaatcacttttatatcagttaaagatttcaaattcact

SEQ ID NO: 17402 - DNA, 120 bp, synthetic construct
  misc_feature 1..120: note = Artificially Synthesized Probe
  source 1..120: mol_type = other DNA
tttcctcctcaccttcacggttccgggccattactattagttggcagattacattaaccatttcttgaagtagggcaggacacttttttagcatgaattgctgatctgcaaaacaataaa

SEQ ID NO: 17403 - DNA, 120 bp, synthetic construct
  misc_feature 1..120: note = Artificially Synthesized Probe
  source 1..120: mol_type = other DNA
ttggtaaccactgtcggaggaagcttgtagatggggaggtgagaggtgttggttgttgtgaaatccattttgctccctccaaaaacttacaaagtcctttaaaaaaattattaggaactt

SEQ ID NO: 17404 - DNA, 120 bp, synthetic construct
  misc_feature 1..120: note = Artificially Synthesized Probe
  source 1..120: mol_type = other DNA
tcatcgggggatttgggaaattagcctaacctgtggtattagaatattatccgttggtctgcttgtggcatctttattatactgaggatcaaattcagaagctccagccaaaaccatgat

SEQ ID NO: 17405 - DNA, 120 bp, synthetic construct
  misc_feature 1..120: note = Artificially Synthesized Probe
  source 1..120: mol_type = other DNA
cctagctaaatgacctaggacaatattcttcatatctgtgtatctcagcttcttcatatgtgcctgacacacagcaagcacagtacttgtgtgagctattactattactaccctcaaatg

SEQ ID NO: 17406 - DNA, 120 bp, synthetic construct
  misc_feature 1..120: note = Artificially Synthesized Probe
  source 1..120: mol_type = other DNA
agaatctggtctccactatagcgtattgagcgataccaccaagagccctaaaacacaaaaaaaattaaacaagaaagaaagtataaaaactacgataggctgggcgagatggctcattcc

SEQ ID NO: 17407 - DNA, 120 bp, synthetic construct
  misc_feature 1..120: note = Artificially Synthesized Probe
  source 1..120: mol_type = other DNA
ttaaagaaaaaacacccaacttcccaatgattcctaaataaatgaagttgagggtggtagtgcgggaagactttcatttgaaactttaaatatatctgtgtcagccaggcatggtggttc

SEQ ID NO: 17408 - DNA, 120 bp, synthetic construct
  misc_feature 1..120: note = Artificially Synthesized Probe
  source 1..120: mol_type = other DNA
gatcctcccacctcaccttcagtggcaagactcttaaattcaaggatcaatgggttatattctaacatacatttaaaatgttatagggagactccaaaacatgtcaatctcctttccaaa

SEQ ID NO: 17409 - DNA, 120 bp, synthetic construct
  misc_feature 1..120: note = Artificially Synthesized Probe
  source 1..120: mol_type = other DNA
gtagttagtgctctgggaacaaatgagataagaagcccctggccaaaggttcctttagctaaatatcaaggagtcacttcataatgctgactagcaatttttacctactgatttttctcc

SEQ ID NO: 17410 - DNA, 120 bp, synthetic construct
  misc_feature 1..120: note = Artificially Synthesized Probe
  source 1..120: mol_type = other DNA
tttaaatgcactcaccagaattgagtttttctggtcaactatccaagctggcagggcaattccaaagcttgtggctgaaatagaaaaaatatcagtttctgaagaatctctactttcagt

SEQ ID NO: 17411 - DNA, 120 bp, synthetic construct
  misc_feature 1..120: note = Artificially Synthesized Probe
  source 1..120: mol_type = other DNA
aaacaatagcaccacattctgaaagaaacagatgaccaccacatgtaaaactccattgctgtgggtaaggtaatttgcactgtgctaagatcacaattttctcctaagccaattgccaga

SEQ ID NO: 17412 - DNA, 120 bp, synthetic construct
  misc_feature 1..120: note = Artificially Synthesized Probe
  source 1..120: mol_type = other DNA
ttgccaaataaagcatagctcacatcagagacactctgattttgcaacctacacagacctacgagttacgattacattaactcactcattaaactgacttctacaactgctgtgtgatgg

SEQ ID NO: 17413 - DNA, 120 bp, synthetic construct
  misc_feature 1..120: note = Artificially Synthesized Probe
  source 1..120: mol_type = other DNA
ctggggggatagggtggggggatttcaccaaagcactaaaataaaaactactaattaaatagtcttggctacctgacttcctctggaaatgtctttttaaattacctgaagacagcaatc

SEQ ID NO: 17414 - DNA, 120 bp, synthetic construct
  misc_feature 1..120: note = Artificially Synthesized Probe
  source 1..120: mol_type = other DNA
tgatatgtgatctttgacatttctattatcattgcggggctggcacacaaactgcacctgcagaagaaaaagaacttaatacatatgtgtttcaaatgctccactcactggccattcccc

SEQ ID NO: 17415 - DNA, 120 bp, synthetic construct
  misc_feature 1..120: note = Artificially Synthesized Probe
  source 1..120: mol_type = other DNA
aaggtgaagtagcaagtgctgatttggaagctgcagcaagttatccagaagatctagctaagatcacaatgaaggtggctaaacaacaaattttcaatgtagacaaaatagccttatact

SEQ ID NO: 17416 - DNA, 120 bp, synthetic construct
  misc_feature 1..120: note = Artificially Synthesized Probe
  source 1..120: mol_type = other DNA
atttgtgattcacaggaagaggccaaaatgtcaacatcaagaggagtttggtagaagctgatttccttttttttttttttttttttttttgagacagagtctcactctgtcgcccaggct

SEQ ID NO: 17417 - DNA, 120 bp, synthetic construct
  misc_feature 1..120: note = Artificially Synthesized Probe
  source 1..120: mol_type = other DNA
aagaaaaagaaaacaaagaagttctgtccataaaatactatcaaatagcatcacatgctagagaaatctttcatgaaaagaatttaaatgatgtagtcaatttaattgtcgtcttatttt

SEQ ID NO: 17418 - DNA, 120 bp, synthetic construct
  misc_feature 1..120: note = Artificially Synthesized Probe
  source 1..120: mol_type = other DNA
ggatgtacttatgaagagtcctgaagaatctagttaagttttatctcttggaagattaatacgcaagagatcactgcatctaatgttacacactctattctgcttcccaaaagggtgcac

SEQ ID NO: 17419 - DNA, 120 bp, synthetic construct
  misc_feature 1..120: note = Artificially Synthesized Probe
  source 1..120: mol_type = other DNA
cagcataagcttttgctatcctcatgaacataacctcatcacctcctttatctggatgatatttaagtgacagcaaacgatattgttttttaatttctgctactgtggctccctggggaa

SEQ ID NO: 17420 - DNA, 120 bp, synthetic construct
  misc_feature 1..120: note = Artificially Synthesized Probe
  source 1..120: mol_type = other DNA
atacacaccctccttagtttgtattatatgaatgtctggatcaagccatctactgagcaaagactcaaagtaaaagtaagtgccatgggggagaaaatagaaagagcactagattgagct

SEQ ID NO: 17421 - DNA, 120 bp, synthetic construct
  misc_feature 1..120: note = Artificially Synthesized Probe
  source 1..120: mol_type = other DNA
gccaccgttcctggctgatattagttctttctaagacccccaacctagattttacattgcttaagtgtcaatgaatacaaggtcataagatttttatcattcaactaacacaaattatcc

SEQ ID NO: 17422 - DNA, 120 bp, synthetic construct
  misc_feature 1..120: note = Artificially Synthesized Probe
  source 1..120: mol_type = other DNA
atagagtctaaagacattatggcaaggtcaaggcaaaaactctacagtagtaccatatcactatgctactgactcaaattctacaatcactgggttacaaactcctgttacagcaacgac

SEQ ID NO: 17423 - DNA, 120 bp, synthetic construct
  misc_feature 1..120: note = Artificially Synthesized Probe
  source 1..120: mol_type = other DNA
gagcgactgcgcccagcctctacagtgaaatactttctggctactaaaaatatttgctgtggatgactatctatcttatattgttaaatttacaaaacagctttcaaaactctatgtata

SEQ ID NO: 17424 - DNA, 120 bp, synthetic construct
  misc_feature 1..120: note = Artificially Synthesized Probe
  source 1..120: mol_type = other DNA
acaaaacacctaggatatgctaaaccgtatgttttacatggagcatccagttctccaagccaaggaatgagaagaggaaaggagaagctcataacagaatccaaaggctgatgaaaatta

SEQ ID NO: 17425 - DNA, 120 bp, synthetic construct
  misc_feature 1..120: note = Artificially Synthesized Probe
  source 1..120: mol_type = other DNA
taaaaaagcttcataaaagtttttttccttgaaaacaggttcagatacccacaaagtgttgaacaaagccagataagagactgggaggccaaaaatacatgcgtcccttggtatcctcag

SEQ ID NO: 17426 - DNA, 120 bp, synthetic construct
  misc_feature 1..120: note = Artificially Synthesized Probe
  source 1..120: mol_type = other DNA
cccatagcctcacaggattaaactggtctgctgtaactaaacatgttaatggcctgtttaaaataaagggtgattaggtccctgatccaacacttctaactacatgactttggtcaagtt

SEQ ID NO: 17427 - DNA, 120 bp, synthetic construct
  misc_feature 1..120: note = Artificially Synthesized Probe
  source 1..120: mol_type = other DNA
ttggaaatgagacttaatgaaaacacaaaaactgacttgcacccaaaatatttagtcagatataatcagtaatttctgggaaattctctccctctttcccctctgctatagaaggaacaa

SEQ ID NO: 17428 - DNA, 120 bp, synthetic construct
  misc_feature 1..120: note = Artificially Synthesized Probe
  source 1..120: mol_type = other DNA
caaaaaaaaaaagtagagtaaaattcagtatcataaattctaattattttgtgttaagctggaaaagtctcctaaacccgtaaaacttaggtttatggggtcaggcaccgtggctcacct

SEQ ID NO: 17429 - DNA, 120 bp, synthetic construct
  misc_feature 1..120: note = Artificially Synthesized Probe
  source 1..120: mol_type = other DNA
aaaaaatcaagttttgaaacaaaaatctgcctttttaagaagatggcaccaaaaacaaaggaggaagcccttgcccaccccaaagccaaagtcaaagcaaaggctttgaaagaacaagaa

SEQ ID NO: 17430 - DNA, 120 bp, synthetic construct
  misc_feature 1..120: note = Artificially Synthesized Probe
  source 1..120: mol_type = other DNA
gagggagagatccatgtaggggagagtatggtagcagaaaaggagactgataatatgcagaggaactgactgaataagttaatatattaaagatacctggagtcagttttccactgtcaa

SEQ ID NO: 17431 - DNA, 120 bp, synthetic construct
  misc_feature 1..120: note = Artificially Synthesized Probe
  source 1..120: mol_type = other DNA
gtgagcatcgccagaaaaaaagacaacctaaaatcatatgccacctgacagcatacaagaacacagaatcagttttgtgaaattcctgcccaagatacacaacctgactctaataatgag

SEQ ID NO: 17432 - DNA, 120 bp, synthetic construct
  misc_feature 1..120: note = Artificially Synthesized Probe
  source 1..120: mol_type = other DNA
tcagccccccgcccggccagccaccccgtccgggaggtgaggggcgcctctgcccagccgcccctactgggaagtgaggagcccctctgcctggccagctgccccgtctgggagggaggt

SEQ ID NO: 17433 - DNA, 120 bp, synthetic construct
  misc_feature 1..120: note = Artificially Synthesized Probe
  source 1..120: mol_type = other DNA
aaagaacatcactgagaaagtgacaaaacccaaatggagtcagacgatgagatggcggtaatgttaattttctgattttcatggtttagagaacacttttgaaaataccactagtgattt

SEQ ID NO: 17434 - DNA, 120 bp, synthetic construct
  misc_feature 1..120: note = Artificially Synthesized Probe
  source 1..120: mol_type = other DNA
ttactgagtgaactcttagcaccataatcatagaacccaaagaggtgaaggaacgttagccagatctaaagtcttcaaacctgtttgcctgcttaccacatagtatccaacagtttttca

SEQ ID NO: 17435 - DNA, 120 bp, synthetic construct
  misc_feature 1..120: note = Artificially Synthesized Probe
  source 1..120: mol_type = other DNA
gttttttgacttttttataatagccattctgactggtatgagatgatctctcactgtggttttgatttgcatttatctgattagtgatgttgagcatttttcatgtttcttggccactta

SEQ ID NO: 17436 - DNA, 120 bp, synthetic construct
  misc_feature 1..120: note = Artificially Synthesized Probe
  source 1..120: mol_type = other DNA
gccaccgcccacgcccagctagtcctagtaaatcctttcttataataccgaaatatgcttcttaaaattatttttttaattccctgtgactataaagtttttcccaatttttttgttttg

SEQ ID NO: 17437 - DNA, 120 bp, synthetic construct
  misc_feature 1..120: note = Artificially Synthesized Probe
  source 1..120: mol_type = other DNA
gttagccatatgtctcattcccaaggccagttcagaactatttggatttggaatataggcttcataagattacatattgttcaccatcaccaccacccaggatacacaatcacagattac

SEQ ID NO: 17438 - DNA, 120 bp, synthetic construct
  misc_feature 1..120: note = Artificially Synthesized Probe
  source 1..120: mol_type = other DNA
aggcacacacacacagctacagacggtacatgaaaagcaagttaaacgatatgacctacatatcaggaacacagggaaaagaaagataggaaaagttggcagaataaatggatgaaaacg

SEQ ID NO: 17439 - DNA, 120 bp, synthetic construct
  misc_feature 1..120: note = Artificially Synthesized Probe
  source 1..120: mol_type = other DNA
accattgtagtatcctttttagttctatttaggaaaatatctggaaaagcaaaggagacaggagagttggcgaggttgaacgtacaccctcagaagagaaacagctctgtgaagaaggaa

SEQ ID NO: 17440 - DNA, 120 bp, synthetic construct
  misc_feature 1..120: note = Artificially Synthesized Probe
  source 1..120: mol_type = other DNA
gttcaagggcagagactgtatcttacccacagtgttcacccctcctctttccagttccctggaatagaggaggcactatataaatatttcttgagaatgatgaactcctttatttaacaa

SEQ ID NO: 17441 - DNA, 120 bp, synthetic construct
  misc_feature 1..120: note = Artificially Synthesized Probe
  source 1..120: mol_type = other DNA
acccatgttgttgaagggttcttttgagagaaaattagtaaggtaggggtaagaaacactacaatttaaaataggaagctcagggaagatggcatctgagcaaagacaacagagatgagg

SEQ ID NO: 17442 - DNA, 120 bp, synthetic construct
  misc_feature 1..120: note = Artificially Synthesized Probe
  source 1..120: mol_type = other DNA
tttggagtctgtgcattagtctaatcctaagcctgtcaccccacctgggttacaaattctaccaaaataagactatgtttatactgcattcatcattgtatcatctgctgtacctgtacg

SEQ ID NO: 17443 - DNA, 120 bp, synthetic construct
  misc_feature 1..120: note = Artificially Synthesized Probe
  source 1..120: mol_type = other DNA
caccgagcccagccgagaacatctttttaaaagaatgaacagcatcgcctttcaaagaaacaatgtgatggtgaaatagtgtaacaacatttgtcatcaataaagtctggtaataatagg

SEQ ID NO: 17444 - DNA, 120 bp, synthetic construct
  misc_feature 1..120: note = Artificially Synthesized Probe
  source 1..120: mol_type = other DNA
cctactgccaagttcccaactgctttcctctgtataggacttaagtgtgtatatgctgcatgtctgatacacccctctgtcaggatagaacaaagaaggaataactttttaaaacaattt

SEQ ID NO: 17445 - DNA, 120 bp, synthetic construct
  misc_feature 1..120: note = Artificially Synthesized Probe
  source 1..120: mol_type = other DNA
aatctgcactccactctcattctctcctcagtacttatattcaataaacagtccaagctttcttagaattctctttctaatctgaccacctgtcactggaaagagcctctgaaatggaca

SEQ ID NO: 17446 - DNA, 120 bp, synthetic construct
  misc_feature 1..120: note = Artificially Synthesized Probe
  source 1..120: mol_type = other DNA
ccaacaaacagtcttccacctggtagctgtatgactttaggaaagttggtaacctcctctaggacgcagttttctcatgaataaaatgagataatacatgaatctagctcaaagtgctac

SEQ ID NO: 17447 - DNA, 120 bp, synthetic construct
  misc_feature 1..120: note = Artificially Synthesized Probe
  source 1..120: mol_type = other DNA
gaggtccttctttttactttttgtgtgtgacagggtctccttctgtcatccaggttggagtgcagtgacatgatcatagctcactgcagcctcgatctcctgggctcaagtgatcctcct

SEQ ID NO: 17448 - DNA, 120 bp, synthetic construct
  misc_feature 1..120: note = Artificially Synthesized Probe
  source 1..120: mol_type = other DNA
aataacttgcctaaaattacagtaggctgcagagccacatttcaaaaccaggcattttgaaaaagtaaggttaagtaagttttgaaaagggaagatcaagccccaaaagtaagatcaagg

SEQ ID NO: 17449 - DNA, 120 bp, synthetic construct
  misc_feature 1..120: note = Artificially Synthesized Probe
  source 1..120: mol_type = other DNA
ttgttgttagcaaagagcacatagcaaaacaaatatactacctcccaaaatggcaactacagcaaaagaccattactaaggaagctctcctccaagcagcacttctcaaacatagctaca

SEQ ID NO: 17450 - DNA, 120 bp, synthetic construct
  misc_feature 1..120: note = Artificially Synthesized Probe
  source 1..120: mol_type = other DNA
agactttacaagctgtgaaatggtgctatgctttctggtgtattcaagagcccactaattccaaaacagccatgctgaaacgactgtcaaccttaaaaattgaaagtcccaaatgtgttg

SEQ ID NO: 17451 - DNA, 120 bp, synthetic construct
  misc_feature 1..120: note = Artificially Synthesized Probe
  source 1..120: mol_type = other DNA
cttatatatgctgttgtgtttccccaaaactgtactacgggggtcctcatcttttacttaaaatccttaagaacaaatgtgcttcagaatttttcagatttgccccgtccgggaaggagg

SEQ ID NO: 17452 - DNA, 120 bp, synthetic construct
  misc_feature 1..120: note = Artificially Synthesized Probe
  source 1..120: mol_type = other DNA
tgcaactgggctgcagaaaaaaagtcactatgatgaaaacatccttttactacaactgtaattccacagaaacaactcaagttattagggtaaatccaagaaaaaagtccaagtggtgcc

SEQ ID NO: 17453 - DNA, 120 bp, synthetic construct
  misc_feature 1..120: note = Artificially Synthesized Probe
  source 1..120: mol_type = other DNA
ataaagtaaaagttgaagtccatgatttacaaatagtattaattccctccacctaaactaccaccactttttcaaagacacttacatgctgaagggggtcaagtatgacttgttggcagg

SEQ ID NO: 17454 - DNA, 120 bp, synthetic construct
  misc_feature 1..120: note = Artificially Synthesized Probe
  source 1..120: mol_type = other DNA
aagaatgttacaggacactgaatccatctgaaagtataacaagttctgagctgattcaaggcttcactgttaacaacttctccaagtagagtatataacctggacaacctagacctccag

SEQ ID NO: 17455 - DNA, 120 bp, synthetic construct
  misc_feature 1..120: note = Artificially Synthesized Probe
  source 1..120: mol_type = other DNA
tcacaaacaggaaactccgaagaaaaggaaatagaaaaaagcctatttttgctaagaggaataacggcattgcttccaacccccacagtgagtgaacaaatgaaaaagcaacgggaggaa

SEQ ID NO: 17456 - DNA, 120 bp, synthetic construct
  misc_feature 1..120: note = Artificially Synthesized Probe
  source 1..120: mol_type = other DNA
acaaaagggccagcactattctggacaaaaaggcaagcaacaaactgaatccaaaggcagtttttctattcaatacacatatcatgtagatgccaatgatcatgaccagtcccgaaaaag

SEQ ID NO: 17457 - DNA, 120 bp, synthetic construct
  misc_feature 1..120: note = Artificially Synthesized Probe
  source 1..120: mol_type = other DNA
tatcataccaatcttcaagtacggaagaaagacgactccactatggagaaaatggtgtgcagaaagatgtatcccaacgcagtatttatagccaaactgaaaagctagtagcaggcaagt

SEQ ID NO: 17458 - DNA, 120 bp, synthetic construct
  misc_feature 1..120: note = Artificially Synthesized Probe
  source 1..120: mol_type = other DNA
ctatatagtataaaggattacagccattaatgttttctttctgcacaccagtgaatgttcttgcatccctgttagggttcatctatgctccttcagagaccacaagcccaaagactatca

SEQ ID NO: 17459 - DNA, 120 bp, synthetic construct
  misc_feature 1..120: note = Artificially Synthesized Probe
  source 1..120: mol_type = other DNA
cctccctggctgaggggtctgggatttattcaggaggcctgtcactccccagcctcttctgggacttgaaaaactggagcctgttcttggcaagaagattctaatgcccaggtcggagtc

SEQ ID NO: 17460 - DNA, 120 bp, synthetic construct
  misc_feature 1..120: note = Artificially Synthesized Probe
  source 1..120: mol_type = other DNA
tcaaaaaataaacaacaaaaaatcccaaaaagacggtcttattttggtcctcaccatgcatgtgagaagagtgagggacttgtgccaccgttttacaaggtaaggccaagcctggtggag

SEQ ID NO: 17461 - DNA, 120 bp, synthetic construct
  misc_feature 1..120: note = Artificially Synthesized Probe
  source 1..120: mol_type = other DNA
ttccccttggcaatcatgacccaggacttggcgttatctgtgatcgcgtgggtaggattccctggcgggcgtggggatgtgagatgggaacagagctttctgtccctgccacaggaacat

SEQ ID NO: 17462 - DNA, 120 bp, synthetic construct
  misc_feature 1..120: note = Artificially Synthesized Probe
  source 1..120: mol_type = other DNA
aacaacaacaaatgcagattcctgggcccccacccatctgtctatgtgaatcagatctcagggactgggccggggaatctgcttatttacaagtcctcctggtgattttttttttttttt

SEQ ID NO: 17463 - DNA, 120 bp, synthetic construct
  misc_feature 1..120: note = Artificially Synthesized Probe
  source 1..120: mol_type = other DNA
atttcccatcaaagaagatttcctggaacaatccgaacagctatttggggcaaagcccgtgagcctgacgggaaagcaggaagatgacctggcaaacatcaaccaatgggtgaaggaggc

SEQ ID NO: 17464 - DNA, 120 bp, synthetic construct
  misc_feature 1..120: note = Artificially Synthesized Probe
  source 1..120: mol_type = other DNA
aaaaaaaaaaaagatccaggaggaggttcctaggagaattgcaggggttggggaaaacacaagcccagatttcaaaaatgctacgggaaagagaccttagatcaattggatgccagctag

SEQ ID NO: 17465 - DNA, 120 bp, synthetic construct
  misc_feature 1..120: note = Artificially Synthesized Probe
  source 1..120: mol_type = other DNA
ttagtaattcagtgaaaatatactgggcatttgctgtgttccagatactgttctaagcactagggtttttgtggagcatgagggaggccaggtctctgctcttaggaaggaggatacaca

SEQ ID NO: 17466 - DNA, 120 bp, synthetic construct
  misc_feature 1..120: note = Artificially Synthesized Probe
  source 1..120: mol_type = other DNA
cagcctgggagattccacggggcgctcacacagtgctccttagaaaggaggatctgattggattggatttctcagcatcttgcgtggaacattctgattggataaacttctttttttttt

SEQ ID NO: 17467 - DNA, 120 bp, synthetic construct
  misc_feature 1..120: note = Artificially Synthesized Probe
  source 1..120: mol_type = other DNA
tgtggcctctcttgcttctagcctaaatgtggtccccttggcctgggtattgatccccgggccagacagctgtggctgagatggctgtatttgttagcttcccaaggcaagtgtgacaca

SEQ ID NO: 17468 - DNA, 120 bp, synthetic construct
  misc_feature 1..120: note = Artificially Synthesized Probe
  source 1..120: mol_type = other DNA
aaagaaaaaaaaagaaatcttaagccaaatcacaatatatttacacagctggcaaagtcacaagagggaggtgtgggagggtggggcgggcagcactcggcagtggctcacccacagaac

SEQ ID NO: 17469 - DNA, 120 bp, synthetic construct
  misc_feature 1..120: note = Artificially Synthesized Probe
  source 1..120: mol_type = other DNA
ttagcttcggggctttctgtcctcatgctcttcccttcccttttctgtaggtggctcatttcccctttaagaacaacatgagctttgtggtccttgtacccacccactttgaatggaacg

SEQ ID NO: 17470 - DNA, 120 bp, synthetic construct
  misc_feature 1..120: note = Artificially Synthesized Probe
  source 1..120: mol_type = other DNA
aactaaaataaataaataaagcatctatccttcagccatttgctaagcagctgctgtattccaggcactgtaccaggtaccgggagcccaccatgtacaaacagctgagtctaatggggt

SEQ ID NO: 17471 - DNA, 120 bp, synthetic construct
  misc_feature 1..120: note = Artificially Synthesized Probe
  source 1..120: mol_type = other DNA
ggaggtgcttctagttctgccaggagacaggttagctgctccccacgtcagctgggacaccccgacttttgtttaccagagaaaaagggagggggagagggctgcctttggacttgtccc

SEQ ID NO: 17472 - DNA, 120 bp, synthetic construct
  misc_feature 1..120: note = Artificially Synthesized Probe
  source 1..120: mol_type = other DNA
cttccacagggcactccaaagtgttaattatggctgcttaaccctggctaatgtttcggaactcatcagatcctgagactcagtggacagtgtttgtttcaaatagattccctaattcct

SEQ ID NO: 17473 - DNA, 120 bp, synthetic construct
  misc_feature 1..120: note = Artificially Synthesized Probe
  source 1..120: mol_type = other DNA
gggtttcacctcgttggccagacggctctcgaactccagacctcaagtgatccgcccattgtggcctcccaaagtgctgggactacaggcgtgagctaccacgctcagccaagaaagacc

SEQ ID NO: 17474 - DNA, 120 bp, synthetic construct
  misc_feature 1..120: note = Artificially Synthesized Probe
  source 1..120: mol_type = other DNA
tctcattttactgctcagataaagtgaggaacttgctaagacttctctcttcctggccctccagttaatcagttctgcttaggaaaggctggtatcatgtgtagtataaacagattttgt

SEQ ID NO: 17475 - DNA, 120 bp, synthetic construct
  misc_feature 1..120: note = Artificially Synthesized Probe
  source 1..120: mol_type = other DNA
aacacggtgttcggaaaagagcccagagaaaattttttctagagctgttgaccgtagcatcctctgtattagtgaatggctcagtcagaagtcttgacttacagataacagattttacat

SEQ ID NO: 17476 - DNA, 120 bp, synthetic construct
  misc_feature 1..120: note = Artificially Synthesized Probe
  source 1..120: mol_type = other DNA
aaaagaaaaaaaaaaaaaccaacctatccaaaacaggactctccacttcctctcactctccttatacatctgaacgtggggcaccactgttctcccctcccctctccccacacctacgct

SEQ ID NO: 17477 - DNA, 120 bp, synthetic construct
  misc_feature 1..120: note = Artificially Synthesized Probe
  source 1..120: mol_type = other DNA
aggaggctgaggcagaagaatcgcttgaacccaggaggcggaggttgcagtgagccgagattgtgccactgcactccaacctgggcgacagagtgagactctgtctcaaaaaaaagaaaa

SEQ ID NO: 17478 - DNA, 120 bp, synthetic construct
  misc_feature 1..120: note = Artificially Synthesized Probe
  source 1..120: mol_type = other DNA
atattttatatatgtacatatatatgtacatatatattttatatgtacatatatatgtacatatatatttatatatgtacatatatatgtacatatatatttatatatgtacatatatat

SEQ ID NO: 17479 - DNA, 120 bp, synthetic construct
  misc_feature 1..120: note = Artificially Synthesized Probe
  source 1..120: mol_type = other DNA
gtggagcttgcagtgagccaagatcgcaccactgcactccagactgggagacagagtgagactaggtctcaaaaaaaaaaaaaaaaaaaaaaaaaaagtgcatcatctcagaactttgtg

SEQ ID NO: 17480 - DNA, 120 bp, synthetic construct
  misc_feature 1..120: note = Artificially Synthesized Probe
  source 1..120: mol_type = other DNA
acaataataataaaattctccgtgtgtcccacaaggcctgcataatctggccagctctttgaacccatgtagttcattttcctcactcccctggctgcactagcccttcatttttgtttt

SEQ ID NO: 17481 - DNA, 120 bp, synthetic construct
  misc_feature 1..120: note = Artificially Synthesized Probe
  source 1..120: mol_type = other DNA
ctcgtgatccgcctgcctcggcctcccaaagtgctgggattacaggtgtgagccaccgcgcccagccttttttactcttaagaacaatgccggccaggcgtggtggctcacacttgtaat

SEQ ID NO: 17482 - DNA, 120 bp, synthetic construct
  misc_feature 1..120: note = Artificially Synthesized Probe
  source 1..120: mol_type = other DNA
gagtgtgcttccaaacccagggctcccgtcatacccatgtcactctgatgtgatgggagacatcacaactggaagcacttggtgaatgtcatacaaaagctactaagtaaaaggtacttg

SEQ ID NO: 17483 - DNA, 120 bp, synthetic construct
  misc_feature 1..120: note = Artificially Synthesized Probe
  source 1..120: mol_type = other DNA
ccaagctcctgtgccctctcccctgtggaagcagggcacgtcacctcccagcacatcaatgcatttgctgaccagaacacccactgagtttcagtgtccggagttctttttttttttttt

SEQ ID NO: 17484 - DNA, 120 bp, synthetic construct
  misc_feature 1..120: note = Artificially Synthesized Probe
  source 1..120: mol_type = other DNA
tccaggaggcagagtttgcagctggtgagctgagatcataccactgcactccagcctgggtgacacagcaagactgtttctcaaaaaaaaaaaaaaaaaatcatttatttggtttttttt

SEQ ID NO: 17485 - DNA, 120 bp, synthetic construct
  misc_feature 1..120: note = Artificially Synthesized Probe
  source 1..120: mol_type = other DNA
catgcctgaagtcatcctatctctgatttttcaattatttaaaccaatagaccccccccccccggctgttttcatgtttaagttagctggaattagggtttctagtagttatagcggaaa

SEQ ID NO: 17486 - DNA, 120 bp, synthetic construct
  misc_feature 1..120: note = Artificially Synthesized Probe
  source 1..120: mol_type = other DNA
gtttgcccatttccccccgacacacacacatcttatactcactcccacactccctggtctctggtatgtgatttctgttccaacagttaggactccagatttgttttttttttaatttct

SEQ ID NO: 17487 - DNA, 120 bp, synthetic construct
  misc_feature 1..120: note = Artificially Synthesized Probe
  source 1..120: mol_type = other DNA
tactcagttctggaaatttcattgggaatctcagaaaagaggcatgctccttctaggagagttgctaagctattagggtttaagcttggagctacaagaagctattttgccactaagaga

SEQ ID NO: 17488 - DNA, 120 bp, synthetic construct
  misc_feature 1..120: note = Artificially Synthesized Probe
  source 1..120: mol_type = other DNA
cggggtttcaccatgttggtcaggctggtctcaaactcctgacctcaagccatccgcccgcctcggcctcccaaagggctgggattacaggcgtgagccagcgctcccggccctgacctc

SEQ ID NO: 17489 - DNA, 120 bp, synthetic construct
  misc_feature 1..120: note = Artificially Synthesized Probe
  source 1..120: mol_type = other DNA
ttttaggtgcaactggagaaggcactgaagccctacgagattcacaccgtcttcggtctcctggggtcggcgccgagtgggaggatggcggaagtaagtatgaaggtgcccttccctccc

SEQ ID NO: 17490 - DNA, 120 bp, synthetic construct
  misc_feature 1..120: note = Artificially Synthesized Probe
  source 1..120: mol_type = other DNA
ggctcctcctttctctaatttctattttagaaaattggaacaataatattcttctcccacatgaagatagtaacaatggcagtcgttcagcggatgcttactttgcgttcagcgctgaca

SEQ ID NO: 17491 - DNA, 120 bp, synthetic construct
  misc_feature 1..120: note = Artificially Synthesized Probe
  source 1..120: mol_type = other DNA
ctcagggaaaggtaagataaccaagtgggagcctctagaatggctcatgggaagtgtgacatgaatattggaggatccgatgtagagggggggtgatctggaaaagttcccttttttagg

SEQ ID NO: 17492 - DNA, 120 bp, synthetic construct
  misc_feature 1..120: note = Artificially Synthesized Probe
  source 1..120: mol_type = other DNA
tgagagcaagtgagagagtgctcagagtggtcacagccctgcagataagctctggggtttaccagcccatggccctggtgtcgctcactttttgttggtaaagctggctcttggctctgt

SEQ ID NO: 17493 - DNA, 120 bp, synthetic construct
  misc_feature 1..120: note = Artificially Synthesized Probe
  source 1..120: mol_type = other DNA
gagagtgtgtccctggggctgcagcttttctgggatagcggaagacagggaaatgttcttactctcaaaaacaatgcctccacttgaaagagaactgtggagtttttgttgttgtggttg

SEQ ID NO: 17494 - DNA, 120 bp, synthetic construct
  misc_feature 1..120: note = Artificially Synthesized Probe
  source 1..120: mol_type = other DNA
gagaattcgaatgcatcttgtttgtagacagcctgcatacattgttctcattaggcatggattaagcctcctccctgcccctgccccagctgaggcgtcgtctcatctctgtaggtggaa

SEQ ID NO: 17495 - DNA, 120 bp, synthetic construct
  misc_feature 1..120: note = Artificially Synthesized Probe
  source 1..120: mol_type = other DNA
ggaaataatggtggttttctccaagcttctggaacactttgtagaaatctttgttttgttcttactctgcatctctgtgtctgtcaggggcaatcacgttttctcttgactctgtacttt

SEQ ID NO: 17496 - DNA, 120 bp, synthetic construct
  misc_feature 1..120: note = Artificially Synthesized Probe
  source 1..120: mol_type = other DNA
gtaaagctcaagttggtgtgggttgggggagtaatagaaggagcatctttgatgcctcttaagagttaggggctttgtcctatagttcaacaaaggacacctttttttttttgtttgtgt

SEQ ID NO: 17497 - DNA, 120 bp, synthetic construct
  misc_feature 1..120: note = Artificially Synthesized Probe
  source 1..120: mol_type = other DNA
atgtatatatatatttaaggcattctgctctccgtttctgcaacagtctttcagctgttgattcagaaaaagatggagacacattgggactttagaacctccttgcaataactctgcagt

SEQ ID NO: 17498 - DNA, 120 bp, synthetic construct
  misc_feature 1..120: note = Artificially Synthesized Probe
  source 1..120: mol_type = other DNA
gaggggggactatcacaaggagaagctttgcttgggagagcagggtagaggaggctgttgtgcctcggggtttggaagggaaagaaatgcgctgataggacacaggaaggcagaaggctc

SEQ ID NO: 17499 - DNA, 120 bp, synthetic construct
  misc_feature 1..120: note = Artificially Synthesized Probe
  source 1..120: mol_type = other DNA
ctttttaaaccccccagccctgctcgtgagattgggctgggtagggacagaggaggccgaaatccctcccccatgcttcctgacccttgttggccaagggcatctttgatggtacaagca

SEQ ID NO: 17500 - DNA, 120 bp, synthetic construct
  misc_feature 1..120: note = Artificially Synthesized Probe
  source 1..120: mol_type = other DNA
aagttacaggaacgataaacaaaatcaccaatacagcatggattagaaatcaaagtgatgagatctgcggaagtctgagaaacaagtttggaaattctctgattccccacaaagcacggg

SEQ ID NO: 17501 - DNA, 120 bp, synthetic construct
  misc_feature 1..120: note = Artificially Synthesized Probe
  source 1..120: mol_type = other DNA
tttactcgatgagagagatttttctggtcagttttagagaggcagagctggccacaatgcctgagataatctacattagattgcaagtcgggcagctttttgtttaattcagacagtgtt

SEQ ID NO: 17502 - DNA, 120 bp, synthetic construct
  misc_feature 1..120: note = Artificially Synthesized Probe
  source 1..120: mol_type = other DNA
cagtgcaggttctgataggtctattacttctctataataagacagtgtaaaaataaactatgttatcagctctttagtcttgcagccagcttgcttgtggttagtggcatgtggcttgga

SEQ ID NO: 17503 - DNA, 120 bp, synthetic construct
  misc_feature 1..120: note = Artificially Synthesized Probe
  source 1..120: mol_type = other DNA
accatgttttataattagagatgggctgagctagttctgaaataataataaaaccaaaaacctgacattcgagtatcctccaaatgggggagaatgtgctggaagcctgactgtgtgttt

SEQ ID NO: 17504 - DNA, 120 bp, synthetic construct
  misc_feature 1..120: note = Artificially Synthesized Probe
  source 1..120: mol_type = other DNA
tcgtgactttgtgctttgactaactccatgtgacatctgcttggccaccttggaattatgctaacagatttgcagaaataaagaaagctaagcaaagctgggcacgatcccatccaaact

SEQ ID NO: 17505 - DNA, 120 bp, synthetic construct
  misc_feature 1..120: note = Artificially Synthesized Probe
  source 1..120: mol_type = other DNA
aaggcctctttatgttcacccaagtttagactttccagccaatcggccacatctggtttagtccacaggtggacaggtttagttgtaaaaggcttatttgagattggctgttgcagtatc

SEQ ID NO: 17506 - DNA, 120 bp, synthetic construct
  misc_feature 1..120: note = Artificially Synthesized Probe
  source 1..120: mol_type = other DNA
acccagtggacagttttgttgcagaaggagctggggtaccctgtgttatttttagcccctttcatgtgagaggctcactggtaggacacacgggccttactgaaaagcagaacgcgtgag

SEQ ID NO: 17507 - DNA, 120 bp, synthetic construct
  misc_feature 1..120: note = Artificially Synthesized Probe
  source 1..120: mol_type = other DNA
tttttttcttttctctttctttaccatggatgtatatttgggtgaaaccacccatcagttacctaggttcccctaagctgtgggtcagtttcctacttgatgttagtcactgttgcttaa

SEQ ID NO: 17508 - DNA, 120 bp, synthetic construct
  misc_feature 1..120: note = Artificially Synthesized Probe
  source 1..120: mol_type = other DNA
tgggggtgctgtggcctgttcttctgtgtttattccagagtcacaagagcacagttttggggaaggcttatttgtccacgttgataaaacaattaagccaagatgattgaaatcaaataa

SEQ ID NO: 17509 - DNA, 120 bp, synthetic construct
  misc_feature 1..120: note = Artificially Synthesized Probe
  source 1..120: mol_type = other DNA
atgacaaatggaatgacttgagacaacactgcaaaaattaatgaacaagaaaggaagaaacagaaaaaagctgcttttcgacagatgaaatgaaggcagtggggcagaccctggctgaaa

SEQ ID NO: 17510 - DNA, 120 bp, synthetic construct
  misc_feature 1..120: note = Artificially Synthesized Probe
  source 1..120: mol_type = other DNA
ctctgcattttagtgatgagcccccatcttgcatgaaaatagcacttatttccaaactgctttcttattttttccatctttacagcctcctgataagcagggcattgaaaagatagaacc

SEQ ID NO: 17511 - DNA, 120 bp, synthetic construct
  misc_feature 1..120: note = Artificially Synthesized Probe
  source 1..120: mol_type = other DNA
ctagtaccaagtcagttttgaagcagtctgtgctctgggaccagctgggcagagataactttttaacaacccaaagttatttgaaaatcaagaggctgtcaggataatactgcagagagc

SEQ ID NO: 17512 - DNA, 120 bp, synthetic construct
  misc_feature 1..120: note = Artificially Synthesized Probe
  source 1..120: mol_type = other DNA
tcctttgtggcatttgtcacagtttgggtttgtcttattatttgttgtccatttctcccctcgagaatttgagctccccaaagggaggggcatctggaatgttttcttgttcagtgataa

SEQ ID NO: 17513 - DNA, 120 bp, synthetic construct
  misc_feature 1..120: note = Artificially Synthesized Probe
  source 1..120: mol_type = other DNA
acgcctgcaaattccatgtcatccttgatttcagggaagagctttgagcatcagagactcattcacggctaaagttaaatcaaacatacccaaggaaaacaaggatctagttgtttaatc

SEQ ID NO: 17514 - DNA, 120 bp, synthetic construct
  misc_feature 1..120: note = Artificially Synthesized Probe
  source 1..120: mol_type = other DNA
tttagtgcctacagtgaatgctcttcatctttgtcctctggcctcaggccatcctgtttctagtccaactctgagtgtaaagtgtaacccttggccgggagcaagaagggaacagacatg

SEQ ID NO: 17515 - DNA, 120 bp, synthetic construct
  misc_feature 1..120: note = Artificially Synthesized Probe
  source 1..120: mol_type = other DNA
cactaagataaggcctctttaattattgcttccacatagagtaatgacggaagagccacattagtatgtaatggggaagggttaaactagtcagtttttcagatttttggcccagtgcag

SEQ ID NO: 17516 - DNA, 120 bp, synthetic construct
  misc_feature 1..120: note = Artificially Synthesized Probe
  source 1..120: mol_type = other DNA
cagtgcaagaatgatcaaatataggctccttccagacagcctcagatagagccctctggttgcgtctagaaatgactcctgacttattctacgttcagttccaatggaaataatgtaaac

SEQ ID NO: 17517 - DNA, 120 bp, synthetic construct
  misc_feature 1..120: note = Artificially Synthesized Probe
  source 1..120: mol_type = other DNA
caaagctatctacatcttcttccacgagcgcgtcttgataaagtgcattgcttttgtgaatgatgggcttcatttttggcttaggaggtactgggggtttgtcaaccataaatgcttgcc

SEQ ID NO: 17518 - DNA, 120 bp, synthetic construct
  misc_feature 1..120: note = Artificially Synthesized Probe
  source 1..120: mol_type = other DNA
ttttcttctgcttcactaagtctgagagagccgggacagaagctgcccggtcatcggggatatcaaaactatttgcaaattccaggggaggaggcaatggctctgtaaaaataaaatcct

SEQ ID NO: 17519 - DNA, 120 bp, synthetic construct
  misc_feature 1..120: note = Artificially Synthesized Probe
  source 1..120: mol_type = other DNA
agtatgggttttctggcatctggcctctcttgttgcggaagttggcttgcgggccggcattccgactgtagaggtcttcagagtccaaggagtagcggtccagctctctcctgaagtaca

SEQ ID NO: 17520 - DNA, 120 bp, synthetic construct
  misc_feature 1..120: note = Artificially Synthesized Probe
  source 1..120: mol_type = other DNA
ggtgtttttagggcaggggtctaaggctgtcacctgtgcatctgaaatgagagcaaagggttgcaggtattgctgtgtttatgtggcaaggatggtgtgcagtccaccgtccagatggca

SEQ ID NO: 17521 - DNA, 120 bp, synthetic construct
  misc_feature 1..120: note = Artificially Synthesized Probe
  source 1..120: mol_type = other DNA
aaagtaaactgggttacattcagattacagattccaaaccgtaaggttcactaacctgatagaaagattctgctgtctgacaggaggaaatcagttgttattaaccagtaaccgcaagac

SEQ ID NO: 17522 - DNA, 120 bp, synthetic construct
  misc_feature 1..120: note = Artificially Synthesized Probe
  source 1..120: mol_type = other DNA
aattatcacagataactgggcttcaagatgacagaagccaccctagattttgtgtccttcaggggggatgagtttcatgccactcagatgttccaatggctccctagtgggcaaggccag

SEQ ID NO: 17523 - DNA, 120 bp, synthetic construct
  misc_feature 1..120: note = Artificially Synthesized Probe
  source 1..120: mol_type = other DNA
ggaagtccccttgtggagttcagaggtgatgggaggaggtgtgagggcagatattgtaactgtaattattaacagttgtttaatgcacattacagaaaagccttgtggtaaatttataat

SEQ ID NO: 17524 - DNA, 120 bp, synthetic construct
  misc_feature 1..120: note = Artificially Synthesized Probe
  source 1..120: mol_type = other DNA
atctcctcgggtttatctgcaatagaaccgtgaggattggagcagcaacaccagtgggggaagctgggtgtagataggaaagcgcacaggtgcagcagccactccaacatccaaaactgt

SEQ ID NO: 17525 - DNA, 120 bp, synthetic construct
  misc_feature 1..120: note = Artificially Synthesized Probe
  source 1..120: mol_type = other DNA
agcacatttttttttttttttttacttgaaaactgaagcacatcccagagctctcctgacgccttagcttcatctcagggtgtttgggatcaggcataagggtgtgtctaaggctgttta

SEQ ID NO: 17526 - DNA, 120 bp, synthetic construct
  misc_feature 1..120: note = Artificially Synthesized Probe
  source 1..120: mol_type = other DNA
ccagccatacacttttagtcttcaaacaaggatggggaagaaaaggcaggagaatgtgcagcagaggccatatggctgtcacgcccagcacacttaccatggggcccttcagggaggtgt

SEQ ID NO: 17527 - DNA, 120 bp, synthetic construct
  misc_feature 1..120: note = Artificially Synthesized Probe
  source 1..120: mol_type = other DNA
gctaggcagtggctgttctttgcctcaagtgagatgtggccgctggtggcccccagagtatttttctccaatgaaacgggggttgagatgtgtctcctgcaccagggagttatgtcccat

SEQ ID NO: 17528 - DNA, 120 bp, synthetic construct
  misc_feature 1..120: note = Artificially Synthesized Probe
  source 1..120: mol_type = other DNA
ctctagggcataacagctttcctgggattacaatttaaatgagccaaatcttcaagaagctcccgtttccaactgggcccttccagaagccatgtgtctgttttttatgtattaacaaac

SEQ ID NO: 17529 - DNA, 120 bp, synthetic construct
  misc_feature 1..120: note = Artificially Synthesized Probe
  source 1..120: mol_type = other DNA
tttcagaaaagccacaggactgagattcctgcttctcattctaggctcctaaggattatgcttaatttataaaagctcagaactaggtctttattcagggactctggatgaaggggatta

SEQ ID NO: 17530 - DNA, 120 bp, synthetic construct
  misc_feature 1..120: note = Artificially Synthesized Probe
  source 1..120: mol_type = other DNA
tctacttctctggagttgcagtgctactacatcctgtctctgggtgagagagtacaaatgtcactccatttccaaaaggaaaacacacacatctgcagcgccagatgttagaggacagaa

SEQ ID NO: 17531 - DNA, 120 bp, synthetic construct
  misc_feature 1..120: note = Artificially Synthesized Probe
  source 1..120: mol_type = other DNA
tccaaataaggtcccattcacagaactttgggggtcacttttcaacccaatacaactgtaaaggcctgacttttgttccacatggcctttctggagtgtgacgagtgctttttccgaggc

SEQ ID NO: 17532 - DNA, 120 bp, synthetic construct
  misc_feature 1..120: note = Artificially Synthesized Probe
  source 1..120: mol_type = other DNA
accaaacaggggtccggccagcttcacggtcatgacgatgtgaacacaggtcagggaagaaacacaggacacgctggggaatcacagacagaagccaagcagaaagaacagacagatgaa

SEQ ID NO: 17533 - DNA, 120 bp, synthetic construct
  misc_feature 1..120: note = Artificially Synthesized Probe
  source 1..120: mol_type = other DNA
ggctcgtttctgcgcccatgtaagctgccttcaccagctccaatttgtgctccagtggagcaagcgtttccacctacatgccatctctgtgtgtttcagagccaccctctttccaaaggt

SEQ ID NO: 17534 - DNA, 120 bp, synthetic construct
  misc_feature 1..120: note = Artificially Synthesized Probe
  source 1..120: mol_type = other DNA
tacctttatccactagtgagaggcccaaaaattcaaaacaaaacaatgttagataaacagaaaagaggaaaggcaggactagcaacaacgccccgcgaggctccgagggaggtgcacaca

SEQ ID NO: 17535 - DNA, 120 bp, synthetic construct
  misc_feature 1..120: note = Artificially Synthesized Probe
  source 1..120: mol_type = other DNA
cctaaaaagggggcaaatgcagggaagcaaagggagtgagaccgtcatctttttggaagcaaaggtgcttttggggaaaccagaatgaatgctgctgtgactgtggaggtcacttaactg

SEQ ID NO: 17536 - DNA, 120 bp, synthetic construct
  misc_feature 1..120: note = Artificially Synthesized Probe
  source 1..120: mol_type = other DNA
agattcttcaaaaactaaacatctggtatacccacaaacagaaaacttaaagcctgtgtgctgcttggtggattttcacaaatccaacatccctgtaagagctggatagaagcaggtact

SEQ ID NO: 17537 - DNA, 120 bp, synthetic construct
  misc_feature 1..120: note = Artificially Synthesized Probe
  source 1..120: mol_type = other DNA
tgtgggaagtttgcgtcctcatcagggagttttggccgacacacaaagaagtgaacacataacttcaggtggctgagtaccacctaagaaggcagaaccaagtaaaaggagactgaacag

SEQ ID NO: 17538 - DNA, 120 bp, synthetic construct
  misc_feature 1..120: note = Artificially Synthesized Probe
  source 1..120: mol_type = other DNA
gaaacatcacttggccttctctgaaagctgatgacaaagaggcatacagggcttgcaggggtggagctaggtttggaatcagttgttgggcatctgatgcccctctgacgtccagaatct

SEQ ID NO: 17539 - DNA, 120 bp, synthetic construct
  misc_feature 1..120: note = Artificially Synthesized Probe
  source 1..120: mol_type = other DNA
ttagctgtcacaatttaaagagtataagacctttgcatagaaagtctagaatttcagttttcattgaaaaattagaaccctcgcacttggggagttgggcctcccacttgcatgcggcat

SEQ ID NO: 17540 - DNA, 120 bp, synthetic construct
  misc_feature 1..120: note = Artificially Synthesized Probe
  source 1..120: mol_type = other DNA
tgctggagtcctaatccctagtatctcaaaatatgaccttactttgcagatacagtcaagttaaaaaggggccattagggtgagcctaacccaggtgactagtgttcttatgaaaagggg

SEQ ID NO: 17541 - DNA, 120 bp, synthetic construct
  misc_feature 1..120: note = Artificially Synthesized Probe
  source 1..120: mol_type = other DNA
tttgagatgctaaaggttgccaggaaaccgtcagctcctatgggagaggcctggaagattttccctcacagccttagagggaacccatgctactgccaccttgatctcaaacttcttgtc

SEQ ID NO: 17542 - DNA, 120 bp, synthetic construct
  misc_feature 1..120: note = Artificially Synthesized Probe
  source 1..120: mol_type = other DNA
agcccaaacggactaagaactcaagtgacaaaccatagctgtgcttacttacccaggagcctggccacagctgtttccgtctcccatcccctgcaattacatatattgtaccaggcttga

SEQ ID NO: 17543 - DNA, 120 bp, synthetic construct
  misc_feature 1..120: note = Artificially Synthesized Probe
  source 1..120: mol_type = other DNA
catttccctacccagttcagcagggacagaggaaaaaaagctttaggatctttagaatttcccagcctttaaacaaacctaaaatcagtttaacctgcaatgagactttggaaccagcta

SEQ ID NO: 17544 - DNA, 120 bp, synthetic construct
  misc_feature 1..120: note = Artificially Synthesized Probe
  source 1..120: mol_type = other DNA
caaatgtcctatggaaggtcaagacaccatcagttgagaaccactaatttggctctttttaaaaaatcctccctccccactgttttcccagtaccaccatcctctagatgtattgatatc

SEQ ID NO: 17545 - DNA, 120 bp, synthetic construct
  misc_feature 1..120: note = Artificially Synthesized Probe
  source 1..120: mol_type = other DNA
taaggaagactcaaataggcttgctatgataaggctgaaatttgagctgctgccactgcagggcagacaaaggttgcaatttgagtttaaccaaactcattatcagctaaaacaaaaaca

SEQ ID NO: 17546 - DNA, 120 bp, synthetic construct
  misc_feature 1..120: note = Artificially Synthesized Probe
  source 1..120: mol_type = other DNA
caaaataaagacctttataaaaaaatgaaaaccaggttatttgttgccagaaagcctgcactaaagaacgttcttcaagctgaagtgaagcgggactggatctatggatggcacaaaggg

SEQ ID NO: 17547 - DNA, 120 bp, synthetic construct
  misc_feature 1..120: note = Artificially Synthesized Probe
  source 1..120: mol_type = other DNA
gtttaaaaagaagacctaattatgctgtccgtacactttcaatacaaagacactgagaggctgagagttaataaatgagaaaagacagttcctgggcagaatggctgttaatatcagaca

SEQ ID NO: 17548 - DNA, 120 bp, synthetic construct
  misc_feature 1..120: note = Artificially Synthesized Probe
  source 1..120: mol_type = other DNA
tcttcctgcatactggtttcttcagttgttttcagtgtgtttgttttgggccgtatttcatattagttcatcaaatgtctgatgttccttggaaggcagctcatatttcagagtagctcc

SEQ ID NO: 17549 - DNA, 120 bp, synthetic construct
  misc_feature 1..120: note = Artificially Synthesized Probe
  source 1..120: mol_type = other DNA
agacaccactacacacctatggaatggccagaatctcaaacaccgacaacagcaaatgccggcgaggatgtgcagcaaccggaatgcttatcgttgctggtgggaacccaaaataacaca

SEQ ID NO: 17550 - DNA, 120 bp, synthetic construct
  misc_feature 1..120: note = Artificially Synthesized Probe
  source 1..120: mol_type = other DNA
gtctactaattaaaaagaggctcatttctacaagtttttattatggaagaagcccaatgttacatgacagtagagagatgagtaccctgagccagtgctgtccctttagccagcgtcagc

SEQ ID NO: 17551 - DNA, 120 bp, synthetic construct
  misc_feature 1..120: note = Artificially Synthesized Probe
  source 1..120: mol_type = other DNA
tctgaggcacagtgtatgtgagaaggcccagatacgggccggatactcgcctttcatcagttttcatgtgaatgagtcacttctttcaagtgaccagttctttaaaaagtgtcattatgg

SEQ ID NO: 17552 - DNA, 120 bp, synthetic construct
  misc_feature 1..120: note = Artificially Synthesized Probe
  source 1..120: mol_type = other DNA
gatatatttcattaactaaagcccacattttattcggatttctctaatttttacctgacgtcccttgtctgtcccaggatctgtccagagcaccacattacgtttagttgctgctctagg

SEQ ID NO: 17553 - DNA, 120 bp, synthetic construct
  misc_feature 1..120: note = Artificially Synthesized Probe
  source 1..120: mol_type = other DNA
tcacactggctcctgagcccatcacatgtgactttgtgtcttcaataccttccttgcttttggatgtgacaaaatattctaccctcttcatgattatactgatagcttcaacagaaattt

SEQ ID NO: 17554 - DNA, 120 bp, synthetic construct
  misc_feature 1..120: note = Artificially Synthesized Probe
  source 1..120: mol_type = other DNA
gcatggctgaatgcacggcttaacctctatctagatttgattgattggcagtgtccctcttttgctggacgttgccaatcaaacctctaaaaattcatttattcttgaaaaagatacaag

SEQ ID NO: 17555 - DNA, 120 bp, synthetic construct
  misc_feature 1..120: note = Artificially Synthesized Probe
  source 1..120: mol_type = other DNA
cacctcaatgcgactggttacaaatacagattcccagccctcacagcagcaggtgctctataaatactattgagcagttctctttgggactgtggtaaaacacagcagggtaggaatgcc

SEQ ID NO: 17556 - DNA, 120 bp, synthetic construct
  misc_feature 1..120: note = Artificially Synthesized Probe
  source 1..120: mol_type = other DNA
ttcccaatgtgctatctttaccggagcaaatcggtacaaccccagacactcggatgcagctaagaccttgtgaattcctttgctccacattgatctgcaaggagtactagtaggagtctg

SEQ ID NO: 17557 - DNA, 120 bp, synthetic construct
  misc_feature 1..120: note = Artificially Synthesized Probe
  source 1..120: mol_type = other DNA
tggatttttttttttctgccttctgctaggagcatgagacagactaagagagaggtgagagaaaagggcatttggaaacgagcttcgaggtaggggagaaaacaggctctttcttttgaa

SEQ ID NO: 17558 - DNA, 120 bp, synthetic construct
  misc_feature 1..120: note = Artificially Synthesized Probe
  source 1..120: mol_type = other DNA
actctgcccccaccccccacccaccttttcaattcagacacaactggccagcactcacattaaaacagagatccggagagtaatggaatgaactcctggtagcaataagacaccaaacta

SEQ ID NO: 17559 - DNA, 120 bp, synthetic construct
  misc_feature 1..120: note = Artificially Synthesized Probe
  source 1..120: mol_type = other DNA
gattcaagttggggaatcctaaagtggcatggcttcctggtgtgtttaaaatactcatttgctcctcactcagaagggcagttgctataaatggcctccagcagcctggagatggcactg

SEQ ID NO: 17560 - DNA, 120 bp, synthetic construct
  misc_feature 1..120: note = Artificially Synthesized Probe
  source 1..120: mol_type = other DNA
actcaggtgtctcagccacaaaatgggatggtggtgagagggaggggcctgagtgcatgttaaggacctggagagctgccaggagcatctgcagcaaatgggcaggccacactctcatga

SEQ ID NO: 17561 - DNA, 120 bp, synthetic construct
  misc_feature 1..120: note = Artificially Synthesized Probe
  source 1..120: mol_type = other DNA
tctgggttattttagaatagcctagaaggtcctcctctcctgacagggattccaagatctatacaccttcgcattgtggtaaaatacacgtggcctaacactgaccattgataacattta

SEQ ID NO: 17562 - DNA, 120 bp, synthetic construct
  misc_feature 1..120: note = Artificially Synthesized Probe
  source 1..120: mol_type = other DNA
tttttttgcttaccagttacgaccatttatggtttgggttgtggggatgtaggatggtgcggctgctatgaagacagtatggcattcctcaacactcaacagagttaccacataatccag

SEQ ID NO: 17563 - DNA, 120 bp, synthetic construct
  misc_feature 1..120: note = Artificially Synthesized Probe
  source 1..120: mol_type = other DNA
aaaaaaaaaaacaaaaaggctaagattatagagtttacatgtattttactatgatttaaaataataactttttaaaagggagaggcatggcccaggcccaggcgcctcacctgccagccc

SEQ ID NO: 17564 - DNA, 120 bp, synthetic construct
  misc_feature 1..120: note = Artificially Synthesized Probe
  source 1..120: mol_type = other DNA
caaatctccttgattcttttgcttgtcattgagaaactcaatgctgagcatgagttgaaatttcaggcatgctgagctgaaattcctgtggcagcagctgttctcaggaacatgtcagtt

SEQ ID NO: 17565 - DNA, 120 bp, synthetic construct
  misc_feature 1..120: note = Artificially Synthesized Probe
  source 1..120: mol_type = other DNA
tgtgcctggacttctttttaaaaagacaatcgattcaaggtctcaaatacagagactcctaggtgcaaattctacatccttattccagtgtcagaactgctgagaatgtccaacctagct

SEQ ID NO: 17566 - DNA, 120 bp, synthetic construct
  misc_feature 1..120: note = Artificially Synthesized Probe
  source 1..120: mol_type = other DNA
ttactcagtgtcaccccttccatgctcacccacaaggtggcacgtctcatcactttcttcctctttatggccaagtagtgttccactgcatgggtgcccattctccaagagctgtggtac

SEQ ID NO: 17567 - DNA, 120 bp, synthetic construct
  misc_feature 1..120: note = Artificially Synthesized Probe
  source 1..120: mol_type = other DNA
ccatcattcagtccatccatcactctatccctctgttcttccattcatccattcattatctaccatcatccatctgccatcatccatcagtctaaccagtccatccatttatccatcatc

SEQ ID NO: 17568 - DNA, 120 bp, synthetic construct
  misc_feature 1..120: note = Artificially Synthesized Probe
  source 1..120: mol_type = other DNA
tgtaagtggcggggtgtggcgggctcatcacgcttgttgtttgttaaagttcaactccgttggaccaagctgagatgaggcttggtctaaaataaaaccggagctgcgtcagtgtgtggg

SEQ ID NO: 17569 - DNA, 120 bp, synthetic construct
  misc_feature 1..120: note = Artificially Synthesized Probe
  source 1..120: mol_type = other DNA
gtctttgcaaatgtaattatgtttctcaacagaatatgacccgggatttatggtggtttaaaatccaatgacacgtgttctcgtaagagacagaagaggaggagacacacagctgggaga

SEQ ID NO: 17570 - DNA, 120 bp, synthetic construct
  misc_feature 1..120: note = Artificially Synthesized Probe
  source 1..120: mol_type = other DNA
tagctggatttacattgagagggcagcgagagaccccatgagtgtcacaaaacagtgatctcaaagtagctcactcacttgcagaggggcgttacccttgaacactcgtgaccatcctgg

SEQ ID NO: 17571 - DNA, 120 bp, synthetic construct
  misc_feature 1..120: note = Artificially Synthesized Probe
  source 1..120: mol_type = other DNA
acctggtgcccaaacgcagctggcaggacagccttggatggactggagacattaaatgatgttctccatttaaagaaagtagagtaaatgaagaacattttagaacattccatcccaaat

SEQ ID NO: 17572 - DNA, 120 bp, synthetic construct
  misc_feature 1..120: note = Artificially Synthesized Probe
  source 1..120: mol_type = other DNA
tcacgattagcgacggggggtgagctgactccatggaggccttgaaacccaccccgtcagccccacccagggctgcatctttatagttttaatttttaactgtactgcggtaaaatccat

SEQ ID NO: 17573 - DNA, 120 bp, synthetic construct
  misc_feature 1..120: note = Artificially Synthesized Probe
  source 1..120: mol_type = other DNA
cttggcataatatcctcaagggtcctccataggaggcctttgtagccagtgtcggttttccctcctgcctaagatggaacgatgctccctgatcgggatacaccacatttgccttcctcc

SEQ ID NO: 17574 - DNA, 120 bp, synthetic construct
  misc_feature 1..120: note = Artificially Synthesized Probe
  source 1..120: mol_type = other DNA
ggcatggttgagttattgcagagaagttacaaaaacagactacatagtgagctgaccggtggccctcgaaagatatgtccatgcctttaacccctggcacctgccaatgtgaccttattt

SEQ ID NO: 17575 - DNA, 120 bp, synthetic construct
  misc_feature 1..120: note = Artificially Synthesized Probe
  source 1..120: mol_type = other DNA
acacagtctgcgttgtgaaatgggtatttggttttcctctcctctactgacacatggctcctaaaatctcaggaccctccagagtgctgagtgtctttgtatgctagtgagatgactggt

SEQ ID NO: 17576 - DNA, 120 bp, synthetic construct
  misc_feature 1..120: note = Artificially Synthesized Probe
  source 1..120: mol_type = other DNA
tttgctttttcctatagcctcacagtccccccaaatttggcctcaacgagaggctgttagcagacacgttcccatttcttaaggcaactttccagaagtcaggaaacagcctatttggaa

SEQ ID NO: 17577 - DNA, 120 bp, synthetic construct
  misc_feature 1..120: note = Artificially Synthesized Probe
  source 1..120: mol_type = other DNA
cagtgacagcaccgtctccctaaggccactgggacgggataattcacgcacaccctccgtacggcgcctgcacacggtaattgctcattaaacagctggtgttgtatttttttctgacac

SEQ ID NO: 17578 - DNA, 120 bp, synthetic construct
  misc_feature 1..120: note = Artificially Synthesized Probe
  source 1..120: mol_type = other DNA
tttttctggtgaccagcccctgccatcctgaagctatctagcctccgcctcccctaagtatcatctcattaacatataaaagacaggaaattcaagaggttttaagagttctgtgccagg

SEQ ID NO: 17579 - DNA, 120 bp, synthetic construct
  misc_feature 1..120: note = Artificially Synthesized Probe
  source 1..120: mol_type = other DNA
tagcccatgcagtattaggaactgagtcctatcccgtactaagtctcctccctattcaatattctgctactcccctaccgcaatagtcctggataaaaactgtatttattaacaactttt

SEQ ID NO: 17580 - DNA, 120 bp, synthetic construct
  misc_feature 1..120: note = Artificially Synthesized Probe
  source 1..120: mol_type = other DNA
ctgcctgaaatagatgcttccagttttctcctgtgattttgatctttctgaaaagagcctctgacacagacgtgcacacacagccatctctaacaatcgatggatggctggatttccctt

SEQ ID NO: 17581 - DNA, 120 bp, synthetic construct
  misc_feature 1..120: note = Artificially Synthesized Probe
  source 1..120: mol_type = other DNA
ttaaaaataagctcccgatggccgagaaaggtgctcctctgtatttaggaaatggagctgcctgcttcctctttggtgatgggacatcgactaggacggcctcatgacatttgcgaagcg

SEQ ID NO: 17582 - DNA, 120 bp, synthetic construct
  misc_feature 1..120: note = Artificially Synthesized Probe
  source 1..120: mol_type = other DNA
tcttcggtttttggcaaatgctgcgttctacaccctggaccctgcttctcactataccagggtctttctattcaagactaaagtctagcccactgctactgctgctcagtgaaaatctca

SEQ ID NO: 17583 - DNA, 120 bp, synthetic construct
  misc_feature 1..120: note = Artificially Synthesized Probe
  source 1..120: mol_type = other DNA
gcattttcacatgtgctcactctgcctgtgtctgctgcagcaaatgttctttttgagggagaaaacacatacagaaacttcccctggtgttgcctatgatgtggctctttcagcttcaaa

SEQ ID NO: 17584 - DNA, 120 bp, synthetic construct
  misc_feature 1..120: note = Artificially Synthesized Probe
  source 1..120: mol_type = other DNA
gctcagggagatttatagctcaatttagttcctgtatgtcccatgtcacagcgagtcatttatcgagtgcttcaacttgacaacaactgaaaaattaatcccaacagcaagcgattaact

SEQ ID NO: 17585 - DNA, 120 bp, synthetic construct
  misc_feature 1..120: note = Artificially Synthesized Probe
  source 1..120: mol_type = other DNA
attctgaagtactggggattggaacgctaatgcatggatttttgagggacacaactcagctgtgacgatccccagcagccccctgccatcctgactgccggtcccagctcctgtcctgac

SEQ ID NO: 17586 - DNA, 120 bp, synthetic construct
  misc_feature 1..120: note = Artificially Synthesized Probe
  source 1..120: mol_type = other DNA
ctgtcctctcggataatgggttccccttgtaatcctggattccaccatgagtcaaagcttgcaaggacctacctgatcttattttaacaaagactttatattttggaacatttttggatt

SEQ ID NO: 17587 - DNA, 120 bp, synthetic construct
  misc_feature 1..120: note = Artificially Synthesized Probe
  source 1..120: mol_type = other DNA
aatattccaaactttctgtctgttatcgtgatctgtgatctatactttttgatgctactattggatttttttgggggtgccgtaaaacacactcaaataagatggtgaatttaatcgata

SEQ ID NO: 17588 - DNA, 120 bp, synthetic construct
  misc_feature 1..120: note = Artificially Synthesized Probe
  source 1..120: mol_type = other DNA
acagtttgtttgaccactcacctactgaaggacatccaggctacatccagtttttggcaataaagctgctataagcacttaacgtgcagcctgatcacatttattttctctctgtctctt

SEQ ID NO: 17589 - DNA, 120 bp, synthetic construct
  misc_feature 1..120: note = Artificially Synthesized Probe
  source 1..120: mol_type = other DNA
tatttttacaaagccagggccataaatgtagtggcattgctggtgtgactcagaaggacccaaccacttccatatttcaagtgctcaccacataccaggcattgcactaaaagcctcatt

SEQ ID NO: 17590 - DNA, 120 bp, synthetic construct
  misc_feature 1..120: note = Artificially Synthesized Probe
  source 1..120: mol_type = other DNA
actatttgaacactttccccttcaaaatgacagtctttggcaaatatgttaaataccaattgagaacaaatgccaccaggaactctgatcatccttcatctgctgagcaaggaaatgcca

SEQ ID NO: 17591 - DNA, 120 bp, synthetic construct
  misc_feature 1..120: note = Artificially Synthesized Probe
  source 1..120: mol_type = other DNA
ttttttagaacacttttagctttaccaaaagaaaccaatgcagagagcgttcagagagtttccacacaccacgcttctttttctcacacaaatagcaacacagttaacagtctgtctgct

SEQ ID NO: 17592 - DNA, 120 bp, synthetic construct
  misc_feature 1..120: note = Artificially Synthesized Probe
  source 1..120: mol_type = other DNA
tggggttgtatttcaagtggagcagaatgtcctggatcctctggacaccccggtgagtaattctatatactagcaaaaaatgatcacaaacagaaattcgaaaatacctctaccatatct

SEQ ID NO: 17593 - DNA, 120 bp, synthetic construct
  misc_feature 1..120: note = Artificially Synthesized Probe
  source 1..120: mol_type = other DNA
cttggcctcccaaagtgcatcgattttctcgacgttgccaaagaaccaacttttggttgctccattttccttgtttttctattttctatgtcattgattgctgtgagcttaatcacttct

SEQ ID NO: 17594 - DNA, 120 bp, synthetic construct
  misc_feature 1..120: note = Artificially Synthesized Probe
  source 1..120: mol_type = other DNA
gtttatcttaataacccttccaagtacacttgaaaacaaagcacagaggattctttccacaactgtcagttaagtcaagctggttgatgggtttgttcatggtttcctatatcccggctg

SEQ ID NO: 17595 - DNA, 120 bp, synthetic construct
  misc_feature 1..120: note = Artificially Synthesized Probe
  source 1..120: mol_type = other DNA
acaatacaagaacttacaacagtacacttccactcttcccctcctagactttgtgccattgttgtcacacctacgatctttccatgtcgtaatccccaagctacatttattcttctgttt

SEQ ID NO: 17596 - DNA, 120 bp, synthetic construct
  misc_feature 1..120: note = Artificially Synthesized Probe
  source 1..120: mol_type = other DNA
aatcctatgtgcctgggtgtgtttttgtttctttttctctcatgtgtcttgtgcttggagtctattgagctgcttgggtgtgtgagttcattgtttacttcaaatttggaaaaagttccc

SEQ ID NO: 17597 - DNA, 120 bp, synthetic construct
  misc_feature 1..120: note = Artificially Synthesized Probe
  source 1..120: mol_type = other DNA
aactctaacatcggtgttaatccccagtcaattttgataatggatttttctcttccttacgggctgtattttcctgcttctttgcaagactgggaatttctgaatggatgccagacatca

SEQ ID NO: 17598 - DNA, 120 bp, synthetic construct
  misc_feature 1..120: note = Artificially Synthesized Probe
  source 1..120: mol_type = other DNA
atatcaaataccatgatgagctccatggtctaccctgaagcttctgccatcgtccatctcatcgcattatttttaataagacaaagaccacacttccctgactttacaccacctcacttc

SEQ ID NO: 17599 - DNA, 120 bp, synthetic construct
  misc_feature 1..120: note = Artificially Synthesized Probe
  source 1..120: mol_type = other DNA
aataattgattggagcagaaaagcctcatgcctttgaagtccctcattaattacctggacaggaagaaggaagaatctctactcagccacaaagcggctaaacacgatcaaagaaaccat

SEQ ID NO: 17600 - DNA, 120 bp, synthetic construct
  misc_feature 1..120: note = Artificially Synthesized Probe
  source 1..120: mol_type = other DNA
gggtgaagcctccttgcctctctcacagctccctgaaagctccttgcagagaacttctctgtttaataacctcggaaaagcattaaaagcgagtctgaagaactcatttaatggattctt

SEQ ID NO: 17601 - DNA, 120 bp, synthetic construct
  misc_feature 1..120: note = Artificially Synthesized Probe
  source 1..120: mol_type = other DNA
ctgtttatagatggctgagaagcctgcctgtgtccagcaagagtgcagctgtgtggccagtggactcagcatccacgtccgagggactgctcacgttctctgaagatgttcaaggctgcc

SEQ ID NO: 17602 - DNA, 120 bp, synthetic construct
  misc_feature 1..120: note = Artificially Synthesized Probe
  source 1..120: mol_type = other DNA
ttattcacctatgaaacttgagctgttcggttgggcctcataagctgtcgctacctgactgttttttgacctataaaaatggcagcttcacaaggcttgaccgaatgacaagagggaact

SEQ ID NO: 17603 - DNA, 120 bp, synthetic construct
  misc_feature 1..120: note = Artificially Synthesized Probe
  source 1..120: mol_type = other DNA
tttcataaatcttgtagttatcttgtgcataacataactatgctgcatcttgggggtcaaagcactcctgtgcggtggtgttcatgggtgttagcatttctttcttctgaagcaatccag

SEQ ID NO: 17604 - DNA, 120 bp, synthetic construct
  misc_feature 1..120: note = Artificially Synthesized Probe
  source 1..120: mol_type = other DNA
ttttgaagcccctccatctagggtattttgccctagtggatttagctgactcagacagaagggaagggaaggaaactaagggaggagagagaagagggaaacaaggagagaaagcccctc

SEQ ID NO: 17605 - DNA, 120 bp, synthetic construct
  misc_feature 1..120: note = Artificially Synthesized Probe
  source 1..120: mol_type = other DNA
actttaaatatgtgaacttgactggacattgattatgccccaataaagtttttaaaaagtgtatcatgatatgaccgataccacaggagaggttgccccatgtgtctgtgtgtgtggggg

SEQ ID NO: 17606 - DNA, 120 bp, synthetic construct
  misc_feature 1..120: note = Artificially Synthesized Probe
  source 1..120: mol_type = other DNA
ggtagggggtgggggtctttggaggcaggagaacaggctggcttgatgcctgcttctgctccatcccagcactgcaactgtgactgatcacctaatgtctcccattcattcattcagtca

SEQ ID NO: 17607 - DNA, 120 bp, synthetic construct
  misc_feature 1..120: note = Artificially Synthesized Probe
  source 1..120: mol_type = other DNA
aagccacacacacaaagggcacatttctgtttcaaagccttcattgcagctgatcctctgcggtgcattcaagctgggccctccttgctccctgctctgggtggggacaaggacatcaca

SEQ ID NO: 17608 - DNA, 120 bp, synthetic construct
  misc_feature 1..120: note = Artificially Synthesized Probe
  source 1..120: mol_type = other DNA
gagagcatttcacgggcttaaattttggcagacagactcttggaatctgagcaccaggccatttgtgtctacggggaactacctgtccctcagcacttcttacaagccctttgttgtcac

SEQ ID NO: 17609 - DNA, 120 bp, synthetic construct
  misc_feature 1..120: note = Artificially Synthesized Probe
  source 1..120: mol_type = other DNA
aagagtgactcagagctgcatttttctggaaagcatgataagggatcatcagtgtcaaaaccccgagctccaggcaggggccatgatttctccagtgaccccaagaccaccaggaatgac

SEQ ID NO: 17610 - DNA, 120 bp, synthetic construct
  misc_feature 1..120: note = Artificially Synthesized Probe
  source 1..120: mol_type = other DNA
ctgtacttcccagaaccacaacaggctgcaagaaacagagactcctgctcccccaagacaggaggaacgcagattgcttttgaacttttattccagccccgcaagagtgggtttcaggaa

SEQ ID NO: 17611 - DNA, 120 bp, synthetic construct
  misc_feature 1..120: note = Artificially Synthesized Probe
  source 1..120: mol_type = other DNA
ggcatcatatttctcaagaaaatcatttccagccagtgagctcactgggctaccttagcaactacatgaaacacagatcaaagtccctcataggagcatgaagtgtccctgaaaaggccc

SEQ ID NO: 17612 - DNA, 120 bp, synthetic construct
  misc_feature 1..120: note = Artificially Synthesized Probe
  source 1..120: mol_type = other DNA
tcacaacgctaagataataaacacgtgttgctggaagccaccaggttcgtggtgacttgctgccaatgcctcagccacgggaagtgcacagctgacttctacaaggctgagaacatcaga

SEQ ID NO: 17613 - DNA, 120 bp, synthetic construct
  misc_feature 1..120: note = Artificially Synthesized Probe
  source 1..120: mol_type = other DNA
gctgttccagtaccttaggaaaggcctctgccttcctcaaagatggcatcttcctatctgaatggtatattttgtgttacattaaggttgttggtgcttcagtttttgttactgtttttt

SEQ ID NO: 17614 - DNA, 120 bp, synthetic construct
  misc_feature 1..120: note = Artificially Synthesized Probe
  source 1..120: mol_type = other DNA
ggtatggcccctgggaagccacttaatctctttggactatgatttaatgtcctgtagagcaaagctcctgatctcctctcttgggcacacgagggttggggccgtaaatgtttgccagct

SEQ ID NO: 17615 - DNA, 120 bp, synthetic construct
  misc_feature 1..120: note = Artificially Synthesized Probe
  source 1..120: mol_type = other DNA
ttcatctatctacgggctcaggtatggctccaaagatgggggattcccaggctgactccagaaggcctagcagcatgtccccaactgatgcaagaggtgggaggaggccttgctggcaga

SEQ ID NO: 17616 - DNA, 120 bp, synthetic construct
  misc_feature 1..120: note = Artificially Synthesized Probe
  source 1..120: mol_type = other DNA
tcatctgtgtcttttattttctctttctgatgctctggcatccagggttttgctgaccctggagggatggcccctcaagaatcaggcaattcctagagaaagtaaacagctcacctgaga

SEQ ID NO: 17617 - DNA, 120 bp, synthetic construct
  misc_feature 1..120: note = Artificially Synthesized Probe
  source 1..120: mol_type = other DNA
actgccctgcaatactctccaatttcacctggcatttaacacaaattgaccagaatcattccctgttctttgttcctaataaggacaggcttgcttttatccagacatccattcatccat

SEQ ID NO: 17618 - DNA, 120 bp, synthetic construct
  misc_feature 1..120: note = Artificially Synthesized Probe
  source 1..120: mol_type = other DNA
atccatccatccaacagctatctgaactgtttaatgacaacctcccatagggagacagctgggaaaaagaccgattcaaccctgaccttgtggagtttgcaacctgcaagtgacaactga

SEQ ID NO: 17619 - DNA, 120 bp, synthetic construct
  misc_feature 1..120: note = Artificially Synthesized Probe
  source 1..120: mol_type = other DNA
ggatgacagtgcttaccgacaggaaaaaatattccccacatgttcagaaaaaaagggtaggttacaaaatggtatggaacagcgagtccgacattcagagaaaaggtataaaaaagatgc

SEQ ID NO: 17620 - DNA, 120 bp, synthetic construct
  misc_feature 1..120: note = Artificially Synthesized Probe
  source 1..120: mol_type = other DNA
aatatagaaattaggctgattatagctcttatttcacatgccaagggaataaaaaaagaaataaggccaattaatgatcacacaatggcctctaactgctcaagtgaaaggaagagtcac

SEQ ID NO: 17621 - DNA, 120 bp, synthetic construct
  misc_feature 1..120: note = Artificially Synthesized Probe
  source 1..120: mol_type = other DNA
gaaatcgatgtctggtttcaaagattcaaaggacaggctgactcccttgtgaggggctagtacagctggtgactttaagttgaagctggtactcatttcccattctgaaaatcctagggc

SEQ ID NO: 17622 - DNA, 120 bp, synthetic construct
  misc_feature 1..120: note = Artificially Synthesized Probe
  source 1..120: mol_type = other DNA
caaacaaacaaaaacagaagtggagctgaagatgggacttaaacgctgcaatctcatgagaaacttgaatggatgaggagttgcttcttagggacaagcaaagaaagtgatttctcgaga

SEQ ID NO: 17623 - DNA, 120 bp, synthetic construct
  misc_feature 1..120: note = Artificially Synthesized Probe
  source 1..120: mol_type = other DNA
tataattagtatccctctccccagtagatgttatcttttaaaaaaggaaaagacaaagaaatggagggaaagggaaggtctacaaatgggtcagaaaaaggaaggtagagaccaggcatg

SEQ ID NO: 17624 - DNA, 120 bp, synthetic construct
  misc_feature 1..120: note = Artificially Synthesized Probe
  source 1..120: mol_type = other DNA
aaataataaaaaataacaagcagaggtgtggagactacatttaaacagggcatgcaggaagcccagtccctgtcaagcctctaatactctcctgtggctcaggctgtgaattgatgtgtg

SEQ ID NO: 17625 - DNA, 120 bp, synthetic construct
  misc_feature 1..120: note = Artificially Synthesized Probe
  source 1..120: mol_type = other DNA
gtaggactttggtggcatttttggctaggtgtagctcctctacttattatattctataatttctcagcagtctccacgcagttctgagaactcttgctgcattgagaaaaatctaaccta

SEQ ID NO: 17626 - DNA, 120 bp, synthetic construct
  misc_feature 1..120: note = Artificially Synthesized Probe
  source 1..120: mol_type = other DNA
gcttgctcacatcaattctttaaaattttattgtgcctcagctgactttataaacaatgcccatccacagatgaatgagtcaacagttgtggtctacccacaccattggatatgattcgg

SEQ ID NO: 17627 - DNA, 120 bp, synthetic construct
  misc_feature 1..120: note = Artificially Synthesized Probe
  source 1..120: mol_type = other DNA
aaatacgcagcaccatctgcagcaacttggaatttaataaatttatttataaagcgactgaggcttcttttaaagtcgagtttttatccctgagatgaggctcctgaggcctatgaggct

SEQ ID NO: 17628 - DNA, 120 bp, synthetic construct
  misc_feature 1..120: note = Artificially Synthesized Probe
  source 1..120: mol_type = other DNA
agatttagttaaggtaaggtcatgctggattagggtaggactttattccagcgactggtgtccttgtgagagaaaacagagcggggtttcagtcgcaaacacagaggagaacatcgtgag

SEQ ID NO: 17629 - DNA, 120 bp, synthetic construct
  misc_feature 1..120: note = Artificially Synthesized Probe
  source 1..120: mol_type = other DNA
agagggtagagaggatagagagggtagagaggatagagagggtagagaggataagagatttttctttacctggcaaagtcctcatgggacttctgagcaggcatatcagaaaataccaga

SEQ ID NO: 17630 - DNA, 120 bp, synthetic construct
  misc_feature 1..120: note = Artificially Synthesized Probe
  source 1..120: mol_type = other DNA
agggagcccttgactatctgggaaggagctgaaaatggatctgaagttagcacaaatgacacaagaaaaaataaaaactcgaagagttctgtaaccttgaaagagattgaaccagaagtt

SEQ ID NO: 17631 - DNA, 120 bp, synthetic construct
  misc_feature 1..120: note = Artificially Synthesized Probe
  source 1..120: mol_type = other DNA
catgaagtgacatcagtgaaactacctaggaataaatctaaaaaaggttttgcagaagctctttgtggagatacttaaaaaaccagtttgaaagagaaatgtaggcagggcgcagtggct

SEQ ID NO: 17632 - DNA, 120 bp, synthetic construct
  misc_feature 1..120: note = Artificially Synthesized Probe
  source 1..120: mol_type = other DNA
agaagaaaaagaaagaaaatgcatatggaaatgtaaagagccaacgattgctcaaataatcctgaagagataaaaggtgggtgggttgggggtgaaggggagaaatattcagaggtaatg

SEQ ID NO: 17633 - DNA, 120 bp, synthetic construct
  misc_feature 1..120: note = Artificially Synthesized Probe
  source 1..120: mol_type = other DNA
atgaaagacaaactttaaactcctggaaaataagattgggaaacagctttacaaactcttgggagaagataatttcttaaataagacagaaaaatcacaaactctgaaggaaagtttgat

SEQ ID NO: 17634 - DNA, 120 bp, synthetic construct
  misc_feature 1..120: note = Artificially Synthesized Probe
  source 1..120: mol_type = other DNA
gtctcggcctccacgtggtagagctgaacacttgcctcctagtgatctagcagctgctctcctaacacctacactcagacatcaggagaatacgcaggagtgctcagagttcctctgttt

SEQ ID NO: 17635 - DNA, 120 bp, synthetic construct
  misc_feature 1..120: note = Artificially Synthesized Probe
  source 1..120: mol_type = other DNA
aatacatgcatgatgtatgtttattctgaaatgcacgtggacccacaggctttggatagcgactaagaagctgtctatcatatgatagagtcctacacaggtgggaaaatgaataaacga

SEQ ID NO: 17636 - DNA, 120 bp, synthetic construct
  misc_feature 1..120: note = Artificially Synthesized Probe
  source 1..120: mol_type = other DNA
cacccagaagtggggtgaggagagcagaacgacccgataaaattatttatgcaaatatttaaccacaggcactgcagcaatgcaaaagtaacatcgaggggcccatgaaatgttagctgc

SEQ ID NO: 17637 - DNA, 120 bp, synthetic construct
  misc_feature 1..120: note = Artificially Synthesized Probe
  source 1..120: mol_type = other DNA
agtgaagggcagggcttgagcctgggatggcgctttttaacagggccacgtgtctttctacataaaaaaagccccctgtcatgccaaatcttaaagtaaacatgcctcttctggaagatg

SEQ ID NO: 17638 - DNA, 120 bp, synthetic construct
  misc_feature 1..120: note = Artificially Synthesized Probe
  source 1..120: mol_type = other DNA
ggaggaaggaggaagcacaaatttaaatgacccttctagaacaacctattattcccccccctccttggggtaaaaagatggcatgaagtaccctcagttaagaatcctggggaaagataa

SEQ ID NO: 17639 - DNA, 120 bp, synthetic construct
  misc_feature 1..120: note = Artificially Synthesized Probe
  source 1..120: mol_type = other DNA
accaacagcaatatgtgccttttcaggtctgggaagaatgtggctccggggtctgggtactgcagattgcccaggtcacgtaccctaggtcctaggggaattttaacagatgaactggtt

SEQ ID NO: 17640 - DNA, 120 bp, synthetic construct
  misc_feature 1..120: note = Artificially Synthesized Probe
  source 1..120: mol_type = other DNA
cactgcccgccatgtccgattcctgctgcctttgccagataaaggtaaatgtgccagctgctcttgtgggaaatcggaatctgaccctaatttgcaagagatttttctttttctttgttt

SEQ ID NO: 17641 - DNA, 120 bp, synthetic construct
  misc_feature 1..120: note = Artificially Synthesized Probe
  source 1..120: mol_type = other DNA
aaacctcattccagcggctataaataacccttacaacacagtccccaggaactctctggaaagatgtggcacggttttgaataacgagataatggaaacacaaacccatgctaattaatt

SEQ ID NO: 17642 - DNA, 120 bp, synthetic construct
  misc_feature 1..120: note = Artificially Synthesized Probe
  source 1..120: mol_type = other DNA
acattacatgtatttgaccacaatgaaaagaaaacagttatgggaccaatgggagctttggtgcccctaaaattccatcagcattgcctgttcttaggcttgttcacctcttaatacgag

SEQ ID NO: 17643 - DNA, 120 bp, synthetic construct
  misc_feature 1..120: note = Artificially Synthesized Probe
  source 1..120: mol_type = other DNA
aaatctttctgagctcaaaactctctgaatttgaaaaacaaatggtcctttgaagaacactgcttccatatggaactatggggcacggtgatcagaagagctccagcctctttaaaaacc

SEQ ID NO: 17644 - DNA, 120 bp, synthetic construct
  misc_feature 1..120: note = Artificially Synthesized Probe
  source 1..120: mol_type = other DNA
atgcgtgcatacatattcttgggggtgttttgccttctttgtacaattacgaatatctttagatccatgcatactttctgatggaacttcatccctgaagtatgcatactgtacaggcaa

SEQ ID NO: 17645 - DNA, 120 bp, synthetic construct
  misc_feature 1..120: note = Artificially Synthesized Probe
  source 1..120: mol_type = other DNA
tgtgtgccatggagtcacatgctggtttgcacagcaggtgtgtctttcatattagtgggcaatgactactgttttctaaagaggttgcaagatttgggactttttttcatgtttttcttt

SEQ ID NO: 17646 - DNA, 120 bp, synthetic construct
  misc_feature 1..120: note = Artificially Synthesized Probe
  source 1..120: mol_type = other DNA
agaggccaggaagggcctcctggagcctctggagggagcgctgccctgctgacaccctgacctttgtcttccagcatccaatgacacagtaaaagtttgctgttttaagccagacagtct

SEQ ID NO: 17647 - DNA, 120 bp, synthetic construct
  misc_feature 1..120: note = Artificially Synthesized Probe
  source 1..120: mol_type = other DNA
gctttaatgggttaactggaaaggcaaaaggaaggaaagaagagaagcctgcttagattggattccccccatgcacagaacccattcgtggacatgccatctgcaatgcttcatggaaga

SEQ ID NO: 17648 - DNA, 120 bp, synthetic construct
  misc_feature 1..120: note = Artificially Synthesized Probe
  source 1..120: mol_type = other DNA
acatgagattgccattcttgtaggttgataagagttcaatatttgctagtttgacatgatgcaactgaacggaccccacggccgactgctccttgctccgataagtagctactgagctga

SEQ ID NO: 17649 - DNA, 120 bp, synthetic construct
  misc_feature 1..120: note = Artificially Synthesized Probe
  source 1..120: mol_type = other DNA
catgtacatgcatgttaaaaccctttaaaaatgtaaaaatcttcctcagaaactcagtcatggatggaatgtggcccccaggccagagttcacccagccctgccataaaagaaagaaacg

SEQ ID NO: 17650 - DNA, 120 bp, synthetic construct
  misc_feature 1..120: note = Artificially Synthesized Probe
  source 1..120: mol_type = other DNA
gaaatgtttgattctgatgtgattcgtgcaggggtgatttcagaaggtcagaatgaacccactgagagggaaaagtctttgaacaaaaggacaaaagtctccagagttaaccgccattta

SEQ ID NO: 17651 - DNA, 120 bp, synthetic construct
  misc_feature 1..120: note = Artificially Synthesized Probe
  source 1..120: mol_type = other DNA
ccccagcccagcctgtgacactctaaggacttcctgagggttcatcatttcagcctgacaaccacccttgggttagattcttattgctcgctgtaattaattactacaaatttagtggct

SEQ ID NO: 17652 - DNA, 120 bp, synthetic construct
  misc_feature 1..120: note = Artificially Synthesized Probe
  source 1..120: mol_type = other DNA
ccggggcctcatcagaacaaaaatgtaattgttttgtgccttttagaaacctcctgagttgggagaaatggagattttggtggctgtccatgaagtacttaattaagcagaacaggtaat

SEQ ID NO: 17653 - DNA, 120 bp, synthetic construct
  misc_feature 1..120: note = Artificially Synthesized Probe
  source 1..120: mol_type = other DNA
acttctagtctccaaataaatgcttgtttaagccccctggtctgtcgaaccttattacagcaacccaaactgaataagacatgtggggtccggtatgacgtaatatctgtgtgaccacaa

SEQ ID NO: 17654 - DNA, 120 bp, synthetic construct
  misc_feature 1..120: note = Artificially Synthesized Probe
  source 1..120: mol_type = other DNA
acaagaacagctggtcaaccactcctcggctccttctagaaccatccaaacccagcaggatgtccaatggaatggacgtctccaatccaacacagcaccgcaacttcccctgcctgccaa

SEQ ID NO: 17655 - DNA, 120 bp, synthetic construct
  misc_feature 1..120: note = Artificially Synthesized Probe
  source 1..120: mol_type = other DNA
actgcacagctattgcttatgctccacgcaccatttgcccttttggaggatcatcgttatttattcatttctttctggcctggctcctgcctctgtcccatcatgcagccagatgcaccc

SEQ ID NO: 17656 - DNA, 120 bp, synthetic construct
  misc_feature 1..120: note = Artificially Synthesized Probe
  source 1..120: mol_type = other DNA
ggaacaaccatcccctcctgcctgagccaggattcacccccagacatccctcagaatccatttccatctttccaaagagatgctcccatggccacaaccttcttcaaaaaaaaaaaaaag

SEQ ID NO: 17657 - DNA, 120 bp, synthetic construct
  misc_feature 1..120: note = Artificially Synthesized Probe
  source 1..120: mol_type = other DNA
cctcaggtttggtgatttgtgggaaagactcgtagaactcactaaaagcacctatgctcacagttatggtttattacagcaaagggatccaggctgagatcaggcaaggacaggcaggcg

SEQ ID NO: 17658 - DNA, 120 bp, synthetic construct
  misc_feature 1..120: note = Artificially Synthesized Probe
  source 1..120: mol_type = other DNA
ctgggcccatttaggaagacatgttttctggtccactcaatgcctcatcctctttgcaaacatttcaaacgttttcttttacatggcttctagatatcacttagcatgcactctatattt

SEQ ID NO: 17659 - DNA, 120 bp, synthetic construct
  misc_feature 1..120: note = Artificially Synthesized Probe
  source 1..120: mol_type = other DNA
gactttgtccctgaagtgtctcctctcacagctcgctctagcactaaaggttcctgtttttgaggtttgtgatattagagttgttccccaaaattccgattttcctccttcttgggcaca

SEQ ID NO: 17660 - DNA, 120 bp, synthetic construct
  misc_feature 1..120: note = Artificially Synthesized Probe
  source 1..120: mol_type = other DNA
tcgcaaagtaagcatagtcactactaagcagtgccttaatatatcaagagctcttttccccggggcctccttcagtccttatagtagctctgaaatgtcctgcaacagctccctattttg

SEQ ID NO: 17661 - DNA, 120 bp, synthetic construct
  misc_feature 1..120: note = Artificially Synthesized Probe
  source 1..120: mol_type = other DNA
tgtgttctgcacaaagacaggatgtacttggggagaggctgtaccattgttgtgagcggaagagaaattaattttaagcctggagttgattccagcctgggagggaaacgccaacacttg

SEQ ID NO: 17662 - DNA, 120 bp, synthetic construct
  misc_feature 1..120: note = Artificially Synthesized Probe
  source 1..120: mol_type = other DNA
gacaaagtggcatctctaggcctctggaaattgtgtgtgatttcaagcaaagagacggtagtggttgaattttgtccccctaaaatccacgtctatgtagaacctcagagtgtgaccttc

SEQ ID NO: 17663 - DNA, 120 bp, synthetic construct
  misc_feature 1..120: note = Artificially Synthesized Probe
  source 1..120: mol_type = other DNA
gctgacttttctaaagcaaataaggtccaggttgcctaaaacaggggagggtagcctaaggctctcccagactcatgacaacttagaattgtacaagtggcacatttagctagaatctgg

SEQ ID NO: 17664 - DNA, 120 bp, synthetic construct
  misc_feature 1..120: note = Artificially Synthesized Probe
  source 1..120: mol_type = other DNA
aggacaatggaaaggttcactctgttctgggaaacgcttcatttagacgctaaacattagaatgcgatttgtccttcaatcagggaagagtggactgagcggacatttttgtttttgttt

SEQ ID NO: 17665 - DNA, 120 bp, synthetic construct
  misc_feature 1..120: note = Artificially Synthesized Probe
  source 1..120: mol_type = other DNA
tatataaataacactgagttgaatatacaaaaatcctgagttcataatgacatactggtgaggaagagagagacagaccagggcagagaagacacagggagagtgaaaaagaccctactt

SEQ ID NO: 17666 - DNA, 120 bp, synthetic construct
  misc_feature 1..120: note = Artificially Synthesized Probe
  source 1..120: mol_type = other DNA
aaggggaagagggagtgacgcgatgcctgggatttgctgaagaaaaaaaaaagaataaaaaggtccgtctgtatatggatggcaagaatttcttggtaacaaaagcacagccaataaaag

SEQ ID NO: 17667 - DNA, 120 bp, synthetic construct
  misc_feature 1..120: note = Artificially Synthesized Probe
  source 1..120: mol_type = other DNA
tgtggaacatggcatggctgctcctcaaaaccttaaacacagaacgagcacgtgagccagcaatgccacttctgcatctatgcccgaaggcattgacagcggggtcttgaagagatatct

SEQ ID NO: 17668 - DNA, 120 bp, synthetic construct
  misc_feature 1..120: note = Artificially Synthesized Probe
  source 1..120: mol_type = other DNA
agtgtgtgagcatatgaatatgtgtgagcacgtgtgagcatctgtgtatgtgtaagcacgtgtgtgaacatatgtacgaggatgcatgagaatgtgtgaatatgtgtgagcatgtgtgaa

SEQ ID NO: 17669 - DNA, 120 bp, synthetic construct
  misc_feature 1..120: note = Artificially Synthesized Probe
  source 1..120: mol_type = other DNA
agaacttgtgtatttataagaatgtatgtaagcatgtgtgaacatgtgtgtgcacatggtagcatgtgtgcaagtgtgtgtgaacatgtgtaccgtttcctggggttgtcacgacaaatc

SEQ ID NO: 17670 - DNA, 120 bp, synthetic construct
  misc_feature 1..120: note = Artificially Synthesized Probe
  source 1..120: mol_type = other DNA
tgagctgtgaggcacacagcaatttggggctaattttctcctgcaaagaagttgatcccataatctggcaaatacactaatcgtcactgcactgctcagagcaggagcttagagctacag

SEQ ID NO: 17671 - DNA, 120 bp, synthetic construct
  misc_feature 1..120: note = Artificially Synthesized Probe
  source 1..120: mol_type = other DNA
gccagtttggggtggaagtgggctccgcaagtgcctgaaagggagtctcagtccatcaggcctttgctcagggtgccgtagcaaaatgccacaaactggtggcttctagacaacagaaat

SEQ ID NO: 17672 - DNA, 120 bp, synthetic construct
  misc_feature 1..120: note = Artificially Synthesized Probe
  source 1..120: mol_type = other DNA
agctagtgcagtgggctgagtggtgtctcccagaaagatgtgcccaggtcctaatctccggaactgagaatgggatcttatttggaaagagtcctcacagacataattaagttaaggacc

SEQ ID NO: 17673 - DNA, 120 bp, synthetic construct
  misc_feature 1..120: note = Artificially Synthesized Probe
  source 1..120: mol_type = other DNA
tgaggcctgaaggttcagacagctaaaacatgggctggctactgcctggcatccctccctgatgaaaaataacaatagatcgtgtacagaatttttaaaattctaagtattttttttttc

SEQ ID NO: 17674 - DNA, 120 bp, synthetic construct
  misc_feature 1..120: note = Artificially Synthesized Probe
  source 1..120: mol_type = other DNA
acctcaaaccatcctgcctagctactggcaattaggctgcctttgagataaattttctcgcctaaaaatgcccatgggtcttaaaactttgattttccgttcgattcaaatttaaatcca

SEQ ID NO: 17675 - DNA, 120 bp, synthetic construct
  misc_feature 1..120: note = Artificially Synthesized Probe
  source 1..120: mol_type = other DNA
ccaacgggttaccttggaggaaggcttatcttgaaggattatcacattggtgtggagctttccagaacttttgcataacatttatgttcccttggaaaatgtggagtacagagaatacat

SEQ ID NO: 17676 - DNA, 120 bp, synthetic construct
  misc_feature 1..120: note = Artificially Synthesized Probe
  source 1..120: mol_type = other DNA
gttatcactggtcctgtttcagagctaaggaaacatgctgggacttgccccagatttaacaggaaagcccaactattcaaaagttaaacaacaaaaagtgaagaacattgcttttttaaa

SEQ ID NO: 17677 - DNA, 120 bp, synthetic construct
  misc_feature 1..120: note = Artificially Synthesized Probe
  source 1..120: mol_type = other DNA
actgaacaacaaatcagtccactgtaatcagaaggctcatcgaaaaacactctggaaaaattaactgacaacaaaaaatgtcttcccggaaaagatgaggctgggcccaatacaggaatt

SEQ ID NO: 17678 - DNA, 120 bp, synthetic construct
  misc_feature 1..120: note = Artificially Synthesized Probe
  source 1..120: mol_type = other DNA
aactgacactaatgccatctccttcctcacactgctgagcgtggaaggggaccctggcatacagtaagtgctcaagaagtggcagaggtcattattgaaacagtccttgttattgttccc

SEQ ID NO: 17679 - DNA, 120 bp, synthetic construct
  misc_feature 1..120: note = Artificially Synthesized Probe
  source 1..120: mol_type = other DNA
ctaacttaaagcacaaagcaatatcttttggtagccccaacttttatcatctgtatgtagaagtaagcccccagttttccttcaagtcttgcctgtgcataacttttgttccttccggct

SEQ ID NO: 17680 - DNA, 120 bp, synthetic construct
  misc_feature 1..120: note = Artificially Synthesized Probe
  source 1..120: mol_type = other DNA
gacaaaatgtattactaacagacacatataaagaagtaaaattccacaaagataagccttgttatgcggacactgtctcctggtggcagcatccctggttttttctttggcttctctgca

SEQ ID NO: 17681 - DNA, 120 bp, synthetic construct
  misc_feature 1..120: note = Artificially Synthesized Probe
  source 1..120: mol_type = other DNA
cacacacaccctaattcccagggctgacaaactccatcaattaaaagatcctgtggggcacttagcacagggccttcctccagttcatttgccagtctaaccacttgtatcatgaaactc

SEQ ID NO: 17682 - DNA, 120 bp, synthetic construct
  misc_feature 1..120: note = Artificially Synthesized Probe
  source 1..120: mol_type = other DNA
acagcatccacacacagaaaaagatggctgttaagattacatcccaatgatctgggacttacctggagcatcagacagacacagtgcaaaagaaacaagctttggagtcagcttagattc

SEQ ID NO: 17683 - DNA, 120 bp, synthetic construct
  misc_feature 1..120: note = Artificially Synthesized Probe
  source 1..120: mol_type = other DNA
tgggaggcagaatgtatgcttcagaaatgaatgagtgaagcttcagaagtaatttttacaattgccaccatttgttgagaactcatgatgccagaaactgctacatgcttcacacacact

SEQ ID NO: 17684 - DNA, 120 bp, synthetic construct
  misc_feature 1..120: note = Artificially Synthesized Probe
  source 1..120: mol_type = other DNA
gtccgacgtacttggcacatggtgggtgtgccctgtgactgctacatgcttcaaataatagtggtaacaaacatcagtcattattataatattattatccccgtttgttcaactaatagc

SEQ ID NO: 17685 - DNA, 120 bp, synthetic construct
  misc_feature 1..120: note = Artificially Synthesized Probe
  source 1..120: mol_type = other DNA
gcgagctctaacaactgttcttcacaccagcttggttgcaaagtcaaacatgctagaggccacctcacatttctcaagtcccattttaaaataccagcccaagaaacatatatatttttt

SEQ ID NO: 17686 - DNA, 120 bp, synthetic construct
  misc_feature 1..120: note = Artificially Synthesized Probe
  source 1..120: mol_type = other DNA
atgaaggatactgccacctgctttaactgcaagggaaaacctatttgcagaaattaacacaaaaatgagattggccacttcagggccaagaaaacaatcacaaaaaccataggcgtcatc

SEQ ID NO: 17687 - DNA, 120 bp, synthetic construct
  misc_feature 1..120: note = Artificially Synthesized Probe
  source 1..120: mol_type = other DNA
gctcttgttacatactaccacattgattgtgaaaacatttatggcaacttaggctttcccccagcaacacatgagtgctgtcaccagcaaggagtatagtcacaaaaaagtatttgctaa

SEQ ID NO: 17688 - DNA, 120 bp, synthetic construct
  misc_feature 1..120: note = Artificially Synthesized Probe
  source 1..120: mol_type = other DNA
taataagggccatctcaaagagacagcagacaaagtcttcagcaaactcttatggcaggctcactctcctttgaaactctctggtctcagcttcctgacaagctctaatcattatgaaaa

SEQ ID NO: 17689 - DNA, 120 bp, synthetic construct
  misc_feature 1..120: note = Artificially Synthesized Probe
  source 1..120: mol_type = other DNA
catttttaaagagaaaataaaaatctgtcacactttcgaggttctttcaaaatagcagagagaaaggaaggcttgccaagggctgcttggggtaaggaagacagaatgcctgcattttgg

SEQ ID NO: 17690 - DNA, 120 bp, synthetic construct
  misc_feature 1..120: note = Artificially Synthesized Probe
  source 1..120: mol_type = other DNA
gtttctcttattgatgaggttatccaggaaacagtccaatgagctgaacaacgggggttgttcttgcatctgcagccctcttttattattgaaaatcaagaaccaagagtgacctatttc

SEQ ID NO: 17691 - DNA, 120 bp, synthetic construct
  misc_feature 1..120: note = Artificially Synthesized Probe
  source 1..120: mol_type = other DNA
caacctgtaacattcttttcttcttcctacttccaaagagtcacatgttcctttgcataacaagattaaaactgaacacctaaactcacaaaaaggcgaggtgatcagatgtactggggc

SEQ ID NO: 17692 - DNA, 120 bp, synthetic construct
  misc_feature 1..120: note = Artificially Synthesized Probe
  source 1..120: mol_type = other DNA
cgcctgtcattttctttaaaagcatcagtgactaaacattttcggttctaaaaatggaaaagttcctcccctgccacacagagctacagaaacaccacactaaaccacttgccaaattta

SEQ ID NO: 17693 - DNA, 120 bp, synthetic construct
  misc_feature 1..120: note = Artificially Synthesized Probe
  source 1..120: mol_type = other DNA
agtctggctcaactagaacacaaaatactgaccaccccatcatttaaaaacaaaaggtaggaggggcaggagggagagagaacccattcagaacaacatcatctacagaaaattaaaaac

SEQ ID NO: 17694 - DNA, 120 bp, synthetic construct
  misc_feature 1..120: note = Artificially Synthesized Probe
  source 1..120: mol_type = other DNA
gtcccgaccacacgcatcttccagggaagcccgggaaaatcagccagaggagaaatgaggcagcagttttgttttgcttttccttgaagggggtttaaaataaaatcaaatcctatctgc

SEQ ID NO: 17695 - DNA, 120 bp, synthetic construct
  misc_feature 1..120: note = Artificially Synthesized Probe
  source 1..120: mol_type = other DNA
ccagccggaaaaagctgcagatgggtcatgaggaacccaccaggcccccgtcgcacaggggcagtcccagggatgcaaatttcaaacaaggccatgtgctgacggactcttggtcccaga

SEQ ID NO: 17696 - DNA, 120 bp, synthetic construct
  misc_feature 1..120: note = Artificially Synthesized Probe
  source 1..120: mol_type = other DNA
catggttattgtgacctttagaaaatgatggggctctctaaacctcagtttccctgcacagcaagagtgggtaagaacaaacctacaggcctcttgggatcaccatggggtcagatgagg

SEQ ID NO: 17697 - DNA, 120 bp, synthetic construct
  misc_feature 1..120: note = Artificially Synthesized Probe
  source 1..120: mol_type = other DNA
ggacccccttcctcctacagggacccctctgatctcgacatccagggctaaaaccttttcagtgattcctaatgcacccaagaacttagttttttaaaattagagacggggttttgctct

SEQ ID NO: 17698 - DNA, 120 bp, synthetic construct
  misc_feature 1..120: note = Artificially Synthesized Probe
  source 1..120: mol_type = other DNA
aagtcagagaggaaacagaaaaggcagccccaggcccttagaaactttcaatgttttggggaattcatgaaaagcaatgggacactctagaagagacattccttgaaaggagctgcagtc

SEQ ID NO: 17699 - DNA, 120 bp, synthetic construct
  misc_feature 1..120: note = Artificially Synthesized Probe
  source 1..120: mol_type = other DNA
gtaagcaaatgccatgccctgatcctctgagtatctccatgcaacacaacattgacccgtgcttattgattgaacaaaaaatgtaatccagcggcgcactccccaaatgttttctgagct

SEQ ID NO: 17700 - DNA, 120 bp, synthetic construct
  misc_feature 1..120: note = Artificially Synthesized Probe
  source 1..120: mol_type = other DNA
tggtgtggtcagttgaatggtgactcaacccacccaaaaaaatgtgtccaattcctaacccccagcgtctgtgaaagtgacgacacttggaatttgggtctttgcaggtataattagtta

SEQ ID NO: 17701 - DNA, 120 bp, synthetic construct
  misc_feature 1..120: note = Artificially Synthesized Probe
  source 1..120: mol_type = other DNA
gcttttcctggcgttctttccggtgaggcccgaatccttctggaatgactcagggtcaacttgcacctgtgccaggaacttccatccaatgatcatgcttccatctgaacaatgcacaag

SEQ ID NO: 17702 - DNA, 120 bp, synthetic construct
  misc_feature 1..120: note = Artificially Synthesized Probe
  source 1..120: mol_type = other DNA
gaacgatcagtgtatcactcacggccaaacaagttcaaaggcggaatgattaaatcacttctgaatgtttttcatggcagaaaggtacattgaacatgggctgtgggtgtgatgtctgat

SEQ ID NO: 17703 - DNA, 120 bp, synthetic construct
  misc_feature 1..120: note = Artificially Synthesized Probe
  source 1..120: mol_type = other DNA
agaaacaataatgtacaaagaacttgattcaaattaaattgtctcattactttgtaataaatcacccacaagcatttcctgagcactaccaggcatgttacctgccaggaacggctggcg

SEQ ID NO: 17704 - DNA, 120 bp, synthetic construct
  misc_feature 1..120: note = Artificially Synthesized Probe
  source 1..120: mol_type = other DNA
ctctattctgagcccactgaaaagtctcctctgaattcactctttatgtaaaaaccttaaatcacactgtatctcccccacttaaaacaccccaacagatccccaccatacttttctttt

SEQ ID NO: 17705 - DNA, 120 bp, synthetic construct
  misc_feature 1..120: note = Artificially Synthesized Probe
  source 1..120: mol_type = other DNA
ctttaaaaaaaaaaaaaaatcaggggaacagtacaactgcctggcattttgctgtgagtgcaggaagggactgttgatgacttttccttcattcgttaattaaaatgacaggccaagcct

SEQ ID NO: 17706 - DNA, 120 bp, synthetic construct
  misc_feature 1..120: note = Artificially Synthesized Probe
  source 1..120: mol_type = other DNA
ccactgaaaagtttgcttctcttccaagtgctgatgcttcattaagagactggtgtcaccagaggggcagttgtaaaaacagttaaaagtaggaggctcatataatttggctatctgtcc

SEQ ID NO: 17707 - DNA, 120 bp, synthetic construct
  misc_feature 1..120: note = Artificially Synthesized Probe
  source 1..120: mol_type = other DNA
cgttttagaaatgagatcatctgtgagatgcctgagaggttcagaaggatcacatggggagtactttctggaaaacaaagaaacacctctttactttgtctaggtttttatgctctggtt

SEQ ID NO: 17708 - DNA, 120 bp, synthetic construct
  misc_feature 1..120: note = Artificially Synthesized Probe
  source 1..120: mol_type = other DNA
ccacacctaaaaatgggtgcaggaacatctggataaacgtttacagttcacaccccatgctggttatggctgtgttttatgattcccatctcaatgaactggcaatgtgtcagaagacaa

SEQ ID NO: 17709 - DNA, 120 bp, synthetic construct
  misc_feature 1..120: note = Artificially Synthesized Probe
  source 1..120: mol_type = other DNA
tattcaactgtccagagaagatctagtcacaacccctcatctcaaatgaactttggttcagaaaacagaactaaggaaaagtggtttccttggactcaaccggtctgaatttcccactaa

SEQ ID NO: 17710 - DNA, 120 bp, synthetic construct
  misc_feature 1..120: note = Artificially Synthesized Probe
  source 1..120: mol_type = other DNA
tgcaccaattttcccaggtcttcagccccagccagtttctcactttaaatcttccccattctccaggacttcctgatttccttctcattttccttcttgttcttttgttgtgttgttgtt

SEQ ID NO: 17711 - DNA, 120 bp, synthetic construct
  misc_feature 1..120: note = Artificially Synthesized Probe
  source 1..120: mol_type = other DNA
attctctctctcacacaacacactgtggagggaggcaccattttctttcccattttacaaacaaggaagctgcggctcagaaaggtccagtgaggagctcaaggtcacacagctggcaaa

SEQ ID NO: 17712 - DNA, 120 bp, synthetic construct
  misc_feature 1..120: note = Artificially Synthesized Probe
  source 1..120: mol_type = other DNA
tctcaacctcttcagtctatgcattgaatgcttgcaagcactctgtgagtgtcctgtgacggctgtaacaacgtaacacaaacttggcagctagacacatttagcctcttacagttctgg

SEQ ID NO: 17713 - DNA, 120 bp, synthetic construct
  misc_feature 1..120: note = Artificially Synthesized Probe
  source 1..120: mol_type = other DNA
gaagtccaagcccatcatttgatgctgccaaatttccgccagcctcagcggtaaccttctctggcaaggttaaagggtctatcagattcccggcccagaaactaattagataaagaggaa

SEQ ID NO: 17714 - DNA, 120 bp, synthetic construct
  misc_feature 1..120: note = Artificially Synthesized Probe
  source 1..120: mol_type = other DNA
accagagctctaggttttagcaacagaaaccacctccagagatcttgaacactgtggggttctgcacgggcttcaggtcaaagatgtggaggggcggacatcaccgggctttataataac

SEQ ID NO: 17715 - DNA, 120 bp, synthetic construct
  misc_feature 1..120: note = Artificially Synthesized Probe
  source 1..120: mol_type = other DNA
agacgctgtctccctgatggcctcagtttccctgctggtctctccaccaggctcaccgctggctcaggatttgacaattaccgctccctccttttttactgaaattttttaattttattt

SEQ ID NO: 17716 - DNA, 120 bp, synthetic construct
  misc_feature 1..120: note = Artificially Synthesized Probe
  source 1..120: mol_type = other DNA
ctggccctggatgcatagttttgaataaatgaatgaaaagagagagagagagacctgggtccctgtccctgctactcactcttcatatccacggcccctctcccagggtcttcactgtcc

SEQ ID NO: 17717 - DNA, 120 bp, synthetic construct
  misc_feature 1..120: note = Artificially Synthesized Probe
  source 1..120: mol_type = other DNA
cagtgtaccctttaggaagaagaagggactccagagatccctcttggctcaaatgcaaaggtgaggataatttgggaaaagaggcaggacaattactttgtgcattttggcagtgggaat

SEQ ID NO: 17718 - DNA, 120 bp, synthetic construct
  misc_feature 1..120: note = Artificially Synthesized Probe
  source 1..120: mol_type = other DNA
tctccttcccatgaagtgaaaatttattgagtgctgacaatgtaccaagtactgcctatagagaggtctgagcacactgcccaactttggtccccacccttaccccaagtcacagattca

SEQ ID NO: 17719 - DNA, 120 bp, synthetic construct
  misc_feature 1..120: note = Artificially Synthesized Probe
  source 1..120: mol_type = other DNA
gcattcattcatggtgaccactggccagtggttatggcagtttcaggcccaatgtgtagaattttatattcacaagagatctcagcaatgatgtaggcattttacaatgtagccatctta

SEQ ID NO: 17720 - DNA, 120 bp, synthetic construct
  misc_feature 1..120: note = Artificially Synthesized Probe
  source 1..120: mol_type = other DNA
caaggtccaaagtccccaagtcaggtgcttgacgtcataaaactgcaaggggaagttggccgtggccaggtcggagcacacctaatttcgtgcacctaatttcgcatcactgagtactgg

SEQ ID NO: 17721 - DNA, 120 bp, synthetic construct
  misc_feature 1..120: note = Artificially Synthesized Probe
  source 1..120: mol_type = other DNA
acctgtgcaactcacttcaagataaacagaccagcacttcaattttcaatttggatcctactacttgtcccataggtatgcatgagaacctatgtctatctttgcttagaacttctggtg

SEQ ID NO: 17722 - DNA, 120 bp, synthetic construct
  misc_feature 1..120: note = Artificially Synthesized Probe
  source 1..120: mol_type = other DNA
tgagagctggagttcaaattggagcagaatgtcagaggactccaacaagaagaggacagattccagtgatacatcagaaaaagaatgatattttagtggtatgctcaagaagccataatt

SEQ ID NO: 17723 - DNA, 120 bp, synthetic construct
  misc_feature 1..120: note = Artificially Synthesized Probe
  source 1..120: mol_type = other DNA
tgtagtttaattaattactttcattacatgcatgcagtacttggatgaaaatttatggagggaggaaaaatgtgaaactgagagttcactgagaatggatgaggggaggggtccctgggg

SEQ ID NO: 17724 - DNA, 120 bp, synthetic construct
  misc_feature 1..120: note = Artificially Synthesized Probe
  source 1..120: mol_type = other DNA
atatataaaaatacaaaataatggcggaggaagaatgagggaaatcaatgtttcttgccattcagttcttacaacctacacactgaggcagtcttctagagcgcagagttagggtttcaa

SEQ ID NO: 17725 - DNA, 120 bp, synthetic construct
  misc_feature 1..120: note = Artificially Synthesized Probe
  source 1..120: mol_type = other DNA
attcgctctctaagagaaaactggttttctctaagggagaacaaaaaacagatgctcagcaccttcttaaaccttttccttgagtggcattaatggacatgttccttttgagcagacctt

SEQ ID NO: 17726 - DNA, 120 bp, synthetic construct
  misc_feature 1..120: note = Artificially Synthesized Probe
  source 1..120: mol_type = other DNA
atttctctggagtatcccatgatgaggctggggatttggttaacgaggagtgggaacttaagattcccattccctgagtggagacatgtttttaaaaatgacattgaaatatctgtaaag

SEQ ID NO: 17727 - DNA, 120 bp, synthetic construct
  misc_feature 1..120: note = Artificially Synthesized Probe
  source 1..120: mol_type = other DNA
agatgaaagacctctggagctggacggtggtgtcggttgcacaacacagtgaatgtcttaataccactagactagtgattcacttaaaaatggtcagaataggaaagtttatattatgtg

SEQ ID NO: 17728 - DNA, 120 bp, synthetic construct
  misc_feature 1..120: note = Artificially Synthesized Probe
  source 1..120: mol_type = other DNA
aacaggtgttcagtacacatgtaaaacaaaagcccttgactggacaccaaaacagggatgcagagttggtggggatcttggaggtcatccagtccaatcttctgtgacattctggcaaga

SEQ ID NO: 17729 - DNA, 120 bp, synthetic construct
  misc_feature 1..120: note = Artificially Synthesized Probe
  source 1..120: mol_type = other DNA
gttgggacaggtcagcattataactgagtccaatgagcaattctgctcctaagtgcacacacatacttgcatgcaaatatcaacagcaatcaataccattcacaacaaccaaaaggtgga

SEQ ID NO: 17730 - DNA, 120 bp, synthetic construct
  misc_feature 1..120: note = Artificially Synthesized Probe
  source 1..120: mol_type = other DNA
acacacaggtgtggtttctgcagaaaaatccaaccacgtgcctgtgccagtcacattgtcaaagatgcagggctctttccacacatcagacgaactcaaacctgctgtgcttagaagatc

SEQ ID NO: 17731 - DNA, 120 bp, synthetic construct
  misc_feature 1..120: note = Artificially Synthesized Probe
  source 1..120: mol_type = other DNA
attctgccgtggtgctgctgagccttccagcaaaactgaaaacctgcagacaactgccatttgggaaagaaagaacatttattgtcattttcctgattatagttcctttctcctaaaaaa

SEQ ID NO: 17732 - DNA, 120 bp, synthetic construct
  misc_feature 1..120: note = Artificially Synthesized Probe
  source 1..120: mol_type = other DNA
gactcttacgtaagcaagagtttcatttctaccacattaggctgcagcctcggattaatttgacacagtggctaagtctttcacatggaagctcccagctgtctccaccccttccacact

SEQ ID NO: 17733 - DNA, 120 bp, synthetic construct
  misc_feature 1..120: note = Artificially Synthesized Probe
  source 1..120: mol_type = other DNA
taaaggaaccatttctaggctaggtaaggtagccagtgtgtcccagactggagtttcatggaccaacaaaactttaaacaaagagaaaaagggtgtagactaacataacattcaccaagt

SEQ ID NO: 17734 - DNA, 120 bp, synthetic construct
  misc_feature 1..120: note = Artificially Synthesized Probe
  source 1..120: mol_type = other DNA
cttccctgtctcctggttcccagaaacagttatacttgggctctgggatatggtccctaagggacaggaaagggaccctaagggacaagatcattatcaccatcaccactcccatcatca

SEQ ID NO: 17735 - DNA, 120 bp, synthetic construct
  misc_feature 1..120: note = Artificially Synthesized Probe
  source 1..120: mol_type = other DNA
ccctccttaaaggggaaggattgaggaatcaatacatgtaaggcactagaatggtgcatggcatgttgaaagtgctatgtaatgttaactaatgctgtcgtggtcatacattagattaga

SEQ ID NO: 17736 - DNA, 120 bp, synthetic construct
  misc_feature 1..120: note = Artificially Synthesized Probe
  source 1..120: mol_type = other DNA
cctggacacagccatgcctggcttctcacttgtacaaactaaatgcatatccttggtggtataaaaaaacttggctttctgttgtttacaatggaaagaactaggaatgatgcagtaatg

SEQ ID NO: 17737 - DNA, 120 bp, synthetic construct
  misc_feature 1..120: note = Artificially Synthesized Probe
  source 1..120: mol_type = other DNA
tggtggttctattagtctgggtcctcaagtcaccccctgttgatgtatgatgggcataaggtgtgaatgagaaagaaacttttgttgttccaaaccacagagattggggaattttttatt

SEQ ID NO: 17738 - DNA, 120 bp, synthetic construct
  misc_feature 1..120: note = Artificially Synthesized Probe
  source 1..120: mol_type = other DNA
agagacaatagaatgagcttttaaaaaatgtaaatcaggtgattttcaactctgctgcttaacgttttccaacagcttcccaatgcaaccagagtcacgttcaagctgccttctatggca

SEQ ID NO: 17739 - DNA, 120 bp, synthetic construct
  misc_feature 1..120: note = Artificially Synthesized Probe
  source 1..120: mol_type = other DNA
aggaaataagaggatttttctcaaagaaatttactaagacactgaaaggccaaaagctaatctttaaggatgggttgggaggaggtgggctatagaactaagagatagaaggtggggcaa

SEQ ID NO: 17740 - DNA, 120 bp, synthetic construct
  misc_feature 1..120: note = Artificially Synthesized Probe
  source 1..120: mol_type = other DNA
tttcttcatgcaacccagctcaggcaagctttgtatttcttgcaatgggaggagtgccatctttcagtctgtctgtcaagctgggtggaacctgttatacccaagacgtcatctcaggtc

SEQ ID NO: 17741 - DNA, 120 bp, synthetic construct
  misc_feature 1..120: note = Artificially Synthesized Probe
  source 1..120: mol_type = other DNA
ataatatactgagctttttcattcttttccccaagtgctacgtcccaaatttacttttgtaaattgacaataagcacagatgccacgggagagtgggaagatgatgccatgcgtcctgaa

SEQ ID NO: 17742 - DNA, 120 bp, synthetic construct
  misc_feature 1..120: note = Artificially Synthesized Probe
  source 1..120: mol_type = other DNA
attcagaggccaggaaagggtggggcagcagaagaggttttctaggcgctctcccagatcaaaacccaccaccacctttgcactgaaaacccctgtcctgagatgaacgcgattttaggg

SEQ ID NO: 17743 - DNA, 120 bp, synthetic construct
  misc_feature 1..120: note = Artificially Synthesized Probe
  source 1..120: mol_type = other DNA
gcagcacaggaaacggagggaactggggctgcaggttccttcacagatcttttttttcttttcctgaagatttatctgcaatctcacccaagacagagattgaaaaagagagagagagag

SEQ ID NO: 17744 - DNA, 120 bp, synthetic construct
  misc_feature 1..120: note = Artificially Synthesized Probe
  source 1..120: mol_type = other DNA
caactgagaggcacagagctttgatttgaaaagcaacacgtatcacaaaaatgccgccaactggctcggctcacttgttccttttctcaatcagcagcagatcattcatcaagcaccttc

SEQ ID NO: 17745 - DNA, 120 bp, synthetic construct
  misc_feature 1..120: note = Artificially Synthesized Probe
  source 1..120: mol_type = other DNA
ggcacagttggtttttcttagtcatctcaggaaattgttggttgtactgcaagatgagtgaagcaccttaagaagaacacgggttacagtactgacttgccactttacgaagcagtcttt

SEQ ID NO: 17746 - DNA, 120 bp, synthetic construct
  misc_feature 1..120: note = Artificially Synthesized Probe
  source 1..120: mol_type = other DNA
caccatgtgatcttgatctgtccttttccaccatccgtcatgccttgccgtgtgccacacacaccatttaagtgtaaaacacactctcttctgaatgctcccagcaacactacaagaaaa

SEQ ID NO: 17747 - DNA, 120 bp, synthetic construct
  misc_feature 1..120: note = Artificially Synthesized Probe
  source 1..120: mol_type = other DNA
acccagccccacctataacatttttgaaaggataaatctcagaggtgagtggtgccctgtagataatattttttacaatgctacacttgagaattatccgggaatgtgggaaaaacctgg

SEQ ID NO: 17748 - DNA, 120 bp, synthetic construct
  misc_feature 1..120: note = Artificially Synthesized Probe
  source 1..120: mol_type = other DNA
ctggatttaaatctaggaatgggtgggggcgggaggattctttttagctttataatcttttttaaggatgccggcagctgaggcttcggaaataggacatctagaaaaaagacctgttga

SEQ ID NO: 17749 - DNA, 120 bp, synthetic construct
  misc_feature 1..120: note = Artificially Synthesized Probe
  source 1..120: mol_type = other DNA
gaacacgccagaaaatgaacaagccacatctgtagccacagcacctcatcatgcaaccgacctccctttgaggttaaccacagtgcttactaggaagagatgtatgaatttgtcttaaaa

SEQ ID NO: 17750 - DNA, 120 bp, synthetic construct
  misc_feature 1..120: note = Artificially Synthesized Probe
  source 1..120: mol_type = other DNA
cagatgaagaagaaagatggctccgggaatgtttcatccatgaggaagttcacaaatttgacttctggggactgaacatccaaatcagctgaaaattcgcttctttgacacaagttgtaa

SEQ ID NO: 17751 - DNA, 120 bp, synthetic construct
  misc_feature 1..120: note = Artificially Synthesized Probe
  source 1..120: mol_type = other DNA
gagcttgggcttgtttccagttatcttgatttgtcagctggggataatcacgaattatcggtaagatggaaatcagggtcatgagaatacaatgaattaaagaagggtgcctggcataca

SEQ ID NO: 17752 - DNA, 120 bp, synthetic construct
  misc_feature 1..120: note = Artificially Synthesized Probe
  source 1..120: mol_type = other DNA
aaacaccgactacctgcacacacgtgcttataaactgtagagtactgtacaaagtgccacggtcatttctgatgtaggggtcatcacctcgtctaactggtttatcacaaaatggatgtg

SEQ ID NO: 17753 - DNA, 120 bp, synthetic construct
  misc_feature 1..120: note = Artificially Synthesized Probe
  source 1..120: mol_type = other DNA
acatacacatctgtacacacatgttggggaggaacagaggagagactgggaattgggaattcttttctttggaaaaataatctcaaggctttctttccctctggaacccaaaggagtcca

SEQ ID NO: 17754 - DNA, 120 bp, synthetic construct
  misc_feature 1..120: note = Artificially Synthesized Probe
  source 1..120: mol_type = other DNA
taaactcttttcgcaagaagcacagcgtgttttgagcacggcttgaatacatacaattcttcaggaatgccaatgacttcaacatcaagggaagaatgtcctttgtttagctgaggcttt

SEQ ID NO: 17755 - DNA, 120 bp, synthetic construct
  misc_feature 1..120: note = Artificially Synthesized Probe
  source 1..120: mol_type = other DNA
taaaaatctcactgttaataatgaataagcctcagttttaacttttctgcctggtccctcatctccttacctttatgggacttttttacaaagcaccgtcagaccccatgtggggctaga

SEQ ID NO: 17756 - DNA, 120 bp, synthetic construct
  misc_feature 1..120: note = Artificially Synthesized Probe
  source 1..120: mol_type = other DNA
taacactataaaatactctatgggtgaaactgtctctcctagacctgaggaagaggatgtagagaggcaatatgggagaagcaaactgaagaaagaaacaagagcaggtgtcctcaaata

SEQ ID NO: 17757 - DNA, 120 bp, synthetic construct
  misc_feature 1..120: note = Artificially Synthesized Probe
  source 1..120: mol_type = other DNA
tttgggggggaaaacacttaagctaaggccattataagactatctttagcgtaaataacatgggcaaaaataagcaccgtacagtgtactaaagggagggatgtttttctactgtgtgga

SEQ ID NO: 17758 - DNA, 120 bp, synthetic construct
  misc_feature 1..120: note = Artificially Synthesized Probe
  source 1..120: mol_type = other DNA
ttcttgtcagcacattgtcggtaactctacgtattttattccctgtcttcatggatgacccggtagacctctgaagacaactgaaagatggtgtacaatgaatgaaaaaatgtgtacaga

SEQ ID NO: 17759 - DNA, 120 bp, synthetic construct
  misc_feature 1..120: note = Artificially Synthesized Probe
  source 1..120: mol_type = other DNA
gccacttgataatttagcaacagttttaccatctacaaaatggagatgacaaatcttgcctctggcacggagcagttgtgagagtcacatgggaaactatgtaaaaatgcattgcgaatt

SEQ ID NO: 17760 - DNA, 120 bp, synthetic construct
  misc_feature 1..120: note = Artificially Synthesized Probe
  source 1..120: mol_type = other DNA
aagttatttacgggctcagcaaaggcatttattgtgtttagtgttctatgctataaatgctttggaaaaggagagtaaatgaatatgcaagcacccagtgtcagggcaagaacaggcagg

SEQ ID NO: 17761 - DNA, 120 bp, synthetic construct
  misc_feature 1..120: note = Artificially Synthesized Probe
  source 1..120: mol_type = other DNA
tgctgtttgaattactgtgttacccccaattcaggtttgctttaaagaaaaacaaaaaaccagttccaaacactttcagtgacactcacaccttctcctacgcatgccctctgatcacgt

SEQ ID NO: 17762 - DNA, 120 bp, synthetic construct
  misc_feature 1..120: note = Artificially Synthesized Probe
  source 1..120: mol_type = other DNA
cttgagccaccgtgcttggcctgcactgtgtactttaaaaatggggatagttctggcgtttgagaatgatatctcaacaaagtgttactaaaaaaaaaaaaaaaaagccgataggtgcct

SEQ ID NO: 17763 - DNA, 120 bp, synthetic construct
  misc_feature 1..120: note = Artificially Synthesized Probe
  source 1..120: mol_type = other DNA
ttaaatcacccaaaaagaaaatctcatacccatgaagcagtcactccatgttatggactaacctgtgtgcccgcaacacacatatgttgaagccccaacgcctaatttgactgtatttgg

SEQ ID NO: 17764 - DNA, 120 bp, synthetic construct
  misc_feature 1..120: note = Artificially Synthesized Probe
  source 1..120: mol_type = other DNA
tgctgctgtgaacatctgtgcacagggacttgtctggacacctgtttttaattctctggggctctcttctttcttgagccctcaaaaccagattcacaccagctaccagcaaggtgcctg

SEQ ID NO: 17765 - DNA, 120 bp, synthetic construct
  misc_feature 1..120: note = Artificially Synthesized Probe
  source 1..120: mol_type = other DNA
ggaagggcatcccaggaaggaggaagaacataagcaaaggcccagaggtgtgaaaaagtttagtatgtttacacagaagcaaggagttgattcatattaacaatttatgtgtgatacaga

SEQ ID NO: 17766 - DNA, 120 bp, synthetic construct
  misc_feature 1..120: note = Artificially Synthesized Probe
  source 1..120: mol_type = other DNA
agatgttttaactgggttgttcgagaatgttttgcctgatgcttctgagcagggattgaacgggcagaatagttaaaacccgagggaggtcgagtgaaggtgtgtgaaggtgacttcaaa

SEQ ID NO: 17767 - DNA, 120 bp, synthetic construct
  misc_feature 1..120: note = Artificially Synthesized Probe
  source 1..120: mol_type = other DNA
ctcccccaggcttgggaaggaaagagaaattctgccaagaacagagtacaaggcccatgaagctgggaatggcaggatattttaagcagtacaagggggattctgggttgccctggagac

SEQ ID NO: 17768 - DNA, 120 bp, synthetic construct
  misc_feature 1..120: note = Artificially Synthesized Probe
  source 1..120: mol_type = other DNA
tacacactccttatgatgtgacctcagatcctgccacttgccatgttttcctgatccaggccatcgccttcctccacagccactagagtagacaaggatgggcaaactagatccaagcct

SEQ ID NO: 17769 - DNA, 120 bp, synthetic construct
  misc_feature 1..120: note = Artificially Synthesized Probe
  source 1..120: mol_type = other DNA
agctgcattcactatcatttcccagccatgtggcgcatcctcccgtttcaatgttaaaatagaaacaagttcaaggaagatgcattcacctgcctgatctgcctgccagcttcctgtgag

SEQ ID NO: 17770 - DNA, 120 bp, synthetic construct
  misc_feature 1..120: note = Artificially Synthesized Probe
  source 1..120: mol_type = other DNA
tgcacacagatggcaaggaggcccgtcatttgcaagagctggcacttaaatgaaaaaacactaagtatatttgctaataaggttccagggtgagcatgtgtgacaatgacaagtgtgaag

SEQ ID NO: 17771 - DNA, 120 bp, synthetic construct
  misc_feature 1..120: note = Artificially Synthesized Probe
  source 1..120: mol_type = other DNA
tctggattcagtgagtagggctggtgagtttctccagccaagatgctgcatatcccaccatctggccccattgtctggggacaggacacactccactttatctcctggccagtgagttag

SEQ ID NO: 17772 - DNA, 120 bp, synthetic construct
  misc_feature 1..120: note = Artificially Synthesized Probe
  source 1..120: mol_type = other DNA
tatgaatgaaaaccataaaggttgtccgcaatgggttctcgtgacaacccatgagaagggctccctctggggatagaaacactgtatgtgttcgacaaataaatgccagcccgtttatcc

SEQ ID NO: 17773 - DNA, 120 bp, synthetic construct
  misc_feature 1..120: note = Artificially Synthesized Probe
  source 1..120: mol_type = other DNA
caaactatgactgagactgatttgatgggcagcaaggtggaggggatgaggttatttgtgttatctcttgcttaactgttcatccattcaacttccgctcatcccatctgtctatccatc

SEQ ID NO: 17774 - DNA, 120 bp, synthetic construct
  misc_feature 1..120: note = Artificially Synthesized Probe
  source 1..120: mol_type = other DNA
tctgttttttcattaaacagtcatcacacgtccataagggaccatcctacttttctaagaagtcacaactggcaaggagtaaggaacagaaggcatatttaactctagatccaggattcc

SEQ ID NO: 17775 - DNA, 120 bp, synthetic construct
  misc_feature 1..120: note = Artificially Synthesized Probe
  source 1..120: mol_type = other DNA
gaagtagaaaattcacacctctgacgccttgcacatatttgatgagccggctcctggcctggcgtccttggatgtctggcatctggaattctgcagaagcttcgtgcatattttgctgaa

SEQ ID NO: 17776 - DNA, 120 bp, synthetic construct
  misc_feature 1..120: note = Artificially Synthesized Probe
  source 1..120: mol_type = other DNA
cgggatcctcagatcctggtgaactctgcccagctcctacattccctgtccaccaattcctgtggattcaggctccaaaacgtctttctttctcaggtctccttccctcctttcctaccc

SEQ ID NO: 17777 - DNA, 120 bp, synthetic construct
  misc_feature 1..120: note = Artificially Synthesized Probe
  source 1..120: mol_type = other DNA
ggacctcctcatcaaggattgtcattttcaccccaatttctacccgacctccaactcagggtcaaccagagaaagccaaatctgctaccccaaccaatgacttagaaggccccagtgcta

SEQ ID NO: 17778 - DNA, 120 bp, synthetic construct
  misc_feature 1..120: note = Artificially Synthesized Probe
  source 1..120: mol_type = other DNA
acacctgagacctcgagcgagcgttattccttcatccgtgtccttcacggttgtcaaaaaaggcctcggatgtgaaaccatttgggcgcatttacggaaaagaaggcagctgagcacatg

SEQ ID NO: 17779 - DNA, 120 bp, synthetic construct
  misc_feature 1..120: note = Artificially Synthesized Probe
  source 1..120: mol_type = other DNA
cagcagggatgggagggacccgggcagttaccagctggctacccggagaacacagtcctgttttctgctggtggaaaagtcttttcatggcctgacattctcaggctcctaatcacccca

SEQ ID NO: 17780 - DNA, 120 bp, synthetic construct
  misc_feature 1..120: note = Artificially Synthesized Probe
  source 1..120: mol_type = other DNA
tatgtgaatgtgtgtgtatacatggacaataataaatattagacgaaaaaagaggagagggaaggaggcaggagactgcactgctatatggaacagtggagctgaaacgggggttatctt

SEQ ID NO: 17781 - DNA, 120 bp, synthetic construct
  misc_feature 1..120: note = Artificially Synthesized Probe
  source 1..120: mol_type = other DNA
gcacaaaggagtggagcaaaagcttaaatgagtgatctgagactttaaccactgaaggcaagatggagattccagtttgagtctaatcatagtagctgtcagctcaaacaaatcataaac

SEQ ID NO: 17782 - DNA, 120 bp, synthetic construct
  misc_feature 1..120: note = Artificially Synthesized Probe
  source 1..120: mol_type = other DNA
ttaacgcagctagcaaacctgggcagatgctgttatttatggactctgaaaaataaagagtagcaggcaattggagaagaaaggcagatttccaagtaccactaaagaagctgtgagttt

SEQ ID NO: 17783 - DNA, 120 bp, synthetic construct
  misc_feature 1..120: note = Artificially Synthesized Probe
  source 1..120: mol_type = other DNA
gttagaagctcatttgacgttggaaaccatgcataaaagttctataaaaggaatttagggcttgatctcaaccaagtgctcatgtcaacctattccatcgggtttaaacaagacccagag

SEQ ID NO: 17784 - DNA, 120 bp, synthetic construct
  misc_feature 1..120: note = Artificially Synthesized Probe
  source 1..120: mol_type = other DNA
ccctccccccttggcctcccaatcagatggactttcagaaaactaaccaatgacatgcagtctataaggactcaaatttacatataacaacatagggaggttaaaaacaaagggatagaa

SEQ ID NO: 17785 - DNA, 120 bp, synthetic construct
  misc_feature 1..120: note = Artificially Synthesized Probe
  source 1..120: mol_type = other DNA
aaaatggacagccacacgatgatactggaaaatttccacattcctacgttctcagcaatcaacaacagaggacaagtcagcaaggctataaacacttaaaaataccatcaaaaggaccga

SEQ ID NO: 17786 - DNA, 120 bp, synthetic construct
  misc_feature 1..120: note = Artificially Synthesized Probe
  source 1..120: mol_type = other DNA
cactacgcctgacaattgtgtagtttaaaaagcatctgaaaaagacttcttgactccagtgatttcgctggtgaattttgccaatcatttcaagaagcagcaacaccaactctacacaat

SEQ ID NO: 17787 - DNA, 120 bp, synthetic construct
  misc_feature 1..120: note = Artificially Synthesized Probe
  source 1..120: mol_type = other DNA
cttcaaatatctagatttaacacggccccagatgcagagagacatcgattacagggaggcacctgggtccctaagaagatactaatacagcaataataacggctatgattacaaaataat

SEQ ID NO: 17788 - DNA, 120 bp, synthetic construct
  misc_feature 1..120: note = Artificially Synthesized Probe
  source 1..120: mol_type = other DNA
tctgatgggaaagatcctttacctgaaaacgctcaaatgctggcctgggttctctgagccttagaggcacattttctgaaacagggataataagggttccaggagcactcactgatcctg

SEQ ID NO: 17789 - DNA, 120 bp, synthetic construct
  misc_feature 1..120: note = Artificially Synthesized Probe
  source 1..120: mol_type = other DNA
aaggattatggaggggagccgtgtgaaggtcaaaggctggcaggtaacaaatgcttaataaatgtgactattcttatttttattcctccatgcatccctttagtagacaagtatctactg

SEQ ID NO: 17790 - DNA, 120 bp, synthetic construct
  misc_feature 1..120: note = Artificially Synthesized Probe
  source 1..120: mol_type = other DNA
ggcttcagtctgctcatggatgcctgcagactccgcctaagctgtggcactgttataaaccttagacaacaggatgactctatatcgagtcctgcgagtccttccagaggaccccagaat

SEQ ID NO: 17791 - DNA, 120 bp, synthetic construct
  misc_feature 1..120: note = Artificially Synthesized Probe
  source 1..120: mol_type = other DNA
acaaaaattagccaggcgtggtggtgtgtgcctgtagtcccagctactcaggaggccaagacagagaactgcttgaacctgggaggcagaggttgcagtgagcagtgagccgagatcacg

SEQ ID NO: 17792 - DNA, 120 bp, synthetic construct
  misc_feature 1..120: note = Artificially Synthesized Probe
  source 1..120: mol_type = other DNA
atggacaacattaaaaccattgcagctccaccagatgctgataacagaccccatgccagcagccataactataactgtgattggataagaggctgatttcagtagctttctcttgataag

SEQ ID NO: 17793 - DNA, 120 bp, synthetic construct
  misc_feature 1..120: note = Artificially Synthesized Probe
  source 1..120: mol_type = other DNA
tcagtgtgctgggtctctggataaatgagacaaagtcgtctgctgtggactgaatggtgtctcctccccacaaattcaaatgttgaaacccaaacctctaacaggatggtatctggtgat

SEQ ID NO: 17794 - DNA, 120 bp, synthetic construct
  misc_feature 1..120: note = Artificially Synthesized Probe
  source 1..120: mol_type = other DNA
tcctgctctcttttcctcaatctgccaatgctcatctcatgaatatttcatctttaaagcagacagaatagagcaaagctccaacaaagcaaaacctaagccaacgcggtagttctcaaa

SEQ ID NO: 17795 - DNA, 120 bp, synthetic construct
  misc_feature 1..120: note = Artificially Synthesized Probe
  source 1..120: mol_type = other DNA
agccttagtttcctcatgtggaggatagagcgaaaaccaatctgccttggagggtgggtctaagttacaacaaatgcaacccaaatgatgcatcctaatgaacaccagtgatgaagcacc

SEQ ID NO: 17796 - DNA, 120 bp, synthetic construct
  misc_feature 1..120: note = Artificially Synthesized Probe
  source 1..120: mol_type = other DNA
tctgggcacactgtgagtggatgtgactcagcatcaaccacactattaaaccgctttttaaaagggtggaatgtatgaaagttagatgctgacatgaaatcataccacattaaactgcat

SEQ ID NO: 17797 - DNA, 120 bp, synthetic construct
  misc_feature 1..120: note = Artificially Synthesized Probe
  source 1..120: mol_type = other DNA
agcatgattgggtcagggatgggcagtgattcaaatcagtccagtgaaattagatcctgaaccttcttttacaatgactgggaaagaggcagtcttgctcttatgtgactactaaaacag

SEQ ID NO: 17798 - DNA, 120 bp, synthetic construct
  misc_feature 1..120: note = Artificially Synthesized Probe
  source 1..120: mol_type = other DNA
tgagatgatgttatggctgatcatccataattggaagcagagtggacaatgtgcatgtccttaaaagagggaatgttttcttgaacctttcgctcttcctctattggaacgcagatacaa

SEQ ID NO: 17799 - DNA, 120 bp, synthetic construct
  misc_feature 1..120: note = Artificially Synthesized Probe
  source 1..120: mol_type = other DNA
ctgctggaagagctcttggcatacaaaatgacaagcaatttttaaacggcataagacgggtgatttttaaccacacggaattctaaatctgttttgagctggttagcgctccttagaaaa

SEQ ID NO: 17800 - DNA, 120 bp, synthetic construct
  misc_feature 1..120: note = Artificially Synthesized Probe
  source 1..120: mol_type = other DNA
aactccaggagtatctaaatgccacaggattttgtactttaaaatggttaatgtcaatttcgcctgaatcaaaacacaaaaaccttccagaatggtctgctggggctcagatatgccagt

SEQ ID NO: 17801 - DNA, 120 bp, synthetic construct
  misc_feature 1..120: note = Artificially Synthesized Probe
  source 1..120: mol_type = other DNA
cctcctttgctcgcagacatgtcctcgtttggatgataaatgatgcggtcaccctggcacatagactccttctaggaggatccaggagaaatgccaggagcttcaggaacaacaaatagg

SEQ ID NO: 17802 - DNA, 120 bp, synthetic construct
  misc_feature 1..120: note = Artificially Synthesized Probe
  source 1..120: mol_type = other DNA
tgtctgtgtgcaggcatgcacgtatgtgcacatttgcacgtgtgtaggtgtgtgtgtatgggtatctttcatctgctactcaatgaggtctgtggttgcatgtgtttgtgagagaggcac

SEQ ID NO: 17803 - DNA, 120 bp, synthetic construct
  misc_feature 1..120: note = Artificially Synthesized Probe
  source 1..120: mol_type = other DNA
gttgtaaccgtttacaaataaaaagctccacagtgatgatgaaagtgacacccatttcggttctctgagaatcaactggagcatgggcctcctctctccgaggaaaagtaacctttcccc

SEQ ID NO: 17804 - DNA, 120 bp, synthetic construct
  misc_feature 1..120: note = Artificially Synthesized Probe
  source 1..120: mol_type = other DNA
gtctaaaaggtgaaggtctctaaggatgaggacggctcaagtcagtggaacccactgtgtaagctgtgagaccccgggcaaaatgacaaagagccccttgtttaaaatgattcagagtct

SEQ ID NO: 17805 - DNA, 120 bp, synthetic construct
  misc_feature 1..120: note = Artificially Synthesized Probe
  source 1..120: mol_type = other DNA
tacaaaagcgtcttgcttgggtcacttctctgcatttcgctctcttgcagaagatccccatgtatatgtaaaaccaatacaattggtatgctattcttattaatctgcctgctgtcaatc

SEQ ID NO: 17806 - DNA, 120 bp, synthetic construct
  misc_feature 1..120: note = Artificially Synthesized Probe
  source 1..120: mol_type = other DNA
caaaaccacaatgatatataggtctaatacccactaagatgcctataacgataacaacaaaccagataataggtgttggcgaagatgatggggaaaactggaacccttcctacactgttg

SEQ ID NO: 17807 - DNA, 120 bp, synthetic construct
  misc_feature 1..120: note = Artificially Synthesized Probe
  source 1..120: mol_type = other DNA
atatcaatttaagaaaagaaaaaaaggttggtgtcctgtgtgaattccttcggatcacagaataatataaaactaaacaggcgagggttaaccgtcaaaatttgattttaggccaggtgt

SEQ ID NO: 17808 - DNA, 120 bp, synthetic construct
  misc_feature 1..120: note = Artificially Synthesized Probe
  source 1..120: mol_type = other DNA
cccataagccaatgtttattcataatccccgaatctgtttcccatcgtctatttcagaggagccaaaaacaacatcttcattcaataacagagcaccatatgacagctttcatttcccag

SEQ ID NO: 17809 - DNA, 120 bp, synthetic construct
  misc_feature 1..120: note = Artificially Synthesized Probe
  source 1..120: mol_type = other DNA
cctcccatctacccacctaactattcatttagacatccatccacccattgagatacctactaacccatttatccatctactcagccacccttctgtcctccaacctacccacctacccat

SEQ ID NO: 17810 - DNA, 120 bp, synthetic construct
  misc_feature 1..120: note = Artificially Synthesized Probe
  source 1..120: mol_type = other DNA
ctctcatggagggtagtaaaccttgatcaattgaccccacaaacaggcgtttacaaattaattaacctccaggtccttgccttcagtcctcttggcttgcaccatttgcacttattaaat

SEQ ID NO: 17811 - DNA, 120 bp, synthetic construct
  misc_feature 1..120: note = Artificially Synthesized Probe
  source 1..120: mol_type = other DNA
ccacggttgtttaacaaaaacataatcattagcagacaggacaatgcgtcctcatagctattttatgttctgtgagggaacagctagtaacttctttggaagctggcttttgtggcttat

SEQ ID NO: 17812 - DNA, 120 bp, synthetic construct
  misc_feature 1..120: note = Artificially Synthesized Probe
  source 1..120: mol_type = other DNA
ctgatgccagacaattttaggcttctccattgtgtacactaataaattcctttcgtagggacaggggttggagggagccctggggttttgttgcctccaatttaaaaagcaataatgacc

SEQ ID NO: 17813 - DNA, 120 bp, synthetic construct
  misc_feature 1..120: note = Artificially Synthesized Probe
  source 1..120: mol_type = other DNA
ttgttgttgttgttttaacgcaggagatttccctcttaacagtgacctacacgttactaagtcagagagattttgaactaagcagtaactatcatcccttccggttctcaccttctctgg

SEQ ID NO: 17814 - DNA, 120 bp, synthetic construct
  misc_feature 1..120: note = Artificially Synthesized Probe
  source 1..120: mol_type = other DNA
gaaaccctcattctcagcaaactatcgcaaggacaaaaaaccaaacaccgcatgttctcactcataggtgggaattgaacaatgagaatacttatttatttatttagagacagtccgctc

SEQ ID NO: 17815 - DNA, 120 bp, synthetic construct
  misc_feature 1..120: note = Artificially Synthesized Probe
  source 1..120: mol_type = other DNA
gtatacaaggactgaccacaaatcaatacgaaacagacaagcctgaagaaaaacaggcagaagacccaaactggcgcatggccaaagacgacacacaaacagccacccaatacatgcaca

SEQ ID NO: 17816 - DNA, 120 bp, synthetic construct
  misc_feature 1..120: note = Artificially Synthesized Probe
  source 1..120: mol_type = other DNA
ttgttttataactgcccactggacgtgcggttgttttgtgaacctctctgtatgcttgttacgcgccacacagaaaaattaaaaataaaagcatcacacaggcaccaaacaggatcctcc

SEQ ID NO: 17817 - DNA, 120 bp, synthetic construct
  misc_feature 1..120: note = Artificially Synthesized Probe
  source 1..120: mol_type = other DNA
acaccatcttacccccagacttgaggaggcatgaggtttgctgctaaaagtgttggggtgacccgagggggaggggccctcactcatcaaagcagatctctgctttaaacctgcattgct

SEQ ID NO: 17818 - DNA, 120 bp, synthetic construct
  misc_feature 1..120: note = Artificially Synthesized Probe
  source 1..120: mol_type = other DNA
tgccagaatttccaacaaacaccaggagtaactttcaagtggaaacacagctggcacgggcagcacagggcttataaatgacggggcaataaagtggaattatgacctttgcacctgtcc

SEQ ID NO: 17819 - DNA, 120 bp, synthetic construct
  misc_feature 1..120: note = Artificially Synthesized Probe
  source 1..120: mol_type = other DNA
cctttatcatcttaaaacctctgacaccatcaccaccagcatcattgctagtcacatcactaccaccatcaatcaccatgactatcaccatcaatagaatcactaccatcatcaccaaca

SEQ ID NO: 17820 - DNA, 120 bp, synthetic construct
  misc_feature 1..120: note = Artificially Synthesized Probe
  source 1..120: mol_type = other DNA
ccaagtttactctgaggatcacatgagttacctataaacatcaaatgagaggtgagaggatgcaaccacagggacaaggtttggaactgtgtgctctgaaaaggctggaacgataacgtt

SEQ ID NO: 17821 - DNA, 120 bp, synthetic construct
  misc_feature 1..120: note = Artificially Synthesized Probe
  source 1..120: mol_type = other DNA
ccattgagtgccacaaaaaagtagaaaagacacactgcaaaccacatctgtttcctggtcagagctctgactttctgatctagatcctatgcttatggctagcttctagaaacttctaga

SEQ ID NO: 17822 - DNA, 120 bp, synthetic construct
  misc_feature 1..120: note = Artificially Synthesized Probe
  source 1..120: mol_type = other DNA
tgacagtttccatgtacacataagatgtgtcgctgaaaactgcacacacgtgcattgcattcatttttcataaactgcctcatccatgggtgccaactgattacttcggaaatattttat

SEQ ID NO: 17823 - DNA, 120 bp, synthetic construct
  misc_feature 1..120: note = Artificially Synthesized Probe
  source 1..120: mol_type = other DNA
aaaaaacctgcactccattaagccactgaagttgtgggttcacttgtcgtagcagctgacattgagctacctaatacaaatgggtggaaagctttagagtcttgacaaaagccagacctt

SEQ ID NO: 17824 - DNA, 120 bp, synthetic construct
  misc_feature 1..120: note = Artificially Synthesized Probe
  source 1..120: mol_type = other DNA
ccttaagaaattacaactaaggctcaggtgagtaagcccactatatcttgaaggcataactaccaaactattcatggaactaagctgaacttgtatcatttgaccaaccatccatccaac

SEQ ID NO: 17825 - DNA, 120 bp, synthetic construct
  misc_feature 1..120: note = Artificially Synthesized Probe
  source 1..120: mol_type = other DNA
ataaaagagaaacagcttccaagggtgcaagcaaggtctactgtgtagaaagagcttggtggatgggaacatctaaaaacattttgtaccatcttccagattctatgtatatccaaagtc

SEQ ID NO: 17826 - DNA, 120 bp, synthetic construct
  misc_feature 1..120: note = Artificially Synthesized Probe
  source 1..120: mol_type = other DNA
aactgagaagcaatccacatgtccatcatcaggagaatgatcaaactgtggtgtaaatacaccataaaacactagccagcaataaacatttataaactgctgtctgggcatggtggatca

SEQ ID NO: 17827 - DNA, 120 bp, synthetic construct
  misc_feature 1..120: note = Artificially Synthesized Probe
  source 1..120: mol_type = other DNA
tcttataatctgtgtgttttcctgtatgtaaatcacacctctataaaagaagataatacaaaagaaggtgctaagtcacgatcttagaacacccaagggcaagcagaacccagcaggaac

SEQ ID NO: 17828 - DNA, 120 bp, synthetic construct
  misc_feature 1..120: note = Artificially Synthesized Probe
  source 1..120: mol_type = other DNA
agaaaatacggttttatcaaggacattgtcctgggagtgtgagctggagcaagatcacccttctagaaacctctgtcttaccccttaaataacctcctcccacagtaaacacaaacacaa

SEQ ID NO: 17829 - DNA, 120 bp, synthetic construct
  misc_feature 1..120: note = Artificially Synthesized Probe
  source 1..120: mol_type = other DNA
aagaacctctaacctcattacagtctgatttccatgctaaatgaccctccccccagcaccaggatagttgacaatcaccatgacaacaacagaaagaaaccgtaaaaggacagaaaggaa

SEQ ID NO: 17830 - DNA, 120 bp, synthetic construct
  misc_feature 1..120: note = Artificially Synthesized Probe
  source 1..120: mol_type = other DNA
atataagtggtctcctcttcacattttaatcagttcaatctctcggcaatcaattttgaaacgattttcagcaagtgctatatctggaggttctaagagagatgctggaatggcttcccg

SEQ ID NO: 17831 - DNA, 120 bp, synthetic construct
  misc_feature 1..120: note = Artificially Synthesized Probe
  source 1..120: mol_type = other DNA
tatctgacaccacgtcatatgaatggatgtgcacggcggccctgtagcatctctcagtgttgcacatgagacaggacagtggtgcttggctgtccttaccatcaatgatttcagatataa

SEQ ID NO: 17832 - DNA, 120 bp, synthetic construct
  misc_feature 1..120: note = Artificially Synthesized Probe
  source 1..120: mol_type = other DNA
gtcaggaggaccccgccggtccccatggccctactgtgataactatttctgtcataaagcttgcagtggcaaagtgaggaaggaaaatctttatatcttagggttttttttttgtttttt

SEQ ID NO: 17833 - DNA, 120 bp, synthetic construct
  misc_feature 1..120: note = Artificially Synthesized Probe
  source 1..120: mol_type = other DNA
aggactcaacactcctgcctgactttccttccaaactcccctctccaggagaatcacaccttttagttccatatttaatctctatgaagtatgcacttcaggatgtgttattgttattac

SEQ ID NO: 17834 - DNA, 120 bp, synthetic construct
  misc_feature 1..120: note = Artificially Synthesized Probe
  source 1..120: mol_type = other DNA
tgggaaacctggctagaaagaaggttcatcctcaacaccatgtctgctccaacacagacgatgctttaaggcacctatgaaaaccaactgcggatctctctatgggccccacatgcttcc

SEQ ID NO: 17835 - DNA, 120 bp, synthetic construct
  misc_feature 1..120: note = Artificially Synthesized Probe
  source 1..120: mol_type = other DNA
gggacaaaacacacactgctatttagaaaactctgtcattctttcacgctgccatgcactcactcactcaccacctatccaactacccacctatccactcattcacccacctatcaaact

SEQ ID NO: 17836 - DNA, 120 bp, synthetic construct
  misc_feature 1..120: note = Artificially Synthesized Probe
  source 1..120: mol_type = other DNA
gagcccttgaattaaaaaaaaaaaaaaaaggagcgtcagtgggggaatcggaacatgtacacacctatttttgggcaccccttattttagaagaaaaatgttggggtatgttttcccagg

SEQ ID NO: 17837 - DNA, 120 bp, synthetic construct
  misc_feature 1..120: note = Artificially Synthesized Probe
  source 1..120: mol_type = other DNA
taggagtcacgtgacctcccttctttcctttgttgaatcattctatcaaacccagggagttggacaggggaaggcccccccagagcttctgggaattaaggtgtgagatgtggattcgcc

SEQ ID NO: 17838 - DNA, 120 bp, synthetic construct
  misc_feature 1..120: note = Artificially Synthesized Probe
  source 1..120: mol_type = other DNA
atgtaaagaaaaatgactgaaaaaaatgaatagagctccagggacttgtttgatgctatcaaatgatgaaatatgtgtgcagcagaaacactggccatcaggcaagagggcggggctctg

SEQ ID NO: 17839 - DNA, 120 bp, synthetic construct
  misc_feature 1..120: note = Artificially Synthesized Probe
  source 1..120: mol_type = other DNA
ttgttggcaccaagagcaaaaggcgacctggaccaggtgagaggggcagagagagagagagcagagtcacaaggtcacaagccacatgccacaaaccacagccaagccattcaacgcatg

SEQ ID NO: 17840 - DNA, 120 bp, synthetic construct
  misc_feature 1..120: note = Artificially Synthesized Probe
  source 1..120: mol_type = other DNA
ccatgggtgaaccttggggacactgctcagtgagatacaccagacacaaaagaacacagactgtgtgatcccagccatgcgagggcccgagagcagtcagattcatggacacagaaagta

SEQ ID NO: 17841 - DNA, 120 bp, synthetic construct
  misc_feature 1..120: note = Artificially Synthesized Probe
  source 1..120: mol_type = other DNA
tcatatccgttcttgctgtatgtcattgattttgcacagagctatgttttcaacctgacttctacacccgacagtaagacacaccttaacagggcccagagacaggacacgcaacacaaa

SEQ ID NO: 17842 - DNA, 120 bp, synthetic construct
  misc_feature 1..120: note = Artificially Synthesized Probe
  source 1..120: mol_type = other DNA
cccatgtcaacgtgtttgaggagccagggctccatgtactccgattactctgtagggagcagattgggcctgaatactcagtctgtctgcctgactccaaatctcagatttgtcctgaaa

SEQ ID NO: 17843 - DNA, 120 bp, synthetic construct
  misc_feature 1..120: note = Artificially Synthesized Probe
  source 1..120: mol_type = other DNA
agagcaggagtcacagggtctgttcacaactgttatgtgtctgacacagcagctgcttaagtccagaacttaggaaccaaatgaggagtgcgtcttctcaggatttccacacccaaagag

SEQ ID NO: 17844 - DNA, 120 bp, synthetic construct
  misc_feature 1..120: note = Artificially Synthesized Probe
  source 1..120: mol_type = other DNA
ccatcttatcatttttctgaacatctattcactcatctacccaaagttcagaaagatcttgcctgaagcccagctgaacacttactatccatcattggacaagttagctacctctcaaag

SEQ ID NO: 17845 - DNA, 120 bp, synthetic construct
  misc_feature 1..120: note = Artificially Synthesized Probe
  source 1..120: mol_type = other DNA
agttcctgcatcccaaactgtccatgttttccttatgttctggccaagaacagccaggagggattctaaccaacttgttttggtataagggccaaatcactgaattcttaaaatgaaaaa

SEQ ID NO: 17846 - DNA, 120 bp, synthetic construct
  misc_feature 1..120: note = Artificially Synthesized Probe
  source 1..120: mol_type = other DNA
caaatgttactaaatgctattggctgacagttgttttaaagttgaaggctcaggtcctgtgtcatctcctgtctggtcaatatcacctccctccctggcttcccaggactgtgaaagtca

SEQ ID NO: 17847 - DNA, 120 bp, synthetic construct
  misc_feature 1..120: note = Artificially Synthesized Probe
  source 1..120: mol_type = other DNA
ttcatgcgtgcaatggacgacgcatggacagggcggcagcattcatctccaccaactgaactcaaaagcatgagtccttctttcctgctgagctgaccccacccaagcaacgttcttgaa

SEQ ID NO: 17848 - DNA, 120 bp, synthetic construct
  misc_feature 1..120: note = Artificially Synthesized Probe
  source 1..120: mol_type = other DNA
caataaggatgaagatgaagacgaccctaagagtggccgacgtttctgcagaaccgaagactgtctatgagcagctgtggatgtcagtgcaggccaggtgctgaaagccacttaatccac

SEQ ID NO: 17849 - DNA, 120 bp, synthetic construct
  misc_feature 1..120: note = Artificially Synthesized Probe
  source 1..120: mol_type = other DNA
cctagttaggacacgggtcttaagggaaggacctctcagctcatcagtgcccatccagagggttcctcctacagcacagctattgctaccattgaggatgctgaatcctggacagatgga

SEQ ID NO: 17850 - DNA, 120 bp, synthetic construct
  misc_feature 1..120: note = Artificially Synthesized Probe
  source 1..120: mol_type = other DNA
cccttgttttataattgacaaagattaggcagattgggttttacctgcccaaggttatgcagctatacaatggtacagtacagaagcgtgtatgcaggaggccaggcaatgagcatttga

SEQ ID NO: 17851 - DNA, 120 bp, synthetic construct
  misc_feature 1..120: note = Artificially Synthesized Probe
  source 1..120: mol_type = other DNA
tccaagcaggaatctagaccagaagcagctggacctccttgtttggctctggtgggaagcgtctgtgggctaaaggccaaagcgttgagaggacgtggggtctgccagctctaagaggat

SEQ ID NO: 17852 - DNA, 120 bp, synthetic construct
  misc_feature 1..120: note = Artificially Synthesized Probe
  source 1..120: mol_type = other DNA
ggagaccgtgccagcagggacagtgagcaaaactcaggcatgaaagtttcctcaacatctgggttggaataaaatgggcttcctgctcaacttctgggccaccccaagttggaggagctg

SEQ ID NO: 17853 - DNA, 120 bp, synthetic construct
  misc_feature 1..120: note = Artificially Synthesized Probe
  source 1..120: mol_type = other DNA
acgtcctaaaccccagttttcaaaatgtgccaatatttgcaggtaaggtctttacagagatcatctgggtggagggccattagtgggggccctgatcccataggattggggtccttataa

SEQ ID NO: 17854 - DNA, 120 bp, synthetic construct
  misc_feature 1..120: note = Artificially Synthesized Probe
  source 1..120: mol_type = other DNA
ggaccagggctaccatctgacaaactgcaaggcaagagaaaacacgtgtcctccctgggattgggtctgggggaaccttcatgcctcagaggagaagaacgtcacaagtagtttaggaca

SEQ ID NO: 17855 - DNA, 120 bp, synthetic construct
  misc_feature 1..120: note = Artificially Synthesized Probe
  source 1..120: mol_type = other DNA
gtggcactggcagaggtcacgggggacagaggtggcgctggcagagcccatgggggacagaggtgatgttggcagagttcatgggggacaggtggcgttggcagagcccacgggggacag

SEQ ID NO: 17856 - DNA, 120 bp, synthetic construct
  misc_feature 1..120: note = Artificially Synthesized Probe
  source 1..120: mol_type = other DNA
gcactggcaaagcacatgaggacaaaggtggtgctggtagatttcactgaggacaaaggtggcactagcagagctcacaggtacagaggtggtattgacagctcccaaggacagaggtgg

SEQ ID NO: 17857 - DNA, 120 bp, synthetic construct
  misc_feature 1..120: note = Artificially Synthesized Probe
  source 1..120: mol_type = other DNA
tctttttctgacccttgtaactgggggaggtatgcatactcttcatagcaagtgatggcatttgggggagtcctggcagttgctaagataaactcattaggaaaaaaaaagtctataaaa

SEQ ID NO: 17858 - DNA, 120 bp, synthetic construct
  misc_feature 1..120: note = Artificially Synthesized Probe
  source 1..120: mol_type = other DNA
tgcatttatttatacatttttttccccacaataaaaattacacaaggtatgacaaacagagtgtgcacttttaaagttggccacgctcccttcccatccattccatgtaactgcaacccc

SEQ ID NO: 17859 - DNA, 120 bp, synthetic construct
  misc_feature 1..120: note = Artificially Synthesized Probe
  source 1..120: mol_type = other DNA
ctatatttctgttcaaaagaatcagacacaagtgcccatgacttctctggctccccacccatcgaggtaattaccctggaaaaaacaggactccaccccctcctactttttttttttttt

SEQ ID NO: 17860 - DNA, 120 bp, synthetic construct
  misc_feature 1..120: note = Artificially Synthesized Probe
  source 1..120: mol_type = other DNA
cacacaaccagagaaagacgagacaagacgaggaaaaagcaaccagagcactaaagtttaattccatatggttgacacactttgtgtcaataaaaatggcggtgtgagaacaagaaggct

SEQ ID NO: 17861 - DNA, 120 bp, synthetic construct
  misc_feature 1..120: note = Artificially Synthesized Probe
  source 1..120: mol_type = other DNA
ctgggaccatgtgacaatcctgcatctgttctgactggtggaccaggcaggggacaaaatggagcctttttcccctcacgggggcctccaatgtcaaatatgtcaaaggaccaagaagag

SEQ ID NO: 17862 - DNA, 120 bp, synthetic construct
  misc_feature 1..120: note = Artificially Synthesized Probe
  source 1..120: mol_type = other DNA
tttccagacaccttcaattctttcaataagcagacaacttttcccgcccacactcggaggaggctgagtaaaccattcacaaagatcaggagcggtggtggctccatcagtctcatgcac

SEQ ID NO: 17863 - DNA, 120 bp, synthetic construct
  misc_feature 1..120: note = Artificially Synthesized Probe
  source 1..120: mol_type = other DNA
gctagtggttgagatgaaaattaagacaaagataaaagatgaaacttaaaaacccattttccctggaggcttccagagatcttcttctctgagaaaagcctcaggctttgggaatgtccc

SEQ ID NO: 17864 - DNA, 120 bp, synthetic construct
  misc_feature 1..120: note = Artificially Synthesized Probe
  source 1..120: mol_type = other DNA
ctgtttcctagtctgtttaatggggatattaatggtgccacttcacaggagagtcataaggataaagtaagttaatatttgtaacagtagtacctggaggcagtgtcggtgatccctgaa

SEQ ID NO: 17865 - DNA, 120 bp, synthetic construct
  misc_feature 1..120: note = Artificially Synthesized Probe
  source 1..120: mol_type = other DNA
gtcctagctttttttctgagtgttccagagcactttactaggttcaccaggctgctctctagttgtgctgctctcctgaggccagaagccaccttccttgtccaactcccaccctacccc

SEQ ID NO: 17866 - DNA, 120 bp, synthetic construct
  misc_feature 1..120: note = Artificially Synthesized Probe
  source 1..120: mol_type = other DNA
gtgcagtacttacgcacagtgggtgctcaacagaggttagctgttgccatcacgaccacgactgaagtttgtttattattgctgactgttcattattgtgattattacaacagcttgttg

SEQ ID NO: 17867 - DNA, 120 bp, synthetic construct
  misc_feature 1..120: note = Artificially Synthesized Probe
  source 1..120: mol_type = other DNA
aatcatgcttttataaataacacaagatataaaaaggcatctcagcaataatgcggggttatctttgcacaaagaggtaggagtctgtggtgtttgtaacgttcccgtcactggagtcat

SEQ ID NO: 17868 - DNA, 120 bp, synthetic construct
  misc_feature 1..120: note = Artificially Synthesized Probe
  source 1..120: mol_type = other DNA
tgatggggtcctttgttccagcttcttataaaaagaatgaaatctgagcttggtggtggaagatgtgagtcctgggtcagtctctgactcaaggcagggttctgggactcagttttctca

SEQ ID NO: 17869 - DNA, 120 bp, synthetic construct
  misc_feature 1..120: note = Artificially Synthesized Probe
  source 1..120: mol_type = other DNA
cagtctatggtattttttgttaaagtggctgcagctaatgaagacaccaggcagactgagcatgccactgcccccttacaggccactgccccttacaggcttccaggggacttacgccat

SEQ ID NO: 17870 - DNA, 120 bp, synthetic construct
  misc_feature 1..120: note = Artificially Synthesized Probe
  source 1..120: mol_type = other DNA
aaaaaaaaagatgcatgctgagtaacttcatccaataaatgaataaataaaaggaaggcacgttcctacctcccaccctggacttgtatggtgtttgcctcaccgtgtgaaatgtcttcc

SEQ ID NO: 17871 - DNA, 120 bp, synthetic construct
  misc_feature 1..120: note = Artificially Synthesized Probe
  source 1..120: mol_type = other DNA
tagaatttgtcccgcgtttgccactgtaattaacaggagggttagtctgacatgagctgctccatcactatgggaaagcagaagtcatgggctcatcaatacatttataattatatttaa

SEQ ID NO: 17872 - DNA, 120 bp, synthetic construct
  misc_feature 1..120: note = Artificially Synthesized Probe
  source 1..120: mol_type = other DNA
tcttcacctagttagcgaatccaaatgcacatttatattttgggaactaattaaggctcagtgactgatttaaccttcaaataaattcctcccagggccgagctggcagcatagtgaata

SEQ ID NO: 17873 - DNA, 120 bp, synthetic construct
  misc_feature 1..120: note = Artificially Synthesized Probe
  source 1..120: mol_type = other DNA
ccagccatcaagacttgactgtgtttcactggagcttgataagacttcacctgagaaacactctggctggctctgatctcttccagaggtgtataaaacatataggaataggccaggcgt

SEQ ID NO: 17874 - DNA, 120 bp, synthetic construct
  misc_feature 1..120: note = Artificially Synthesized Probe
  source 1..120: mol_type = other DNA
cctgaagcctggatgggtgtcacagctatttggcccatgcttgttcaaatcacgaacagaacaaatgcaatattggcgatatctgaaaactcaccaagcatttacttccaagtatatgaa

SEQ ID NO: 17875 - DNA, 120 bp, synthetic construct
  misc_feature 1..120: note = Artificially Synthesized Probe
  source 1..120: mol_type = other DNA
agcccagagctgaggctggaaggtacaggtttcaggtcatggggtcagggagcagaggctgcagtggagatgctcaggtggtgactgtgactgggaggttgcaaagacagctattagggt

SEQ ID NO: 17876 - DNA, 120 bp, synthetic construct
  misc_feature 1..120: note = Artificially Synthesized Probe
  source 1..120: mol_type = other DNA
ccctgccacaggcacccctacaacattagttcaactcattaatactctgcttaaaaagaaaaatctaatgaatgccccattttcctaattgggtcagcagagcatgccttgaatagcatt

SEQ ID NO: 17877 - DNA, 120 bp, synthetic construct
  misc_feature 1..120: note = Artificially Synthesized Probe
  source 1..120: mol_type = other DNA
cgtgggatgttacgtaatattcctggaggatacatgctgttcttttacatgacaaattcctcagacagggattatctcagtccagctgagatgcttttcgactttccccatgatcaataa

SEQ ID NO: 17878 - DNA, 120 bp, synthetic construct
  misc_feature 1..120: note = Artificially Synthesized Probe
  source 1..120: mol_type = other DNA
aaaatcagaatgaaacagacggccccgggtgaatgaatgcacatttcccataattacatagagatggaaataagcagcacagaacaaagcgagaaggagagcccacttccaagttgtttg

SEQ ID NO: 17879 - DNA, 120 bp, synthetic construct
  misc_feature 1..120: note = Artificially Synthesized Probe
  source 1..120: mol_type = other DNA
tatgttccaatgtaaagcaccacactctccctcccacccttctctgaaaaatgggggctagaacaggaccactgggtgctgtgagcatgaacgaggtcatccaatggagagccttcggtg

SEQ ID NO: 17880 - DNA, 120 bp, synthetic construct
  misc_feature 1..120: note = Artificially Synthesized Probe
  source 1..120: mol_type = other DNA
atttttatgtgaaatctcctgattttaaataccagcaacgagttcctattttatcaaaatgtgccttacagcatgggctaaaagaatctgcccgtgagccgccaggaattgtggggtggg

SEQ ID NO: 17881 - DNA, 120 bp, synthetic construct
  misc_feature 1..120: note = Artificially Synthesized Probe
  source 1..120: mol_type = other DNA
gtgatcttaattacagaatgggagagccagtcctttccccgagcaagcaagcctgatgccagcttgtttcaggaccaccaggaatgtcaacaagtgcatgatgctgggagacaaattgag

SEQ ID NO: 17882 - DNA, 120 bp, synthetic construct
  misc_feature 1..120: note = Artificially Synthesized Probe
  source 1..120: mol_type = other DNA
tgtcaaaagaatgaaaccacagtaaaaaaaatatgcaaacagcagtgttgggtcaaatctgttaatagctgccatttatcaagtctcctggatggtgatctggggtccatgatctcccta

SEQ ID NO: 17883 - DNA, 120 bp, synthetic construct
  misc_feature 1..120: note = Artificially Synthesized Probe
  source 1..120: mol_type = other DNA
tttccacttcatggagcccttaactctcagatccaaataccagagccttgcagaacaagaacagactttccttcagaaaagatcttctccccaacaaaggcacaagaaagggctgttgta

SEQ ID NO: 17884 - DNA, 120 bp, synthetic construct
  misc_feature 1..120: note = Artificially Synthesized Probe
  source 1..120: mol_type = other DNA
actgtgatagaatgtgatcaattaataagaatcactgccccatgaaactctgccaggcagtctgttcccattcccacctactcctgaaagccgtgaaaataaaacacagtcccttttaaa

SEQ ID NO: 17885 - DNA, 120 bp, synthetic construct
  misc_feature 1..120: note = Artificially Synthesized Probe
  source 1..120: mol_type = other DNA
ctgggctccttagagcctgtggggagagtgaagttgggggaaatgaaacatgagcaacactccgtgagctctggaaacagagccagactctttctagggagcagacactggaaactccag

SEQ ID NO: 17886 - DNA, 120 bp, synthetic construct
  misc_feature 1..120: note = Artificially Synthesized Probe
  source 1..120: mol_type = other DNA
agtgttaacagtgattcacttggggagtgggggagaagaaggtttggatgattttcatatgtacacgcatttaccccttgcttttgtgtaatttctacgaagaccacatattacctctct

SEQ ID NO: 17887 - DNA, 120 bp, synthetic construct
  misc_feature 1..120: note = Artificially Synthesized Probe
  source 1..120: mol_type = other DNA
acttcatgatgagggataattaaaacagcttccctgcacgttctcctccctcatccaatttggtcacatgatgaacaagctcagaggaaattagcaaggtattctaagccctacaggaca

SEQ ID NO: 17888 - DNA, 120 bp, synthetic construct
  misc_feature 1..120: note = Artificially Synthesized Probe
  source 1..120: mol_type = other DNA
aggtaacgctaaaccagcagaccctgagggcagagaagctgccttccatggcacagggcctggcatgtggtaagctcacaaaaaatgtaagatgaacagaagagaggaaggaaagaaaaa

SEQ ID NO: 17889 - DNA, 120 bp, synthetic construct
  misc_feature 1..120: note = Artificially Synthesized Probe
  source 1..120: mol_type = other DNA
tgatacattatttcattaaaaacaccaacagccttatgagggaggcatctgattcctgctttattgaatcagagaatttcaaggatcttacacagagtcccactcaataagcaggtggga

SEQ ID NO: 17890 - DNA, 120 bp, synthetic construct
  misc_feature 1..120: note = Artificially Synthesized Probe
  source 1..120: mol_type = other DNA
caccccagagcatctgcttcctgtcccctgttcataatccattttaaatgaagtcatcaaaattcactgccatgttcatataaaataacagcagcaactgccactaaatttgtattgcgc

SEQ ID NO: 17891 - DNA, 120 bp, synthetic construct
  misc_feature 1..120: note = Artificially Synthesized Probe
  source 1..120: mol_type = other DNA
tggatgaattggatggacagaatgaatgtatagataatagagagatgaacagatgtctggatggatgggtggatgagggtaagtaggcaagtgggtgaatagatgtgtagataagtagat

SEQ ID NO: 17892 - DNA, 120 bp, synthetic construct
  misc_feature 1..120: note = Artificially Synthesized Probe
  source 1..120: mol_type = other DNA
agtcagaaaagtggatgaatgacatcataggtagatatcatcacctatacaactgagtcagagaaacttcttcagagaagctgagaaactgaagacacagaaccagcaagtggcaaaaca

SEQ ID NO: 17893 - DNA, 120 bp, synthetic construct
  misc_feature 1..120: note = Artificially Synthesized Probe
  source 1..120: mol_type = other DNA
ttgaagaaaatggatgaatacttgtcctttgacctctcaaagtcataaaagtataaaatgaaatgcgagcatgcatttatagttttagaaatacacgcaaggggcctggcgcgatggctc

SEQ ID NO: 17894 - DNA, 120 bp, synthetic construct
  misc_feature 1..120: note = Artificially Synthesized Probe
  source 1..120: mol_type = other DNA
ctcagagctagacaataaataagcacaggaataaatgagtgatccaactgggaggagaaccaaaagaacaaagcagagatgtgatcagttagaagaggagcagagcccaatttggatagg

SEQ ID NO: 17895 - DNA, 120 bp, synthetic construct
  misc_feature 1..120: note = Artificially Synthesized Probe
  source 1..120: mol_type = other DNA
catccatcttagatggcagggatcaaggggtttttatacctgggtaggtctagagaaaccgtgaacactgtcacattccagggacaaatctcaaaaataatttgtaggccagacagcagg

SEQ ID NO: 17896 - DNA, 120 bp, synthetic construct
  misc_feature 1..120: note = Artificially Synthesized Probe
  source 1..120: mol_type = other DNA
ggatgctctgctatttgcacattttgaaattggaggtgggtagtgagaagggaaaaaggaaagaaaaattgagggagatgagagtatccagggcaaaagaaaggagagaaaagcaaatga

SEQ ID NO: 17897 - DNA, 120 bp, synthetic construct
  misc_feature 1..120: note = Artificially Synthesized Probe
  source 1..120: mol_type = other DNA
aaatatgtattttttacgagccatctagttcatggtactttgctgcagtggcctgagcgggctaagaccttcctccttggagatcccatggagtggggttcaaggggtccttatgatacc

SEQ ID NO: 17898 - DNA, 120 bp, synthetic construct
  misc_feature 1..120: note = Artificially Synthesized Probe
  source 1..120: mol_type = other DNA
tgcctcgcaccgccttctgatgtagctggacaagaagtgtgttcttcttccagcattgaatcagatcctgtctctcaaaatgagcctcagatagatagattcattcattcattcactcac

SEQ ID NO: 17899 - DNA, 120 bp, synthetic construct
  misc_feature 1..120: note = Artificially Synthesized Probe
  source 1..120: mol_type = other DNA
ggagacacacaagtcaacaaataggagatttttgtgatttctaaaggtccacttttgctggagttttcctatgtctacccggcaaattttcatctccccatttccctaaggaaacatttc

SEQ ID NO: 17900 - DNA, 120 bp, synthetic construct
  misc_feature 1..120: note = Artificially Synthesized Probe
  source 1..120: mol_type = other DNA
ggcagtaagtgtctaaactccttagcatttgacagcataattgaagacacaaatatgaagcctaatgaagagtttcttttctcgaggaagactccctcgttctcactttcaatggcttgg

SEQ ID NO: 17901 - DNA, 120 bp, synthetic construct
  misc_feature 1..120: note = Artificially Synthesized Probe
  source 1..120: mol_type = other DNA
caggatatcagcatgtgtgcgactgtatagggagatgggctttaaagaggcaactaaattaaagtgaggccagatggggcaggtcctaaatccaatccaactggcgtccttacaagaaga

SEQ ID NO: 17902 - DNA, 120 bp, synthetic construct
  misc_feature 1..120: note = Artificially Synthesized Probe
  source 1..120: mol_type = other DNA
caaatccatgtccacccagaacctacgaatggggccttaactggaaatgggtcattgcctccttgcagatgtgatcagtgaggttgcgacgaggtaatactggattagggagggtcctaa

SEQ ID NO: 17903 - DNA, 120 bp, synthetic construct
  misc_feature 1..120: note = Artificially Synthesized Probe
  source 1..120: mol_type = other DNA
gcccaatctaatgacctcattttcagctgatgacttctgtaaagaccctacctctaaacaaggtcacactctgagatcctcagggtgatacttcaacatatgcatttgcagggacacact

SEQ ID NO: 17904 - DNA, 120 bp, synthetic construct
  misc_feature 1..120: note = Artificially Synthesized Probe
  source 1..120: mol_type = other DNA
atcctccataacaacaccgtcttgaaagaagcctttgaactacttgaaaggtaaacccagcattattcttggattaagaactcttgttcattcaacaaatacagccccacgacgacatcc

SEQ ID NO: 17905 - DNA, 120 bp, synthetic construct
  misc_feature 1..120: note = Artificially Synthesized Probe
  source 1..120: mol_type = other DNA
ccacagcaaccgtggcatcccagcactcagaggctattctcagacactaaacaatgagttttgcctttcaaatgcatttgatacaatttgcttggaaggcattaacatcctctgacaaaa

SEQ ID NO: 17906 - DNA, 120 bp, synthetic construct
  misc_feature 1..120: note = Artificially Synthesized Probe
  source 1..120: mol_type = other DNA
ttttttttgccagttcatgaacaactttgctattgtttacaacgatctcatgggattagaataccaaacagtgatgccagtgagaagaccaaataaccttcattcctagcaccagcctcc

SEQ ID NO: 17907 - DNA, 120 bp, synthetic construct
  misc_feature 1..120: note = Artificially Synthesized Probe
  source 1..120: mol_type = other DNA
gaagttcacagatacatttcaacagcaactgtagcaattgcttagatcttagaccaacgattgggggaaggagtattttatcattggcaatttttagaacggggggacatggtgatcatt

SEQ ID NO: 17908 - DNA, 120 bp, synthetic construct
  misc_feature 1..120: note = Artificially Synthesized Probe
  source 1..120: mol_type = other DNA
gtggctcatgcctgtaatccaagcactttgggagcccgaggtgggcagatcacctgaggttgggagtttgagaccagcctgaccaacatggagaaaccccgtctctactaaaaatacaga

SEQ ID NO: 17909 - DNA, 120 bp, synthetic construct
  misc_feature 1..120: note = Artificially Synthesized Probe
  source 1..120: mol_type = other DNA
caggacacagaaaaagaatacggataatttataactaaaggagcaacaatggtgttctgaattattttcccctctttttggaacgcatcaacatgtaatttgtgccccgctcgctggata

SEQ ID NO: 17910 - DNA, 120 bp, synthetic construct
  misc_feature 1..120: note = Artificially Synthesized Probe
  source 1..120: mol_type = other DNA
gacacggatagacgggcacattctataaatattccctgcggagaaagtggctgtttctctcctgcaccaggaaagaacaggtctgaatagtcagcaattgactcaacaaatatttgtcaa

SEQ ID NO: 17911 - DNA, 120 bp, synthetic construct
  misc_feature 1..120: note = Artificially Synthesized Probe
  source 1..120: mol_type = other DNA
tagctgtttaatgtgtcccttctggcttggctaaaagcaacagcacttaggtacatatgcgtacaagttcttccttttctgtctgaagcctccataacgtcttttcacttatgcttatta

SEQ ID NO: 17912 - DNA, 120 bp, synthetic construct
  misc_feature 1..120: note = Artificially Synthesized Probe
  source 1..120: mol_type = other DNA
caaacgctttttcttcagctccaatacccaggtgcttttgcatattaacaaaaattaagatctctgtgactatttcctgactccaatgccagtggctagaaattcaggggttgaatccct

SEQ ID NO: 17913 - DNA, 120 bp, synthetic construct
  misc_feature 1..120: note = Artificially Synthesized Probe
  source 1..120: mol_type = other DNA
cacattctgagtctgtgttccctggggtcaccaacttttgggcatcccaaccctgaacgacaattacttctggaagcaccttgagagtctttctttttgttaatagaaacagaatctctg

SEQ ID NO: 17914 - DNA, 120 bp, synthetic construct
  misc_feature 1..120: note = Artificially Synthesized Probe
  source 1..120: mol_type = other DNA
gattgtcctcttctgggtagatcccaataatctttctccccaggtggatgggtgagcacagagttctagaattccagagctcttttgagtatactagatcctttggctttaattttattt

SEQ ID NO: 17915 - DNA, 120 bp, synthetic construct
  misc_feature 1..120: note = Artificially Synthesized Probe
  source 1..120: mol_type = other DNA
cttgtcattaataggtcacagaacaggagcaggggccagctgggctagtctgtgcagaagcaggcttaggtcagaggtagggcagaccccaaaacttgcttgcaaaatcagccaggagca

SEQ ID NO: 17916 - DNA, 120 bp, synthetic construct
  misc_feature 1..120: note = Artificially Synthesized Probe
  source 1..120: mol_type = other DNA
aggaatctgccttggtcatgaccttggtggtcttcagccctctgcaggagtcagagctgaggaaccagaggccaacctgctgggccagagtcctcggtctcagaagggtaggaacagaga

SEQ ID NO: 17917 - DNA, 120 bp, synthetic construct
  misc_feature 1..120: note = Artificially Synthesized Probe
  source 1..120: mol_type = other DNA
cactgcgcccagccaggggtcttttctaaattccacgtgtatgtcagggtatgttatctaagagtttcatttgaggataatgaaggagatgttatacaacactttttctaagagaactgg

SEQ ID NO: 17918 - DNA, 120 bp, synthetic construct
  misc_feature 1..120: note = Artificially Synthesized Probe
  source 1..120: mol_type = other DNA
tcaactccgctttacaatttggaacaaaacttctagacagatacgcacgggagaaagtaggaccacagcaacacgcacgtgaccgaccccttcagctgacatgaaaatgacaccaagcaa

SEQ ID NO: 17919 - DNA, 120 bp, synthetic construct
  misc_feature 1..120: note = Artificially Synthesized Probe
  source 1..120: mol_type = other DNA
ctcaatgtgcctccttttaaaatataaaaacccctcgcttctctctccatagctgcggaaggacaagatgtatgaaaacaaaccttgttcggttgaggaagaacaacccatgtcatttaa

SEQ ID NO: 17920 - DNA, 120 bp, synthetic construct
  misc_feature 1..120: note = Artificially Synthesized Probe
  source 1..120: mol_type = other DNA
ggccacttgatcctttaaagagactttttaaaggaaaacatcccattgaccaggctgtacacggcaagtcagaaaaatgtgtggtattttaatttacccactttgaagcaccaacatcca

SEQ ID NO: 17921 - DNA, 120 bp, synthetic construct
  misc_feature 1..120: note = Artificially Synthesized Probe
  source 1..120: mol_type = other DNA
tagaatcagataccatctgtccttgaagaggtaacagcctgagaagacaaaagtcatgaagcaatgtgagttccctagagtgggtggaatggtggtcctcaaaaagatgggcccaagtcc

SEQ ID NO: 17922 - DNA, 120 bp, synthetic construct
  misc_feature 1..120: note = Artificially Synthesized Probe
  source 1..120: mol_type = other DNA
agggacattatcttccatggtcatcccctcccccaaagggcctgggacatgcaaatatttctgaatctccaaattagcacagggtctgtgaaaaaggtgctcaatgaagacttgtcacca

SEQ ID NO: 17923 - DNA, 120 bp, synthetic construct
  misc_feature 1..120: note = Artificially Synthesized Probe
  source 1..120: mol_type = other DNA
gcctcaaaaaaaaaaaaaagagttgtcacgggaagatggtgaccacataggtgtttgagctggtgagagtgcaggcatcttcaggacctgccatttcaggtacctgacatgtgcaagtac

SEQ ID NO: 17924 - DNA, 120 bp, synthetic construct
  misc_feature 1..120: note = Artificially Synthesized Probe
  source 1..120: mol_type = other DNA
atcccagtgacaattgaaaatttcatggtgggtgagaaatgccacagaagacattcctctttgaaatgttaatgtggaaggtggaggaatctaggctttgcagagaaaacaacagattct

SEQ ID NO: 17925 - DNA, 120 bp, synthetic construct
  misc_feature 1..120: note = Artificially Synthesized Probe
  source 1..120: mol_type = other DNA
atggctgtgatgctgtacgtgaagtgctggcctgtagtacttggtaagtgctaactgttttcactgtggttactcattcattcacccagaagttgggcagctttcttaaacaatgggcaa

SEQ ID NO: 17926 - DNA, 120 bp, synthetic construct
  misc_feature 1..120: note = Artificially Synthesized Probe
  source 1..120: mol_type = other DNA
gcccccctctctcaatggggggtgctgtttacagttaacaattgatcagaacaggtaaagggtaattaaaatgtattcgcccaacaaatgggcattccttttataataatgaaaaaaacc

SEQ ID NO: 17927 - DNA, 120 bp, synthetic construct
  misc_feature 1..120: note = Artificially Synthesized Probe
  source 1..120: mol_type = other DNA
atatttttagctctcaaaccaaagctatcctgtgtgctgctctttcatattagggaggcagcaggaagacggtctctggcactctgagagctcagttcattttctaaatcattttgcaga

SEQ ID NO: 17928 - DNA, 120 bp, synthetic construct
  misc_feature 1..120: note = Artificially Synthesized Probe
  source 1..120: mol_type = other DNA
atacatacatcagatagggaatcctagagccaacccttagcataaattaaacacttcctgttcctctccccattttactaaatcaatgatgttcacatggaaagaaaccttgcaacaggg

SEQ ID NO: 17929 - DNA, 120 bp, synthetic construct
  misc_feature 1..120: note = Artificially Synthesized Probe
  source 1..120: mol_type = other DNA
gttccagctctgacaccccggagccctgtttatctgattagatgcatgccaatctacataactggaaagaaggggaaacctcaaaaaaagcatttaaaactcatcagatttcagttatgt

SEQ ID NO: 17930 - DNA, 120 bp, synthetic construct
  misc_feature 1..120: note = Artificially Synthesized Probe
  source 1..120: mol_type = other DNA
aaggtagggtgggtgatttttggttttgtgttttttcttccttacttagggcatctgtaggcctcaaaggacctttcctttaggtcatattcctcagaaagtcttcgctcttcagttttt

SEQ ID NO: 17931 - DNA, 120 bp, synthetic construct
  misc_feature 1..120: note = Artificially Synthesized Probe
  source 1..120: mol_type = other DNA
ataagacaaatgaaagaagactatcggacttaatggatttgacagaagagggtaacagagctgtctggtcacaaatgtgtgctactcttcaggaagaaggcaaaataaccctgaaaggaa

SEQ ID NO: 17932 - DNA, 120 bp, synthetic construct
  misc_feature 1..120: note = Artificially Synthesized Probe
  source 1..120: mol_type = other DNA
acaaacctaggttttctcacctgtgaaataggtttggtgtgtggatttattgagatctcacaagtaaaggtttagagcagtgcgtggcacatggccaatcaaccctaaaaaactatgcta

SEQ ID NO: 17933 - DNA, 120 bp, synthetic construct
  misc_feature 1..120: note = Artificially Synthesized Probe
  source 1..120: mol_type = other DNA
taaaggactcaactcacagtgcaaatgagaacaatgcaaacatttacttgtgataattgcctgactgtttctccccttgatgatttcaaggcctagaaattcctcttggcagaaagcagc

SEQ ID NO: 17934 - DNA, 120 bp, synthetic construct
  misc_feature 1..120: note = Artificially Synthesized Probe
  source 1..120: mol_type = other DNA
attcaactgtcctcctccttccttgtttcaaataacatttcggtaatacagacagatgcctacctgcagggtacggccataatgcaaccttgagggggaaatgttagggtttaaagaaac

SEQ ID NO: 17935 - DNA, 120 bp, synthetic construct
  misc_feature 1..120: note = Artificially Synthesized Probe
  source 1..120: mol_type = other DNA
tgaagttttgtgtgatgagggcaccacaggattttttttgtgggaatcacccccagttgtaagtcctcagtgccctaaactgggttttcctggaatgaagcaatcatatctgagatggga

SEQ ID NO: 17936 - DNA, 120 bp, synthetic construct
  misc_feature 1..120: note = Artificially Synthesized Probe
  source 1..120: mol_type = other DNA
cttgttcctcgcttggtgttgcctgccccacaaactcagaaacaaaccactcaagtagtaagtggtgagaaggatcagactgccacaaggtgggtgcctggaaattatctgagtctcatg

SEQ ID NO: 17937 - DNA, 120 bp, synthetic construct
  misc_feature 1..120: note = Artificially Synthesized Probe
  source 1..120: mol_type = other DNA
aaatgagccagccagacaggcaggtgaggaggacctggggctgtctggttggtcctcgccacagttctctgaggatctgaattccactgctcctattatatcaggcaacccctttcaaga

SEQ ID NO: 17938 - DNA, 120 bp, synthetic construct
  misc_feature 1..120: note = Artificially Synthesized Probe
  source 1..120: mol_type = other DNA
tgggccctcatcagacagcccatctgctggcccttgatcttgaactcacagcctctggagctataacagatccatgcctattgtttataagccaccacccagtttatgtttttttttttt

SEQ ID NO: 17939 - DNA, 120 bp, synthetic construct
  misc_feature 1..120: note = Artificially Synthesized Probe
  source 1..120: mol_type = other DNA
gtttccttccagataatggtgcttcatttatttcagactcctgtggcaactcaggaagccactgatgcccaaagaccccagggcctggtaagaatgttttaattacaggcatcctccaag

SEQ ID NO: 17940 - DNA, 120 bp, synthetic construct
  misc_feature 1..120: note = Artificially Synthesized Probe
  source 1..120: mol_type = other DNA
agaaaaaaaaaatcttaataaactgggaagaaaagtgaactttgcctgctagtgcagcagtgaaacagattgttgcttaagagaccaccctaaaactaagggctgcatgggtctgaggac

SEQ ID NO: 17941 - DNA, 120 bp, synthetic construct
  misc_feature 1..120: note = Artificially Synthesized Probe
  source 1..120: mol_type = other DNA
tagggtagaagagaccttctgggcagtattatcctctgtcctgtgaaatacgtatggcagtcaagggaataaaaacctcgaaaaacatcagcgtgtaagtttaacaaacacacaaaagaa

SEQ ID NO: 17942 - DNA, 120 bp, synthetic construct
  misc_feature 1..120: note = Artificially Synthesized Probe
  source 1..120: mol_type = other DNA
ttaaaaaaggcaagagggagattagcaacgagatttggttccaaagcaagaattgaacaccattttctgcaggacagtaaccaaagaaagaaatcatggctgacaacggggtacgcttgc

SEQ ID NO: 17943 - DNA, 120 bp, synthetic construct
  misc_feature 1..120: note = Artificially Synthesized Probe
  source 1..120: mol_type = other DNA
aggtctccacatgcctctttcccctaattttttgtactgttttaattcagctaaaagtacatgccacgaaacacacaggccttaagcacagagttggatgagtttttttgttgttgttgt

SEQ ID NO: 17944 - DNA, 120 bp, synthetic construct
  misc_feature 1..120: note = Artificially Synthesized Probe
  source 1..120: mol_type = other DNA
ggttttaaactttatttgccccccaacttctccttttttgcaacctcaccattgctatcattagaataaaattaattatccgttttcccagagggtggaaaaaggcagtgattccaggac

SEQ ID NO: 17945 - DNA, 120 bp, synthetic construct
  misc_feature 1..120: note = Artificially Synthesized Probe
  source 1..120: mol_type = other DNA
gtcactatcatgtgtcacatcggggaacaatttctgagacaggaacaaaaattgaccacaaaaagatctcccgggaaaactgtcttatttccttcagttctctggacttatcaatttaca

SEQ ID NO: 17946 - DNA, 120 bp, synthetic construct
  misc_feature 1..120: note = Artificially Synthesized Probe
  source 1..120: mol_type = other DNA
agatccttgcaaataatttaaaaaccactaaaaatataagctaaggcctcagagttcccactttgggatctgggggctaaaagagaagattctgagtttagacgttggctctaaaccctg

SEQ ID NO: 17947 - DNA, 120 bp, synthetic construct
  misc_feature 1..120: note = Artificially Synthesized Probe
  source 1..120: mol_type = other DNA
aaattcagttgttaaagtatttaactggaaacagcaggaatcttgtaggctacaacaccattcactttggaaatgcactttcctctccacaagctgcatctcagcttcctttccctaatc

SEQ ID NO: 17948 - DNA, 120 bp, synthetic construct
  misc_feature 1..120: note = Artificially Synthesized Probe
  source 1..120: mol_type = other DNA
atgcgttgctcagtcataaaatcaaggccatgctttaaagacttctggatgacttgacttatgacactcaggcacaacatcatttttttctcattctaaacactgtgtgtgttccctgac

SEQ ID NO: 17949 - DNA, 120 bp, synthetic construct
  misc_feature 1..120: note = Artificially Synthesized Probe
  source 1..120: mol_type = other DNA
tttcacacagtagcacagcaagcttcaggaattatttccagaattctaatggagcatgattcaccggcaagaggatgatgacctaattatccacctgtgtcagttaaatggcaagaagcc

SEQ ID NO: 17950 - DNA, 120 bp, synthetic construct
  misc_feature 1..120: note = Artificially Synthesized Probe
  source 1..120: mol_type = other DNA
tttttttttttaaataaggccaacagatgaacatctcaaggcaacccatattttaagtcattttactgtgaggaccctgacccaggaaagaaaagcaattgctataaaacaggtggccca

SEQ ID NO: 17951 - DNA, 120 bp, synthetic construct
  misc_feature 1..120: note = Artificially Synthesized Probe
  source 1..120: mol_type = other DNA
tacactgatggtgtacaacatgttttgaaaaacgcatacaggccaggcacagtggctcagcctgtaatcccagcactttgagaggccaaggcggatggatcacttgagcccaggagtttg

SEQ ID NO: 17952 - DNA, 120 bp, synthetic construct
  misc_feature 1..120: note = Artificially Synthesized Probe
  source 1..120: mol_type = other DNA
gttcaacttgttaagattctgcacataagtgagattgcatcatgcttgtgcctggcttgtggtgcttaacattatgtcctccgggctcattccatggatgtcttttaaataatcaatcaa

SEQ ID NO: 17953 - DNA, 120 bp, synthetic construct
  misc_feature 1..120: note = Artificially Synthesized Probe
  source 1..120: mol_type = other DNA
gatcaaggaggttaagtcaaaaccttgtcctgaatcacaacaggcaatatcaatataactcatgatgcatattacctaaaaagtaagcccccttaaacttagacgtggcccttaaacacc

SEQ ID NO: 17954 - DNA, 120 bp, synthetic construct
  misc_feature 1..120: note = Artificially Synthesized Probe
  source 1..120: mol_type = other DNA
attgaatgcagaagggaatcaatcgtaaactctagaccttaaaatccaacgtctacaattaaggacctcaaaggtaggcttaagatcggattacatgtaggagatggataaggaaattgg

SEQ ID NO: 17955 - DNA, 120 bp, synthetic construct
  misc_feature 1..120: note = Artificially Synthesized Probe
  source 1..120: mol_type = other DNA
tcagaaaggaataaaaagcaaatggaaaataagtgagcaagtaataaagaacaggaagatgtaggagtggtgagtttctaaacgtgttaccacagctaggagatgcaggggaggaagctg

SEQ ID NO: 17956 - DNA, 120 bp, synthetic construct
  misc_feature 1..120: note = Artificially Synthesized Probe
  source 1..120: mol_type = other DNA
tggccaagcatcaatgtcttaaccctgattagcctaattgggcagctcctcttctcttccagccagtgacatccagcctataagaatgcagaccggtgaaccactgcccagtgatggctc

SEQ ID NO: 17957 - DNA, 120 bp, synthetic construct
  misc_feature 1..120: note = Artificially Synthesized Probe
  source 1..120: mol_type = other DNA
ttgagccaccgtacccagccccttgcctgatacttgataagggttttacacttttattatctcattaggcaccacaaaaccttataagagaaatggggcttatttcagagaacagataaa

SEQ ID NO: 17958 - DNA, 120 bp, synthetic construct
  misc_feature 1..120: note = Artificially Synthesized Probe
  source 1..120: mol_type = other DNA
acagcactaacttcttattgtccaggatgtgtaaagagattattctcatggtctgcggtgctaacatcctataaacctgccacaaatacaaaattagcaatactgagctgttgctcctag

SEQ ID NO: 17959 - DNA, 120 bp, synthetic construct
  misc_feature 1..120: note = Artificially Synthesized Probe
  source 1..120: mol_type = other DNA
ataccaggcaggcacacatcatgtgcttgccaaggcatctcaatatgttaatttctttgttttaaaaaaataagggcctagagtaataagaagtagactccaatgcaacacacggagaca

SEQ ID NO: 17960 - DNA, 120 bp, synthetic construct
  misc_feature 1..120: note = Artificially Synthesized Probe
  source 1..120: mol_type = other DNA
agttccagggtcctcagagtaaactgttatttctgggtctatttgggaggctgttcctggatatatctgggagaatgttcctggatcagcatttgaatcggtaaacccagaaaagcagat

SEQ ID NO: 17961 - DNA, 120 bp, synthetic construct
  misc_feature 1..120: note = Artificially Synthesized Probe
  source 1..120: mol_type = other DNA
ttccttactctctagtgtgacttccagaacttgtacctgaggttgccatctgttagtggtgtgtgtatcataaggaagcctctgcttttgcagaaatatctgaggggtagaatggagaga

SEQ ID NO: 17962 - DNA, 120 bp, synthetic construct
  misc_feature 1..120: note = Artificially Synthesized Probe
  source 1..120: mol_type = other DNA
gcagcaaacacaggtaacatttcaatgaacagacatgactatgctccagaaaatttttatttacaaagataaggctacgggccaagtgcaggacctactgtgtaaacctcaatgcagaat

SEQ ID NO: 17963 - DNA, 120 bp, synthetic construct
  misc_feature 1..120: note = Artificially Synthesized Probe
  source 1..120: mol_type = other DNA
tgtgagctgctgaacctaagccactctcaagtcactgccacatctgggtagaggtcattggtctcagaggttgatcttgcaaacataaatgccttttctcttgtttttatttctttgtct

SEQ ID NO: 17964 - DNA, 120 bp, synthetic construct
  misc_feature 1..120: note = Artificially Synthesized Probe
  source 1..120: mol_type = other DNA
ctcacatctagaaagccactgcctgctgctgaagggccaatctcttctgagcagataccctctcaacgacgcttattatttttccaaagtgaaaatcatactaatgttttttataaagaa

SEQ ID NO: 17965 - DNA, 120 bp, synthetic construct
  misc_feature 1..120: note = Artificially Synthesized Probe
  source 1..120: mol_type = other DNA
cctaggctcatgccttccatacaatattgtcctggtggttgccacagaaaacagaaactattgaaaagcacagcataccacttcacgtgaattagcatggctactacatagaaaaaaaaa

SEQ ID NO: 17966 - DNA, 120 bp, synthetic construct
  misc_feature 1..120: note = Artificially Synthesized Probe
  source 1..120: mol_type = other DNA
tgactacagttgagaaaaatatgaatttctaaattctcttgaaaaccaggaagatctgacaacaatgggtatatatgtatttattgtaattttttaaaaaagcaacaacaggctgggtgt

SEQ ID NO: 17967 - DNA, 120 bp, synthetic construct
  misc_feature 1..120: note = Artificially Synthesized Probe
  source 1..120: mol_type = other DNA
ttatgtcccaatgataagagaaaatgctgctgctgaatatttcaaatactattgattatgatatagaagaggcgaatgggaaccccttaggctgacatgccacgtgtgggtaaatcacga

SEQ ID NO: 17968 - DNA, 120 bp, synthetic construct
  misc_feature 1..120: note = Artificially Synthesized Probe
  source 1..120: mol_type = other DNA
gacatgaaaaaaacagactctgtcctaactagacactttccaagatctgaaaggcctactccaagagacagcaacttgggaatgttttaaaactccatgttctgaaaagcatagcgactc

SEQ ID NO: 17969 - DNA, 120 bp, synthetic construct
  misc_feature 1..120: note = Artificially Synthesized Probe
  source 1..120: mol_type = other DNA
ttgctatttatttctctatcttgttgacaatcattttggtctctgaagatcatgttagcaaccaaaagccagagctgaaacagttctccactaacgaacaggttcatagagagctggtgc

SEQ ID NO: 17970 - DNA, 120 bp, synthetic construct
  misc_feature 1..120: note = Artificially Synthesized Probe
  source 1..120: mol_type = other DNA
ttttcttgaggggcaatagaacattttttaaaaggcaaagcttggagaaaaaaggtctaggtcaagtcctggtgttgtccctgtttactcaggaaccgcttattgttgaggaacacaaat

SEQ ID NO: 17971 - DNA, 120 bp, synthetic construct
  misc_feature 1..120: note = Artificially Synthesized Probe
  source 1..120: mol_type = other DNA
acagaggctatcaggggacttataaaaatacatatatgtgtcattttgctcactaagatttagccaaagaaacagtatttactcacagccacctgtacgggtcaatcctgaggaatgtgc

SEQ ID NO: 17972 - DNA, 120 bp, synthetic construct
  misc_feature 1..120: note = Artificially Synthesized Probe
  source 1..120: mol_type = other DNA
aggcagaacaacggcctagaagagatcaagtcccaatccctggagcccataaataagtgaactttgtcttcatagatgtcatgaagttaacgatcttcagatgcagagactatcctggat

SEQ ID NO: 17973 - DNA, 120 bp, synthetic construct
  misc_feature 1..120: note = Artificially Synthesized Probe
  source 1..120: mol_type = other DNA
gataactaaaaagatttacagcctatgtggggcattaaaacttcatggagggtgcaagaaaaaaggaaaaaatggctgaaaaagcaccagcttaaatgaacaagcaccacacaggggtca

SEQ ID NO: 17974 - DNA, 120 bp, synthetic construct
  misc_feature 1..120: note = Artificially Synthesized Probe
  source 1..120: mol_type = other DNA
ataagaagaggcaccagagagccagctcactctttctttgccacatgagggcacagggagaaggaaatcagcccccatgagaaatggaatcagccacaaccttgctcggacttccagcct

SEQ ID NO: 17975 - DNA, 120 bp, synthetic construct
  misc_feature 1..120: note = Artificially Synthesized Probe
  source 1..120: mol_type = other DNA
agatagatgggaaagtgcatccctctcaaagcactttaaagtttagcttgggagacttatgcatgaaccattcattgtaatacaatacagaaaaggtacccagcaagtactgtgggaatc

SEQ ID NO: 17976 - DNA, 120 bp, synthetic construct
  misc_feature 1..120: note = Artificially Synthesized Probe
  source 1..120: mol_type = other DNA
taaatagcaaacatctgatcatccgtcttgatttccttctgtttaaatattacttgttgacttcctgccagggaagatgagagtttcactcatttatcacacagcccaagacagccacag

SEQ ID NO: 17977 - DNA, 120 bp, synthetic construct
  misc_feature 1..120: note = Artificially Synthesized Probe
  source 1..120: mol_type = other DNA
agggctctcttccgcctccttgtgttcatctccaacattactgctatgccatttttttgcaatcattattgatcttcaagagtttctcaaatgctccctgtttcacagatgctattatat

SEQ ID NO: 17978 - DNA, 120 bp, synthetic construct
  misc_feature 1..120: note = Artificially Synthesized Probe
  source 1..120: mol_type = other DNA
cgcacaaggaatggctctcctaattattggatctacagcccttggtgggaatgaacgtgacctcaagtcctctctttcacagcctccctctccactaaccaaaccttcccagttcaacct

SEQ ID NO: 17979 - DNA, 120 bp, synthetic construct
  misc_feature 1..120: note = Artificially Synthesized Probe
  source 1..120: mol_type = other DNA
aggctcaacctccctctgcactaaccaacccttctcaattaaccaactgacttggaaaatctccctgtgctgaccccaatctggtgaaattcttgaggcacctctccaacacacacacac

SEQ ID NO: 17980 - DNA, 120 bp, synthetic construct
  misc_feature 1..120: note = Artificially Synthesized Probe
  source 1..120: mol_type = other DNA
acattttaaaaaattatagttacatataaatacccatgtgcgtcctgtggttactggactggacagggagctctagaatattctgccaaatccagatgcctcactcagcatcttcatgag

SEQ ID NO: 17981 - DNA, 120 bp, synthetic construct
  misc_feature 1..120: note = Artificially Synthesized Probe
  source 1..120: mol_type = other DNA
ttaaattaaaaaaattaaattttaacatctgggcaggttacaatcaagctctcttgggtcagatccaacctccagacggccgacggtgaactttacactacggctcattctatcaaccaa

SEQ ID NO: 17982 - DNA, 120 bp, synthetic construct
  misc_feature 1..120: note = Artificially Synthesized Probe
  source 1..120: mol_type = other DNA
agtatccacagtcatgaggcactgtctgacccctccacctgcgcgtcttagtgagtcggggcctctatgccaaaacacctgaggctgggtcgattataaatggcagaaatctatggctca

SEQ ID NO: 17983 - DNA, 120 bp, synthetic construct
  misc_feature 1..120: note = Artificially Synthesized Probe
  source 1..120: mol_type = other DNA
cacatgaatttgaaggcacattaagactacagcacctatatgtgatgctatgcaaacttctggacactcccttaactgcagtgattagccccatttcaaagaagtagagaggagttgcat

SEQ ID NO: 17984 - DNA, 120 bp, synthetic construct
  misc_feature 1..120: note = Artificially Synthesized Probe
  source 1..120: mol_type = other DNA
gccctagttccaaacaatatcacattcacaggttctagatagacatgaatttacggggcaaacgctttgactcagtaagggagcatttggagacttttaagtaaatcctaagtggcctgc

SEQ ID NO: 17985 - DNA, 120 bp, synthetic construct
  misc_feature 1..120: note = Artificially Synthesized Probe
  source 1..120: mol_type = other DNA
tgtctagctacttggctgtcttgttcaaataaatgggattttatcaaatcacccagtaagtgcaaaatgcagtctctgggtggcgatggagctagtacccgtctcagtgctgaaactgtt

SEQ ID NO: 17986 - DNA, 120 bp, synthetic construct
  misc_feature 1..120: note = Artificially Synthesized Probe
  source 1..120: mol_type = other DNA
tgtatgtgtgtgtgtgtctaatagacagtcttacatgaactttacaatttgcccacatcagctcatagaaattgcaatgcagacagcagcacaacagggacatcctgggaccctgcccat

SEQ ID NO: 17987 - DNA, 120 bp, synthetic construct
  misc_feature 1..120: note = Artificially Synthesized Probe
  source 1..120: mol_type = other DNA
ccatattaaatttgggccttattaaaatggagccattctgaacgtctctcattgccactgcctttttttcctgattttctccaccctttctttgcttctggatgtctggttaaaaactgt

SEQ ID NO: 17988 - DNA, 120 bp, synthetic construct
  misc_feature 1..120: note = Artificially Synthesized Probe
  source 1..120: mol_type = other DNA
catgcaaagagatttattttaagggattggtttaaatgattgtggaggctgacaagtccaaaatccataggacagggcagcaggctggaaactcaggcaggagttgatgctgcagtctta

SEQ ID NO: 17989 - DNA, 120 bp, synthetic construct
  misc_feature 1..120: note = Artificially Synthesized Probe
  source 1..120: mol_type = other DNA
ggtacagggtttccttttgggaaaggaaagttcccaaagctaagttcttagctagacaatggggatggttttgcacagcatcatgaatattcttaatgccaccaaagtgtacactttaaa

SEQ ID NO: 17990 - DNA, 120 bp, synthetic construct
  misc_feature 1..120: note = Artificially Synthesized Probe
  source 1..120: mol_type = other DNA
atgttgctttcatctggctcctgtatgctgtcaggtgaggctcacctgctgccaactatggccaaacaatttcactttttaagactatatcctatagaaagtcttgcacatgtatataaa

SEQ ID NO: 17991 - DNA, 120 bp, synthetic construct
  misc_feature 1..120: note = Artificially Synthesized Probe
  source 1..120: mol_type = other DNA
ataaaggcttaaagtctatattatagaaaagcagggactatgtctggaaggatatgcaccagttaacggtatttactttcatggaaaggaaaaggattagggagagaacagaaggaatct

SEQ ID NO: 17992 - DNA, 120 bp, synthetic construct
  misc_feature 1..120: note = Artificially Synthesized Probe
  source 1..120: mol_type = other DNA
gcagtagaatactgatgtagccgtaccgactattagaataattttgcctagcaaatgcagttggctgtttagaataagcaaactctgtttttggaagtgcatttaaatgatcaggggctg

SEQ ID NO: 17993 - DNA, 120 bp, synthetic construct
  misc_feature 1..120: note = Artificially Synthesized Probe
  source 1..120: mol_type = other DNA
aactgtatggtgtgtgaattgcatctcaatagagggtcacatacatatttaagaagacagacagcaggaaggcaggccaccctggcagagagtcttcatccctggctgggtgggtcgggc

SEQ ID NO: 17994 - DNA, 120 bp, synthetic construct
  misc_feature 1..120: note = Artificially Synthesized Probe
  source 1..120: mol_type = other DNA
cacagggtttcagggtgggaaacccctggaaaaagcacaaatgtggattccagtttttacgctgagatttccatactctactaattattgccataaatatatgttgctttgagtacagga

SEQ ID NO: 17995 - DNA, 120 bp, synthetic construct
  misc_feature 1..120: note = Artificially Synthesized Probe
  source 1..120: mol_type = other DNA
ctctgccccagctgcaggacttgccctgtgtcctgatcatgagcccaaaatttcccgtcaaatcacccccagtgggatcctgttatttccaactccaaaaagtctttctttctttttttt

SEQ ID NO: 17996 - DNA, 120 bp, synthetic construct
  misc_feature 1..120: note = Artificially Synthesized Probe
  source 1..120: mol_type = other DNA
cctggcgaattggaatacagaatatgagagccctgctcagggaggagcctgggacactcttccccatctcctcttatttctcagtaagaactttttctgaaaattccctattataggctg

SEQ ID NO: 17997 - DNA, 120 bp, synthetic construct
  misc_feature 1..120: note = Artificially Synthesized Probe
  source 1..120: mol_type = other DNA
cccttgcgaggctgctggctgccctggattcctttcagaggtgtatcttatctgacaggtctttatccttttaaataattcagtgaagtataaatatagaagcaattggaatgctttttg

SEQ ID NO: 17998 - DNA, 120 bp, synthetic construct
  misc_feature 1..120: note = Artificially Synthesized Probe
  source 1..120: mol_type = other DNA
tatgcaaagggggttctcagcaggggagggatgaagaacttgggtgacagaaagtggatttgagggaagacagactggaaggaaagaggctggatggtgaatacatagtcccagggagag

SEQ ID NO: 17999 - DNA, 120 bp, synthetic construct
  misc_feature 1..120: note = Artificially Synthesized Probe
  source 1..120: mol_type = other DNA
actcttccagggagatgaacagtgagtggggaagttgggggtggtacagaactctcccagggagatgagcagtgagtggcgaagttggggaggaggggtacagaactctcccagggagat

SEQ ID NO: 18000 - DNA, 120 bp, synthetic construct
  misc_feature 1..120: note = Artificially Synthesized Probe
  source 1..120: mol_type = other DNA
tttgttttcaggttaagctatcttttgaaataaggccttttgggcagccataaatgtaaaaacaactaagatgtctgcataagtaaaacggggaagtggctgggacgcttgtgtcattgg

SEQ ID NO: 18001 - DNA, 120 bp, synthetic construct
  misc_feature 1..120: note = Artificially Synthesized Probe
  source 1..120: mol_type = other DNA
gtattttattacaagtgtggaggtggtaaggcctgcctaaaactgataaagcacatgtaacaatccatacacctgggtgcttttagatctaacaaggagaggcttgttacaggaatatcg

SEQ ID NO: 18002 - DNA, 120 bp, synthetic construct
  misc_feature 1..120: note = Artificially Synthesized Probe
  source 1..120: mol_type = other DNA
aagactcatccaaagagactggaagaatctgaatatctagggaaggcaaataaagtgcctttgcttgacaagttccccagcagcacaatgcaacaccgcaaccatgactgtgtatttggc

SEQ ID NO: 18003 - DNA, 120 bp, synthetic construct
  misc_feature 1..120: note = Artificially Synthesized Probe
  source 1..120: mol_type = other DNA
tctaatgaaccacatgcctcatacatgtgtagacaagggggagtgagtatagcaaggtgttcaaatggtgactcaggaaggaaagaagctttgggtcaagtacaacacgcagtgcctgca

SEQ ID NO: 18004 - DNA, 120 bp, synthetic construct
  misc_feature 1..120: note = Artificially Synthesized Probe
  source 1..120: mol_type = other DNA
cagctgaggcataggacagatatggggcatgtggagtgtggagtgataccaagtcaagctcaatacagatcatcaaaatgtgttaaccttttctaatcagaaagaaacatcaacactttc

SEQ ID NO: 18005 - DNA, 120 bp, synthetic construct
  misc_feature 1..120: note = Artificially Synthesized Probe
  source 1..120: mol_type = other DNA
agaaaaatgtacaactatgtgagggagtcatcagcagaaggcttgactgagggtcaggaagtctgaattggatcttgaaggatgcataggagttttccagggcaaagaatccaggaagat

SEQ ID NO: 18006 - DNA, 120 bp, synthetic construct
  misc_feature 1..120: note = Artificially Synthesized Probe
  source 1..120: mol_type = other DNA
cgcacatgatccacacaagggagtattatttaccttaaaactattattcagcttaaaaaggaaggataaaaaattccgacacagcctacagcgtggacaaacctcgaaaacattgcactc

SEQ ID NO: 18007 - DNA, 120 bp, synthetic construct
  misc_feature 1..120: note = Artificially Synthesized Probe
  source 1..120: mol_type = other DNA
ccttccccatctcatgactctgatctgcccctctccatgttccatatagagacctgctgacggggtagatggctgactccagaactgaacagagtttgcatcccagctacagagggtgga

SEQ ID NO: 18008 - DNA, 120 bp, synthetic construct
  misc_feature 1..120: note = Artificially Synthesized Probe
  source 1..120: mol_type = other DNA
gtttgggtgagggccactaaggggcaggggctgacaagcaggcattggctaattaagcaggggcttagtatattttgtttcttttgtagtttgctgacctaagccaattttttttttttt

SEQ ID NO: 18009 - DNA, 120 bp, synthetic construct
  misc_feature 1..120: note = Artificially Synthesized Probe
  source 1..120: mol_type = other DNA
agtcctgaaccatttatcagaactttcgcctgagtacctatgtgcaccctcatctgtaggcagaaacaacccttaaccctcacagggttcagatgagaatcacgtgggacaaagaacacc

SEQ ID NO: 18010 - DNA, 120 bp, synthetic construct
  misc_feature 1..120: note = Artificially Synthesized Probe
  source 1..120: mol_type = other DNA
gaggtgaatttcaccttctcagggtccacgagaaagagctacacctcagcaattaacagtgaggaaagatgacagggaagatattgaaactattaattggatgagctataaaaacaaaac

SEQ ID NO: 18011 - DNA, 120 bp, synthetic construct
  misc_feature 1..120: note = Artificially Synthesized Probe
  source 1..120: mol_type = other DNA
agggctgaacaaaaaccaaaagtcacccagaatcccacagtcttagcactagcagtaattttttttttttaagtgtcatttcggctagtctcttctttctgttttaacccctggtggttg

SEQ ID NO: 18012 - DNA, 120 bp, synthetic construct
  misc_feature 1..120: note = Artificially Synthesized Probe
  source 1..120: mol_type = other DNA
caatggatgccaaaactgtcaggtgaaaggggtatgagaaaacagatttttgcatagcctcaaagatcaccaaacaagatctattaattacaaaggagcaaagtaaggcaggaggtggga

SEQ ID NO: 18013 - DNA, 120 bp, synthetic construct
  misc_feature 1..120: note = Artificially Synthesized Probe
  source 1..120: mol_type = other DNA
agaacgaactcgcttgacacaaagatactgaaagctaccaaagtgttaaaagaaggaattcatcctcccacaagagaagcaacactaacctccttttcttattttgaaaagggtgtctgg

SEQ ID NO: 18014 - DNA, 120 bp, synthetic construct
  misc_feature 1..120: note = Artificially Synthesized Probe
  source 1..120: mol_type = other DNA
caaacaaaattgttcccaaccacacttaggcatttctcccaaaacatatgccttgtgacatgaggtagagacaccacagcccacacaacaaagagtcacatcatttcggctctcactggg

SEQ ID NO: 18015 - DNA, 120 bp, synthetic construct
  misc_feature 1..120: note = Artificially Synthesized Probe
  source 1..120: mol_type = other DNA
aagacatcatgctataattccaaaaggagagatgactggcattcccacataaagctgcggcccttgcccaccttccccatggagcccatcactctcataacatgatttttggaaagatga

SEQ ID NO: 18016 - DNA, 120 bp, synthetic construct
  misc_feature 1..120: note = Artificially Synthesized Probe
  source 1..120: mol_type = other DNA
ggcccgaaactatttctttaaggcggacactcttcatttaaatgcgataaataacaaatagcagccagtaacaacattcagactgatgtcacacccattgcacaatgggagcaaaatcaa

SEQ ID NO: 18017 - DNA, 120 bp, synthetic construct
  misc_feature 1..120: note = Artificially Synthesized Probe
  source 1..120: mol_type = other DNA
tacccccaaatctgacccctgatgtccttgggttgtgggaatgcattggggtgtttcttaacttgcttctttatacttctttgtattttccaagatttccatgatgcatgggtaattttt

SEQ ID NO: 18018 - DNA, 120 bp, synthetic construct
  misc_feature 1..120: note = Artificially Synthesized Probe
  source 1..120: mol_type = other DNA
caatgagaagtaaccagctctgaggatatagaatcatagtgcaattaaagcagctcaggacaatgaatgcccccaaattgctacgggtcctatacacatttgaccatttttacaaagaca

SEQ ID NO: 18019 - DNA, 120 bp, synthetic construct
  misc_feature 1..120: note = Artificially Synthesized Probe
  source 1..120: mol_type = other DNA
tatataatataatatataacatattatatgttatatatattatattatataaaatataatatattatataatatattatgttatataatatatattatatttatattatataatatatga

SEQ ID NO: 18020 - DNA, 120 bp, synthetic construct
  misc_feature 1..120: note = Artificially Synthesized Probe
  source 1..120: mol_type = other DNA
ccttatctgctccgtcccttatcatctgataggcacaagggccctgcagatgaatgagaggaggctcgcgaaggcaaagttgcttcacattatcactgagaatctttagcaggggagaaa

SEQ ID NO: 18021 - DNA, 120 bp, synthetic construct
  misc_feature 1..120: note = Artificially Synthesized Probe
  source 1..120: mol_type = other DNA
aggactcattcactaaaggaaacctgaatttaaaccttcctcttccttgggcgctcctgtcttcatgaagtcagtgactgctctcaaaaccagtagactaaattgatgattctccataat

SEQ ID NO: 18022 - DNA, 120 bp, synthetic construct
  misc_feature 1..120: note = Artificially Synthesized Probe
  source 1..120: mol_type = other DNA
cctgaacacacaaacaacattgagtggtttctatggtgtcatccagcgacatcaaatgacagttctgttcacgtgaatcaccgactttgagttgactgagaacaagactcattatccatt

SEQ ID NO: 18023 - DNA, 120 bp, synthetic construct
  misc_feature 1..120: note = Artificially Synthesized Probe
  source 1..120: mol_type = other DNA
taatttatgttcgtctttctatctcatgtctggtttccccccacgggaacaccaggggcttgcatcaggcatttctgttcactgctgcaggctgtgtattcaggacaccgagacacatgg

SEQ ID NO: 18024 - DNA, 120 bp, synthetic construct
  misc_feature 1..120: note = Artificially Synthesized Probe
  source 1..120: mol_type = other DNA
tatgtatatgcacgcagagaatttttaaaagtttagagcttagacacataaaattaaagatagaaatattttaaagagttggctcatgcaatcacggaggctgtaagtctgaaatctgca

SEQ ID NO: 18025 - DNA, 120 bp, synthetic construct
  misc_feature 1..120: note = Artificially Synthesized Probe
  source 1..120: mol_type = other DNA
acacctctacctgatcaggtaaagacttttcactggagacagccggtgaaatctgtttcttgccaagaccaggctgacctacctcctaacccaactgttgcaaggttgggcctgaaaaac

SEQ ID NO: 18026 - DNA, 120 bp, synthetic construct
  misc_feature 1..120: note = Artificially Synthesized Probe
  source 1..120: mol_type = other DNA
ctgtctttataatctggggatgcaccaagctctaaaagggtctaggaaaaaaaaattgaaagccgtcgttattggtctcatgaccccttttgcagagtgaggtgatccagaaagcagcac

SEQ ID NO: 18027 - DNA, 120 bp, synthetic construct
  misc_feature 1..120: note = Artificially Synthesized Probe
  source 1..120: mol_type = other DNA
aaacctcttcttataaattactccgatctcacatttctttattgcaacgcaggaacagactcacacaccaacagaaggggtgcagctgaaatgaagtgaaagtcctgagactttagggac

SEQ ID NO: 18028 - DNA, 120 bp, synthetic construct
  misc_feature 1..120: note = Artificially Synthesized Probe
  source 1..120: mol_type = other DNA
cccaaacacacacactttagaaccaacatttgtcacactgctcacaaagccatattcagatgcccaaaactaagctgaaagaactgactcccctcctccacctccagggtgtttacagct

SEQ ID NO: 18029 - DNA, 120 bp, synthetic construct
  misc_feature 1..120: note = Artificially Synthesized Probe
  source 1..120: mol_type = other DNA
tattcccatctatttttaattgtgatgtttacttatccatacatgggtaccctcctgaggacttttaacattcaccctaggaaccactctgcagcttggcacttcatggtgatatgcaca

SEQ ID NO: 18030 - DNA, 120 bp, synthetic construct
  misc_feature 1..120: note = Artificially Synthesized Probe
  source 1..120: mol_type = other DNA
aacatataattttcatagctgacaacctcagctgttccattttataaatgagaatgctgtctcagagagagctggtggcaagtggtaaaatcagatcagaggcttgaatcctgacttttg

SEQ ID NO: 18031 - DNA, 120 bp, synthetic construct
  misc_feature 1..120: note = Artificially Synthesized Probe
  source 1..120: mol_type = other DNA
ttcttaagactattcctcaggttttgcattttgaaatttctttagttttaaaaatagactggaacctcaacaagcataacctcagagtggccccagtctccctcaacgtgaacaacgggt

SEQ ID NO: 18032 - DNA, 120 bp, synthetic construct
  misc_feature 1..120: note = Artificially Synthesized Probe
  source 1..120: mol_type = other DNA
aagactaaaggcaaaaggaacagaataaataaagctgggttataagtcaaccagaaagtgagtgcaaccacattgatagaaataagcaagggattcacaagtgaacgggaggaaggggcc

SEQ ID NO: 18033 - DNA, 120 bp, synthetic construct
  misc_feature 1..120: note = Artificially Synthesized Probe
  source 1..120: mol_type = other DNA
gcaaaccacccaattaaaaagggaacaaaatatttaaatggatacctcacaacagaagatattcagatagccaacacacacgagaagatgctccacaccgtatgtcattagggaactgca

SEQ ID NO: 18034 - DNA, 120 bp, synthetic construct
  misc_feature 1..120: note = Artificially Synthesized Probe
  source 1..120: mol_type = other DNA
ccttcagtaggtgagtggatacattatccattgcacatgcagacaacaagatgttgttcaacactaaagagagacaagctgtcaagccacaacacgatacgaaggaagcttaaatgcata

SEQ ID NO: 18035 - DNA, 120 bp, synthetic construct
  misc_feature 1..120: note = Artificially Synthesized Probe
  source 1..120: mol_type = other DNA
ttaaaaacaggtctctttttatgagaaactgtactgaacaaaccaaaggcactggtagcaaagggagttatttactcgaagtcttccagctccttcattggcactgggtaatttctgcac

SEQ ID NO: 18036 - DNA, 120 bp, synthetic construct
  misc_feature 1..120: note = Artificially Synthesized Probe
  source 1..120: mol_type = other DNA
tcctgagcttagcaaaaaggctgctttcaactctaagcacagactctgctgtcccctgggtggctttgagaagtcaccaaactcactgtggagaggctaaaatatgggatgggaacatgc

SEQ ID NO: 18037 - DNA, 120 bp, synthetic construct
  misc_feature 1..120: note = Artificially Synthesized Probe
  source 1..120: mol_type = other DNA
aaccaggagaaaacaacattgactgagctgccgtagttgatgctgatgacaggaacattctggaactctattaaaggtgacgcataccccatacgcttaaccactgatatggtttggatg

SEQ ID NO: 18038 - DNA, 120 bp, synthetic construct
  misc_feature 1..120: note = Artificially Synthesized Probe
  source 1..120: mol_type = other DNA
ataagtaatgtttttggccttacaaaaaaatgccactgtgtatgatcgctgttagtttgatctgtacaaaaacccacacacgggtgtttatggcagcttgacccacaattgccaaaagct

SEQ ID NO: 18039 - DNA, 120 bp, synthetic construct
  misc_feature 1..120: note = Artificially Synthesized Probe
  source 1..120: mol_type = other DNA
tactgggttacgactccaagcgtgaaccttcatgtaagcttggacttgaggatcacaactggttcactgattgtaacagatgtcctatactaaagcaagatattactaacagaggaaact

SEQ ID NO: 18040 - DNA, 120 bp, synthetic construct
  misc_feature 1..120: note = Artificially Synthesized Probe
  source 1..120: mol_type = other DNA
catgagaatatttcagaacattcataaggtaactctgtgctactgtctccatggatcaggctcccaagccatttctactcagctctgggaaacatggtcaggtctttctcctttaattat

SEQ ID NO: 18041 - DNA, 120 bp, synthetic construct
  misc_feature 1..120: note = Artificially Synthesized Probe
  source 1..120: mol_type = other DNA
gacccagagaaatcgctgcttacctgtttcagagtctgcactgatgtgtttttagcagtgaattgagagtctattctggaataacagtcatctcagaaccttaaagtcgagacattaaca

SEQ ID NO: 18042 - DNA, 120 bp, synthetic construct
  misc_feature 1..120: note = Artificially Synthesized Probe
  source 1..120: mol_type = other DNA
acaaatgatgagaaagtggcattctttggttgacaaacacatttgttgtgtattttatatttttgaggtgtgacaccagtatgtgatgatggcactataccatgcaggggccagaagcag

SEQ ID NO: 18043 - DNA, 120 bp, synthetic construct
  misc_feature 1..120: note = Artificially Synthesized Probe
  source 1..120: mol_type = other DNA
caggcctcggtccagcatcttggtgatcttctccaccaagcgatgctgaatgtgatccatgcatttcttcagattggtctagaaggaaaaacaatacaattgaaacatctttataagaaa

SEQ ID NO: 18044 - DNA, 120 bp, synthetic construct
  misc_feature 1..120: note = Artificially Synthesized Probe
  source 1..120: mol_type = other DNA
cctatcctggatgaatgtttaaaatcccctcaccgttcgccatcctagtgctacggacttaacgtgtgtgtccccgcaaaattcataggttgaataatctccaatgtaatagtatggaga

SEQ ID NO: 18045 - DNA, 120 bp, synthetic construct
  misc_feature 1..120: note = Artificially Synthesized Probe
  source 1..120: mol_type = other DNA
gatttccacctgcccattttctgtatgtttcggaactagaactgatcaaatgccctcaaacacatgacttacacatggtgtcactgaaaacctgcattgctatttacaaatcagcatttt

SEQ ID NO: 18046 - DNA, 120 bp, synthetic construct
  misc_feature 1..120: note = Artificially Synthesized Probe
  source 1..120: mol_type = other DNA
tagtgcattccgccaggttctgaacactctgtgcaacgcccctgctgctcacctgcagtctaacttcagtgcaatttatgtgaacagcactttaacaaggtttttcctgaagcaacaaca

SEQ ID NO: 18047 - DNA, 120 bp, synthetic construct
  misc_feature 1..120: note = Artificially Synthesized Probe
  source 1..120: mol_type = other DNA
gttttaaataaatgactggtatttgcaccccagagcctacaacatcctcagcatcacttttgtcaagattctgtagcagtttagctaaaaagccatataaagaaacaggagcaaggggaa

SEQ ID NO: 18048 - DNA, 120 bp, synthetic construct
  misc_feature 1..120: note = Artificially Synthesized Probe
  source 1..120: mol_type = other DNA
ccaaacaaaatggctatttgacaaaagacaaaattcttgtgcacagactgatacttgtggggttttgttttcaactggccaaataaaccagctgtgaaatcggaaagttctgtgaagcgc

SEQ ID NO: 18049 - DNA, 120 bp, synthetic construct
  misc_feature 1..120: note = Artificially Synthesized Probe
  source 1..120: mol_type = other DNA
aaacaaaacaaaaaacaaagtatcagcaacaatttcatgacaatgaaaccagagcagcagctgcaaagtcaatttggggacttgtggatggccaggctcacaacgcacacactgctccat

SEQ ID NO: 18050 - DNA, 120 bp, synthetic construct
  misc_feature 1..120: note = Artificially Synthesized Probe
  source 1..120: mol_type = other DNA
atgccaacatgttgtgcaggagtagaaatgatccgtttctggcttctcttaactgacgtaacccaacacgtatacactgcaggaaacaatgcctgtaaacttggggcgtagcaagcctgg

SEQ ID NO: 18051 - DNA, 120 bp, synthetic construct
  misc_feature 1..120: note = Artificially Synthesized Probe
  source 1..120: mol_type = other DNA
tatgatgtaatttaaaaattccttctttgtgcctgactcctggcagagttcctaaaacctttgtactgtcctcagtgataagagtatctctggagcactaatgagatgactctcaactcc

SEQ ID NO: 18052 - DNA, 120 bp, synthetic construct
  misc_feature 1..120: note = Artificially Synthesized Probe
  source 1..120: mol_type = other DNA
agccaaatcatatcaaacctcaagaccccagactgatttttaaatgtggggataatttcccaatgcaaatggaattggtctcgccccaccaccatgtctcccccacccaccatggcatcc

SEQ ID NO: 18053 - DNA, 120 bp, synthetic construct
  misc_feature 1..120: note = Artificially Synthesized Probe
  source 1..120: mol_type = other DNA
tcgttctttagcatttcagattcggtggaagccttgtcttataaccacactgacgagaaagttttcatactacctacgctgactctgaacacaaaagctttaaaaatgcagtcatcacct

SEQ ID NO: 18054 - DNA, 120 bp, synthetic construct
  misc_feature 1..120: note = Artificially Synthesized Probe
  source 1..120: mol_type = other DNA
ggggctcaataattcactttgtcactgtcaaagtgttcagaacaaaaggaggtttgattgaatataagactcaaaccaattctctatctgaggattctgtgggtttgtgcccaagaaagc

SEQ ID NO: 18055 - DNA, 120 bp, synthetic construct
  misc_feature 1..120: note = Artificially Synthesized Probe
  source 1..120: mol_type = other DNA
catgcctatgtcctgaatggtactacctaggttttcttctagtgtttttatggttttaggtctaacatttaagtctttaatccatcgtgaattaatttttgtataaggtgtaaggaaggc

SEQ ID NO: 18056 - DNA, 120 bp, synthetic construct
  misc_feature 1..120: note = Artificially Synthesized Probe
  source 1..120: mol_type = other DNA
tttgagacaatacgtgtctgggatttaaggcaccagtctgtggttggttatggcaggcatgggaactcataaacgtgtgaatcacctgccactaattgtggcagcaaaaaaacagcagca

SEQ ID NO: 18057 - DNA, 120 bp, synthetic construct
  misc_feature 1..120: note = Artificially Synthesized Probe
  source 1..120: mol_type = other DNA
cctgcgaggtggctattcctttataatttgttagagatgttctgagtgagtgagtgatttgttagatgactcacagatagtacagaaaggatggcaaagacaacagtgtataggaagtcc

SEQ ID NO: 18058 - DNA, 120 bp, synthetic construct
  misc_feature 1..120: note = Artificially Synthesized Probe
  source 1..120: mol_type = other DNA
gatgatgttcctctctatacacacccactgccaatcttagtgcaggcaaatcataaattagaggcatatcccattctatttcacttgctttattgagcttcacagagaaggtgtttttgc

SEQ ID NO: 18059 - DNA, 120 bp, synthetic construct
  misc_feature 1..120: note = Artificially Synthesized Probe
  source 1..120: mol_type = other DNA
tccagtgaacacacaaatggtaagtgaaacaggccttagtgctgacagggagaaggtttgagtcaccaaactttgatgatcaagacggtcacaacattcatttaaaccaaagcctcatcc

SEQ ID NO: 18060 - DNA, 120 bp, synthetic construct
  misc_feature 1..120: note = Artificially Synthesized Probe
  source 1..120: mol_type = other DNA
gatgccattaagaatattcatgtttcataagaggaggtggaaatgtcaacattaagttcggaagaagttgattccaaccctcataaacgactttttttttttttttttttgagatggagt

SEQ ID NO: 18061 - DNA, 120 bp, synthetic construct
  misc_feature 1..120: note = Artificially Synthesized Probe
  source 1..120: mol_type = other DNA
ccagactcactatctctaagatatgcctgttatgtaagtcattgagaatactgaagaagatgttgatgttcaggtcatttctggatcagaagacatattccctttgttcagaccttccag

SEQ ID NO: 18062 - DNA, 120 bp, synthetic construct
  misc_feature 1..120: note = Artificially Synthesized Probe
  source 1..120: mol_type = other DNA
gacacagaaaacctgcaaatggatgtaacgagatctccgagacacaaaccaggctgtcttctcccttatctccagaaaggcagtacatacagcatgagacctgggtggtgatggagtggg

SEQ ID NO: 18063 - DNA, 120 bp, synthetic construct
  misc_feature 1..120: note = Artificially Synthesized Probe
  source 1..120: mol_type = other DNA
ttgaacagagtgatacatctacacccctcttagtacagttcatggtcaagctcaaatcaaaaccaaagagcaggcgaggcaacatagggaaaccgtctctacgaaaaatgaaaattttta

SEQ ID NO: 18064 - DNA, 120 bp, synthetic construct
  misc_feature 1..120: note = Artificially Synthesized Probe
  source 1..120: mol_type = other DNA
taaatattataccatataaaataggtcttattgccatgggttatctgaaagctgtggaaagggccatctacaacatgaggcttggattacacagatggattcagggacctccacctctac

SEQ ID NO: 18065 - DNA, 120 bp, synthetic construct
  misc_feature 1..120: note = Artificially Synthesized Probe
  source 1..120: mol_type = other DNA
gatcagatgctggccagagaagtccctttagaagcaataaattgaagtgaagtaagtcagccatggaaggggggttataattaaaaagtcctgactgcagacacaaaacacttactatgt

SEQ ID NO: 18066 - DNA, 120 bp, synthetic construct
  misc_feature 1..120: note = Artificially Synthesized Probe
  source 1..120: mol_type = other DNA
catatacaaagcacgaacccaatacgtaacagaggaagggtccacatataatccttacaatatttgctttaaatgacgtgtaagaaaacaaagtccttctctgcctttatcgaggatgcc

SEQ ID NO: 18067 - DNA, 120 bp, synthetic construct
  misc_feature 1..120: note = Artificially Synthesized Probe
  source 1..120: mol_type = other DNA
gtcagtgttgggccacactccatggactcaaagtttttgaataaagaccattatcatgttaccatcttctgcccaagtcctttttgatgacttttcttttagggcagaaaatgtgctcat

SEQ ID NO: 18068 - DNA, 120 bp, synthetic construct
  misc_feature 1..120: note = Artificially Synthesized Probe
  source 1..120: mol_type = other DNA
agcttcctgagattcacagtggtgatgggctcactcatccgtgaatttcctaaaatccaacgacttgcacacttccaatgggtgaattatatggcatgtatattacatctcaattttttt

SEQ ID NO: 18069 - DNA, 120 bp, synthetic construct
  misc_feature 1..120: note = Artificially Synthesized Probe
  source 1..120: mol_type = other DNA
aaacaaagagaccgaggagaagccatggagccatggaatcctcaggaaaaagaatccactgacttgcacacttccaataggtgtgtgcccagactaggggggatatgttttttttttttt

SEQ ID NO: 18070 - DNA, 120 bp, synthetic construct
  misc_feature 1..120: note = Artificially Synthesized Probe
  source 1..120: mol_type = other DNA
aaaactgcatttgtacccactgaatttatacccaaaaaagctgattatgctgagtcaaagaaatcaggcacagaaggccacatgttgtttgactccatgtctggaataagcaaatccaca

SEQ ID NO: 18071 - DNA, 120 bp, synthetic construct
  misc_feature 1..120: note = Artificially Synthesized Probe
  source 1..120: mol_type = other DNA
aaaaaaaaaaaaaaaaggtaactgctatctaagagagcaaataacagtggggccagacctggaggttcctagagaaagttacggtcatagcattggttttgcacaacttgagttgagggg

SEQ ID NO: 18072 - DNA, 120 bp, synthetic construct
  misc_feature 1..120: note = Artificially Synthesized Probe
  source 1..120: mol_type = other DNA
aaatgcaaatgcggtaattatgtgcctgtgaccaaaaagaggggattaaatcctgaaggtggaggaggtgaaacctccttacttttggggttctattttaatccacaataataagcagac

SEQ ID NO: 18073 - DNA, 120 bp, synthetic construct
  misc_feature 1..120: note = Artificially Synthesized Probe
  source 1..120: mol_type = other DNA
taaataaataaaagaaaaaccactttgggccacggggccagttttcttccctcttcctcattcacactcccccagaaataacagagctcaccagtttgtattgattttggcacatgccac

SEQ ID NO: 18074 - DNA, 120 bp, synthetic construct
  misc_feature 1..120: note = Artificially Synthesized Probe
  source 1..120: mol_type = other DNA
tggctcacttcacaagtggtgtttgttcccgacaggtggaaccccgaggctcagatcttcagaccctcgcccaaaagtgtagagtgaatggcgagggagacgtgcttctgactcatgcca

SEQ ID NO: 18075 - DNA, 120 bp, synthetic construct
  misc_feature 1..120: note = Artificially Synthesized Probe
  source 1..120: mol_type = other DNA
aacagatggccaaatctaacttcatgatggagccaaacggaattcacccatgcactatgcgaaccaacagaaagcccaaactactgacagccaacctagacgagacaggcagaaatgtca

SEQ ID NO: 18076 - DNA, 120 bp, synthetic construct
  misc_feature 1..120: note = Artificially Synthesized Probe
  source 1..120: mol_type = other DNA
atgtccttaaacagaatctgcagagagaaagtttttctaggaaaaaccaagaatgcccaacaccaaacacttcctggtgtagcaacggaagccacttctttaggaatctagtccaaaaaa

SEQ ID NO: 18077 - DNA, 120 bp, synthetic construct
  misc_feature 1..120: note = Artificially Synthesized Probe
  source 1..120: mol_type = other DNA
atcgaccatccattcaccgagaaagcactgctcttaggaactcttgctaaaaaaaacccactgaacagtgaattccctccaattaaaagcaaaataacaaccagaaaaggatctggcaaa

SEQ ID NO: 18078 - DNA, 120 bp, synthetic construct
  misc_feature 1..120: note = Artificially Synthesized Probe
  source 1..120: mol_type = other DNA
ccatcctgccaacccaggtggactgagaagagagaaaaaaaataaagcatctatgtgttaagtgcctgacatttggaggccttttattatagcaatgagcttagtttacccctaaatgat

SEQ ID NO: 18079 - DNA, 120 bp, synthetic construct
  misc_feature 1..120: note = Artificially Synthesized Probe
  source 1..120: mol_type = other DNA
tttaacccaaagctaaaatgagaagggtcctcccagcccactgagggagacccttctagaaagcacagatggagactgtgacgagcctcacccagatgcccctctgagtcctaactcttg

SEQ ID NO: 18080 - DNA, 120 bp, synthetic construct
  misc_feature 1..120: note = Artificially Synthesized Probe
  source 1..120: mol_type = other DNA
tcaggcaaaagatgaagccacaccccttcctctgcacacgaagctcccctttacagacaagatgaagccacaccccttcctctgcacacgaagctcccctttacagacaagatgaagcca

SEQ ID NO: 18081 - DNA, 120 bp, synthetic construct
  misc_feature 1..120: note = Artificially Synthesized Probe
  source 1..120: mol_type = other DNA
gcttcaggagaggaagaaacatgggcttcaggtcagaatggcagcaagttcacgctataataaccctctctgcttcaaacacagagcaatgataggtaccgtgtaaaaacagaacaaaag

SEQ ID NO: 18082 - DNA, 120 bp, synthetic construct
  misc_feature 1..120: note = Artificially Synthesized Probe
  source 1..120: mol_type = other DNA
acagctgtgacaatgaatgaacccaagctacatgtggatgatccctgaaacataacactgtgcaaaaggaaggcaattcacggaaggattcaaaccacatactatcatttccagataaag

SEQ ID NO: 18083 - DNA, 120 bp, synthetic construct
  misc_feature 1..120: note = Artificially Synthesized Probe
  source 1..120: mol_type = other DNA
agacactcttcactgacgggtgctctatgtgttcacaaaccatttttctcttgcgactgtcttatgtcagctcaatttcagggccccaggtagagaggagggtagtaggaaaagaaattt

SEQ ID NO: 18084 - DNA, 120 bp, synthetic construct
  misc_feature 1..120: note = Artificially Synthesized Probe
  source 1..120: mol_type = other DNA
tctatttagtctctagctataaaccaaaatatatttactgtgcaccaattatacatgagggatccccctagggtgtgtgtggcttcatgtccagcgcatgttctttctttgtaagaaagg

SEQ ID NO: 18085 - DNA, 120 bp, synthetic construct
  misc_feature 1..120: note = Artificially Synthesized Probe
  source 1..120: mol_type = other DNA
aaagagcccttcttaagtggagccaaagctactcagagctcatgtcactcattaatgcagaaagaagcctagtgtggtagcgaggccagcctcagcgtcaacatctgaaaaacggagggc

SEQ ID NO: 18086 - DNA, 120 bp, synthetic construct
  misc_feature 1..120: note = Artificially Synthesized Probe
  source 1..120: mol_type = other DNA
aggcgcaagtcccatctgcatttcagacaaacaacaaagacactttactgcatgtcccaaataattgcgtgggacattcttatactaaaaaactctctgctgttcatctgaaattcaggc

SEQ ID NO: 18087 - DNA, 120 bp, synthetic construct
  misc_feature 1..120: note = Artificially Synthesized Probe
  source 1..120: mol_type = other DNA
tgacctgggagagaagatacataataaaaacaaacaaaaaacctcacggccagcgctgactttgtcaaggttagagttgcaaaacctttgtaaacacctttaaaactgcaagagttcagc

SEQ ID NO: 18088 - DNA, 120 bp, synthetic construct
  misc_feature 1..120: note = Artificially Synthesized Probe
  source 1..120: mol_type = other DNA
aacctgtggaactagaacagaatattcaaggaatccaggttccatcggatgttagaaaattgccgttctaagagctgacatagacatagggctgagagcaagtgcgagggtgtgggcttt

SEQ ID NO: 18089 - DNA, 120 bp, synthetic construct
  misc_feature 1..120: note = Artificially Synthesized Probe
  source 1..120: mol_type = other DNA
accagcatggcattagacacactgtgagctgaactgtgtcccctgctcaaatccgtatgtggaagtccgaatccccggggcctggaaaagtgacagtattggagacagggcctttaaaaa

SEQ ID NO: 18090 - DNA, 120 bp, synthetic construct
  misc_feature 1..120: note = Artificially Synthesized Probe
  source 1..120: mol_type = other DNA
ccagctctgagaactaattccattacacatacaccctccaaccctcctctggacacatacatttgtgaaatgtaactggatagaacaaaaacacacaggtcattttgctgctgaattttt

SEQ ID NO: 18091 - DNA, 120 bp, synthetic construct
  misc_feature 1..120: note = Artificially Synthesized Probe
  source 1..120: mol_type = other DNA
taattgggcctcagtgggtttctgtccaggctgctgtaaagagcacatgatttataaagaagtcttcattttatgacaggtttccatttcagttttcttagagcagaattcaaggggttc

SEQ ID NO: 18092 - DNA, 120 bp, synthetic construct
  misc_feature 1..120: note = Artificially Synthesized Probe
  source 1..120: mol_type = other DNA
agaacttaacactctgatcttaaagctcaaagaagatggagagccacataaaaccaagataactctggagactaagaggagactcattctaccagatgccaaggcttaccagaaaaagtt

SEQ ID NO: 18093 - DNA, 120 bp, synthetic construct
  misc_feature 1..120: note = Artificially Synthesized Probe
  source 1..120: mol_type = other DNA
aggcgagaaaaaaagtgtttctttctacaaggcatcgggtacaaggcatgaagggacagacaaattagacaatgtaaaagttaagacttccatcagacacaacagcaagaagacacctca

SEQ ID NO: 18094 - DNA, 120 bp, synthetic construct
  misc_feature 1..120: note = Artificially Synthesized Probe
  source 1..120: mol_type = other DNA
gaaaggtgagaaaataaatttctgctaagtcatcctatctattctgttatagcctgagctgcccaagacacccaccttctacaacatcatgtgtaaaacataacagagttgatggggaaa

SEQ ID NO: 18095 - DNA, 120 bp, synthetic construct
  misc_feature 1..120: note = Artificially Synthesized Probe
  source 1..120: mol_type = other DNA
aatattttacagagttgactatttttcattggcattttcttagacacaggaggaaatgtcttcacagtctgtccacaggcagggcagcatcctcaaatctggtagacagtgtggaggctc

SEQ ID NO: 18096 - DNA, 120 bp, synthetic construct
  misc_feature 1..120: note = Artificially Synthesized Probe
  source 1..120: mol_type = other DNA
aaccatagcagccaccaacaggaaactaagtaaatgattgtatagtaatatcaggtaaaattatagaacagtgaagacaaatcaagtaacatacgttggcatgtgacagtgaaatgggga

SEQ ID NO: 18097 - DNA, 120 bp, synthetic construct
  misc_feature 1..120: note = Artificially Synthesized Probe
  source 1..120: mol_type = other DNA
tcacactcaatccaaattcaagattctccagacgattttcaaaagatagtttgcttgtgcaaaaaggagctcagtggaaactgccccaaaagattgcagtgtgagctcttagaggagtga

SEQ ID NO: 18098 - DNA, 120 bp, synthetic construct
  misc_feature 1..120: note = Artificially Synthesized Probe
  source 1..120: mol_type = other DNA
gggaacatcacacaacaaaatcacacagctctgagacctctatggagcgatgaaatgtcactggtaaacggagatgtgcctgttactaaacatatttagtgtatagatgttcttgtacac

SEQ ID NO: 18099 - DNA, 120 bp, synthetic construct
  misc_feature 1..120: note = Artificially Synthesized Probe
  source 1..120: mol_type = other DNA
ggtaatcattcaccttgaaatacccccaagtgaaacaggggctcagccaaggttgagaactggcaacatcttttacgtggtgtagtcatgtaaccttttctcaggagcagagacacgtct

SEQ ID NO: 18100 - DNA, 120 bp, synthetic construct
  misc_feature 1..120: note = Artificially Synthesized Probe
  source 1..120: mol_type = other DNA
ctacttctttccagacagcaagaatgcagtgaattctcatacagcaatgcagcacaccccggtattacaagacatgacttttcttggtttaccttccaatccacacgtcttttttttctt

SEQ ID NO: 18101 - DNA, 120 bp, synthetic construct
  misc_feature 1..120: note = Artificially Synthesized Probe
  source 1..120: mol_type = other DNA
cctcacttcccagtaggggcggccgggaagaggcgcccctcacttcccggacaggacagctggccgggcggggggctgacccctccacctccctcctggacggagcggctggccgggcag

SEQ ID NO: 18102 - DNA, 120 bp, synthetic construct
  misc_feature 1..120: note = Artificially Synthesized Probe
  source 1..120: mol_type = other DNA
acagtggcaggtagcatctagggaccatttgacaacactgataaaaggtcaactgaggcagaataagatgcataaagagttagtttgagcaaacagtgatttatgaaatcaggaagtacc

SEQ ID NO: 18103 - DNA, 120 bp, synthetic construct
  misc_feature 1..120: note = Artificially Synthesized Probe
  source 1..120: mol_type = other DNA
tttatcagaaatagctcaagttagatttcactcaggtgttgcacatccagcaaggctgaggtcacttatgaagtctgactggctttgcttaggattctttaggcctgttttcctttttaa

SEQ ID NO: 18104 - DNA, 120 bp, synthetic construct
  misc_feature 1..120: note = Artificially Synthesized Probe
  source 1..120: mol_type = other DNA
tcaattcccacatgatttacattttgccatcatgaagggatgtctgtgaaagcagaagaaactatgatctaatgtgctagctgggtgtgtacctaactttcaaataggaaacacgtcatg

SEQ ID NO: 18105 - DNA, 120 bp, synthetic construct
  misc_feature 1..120: note = Artificially Synthesized Probe
  source 1..120: mol_type = other DNA
gtgaaacagggactcagccaaagttgaaaattggtgacatcttttacatcttactggccgctggtcaagtcctgaagtccaaaggctttggagttgtccaaagacaagagaggatgagtg

SEQ ID NO: 18106 - DNA, 120 bp, synthetic construct
  misc_feature 1..120: note = Artificially Synthesized Probe
  source 1..120: mol_type = other DNA
caatggcaggtacacacacagtgactgagtcccatgtgagaacgtgatcaaaaatgcacgagcacagcaaattcgtgctccttcaaagacactctcgtgggctgcatttcaaagtgctct

SEQ ID NO: 18107 - DNA, 120 bp, synthetic construct
  misc_feature 1..120: note = Artificially Synthesized Probe
  source 1..120: mol_type = other DNA
agtcaactattccaaaacatgctgaaacctacccaagtgcactggcgtgaagagtgtcctctcaaaattcgtcttcacccaaatctcagaatgagatcttctttgagaatatttgcagat

SEQ ID NO: 18108 - DNA, 120 bp, synthetic construct
  misc_feature 1..120: note = Artificially Synthesized Probe
  source 1..120: mol_type = other DNA
aaaaaaaagaacacaagctttggtgcggggcacacaggattagattccaatgctggggctccctcagggagtagattggatacagtgaacatacccagctttgtgttcatgatttcttct

SEQ ID NO: 18109 - DNA, 120 bp, synthetic construct
  misc_feature 1..120: note = Artificially Synthesized Probe
  source 1..120: mol_type = other DNA
gagacagagacatcgcttccagccaagatggaggaagggaaactggatttagcgtcctacctgaaaccacccaaaatatatccaaaccaccaaaatatgtaaaaagaaaaataacatata

SEQ ID NO: 18110 - DNA, 120 bp, synthetic construct
  misc_feature 1..120: note = Artificially Synthesized Probe
  source 1..120: mol_type = other DNA
agagagtatcagtgaaccatgaaacaatgtcaagcagcctaatatgtacatagttggagtttctaaaaaaaaagaggggggaacagaacaaatatttctatttttggccaaaagttattc

SEQ ID NO: 18111 - DNA, 120 bp, synthetic construct
  misc_feature 1..120: note = Artificially Synthesized Probe
  source 1..120: mol_type = other DNA
acccctttaagacaactgactaagcaggaaaaaaatgtatcatggggtttacaagacatatagaagaaaaatatacaacaatagcacaaaggttggagtgggaaaatggaagcatattat

SEQ ID NO: 18112 - DNA, 120 bp, synthetic construct
  misc_feature 1..120: note = Artificially Synthesized Probe
  source 1..120: mol_type = other DNA
cagaggccagaaagagacgggagaggaactattgtttaatgggcacagagattttgtgaaaaatgacaaaagaaagttttgggtatagacagagtggtggttacacaatgttgtgaatgt

SEQ ID NO: 18113 - DNA, 120 bp, synthetic construct
  misc_feature 1..120: note = Artificially Synthesized Probe
  source 1..120: mol_type = other DNA
tccctaagatccttgatcttacaaggctgaggcgtccactttcacacttctcctcagcaagacaagaaaaatacataaaatgcatccagagtgagatggaagaaataaaaccatccttgt

SEQ ID NO: 18114 - DNA, 120 bp, synthetic construct
  misc_feature 1..120: note = Artificially Synthesized Probe
  source 1..120: mol_type = other DNA
aaagaaaaaaaaccccacacacaaagttcagtttctaatgaaaatacatacaggcttctagaaaacatctacagatggcatttttttggcgggggcggcgggaatggcatgtttgaacaa

SEQ ID NO: 18115 - DNA, 120 bp, synthetic construct
  misc_feature 1..120: note = Artificially Synthesized Probe
  source 1..120: mol_type = other DNA
caaacaaaaaaggcaatggtcatatgacaattcaggatctcagaagaatgaagccaaggtcagaatctcatcttgacaaccccagtgtcaaagaaaaccaatcggagtggccaccagcaa

SEQ ID NO: 18116 - DNA, 120 bp, synthetic construct
  misc_feature 1..120: note = Artificially Synthesized Probe
  source 1..120: mol_type = other DNA
ttcaaatgtgcttgtagatggaacagccttgaagatggatttgtttcttgggactaccacgacaaagtaccacaaactggaattgaagcaaaaacggcagaaatgtattatctgacagct

SEQ ID NO: 18117 - DNA, 120 bp, synthetic construct
  misc_feature 1..120: note = Artificially Synthesized Probe
  source 1..120: mol_type = other DNA
tcagtgaggaggtgcttgcttttcaatgcaaagctctaagcaaacagaaaacagcagcccttcatctggctgtgccctgagcaactgcgacactgctagaaatcactacatcaatgcatg

SEQ ID NO: 18118 - DNA, 120 bp, synthetic construct
  misc_feature 1..120: note = Artificially Synthesized Probe
  source 1..120: mol_type = other DNA
agtcagattaaagacgtccttctttggggccacacattctggcaagtcacggcggctgattgaacattctgggtcagcatgtagatgcctgagctcagagtccatttgttctttgatgag

SEQ ID NO: 18119 - DNA, 120 bp, synthetic construct
  misc_feature 1..120: note = Artificially Synthesized Probe
  source 1..120: mol_type = other DNA
gtagaaaagtctgatcactatatatggctaatccaggaaggaatcatctcctcttggccacattctgagtaatggccaggaagagaaggatggggattatatagaccaactgtgaaaact

SEQ ID NO: 18120 - DNA, 120 bp, synthetic construct
  misc_feature 1..120: note = Artificially Synthesized Probe
  source 1..120: mol_type = other DNA
ctcagtgacttggttaacttttcgggttagtggcacattatttctgtgaatgctgcagacagctatccataggagacatctaactagaaaaggttgtaggaaacgtgtcccaggacttag

SEQ ID NO: 18121 - DNA, 120 bp, synthetic construct
  misc_feature 1..120: note = Artificially Synthesized Probe
  source 1..120: mol_type = other DNA
gggtttctcatgttttattcagcacagttcatgggtttctcatgttttattcagcacagttcaagggtttctcatgtttgcccaggaaccgttcttcatgggttttcatgtcaggaatgt

SEQ ID NO: 18122 - DNA, 120 bp, synthetic construct
  misc_feature 1..120: note = Artificially Synthesized Probe
  source 1..120: mol_type = other DNA
gcaaatatttacagtggacgtacgaaaaggcacaggaatactgagtaattgaaaggtggaaataaacgaggccccatgaattaccctggcaaccaggtacagccgtgaagacaatgaaat

SEQ ID NO: 18123 - DNA, 120 bp, synthetic construct
  misc_feature 1..120: note = Artificially Synthesized Probe
  source 1..120: mol_type = other DNA
tcgctggtgcctcgctggtgaccaatcagtgcctgtgtaattgacaaactctaccaaacctcagagagtttctcagtagagagagtcaccccaactttattattttttattctttttctt

SEQ ID NO: 18124 - DNA, 120 bp, synthetic construct
  misc_feature 1..120: note = Artificially Synthesized Probe
  source 1..120: mol_type = other DNA
tgctggagaaggccattgtgaagcttaaatgtgaggtatctctggtgtgtttgtgcatacatatgcatgcatgcatccctttctcccatgcaatgggagaaagggacgtctacgccactt

SEQ ID NO: 18125 - DNA, 120 bp, synthetic construct
  misc_feature 1..120: note = Artificially Synthesized Probe
  source 1..120: mol_type = other DNA
catgctatgtctttgttcacaatttaatactgataaactgtgtgttatgagggagacaggacgctgcatatcacctcagatgtcttcgcctgggctaccgtacaaagcccggcagacagg

SEQ ID NO: 18126 - DNA, 120 bp, synthetic construct
  misc_feature 1..120: note = Artificially Synthesized Probe
  source 1..120: mol_type = other DNA
accctgggtggaaaagcctcgcctttcccaggaaaatgacctaatcaatccaatttcatactctctgtcttcagtcattactggaatattcacttacaaatgcaaattgcaaagagatct

SEQ ID NO: 18127 - DNA, 120 bp, synthetic construct
  misc_feature 1..120: note = Artificially Synthesized Probe
  source 1..120: mol_type = other DNA
gacgtgcaaacatctcatgaccccatccagaggaagggttgaggtctctgtcataacatgagataacaggctggaaagagccacaatttctgaggtcaaagggtactggcgtgactgtta

SEQ ID NO: 18128 - DNA, 120 bp, synthetic construct
  misc_feature 1..120: note = Artificially Synthesized Probe
  source 1..120: mol_type = other DNA
aatggccacatgtcttcagagccaacctgcaagtaattaaaatgtctaaagaccacaaagaaacgcaaaagagaaccagaccattaaagtgagctccaaacttcctggcaaagtatactt

SEQ ID NO: 18129 - DNA, 120 bp, synthetic construct
  misc_feature 1..120: note = Artificially Synthesized Probe
  source 1..120: mol_type = other DNA
agtttaatgctaaaatcacacataacaaaaatactcttttctgaggggaaatcttcccttgaggaacaagaaaggacctggtgttggtacctgcctgccatagaggagagtcagtcataa

SEQ ID NO: 18130 - DNA, 120 bp, synthetic construct
  misc_feature 1..120: note = Artificially Synthesized Probe
  source 1..120: mol_type = other DNA
tgagccattgcacgtggccctgcctctggttctttctgctaaaaagggagagagactagcaaggtcctagaaatgtcaaaggctctctggcacaacaaaccaggggtctccctgcatgcc

SEQ ID NO: 18131 - DNA, 120 bp, synthetic construct
  misc_feature 1..120: note = Artificially Synthesized Probe
  source 1..120: mol_type = other DNA
aaatcccatctgctctatcagatggtgaatcctggggagatggaccccatgggtctcagattttagattttgtctgcatcttctgaagagaacctggcaggcattttatttatttattta

SEQ ID NO: 18132 - DNA, 120 bp, synthetic construct
  misc_feature 1..120: note = Artificially Synthesized Probe
  source 1..120: mol_type = other DNA
gcagacatgagccactgtactcaggcacttttgcctttgtatgttatgaatgttgtggctggtgctggggcctcctgcccagcatctgtcccaacaggacagtgaccccagttaggatct

SEQ ID NO: 18133 - DNA, 120 bp, synthetic construct
  misc_feature 1..120: note = Artificially Synthesized Probe
  source 1..120: mol_type = other DNA
ccaggcaggaatcccctctggcaaagagaatgaagcttcatttccaaatagattaatctctcaaaggcggacatggttttgtcttttagggcatttgtttccttagcaattttttagaca

SEQ ID NO: 18134 - DNA, 120 bp, synthetic construct
  misc_feature 1..120: note = Artificially Synthesized Probe
  source 1..120: mol_type = other DNA
ctacatttgacttcactctacatttaacataactctacatttaacttcactctacatttaactttttttaggacttgccaggccgtcttcctcagcggcagccacatgttaaccaatacc

SEQ ID NO: 18135 - DNA, 120 bp, synthetic construct
  misc_feature 1..120: note = Artificially Synthesized Probe
  source 1..120: mol_type = other DNA
ctcccggaacctgcccagtggcttctgtcattgccaaatttcaaaggcacagccatgagccctccaaatggattagggtcccctgttctacaggataccgaccaattattgttatttgga

SEQ ID NO: 18136 - DNA, 120 bp, synthetic construct
  misc_feature 1..120: note = Artificially Synthesized Probe
  source 1..120: mol_type = other DNA
ccatgggaaactgccttggaaaaaacggagccagatgccaccaggatagttggcactggggctgggtgactttgaccctttttctctgttttccaaattttctgtggagcagcaaaataa

SEQ ID NO: 18137 - DNA, 120 bp, synthetic construct
  misc_feature 1..120: note = Artificially Synthesized Probe
  source 1..120: mol_type = other DNA
cgaacctttgccaagaccttagtggtcagcatttgccaacaagtcaatctcccacatgcctaagagataggtgctatgataacccctatttcaacaagaaaacaatgagatataagaagt

SEQ ID NO: 18138 - DNA, 120 bp, synthetic construct
  misc_feature 1..120: note = Artificially Synthesized Probe
  source 1..120: mol_type = other DNA
tagggtttctgagaacagggtcccctcgaggtttcagctggggccactgtctccttccaagacagccccagtctaaccctgaccagagacacagaaaacaagaccaagaatgcactcatt

SEQ ID NO: 18139 - DNA, 120 bp, synthetic construct
  misc_feature 1..120: note = Artificially Synthesized Probe
  source 1..120: mol_type = other DNA
agtccctctagctgtttgttagcattcaactttgggaagtccgagtcggccacccagagatttccaagatgtcagggaagcaccacacttccaaattttaccaggaggaaagttccagag

SEQ ID NO: 18140 - DNA, 120 bp, synthetic construct
  misc_feature 1..120: note = Artificially Synthesized Probe
  source 1..120: mol_type = other DNA
agttacagaaccacagcaaaattacagcgctcatgtccccatacctccaaaaaactagcttgctacctcagtaaacagttgataatttgtaatataataaaaacgtcaaggctgggtgca

SEQ ID NO: 18141 - DNA, 120 bp, synthetic construct
  misc_feature 1..120: note = Artificially Synthesized Probe
  source 1..120: mol_type = other DNA
ctttccaagaaaaggggaaattagcaagtttctaatctattttcagtgctttgctgagatgcaggtaaagtttaaccaagaagcaaaaacaaatcgacagagcaggacagcactgacgcc

SEQ ID NO: 18142 - DNA, 120 bp, synthetic construct
  misc_feature 1..120: note = Artificially Synthesized Probe
  source 1..120: mol_type = other DNA
ttagagcagaggttgctaaactctgggagatcacaggccaggaaacagaagaaaaagaaatttcatgatcctgttgagatgaccaacgttacatgtctccaggaaaaggcatctgcagaa

SEQ ID NO: 18143 - DNA, 120 bp, synthetic construct
  misc_feature 1..120: note = Artificially Synthesized Probe
  source 1..120: mol_type = other DNA
ggataaatgtcgctctgggtgaggacttgaggaaaaccacagggccttgcaaggactgtcatgattgttctcatcaagaaatccccttcacaatttgtagtgagtgggccactcccgaca

SEQ ID NO: 18144 - DNA, 120 bp, synthetic construct
  misc_feature 1..120: note = Artificially Synthesized Probe
  source 1..120: mol_type = other DNA
agatacatatttatattcatgtaatgtgcttttgtttctgttcacactcatctcacttcttccctactggcagactgttccacaagtgtcaggaaatccactgcagctggagaccagatc

SEQ ID NO: 18145 - DNA, 120 bp, synthetic construct
  misc_feature 1..120: note = Artificially Synthesized Probe
  source 1..120: mol_type = other DNA
tctttttttcacttcttttgagaaaagctttgcagttgtccagatctcctctgtgcatggttctttaagttgcatgcctgaatcacttcaaaatatgagatgggaacacactggaacgac

SEQ ID NO: 18146 - DNA, 120 bp, synthetic construct
  misc_feature 1..120: note = Artificially Synthesized Probe
  source 1..120: mol_type = other DNA
tgcaatttaaataacatgcctaaaaatgttctcagacctggctttaaagccaaagcaaaatgtcacagcccttttcctaggacttaaaagacattctggggaaaacaagcctcgttcctc

SEQ ID NO: 18147 - DNA, 120 bp, synthetic construct
  misc_feature 1..120: note = Artificially Synthesized Probe
  source 1..120: mol_type = other DNA
atagtgccaagttggacatctttatgatcacagtttcactttactcttccctctggataaatccccaggggcaaggtttttaactcaaagtccattttcctgtaaaacagaggttcaaac

SEQ ID NO: 18148 - DNA, 120 bp, synthetic construct
  misc_feature 1..120: note = Artificially Synthesized Probe
  source 1..120: mol_type = other DNA
gggaaatgtaagccataaaaccttcttttgggaaatctttttgtcctcactcagccacctccatcagttaaaatcccgcagcacaaatgagacagacgcagcaaggaagacagtttccac

SEQ ID NO: 18149 - DNA, 120 bp, synthetic construct
  misc_feature 1..120: note = Artificially Synthesized Probe
  source 1..120: mol_type = other DNA
gctcaggagctcaaacctctgcaaacacgattatttagcaaaacccagacatgacaccccagaagcggcacccccactctgtagtcagaccacaacctttttagggacaaggagtggagt

SEQ ID NO: 18150 - DNA, 120 bp, synthetic construct
  misc_feature 1..120: note = Artificially Synthesized Probe
  source 1..120: mol_type = other DNA
gtacaggttttgggggggaatataaaaaaagattactcttcacaaatgttaatattgatttgggtgatgactgcgccactctgaaaatacagccacgtgctgctgtcaacatttcagtca

SEQ ID NO: 18151 - DNA, 120 bp, synthetic construct
  misc_feature 1..120: note = Artificially Synthesized Probe
  source 1..120: mol_type = other DNA
cttccagatgttctagaggaaggcactgtaatcacaggagatgccagctccacgcatgttactgcccctgaagaccttccagtgggacgagatgcagaggtgaaagacaatggtattgaa

SEQ ID NO: 18152 - DNA, 120 bp, synthetic construct
  misc_feature 1..120: note = Artificially Synthesized Probe
  source 1..120: mol_type = other DNA
atcagcacagaacacctacacacccaatctccatcaactccaaggtctctcgatgggaaagactcacgtgaaaatccaatgacccctgaaccagacacaagttgcagtggcagcataaac

SEQ ID NO: 18153 - DNA, 120 bp, synthetic construct
  misc_feature 1..120: note = Artificially Synthesized Probe
  source 1..120: mol_type = other DNA
tattcacaaaagagaacccagattgtcaggaaatatcacaaattacacatctgaccagggattagcatctagcatatatcaagaactcatacaatccaacaactcaaaaataggcaaaga

SEQ ID NO: 18154 - DNA, 120 bp, synthetic construct
  misc_feature 1..120: note = Artificially Synthesized Probe
  source 1..120: mol_type = other DNA
actaaacataaaaaaccatatgaacctgccattccatttctgggggtaggtatatgcctgaaagaacgggtggatatcttgaggagatatatccgcacacctatgttcacagaacactat

SEQ ID NO: 18155 - DNA, 120 bp, synthetic construct
  misc_feature 1..120: note = Artificially Synthesized Probe
  source 1..120: mol_type = other DNA
tggagcatatcctcttgggtcatgtcattaatcattagggggtgcctgattacacccacaagtggaaaatataatttgagacaatagcaaagaacacctcaggaaaaaccacatcttcaa

SEQ ID NO: 18156 - DNA, 120 bp, synthetic construct
  misc_feature 1..120: note = Artificially Synthesized Probe
  source 1..120: mol_type = other DNA
ccaaggtcaccaactgtgtgggctgaaagtgccctggccagaaaaacaaaactaaaacaaattcactcccagccttcgtgagttgcccagacaagtttttccttctctccttcccattaa

SEQ ID NO: 18157 - DNA, 120 bp, synthetic construct
  misc_feature 1..120: note = Artificially Synthesized Probe
  source 1..120: mol_type = other DNA
cagagataaacgatcagcacagcaacagccttccatatgcgtggcttcagttaccctgaactcaaccaaccatgcgcacattggaaatattttttagttgcatctgtaccgaacatgtac

SEQ ID NO: 18158 - DNA, 120 bp, synthetic construct
  misc_feature 1..120: note = Artificially Synthesized Probe
  source 1..120: mol_type = other DNA
actgttgagaggcacatgttaaaacttcatgtagattctgatatttctgtgctaaaaaccagggatcgaacttctgcttccgggcaattggagtagacacatttttccctattcctcaca

SEQ ID NO: 18159 - DNA, 120 bp, synthetic construct
  misc_feature 1..120: note = Artificially Synthesized Probe
  source 1..120: mol_type = other DNA
ctatggcacctgtcagtaatgaggtgacacccctttccaccttcccttgtggaagtggcgtcaggaaaagttagcttacaaaaaaagtttaactaagactaaaagtctcataacataata

SEQ ID NO: 18160 - DNA, 120 bp, synthetic construct
  misc_feature 1..120: note = Artificially Synthesized Probe
  source 1..120: mol_type = other DNA
gtctcagggagttatgggacaataataaaatacctaactttaaatgtttgaaatcccagaaggagagagaagagagggagggtctgaaaaagtactcaaaatgtcccaaatttgctgaga

SEQ ID NO: 18161 - DNA, 120 bp, synthetic construct
  misc_feature 1..120: note = Artificially Synthesized Probe
  source 1..120: mol_type = other DNA
ctttctccacaattgatagaataggacaggaaaatcagcaaggatacagaactcagtaatatacccaatcaacaagatcaaagtgatagttgtagaaccttcctccactgtactacagca

SEQ ID NO: 18162 - DNA, 120 bp, synthetic construct
  misc_feature 1..120: note = Artificially Synthesized Probe
  source 1..120: mol_type = other DNA
tccagaaagtagaataggagagaacatttcttaatttattttatggagcaactactaccttgataccaaagccagagaaaatgagcacaaaaagaagattacaggctgggtatggtggct

SEQ ID NO: 18163 - DNA, 120 bp, synthetic construct
  misc_feature 1..120: note = Artificially Synthesized Probe
  source 1..120: mol_type = other DNA
aggaacaaaattgtccctatttgcacacagcatgaaaaatcacaaagaaacaaccataaaaccccaaaacctcctggaaataataaatgagttgagcaaggtcacaagacaccagatcaa

SEQ ID NO: 18164 - DNA, 120 bp, synthetic construct
  misc_feature 1..120: note = Artificially Synthesized Probe
  source 1..120: mol_type = other DNA
aatgggaggaaatcagtatactcagcttcaagatttattatacagtatagtaatcaaagctgtgtggttctggtggagggacaggcacatagcaatagaactcaatacagagcccagaaa

SEQ ID NO: 18165 - DNA, 120 bp, synthetic construct
  misc_feature 1..120: note = Artificially Synthesized Probe
  source 1..120: mol_type = other DNA
gaccatacacctatcaaaacagctagaatgaaaaatggtgacaccaattgctagtaagaaaataaagaatcacattgccggtggaaaacctggatcttacacgttgctggtggaaataca

SEQ ID NO: 18166 - DNA, 120 bp, synthetic construct
  misc_feature 1..120: note = Artificially Synthesized Probe
  source 1..120: mol_type = other DNA
gggggagtcacaagttatacctggacttttgactgtgtgggagttggaacccaacctctccattgttcaaaggttaactgtaaaaattttaagtctttttaaaagcacactgtggaaaac

SEQ ID NO: 18167 - DNA, 120 bp, synthetic construct
  misc_feature 1..120: note = Artificially Synthesized Probe
  source 1..120: mol_type = other DNA
ggcgtctttattgggggaataaacatgttcctaaatcgactccgatggttgcacaatctccctaatttactaaaaaacacggcactgcaggttttcaaagggtgaatcacaatgttatgt

SEQ ID NO: 18168 - DNA, 120 bp, synthetic construct
  misc_feature 1..120: note = Artificially Synthesized Probe
  source 1..120: mol_type = other DNA
ggaggaaatgtcacaccctccccctctaatattcgaaacatgtatacaaatgttcacaacagcacattttacaacagccaaaacccagaaagaacaaaacacccacccacacacaatgga

SEQ ID NO: 18169 - DNA, 120 bp, synthetic construct
  misc_feature 1..120: note = Artificially Synthesized Probe
  source 1..120: mol_type = other DNA
ggaaaaaaaaaaaaacgttaactttatgttacctgtattttacctccataaaggaactaaaaagaacctctcattctcgacggctcacaagggttcaggatccacttcatggagcaaggg

SEQ ID NO: 18170 - DNA, 120 bp, synthetic construct
  misc_feature 1..120: note = Artificially Synthesized Probe
  source 1..120: mol_type = other DNA
tatcaacacacaccatgcaaaattattcaggaacaaaatttaaaaatgcattatgcctcctggttgaaccacaaaatgctgtgaccagtaaaagcatcaaaacccaacatgagggcgggc

SEQ ID NO: 18171 - DNA, 120 bp, synthetic construct
  misc_feature 1..120: note = Artificially Synthesized Probe
  source 1..120: mol_type = other DNA
gaaatgaacaggtgttttaccctttgtctggggtggtctgttatgcagcaaaggttaactaacacgaccctcaacttaacagtggcttattagatagctgtcgttatctccaacctaaag

SEQ ID NO: 18172 - DNA, 120 bp, synthetic construct
  misc_feature 1..120: note = Artificially Synthesized Probe
  source 1..120: mol_type = other DNA
caggcactttatagacccaacaatccaacacagataatgcaaacatcaccactaatgacagtaagaacagttggcggtacgtggatgcttaccatagtctcagctttacataaattacct

SEQ ID NO: 18173 - DNA, 120 bp, synthetic construct
  misc_feature 1..120: note = Artificially Synthesized Probe
  source 1..120: mol_type = other DNA
atgagaccatatgcacaaagctcctggctcacagcaggtactgaaatgtcctccaacaatgtctgcagataatacgttaataatgataatgatgatgactgactaagctacctacaaaga

SEQ ID NO: 18174 - DNA, 120 bp, synthetic construct
  misc_feature 1..120: note = Artificially Synthesized Probe
  source 1..120: mol_type = other DNA
caagaaggggcagaccccagcccctagagaatgaaggttacaaatccaggctgccccatagcaatataattggagtcacaaatgtaattttaaatttcctaggagacacatcaaaaaaat

SEQ ID NO: 18175 - DNA, 120 bp, synthetic construct
  misc_feature 1..120: note = Artificially Synthesized Probe
  source 1..120: mol_type = other DNA
aagaataaaatgcggttaaccattccatagaatgtataaactgagctacatgatcaactcagggtggatttttttaagtgactattaaggaaacatcaaggcaaagcttccagcgagcgg

SEQ ID NO: 18176 - DNA, 120 bp, synthetic construct
  misc_feature 1..120: note = Artificially Synthesized Probe
  source 1..120: mol_type = other DNA
ttttgcacaatttataaaatgtgcattgggaaaaaaagtgctctcaatttccactgaactcttcctgtatcacacaccgcttcctttacctcctttaagtgtttgctcaaggaccgctac

SEQ ID NO: 18177 - DNA, 120 bp, synthetic construct
  misc_feature 1..120: note = Artificially Synthesized Probe
  source 1..120: mol_type = other DNA
caataataataatgagacggtgctacaaacaactacatagcaaccacattagagaaactcacatgaagtggacacatttctggtgggacacaaactaacaaacttgactcaagaagaaac

SEQ ID NO: 18178 - DNA, 120 bp, synthetic construct
  misc_feature 1..120: note = Artificially Synthesized Probe
  source 1..120: mol_type = other DNA
agagatctatgaagtcaaaccattctcatcataacactgagatgggagctgctttttcaagctcatcctctcccaagtgcacaacggaagctacaaaacttgtgatattgcaacaagctg

SEQ ID NO: 18179 - DNA, 120 bp, synthetic construct
  misc_feature 1..120: note = Artificially Synthesized Probe
  source 1..120: mol_type = other DNA
acaatagattcgtgctcatacataaaaagcttctgggtccttcaaaatgctaagagagcaaaaaagattccttaagctagaagtctgacaaccactgtgctacctcatctgctttacctg

SEQ ID NO: 18180 - DNA, 120 bp, synthetic construct
  misc_feature 1..120: note = Artificially Synthesized Probe
  source 1..120: mol_type = other DNA
agggctaatgcaactagggcttcaattaaaacaccaaaaacacccactgccttctcactcagagaggcagctccagtaacagctccccttttccatttctaaaaatctgtaatatattta

SEQ ID NO: 18181 - DNA, 120 bp, synthetic construct
  misc_feature 1..120: note = Artificially Synthesized Probe
  source 1..120: mol_type = other DNA
attgttgcagaaaatgtatgagagaacaagctgttttttttaaaaaaaacaacactttcagggacagacaaaaaaaaaaaaatggaagaggcaggccccagcccagcagggccatggcag

SEQ ID NO: 18182 - DNA, 120 bp, synthetic construct
  misc_feature 1..120: note = Artificially Synthesized Probe
  source 1..120: mol_type = other DNA
ttctgatctgtgaaatgggaatcgtaatgaatcggagctggctcattggacttctgagatttactgagggaataaatagcaagagtgtggcactaatgccaatcaaaaggaaaatgctcg

SEQ ID NO: 18183 - DNA, 120 bp, synthetic construct
  misc_feature 1..120: note = Artificially Synthesized Probe
  source 1..120: mol_type = other DNA
atcccagaactctctcgtctgcaactctgttacgtatttggaagtaaggcaagtatgctaaagcactgccttcctataaagagccatttttaggagtgtgtttctgtatactggttaatt

SEQ ID NO: 18184 - DNA, 120 bp, synthetic construct
  misc_feature 1..120: note = Artificially Synthesized Probe
  source 1..120: mol_type = other DNA
ttataggtgaaatcacctacttgtaaagagttacctttgatacttgaattccaacctccttccaaagggacccaaagaagcaccaagctttccacccaattcttccttccaggaaaacaa

SEQ ID NO: 18185 - DNA, 120 bp, synthetic construct
  misc_feature 1..120: note = Artificially Synthesized Probe
  source 1..120: mol_type = other DNA
cccgacccgccacccccgggcccgcaccaggcgcgccggccccggcctctccgcgacagctgctgctgccgccgcgcgcgcctggatgggagctctgcgtgcagggccagggtgaccgca

SEQ ID NO: 18186 - DNA, 120 bp, synthetic construct
  misc_feature 1..120: note = Artificially Synthesized Probe
  source 1..120: mol_type = other DNA
agggcggggccccgggaagcccggcccctggggcggggcttcggccgcggttcgcggaggcgcggggtcccgggcgccggcacccgagccccggactccttcggcgggggcccggggctc

SEQ ID NO: 18187 - DNA, 120 bp, synthetic construct
  misc_feature 1..120: note = Artificially Synthesized Probe
  source 1..120: mol_type = other DNA
tgagtgttgtgattgtggtaagcaggatgcgcagtatacagtgaacagtgtgcacagtgtgtgcagtgtgggctgtgtgccacagagtcagtgtggtgtgtgtagtttgaacagtgtgtg

SEQ ID NO: 18188 - DNA, 120 bp, synthetic construct
  misc_feature 1..120: note = Artificially Synthesized Probe
  source 1..120: mol_type = other DNA
ggggcattttctctaccttttctttatctgagcagtttcgatacaagcggcgagtttatgcccagaacctcatcgatgataagcagtttgcaaagcttcacacaaaggtaaaggatcacg

SEQ ID NO: 18189 - DNA, 120 bp, synthetic construct
  misc_feature 1..120: note = Artificially Synthesized Probe
  source 1..120: mol_type = other DNA
ccacctctccctccggatctctcttcagtgaccaacaagacatgagtgactcactctgaagtaggtctcgtttgtttttaggatgagcctgaacttcttacatagcccgtgtttctgctt

SEQ ID NO: 18190 - DNA, 120 bp, synthetic construct
  misc_feature 1..120: note = Artificially Synthesized Probe
  source 1..120: mol_type = other DNA
acctgaagaagttcatggactacgtccagctgcatagcacggacaaggtggcacgcctgttggacaaggggctggaccccaacttccatgaccctgactcaggaggtgaggagtggagtc

SEQ ID NO: 18191 - DNA, 120 bp, synthetic construct
  misc_feature 1..120: note = Artificially Synthesized Probe
  source 1..120: mol_type = other DNA
gggttgtacatgtgtgtgcacacagatgaccctgtacagtgattgtatgcgtgcaccagtgagtgtggatatacttgcctgttctgggggtgtacgtgtgtttgtgtgcacacaggtgac

SEQ ID NO: 18192 - DNA, 120 bp, synthetic construct
  misc_feature 1..120: note = Artificially Synthesized Probe
  source 1..120: mol_type = other DNA
tgtgtgcacacagatgaccctgtacactgattgcatgcgtgcaccagggagtgtggatatacttgcctgttctggtgttgtacatgtgtgtgtgtgcacacagatgactctacagtgatt

SEQ ID NO: 18193 - DNA, 120 bp, synthetic construct
  misc_feature 1..120: note = Artificially Synthesized Probe
  source 1..120: mol_type = other DNA
tgggggtgtacacgtgtgtgcacacagatgaccctgtacagtgattgtacacgtgtaccagggagtgtggatatacttgcctgttctgggggtgtacacgtgtgtttgcacacagatgac

SEQ ID NO: 18194 - DNA, 120 bp, synthetic construct
  misc_feature 1..120: note = Artificially Synthesized Probe
  source 1..120: mol_type = other DNA
agttgtggctgcagcacagcctcataggcatatgtgtgcacatttgttctctgaacacacaggggcttcacatgtgtgcacgtgtgttctgaataaccaggtatgaattgggtacatcta

SEQ ID NO: 18195 - DNA, 120 bp, synthetic construct
  misc_feature 1..120: note = Artificially Synthesized Probe
  source 1..120: mol_type = other DNA
tctgacttggagtttgttggggagtcgggaatattgtgggggtttgcggaccaggaacagagccagaactcctctattttcagtaggagtgagatgtgggaagagtggtcaggctgctga

SEQ ID NO: 18196 - DNA, 120 bp, synthetic construct
  misc_feature 1..120: note = Artificially Synthesized Probe
  source 1..120: mol_type = other DNA
tcaccctggagcaagcatgagtcttggtggtccgtagcaagctctcagcatggaaagatcatgtaaacgacacataaggaaaacaacagtgatgggaaagcagaatggggctgggaatag

SEQ ID NO: 18197 - DNA, 120 bp, synthetic construct
  misc_feature 1..120: note = Artificially Synthesized Probe
  source 1..120: mol_type = other DNA
cccctctgggagagttgctgctggccaggctgggaccgtcctgttgtagctgctggagtcccctctgggagagttgtagctgccggagtcccctctgggagagttgctgctggccaggct

SEQ ID NO: 18198 - DNA, 120 bp, synthetic construct
  misc_feature 1..120: note = Artificially Synthesized Probe
  source 1..120: mol_type = other DNA
cattttttgtttttgttttaatttgaagtgacagcgggcagcaaacgtctggagcagatgttagggttggactctcacttggttctaatgtgaggtcatggtcagggctggagttgaatt

SEQ ID NO: 18199 - DNA, 120 bp, synthetic construct
  misc_feature 1..120: note = Artificially Synthesized Probe
  source 1..120: mol_type = other DNA
cctcctcttctgcctataattgtctaaccgtgggaaagctgtctgggacctctgcgcctcagtttctcttaagtgaaacatggtctcttatggtcatttgcatccccttccccctgtggt

SEQ ID NO: 18200 - DNA, 120 bp, synthetic construct
  misc_feature 1..120: note = Artificially Synthesized Probe
  source 1..120: mol_type = other DNA
atcaccacaaaagaagaccctggacacattaagcaataattctgcatcaattaccctctccctccaactctgtcagccattaacacactttcgtctctgtggactatagatttacctatt

SEQ ID NO: 18201 - DNA, 120 bp, synthetic construct
  misc_feature 1..120: note = Artificially Synthesized Probe
  source 1..120: mol_type = other DNA
ttgttgaaaatgaattgatcctagatatgtgggtttatttggactctcaattctatcccagtggtctacatgtatattcttatgccaggaccacatggtttgattactgcagctttgtag

SEQ ID NO: 18202 - DNA, 120 bp, synthetic construct
  misc_feature 1..120: note = Artificially Synthesized Probe
  source 1..120: mol_type = other DNA
tcagggcccctggcaattccatatagacttgaacattgcttttctatttgtgcaaaaagggacattggaattttgcattgaatctgtcatcactctgggtgacattaacattttaacacc

SEQ ID NO: 18203 - DNA, 120 bp, synthetic construct
  misc_feature 1..120: note = Artificially Synthesized Probe
  source 1..120: mol_type = other DNA
tgagaatttgtgtcaattctttaaatttctagtagagtgcaccagtgatgccatctggtggtggacttttcttcgttgggaggcttgtggttaaggattcaatctctttgcttgttatag

SEQ ID NO: 18204 - DNA, 120 bp, synthetic construct
  misc_feature 1..120: note = Artificially Synthesized Probe
  source 1..120: mol_type = other DNA
aggttattgatttgagattgttttcctttttaaaagtaagtgtttacagcgttgtttccctttaagtactgcttttgctccatatgttgtatttttgttcttgtttgtcttaaagtgttt

SEQ ID NO: 18205 - DNA, 120 bp, synthetic construct
  misc_feature 1..120: note = Artificially Synthesized Probe
  source 1..120: mol_type = other DNA
cgagaagaattcttgaatatattctgctcttgttgggtggcatgttctgtacgtatcgttgagtctaattggtttaagtcttctatgtccttattgatctctccagatgttctacccatt

SEQ ID NO: 18206 - DNA, 120 bp, synthetic construct
  misc_feature 1..120: note = Artificially Synthesized Probe
  source 1..120: mol_type = other DNA
ccttaatggtagcttcatttgtagggtggccaactcttttggtttgcctggaaccaaggcagttcctggaacataggatttagttttaacatctggaaagcctgggcaaactggacaagt

SEQ ID NO: 18207 - DNA, 120 bp, synthetic construct
  misc_feature 1..120: note = Artificially Synthesized Probe
  source 1..120: mol_type = other DNA
ctttacagttctgtcagtccaggcccgctgttgggctgaatggcatgtgtatactagctcctttaaccttgacgaacgtacatgttcatgctctattaataccatgttacagatgagcgt

SEQ ID NO: 18208 - DNA, 120 bp, synthetic construct
  misc_feature 1..120: note = Artificially Synthesized Probe
  source 1..120: mol_type = other DNA
ttcattttttgtacgtgttcattcatcctttcagcagacacaaaactaagacctgctgtgtgaggggctccagctcacctgctctgtggggatggcagaattctgttttttccttcctcg

SEQ ID NO: 18209 - DNA, 120 bp, synthetic construct
  misc_feature 1..120: note = Artificially Synthesized Probe
  source 1..120: mol_type = other DNA
gggcggcgccgcgcgcggtgctggccgggccggggcagtggctctggggtctcctctgccggggcggccctgggcccttgtgggatccctggtgtcacggtgaagggctctgcctgggga

SEQ ID NO: 18210 - DNA, 120 bp, synthetic construct
  misc_feature 1..120: note = Artificially Synthesized Probe
  source 1..120: mol_type = other DNA
ctctcttggtgctaaatccacatggatattcatagagaaaagactagaggtaaactcaaacaaacactcaaagtagatgcaaacttgtgtacatgacacagacacgtgtgcacacactct

SEQ ID NO: 18211 - DNA, 120 bp, synthetic construct
  misc_feature 1..120: note = Artificially Synthesized Probe
  source 1..120: mol_type = other DNA
tctggtttgaggactgtgtggagtgaggggcatttggacctacgtctgaagctgacggggagggaggggggtttaggctggagtcagaattggagagcagcaaatgttttttaggtgttt

SEQ ID NO: 18212 - DNA, 120 bp, synthetic construct
  misc_feature 1..120: note = Artificially Synthesized Probe
  source 1..120: mol_type = other DNA
agcacttctacacgtataagtcgttgactcatcccagcagtcccaagaggtggggccacttgttgttattccatttctagggggtcacatggccctgaggggcaaagtcttgtttgcaac

SEQ ID NO: 18213 - DNA, 120 bp, synthetic construct
  misc_feature 1..120: note = Artificially Synthesized Probe
  source 1..120: mol_type = other DNA
tcttattaacaaaactggaaaaatgagtttgtgttatgtaatccatacaatttgtttggttgacaacatctgaaaacaggaggctggtcaagtgcaagtgtggcgggttcttcagcaggc

SEQ ID NO: 18214 - DNA, 120 bp, synthetic construct
  misc_feature 1..120: note = Artificially Synthesized Probe
  source 1..120: mol_type = other DNA
ctatgtctttatcctctgtttatcctgtctcccagaacagattataaaccccacgagtgcagagactttgttctcttctctgctgtatttgcagagctggtacacagtaggagctcaata

SEQ ID NO: 18215 - DNA, 120 bp, synthetic construct
  misc_feature 1..120: note = Artificially Synthesized Probe
  source 1..120: mol_type = other DNA
gacggcaggtcacacagacacatgagcacggcacttgcacacagtgggctcatatagagacacgtgcatgagcacagcatctacacatgaccacggatctctcacacacacacgtatgtg

SEQ ID NO: 18216 - DNA, 120 bp, synthetic construct
  misc_feature 1..120: note = Artificially Synthesized Probe
  source 1..120: mol_type = other DNA
cggcaattccttcccttcgttgttttccactgtctttgctctagagtctaaccgagtgggggcttttctggcatgggcaaagggagttttgcagagggtcatgtctaggatccttgggcc

SEQ ID NO: 18217 - DNA, 120 bp, synthetic construct
  misc_feature 1..120: note = Artificially Synthesized Probe
  source 1..120: mol_type = other DNA
tccctgagctccttgagccatgaagaagtttgcgtccagccgtaacctgaacaagatcctggcacagtgcgactcatcctcgcgggagtacgaggagatccaggcggtggagcgcaagtg

SEQ ID NO: 18218 - DNA, 120 bp, synthetic construct
  misc_feature 1..120: note = Artificially Synthesized Probe
  source 1..120: mol_type = other DNA
ttcatgggcaggtcttatatatgtgtccattaacaaccttgtcatgtgcacgtccagatatacttgatcatgtcctgacgtgacagtcagtagcctcttcatgggactgtcccattacgt

SEQ ID NO: 18219 - DNA, 120 bp, synthetic construct
  misc_feature 1..120: note = Artificially Synthesized Probe
  source 1..120: mol_type = other DNA
gggagacgtggctggacctgtgagaagcgggaaggttaaaaaccaagcccaaccactggaattagcttcgaaagaactggaaatcagagaagaatatgaaaaacattaaaataaagtaaa

SEQ ID NO: 18220 - DNA, 120 bp, synthetic construct
  misc_feature 1..120: note = Artificially Synthesized Probe
  source 1..120: mol_type = other DNA
atcccagcatctacctaatgcaaggcgtggaagcaaaaataaaatgttgcctggaggcaatatttggagatgagatggcttaagaatttccgaaagttgaacaaagacatgagtcttcag

SEQ ID NO: 18221 - DNA, 120 bp, synthetic construct
  misc_feature 1..120: note = Artificially Synthesized Probe
  source 1..120: mol_type = other DNA
tgtttttgctttcagaagatagaaatgaggcctgttggtcactgctggcatgaacacatcagaactgcctcacactgtcaagagctattagagccctttaggatccatagtctatcgaga

SEQ ID NO: 18222 - DNA, 120 bp, synthetic construct
  misc_feature 1..120: note = Artificially Synthesized Probe
  source 1..120: mol_type = other DNA
taagaccgactttgaacagaacacagaggtgaccaccttaattttcagcgacacctgaacttgttttctatggggttttgccttttttctgaacaaacgtttgactgagccaagcatgat

SEQ ID NO: 18223 - DNA, 120 bp, synthetic construct
  misc_feature 1..120: note = Artificially Synthesized Probe
  source 1..120: mol_type = other DNA
ggttgtttcctccttggctttcaaggcatgtaccaactgactccagagttgggcagatttgctattcacggtctgataaagaggtgtaggctgggggcagatttgggaggtcatggtttt

SEQ ID NO: 18224 - DNA, 120 bp, synthetic construct
  misc_feature 1..120: note = Artificially Synthesized Probe
  source 1..120: mol_type = other DNA
agagggccctgggagtgagcgggtccacttggttcctgatgggctttgtttcccttaattatctaaaattatttatttaagaatatatcctctaatattggggggagatttatgtcaacc

SEQ ID NO: 18225 - DNA, 120 bp, synthetic construct
  misc_feature 1..120: note = Artificially Synthesized Probe
  source 1..120: mol_type = other DNA
tttgcataaagtcccgcatactctagaaatcaccaagaacttaacagatggtggcaatggtgacttcaactcccaaaaagaaatcattcacttcatgacaaaagcaaatgagaagtcccc

SEQ ID NO: 18226 - DNA, 120 bp, synthetic construct
  misc_feature 1..120: note = Artificially Synthesized Probe
  source 1..120: mol_type = other DNA
cttatgtcctgggggagccatccaaccagggctctgatggtcctgagatacacgtattagtttaacagtttccaagtcactttgatcttctgtggaaacctgcttgtacatcagggtctg

SEQ ID NO: 18227 - DNA, 120 bp, synthetic construct
  misc_feature 1..120: note = Artificially Synthesized Probe
  source 1..120: mol_type = other DNA
ggtggacttgggtttgaaggacactgcctctctctgcccataactggggtttccagtttccctctcagtcctgtctcttcctggccccagctaaaggatctcatacgttgatggacatgt

SEQ ID NO: 18228 - DNA, 120 bp, synthetic construct
  misc_feature 1..120: note = Artificially Synthesized Probe
  source 1..120: mol_type = other DNA
tctgttacacataggagtaaacctctcagcacttactacgggctggacactgagcatttaatacttagaataaccatattgaggttgagaccactagtacctccattttacagatgagaa

SEQ ID NO: 18229 - DNA, 120 bp, synthetic construct
  misc_feature 1..120: note = Artificially Synthesized Probe
  source 1..120: mol_type = other DNA
tatttctgtaggtgggattgtggggaagaaggctggtgaggctgcagctactttggagctgagaagcgctctcccctgctctccctggcctaaacactgagtgtcttccatggtttcttt

SEQ ID NO: 18230 - DNA, 120 bp, synthetic construct
  misc_feature 1..120: note = Artificially Synthesized Probe
  source 1..120: mol_type = other DNA
ggtatcagaacagattccccattccatgctgaggcaagtgacttttctttaccctaagtcagaacttggcatgctattagcattaagtttccccttatttcatctttgcacgtcactccc

SEQ ID NO: 18231 - DNA, 120 bp, synthetic construct
  misc_feature 1..120: note = Artificially Synthesized Probe
  source 1..120: mol_type = other DNA
cccatgtcttgcggggctgtccctgcctttctgggatatcttctcagggcctgcttgatgaccctgggtttgggcaggtcttggccccaacccaggccgtcagagtttgtgtcctttctc

SEQ ID NO: 18232 - DNA, 120 bp, synthetic construct
  misc_feature 1..120: note = Artificially Synthesized Probe
  source 1..120: mol_type = other DNA
gccgcagcgccgcaagagccccctggtgaagcagctgcaggtggaggacgcgcaggagcgcgcggccctggccgtgggcagccccggtcccggcggcggcagcttcgcccgcgagccctc

SEQ ID NO: 18233 - DNA, 120 bp, synthetic construct
  misc_feature 1..120: note = Artificially Synthesized Probe
  source 1..120: mol_type = other DNA
aagagccagagctggtgtttgctgtgaacctgccacctgcccagctgtcgtccagcgatgaggagaccagggaggagctggcccgaattgggttggtgccaccccctgaagagtttgcca

SEQ ID NO: 18234 - DNA, 120 bp, synthetic construct
  misc_feature 1..120: note = Artificially Synthesized Probe
  source 1..120: mol_type = other DNA
ggatctgccactaactccctatttcccatcccagaaacatttgtctcttggcaccaccttagaatcccttaaacatggattcccgtgtgtcatttctaaagtgcagtaagaagatagatg

SEQ ID NO: 18235 - DNA, 120 bp, synthetic construct
  misc_feature 1..120: note = Artificially Synthesized Probe
  source 1..120: mol_type = other DNA
ggtcttgatgaaaatcaaagccattttaaaaagtgcatagcacagtgcctggcctggttcgggccctcaataaacatttcttaaatggatgaaagaacaaagcaaaatgcaaatgctgtg

SEQ ID NO: 18236 - DNA, 120 bp, synthetic construct
  misc_feature 1..120: note = Artificially Synthesized Probe
  source 1..120: mol_type = other DNA
tgtttgtttttctttctcagatgtgggatggggaaggacaagaccagcagccctgacccttacgtgacgtctgttcttttactcagtagttcctgcaaaattctgatctctgattgggtt

SEQ ID NO: 18237 - DNA, 120 bp, synthetic construct
  misc_feature 1..120: note = Artificially Synthesized Probe
  source 1..120: mol_type = other DNA
agatggctcattcctgatgtgctttagccacaaggtgttctgtggcctgagagctttctggacaagttaagctgtcctgtatgtcgtggaaccaaagctcggtaacctgtggaaaaatga

SEQ ID NO: 18238 - DNA, 120 bp, synthetic construct
  misc_feature 1..120: note = Artificially Synthesized Probe
  source 1..120: mol_type = other DNA
cacttagctttacatgggactctcacatctggttttgtaggtaaagttcatggcaaagtagctttggaaacacaaaaagaggttctttgctgcagtacttctggtgcctttgacaagctt

SEQ ID NO: 18239 - DNA, 120 bp, synthetic construct
  misc_feature 1..120: note = Artificially Synthesized Probe
  source 1..120: mol_type = other DNA
gggtgtgagtggataatgttgcccaggagaaactgcaaactaagaggggagctctccgaaaatccatctaggaaggaagaggcctgggaaagaatgtctcgaagggaaacatgaacaggt

SEQ ID NO: 18240 - DNA, 120 bp, synthetic construct
  misc_feature 1..120: note = Artificially Synthesized Probe
  source 1..120: mol_type = other DNA
atgggagcaaagacagcttattctggtggttggtgcctgtgctgaggcccacctcaggtgttcttgaagcccctttctgtttgggggcacagtgtggcctcttcaggaagttctgctctg

SEQ ID NO: 18241 - DNA, 120 bp, synthetic construct
  misc_feature 1..120: note = Artificially Synthesized Probe
  source 1..120: mol_type = other DNA
aactctctctctcattgctctctcctgcccatctgcatgtggctgctctgtcgagctgcgccgtggtcccgagcgccggctgtgtaagtgagcatgcccatcccatgcctcttgccgtcc

SEQ ID NO: 18242 - DNA, 120 bp, synthetic construct
  misc_feature 1..120: note = Artificially Synthesized Probe
  source 1..120: mol_type = other DNA
agcctggatggagtggagggggccaccagtcattcctcatattccagccagtcgctggctctggtcccaggggccaaagaaaagggccagggtaaccgtaggatcccaccctttatttct

SEQ ID NO: 18243 - DNA, 120 bp, synthetic construct
  misc_feature 1..120: note = Artificially Synthesized Probe
  source 1..120: mol_type = other DNA
tgttttgcatattttaatccactctatatttggaacgagaaaaggaacaaatatctctgtccgtaatagtttcctctcccctcccttctacttccactggtcccactgcagctgcccagt

SEQ ID NO: 18244 - DNA, 120 bp, synthetic construct
  misc_feature 1..120: note = Artificially Synthesized Probe
  source 1..120: mol_type = other DNA
gtggggtggggggccctgggacgtttttaaacctagggtttggagtctggactaagctccatccacgtcactcacaagtttctgtttatatttctagctttttttaataaaataaaaaaa

SEQ ID NO: 18245 - DNA, 120 bp, synthetic construct
  misc_feature 1..120: note = Artificially Synthesized Probe
  source 1..120: mol_type = other DNA
cttggtgatcagagacgcgcagagggaggatgaggcatggtacttctttcgggtggagagaggaagccgtgtgagacatagtttcgtgaacaatttgttctaaaagtaacaggtatggaa

SEQ ID NO: 18246 - DNA, 120 bp, synthetic construct
  misc_feature 1..120: note = Artificially Synthesized Probe
  source 1..120: mol_type = other DNA
ggagttttttccaggtgtgaggaacaaattgtccctccctgaagccagctcacaatcttgttgcagatgcccccaaagaccttattatcagcatttcacatgacaacacgtcaggtactg

SEQ ID NO: 18247 - DNA, 120 bp, synthetic construct
  misc_feature 1..120: note = Artificially Synthesized Probe
  source 1..120: mol_type = other DNA
ctccatttcagatcctccagagaacctgagagtgatggtttcccaagcaaacaggacaggtaggaaaggagacagaggagccagggcctctcagtgccaaattgggggcccaggtgtctg

SEQ ID NO: 18248 - DNA, 120 bp, synthetic construct
  misc_feature 1..120: note = Artificially Synthesized Probe
  source 1..120: mol_type = other DNA
ctgcatccagggatgtaggaagggcctggagaaccaagttgcaataagagaggaaggattcggaagtgtggtttagaaggtgaatgggccttatcccacttttccaggcaaatcagggcc

SEQ ID NO: 18249 - DNA, 120 bp, synthetic construct
  misc_feature 1..120: note = Artificially Synthesized Probe
  source 1..120: mol_type = other DNA
cgggccaaggactctgcggctcttgacactttgcacgtgtagtttcttctcctgaaacacccttccctcctgccaaaccacgtctggaccctccttcaggttcacttttttttttttttt

SEQ ID NO: 18250 - DNA, 120 bp, synthetic construct
  misc_feature 1..120: note = Artificially Synthesized Probe
  source 1..120: mol_type = other DNA
gcccattgctcctagactatacacctgcacggcatgttcctgtagtgaaagctgtaggcaattataacgcaatggataggttaaagacagagttttagtaaaaatatggcataataggcc

SEQ ID NO: 18251 - DNA, 120 bp, synthetic construct
  misc_feature 1..120: note = Artificially Synthesized Probe
  source 1..120: mol_type = other DNA
ttgatattgtgatgctgacccgtctgctcacctgatttgggtgctgaagggcagctgacccccctaatcttttatagacttgtgaaacgaaaataaataaaagtcaagctgggaacagct

SEQ ID NO: 18252 - DNA, 120 bp, synthetic construct
  misc_feature 1..120: note = Artificially Synthesized Probe
  source 1..120: mol_type = other DNA
cattaactagggttagaaactaacttcattctttttagaattcaacagttttcctaggtcaccaattccaccttttgttcttattaaggcgcaaagtcacaggacccccttcctgggagt

SEQ ID NO: 18253 - DNA, 120 bp, synthetic construct
  misc_feature 1..120: note = Artificially Synthesized Probe
  source 1..120: mol_type = other DNA
aatgtatttcatgctggaaagaacagattttctctcattaaaaatagccccactaaaggagaccaacatgctagaagtgcggcaccagggcctcaagactacacttcggaacatgaagag

SEQ ID NO: 18254 - DNA, 120 bp, synthetic construct
  misc_feature 1..120: note = Artificially Synthesized Probe
  source 1..120: mol_type = other DNA
agccatgaggcagccacagctgtggacaaggaaaaaggatcaggatttcctaagacatctgccttggaaggcaagaggagcatcaactgtgatatattgtagttgatatggtttggctgt

SEQ ID NO: 18255 - DNA, 120 bp, synthetic construct
  misc_feature 1..120: note = Artificially Synthesized Probe
  source 1..120: mol_type = other DNA
tagcttctcaaagttctttaacccgtatcatcttagaatcacataccaggccttagagggacactgttggctgctttattttagggagtgaaggtaacgcctatagtctgttaagaatac

SEQ ID NO: 18256 - DNA, 120 bp, synthetic construct
  misc_feature 1..120: note = Artificially Synthesized Probe
  source 1..120: mol_type = other DNA
gagaggcctagctcggtgccatcaggcttcttcatacagctctcaaagcttcttttaagaggaacaaggtaaaaaaatggatacattaataaatggcattaaaactggctcattatctgg

SEQ ID NO: 18257 - DNA, 120 bp, synthetic construct
  misc_feature 1..120: note = Artificially Synthesized Probe
  source 1..120: mol_type = other DNA
tcaagaggtacaaatatacaatccaaagagaagaaacacaactggcaataaacatgaaaagatgaacttcattctttactacagaaaggcaaaatccgcacccccctccacacacacaca

SEQ ID NO: 18258 - DNA, 120 bp, synthetic construct
  misc_feature 1..120: note = Artificially Synthesized Probe
  source 1..120: mol_type = other DNA
agattttagaaaagatcatatggtttacatcccacgttatgtcacacctaaaggggatctggagtggtactccacagtcaaacacattaacatttcgtccacaaagcacatgagatagag

SEQ ID NO: 18259 - DNA, 120 bp, synthetic construct
  misc_feature 1..120: note = Artificially Synthesized Probe
  source 1..120: mol_type = other DNA
ggactccagactcatgtccacctgctcaacacctccagtccgcagcacatcctcaaatccgtggaaacaaggctgagttcctgagctcccccaaacccacctaccaggcttctccatctc

SEQ ID NO: 18260 - DNA, 120 bp, synthetic construct
  misc_feature 1..120: note = Artificially Synthesized Probe
  source 1..120: mol_type = other DNA
tacatccagtcacgcacacactgacttcatggtctcatttcttgctctcatcacagcttttaggaatttcctgagctgcagacgcagacgcagaacagctgcttgaacacatccagggca

SEQ ID NO: 18261 - DNA, 120 bp, synthetic construct
  misc_feature 1..120: note = Artificially Synthesized Probe
  source 1..120: mol_type = other DNA
aaaaggcaacaagttcttattaaagtctcaaacattctcccccaaaaaaggtgagagagggatcatgaacccccatgtacccagcttcaggaattaccagttttcatagctaattgtttc

SEQ ID NO: 18262 - DNA, 120 bp, synthetic construct
  misc_feature 1..120: note = Artificially Synthesized Probe
  source 1..120: mol_type = other DNA
aatacaatattagtaaactggaaaaaagaccagaagaaattacccagaatgcagcacaagaagcagcaattacaggacagaagagtgatcaggaacagcaggagagagaaggtctaatgt

SEQ ID NO: 18263 - DNA, 120 bp, synthetic construct
  misc_feature 1..120: note = Artificially Synthesized Probe
  source 1..120: mol_type = other DNA
agagaactaagcagacctctcagggaagggtgaaggaaccattaatctcatcttgtctttaatctgtatctgggaagataaaccagtaatccacattagcagtgtagagtctttgaaaag

SEQ ID NO: 18264 - DNA, 120 bp, synthetic construct
  misc_feature 1..120: note = Artificially Synthesized Probe
  source 1..120: mol_type = other DNA
cctgggcaacagagcaagactctatctcaaaaaaacaaaaaatccaaacaacaacaacaaaaataaaacaggcagagaacagatagcaacagtttcagaaatttatatgaaaagccaaaa

SEQ ID NO: 18265 - DNA, 120 bp, synthetic construct
  misc_feature 1..120: note = Artificially Synthesized Probe
  source 1..120: mol_type = other DNA
tatttatagtaaaattcgtatggcacccagttgtaactgttggatgactccaccttattttaatttctattcacatccacagaacccagcaaagggcctggcactgaggagactaaacta

SEQ ID NO: 18266 - DNA, 120 bp, synthetic construct
  misc_feature 1..120: note = Artificially Synthesized Probe
  source 1..120: mol_type = other DNA
gcgccactgcactccagcctggtgataagagctagactccgtctcaaaacaaacaaacaaaaaagttaaacatgggcagggcatggtggctcacgcctgtaatcttagcactttgggagg

SEQ ID NO: 18267 - DNA, 120 bp, synthetic construct
  misc_feature 1..120: note = Artificially Synthesized Probe
  source 1..120: mol_type = other DNA
atgtttcacactattattgttcaactgtcctttcgagacaatgcttataaaataccacttttccagatcaccccaacagcaaactgcagaaggacaaccaacagcaggataactcacccg

SEQ ID NO: 18268 - DNA, 120 bp, synthetic construct
  misc_feature 1..120: note = Artificially Synthesized Probe
  source 1..120: mol_type = other DNA
atataaatatcataaattccaaaagaattgcttggtagaaacagacaaaaagtgacttcttatgaaagttgtgttagtattaactggttctgaaaggctgcggtggcacagccagggtcc

SEQ ID NO: 18269 - DNA, 120 bp, synthetic construct
  misc_feature 1..120: note = Artificially Synthesized Probe
  source 1..120: mol_type = other DNA
ctgggattacaggtgtgatcccacacctgtaatccggcacccggccggagttgtttttaaagtattctctagagctatccattcatgtgtttatagattatttctagattaaattcatga

SEQ ID NO: 18270 - DNA, 120 bp, synthetic construct
  misc_feature 1..120: note = Artificially Synthesized Probe
  source 1..120: mol_type = other DNA
aacaacacttgaagcacccacagaaaaagatatggaccttcttccacctttaatactgacagaaaaaaacacagcagcaaaggaaacagatagcaaccaatctcaggatagcaagaacga

SEQ ID NO: 18271 - DNA, 120 bp, synthetic construct
  misc_feature 1..120: note = Artificially Synthesized Probe
  source 1..120: mol_type = other DNA
ttattattgctgttgagtgcctgctgagggcaaggtatcacgaagggtgcctgagtacattcctcatttacgtaaataaaatgtttgtgagtcactgaaaaacacataaacggcgtttta

SEQ ID NO: 18272 - DNA, 120 bp, synthetic construct
  misc_feature 1..120: note = Artificially Synthesized Probe
  source 1..120: mol_type = other DNA
caagtgtgagctaccacttcgagactcacttttcaccaacattttcagcagttgtgtcagacagcaagtcaatgtgccattatttacttaaatattcatccattatagggcatctgatac

SEQ ID NO: 18273 - DNA, 120 bp, synthetic construct
  misc_feature 1..120: note = Artificially Synthesized Probe
  source 1..120: mol_type = other DNA
ggtgatagttaatactttctgagcgcttttactatggtcaggcattatatttacacctaatcctcgcaaaacactactgggaagatcctcatttgacaggagcaattccgggtcacaaag

SEQ ID NO: 18274 - DNA, 120 bp, synthetic construct
  misc_feature 1..120: note = Artificially Synthesized Probe
  source 1..120: mol_type = other DNA
tgaacacaaaacataaactaagttttaagccacataggtgttctgaaagcatgctcaacaaccacagccactggaggatggtccactggaaaaatatgatttcaggaaccagaagtaaag

SEQ ID NO: 18275 - DNA, 120 bp, synthetic construct
  misc_feature 1..120: note = Artificially Synthesized Probe
  source 1..120: mol_type = other DNA
tttcagctcattccctttagtatggccctaaaaaatcaacagaactgtcctacttcatgttgcccgactagcaggcaggtatgtgaacctaaagtagaagtcctagcttacatattattc

SEQ ID NO: 18276 - DNA, 120 bp, synthetic construct
  misc_feature 1..120: note = Artificially Synthesized Probe
  source 1..120: mol_type = other DNA
gaaaaataggaggaaatggtacctggggtcttactgagggaggtaatattctgtttcttgattgggtgctggttacacagatgtattaactttgtggaaattcatctagctgcacacttt

SEQ ID NO: 18277 - DNA, 120 bp, synthetic construct
  misc_feature 1..120: note = Artificially Synthesized Probe
  source 1..120: mol_type = other DNA
aaatttctgggtcatgtgactacctttaacaaccattttttggattttttcaatttcagtctaaccagagtggtgactacatttgcagcattaactaagaaacacacggccgggcgtggt

SEQ ID NO: 18278 - DNA, 120 bp, synthetic construct
  misc_feature 1..120: note = Artificially Synthesized Probe
  source 1..120: mol_type = other DNA
aaaacccaaacaaacaagcagtagaactagcaatgaggaagtgaaagagaaggcactgggaagccagtatgaggtcatttatttgggaaaaaaggagaaacatgaagaaagaaacaccct

SEQ ID NO: 18279 - DNA, 120 bp, synthetic construct
  misc_feature 1..120: note = Artificially Synthesized Probe
  source 1..120: mol_type = other DNA
aaaccagcctgaccaacatggagaagctccgtctctattaaaaatacaaaattagctgggcgtggtggcacatgcctgtaatcccagctattcgggaggctgaggcaggaaaatcgccgg

SEQ ID NO: 18280 - DNA, 120 bp, synthetic construct
  misc_feature 1..120: note = Artificially Synthesized Probe
  source 1..120: mol_type = other DNA
ttcccacttgtaaacatacaagactgtaattcaggaatccatatttccctagcagaagtgctggcattatcagtaagtgaaatgaacacatggtagtgagctgacttaggttctggtgtt

SEQ ID NO: 18281 - DNA, 120 bp, synthetic construct
  misc_feature 1..120: note = Artificially Synthesized Probe
  source 1..120: mol_type = other DNA
tatgagccacagcgcctggctgcttctttcaatagacagctattctgctccaggttgtgttcttgtgaaattttatgtctaaataaaatgtcttattgcaatgggattttatattcagct

SEQ ID NO: 18282 - DNA, 120 bp, synthetic construct
  misc_feature 1..120: note = Artificially Synthesized Probe
  source 1..120: mol_type = other DNA
gagaagtgaggagcccctctgcccggccagccgctccgtccgggagggaggtgggggggtcagccccctgcccggccagccgccccgtccgggaggtgaggggcgcctctgcccggccgc

SEQ ID NO: 18283 - DNA, 120 bp, synthetic construct
  misc_feature 1..120: note = Artificially Synthesized Probe
  source 1..120: mol_type = other DNA
acatacaggaacacagccatggaaataacccctttttatagtgatataggaaagttctgagatatcattttcatacagaaagcttagcatgtctagcttaaagttttttaagttaaaaaa

SEQ ID NO: 18284 - DNA, 120 bp, synthetic construct
  misc_feature 1..120: note = Artificially Synthesized Probe
  source 1..120: mol_type = other DNA
tatgttcaaaacttgtgcatacacacagcactataacaaaaccatgaagtacagatctttttggctcatcccctttaggggtgtatctaaattaaccaagcttggcagagcctctctttt

SEQ ID NO: 18285 - DNA, 120 bp, synthetic construct
  misc_feature 1..120: note = Artificially Synthesized Probe
  source 1..120: mol_type = other DNA
cagggtgtgactctgcctcaaaagataataaatacattgataacataaaatctctatttcagtctatagaagtaaaggcctataaaatccaagtacacatttatatgttaataggaatat

SEQ ID NO: 18286 - DNA, 120 bp, synthetic construct
  misc_feature 1..120: note = Artificially Synthesized Probe
  source 1..120: mol_type = other DNA
gggccctcagttgttaccacaacaaaaagcaactatgaaaaacctaagatatgtaatccccaataagatatgtagccaagactcctgcaactagaaataactgatgtgctttgaatgaag

SEQ ID NO: 18287 - DNA, 120 bp, synthetic construct
  misc_feature 1..120: note = Artificially Synthesized Probe
  source 1..120: mol_type = other DNA
agatgccagcaggaatcatgttactttcatgtttgtgtcttcaacatctggtacagtgcctggcacagtgtttctcaaatgactagatccgttaatgagcatgctattacactgaaattt

SEQ ID NO: 18288 - DNA, 120 bp, synthetic construct
  misc_feature 1..120: note = Artificially Synthesized Probe
  source 1..120: mol_type = other DNA
gagattctaataagacttcaggaacctgatgaatcctaagctacctttcagatttattaaatggtgtgggtgacttaccaccttctggctggatggctgctgaaccaattttatgttcct

SEQ ID NO: 18289 - DNA, 120 bp, synthetic construct
  misc_feature 1..120: note = Artificially Synthesized Probe
  source 1..120: mol_type = other DNA
aaaacatcctaagcgataacatagcctagaactatttcttgccaaaactctcaattcccatatccctttgactattcgtcaatcctaggcttgacaaaacctcaagtcttggccaggtgc

SEQ ID NO: 18290 - DNA, 120 bp, synthetic construct
  misc_feature 1..120: note = Artificially Synthesized Probe
  source 1..120: mol_type = other DNA
aagggagtttctgccttcacagagttcctagtctagttgggtgaacagacacagtaatgagttattgcaatgttctaatgagagcactgtggacagaggtgatgatagttaaaagtttaa

SEQ ID NO: 18291 - DNA, 120 bp, synthetic construct
  misc_feature 1..120: note = Artificially Synthesized Probe
  source 1..120: mol_type = other DNA
aacggccaaagaataatcacagccaatgaagccagcagctaccaggaatactgcaggtccaatcattcctggagttaaaaagttataaaagggaaaaaacacccagcattaatatttgct

SEQ ID NO: 18292 - DNA, 120 bp, synthetic construct
  misc_feature 1..120: note = Artificially Synthesized Probe
  source 1..120: mol_type = other DNA
ttggtcattacaggcagttaagcgtaaaatatgagaagagacttaatgagtgggctgtcagtttttctgtgtctacagcagtgctatccaatagctctctgtgatgatggaaatgttgta

SEQ ID NO: 18293 - DNA, 120 bp, synthetic construct
  misc_feature 1..120: note = Artificially Synthesized Probe
  source 1..120: mol_type = other DNA
ggcaacagccaccgagcccagccagggtctttttataatgtaattactgaagtatagtcactgagacttccagggtctctactggagacttttaaaaagttaaatgattgtcttagacag

SEQ ID NO: 18294 - DNA, 120 bp, synthetic construct
  misc_feature 1..120: note = Artificially Synthesized Probe
  source 1..120: mol_type = other DNA
ggcataagccactgcgcccagtgaatattataaatcttaatcctcaaaatgtatgattcaaaaagaaacatattgtaaagaaatgcacttaaatgcatcatagtgttttgttatgtgaac

SEQ ID NO: 18295 - DNA, 120 bp, synthetic construct
  misc_feature 1..120: note = Artificially Synthesized Probe
  source 1..120: mol_type = other DNA
tgatttaatcaatcatacacatttaacgaagtctccatacaaactcaaagggacagggtttggatgaacttttgcggtcggggttcttggagggtggtgttccaggagagggcatgaaaa

SEQ ID NO: 18296 - DNA, 120 bp, synthetic construct
  misc_feature 1..120: note = Artificially Synthesized Probe
  source 1..120: mol_type = other DNA
gttaattttttaatataattacagtaaataagtctggctgtcagaaggattatagggttcagtccaaggcagtccctaagagtctgtctcagagggaaataagccttgccctagtcctgt

SEQ ID NO: 18297 - DNA, 120 bp, synthetic construct
  misc_feature 1..120: note = Artificially Synthesized Probe
  source 1..120: mol_type = other DNA
agttacatcacccaaatgtacatccctagacacttcgatttagtcttggccattaaaatttttttgatttgccttttatgtctctttaaatctgtaagttcccttccattcatttttttc

SEQ ID NO: 18298 - DNA, 120 bp, synthetic construct
  misc_feature 1..120: note = Artificially Synthesized Probe
  source 1..120: mol_type = other DNA
ctgcgctccagcctgggcaacaacctaaatacactaaagtcttcagcatttatacattccacaggcaccttccacagttgttaagttttctcttcaaggataagatcccttgtattcatt

SEQ ID NO: 18299 - DNA, 120 bp, synthetic construct
  misc_feature 1..120: note = Artificially Synthesized Probe
  source 1..120: mol_type = other DNA
aaacacaagaagaaatgcctggtgcagagcactaattcctacttcatggatgtgaagtgcccaggacgctataaaatcatcacggtctttactcatgcacaaacagtagttttgtgtgtt

SEQ ID NO: 18300 - DNA, 120 bp, synthetic construct
  misc_feature 1..120: note = Artificially Synthesized Probe
  source 1..120: mol_type = other DNA
aaatgcaagataaaagatccttgttttaaagtacacaacattaattactggccagctattgatattttatttcttccatatatagttcttcctggaaaatctcaaatagaaacatcagtg

SEQ ID NO: 18301 - DNA, 120 bp, synthetic construct
  misc_feature 1..120: note = Artificially Synthesized Probe
  source 1..120: mol_type = other DNA
gaagttttaaggtttggtccacatagccaggccaatgtttatggtatactttggaatgtgagtgactgaggattcactttaatagtttttaaagcaggtaagtccatgtagccagtgcag

SEQ ID NO: 18302 - DNA, 120 bp, synthetic construct
  misc_feature 1..120: note = Artificially Synthesized Probe
  source 1..120: mol_type = other DNA
aggcaataatgtcaataaagtataaaaagtccagttgtaagaaaagtgtgcaactacgatagcccaaagtggcagggattttaaaatgggtacccacggcactgacttctgtgaagaaag

SEQ ID NO: 18303 - DNA, 120 bp, synthetic construct
  misc_feature 1..120: note = Artificially Synthesized Probe
  source 1..120: mol_type = other DNA
tgatttataaaaattaggcaatacaaggtttctgtatgcagccatatgcagtagtggtctttaaagcagggtaaaagcaccataggggtatgcaagatgatctgttggggtgaggaaaga

SEQ ID NO: 18304 - DNA, 120 bp, synthetic construct
  misc_feature 1..120: note = Artificially Synthesized Probe
  source 1..120: mol_type = other DNA
caggtgtgagccactgcccccagcgtaagtgatttattttaagtgtcttttatttttatttatttatttatttatttatttatttatttatttatttatttatttttgagatggagtctc

SEQ ID NO: 18305 - DNA, 120 bp, synthetic construct
  misc_feature 1..120: note = Artificially Synthesized Probe
  source 1..120: mol_type = other DNA
tatacattcagattgtgagcctcccacctgtttattgattcttgcatgatcaagaaagcttggataccactgatatttagggcatcagatttttatattttctatacgctaagactgttg

SEQ ID NO: 18306 - DNA, 120 bp, synthetic construct
  misc_feature 1..120: note = Artificially Synthesized Probe
  source 1..120: mol_type = other DNA
cagcagtggttttcaactccagctatactttacaattataggggcctgtgttctactctctgcctattgaataaacaaaacaaaaacaagtaaggcaaaaaaactctgagtgtagggcca

SEQ ID NO: 18307 - DNA, 120 bp, synthetic construct
  misc_feature 1..120: note = Artificially Synthesized Probe
  source 1..120: mol_type = other DNA
ataagcccttcacatggcaggttctcaatagctgcttatcaaacgaatacaaggctcacagggttagaggcttagaaagaagaatgtgaaatgtatgtattccagcttagtgttcatttg

SEQ ID NO: 18308 - DNA, 120 bp, synthetic construct
  misc_feature 1..120: note = Artificially Synthesized Probe
  source 1..120: mol_type = other DNA
catactggacaacacaaggttgggcttaagaaggtacaaaacagctttttttgatgttctggatctagaaattattctcttgctattgtttctaacacactactatcttgccaatcaagc

SEQ ID NO: 18309 - DNA, 120 bp, synthetic construct
  misc_feature 1..120: note = Artificially Synthesized Probe
  source 1..120: mol_type = other DNA
gagggagactctgtcctccccacccccaccccccaaaaaggaaaatacatacaggcaaaaaaatttaaaattgctcagatcatttgctcagccaacattttgaaagcaaatatactttgg

SEQ ID NO: 18310 - DNA, 120 bp, synthetic construct
  misc_feature 1..120: note = Artificially Synthesized Probe
  source 1..120: mol_type = other DNA
aagaacacttcaatgggtgaagtggtaatgtctttccataattcattaaaaggagatcttcaacatagaggagtagctgatgatcttaaagcactcgctagtcatgagatggtccttctg

SEQ ID NO: 18311 - DNA, 120 bp, synthetic construct
  misc_feature 1..120: note = Artificially Synthesized Probe
  source 1..120: mol_type = other DNA
agaatgaaatcacatttctacctataagtactgactttttcttggttggataactgagaaaacatttgaactgcaactcttgcttgtccagctcagatctccttcgacatgactgccagc

SEQ ID NO: 18312 - DNA, 120 bp, synthetic construct
  misc_feature 1..120: note = Artificially Synthesized Probe
  source 1..120: mol_type = other DNA
attatcaaatccagagcaaaatattgattctttaaacccttcccaaagtcacctactgcaagtctaaactgcaacaagttcctctcaactctgcactaagatgccccatggttcttcatg

SEQ ID NO: 18313 - DNA, 120 bp, synthetic construct
  misc_feature 1..120: note = Artificially Synthesized Probe
  source 1..120: mol_type = other DNA
aaaaaaaaaggaatgcaatctgggcttctcctcctaactctcttgcctctgaatattcctttttccgaagtgtgtcgagaaacaacctaagtttggagagattaagacacatatcgatgt

SEQ ID NO: 18314 - DNA, 120 bp, synthetic construct
  misc_feature 1..120: note = Artificially Synthesized Probe
  source 1..120: mol_type = other DNA
cagacccaagtaaccttggatatgagctctccacctggttaaaactttattacagtgctgatttcttctgtttctaagtttttgccaatctttggcaaagatcaagacaggtcataattc

SEQ ID NO: 18315 - DNA, 120 bp, synthetic construct
  misc_feature 1..120: note = Artificially Synthesized Probe
  source 1..120: mol_type = other DNA
tcagatttgggatgtacaactgtataaacacactagttggttttctaacaactaatggtcagaatgagaatcctttcatgaataacacattttattttctactaatcaagtggaaaaaac

SEQ ID NO: 18316 - DNA, 120 bp, synthetic construct
  misc_feature 1..120: note = Artificially Synthesized Probe
  source 1..120: mol_type = other DNA
tgtgtcaaagtccatacctgatttcttaatgatgaaagaatgtattccttttcataatgggaaattctcttgtgtttttgtggtgtgtcactaactaaccagatccacaaaagaaaccaa

SEQ ID NO: 18317 - DNA, 120 bp, synthetic construct
  misc_feature 1..120: note = Artificially Synthesized Probe
  source 1..120: mol_type = other DNA
ccagaaagaggaagagaaattactgtcccaagctgtgctcctagaacaacacataagactattttataaactttggagagagaaacaaggataggacagacaagtctactgcttacagag

SEQ ID NO: 18318 - DNA, 120 bp, synthetic construct
  misc_feature 1..120: note = Artificially Synthesized Probe
  source 1..120: mol_type = other DNA
ctgatataacccggctcttatctctttctctaacctcatcttatgccatcatcctccttactcactgagttctagccatccaaggtagttttccacttcttttaacccttatgttatttc

SEQ ID NO: 18319 - DNA, 120 bp, synthetic construct
  misc_feature 1..120: note = Artificially Synthesized Probe
  source 1..120: mol_type = other DNA
taacatattacagcaaaatttggtaattgttatctcacctgcatatgaaatgctaagaagtttgcttctttcaagagggggagcccaagaagaccacatggcatgcatggctggaaatgt

SEQ ID NO: 18320 - DNA, 120 bp, synthetic construct
  misc_feature 1..120: note = Artificially Synthesized Probe
  source 1..120: mol_type = other DNA
ggctctccttggacactctctgtgtcacttcagaaagattagttaacctccctgaacttcaaggcggttgcataattgttgtaaagataaatggtaactagtgctattattagtggagag

SEQ ID NO: 18321 - DNA, 120 bp, synthetic construct
  misc_feature 1..120: note = Artificially Synthesized Probe
  source 1..120: mol_type = other DNA
aaactctggtccagtgttcattccaacagcatgatacactgctacttaaaataatcttcatcctctacaccaagcccagtggccattatcttgcttgaattaaagaaatgcaagagagca

SEQ ID NO: 18322 - DNA, 120 bp, synthetic construct
  misc_feature 1..120: note = Artificially Synthesized Probe
  source 1..120: mol_type = other DNA
taccaaagaatgacatctttaagaagaagagaaggagacacacggtaagaagtaaaacaagagagaaaagaaaattacctctcctagtccttctagtgctctgagtacaatgagtggtcc

SEQ ID NO: 18323 - DNA, 120 bp, synthetic construct
  misc_feature 1..120: note = Artificially Synthesized Probe
  source 1..120: mol_type = other DNA
gaaccaggcttggttttaatcctagctctattacttaccgaatgtgtgatctgggaagaggaaatgaaataggcacataaaataaggcttgatgtacagttagtgttcacttagtgctgg

SEQ ID NO: 18324 - DNA, 120 bp, synthetic construct
  misc_feature 1..120: note = Artificially Synthesized Probe
  source 1..120: mol_type = other DNA
gagtcactgcacccagcctgcaaatgtacttctaaaaagaatactagcttttctttctgtactatctcctcgtgtgataagcaacataaaatgaagtatatataacttaattataaacaa

SEQ ID NO: 18325 - DNA, 120 bp, synthetic construct
  misc_feature 1..120: note = Artificially Synthesized Probe
  source 1..120: mol_type = other DNA
tgtatttgaatctaccatatccactaacgcaacactcagattcacacgtaatgcatacacaatgaagaaaccaaaaaaggccaaaattgctaagttgtaacgagcagagcagcacactgg

SEQ ID NO: 18326 - DNA, 120 bp, synthetic construct
  misc_feature 1..120: note = Artificially Synthesized Probe
  source 1..120: mol_type = other DNA
acttgcagaacctatgacagttgcagcatctgtgacagttgctcagtagttatcaagcgtaaagggctcacagtaaaaagggaaatcagtgaatgtaccaccatgattaaaaaaaaagga

SEQ ID NO: 18327 - DNA, 120 bp, synthetic construct
  misc_feature 1..120: note = Artificially Synthesized Probe
  source 1..120: mol_type = other DNA
agatccagatctgtaagaactgaatttctaaagttctattcacattgtctctattactagaatctaggcgaatttgctttctgctgcaaccaaatgggcagttgtccagttaatgacggt

SEQ ID NO: 18328 - DNA, 120 bp, synthetic construct
  misc_feature 1..120: note = Artificially Synthesized Probe
  source 1..120: mol_type = other DNA
aaatgggcagatctgagatgtttaaaggcagaattaacaggccttgcccaaatgttagatgtgggagtaagtgaaggggagggatgaagttattagtaattctcttactctaaaaaactc

SEQ ID NO: 18329 - DNA, 120 bp, synthetic construct
  misc_feature 1..120: note = Artificially Synthesized Probe
  source 1..120: mol_type = other DNA
gtgtgtgggtgtaactgaaagtacacaggctaatttagagtgggacctgggaatgaatctgtttctgatttttcactggctgtgtgcttttgtagaaattacttactagttttcattctc

SEQ ID NO: 18330 - DNA, 120 bp, synthetic construct
  misc_feature 1..120: note = Artificially Synthesized Probe
  source 1..120: mol_type = other DNA
cgcttggcactagtcgaagtattttgcctgaattagggttattataaggattcactgagttagtaatgtaaaatacttagaagagtgcttggcacagaataactgtgaattattatgggt

SEQ ID NO: 18331 - DNA, 120 bp, synthetic construct
  misc_feature 1..120: note = Artificially Synthesized Probe
  source 1..120: mol_type = other DNA
taaagtgttggactttgattgtaacccaagaagaaagcaaaatggagagggctgaaagtttaggaaaatatacactagaatataaaagtctataagggcaggagcttttgttctgttttg

SEQ ID NO: 18332 - DNA, 120 bp, synthetic construct
  misc_feature 1..120: note = Artificially Synthesized Probe
  source 1..120: mol_type = other DNA
gggcaggggaaacagattaaaagagacaaaaaacatttcaatcatttggaaggtatggacattattgagatcctgatttgaacacactataaaaaattaggacataggcccggcccggtg

SEQ ID NO: 18333 - DNA, 120 bp, synthetic construct
  misc_feature 1..120: note = Artificially Synthesized Probe
  source 1..120: mol_type = other DNA
gtaacaaacgtagccacctaaagccaggaaggacagggccagtaccataagatccatacactcaacacatgaatcaagtagggattgtttttaaaagggatgctataagctactttttta

SEQ ID NO: 18334 - DNA, 120 bp, synthetic construct
  misc_feature 1..120: note = Artificially Synthesized Probe
  source 1..120: mol_type = other DNA
aaaatgtcctcgatgtttttagtctcttactgcacaatgtcaagatatcagctgggttatacaatagttgccctctgcatactcacaaatgttaactccagtccttttttgtcttccctc

SEQ ID NO: 18335 - DNA, 120 bp, synthetic construct
  misc_feature 1..120: note = Artificially Synthesized Probe
  source 1..120: mol_type = other DNA
atcgtcactgaggtaaaaaagcctctgtaacatgggagttcctgggacagggagaaatataaagcaaatcctatgaagttcagttccatatcaggaaagaggtagggggctatgtttatt

SEQ ID NO: 18336 - DNA, 120 bp, synthetic construct
  misc_feature 1..120: note = Artificially Synthesized Probe
  source 1..120: mol_type = other DNA
agcattttgctttgagaatcctttagtaaaaagtgtcaccacatttttttcccatcatgagcccttttgaaactattgcacggtaacaagtgtggatgcttggtgggttggagaagctgt

SEQ ID NO: 18337 - DNA, 120 bp, synthetic construct
  misc_feature 1..120: note = Artificially Synthesized Probe
  source 1..120: mol_type = other DNA
aggatgcccagttaaactcgaacatttgaacttcagataatccaactggataggatacttacttcccagatactgcatgatatttggtactgataactgagactggaaatgcaaatattg

SEQ ID NO: 18338 - DNA, 120 bp, synthetic construct
  misc_feature 1..120: note = Artificially Synthesized Probe
  source 1..120: mol_type = other DNA
cttagttattcatttctgcagaactaatttttaacctagcattgccttggacattggaacttgctttaggagggaaggtgagctaatctgttcgaacgccaagtttaactcccactgcaa

SEQ ID NO: 18339 - DNA, 120 bp, synthetic construct
  misc_feature 1..120: note = Artificially Synthesized Probe
  source 1..120: mol_type = other DNA
attttcctggcttttgactctcccaacaagaggatctcttctggtgctaagatcatgaggtccactcggggggtatgtgggcattttcctggcttttgactctcccaacaagaggatctc

SEQ ID NO: 18340 - DNA, 120 bp, synthetic construct
  misc_feature 1..120: note = Artificially Synthesized Probe
  source 1..120: mol_type = other DNA
tctcaggccaagggagacagaggtagttacattagtgtttctcaaacttggctgatcctcaggatcacctggattcctattcgggacccactgaggcagaatacacagggaatctgtggt

SEQ ID NO: 18341 - DNA, 120 bp, synthetic construct
  misc_feature 1..120: note = Artificially Synthesized Probe
  source 1..120: mol_type = other DNA
cagaaggcagttactaggagaggcttgtgtttgtttctgaaactcaggtggtaacacagagtttaacctatatttcagggaaaaaaaaaagtgctcatgtcaaggaactagtcagtccat

SEQ ID NO: 18342 - DNA, 120 bp, synthetic construct
  misc_feature 1..120: note = Artificially Synthesized Probe
  source 1..120: mol_type = other DNA
ctcccctggcttttggtgcatgggagcctctgatgtcctcctaacctttggtcccacccacatgtgaccataaggcacagtctatctcaagaaacttaacaactaatagcttactattga

SEQ ID NO: 18343 - DNA, 120 bp, synthetic construct
  misc_feature 1..120: note = Artificially Synthesized Probe
  source 1..120: mol_type = other DNA
gctgagtgattcatcagaaactttgaatttgtcttatgaaaatgtagtaggagaaaactctgtgaaacagcccagggataccgagtttgatgaactgcatttgctttgctgaagagagga

SEQ ID NO: 18344 - DNA, 120 bp, synthetic construct
  misc_feature 1..120: note = Artificially Synthesized Probe
  source 1..120: mol_type = other DNA
gttggagaaaacccgaaggcaggagagtggagttgtgtgaacaactctttaaaagagtgtggggagggtccaggatgaggaggctgataggggagggagtcagggatgcaggaagaagac

SEQ ID NO: 18345 - DNA, 120 bp, synthetic construct
  misc_feature 1..120: note = Artificially Synthesized Probe
  source 1..120: mol_type = other DNA
actagggcaggacatgggctagaatggcctcctctctttttgtgtctgagacacttaaattatcacttagattactgacctattaatcaactaatctatttggggaacaaaaagacccca

SEQ ID NO: 18346 - DNA, 120 bp, synthetic construct
  misc_feature 1..120: note = Artificially Synthesized Probe
  source 1..120: mol_type = other DNA
agccacacttttactcatttgtgggggagaaaaaagaaatagcctgtcttttcatctttgaaaacaaggtgctatcacttggcattctgagaactcattcactagggccaagaggatcca

SEQ ID NO: 18347 - DNA, 120 bp, synthetic construct
  misc_feature 1..120: note = Artificially Synthesized Probe
  source 1..120: mol_type = other DNA
gggtttcccacacgcatgatgcatagggatgaggggagcctggggcttcccacatgcatgatgcatagggatgagcagagcccggggtttcccacatgcatgatgcatagggatgagcag

SEQ ID NO: 18348 - DNA, 120 bp, synthetic construct
  misc_feature 1..120: note = Artificially Synthesized Probe
  source 1..120: mol_type = other DNA
cttccccctcttctcttcctctctgctgtcatctctgctcttctcccacttcttcatttttatagtactattggtattattattaagacactgaaatacctctcatctagccatagagca

SEQ ID NO: 18349 - DNA, 120 bp, synthetic construct
  misc_feature 1..120: note = Artificially Synthesized Probe
  source 1..120: mol_type = other DNA
ggctgttatcacaaaaaagaaacactgaagcaataaagataatggaccacatcgctcaaaagaatgggaagttgcctcctgctgatttaaaggtgaaatctaggaaggggtatctcacat

SEQ ID NO: 18350 - DNA, 120 bp, synthetic construct
  misc_feature 1..120: note = Artificially Synthesized Probe
  source 1..120: mol_type = other DNA
atgtgaggttttattggaacaaagagtttgtagtaagtcagtgcctggcatattgcagaccctaaatcaatatttgctgaaagttgaatgagtaaacactgtgccccagaatctgtccag

SEQ ID NO: 18351 - DNA, 120 bp, synthetic construct
  misc_feature 1..120: note = Artificially Synthesized Probe
  source 1..120: mol_type = other DNA
gtaatgggagaagtgatagtacctatctcacagatgtgttgggaggattaaggagattatatgtgtaaatgacatagaagagggtacagcatccatgcaggaaatgttcaatgtcaatgt

SEQ ID NO: 18352 - DNA, 120 bp, synthetic construct
  misc_feature 1..120: note = Artificially Synthesized Probe
  source 1..120: mol_type = other DNA
tctatcatgaaaaaaatgtatcattggggcccttctaggacactctttctcatttttactcccctcttctcatattgctctagggcattctaaacccagtgattcatgctctttctccat

SEQ ID NO: 18353 - DNA, 120 bp, synthetic construct
  misc_feature 1..120: note = Artificially Synthesized Probe
  source 1..120: mol_type = other DNA
ttgagttttaacatacatacaatcagcaaactataagtgcatgactccatgagtttttaaaaatgtgtacacccgggcagcatgatccacgtaaagatggggaacctttccaacttctcc

SEQ ID NO: 18354 - DNA, 120 bp, synthetic construct
  misc_feature 1..120: note = Artificially Synthesized Probe
  source 1..120: mol_type = other DNA
aacacatgggagctccgattactccagatcctcccaacacttgatctggctcatctttttaagagtggccattttggtggatgtatactttagtctgtaattcttacaatcaaagataaa

SEQ ID NO: 18355 - DNA, 120 bp, synthetic construct
  misc_feature 1..120: note = Artificially Synthesized Probe
  source 1..120: mol_type = other DNA
tagtccttatcacattttaggacagtcattcattcaacccgcaggaaatatctccaggccttctatatggctggcaggtatctaggtcctaggatttcaaccatgagcgaagcagagaga

SEQ ID NO: 18356 - DNA, 120 bp, synthetic construct
  misc_feature 1..120: note = Artificially Synthesized Probe
  source 1..120: mol_type = other DNA
agcccaggaaaccaagctgagattcaaaaagcccattctttcccctgttcaatggagtcttcttgaatatgtcatcgtcaactccccaaatctcttgagactcagtttacttatctaaaa

SEQ ID NO: 18357 - DNA, 120 bp, synthetic construct
  misc_feature 1..120: note = Artificially Synthesized Probe
  source 1..120: mol_type = other DNA
tacgcgagtatttccatacatgtgattcccttaaatttgttcttgggtatgatcatccccatattacatatgaggaagctgtgatttagaaagggaaagaagcgttgtaggggtcagaca

SEQ ID NO: 18358 - DNA, 120 bp, synthetic construct
  misc_feature 1..120: note = Artificially Synthesized Probe
  source 1..120: mol_type = other DNA
atatttccatcacccccaaaaggttcttcatgtctctttgcagttaatacccttttcttctcacctccagaccatgcagttttagcttttccagaatgagctgtaaatgtaataataggg

SEQ ID NO: 18359 - DNA, 120 bp, synthetic construct
  misc_feature 1..120: note = Artificially Synthesized Probe
  source 1..120: mol_type = other DNA
caccacacctggtctggtgtcagctttctaaaagtcattttggtaggtaatggtattattgtgacttgacttttcctaattactgataatgttgagtatctttgtctgtacttaattgcc

SEQ ID NO: 18360 - DNA, 120 bp, synthetic construct
  misc_feature 1..120: note = Artificially Synthesized Probe
  source 1..120: mol_type = other DNA
cagtttcagagttggactgctctgctcctcttcactttgtgcagcacgtgttgtaagaacattcatttggcattaatacccactgccttgttttgaaaatgatctttccatttttatctc

SEQ ID NO: 18361 - DNA, 120 bp, synthetic construct
  misc_feature 1..120: note = Artificially Synthesized Probe
  source 1..120: mol_type = other DNA
cccagaacatggcctggctgcttccccacaaacccttctagaaatggctgatagaggaagaaataacagtatgaaaagatgagtaataaacaaaaaagtaattcattcaggaggtacaca

SEQ ID NO: 18362 - DNA, 120 bp, synthetic construct
  misc_feature 1..120: note = Artificially Synthesized Probe
  source 1..120: mol_type = other DNA
agagtcaccaagtagccaggctgaaagtttgtcacctatataagaagaacaaattgttatcatttgatgaagacagtcaatgcctgcagtgacctcaagaaaataaagtgcaatccagtg

SEQ ID NO: 18363 - DNA, 120 bp, synthetic construct
  misc_feature 1..120: note = Artificially Synthesized Probe
  source 1..120: mol_type = other DNA
acagataaccaacacatactgaaaataaaagacaccagaagcaataaaaagccctggtgtgaataggtgatagaatatgaatagatgacagcattgatatgacagaactgacatggtaga

SEQ ID NO: 18364 - DNA, 120 bp, synthetic construct
  misc_feature 1..120: note = Artificially Synthesized Probe
  source 1..120: mol_type = other DNA
tcaaactgacctagaaatggcacagatggtagaattagtggacatgaacattagaacagttatgatacctatattctctatgtttaaggtcctagagtaaagattgagcatgttaagtag

SEQ ID NO: 18365 - DNA, 120 bp, synthetic construct
  misc_feature 1..120: note = Artificially Synthesized Probe
  source 1..120: mol_type = other DNA
gcactgaaaatgataactacgtgagtaaatggaaattttttttttctggttattttctttaaaagacaatgaactgtttaaagcaggcattggcaaacttttccagtacagagctggata

SEQ ID NO: 18366 - DNA, 120 bp, synthetic construct
  misc_feature 1..120: note = Artificially Synthesized Probe
  source 1..120: mol_type = other DNA
tgggctgtagtttgccaatcaaaacaataatcacaatgtgttgtgcaaaggctgggagggaagaaacacaagtatactattgtaaggttcacatataatctatgaatgttacaatattac

SEQ ID NO: 18367 - DNA, 120 bp, synthetic construct
  misc_feature 1..120: note = Artificially Synthesized Probe
  source 1..120: mol_type = other DNA
ggtgatgacaggtcatggacctagaacaggagtgaggtaaaattgaagtttagagcagggagcatgtgttctttttatctttgtaaggcttgtagcaattcttcaggtattatacaccta

SEQ ID NO: 18368 - DNA, 120 bp, synthetic construct
  misc_feature 1..120: note = Artificially Synthesized Probe
  source 1..120: mol_type = other DNA
catcctctggctctggactccaatcattcatactataggacagaatctgagagaccttttgacagtctcctgataaatctgatcaccaattcttacacatttaacacacaattgctagag

SEQ ID NO: 18369 - DNA, 120 bp, synthetic construct
  misc_feature 1..120: note = Artificially Synthesized Probe
  source 1..120: mol_type = other DNA
tctgacacgccctccaaaaggggcctaatatcactccacattctccatttcctctatcttaaaagtttaggagagctttacagatatttgtatgtctttttattactcccagaactgcta

SEQ ID NO: 18370 - DNA, 120 bp, synthetic construct
  misc_feature 1..120: note = Artificially Synthesized Probe
  source 1..120: mol_type = other DNA
cttggccttcttggtttttggtttagaatgtgaatgatgcaactcaggaatctgttttaataatctctgccaacaatgcacatgcagataggcactctgtacacttcacttggggaaatt

SEQ ID NO: 18371 - DNA, 120 bp, synthetic construct
  misc_feature 1..120: note = Artificially Synthesized Probe
  source 1..120: mol_type = other DNA
ctagttgtacaaaaacaggctataagctcgaatggggccacaggctgtagtttgctatgcccttttcttctttgctgtttgccatccttactttctctttgtcttgacacttattcattt

SEQ ID NO: 18372 - DNA, 120 bp, synthetic construct
  misc_feature 1..120: note = Artificially Synthesized Probe
  source 1..120: mol_type = other DNA
tcaacgcgggttaaactttgaccaaggaaatgattgctaaactcgattccataagtgtcaccggtcacactttaattccagtctaaaattaaagtcttcagtctccacattccctacttt

SEQ ID NO: 18373 - DNA, 120 bp, synthetic construct
  misc_feature 1..120: note = Artificially Synthesized Probe
  source 1..120: mol_type = other DNA
gaccaaagcacacagagtaagggattaccccaggctgcctcccagatggggcgccaggcaaagccaggcaagcagagaggggcagctcatcccaacaagtgggaagaacctctttataaa

SEQ ID NO: 18374 - DNA, 120 bp, synthetic construct
  misc_feature 1..120: note = Artificially Synthesized Probe
  source 1..120: mol_type = other DNA
tctggaaccttctctgaacctcgagttcaccaactttactctgggggttgtagaggatttctgctccccagcaaacattcactgctaaaactggcttggccatgcgccttccttcagcag

SEQ ID NO: 18375 - DNA, 120 bp, synthetic construct
  misc_feature 1..120: note = Artificially Synthesized Probe
  source 1..120: mol_type = other DNA
cctctcaagtgctccttctcctacttattcttctcttttcctccctcctcctcatctcttggcctattctcctctcctgtccctgcctgccttggcatctatgctgccaggcccatcttc

SEQ ID NO: 18376 - DNA, 120 bp, synthetic construct
  misc_feature 1..120: note = Artificially Synthesized Probe
  source 1..120: mol_type = other DNA
atggatggatgggtggatggatggatggatggatggatggatggatggttggaatagatggatggatggatgggtggatggatggatggatggatggatggatagatggatagatggaaa

SEQ ID NO: 18377 - DNA, 120 bp, synthetic construct
  misc_feature 1..120: note = Artificially Synthesized Probe
  source 1..120: mol_type = other DNA
gatggatggatggatggaatggatggatggttggaatagatggaatggatggatggatggatggatggatggaatggatggatggttggaatagatggaatggatagatggatggatgga

SEQ ID NO: 18378 - DNA, 120 bp, synthetic construct
  misc_feature 1..120: note = Artificially Synthesized Probe
  source 1..120: mol_type = other DNA
aagaagaaggctgagtccacaaatctctcccacccaacagcttggagtggagtaacaatttgcagccactcctcagagcaggagaaaattacatctcatacagtggctccacaaggaggc

SEQ ID NO: 18379 - DNA, 120 bp, synthetic construct
  misc_feature 1..120: note = Artificially Synthesized Probe
  source 1..120: mol_type = other DNA
caggtgcgaggggtcctggaggtgtgggaatcagctgacagggtgcggccagagggcgctggtgctgttggggaccctggtcccagcctgagccccggggtggctgtgaagctgtttgca

SEQ ID NO: 18380 - DNA, 120 bp, synthetic construct
  misc_feature 1..120: note = Artificially Synthesized Probe
  source 1..120: mol_type = other DNA
ctctgtcagtcactcccgacaggagacaacccaggccgggtgggctcactgagggggccttaataaggggcaaggcagataaaagagatgcagtaggtaggatccctaacaaagctcctg

SEQ ID NO: 18381 - DNA, 120 bp, synthetic construct
  misc_feature 1..120: note = Artificially Synthesized Probe
  source 1..120: mol_type = other DNA
agtgtctgcactgagccagcaagagcggtgaaggagtggcatgggtggcaccagggaaaagtgtggagttaaaatgagaactaagtgatggattgcaggaggagggaaacggggtcaaga

SEQ ID NO: 18382 - DNA, 120 bp, synthetic construct
  misc_feature 1..120: note = Artificially Synthesized Probe
  source 1..120: mol_type = other DNA
ttgacctagggctttgtcctctgcctttcactccaccattcaaggcacaaatggacaagctcccccaggtccaccctgagagaggccaaagggagaagagtggatagtcctttgtgagag

SEQ ID NO: 18383 - DNA, 120 bp, synthetic construct
  misc_feature 1..120: note = Artificially Synthesized Probe
  source 1..120: mol_type = other DNA
tgtcctaaaatccacacagttttagcctcctggggaacctgcgatgggacggtcagaggaagagacttcttctgttctctggagaaggcaggaggaaagcaaagacctccatttccagag

SEQ ID NO: 18384 - DNA, 120 bp, synthetic construct
  misc_feature 1..120: note = Artificially Synthesized Probe
  source 1..120: mol_type = other DNA
cagtcctccctgggaattatattatcacaggtcagtatcactaagaacattcaaaagcattgaaattctggattatttcactactttgcctccatctttcctgcttcaaccaggtccaga

SEQ ID NO: 18385 - DNA, 120 bp, synthetic construct
  misc_feature 1..120: note = Artificially Synthesized Probe
  source 1..120: mol_type = other DNA
tccgttttccctgtgttggtactagcaccctcttcccctctgagtctctgggtgcaaagaggaattcccaaaagttttgtgcagaataactggtatctattactaggatgccagatgatt

SEQ ID NO: 18386 - DNA, 120 bp, synthetic construct
  misc_feature 1..120: note = Artificially Synthesized Probe
  source 1..120: mol_type = other DNA
tagcttcactttcctcattgggtaaaatgagggttggcagtagacaagctctgaagtcctttctcacgttgataagctattttggtcctatccaggctttttggaatgtgctggagattc

SEQ ID NO: 18387 - DNA, 120 bp, synthetic construct
  misc_feature 1..120: note = Artificially Synthesized Probe
  source 1..120: mol_type = other DNA
tgtccacatgcaataataattcatttgtagacccagaatccatctattctaccataacgtaagtttctaaaaggcagaggcctttgttttgctcactgctatgtgcccatcctgaactgt

SEQ ID NO: 18388 - DNA, 120 bp, synthetic construct
  misc_feature 1..120: note = Artificially Synthesized Probe
  source 1..120: mol_type = other DNA
gggaatatattttctaatctgttcaagtctgataaccagcctcactttgcctgctttgtccctcacaatgctgttgaaaaggtgtgtgtttatgtgtgtgatttgtatctgtgaatggtc

SEQ ID NO: 18389 - DNA, 120 bp, synthetic construct
  misc_feature 1..120: note = Artificially Synthesized Probe
  source 1..120: mol_type = other DNA
ttactgagctagtaaattaaatgtcaaaaagctgagacaaaactcagacccaatctctttatccctcaccagcctgaaatctctaagctccggtaagttaaaatgggtaggcttactccc

SEQ ID NO: 18390 - DNA, 120 bp, synthetic construct
  misc_feature 1..120: note = Artificially Synthesized Probe
  source 1..120: mol_type = other DNA
aatatcagttttggacggcagagggcaacatgaacttgaggatgctgaagtttcaacccagagcagaaggaagcagtttgatttagggagtcagtactttgtggtgattcgagtggaaaa

SEQ ID NO: 18391 - DNA, 120 bp, synthetic construct
  misc_feature 1..120: note = Artificially Synthesized Probe
  source 1..120: mol_type = other DNA
aaggaatgttctgagtgggtctcaaaagtgattcacaaaacgtacttcagaggggaagccaaacaaataagcaaccctgagagcccagcagccaaagacaaaaatagcagcaaagcacac

SEQ ID NO: 18392 - DNA, 120 bp, synthetic construct
  misc_feature 1..120: note = Artificially Synthesized Probe
  source 1..120: mol_type = other DNA
tggaaagttatcagatggatacattcattcaaggtgtcccgtgggctctctgtttggcctgatggtgtggggcactggtattattccttctcctgtcctagggtggccggtgaatgaggg

SEQ ID NO: 18393 - DNA, 120 bp, synthetic construct
  misc_feature 1..120: note = Artificially Synthesized Probe
  source 1..120: mol_type = other DNA
cctctgggttgttcaaaagtccatgggccatgtcctatcttagccagaaaatggagaagggccttgggggttcagtggcttccctgggagatggtagcacctcatccaagaagaaaaatg

SEQ ID NO: 18394 - DNA, 120 bp, synthetic construct
  misc_feature 1..120: note = Artificially Synthesized Probe
  source 1..120: mol_type = other DNA
tcaagttgcagaaatgtctttattggctttaaaaagcaacctcttcttggggtggtgcagagcaaaagaaggaggtcataagcttgaattacctaccctattataggtcttgggattcac

SEQ ID NO: 18395 - DNA, 120 bp, synthetic construct
  misc_feature 1..120: note = Artificially Synthesized Probe
  source 1..120: mol_type = other DNA
aaaagcagacctggggaaaaaacaacctctttcaggaagtcttcctggattagccaaggccattctctgttagtacaacctcagagcctctcttctcttttttttctttaaatagcattt

SEQ ID NO: 18396 - DNA, 120 bp, synthetic construct
  misc_feature 1..120: note = Artificially Synthesized Probe
  source 1..120: mol_type = other DNA
tgaagttttgatagttgccccctatagattttaagacctggaaattcctctaaaggaaataaatctgcccagattcctgtagagaattgctgtgaagatcaaatggaaacaaaagccgcc

SEQ ID NO: 18397 - DNA, 120 bp, synthetic construct
  misc_feature 1..120: note = Artificially Synthesized Probe
  source 1..120: mol_type = other DNA
cgatgtagacaacatgtttacttgtattaccttgcttcttcttcatagaaaaccctgggaggcagagagcataaaataaccatttgcccagttaagacaccaagactgggaaaggttaag

SEQ ID NO: 18398 - DNA, 120 bp, synthetic construct
  misc_feature 1..120: note = Artificially Synthesized Probe
  source 1..120: mol_type = other DNA
tatggacaaggttacttagactctcagactcagtttccttcacctgtaaaatggggaggataaaacctgcattgtctacctcacagtttgtggttgagactaagtgtgacaacagtggca

SEQ ID NO: 18399 - DNA, 120 bp, synthetic construct
  misc_feature 1..120: note = Artificially Synthesized Probe
  source 1..120: mol_type = other DNA
ttgaacctaatagttccctttctacatggacaaagaaccaatgcattagagcaaggcaaagagccagcaagcggctgttcagagaggctttgtttaacagcatcagttgaatgagattta

SEQ ID NO: 18400 - DNA, 120 bp, synthetic construct
  misc_feature 1..120: note = Artificially Synthesized Probe
  source 1..120: mol_type = other DNA
acaccaagacagaattaaaaccctgatcaggaaccctgtcccgtcgcccaccgccctttcccaaaaggcacatggggaacttgtgctagaaaaggaatgctttctttttctttagaagag

SEQ ID NO: 18401 - DNA, 120 bp, synthetic construct
  misc_feature 1..120: note = Artificially Synthesized Probe
  source 1..120: mol_type = other DNA
acatcacctctctggctttggcttatctgtaaaataagtctagtcctcccccagtgttttctctctcagtaaatgacaccatcattaacctggttgcccaaccaaaaacttgagagtcat

SEQ ID NO: 18402 - DNA, 120 bp, synthetic construct
  misc_feature 1..120: note = Artificially Synthesized Probe
  source 1..120: mol_type = other DNA
gagagaggctgtgagtcttttacaggtttaaagctcaggacagtttaaccaggtacagctgttgtttttttgtatggtcgtgctacatgcagatgaggagatactgttaattttcaaggt

SEQ ID NO: 18403 - DNA, 120 bp, synthetic construct
  misc_feature 1..120: note = Artificially Synthesized Probe
  source 1..120: mol_type = other DNA
ccaaggctcttctccaacacaataataacaaccactcactctaaccatgatctatgcttttcaaggtgcttttaccccaatggtcaatattgtcatacaggacacgtgagaaaatgaact

SEQ ID NO: 18404 - DNA, 120 bp, synthetic construct
  misc_feature 1..120: note = Artificially Synthesized Probe
  source 1..120: mol_type = other DNA
tggacattccgtgttggagagggattatcatatcctgctcatttcattcattggttcattcaaaattcactgaactgtgtgccagggatattgagaagaaaaggcaggaactttttcttg

SEQ ID NO: 18405 - DNA, 120 bp, synthetic construct
  misc_feature 1..120: note = Artificially Synthesized Probe
  source 1..120: mol_type = other DNA
tcccctggatgtcacccaagactgaaaccaacaaagacaatgctttgtaccttggaaagtctgggcagattttctcttccaactaacactccaagaaaaagcatcatcatcaatatctta

SEQ ID NO: 18406 - DNA, 120 bp, synthetic construct
  misc_feature 1..120: note = Artificially Synthesized Probe
  source 1..120: mol_type = other DNA
ggaaagttcagaaatttagggcctccttttggcattctctggaccaagtggaggaaggaacatccgggagggaaaggacaaagaacctggggtgatggtaacttcaggtattttttgtaa

SEQ ID NO: 18407 - DNA, 120 bp, synthetic construct
  misc_feature 1..120: note = Artificially Synthesized Probe
  source 1..120: mol_type = other DNA
tcctaccattcagccagtcagcttggaagaaacagaaaacagcttgcctagaggcagggggatagctgagatgacctcaagaggacccttcttggataagacatctagaacttcaccaac

SEQ ID NO: 18408 - DNA, 120 bp, synthetic construct
  misc_feature 1..120: note = Artificially Synthesized Probe
  source 1..120: mol_type = other DNA
aagaaggggttgtgtaaaatgtaaagtgtgatgcaaatgtgagtttctattatgaataagattgtgctcaagttggtgaaggctgggctggtgcattccattcatttggtcttgggatcc

SEQ ID NO: 18409 - DNA, 120 bp, synthetic construct
  misc_feature 1..120: note = Artificially Synthesized Probe
  source 1..120: mol_type = other DNA
tcagaaaaagactcatggtttggggagtctagcccaggccactaaacagaccacttgcaaaaaaaaaaatagccaaaaatttcaaggggggctgagtcagaaaagaagagccctttggaa

SEQ ID NO: 18410 - DNA, 120 bp, synthetic construct
  misc_feature 1..120: note = Artificially Synthesized Probe
  source 1..120: mol_type = other DNA
aatcctgagtttgcataaagaggagaacccagcagccagtcagagtcagaaagttttgtgtagaagagaacttgaggaccacatttgtccaattgtctcattttgcagataaagaaactg

SEQ ID NO: 18411 - DNA, 120 bp, synthetic construct
  misc_feature 1..120: note = Artificially Synthesized Probe
  source 1..120: mol_type = other DNA
agcaagaaagagagccaggtatagggaacataacaatctgatccccagttaaacaaacaaacagccatgataagtgatgtcagcatcgctggaaaaaaaagtcaagtgccctattgccag

SEQ ID NO: 18412 - DNA, 120 bp, synthetic construct
  misc_feature 1..120: note = Artificially Synthesized Probe
  source 1..120: mol_type = other DNA
aattttcccaggacttgatgagaggaacagcagaaaatcttgtcagaagagggtagaacatctgcagagcaggactgtgaggggtccatttgtgggttttggttggatctggaggtgatc

SEQ ID NO: 18413 - DNA, 120 bp, synthetic construct
  misc_feature 1..120: note = Artificially Synthesized Probe
  source 1..120: mol_type = other DNA
ttagtacggtttaagaggcactcttgaatactgggtatatgccaatctccggaagactctgggcattaaaagataaagaggagtccgtctctgccccagggtttatacaaatgagactca

SEQ ID NO: 18414 - DNA, 120 bp, synthetic construct
  misc_feature 1..120: note = Artificially Synthesized Probe
  source 1..120: mol_type = other DNA
gcagagtaggctggtgagtcaagcattaagagcttttccctccaagacttgaaaagaaagggagaggagcagcccacagcttcaaaggctgtcgcggaggaaggtctaacattttccttt

SEQ ID NO: 18415 - DNA, 120 bp, synthetic construct
  misc_feature 1..120: note = Artificially Synthesized Probe
  source 1..120: mol_type = other DNA
ggccatttcacatttgtgaccttcatctactcccaagaacaggaaaactcggagaaaaacagtcccatcagatgtccccttgatcgagtcctcaaagctccaggaatagaacccaagagt

SEQ ID NO: 18416 - DNA, 120 bp, synthetic construct
  misc_feature 1..120: note = Artificially Synthesized Probe
  source 1..120: mol_type = other DNA
ggctcttaagtcagtacccacccccaggccatccggttttagggaccctggatgtcagaagagtgaactgtcatgttttggctagaaaagcctcttagaacacgtctcaggacaactcgg

SEQ ID NO: 18417 - DNA, 120 bp, synthetic construct
  misc_feature 1..120: note = Artificially Synthesized Probe
  source 1..120: mol_type = other DNA
agtttaaaaacttaaaaaaaaaaagaacacgtctcactacacccattgcacagagggcagatactaaggtctaaaatgtgaaaaggtcttgcccaaggtcacttggagaatggtgggcag

SEQ ID NO: 18418 - DNA, 120 bp, synthetic construct
  misc_feature 1..120: note = Artificially Synthesized Probe
  source 1..120: mol_type = other DNA
aaatatctattcccgcttgttctctactaggtgccaggctagctttggggtccagagaggaataaggcagaccccatctgccaagctcagattggtcaggagaaagaaagggacacagca

SEQ ID NO: 18419 - DNA, 120 bp, synthetic construct
  misc_feature 1..120: note = Artificially Synthesized Probe
  source 1..120: mol_type = other DNA
gagccttgatttccttctgtgtaaggggaggggaatcatacgaactctcagtgttattgagaggcatcagtaaggcagtgcatgttcccagcaggagccaggagatagaagtgttgtagg

SEQ ID NO: 18420 - DNA, 120 bp, synthetic construct
  misc_feature 1..120: note = Artificially Synthesized Probe
  source 1..120: mol_type = other DNA
cctgccaaggctgtgtgggtcagtggttaagggcacagagtggagtcagacagcttaggcagtgccacgagtaaacgagatcctggggaagggactgatttctctgagcctcagtttcct

SEQ ID NO: 18421 - DNA, 120 bp, synthetic construct
  misc_feature 1..120: note = Artificially Synthesized Probe
  source 1..120: mol_type = other DNA
cgtgtcaaaaaaaaagatacttacctgaagcactagcaacatggctgatgctaggtggcccctcagtacaatggtaatcatccttgtgactaattaggccgtatctagctcatctgtaaa

SEQ ID NO: 18422 - DNA, 120 bp, synthetic construct
  misc_feature 1..120: note = Artificially Synthesized Probe
  source 1..120: mol_type = other DNA
cgtcaatcttctcatctgtaagaggggctgtcaatggtccctccttcccagggctgtgagaccagggaatgcaggtaaagcggacctactctgtggttagcccatggctaatagaaccat

SEQ ID NO: 18423 - DNA, 120 bp, synthetic construct
  misc_feature 1..120: note = Artificially Synthesized Probe
  source 1..120: mol_type = other DNA
tgaaggtgacatgagctgatgtgtatcagtgccagatacagggctgagaacacaggagctcacaaagtccagtgtgatttgttgaacaagccttcattgatgcctaatgggcagaatcct

SEQ ID NO: 18424 - DNA, 120 bp, synthetic construct
  misc_feature 1..120: note = Artificially Synthesized Probe
  source 1..120: mol_type = other DNA
atcttactcactgatgtctctctccaccagggcctagcacagagcaagggcccaggaaatatttgttggaatggatgccggtgttagagctgaatggtatctgaggttatcagaacaggc

SEQ ID NO: 18425 - DNA, 120 bp, synthetic construct
  misc_feature 1..120: note = Artificially Synthesized Probe
  source 1..120: mol_type = other DNA
caaaaaattagccaggtgtggtggctcatgcctgtaggcccagctactcgggagggtgaggcaggagaatggcgtgaacccgggaggtggagcttgcagtgagccaagatcgtgccactg

SEQ ID NO: 18426 - DNA, 120 bp, synthetic construct
  misc_feature 1..120: note = Artificially Synthesized Probe
  source 1..120: mol_type = other DNA
aaaaaaagttgttttaaattgaaaaaaggatgagcacaccagcctcacagtgtgtgtggcagtgtcccacggggcatctgggcctgtctcatttcagtttgtttccacagatatgcatgg

SEQ ID NO: 18427 - DNA, 120 bp, synthetic construct
  misc_feature 1..120: note = Artificially Synthesized Probe
  source 1..120: mol_type = other DNA
tcccctagttaccctcttcccaactacactccggggcatctgtcttatagctgaggtggccagtcattccaaagggctcatttgtggcaaagttcccattgttcagatgggaaggctgag

SEQ ID NO: 18428 - DNA, 120 bp, synthetic construct
  misc_feature 1..120: note = Artificially Synthesized Probe
  source 1..120: mol_type = other DNA
ttcattcattttcatattgactccaaatgaccctgagtccaggctgcttgagatttattctggctcagctccttagctctgtgtcatgggcgagtattcagcctcactgtgcctaagtcc

SEQ ID NO: 18429 - DNA, 120 bp, synthetic construct
  misc_feature 1..120: note = Artificially Synthesized Probe
  source 1..120: mol_type = other DNA
ccgcatcatccagaaagaccccctgcgccgcttcgatggctacctcaaccagggcgccaacaacaagaagattgccaaggatgtcttcaagaagggggaccaggcctaccttactggtgg

SEQ ID NO: 18430 - DNA, 120 bp, synthetic construct
  misc_feature 1..120: note = Artificially Synthesized Probe
  source 1..120: mol_type = other DNA
ttggagttttagagcaggagagaggctggcctaggacaaggcattccaaaggtaaagaatcgaccacataatctgtcatgagattagagttaaacagataaaaagaaaaatgaaccacag

SEQ ID NO: 18431 - DNA, 120 bp, synthetic construct
  misc_feature 1..120: note = Artificially Synthesized Probe
  source 1..120: mol_type = other DNA
ccgtctctaccaaaaatacaaaaaaattagccaggtatggtggtgggcgcctgtagtcccagctacttgggaggctgcagcaggaggatcgcttgagccccggaggtggaggttgtagta

SEQ ID NO: 18432 - DNA, 120 bp, synthetic construct
  misc_feature 1..120: note = Artificially Synthesized Probe
  source 1..120: mol_type = other DNA
tggctcgaaacaaccagtttattgatgcataattctgtgggtaagcaatttaggggttaagtgcagctgagcagttcttctattgaccttgctttggggtcatcacttagtaacttagct

SEQ ID NO: 18433 - DNA, 120 bp, synthetic construct
  misc_feature 1..120: note = Artificially Synthesized Probe
  source 1..120: mol_type = other DNA
cctacaacattgcttttgccaccttctgttggttaaagcaagttgtaaagccagtccagattgaggccaatggagattgaaaaagtcgagctcttgccaggagaagtgccaaagccacat

SEQ ID NO: 18434 - DNA, 120 bp, synthetic construct
  misc_feature 1..120: note = Artificially Synthesized Probe
  source 1..120: mol_type = other DNA
aaaatatgtgctgctaattatactagttcagagatgttaaaatctgcaagcacgtccgtgttagaatccagagaatacggttgagcacctgccttatggggctgatgtacagatgaaata

SEQ ID NO: 18435 - DNA, 120 bp, synthetic construct
  misc_feature 1..120: note = Artificially Synthesized Probe
  source 1..120: mol_type = other DNA
tataaatggaaccagagcagaagtccccagactcaggaagtcaacagagtgggcagggacagtggtagcatccatctggtggccaaagagaatcgtagccccagagctgcccaagttcac

SEQ ID NO: 18436 - DNA, 120 bp, synthetic construct
  misc_feature 1..120: note = Artificially Synthesized Probe
  source 1..120: mol_type = other DNA
ggcacaggcccagtcagagctggggatgctgctcacggggacaggcgtctgcagaagcctgcgctcgggtgagtgccccacaccatccagcctgaatcacccctcctgtatcggtgggac

SEQ ID NO: 18437 - DNA, 120 bp, synthetic construct
  misc_feature 1..120: note = Artificially Synthesized Probe
  source 1..120: mol_type = other DNA
gcagcagaagacccaggaaagcacagttggcttccgtttctcctgctccctgtgtgtgttagaattttaacataaattccactttcataatatggagtttctgaataagaatcctgattt

SEQ ID NO: 18438 - DNA, 120 bp, synthetic construct
  misc_feature 1..120: note = Artificially Synthesized Probe
  source 1..120: mol_type = other DNA
cagctctctgacacccatcgatcctttggcctccttaaggaccctcatcatatcttgtcccctacctgcacacttagtcacaccgcagagtcccttttgccaattgagatgttcacagct

SEQ ID NO: 18439 - DNA, 120 bp, synthetic construct
  misc_feature 1..120: note = Artificially Synthesized Probe
  source 1..120: mol_type = other DNA
gagagtcagggtatagaaggctgtgaaagggccagatcatgcaagaaaagctgcagggggtgagggcagtttttaaataaactttttcacatttagaagcaatttatgctcacttagaaa

SEQ ID NO: 18440 - DNA, 120 bp, synthetic construct
  misc_feature 1..120: note = Artificially Synthesized Probe
  source 1..120: mol_type = other DNA
tccctcctcaccctgcagtacccagtgctatgattaattctcttgagtaaacacttggatactactgtggctatttctgtagtataaatttctcaaaatgggattggtgagttacaggga

SEQ ID NO: 18441 - DNA, 120 bp, synthetic construct
  misc_feature 1..120: note = Artificially Synthesized Probe
  source 1..120: mol_type = other DNA
caagaattgctaagacaatttggaaaaaacgacaagtagggaagaattgtcatattgtaaataaaaacactgttaagttatataatattaaaatagtgtggtggctgggcacggtggctc

SEQ ID NO: 18442 - DNA, 120 bp, synthetic construct
  misc_feature 1..120: note = Artificially Synthesized Probe
  source 1..120: mol_type = other DNA
gaaatgactcaaccaatcagtgaagacagggtggatgttcactgaatattggagaaaactgaactcccccatacaaaagaaaacagatttccactttacacacactcaaaattaaattcc

SEQ ID NO: 18443 - DNA, 120 bp, synthetic construct
  misc_feature 1..120: note = Artificially Synthesized Probe
  source 1..120: mol_type = other DNA
gcgcctggccgaaaatgatttcttaaataataacacaaaaagtatacagacccctaaaaccctgccaataacaagtattggttaggcagcacagaacaggacctgtgaatttgatgagtt

SEQ ID NO: 18444 - DNA, 120 bp, synthetic construct
  misc_feature 1..120: note = Artificially Synthesized Probe
  source 1..120: mol_type = other DNA
gaaacatggagaaaggccataaggcaggaatacacatcagaagaaactaggctgatagaccagaaagaaaatatgcttagcattacatgcctagcagtaatcagagaaaccccagcactg

SEQ ID NO: 18445 - DNA, 120 bp, synthetic construct
  misc_feature 1..120: note = Artificially Synthesized Probe
  source 1..120: mol_type = other DNA
catatgatgagctactgaaactgcctttgcaaaattatgactaagacagtgaaagagatctgactaaatcaattccatcttgcttctaacctctaagctgtcctagttcattcttgggca

SEQ ID NO: 18446 - DNA, 120 bp, synthetic construct
  misc_feature 1..120: note = Artificially Synthesized Probe
  source 1..120: mol_type = other DNA
agccaccatacctggccccatagttgaacttaaaatagactatatgattatctgggggtgtgggggggctgatctagctacatgatcccttttaaaacatggagctcttggcgggcatag

SEQ ID NO: 18447 - DNA, 120 bp, synthetic construct
  misc_feature 1..120: note = Artificially Synthesized Probe
  source 1..120: mol_type = other DNA
tgagccaccactcccggccccatacatttattttaaagtaaatttccacatcttgcaataataaaataaacagtatttcaagtcaccttaaaatagataatgtctacattaatagatgtt

SEQ ID NO: 18448 - DNA, 120 bp, synthetic construct
  misc_feature 1..120: note = Artificially Synthesized Probe
  source 1..120: mol_type = other DNA
aaggcaagttctagcaaggcagagagggatctgtgtgaggaggtacctctcattaccaccactgttaatcatcattgacttattcattcatagagaaaaagtcatcttgaaccatcaaac

SEQ ID NO: 18449 - DNA, 120 bp, synthetic construct
  misc_feature 1..120: note = Artificially Synthesized Probe
  source 1..120: mol_type = other DNA
tataaagaaagcatggtgccctccaccaccttttacttctatacctaaccagcaattttggggggaaaagacataaatgggaaagagttctgacacatgactagctaagaaggttttgaa

SEQ ID NO: 18450 - DNA, 120 bp, synthetic construct
  misc_feature 1..120: note = Artificially Synthesized Probe
  source 1..120: mol_type = other DNA
atctctaccaaaaaaatgcaaaaattagctgagcctggtggcacatgcctgtaatcccacctactcaggaggctgagacaggagcatcacttgaacctgggaggcagaggttgcagtgag

SEQ ID NO: 18451 - DNA, 120 bp, synthetic construct
  misc_feature 1..120: note = Artificially Synthesized Probe
  source 1..120: mol_type = other DNA
gttgaggtagggtccctggtattccgtaccctcctccctttgtttctgttggttgtcactcctgctgaatgtattgctttttaatactgtactgcaggttttttttaaataaaattgttt

SEQ ID NO: 18452 - DNA, 120 bp, synthetic construct
  misc_feature 1..120: note = Artificially Synthesized Probe
  source 1..120: mol_type = other DNA
accacacccagctaatcaaatattattttttaatccttgcaaatgtaatagcaaaaactatgaatgccccaagctagctagggcttagggaggcacggatttgtataaagtgctggtgaa

SEQ ID NO: 18453 - DNA, 120 bp, synthetic construct
  misc_feature 1..120: note = Artificially Synthesized Probe
  source 1..120: mol_type = other DNA
gcacagaaatagcaagtcacaacaactatcacttcgcagaagagaattacagtgcacggccaccaccaatgacaaacagatgctcatagtgggaccccaactgaaaaggatactgtctca

SEQ ID NO: 18454 - DNA, 120 bp, synthetic construct
  misc_feature 1..120: note = Artificially Synthesized Probe
  source 1..120: mol_type = other DNA
ggctttgtcagattgtgtatccacagcacttcacaggggagttatccacatccactggcccagccaccgcctcagtggcccaccaaagacccacagatgagaatcagagttctcatctct

SEQ ID NO: 18455 - DNA, 120 bp, synthetic construct
  misc_feature 1..120: note = Artificially Synthesized Probe
  source 1..120: mol_type = other DNA
ttccccacctgtaaaatcagaataacgacccctccacccacaaagctgttggaagtttaaaatgagaaccctccgcacctggcacgcacacgccatacacgttaacctgttgcaagaagt

SEQ ID NO: 18456 - DNA, 120 bp, synthetic construct
  misc_feature 1..120: note = Artificially Synthesized Probe
  source 1..120: mol_type = other DNA
acacagaaaatgagagagaagtatagagaaggcggtatggggagcccatgagaaacaggaaaaggataacaagggatggaagacggacagacaaatggcagtgagaatagatatgaccag

SEQ ID NO: 18457 - DNA, 120 bp, synthetic construct
  misc_feature 1..120: note = Artificially Synthesized Probe
  source 1..120: mol_type = other DNA
cgacctcagagctttgcctgggggacgttaccagaggtgactggaggcctcatctggggtctcacctaagagtagttacctagaactttaatttaatggaaatttaattttaattaatta

SEQ ID NO: 18458 - DNA, 120 bp, synthetic construct
  misc_feature 1..120: note = Artificially Synthesized Probe
  source 1..120: mol_type = other DNA
tagaagagcataggcaggcctgggttcaaatcctgtctccaggatgccgggaaagctccgtgcctgttataaagtgagcaatgctaaataagggctgtaaatattaaattttttattttt

SEQ ID NO: 18459 - DNA, 120 bp, synthetic construct
  misc_feature 1..120: note = Artificially Synthesized Probe
  source 1..120: mol_type = other DNA
gtggacagttagagtagtgagtgagtagatggatggctggacagtgacatgcagaggcaggggggtagaaagatggataggtggctgggtgaggatcgtcacgcctgtaatcccaggact

SEQ ID NO: 18460 - DNA, 120 bp, synthetic construct
  misc_feature 1..120: note = Artificially Synthesized Probe
  source 1..120: mol_type = other DNA
ctcaaaagaaaaagaaaaaaactgaatctaacaacacctctagttaaagtttccaatttaacaagaaatgcagatgaaaggggaacagagacctacaagcaaatacaatggggagactgt

SEQ ID NO: 18461 - DNA, 120 bp, synthetic construct
  misc_feature 1..120: note = Artificially Synthesized Probe
  source 1..120: mol_type = other DNA
tcacttgtagtcccagctactccggagacttaggcaggagaatggcatgaacccaggaggcggagcttgccgtgagcagagattgcgccactgcactccagcctgggcgacagagcgaga

SEQ ID NO: 18462 - DNA, 120 bp, synthetic construct
  misc_feature 1..120: note = Artificially Synthesized Probe
  source 1..120: mol_type = other DNA
cgggcacggtagttcacacctgtaatcccagcactttgggaggccgaggcgggcggatcacgaggtcaggagttcgagaccagcctggccaacatggttaaaccctgtctctactaaaaa

SEQ ID NO: 18463 - DNA, 120 bp, synthetic construct
  misc_feature 1..120: note = Artificially Synthesized Probe
  source 1..120: mol_type = other DNA
aaaagaaacagagaagtatatgcgaaattaaactggcaacatgttaacaattattgatgctgggcgaagatacatgagatgtcatcaaactattttcactttttttttttttttgcaagg

SEQ ID NO: 18464 - DNA, 120 bp, synthetic construct
  misc_feature 1..120: note = Artificially Synthesized Probe
  source 1..120: mol_type = other DNA
gaaaaaccccgccctggtaaatttgaggtcagaccagttctctgctcttgaaccctgttttctgttgtttaagatgtttatcaagacaatatgtgcaccactgaacatagacccttatca

SEQ ID NO: 18465 - DNA, 120 bp, synthetic construct
  misc_feature 1..120: note = Artificially Synthesized Probe
  source 1..120: mol_type = other DNA
tcaggagtttgagaccagcctgaccaacatggtgaaacctagtctctagtaaaaatacaaaaattagctgggcgtggtggtgcgtgcctgtaatcccagctactcaggaggctgaggcag

SEQ ID NO: 18466 - DNA, 120 bp, synthetic construct
  misc_feature 1..120: note = Artificially Synthesized Probe
  source 1..120: mol_type = other DNA
aacagtcaagtatagggatttgtggttgggttcacaggctgaatttggactgaaagtaatatgtcaagatcaaaggtttcagtggctgtttactggacacaggaagaattctggcattga

SEQ ID NO: 18467 - DNA, 120 bp, synthetic construct
  misc_feature 1..120: note = Artificially Synthesized Probe
  source 1..120: mol_type = other DNA
acccacagatgcaggcagaggagcagctagtagagaaaagcatccatgttgtttggtaaagaatcccatcattagtatttttggtcaaattgtgggaaaattaaactctgatgacctgag

SEQ ID NO: 18468 - DNA, 120 bp, synthetic construct
  misc_feature 1..120: note = Artificially Synthesized Probe
  source 1..120: mol_type = other DNA
gcagcagcagcagcaaggccaactgttgcctgacacccatggtaccagctcctccctaggagcagcagctgtggagtgttcaggctcacctctggcccctcaagagtagcccaatggctc

SEQ ID NO: 18469 - DNA, 120 bp, synthetic construct
  misc_feature 1..120: note = Artificially Synthesized Probe
  source 1..120: mol_type = other DNA
tttctcatctgtgaaatgggcacgttaatgccaaaggcataaaacaggagctattatgtaggcgctcagggactggatgaatctgtgggaatctagccatccttcctgccttcatctggg

SEQ ID NO: 18470 - DNA, 120 bp, synthetic construct
  misc_feature 1..120: note = Artificially Synthesized Probe
  source 1..120: mol_type = other DNA
agccctgccgttcagcgcacacaggctgccttgccctctccagagaggatcatggggcttaatttgttgattgaatttgcttgtttggcccagatggttgggtctcattttctttcttct

SEQ ID NO: 18471 - DNA, 120 bp, synthetic construct
  misc_feature 1..120: note = Artificially Synthesized Probe
  source 1..120: mol_type = other DNA
ttcaccccatctctgtctgatctccactgcgtgtacggattgacgggaaagattctaatgggctttaagttaataagctgggaacgaattaagtttgatctctgccagaagcagatggca

SEQ ID NO: 18472 - DNA, 120 bp, synthetic construct
  misc_feature 1..120: note = Artificially Synthesized Probe
  source 1..120: mol_type = other DNA
gcgctttgggaggccaaggtgggtggaacacctgagaacaggagttcgagaccagcttggccaacatggcaaaaccccgtctctactaaaaatacaaaaattagtcagatgttgtggcac

SEQ ID NO: 18473 - DNA, 120 bp, synthetic construct
  misc_feature 1..120: note = Artificially Synthesized Probe
  source 1..120: mol_type = other DNA
tttttttgtttttggcacacagcggaaggtatcttttgtgtttccctttgctgtttctgtatcccctaacgctgtcatgctgccagctttccatattattctaaatcttcctaaccgcat

SEQ ID NO: 18474 - DNA, 120 bp, synthetic construct
  misc_feature 1..120: note = Artificially Synthesized Probe
  source 1..120: mol_type = other DNA
ctcctgttcttgaattaaatgagctgtttccagactcagcactttgcattggctgttccctgtgctgggaacacccttcccactaacatttccatcattcaaatctctcagttcagatat

SEQ ID NO: 18475 - DNA, 120 bp, synthetic construct
  misc_feature 1..120: note = Artificially Synthesized Probe
  source 1..120: mol_type = other DNA
ggcccaccaaataattcttatctggaaaccccacccccacatccaggacaaggcagggatccccgttgaaagctctaggcttatgggaagcactggagcttgtgaactttatttttattt

SEQ ID NO: 18476 - DNA, 120 bp, synthetic construct
  misc_feature 1..120: note = Artificially Synthesized Probe
  source 1..120: mol_type = other DNA
ctacaggtgagtagagggagaatagggcggggtcatgattccattcacctgggagaaaaacggaggctcccaggcaaagggagtcatgggaagcaacctagccagttctgatcccaagct

SEQ ID NO: 18477 - DNA, 120 bp, synthetic construct
  misc_feature 1..120: note = Artificially Synthesized Probe
  source 1..120: mol_type = other DNA
aatggggaggaggaagaaggggagggagagggaggagaagagaggaatggagagggagggaaagagaggaggaatggggaggagggggagggaggagaggagggtgaagggaggagggaa

SEQ ID NO: 18478 - DNA, 120 bp, synthetic construct
  misc_feature 1..120: note = Artificially Synthesized Probe
  source 1..120: mol_type = other DNA
gggcttgtaacccacccccacaggagttggagcagcttagaccgctgggctgcggaaagggcagcagaggcatcgttagccccggttaacggggaccaggggtgtaccaggcatcaacta

SEQ ID NO: 18479 - DNA, 120 bp, synthetic construct
  misc_feature 1..120: note = Artificially Synthesized Probe
  source 1..120: mol_type = other DNA
tcaggcatcaaggggtcacggcagcgcagagtggaggagcagggccaagccctgtaaacactggagttattaagccagtgtgcatgtcgttaaattttaactaaggggggacagggcagg

SEQ ID NO: 18480 - DNA, 120 bp, synthetic construct
  misc_feature 1..120: note = Artificially Synthesized Probe
  source 1..120: mol_type = other DNA
tttaggccccagttaaaattctgtagtgagctagaagagggggacatggggtcacagggaggtgcttggtaactgatcatgaaaacctgcctagaggctgggaagggagtaaactgaggc

SEQ ID NO: 18481 - DNA, 120 bp, synthetic construct
  misc_feature 1..120: note = Artificially Synthesized Probe
  source 1..120: mol_type = other DNA
aaaagaaaaaagaaaaaaatcattttaggggaaaaagctagcctgcctcaggcacacacagggctgcccacacagtgcaagcgtctccatcacagatgacttagctccttcctttcctcc

SEQ ID NO: 18482 - DNA, 120 bp, synthetic construct
  misc_feature 1..120: note = Artificially Synthesized Probe
  source 1..120: mol_type = other DNA
aaaaaagaaaaaaaagacataccaggtgacattgcttatctgcttaaattaatgtcctctggatggatagaaaggacggtccccccaggggatacagtcccggccgcatggcatcaatgt

SEQ ID NO: 18483 - DNA, 120 bp, synthetic construct
  misc_feature 1..120: note = Artificially Synthesized Probe
  source 1..120: mol_type = other DNA
ctttacccaccaggagcccctggtcaagtcagtgttgttctgtgaccctcggtgtcttcttctggaaaagggagatgatactgtgtcagtgtggttgcatcagaatccacagaatcttgc

SEQ ID NO: 18484 - DNA, 120 bp, synthetic construct
  misc_feature 1..120: note = Artificially Synthesized Probe
  source 1..120: mol_type = other DNA
tgattaggtcagacccacccagggtaatttcccttttgataaagttaatggagaagggactttaatcgcaaaacgccttcacagcagcaccagggctagggttggaactggggactgtac

SEQ ID NO: 18485 - DNA, 120 bp, synthetic construct
  misc_feature 1..120: note = Artificially Synthesized Probe
  source 1..120: mol_type = other DNA
gtttcctgtccatcaagctggcagctgcagtggctgtgagggcgtgggtgtggtggctgtagccacagtatttggtggcttttgataatggccagatgacagaggtatctggaacagagg

SEQ ID NO: 18486 - DNA, 120 bp, synthetic construct
  misc_feature 1..120: note = Artificially Synthesized Probe
  source 1..120: mol_type = other DNA
cattcctctgcacggcaacatccagcttcaaggcccggctcaaatggtgcctcctacaggaagccctccaggtgcccctgttagactcgtaaagcatccctggccctccttaaaggggaa

SEQ ID NO: 18487 - DNA, 120 bp, synthetic construct
  misc_feature 1..120: note = Artificially Synthesized Probe
  source 1..120: mol_type = other DNA
caaactttttttgaaaactagtttttattttgcaaaaatttcaaacctacagaaagcttgcaagaatgatacagtgaagtcccatacgagcactctctccccctctccctccaccccgtc

SEQ ID NO: 18488 - DNA, 120 bp, synthetic construct
  misc_feature 1..120: note = Artificially Synthesized Probe
  source 1..120: mol_type = other DNA
ttttgaccatgacttccaggaagaaagcaatacattttatattacggccctgtaaacacgtgtgtgtatttataaatgatgtcaagccttcgtgaactaatactcccaatactactgttc

SEQ ID NO: 18489 - DNA, 120 bp, synthetic construct
  misc_feature 1..120: note = Artificially Synthesized Probe
  source 1..120: mol_type = other DNA
ttagttaggatgagaggggttattgctgtataacaaatagcccagaaatctcagtggttccatagaacaagcctgacttctcacttttgctgcctgtcttctctggagggtgaagggtgt

SEQ ID NO: 18490 - DNA, 120 bp, synthetic construct
  misc_feature 1..120: note = Artificially Synthesized Probe
  source 1..120: mol_type = other DNA
caaactcacgtctcctccacccaccctgccaatcacacccaccccttctcagcaaatggcacccctttgctcacgcctgaaccttacatgacatccggcccttctccaagtcctaggtct

SEQ ID NO: 18491 - DNA, 120 bp, synthetic construct
  misc_feature 1..120: note = Artificially Synthesized Probe
  source 1..120: mol_type = other DNA
ggacttagagggagcggcagggggtggggctgggaagggaggtggggtggggagtgagggagcgggtgggacggggctgggtggggtcaagctgagtcggggggtggggtgggatgcagc

SEQ ID NO: 18492 - DNA, 120 bp, synthetic construct
  misc_feature 1..120: note = Artificially Synthesized Probe
  source 1..120: mol_type = other DNA
tcacctgcatcccagactgtggtctcctcctgtggtggagactccttcctgccagcctcctttattctgtgtactcttactgatgtggcttcttactggcaccccacgtctcgtggccta

SEQ ID NO: 18493 - DNA, 120 bp, synthetic construct
  misc_feature 1..120: note = Artificially Synthesized Probe
  source 1..120: mol_type = other DNA
tgtttggaggaggggaaaagcagagaggtcataggggaccagatgctctggttggtttggtcagaggctggtagagggttcacaggaatgatgagatggaatttgctgcatcagaagtgt

SEQ ID NO: 18494 - DNA, 120 bp, synthetic construct
  misc_feature 1..120: note = Artificially Synthesized Probe
  source 1..120: mol_type = other DNA
gtgtcgggggacgccatggggtgggggtgacaagggaggccctggcctatccgggaagggttctgagtgaaggatgcatgtggctcccaggtggaaagggcaagagctgtgcagtggcgc

SEQ ID NO: 18495 - DNA, 120 bp, synthetic construct
  misc_feature 1..120: note = Artificially Synthesized Probe
  source 1..120: mol_type = other DNA
aggaaggtgcatttgggttccgggggttcagaacagtcagtgtctgggaggccgtaggtgtggggacattctcagccacttcattcactcatttattcgttcgttcatcccacaactact

SEQ ID NO: 18496 - DNA, 120 bp, synthetic construct
  misc_feature 1..120: note = Artificially Synthesized Probe
  source 1..120: mol_type = other DNA
ggaaaaaaaaaaaaaaaatcccagatcggcgtgactggttgaatggcagtaagtcctatggggaaaaataaagcagagaaacaggagtgatgggatgggagagtcaggctcgggagccag

SEQ ID NO: 18497 - DNA, 120 bp, synthetic construct
  misc_feature 1..120: note = Artificially Synthesized Probe
  source 1..120: mol_type = other DNA
tgtctttaaattttaaaaatgggggcttgggggactcagagaaggcaggcaaggcctggagtgcatagcagatggcctcgggaagaaggaatgaggaaggacaggatccggagagggtgc

SEQ ID NO: 18498 - DNA, 120 bp, synthetic construct
  misc_feature 1..120: note = Artificially Synthesized Probe
  source 1..120: mol_type = other DNA
gaactctggagccctgagaggagaggggcagccccccaccttgtcaccctcagggcttccccttctgtcctcattcttagagactgcttctcccaaacataacgcgttagccatgaagga

SEQ ID NO: 18499 - DNA, 120 bp, synthetic construct
  misc_feature 1..120: note = Artificially Synthesized Probe
  source 1..120: mol_type = other DNA
gactgcactgcatcctaggagtcagagcctcctggcttcgagcctcatcccttttgctgatttgtgcaatttggacaaaatcctgcactgttctgtgcctcatttctttctttttttatt

SEQ ID NO: 18500 - DNA, 120 bp, synthetic construct
  misc_feature 1..120: note = Artificially Synthesized Probe
  source 1..120: mol_type = other DNA
agagatgccgtccacccccatctaggtgagggcttggggccactcttagcattagtatcattttcttctagtatcattttgtggtaggcatggctggaaatgtgcagctttgcttttttt

SEQ ID NO: 18501 - DNA, 120 bp, synthetic construct
  misc_feature 1..120: note = Artificially Synthesized Probe
  source 1..120: mol_type = other DNA
tggcacccaacttcttccagtcgaatcctgcttcttggtgccctgatatggcagaatgcccccagacaccacccctactccagcccctgaaataaaccactccagacaattttatttttc

SEQ ID NO: 18502 - DNA, 120 bp, synthetic construct
  misc_feature 1..120: note = Artificially Synthesized Probe
  source 1..120: mol_type = other DNA
gggcatataggaggaagggtcactgctgtctccggaagctcttggctgcaaagagagaggatcccgggtatctccctccttacaaccaccgccacctcctagtgccttagaagccactga

SEQ ID NO: 18503 - DNA, 120 bp, synthetic construct
  misc_feature 1..120: note = Artificially Synthesized Probe
  source 1..120: mol_type = other DNA
acagagtctaagggtcattaaataacttgctcaaggtaatacagatagtgagtggccaagccaagactcaattcctgtggccatgagctcagccacaatatcagtgattttctttttctt

SEQ ID NO: 18504 - DNA, 120 bp, synthetic construct
  misc_feature 1..120: note = Artificially Synthesized Probe
  source 1..120: mol_type = other DNA
aggaataaaatgaatgctagtatgtggtggggttggaagcacaacaaagcaccccagcagcatggagatgttttgagcaggaaaatgatctgatctgactcatacttaaagatttctctg

SEQ ID NO: 18505 - DNA, 120 bp, synthetic construct
  misc_feature 1..120: note = Artificially Synthesized Probe
  source 1..120: mol_type = other DNA
tgttttggaagtaagagagaatggaattgggagtgaatagattctgggaggtgagaaagagatgctataaattcttcgatgagacatttacataccaggcactcttggtgcttagatgta

SEQ ID NO: 18506 - DNA, 120 bp, synthetic construct
  misc_feature 1..120: note = Artificially Synthesized Probe
  source 1..120: mol_type = other DNA
ctgtctttttggcctttttgtagagatctctctgtttctatgaaccccatggcatcaacgggtggaggaggccaggggtggtcatttagctccttattcctgcagttctagtcccagaca

SEQ ID NO: 18507 - DNA, 120 bp, synthetic construct
  misc_feature 1..120: note = Artificially Synthesized Probe
  source 1..120: mol_type = other DNA
ccagcactttgggaggccaaggcaggcggatcacctgaggtcaggagttcaagaccagcctggccaacatggtgaaaccccatgtctactaaaaatacaaaaaaagaaaaaaaaaattag

SEQ ID NO: 18508 - DNA, 120 bp, synthetic construct
  misc_feature 1..120: note = Artificially Synthesized Probe
  source 1..120: mol_type = other DNA
gtttatttccctcctttttctttcattatgaaacgtttcagacacacagaagttataaagaatcacgcacatccagaagccagcctaaggcatgaaatgcggcaaatacaatcacagctc

SEQ ID NO: 18509 - DNA, 120 bp, synthetic construct
  misc_feature 1..120: note = Artificially Synthesized Probe
  source 1..120: mol_type = other DNA
ggtacatagttggtgcctaataaatgtttatttcactgagtccccagggcctagtacagagcctggtacatagttgatgcctaataacatttgttttactgagtcacaagacctaacaca

SEQ ID NO: 18510 - DNA, 120 bp, synthetic construct
  misc_feature 1..120: note = Artificially Synthesized Probe
  source 1..120: mol_type = other DNA
aaacatgcttcctgcacttttctactcctcatctttccccaaatcctgttttagaagcagcaggttgaagtgtttgaaaacacagactctgaaatcagactggattcgagtcccagcttt

SEQ ID NO: 18511 - DNA, 120 bp, synthetic construct
  misc_feature 1..120: note = Artificially Synthesized Probe
  source 1..120: mol_type = other DNA
ccaccacacctggcctccaaattatttctctaatctactccctctgctatgatctgattgtgcatgtccctctgtccccagattcctacattgaaacctaaatccctaatgcaatagtat

SEQ ID NO: 18512 - DNA, 120 bp, synthetic construct
  misc_feature 1..120: note = Artificially Synthesized Probe
  source 1..120: mol_type = other DNA
atgtgtattgcccacgcaataaagattttcagaggacccaccagacattcatgtgggcgaaaatcccatttatcactatctgagtccacaacctaccttcagattgcataaaatgaaaag

SEQ ID NO: 18513 - DNA, 120 bp, synthetic construct
  misc_feature 1..120: note = Artificially Synthesized Probe
  source 1..120: mol_type = other DNA
aatgcccaaaggccaacagagtggagttgcatcttaacacagaaataagtcaatgccctgatcacttgtggtcaaaaatcacccttggaaattttattagtttctgactgctgctttaac

SEQ ID NO: 18514 - DNA, 120 bp, synthetic construct
  misc_feature 1..120: note = Artificially Synthesized Probe
  source 1..120: mol_type = other DNA
ggagactgactcaggtgtctcatttttctttcactctgggacacgtgcttgctgaaatcatctgtactattgcaattgtttatgcttctttctattttgccaagtgagtgacaaaattga

SEQ ID NO: 18515 - DNA, 120 bp, synthetic construct
  misc_feature 1..120: note = Artificially Synthesized Probe
  source 1..120: mol_type = other DNA
cattgggtgtggactattgtcagacactgttttaagcattttcacttacatttctcatgtaattttcacaggcccctgtgagaaagatgctgttacaatacccattttacagataaggaa

SEQ ID NO: 18516 - DNA, 120 bp, synthetic construct
  misc_feature 1..120: note = Artificially Synthesized Probe
  source 1..120: mol_type = other DNA
cactgtttgggagtgtagctataagataaattccctgcagcagaaatgcgtatattaaagaatatatgcatttgtgattatactagtttgtgtcaaattgcactccttaggtgtacacat

SEQ ID NO: 18517 - DNA, 120 bp, synthetic construct
  misc_feature 1..120: note = Artificially Synthesized Probe
  source 1..120: mol_type = other DNA
gccaccgcacccagccagtattgttaatatgcatttatcttacaatgaatgaggttgggccccattacgtatgtttaaacaccacatattttctttatgtgaactatggcttcatatctt

SEQ ID NO: 18518 - DNA, 120 bp, synthetic construct
  misc_feature 1..120: note = Artificially Synthesized Probe
  source 1..120: mol_type = other DNA
atgtttcctctaaagacacaaaattaaaattttatccaaaactctgggagaaacaaaatatatttgatatccgaatctggccctcaggactcccagtttgcaatccctgcctggcctagg

SEQ ID NO: 18519 - DNA, 120 bp, synthetic construct
  misc_feature 1..120: note = Artificially Synthesized Probe
  source 1..120: mol_type = other DNA
ataaaaataaaatttaaaaatgtgcttttctcctctggactcattcatgcagctgcatttagttggtgactaggctagacagaagtccaagatggcttcatccacatttggggggctttg

SEQ ID NO: 18520 - DNA, 120 bp, synthetic construct
  misc_feature 1..120: note = Artificially Synthesized Probe
  source 1..120: mol_type = other DNA
cagagttataagctgggagaattgcaaagactgggaaaattattggtttcagggatttaagaaaatgtcttttcagtcattagctgcccaataaactgagcatagattttggtggccaca

SEQ ID NO: 18521 - DNA, 120 bp, synthetic construct
  misc_feature 1..120: note = Artificially Synthesized Probe
  source 1..120: mol_type = other DNA
tgaggaacagaaaaaaaacgaagagaaacagagtctcagagatctgtgggacatgattaagcataattaacatacacataattgaagttccagaggagaggagagagagagaaaggggca

SEQ ID NO: 18522 - DNA, 120 bp, synthetic construct
  misc_feature 1..120: note = Artificially Synthesized Probe
  source 1..120: mol_type = other DNA
gcatactagataatatctagcacaaaaggcaatggaggaatagaagaataagaaggacactagacatatattaattgcatggtaatatggcatatgtaaattctactttaccagtattac

SEQ ID NO: 18523 - DNA, 120 bp, synthetic construct
  misc_feature 1..120: note = Artificially Synthesized Probe
  source 1..120: mol_type = other DNA
gaatgaaattataaataaataaccttggaaaattcccaaatacatatcaattaaacaacacacttctaaataaccaatgggccaaagaagaaatcacaagacaaattagaaaatactttg

SEQ ID NO: 18524 - DNA, 120 bp, synthetic construct
  misc_feature 1..120: note = Artificially Synthesized Probe
  source 1..120: mol_type = other DNA
tcacaaaacttctcacaaagaaaaagaccaagcaccaaggatcaagatggcttcaacgataaactcttccaaacattcctagaataattaacacaaatgctttacagattcttccaaaaa

SEQ ID NO: 18525 - DNA, 120 bp, synthetic construct
  misc_feature 1..120: note = Artificially Synthesized Probe
  source 1..120: mol_type = other DNA
caagtacagcactagccatttagtgctataccaagaagactatctactttgataagtaagaagcagatctgggggagtaacacaggcttcctgattctcatcatgaatcactttctacat

SEQ ID NO: 18526 - DNA, 120 bp, synthetic construct
  misc_feature 1..120: note = Artificially Synthesized Probe
  source 1..120: mol_type = other DNA
atgaacttaatgtaagtattttacctagggcatagatgacatcttacctctacctaacaggtagatctcaggggaaagttgtgtgaatgccctgcactttaaaaatagaatggtggggcc

SEQ ID NO: 18527 - DNA, 120 bp, synthetic construct
  misc_feature 1..120: note = Artificially Synthesized Probe
  source 1..120: mol_type = other DNA
gttccatatgctatcacattataggattcatttacaaattagacccacactgcctgggtttacattcttgctccaacacgtataaacttcagcagcaagttgctttttgtgtgaccttgg

SEQ ID NO: 18528 - DNA, 120 bp, synthetic construct
  misc_feature 1..120: note = Artificially Synthesized Probe
  source 1..120: mol_type = other DNA
agtccatagcacttcctgccagtacccaacatccaaggcacacagaaggcatttggaggttggaaaaaatatggaccccaaaattttaaataccaaaacacaaatgtaaagctcacaatc

SEQ ID NO: 18529 - DNA, 120 bp, synthetic construct
  misc_feature 1..120: note = Artificially Synthesized Probe
  source 1..120: mol_type = other DNA
ggggaaaggggaaaagggaaagggaaaggagaagaaggaaggaagagagaaaggaaggaatggagagagggagggaggaaggaaggaaggaaggaaggaaggaaggaaggaaggaaggaa

SEQ ID NO: 18530 - DNA, 120 bp, synthetic construct
  misc_feature 1..120: note = Artificially Synthesized Probe
  source 1..120: mol_type = other DNA
atgcggtatcgtgtagtgtgactcacattccaatatatttatccattctgttgtgcatgggcgtttaagttgctcccagtattggtctatgatagacagcactgctgtgaacatttttat

SEQ ID NO: 18531 - DNA, 120 bp, synthetic construct
  misc_feature 1..120: note = Artificially Synthesized Probe
  source 1..120: mol_type = other DNA
gccaccgcacctggccatctcactgtttttaattggcaactctttttatacattttccggccatttggatttcctctttgaggaagtaacttgtctaggacttttgtccatttttctatt

SEQ ID NO: 18532 - DNA, 120 bp, synthetic construct
  misc_feature 1..120: note = Artificially Synthesized Probe
  source 1..120: mol_type = other DNA
aaaaaaaagaagaaattgggagaaaaggtagaggaaaggagggaaggactttctctcctactcctgccaaagcttctttgtcaacatctcaggatgatgtgggttgatcaatgggactcc

SEQ ID NO: 18533 - DNA, 120 bp, synthetic construct
  misc_feature 1..120: note = Artificially Synthesized Probe
  source 1..120: mol_type = other DNA
gccactctaccttctccttgcccatcttctgatgttccattgtgctaagacccatttattcattaaacgtcactcctttaccctagataaaaagatttctcctgaccattatccaaagga

SEQ ID NO: 18534 - DNA, 120 bp, synthetic construct
  misc_feature 1..120: note = Artificially Synthesized Probe
  source 1..120: mol_type = other DNA
aaaagataaagcatttttaaaatgcaccacaatggcataatgttttttcccattcatgtatcccagaactgtttcttgagcacctactaactgctgagccatgtgcactcacaggcacaa

SEQ ID NO: 18535 - DNA, 120 bp, synthetic construct
  misc_feature 1..120: note = Artificially Synthesized Probe
  source 1..120: mol_type = other DNA
ttttttacatagaatattcagctaaggcctctctaaggtgatatctcaaccaatttttttttcaccttcgactttgattttagattcaggaggtacatgcaggtttgttaataggtatat

SEQ ID NO: 18536 - DNA, 120 bp, synthetic construct
  misc_feature 1..120: note = Artificially Synthesized Probe
  source 1..120: mol_type = other DNA
ctacccgagactggataatttatgaaaaaaaaaagaggtttaattgactcacagttccacaggcttaacaggaagcatggctaggaggcctcaggaaacttacagtcatggtggaaggca

SEQ ID NO: 18537 - DNA, 120 bp, synthetic construct
  misc_feature 1..120: note = Artificially Synthesized Probe
  source 1..120: mol_type = other DNA
ggctgcagtgatctgagatcgtgccactgcactccagcctgggcaacagagcgaaactcaaattaaaaaaaaaaaaaagctgttctgactggtgtgagatgatatctcattgtggtagtg

SEQ ID NO: 18538 - DNA, 120 bp, synthetic construct
  misc_feature 1..120: note = Artificially Synthesized Probe
  source 1..120: mol_type = other DNA
ggtaagagtgggattggagaaaagggcagggaccagagctttgaaggaaacaaaatgagccttacatttgttctaagtgccatggaatactattggatgctctaaacagaaaattgacaa

SEQ ID NO: 18539 - DNA, 120 bp, synthetic construct
  misc_feature 1..120: note = Artificially Synthesized Probe
  source 1..120: mol_type = other DNA
aactaaaggtgttcagagcttggggactgtggcctaagcaccacttcctatatcagttgaaaattgctgtgttaaaaaaccacccacaaattgaggggcttgaaaaatcaatggtttatt

SEQ ID NO: 18540 - DNA, 120 bp, synthetic construct
  misc_feature 1..120: note = Artificially Synthesized Probe
  source 1..120: mol_type = other DNA
acggcaaacctagctgtcaaagagcatactactggggaattttttgtcacaggtgctttgcttgaggcacggttattttagctagaagagaaatgtgcttattgtggaaacttactgttt

SEQ ID NO: 18541 - DNA, 120 bp, synthetic construct
  misc_feature 1..120: note = Artificially Synthesized Probe
  source 1..120: mol_type = other DNA
tcagctctctgataggttcaggggaagttattttgttgattagccaacttcttattattgttaagcgggggacactactctccacaggtttctatcttttagaggtaagccactcattaa

SEQ ID NO: 18542 - DNA, 120 bp, synthetic construct
  misc_feature 1..120: note = Artificially Synthesized Probe
  source 1..120: mol_type = other DNA
atcaagagagtgccatgcttggaatcctgaactctatgaaacatgtatgaaagatagaagtagaggacaaactgaggtgaagggagaatagaagcggataaaaaggaaaaagattacaga

SEQ ID NO: 18543 - DNA, 120 bp, synthetic construct
  misc_feature 1..120: note = Artificially Synthesized Probe
  source 1..120: mol_type = other DNA
atgtgttttatgggaaaagttgtatcctaagtaaggatcagataccagccaagttctctgtttgccagggctgcagaaatattctgaaccatgcaaagacttagtaaagggaggacctat

SEQ ID NO: 18544 - DNA, 120 bp, synthetic construct
  misc_feature 1..120: note = Artificially Synthesized Probe
  source 1..120: mol_type = other DNA
gccatcttctaaatagtgcctgggtcacaaaggaagtaaaagctgcaattacagactatgcagagaaaaatgagaacattacatttcatacttaatacagtcaaagctgtacctctatca

SEQ ID NO: 18545 - DNA, 120 bp, synthetic construct
  misc_feature 1..120: note = Artificially Synthesized Probe
  source 1..120: mol_type = other DNA
gagccacctggcccggcccaatatctatttctttgaaaagaaccataaaatgcagctgcaaatcaaaccaagaaaaaaagagaaaacagcataattaagaatgagaaaagaaacaaaata

SEQ ID NO: 18546 - DNA, 120 bp, synthetic construct
  misc_feature 1..120: note = Artificially Synthesized Probe
  source 1..120: mol_type = other DNA
cacacaggggagaattacagagggatttctcaatatcctaatgtcatacagatgtttctataccgcacttcttaaggaaaaaggagatggacaagtgtagatgattttagggaggtagta

SEQ ID NO: 18547 - DNA, 120 bp, synthetic construct
  misc_feature 1..120: note = Artificially Synthesized Probe
  source 1..120: mol_type = other DNA
tctcttctctcatttgcgttttccctgcttccttgactacttcctcctttccattgctctacatgctattttatttcttcctctgtgaatgggaatgacaaatccaaagctgctgatatt

SEQ ID NO: 18548 - DNA, 120 bp, synthetic construct
  misc_feature 1..120: note = Artificially Synthesized Probe
  source 1..120: mol_type = other DNA
agatgttaaagtttgataaatatcattttaaaaagtagagtgaggtcaaggagattgagagtgtgggagtgcaatttaaaatggggtgacaggtggctcacacactttaggatgctgagg

SEQ ID NO: 18549 - DNA, 120 bp, synthetic construct
  misc_feature 1..120: note = Artificially Synthesized Probe
  source 1..120: mol_type = other DNA
aaacaaaaaaagacagttgacccattctgccaccaggaaaaagccgtttgtaaaaaccagccagagacaatttcacctgcccaggtattcccccaagaccatcttcctccttcctttatt

SEQ ID NO: 18550 - DNA, 120 bp, synthetic construct
  misc_feature 1..120: note = Artificially Synthesized Probe
  source 1..120: mol_type = other DNA
ttctctggtttcatctaacaatagcagtgatgatgacaatgccaataatcacaactgctctctttgctaaagagctgctagacacctgaaaagcaagcacagttatcatccccattttac

SEQ ID NO: 18551 - DNA, 120 bp, synthetic construct
  misc_feature 1..120: note = Artificially Synthesized Probe
  source 1..120: mol_type = other DNA
actgcactccaatctgggtgatagagtgagatcctgcctcagaaaaaaagaaagaaagaaaaaaaaaagaaccatccgactactctcccttttaggatctgatggttacagaaaacagac

SEQ ID NO: 18552 - DNA, 120 bp, synthetic construct
  misc_feature 1..120: note = Artificially Synthesized Probe
  source 1..120: mol_type = other DNA
caaaatgtgctgtgaaatctaaattattggggctgtggtatggggtttgcagcaagtcttaacctcactacactcttctcattaagggttctttgatgatttagtgaggactcatttagt

SEQ ID NO: 18553 - DNA, 120 bp, synthetic construct
  misc_feature 1..120: note = Artificially Synthesized Probe
  source 1..120: mol_type = other DNA
gtagtatttgaacccagactgcctgtctctgatactacatcatcacacattgcctttctctccatttcctggttttctttcctctgtgatgacttagtttcaaagaggccttcccatatc

SEQ ID NO: 18554 - DNA, 120 bp, synthetic construct
  misc_feature 1..120: note = Artificially Synthesized Probe
  source 1..120: mol_type = other DNA
agaacacagctgggggaagaggtcattggtatgtgagtctcagaccatgtgaattattctaaacatattattagaagcctcaagagaatgtgactacagtcctttctctctttttctaag

SEQ ID NO: 18555 - DNA, 120 bp, synthetic construct
  misc_feature 1..120: note = Artificially Synthesized Probe
  source 1..120: mol_type = other DNA
tatttttttgaaaccaactaggctaaggtcttgtggttccagagcagttctctgaagtctcatgtgaaagtttgtcccttactttagtgtttgagctcagtggttgggttgggtaacttt

SEQ ID NO: 18556 - DNA, 120 bp, synthetic construct
  misc_feature 1..120: note = Artificially Synthesized Probe
  source 1..120: mol_type = other DNA
tgctttagtttttttcttaatgtggtaagggaataggtttataccatggggataaatgataccgaggaggggcaatgtcaccagaagacactgtggtgtcagaaactggtgatctataca

SEQ ID NO: 18557 - DNA, 120 bp, synthetic construct
  misc_feature 1..120: note = Artificially Synthesized Probe
  source 1..120: mol_type = other DNA
aaaaaaaaaggaaagaatatggcttcaaacaaccacattcattgtgcacttgctaagggtcagtccctatgaaaagagcttcagagtggagtgtggatatgaatatggattctgatctgg

SEQ ID NO: 18558 - DNA, 120 bp, synthetic construct
  misc_feature 1..120: note = Artificially Synthesized Probe
  source 1..120: mol_type = other DNA
gtctcagaaaagagtaaaaacataaataatttttgactgtgctaaatgccaggaggaggatgcacaaggagatatcaaaaagaatgtcagatcagagctacttctgacaaggtttcccgg

SEQ ID NO: 18559 - DNA, 120 bp, synthetic construct
  misc_feature 1..120: note = Artificially Synthesized Probe
  source 1..120: mol_type = other DNA
tctatcatatgatacaagcaagaggtgcaaaataaattttagagagtaaggtgaattagagagagtgaagtgggcattgtgtatttgaagtctctctcccttctctggaggcccagacca

SEQ ID NO: 18560 - DNA, 120 bp, synthetic construct
  misc_feature 1..120: note = Artificially Synthesized Probe
  source 1..120: mol_type = other DNA
gtccaagctcagaaaatgccagacgtttataaaaccatcagatctcatgagaactcactcactatcatgagtacacaagggggaaccacccccatgatccgatcacctccctccctcgac

SEQ ID NO: 18561 - DNA, 120 bp, synthetic construct
  misc_feature 1..120: note = Artificially Synthesized Probe
  source 1..120: mol_type = other DNA
ttttctgttcctgtgttagtttgctgggaatgatggtttccagcttcatccatgagaaatggcacatatttttaaataaactatatggaaattaagagagaagcaaaacaaccctcaaaa

SEQ ID NO: 18562 - DNA, 120 bp, synthetic construct
  misc_feature 1..120: note = Artificially Synthesized Probe
  source 1..120: mol_type = other DNA
ggcatcttatttcaggcatcagagggtgtgaagcattctgacaagagaatctacgtataggaaatgattcattaaccaggacaggtgagcagatgttactgaacagtgagttaatgatca

SEQ ID NO: 18563 - DNA, 120 bp, synthetic construct
  misc_feature 1..120: note = Artificially Synthesized Probe
  source 1..120: mol_type = other DNA
cattcaggagatgctgaacgagcacctactgtgtaccaggcacagggcacataaccatgaaagggctcagttcttgccttcatggagccagggaaggaggagaataagcaaataatttta

SEQ ID NO: 18564 - DNA, 120 bp, synthetic construct
  misc_feature 1..120: note = Artificially Synthesized Probe
  source 1..120: mol_type = other DNA
aagaccctgtctattaaaagagacagagagagggaaagaggagtaaatgttcagatgatgctaatttgtgcctctcgccgccggcaccagggtgtttgtgctgctgctggtcctggtctc

SEQ ID NO: 18565 - DNA, 120 bp, synthetic construct
  misc_feature 1..120: note = Artificially Synthesized Probe
  source 1..120: mol_type = other DNA
aggatgatttgggactctgaaaaggtcatcagaatccatctgcacttctgcttcaattcttaggtcccatatggagcccagtatcttctagagatacatcctcttttactgtcattaagt

SEQ ID NO: 18566 - DNA, 120 bp, synthetic construct
  misc_feature 1..120: note = Artificially Synthesized Probe
  source 1..120: mol_type = other DNA
aaaaataagcattaatatttctgtcccagaatttctagagaatttctagatttccattgatggagtcagctcaggacacatgctcatccgtgaaccaattcaatccctgtggccagagaa

SEQ ID NO: 18567 - DNA, 120 bp, synthetic construct
  misc_feature 1..120: note = Artificially Synthesized Probe
  source 1..120: mol_type = other DNA
caacttgccttctctcagttagtgcttctaaactggcggcttgcagacatattttggcttagcccacctacagtttcaacaaaatgtgagttaacatttaaaaattgagagattttggcc

SEQ ID NO: 18568 - DNA, 120 bp, synthetic construct
  misc_feature 1..120: note = Artificially Synthesized Probe
  source 1..120: mol_type = other DNA
tctgaatgtcgtcagttctttaaagaacacacaatccgctctgggtttcctcaccacagccttggtgtgtccagacatgtgctcaggtgcccttctccgaggttctttgcaggaatttgg

SEQ ID NO: 18569 - DNA, 120 bp, synthetic construct
  misc_feature 1..120: note = Artificially Synthesized Probe
  source 1..120: mol_type = other DNA
gagccccgcacaactatcccttgttataaggttactcctttaaagtgtttttcctcctgcttaagaaaagattctcaacaggcagaaaatgcaggaaatgcgcacaaatggaaaaaacaa

SEQ ID NO: 18570 - DNA, 120 bp, synthetic construct
  misc_feature 1..120: note = Artificially Synthesized Probe
  source 1..120: mol_type = other DNA
gcggtaaagatttacagtgattttctcacacctatgacatttcatggcagctgctttattacacattcagcgtctttaaatcaaaggaacgtagactcgtaaatgccaagcgatgggttc

SEQ ID NO: 18571 - DNA, 120 bp, synthetic construct
  misc_feature 1..120: note = Artificially Synthesized Probe
  source 1..120: mol_type = other DNA
caaaacaaacacccaaaaaggagttgtgtagacattcttaccatgtggaatcaacgcttcttcttccttcaaattcggaaaaaatgcatggactgactgtctcttcctgcgcattcaacg

SEQ ID NO: 18572 - DNA, 120 bp, synthetic construct
  misc_feature 1..120: note = Artificially Synthesized Probe
  source 1..120: mol_type = other DNA
aagtgatgttttcacagtgcaggctgaacaggggaaaggtaagaggggctctcacggtacaggctggagatgggggaggggagaggggctctcacagcgcaggctaaagggaagggaagg

SEQ ID NO: 18573 - DNA, 120 bp, synthetic construct
  misc_feature 1..120: note = Artificially Synthesized Probe
  source 1..120: mol_type = other DNA
ggcagtcgcagaacattctcatggtgacacaaacccagagcaaggctgtgttgatgacctggaaacgagcttctagaagccggaccctgcctggcaaagtggagctgatgggagatgcca

SEQ ID NO: 18574 - DNA, 120 bp, synthetic construct
  misc_feature 1..120: note = Artificially Synthesized Probe
  source 1..120: mol_type = other DNA
tgtttaaaaaacatgctcagtcagcactttatttctgcagactcatgaattttcagaaacatcacgttaatgaaaggagctgttttcccatggggaggctgatggcagaggttttcagtg

SEQ ID NO: 18575 - DNA, 120 bp, synthetic construct
  misc_feature 1..120: note = Artificially Synthesized Probe
  source 1..120: mol_type = other DNA
tggaagctggtgttgccattcacatgtgaggtgtgagggaggcctggctttcagctgcgcccttcagcatgtgttattttatgttgttattttgttttattctcactgcttctgggcaga

SEQ ID NO: 18576 - DNA, 120 bp, synthetic construct
  misc_feature 1..120: note = Artificially Synthesized Probe
  source 1..120: mol_type = other DNA
tgcctccacactcagctaattttttttttgagacggagtcttgctctgtcgcccaggctggagtgcagtggtgctatcttggctcactgcaagctctgcctcccaggttcacgccattct

SEQ ID NO: 18577 - DNA, 120 bp, synthetic construct
  misc_feature 1..120: note = Artificially Synthesized Probe
  source 1..120: mol_type = other DNA
gatggtttgtgggtcccaaattccttctaccttgtccaagcgtttacttttggggtcacttaggccagccctttgattttcaggcaggccgagaggagttaagtcctctctcaatgcaca

SEQ ID NO: 18578 - DNA, 120 bp, synthetic construct
  misc_feature 1..120: note = Artificially Synthesized Probe
  source 1..120: mol_type = other DNA
tgtgttcgctttgtgtctacaagctcttgcgaggggcataaacatctaggattgcaacgtcttcttagggaattgatcccattatcactgtgaagcaaccttttttattctggtgatatt

SEQ ID NO: 18579 - DNA, 120 bp, synthetic construct
  misc_feature 1..120: note = Artificially Synthesized Probe
  source 1..120: mol_type = other DNA
aaacaagcgattatctttcaaagaggcttaaataatgagaaaaactgtattgatgttcaaccatgtggtttccattgggagcagcagaaaggaccagtagaacctgagcctcctgcttgc

SEQ ID NO: 18580 - DNA, 120 bp, synthetic construct
  misc_feature 1..120: note = Artificially Synthesized Probe
  source 1..120: mol_type = other DNA
tgcttctctgaggcttgtggacagaccagaggccatttcaagtctcatgactccaccttttgtttcaaggtgatttacttcacagctttgttcccttacctggtcctgaccatctttctc

SEQ ID NO: 18581 - DNA, 120 bp, synthetic construct
  misc_feature 1..120: note = Artificially Synthesized Probe
  source 1..120: mol_type = other DNA
aaagaggtcaggtttggagtgagcctggaggactcaggaaagaggtcaggtttggagtgggcctggaggaggacttcggtctggggcaggtggactttggcacctgtgggacaccaagtg

SEQ ID NO: 18582 - DNA, 120 bp, synthetic construct
  misc_feature 1..120: note = Artificially Synthesized Probe
  source 1..120: mol_type = other DNA
ttttatgatatcttaatatgcacagatccctacaaagtgcaattccacggatcataaagtgcatagcccagtgcactgtgatgaacctgaaacaagccttatttcccgtggctgccagta

SEQ ID NO: 18583 - DNA, 120 bp, synthetic construct
  misc_feature 1..120: note = Artificially Synthesized Probe
  source 1..120: mol_type = other DNA
ggaagggtggcgtgggcacatttcatttctgtaggggtgtggagtgaatggtgtccccagaaggtcacttccacccaaaacttcagaatgtgacctggttggaaaagggtctttgcagat

SEQ ID NO: 18584 - DNA, 120 bp, synthetic construct
  misc_feature 1..120: note = Artificially Synthesized Probe
  source 1..120: mol_type = other DNA
gtcaccaagaaaacgcacacaaaagtggaaaacatggcactcacaggccacagaagggacagtgttttacaggatgagccgggtcagggaggacggtgatttataggatttacaggatga

SEQ ID NO: 18585 - DNA, 120 bp, synthetic construct
  misc_feature 1..120: note = Artificially Synthesized Probe
  source 1..120: mol_type = other DNA
caagggtttctctggatgtgtttgggaaccagggccatgagcccacagtcctctctgtccccgcagaaacatcctcagcctcatcaacgactttgacttcccagagcagagcatctccag

SEQ ID NO: 18586 - DNA, 120 bp, synthetic construct
  misc_feature 1..120: note = Artificially Synthesized Probe
  source 1..120: mol_type = other DNA
ccatgctcttcttcgggatgctgttcaccttggggctatcgaccatgttcgggaccgtggaggcggtcatcacacccctgctggacgtgggggtcctgcctagatgggtccccaaggagg

SEQ ID NO: 18587 - DNA, 120 bp, synthetic construct
  misc_feature 1..120: note = Artificially Synthesized Probe
  source 1..120: mol_type = other DNA
agtcccctgctgctgaccatctttgtggcttacatcatcctcctgttctggaagccactgagatacaaggcctggaaccccaaatacgtaggtccttccggtgggaacctgggaagtcct

SEQ ID NO: 18588 - DNA, 120 bp, synthetic construct
  misc_feature 1..120: note = Artificially Synthesized Probe
  source 1..120: mol_type = other DNA
ttctcgggaatgtggacgccactcctctccaaatgtgtcttggaaagtccctccgtagcagaacaccaagggcaggtgaaggaggagtgaccatgtatttttgaagaatttccacggtac

SEQ ID NO: 18589 - DNA, 120 bp, synthetic construct
  misc_feature 1..120: note = Artificially Synthesized Probe
  source 1..120: mol_type = other DNA
gtgccatggaaagcagcttttggccaacatccttcactcagtattgctaattattcttgtaaacaaaaactgcaatatcagcaagcaggctcgcggatactgcattcttgaatttgtttt

SEQ ID NO: 18590 - DNA, 120 bp, synthetic construct
  misc_feature 1..120: note = Artificially Synthesized Probe
  source 1..120: mol_type = other DNA
ggaaaggactttgcatgaatttgtggtttcctccatttcaccttctgcacagctaaaccaagcaggacacttggctttttaatatgggcaaagtaaatggtctaggaagctactgtgagc

SEQ ID NO: 18591 - DNA, 120 bp, synthetic construct
  misc_feature 1..120: note = Artificially Synthesized Probe
  source 1..120: mol_type = other DNA
atttacaccaccagcaaatgtcatcgcctgctattatgcagctgttagttcagcctgtttgtgagcgtcaaagcccctcgatagcactaaatggcaagaagtgtgcttcataaacatttc

SEQ ID NO: 18592 - DNA, 120 bp, synthetic construct
  misc_feature 1..120: note = Artificially Synthesized Probe
  source 1..120: mol_type = other DNA
acggtaggtgaaacgtagctatggatacaaacatttctgacctagatggaataatagggatcgaatttaccctactgtccgaaacaagccccaaataaacaaaacacacgtgccgatgac

SEQ ID NO: 18593 - DNA, 120 bp, synthetic construct
  misc_feature 1..120: note = Artificially Synthesized Probe
  source 1..120: mol_type = other DNA
cacagaaaggcagaaggcaatctttcagtgtgtggctgcaaaattcacagaatgacaagatttgtgaatccacagatctggccacaaaacatatccagagaggaaaaataaaaagaaacc

SEQ ID NO: 18594 - DNA, 120 bp, synthetic construct
  misc_feature 1..120: note = Artificially Synthesized Probe
  source 1..120: mol_type = other DNA
tccttataatgggatggggttaaaatatggtttctctgtagagtttaagtgaaatatgtatggtacaacctcaagagtagctattaaaggaatagaataagtccgggcacagtggcttac

SEQ ID NO: 18595 - DNA, 120 bp, synthetic construct
  misc_feature 1..120: note = Artificially Synthesized Probe
  source 1..120: mol_type = other DNA
gaggggaacagcaaacaaatatactatcgaggaagaatatgccacaggcatctctcaattactcatggtcaagcacccctaaagttgacaaagtgtagacaatgtgggtaacataatata

SEQ ID NO: 18596 - DNA, 120 bp, synthetic construct
  misc_feature 1..120: note = Artificially Synthesized Probe
  source 1..120: mol_type = other DNA
tgtagagagagtgctgggctgcctcttagggttgtgggagtaaaaacacgtcaagtgtttactgtgtgcccccgggaatgcacctgctccacggcatgtcatgaacatgttcgcacacag

SEQ ID NO: 18597 - DNA, 120 bp, synthetic construct
  misc_feature 1..120: note = Artificially Synthesized Probe
  source 1..120: mol_type = other DNA
gtccccttaaagtctagcgcagagcagaacatcagcatttgagcactcgcttgaaaataaaacgtggtcctggagatggctcttgagtctaagctaccacgtgtgctgggctctgagtaa

SEQ ID NO: 18598 - DNA, 120 bp, synthetic construct
  misc_feature 1..120: note = Artificially Synthesized Probe
  source 1..120: mol_type = other DNA
tgtctcttcctggaaccacagagccagggtgttaaacagggccctgtgactggtccacctgcctttcttctacacaaaggcggcaaaaccaagcagaagaaaggagatgcatatcagtga

SEQ ID NO: 18599 - DNA, 120 bp, synthetic construct
  misc_feature 1..120: note = Artificially Synthesized Probe
  source 1..120: mol_type = other DNA
cttcatggcagagcgtctctcagcccccacagctgtgcaggtgcagaccccggccaggcctgcagacatggcagctgggcatcccgggcaagccatgtcctcctgaagcatgatctagcc

SEQ ID NO: 18600 - DNA, 120 bp, synthetic construct
  misc_feature 1..120: note = Artificially Synthesized Probe
  source 1..120: mol_type = other DNA
agcttaaaatgcaattttttcccaattgtccacttttcctcaatttcagaaaagttaaaacatccaagccttccacctgaaaagcatgttggacgcgtgtctcatgccagtctcagcatc

SEQ ID NO: 18601 - DNA, 120 bp, synthetic construct
  misc_feature 1..120: note = Artificially Synthesized Probe
  source 1..120: mol_type = other DNA
tatctaaaagtctacgaagtgtgtttctgtatgaagttcgaagatttagtctaagatcagtagaacattttatctcctaagatcgaggtcagccctctgggtgttaagaggagacacccc

SEQ ID NO: 18602 - DNA, 120 bp, synthetic construct
  misc_feature 1..120: note = Artificially Synthesized Probe
  source 1..120: mol_type = other DNA
aggactcacaacggactgtgacaggggtccaagaccatgtgaggttttttcggtgggtctagaggggagggtggaagccaccttaaggagactatagatgagttcagggatcagcctgtc

SEQ ID NO: 18603 - DNA, 120 bp, synthetic construct
  misc_feature 1..120: note = Artificially Synthesized Probe
  source 1..120: mol_type = other DNA
ctccccaaaagcaagtaccagcagtccactttagaaatgcatatttttctttcactggtattatctaacttcttctaggaactgaccctaagaccttaagagtggtttctccccccacat

SEQ ID NO: 18604 - DNA, 120 bp, synthetic construct
  misc_feature 1..120: note = Artificially Synthesized Probe
  source 1..120: mol_type = other DNA
tccgttttctgtagagcaacactgaaaacaatgttctcagaataggagctatttgtcctatttgtctcaaagtcagggcgtttatctggctataaattccatggctctgaggcagagaaa

SEQ ID NO: 18605 - DNA, 120 bp, synthetic construct
  misc_feature 1..120: note = Artificially Synthesized Probe
  source 1..120: mol_type = other DNA
agcctggggattcactgtgcacacaaattgtttcactcactgcaaaactctggtttgagtccctaaaattcaacccacatgcagcttcttagggccacgtgtattacaaaaaataaaaat

SEQ ID NO: 18606 - DNA, 120 bp, synthetic construct
  misc_feature 1..120: note = Artificially Synthesized Probe
  source 1..120: mol_type = other DNA
tctctgggtgggtaagatgcggcatggctaaaacaatgccaccctgtccactgctgctgcacgggctcagcttggccagattttcctgagcaagatgcgtcccccacacaaagctttcag

SEQ ID NO: 18607 - DNA, 120 bp, synthetic construct
  misc_feature 1..120: note = Artificially Synthesized Probe
  source 1..120: mol_type = other DNA
ttccaggatctgtaggtggctcagggcagggcacacaggtaccccagagtagggggataaagggaaaggtaaactccagtcaccactcactccagccccgagaaaggtctcccaaataat

SEQ ID NO: 18608 - DNA, 120 bp, synthetic construct
  misc_feature 1..120: note = Artificially Synthesized Probe
  source 1..120: mol_type = other DNA
cacaaacacacacaaatcacacacgtccacactatttagtagcctaatttctaaaattagcaaaacatttagggatacattcctgacctccgccttccaggcacatgaggaagctgaggt

SEQ ID NO: 18609 - DNA, 120 bp, synthetic construct
  misc_feature 1..120: note = Artificially Synthesized Probe
  source 1..120: mol_type = other DNA
tgcaaactatgctcgttatcataataaagggcaaaaagaatgaagaaaaggcataaatgcggcaccgagtaaatttcactgctctgcatttatttgcagatgttccctttctcccgcttt

SEQ ID NO: 18610 - DNA, 120 bp, synthetic construct
  misc_feature 1..120: note = Artificially Synthesized Probe
  source 1..120: mol_type = other DNA
tgatgtttgcggcatcccagcctgcctccaggtgttgctggaacagctcattcctccccttccctgagctgcatgttcccacaccgcgtggcaagcaaacatctagagggccctcagtga

SEQ ID NO: 18611 - DNA, 120 bp, synthetic construct
  misc_feature 1..120: note = Artificially Synthesized Probe
  source 1..120: mol_type = other DNA
tgatggaggtggtgacaatcgcgtccctgtaagaacaagacacgccgtctcaggaaccagctgagctgcagcagctgcaattttccagtcattattcttaatttactgtgtctggggaag

SEQ ID NO: 18612 - DNA, 120 bp, synthetic construct
  misc_feature 1..120: note = Artificially Synthesized Probe
  source 1..120: mol_type = other DNA
cacacccactggcttcagtgccttctttaaagttgaaatcaaaatcgtgttgggagctgcctcgctgtcgcttctgtctgaaaggccacgcagctcacaggtttgcgggttcagtggatc

SEQ ID NO: 18613 - DNA, 120 bp, synthetic construct
  misc_feature 1..120: note = Artificially Synthesized Probe
  source 1..120: mol_type = other DNA
acatgacatgaccgcagcgtcctaacaaccctcggaacagcacagattcatccacatgctgcataatggtggcaccctgataaccctcagaaagtcatgaactcatccacacacaacatg

SEQ ID NO: 18614 - DNA, 120 bp, synthetic construct
  misc_feature 1..120: note = Artificially Synthesized Probe
  source 1..120: mol_type = other DNA
ctgcctccctgggcctcacctcatgcactttcactccaggacctgcaattgtcctttccttccatttctttcctgatttctcttcactatacatcaatccatcatctattatctatcaat

SEQ ID NO: 18615 - DNA, 120 bp, synthetic construct
  misc_feature 1..120: note = Artificially Synthesized Probe
  source 1..120: mol_type = other DNA
catccatccatccatccaatctattcactgtctccacctaatttctgacatctcatctttgtaatttgttctccagtgagcatcttttcacatgcactggtgtttgttttgcctcctcct

SEQ ID NO: 18616 - DNA, 120 bp, synthetic construct
  misc_feature 1..120: note = Artificially Synthesized Probe
  source 1..120: mol_type = other DNA
ggaggctttctccaaatattttaaccctgaattatgtcttcttttgctgaccaaagctgcagcctgagtctagatggagtttctgatgtaatttgatttagatgactcgtgctgtatcac

SEQ ID NO: 18617 - DNA, 120 bp, synthetic construct
  misc_feature 1..120: note = Artificially Synthesized Probe
  source 1..120: mol_type = other DNA
ctgcgggaggctcccgtggctggtgccatactacacgcacttttccaagggaggagtcgtatcttggtcaaaactggttttggcccatataacaaccaaagttttttttttttttttgag

SEQ ID NO: 18618 - DNA, 120 bp, synthetic construct
  misc_feature 1..120: note = Artificially Synthesized Probe
  source 1..120: mol_type = other DNA
tgattatggccatatgagtctcccaaactcaaccatggccatgtgtccaccccaacctggccatggccacattggtagcacaaaacccaactgaggccacacgtgcacctcctgtccagc

SEQ ID NO: 18619 - DNA, 120 bp, synthetic construct
  misc_feature 1..120: note = Artificially Synthesized Probe
  source 1..120: mol_type = other DNA
ctgggtacccaccactgcccacagtactgcccaaggtgctgggtacccaccactgcccacagtgctgcccacgctgctgggtacccactgctgcccagtgctgcccacggtgctaggtgc

SEQ ID NO: 18620 - DNA, 120 bp, synthetic construct
  misc_feature 1..120: note = Artificially Synthesized Probe
  source 1..120: mol_type = other DNA
gtgggaactcattccatcctggtgacactctctgtgggagaacatgcaccaggctacatgcagtcagctgcgtcaccactgcagactgtgacttggggccaagacaactgtaacagccgt

SEQ ID NO: 18621 - DNA, 120 bp, synthetic construct
  misc_feature 1..120: note = Artificially Synthesized Probe
  source 1..120: mol_type = other DNA
ttttaccaagagggagccaaggcagtgaggtggtgaaacaagcttccaaaggataaaattgtgccaaagcacgttaacttcctattagaacaaatctaacactctctaaacaaagacgac

SEQ ID NO: 18622 - DNA, 120 bp, synthetic construct
  misc_feature 1..120: note = Artificially Synthesized Probe
  source 1..120: mol_type = other DNA
caaacaagcagaaagtaagtgttgtcaaggatgtggggaaatcagaacccttgttccgatttgcatccactgtgggaaacagtgtggtggttcctcaaaaaattaaacacagaattatca

SEQ ID NO: 18623 - DNA, 120 bp, synthetic construct
  misc_feature 1..120: note = Artificially Synthesized Probe
  source 1..120: mol_type = other DNA
agcaatgctatgtatagcttaccacaatagccccccaagaaggcaaaatacttttgtgtaaagcccaagctgaatcactgccagcaagtctacgctatgagaaatgttaaaggaaattct

SEQ ID NO: 18624 - DNA, 120 bp, synthetic construct
  misc_feature 1..120: note = Artificially Synthesized Probe
  source 1..120: mol_type = other DNA
acacagtgacctaacataacctctctgacatttatgcaactttccaaccaaagacagcagaatacatattctttctaggtgcatgtggaacattcaccagtgtaaaccatctagtaggtc

SEQ ID NO: 18625 - DNA, 120 bp, synthetic construct
  misc_feature 1..120: note = Artificially Synthesized Probe
  source 1..120: mol_type = other DNA
ttagttgtcaaatttatgacacgtcatgtttcgtacattgtgtaggaaactcaatcccttttgtgtttactgacaaagtcaggcatgcccattatctaggacaaagagctgcactgtcac

SEQ ID NO: 18626 - DNA, 120 bp, synthetic construct
  misc_feature 1..120: note = Artificially Synthesized Probe
  source 1..120: mol_type = other DNA
tttaattagggaaatgtaggtgtgaacaggccatccacacgcaatgggagttttctccctcgagaatgttaaaatctacttggacaaatggtgtgactgtgcattatttggacaatttta

SEQ ID NO: 18627 - DNA, 120 bp, synthetic construct
  misc_feature 1..120: note = Artificially Synthesized Probe
  source 1..120: mol_type = other DNA
tgctttcaagctccctgttttctgactcaaaacaaattttgcaaaggcacctactggctgttaaaactggaattagtcttactggtcaaagttccttttcctaccttgaagtggactcat

SEQ ID NO: 18628 - DNA, 120 bp, synthetic construct
  misc_feature 1..120: note = Artificially Synthesized Probe
  source 1..120: mol_type = other DNA
aggtaaacaacaaaacaaagtcttgtgaaaagcggacggctgggtcaccctggagacaggggctgcctactgaagccagagacttcttgcgcagtgacacccagaaagttatcttttctg

SEQ ID NO: 18629 - DNA, 120 bp, synthetic construct
  misc_feature 1..120: note = Artificially Synthesized Probe
  source 1..120: mol_type = other DNA
agcatcttcaaacatgcagggaaggcccgtgaaaggcctgagaccagatttcacactgtgaccacagagaagaagctgcccactccccaaaaccatgcactcctacacaaggactttcag

SEQ ID NO: 18630 - DNA, 120 bp, synthetic construct
  misc_feature 1..120: note = Artificially Synthesized Probe
  source 1..120: mol_type = other DNA
atctatagctgctcatgcctctcctgcaagactactcagaagagtcatctgagctcatttacagccatgtggagccatccaaggtcacactacccatgcatgaccatccagggtttccta

SEQ ID NO: 18631 - DNA, 120 bp, synthetic construct
  misc_feature 1..120: note = Artificially Synthesized Probe
  source 1..120: mol_type = other DNA
tgctgcctttggaaggtcttctcctatgtggatctggtccatattaaataattctgtattgcagtctgtcatggattgcctttgaaaagccttctcccatatggatctggtccatattaa

SEQ ID NO: 18632 - DNA, 120 bp, synthetic construct
  misc_feature 1..120: note = Artificially Synthesized Probe
  source 1..120: mol_type = other DNA
gctcaccgaaggcccagacgcaggaaacccactaccctgttggctacagaaccttctagtgatctctgctcatgacatcactgtgggctccagatgaagcttcacctgacacatttctta

SEQ ID NO: 18633 - DNA, 120 bp, synthetic construct
  misc_feature 1..120: note = Artificially Synthesized Probe
  source 1..120: mol_type = other DNA
actaaaatatgactgactataaaatattttatattcaatacaatcgaatggtggggtttccagggcgtctgtaaaatggggttgcccttggcaatgaaaccgaaacctgacaaacagaag

SEQ ID NO: 18634 - DNA, 120 bp, synthetic construct
  misc_feature 1..120: note = Artificially Synthesized Probe
  source 1..120: mol_type = other DNA
atgaaaacgtatgcatttttattaaccagatttttaaaaaggacaaaggcacatgtatcagggtgccgggggtgcatggtgtacatctgatttcataagcaatgtcagtctcctctaaac

SEQ ID NO: 18635 - DNA, 120 bp, synthetic construct
  misc_feature 1..120: note = Artificially Synthesized Probe
  source 1..120: mol_type = other DNA
ttggtgaacatcctttctgtgtgacagacggaaggaaatgagctcttatctgcggacctacaggtccctttttctcctgccctcctcacctgaatcctgcacgtgaagaggtgatttaac

SEQ ID NO: 18636 - DNA, 120 bp, synthetic construct
  misc_feature 1..120: note = Artificially Synthesized Probe
  source 1..120: mol_type = other DNA
taaacacacagcttttccagaacttctatgagtatccagaggctgaccttctagtagtcattttcttaatgccaattttctgagtggtgcctctgagtaaatgcctgaatcctccctgaa

SEQ ID NO: 18637 - DNA, 120 bp, synthetic construct
  misc_feature 1..120: note = Artificially Synthesized Probe
  source 1..120: mol_type = other DNA
ccgatggatgataggtagatggcagatccatagatagacatgtgttttatcttaactacattttagcatcttgacaaagtaacaccacaaatgaattgcaggaccctcacctagagcaag

SEQ ID NO: 18638 - DNA, 120 bp, synthetic construct
  misc_feature 1..120: note = Artificially Synthesized Probe
  source 1..120: mol_type = other DNA
cagctctgtctttgggcaacttcctgtacctgctgaggcctctgtcttcccctcttcaagatgggcataaaaatgccagcctcctcgcaggcatcctgtgaggcttccccccagattctt

SEQ ID NO: 18639 - DNA, 120 bp, synthetic construct
  misc_feature 1..120: note = Artificially Synthesized Probe
  source 1..120: mol_type = other DNA
cacggagcatttgctcttactcatgggcacactgggagttgaggaattctgtgcttcttccctcttggtcttcagccaatatgaaaaataaacacacaacaggaacgcaacaattcagca

SEQ ID NO: 18640 - DNA, 120 bp, synthetic construct
  misc_feature 1..120: note = Artificially Synthesized Probe
  source 1..120: mol_type = other DNA
taataaagagcaaaatttatataagcaaaatcagccactgtaaagagagtttagacataaccatcacaactgcttcctcaaaaagtgtctgtacaagccacatccacctagggcaggtgg

SEQ ID NO: 18641 - DNA, 120 bp, synthetic construct
  misc_feature 1..120: note = Artificially Synthesized Probe
  source 1..120: mol_type = other DNA
cggtgtacaaaacccactccgatcggatctgggatgcgccgcacccctagtagggttaagttccacgagaagaaaccaggacccccgagtcacagccatagacacccacgcgtcccctaa

SEQ ID NO: 18642 - DNA, 120 bp, synthetic construct
  misc_feature 1..120: note = Artificially Synthesized Probe
  source 1..120: mol_type = other DNA
cagcccttgaacttataaagcttttctcattaagagtcagttttacccttctgtaaataaggatggtgatactgttatccaggcctaaaaagcaggaagtgcaacaaacccttagggttt

SEQ ID NO: 18643 - DNA, 120 bp, synthetic construct
  misc_feature 1..120: note = Artificially Synthesized Probe
  source 1..120: mol_type = other DNA
tggaagtgtttctttgtattacaaaccctcaccctaaacctggggtttgggctctaaaaaagtaatttagggaagcagatcaagagcctgattatcagttctcacatggaaatctcaaca

SEQ ID NO: 18644 - DNA, 120 bp, synthetic construct
  misc_feature 1..120: note = Artificially Synthesized Probe
  source 1..120: mol_type = other DNA
caaaagtgatggataatttaccagaggcacatgcttttgaagtaaagctgttttttgtttttgcttgagtaaggtgccaggtacctctgaagcctgaaaacacaggcaataaaattcacc

SEQ ID NO: 18645 - DNA, 120 bp, synthetic construct
  misc_feature 1..120: note = Artificially Synthesized Probe
  source 1..120: mol_type = other DNA
ggtaaaagattacactggattagctactttctatgaaagaaactacagctatcacagaagagggaaaatttgaatgacctccaaaaaaaatgcacactataagcaaaagggagtgtacat

SEQ ID NO: 18646 - DNA, 120 bp, synthetic construct
  misc_feature 1..120: note = Artificially Synthesized Probe
  source 1..120: mol_type = other DNA
tcagtccatttctgaaattcatatcgcatagcctttagcctttttctacttactggtcaacccaaccagtactgttgccaagcaacaagtgttacacgagaatctgaatgcatcaaatct

SEQ ID NO: 18647 - DNA, 120 bp, synthetic construct
  misc_feature 1..120: note = Artificially Synthesized Probe
  source 1..120: mol_type = other DNA
atggaggcacattctgtaaaccaactaatctagacaaaccaaaaatatcaacggaagagaagagggaaaggctcaggaactgttctagatattaaagcagatcaagaagtaggacaagga

SEQ ID NO: 18648 - DNA, 120 bp, synthetic construct
  misc_feature 1..120: note = Artificially Synthesized Probe
  source 1..120: mol_type = other DNA
tggagcatatgagtttctaattagggatgctccactcatactacacctgcaacccaaagggtccttggcatttcatttgaaaccttcaacagtcttctttaaatggaaactaactgtagt

SEQ ID NO: 18649 - DNA, 120 bp, synthetic construct
  misc_feature 1..120: note = Artificially Synthesized Probe
  source 1..120: mol_type = other DNA
caagcacgggataggtggtagtggttgataccccaattaaataatcaactataaatccttatccttggacacagcaattgtcttcctaaaaatgtagcctaaaaacagccagacattcag

SEQ ID NO: 18650 - DNA, 120 bp, synthetic construct
  misc_feature 1..120: note = Artificially Synthesized Probe
  source 1..120: mol_type = other DNA
tagtttacagtcccaccaacagtgtaaaagtgttcctatttctccacatcctctccagcacctgttgtttcctgactttttaatgatggccattctaactggtgtgagatggtatctcat

SEQ ID NO: 18651 - DNA, 120 bp, synthetic construct
  misc_feature 1..120: note = Artificially Synthesized Probe
  source 1..120: mol_type = other DNA
aactggaaaggcaacaaaaattacatttgcataatcatcccaatgtgtttgtgtatgtgtacatatgcacagcaagtaaatcaacaaatgcagagtggtttctgcctctatttggaatgg

SEQ ID NO: 18652 - DNA, 120 bp, synthetic construct
  misc_feature 1..120: note = Artificially Synthesized Probe
  source 1..120: mol_type = other DNA
cctacctgcagcgaaggatggctgataagtagcagatgacgttggactcgaacattcatttgttgcatcggtgactaagggtgatgcaaaactcactaaattattatagatactgaaata

SEQ ID NO: 18653 - DNA, 120 bp, synthetic construct
  misc_feature 1..120: note = Artificially Synthesized Probe
  source 1..120: mol_type = other DNA
ttataacagagggagagtaaatgtgtgttcatggtattagtcttaccttagccatagctttcaagagatgtttgacatctccaagctgtcggttatgaccagtgagcacagtctttatat

SEQ ID NO: 18654 - DNA, 120 bp, synthetic construct
  misc_feature 1..120: note = Artificially Synthesized Probe
  source 1..120: mol_type = other DNA
tagccttatttaatcaagtttctttccaccaagactcaccactctctgtaataaacgaagctctaactcagacactgaactgttaaactgtgatgcaaacgaacacatctgctgacatcg

SEQ ID NO: 18655 - DNA, 120 bp, synthetic construct
  misc_feature 1..120: note = Artificially Synthesized Probe
  source 1..120: mol_type = other DNA
ccaccatgcccagctatgatacattcttaaatagttcttaataggtatatactgaaaaatttatagataaaattatgcactatttgggatttctattaaatatggatagaaaggaggatt

SEQ ID NO: 18656 - DNA, 120 bp, synthetic construct
  misc_feature 1..120: note = Artificially Synthesized Probe
  source 1..120: mol_type = other DNA
acggcgcctggccaacagggcacaaggtcttaagacgttttattgtcatgtggaaaaaataatattccaagtacctttccaaatctttggatcactttagttgtataaaagagacccaga

SEQ ID NO: 18657 - DNA, 120 bp, synthetic construct
  misc_feature 1..120: note = Artificially Synthesized Probe
  source 1..120: mol_type = other DNA
tcatgacgaggaaagtttaatgtaacaaagttatttgattatttattcaacatttcaggtggacgcattcacattttctctccccaactccctctactttcctgcatgtccatgtctcta

SEQ ID NO: 18658 - DNA, 120 bp, synthetic construct
  misc_feature 1..120: note = Artificially Synthesized Probe
  source 1..120: mol_type = other DNA
atgtacatagctttcaatatccagtcactataatagttcagaaaaatattctgctgccttaggcatcacaaaattccattatctatacaacataagaaatgcccatgcttgttagctact

SEQ ID NO: 18659 - DNA, 120 bp, synthetic construct
  misc_feature 1..120: note = Artificially Synthesized Probe
  source 1..120: mol_type = other DNA
tttgctgtgcagaagctctttagtttaattagatcccatttgtcaattttggtttttgttgccattgcttttggtgttttggacatgaagtccttgcccacacctatgtcctgaatggta

SEQ ID NO: 18660 - DNA, 120 bp, synthetic construct
  misc_feature 1..120: note = Artificially Synthesized Probe
  source 1..120: mol_type = other DNA
cctaattgaataccctttatttccttctcctgcctgattgccctggccagaacttccaacactatgttgaataggagcggtgagagagggcatccctgtcttgtgccagttttcaaaggg

SEQ ID NO: 18661 - DNA, 120 bp, synthetic construct
  misc_feature 1..120: note = Artificially Synthesized Probe
  source 1..120: mol_type = other DNA
attttttgaagggttttttgtgtctctatttccttcagttctgctctgattttagttatttcttgccttctgctagcttttgaatgtgtttgctcttgcttttctagttcttttaattgt

SEQ ID NO: 18662 - DNA, 120 bp, synthetic construct
  misc_feature 1..120: note = Artificially Synthesized Probe
  source 1..120: mol_type = other DNA
agtctgtgtcttttaattgcagaatttagtccatttatatttaaagttaatattgttatgtgtgaatttgatcctgtcattatgatgttagctggtgattttgctcattagttgatgcag

SEQ ID NO: 18663 - DNA, 120 bp, synthetic construct
  misc_feature 1..120: note = Artificially Synthesized Probe
  source 1..120: mol_type = other DNA
agctcagagtaatttgatcgtctgaagccttcttctctcagctcgtcaaaatcattctccatccagctttgttctgttgctagtgaggaactgcgttcctttggaggaggagaggcgctc

SEQ ID NO: 18664 - DNA, 120 bp, synthetic construct
  misc_feature 1..120: note = Artificially Synthesized Probe
  source 1..120: mol_type = other DNA
aggtcaggagtttgagaccagcctggccagcatggtgaaaccccgtctctataaaaatacaaaaattagctggacatggtggtgcgtgcctgtagtcccagctacttcagaggctgaggc

SEQ ID NO: 18665 - DNA, 120 bp, synthetic construct
  misc_feature 1..120: note = Artificially Synthesized Probe
  source 1..120: mol_type = other DNA
gtctattgataagtagatcttcatgttgccactgttgagagaaaaagaaatgtattaaaatcagcaggaaaaaagcgtttagataaataagggaagggaggcgcaacctaggactggcgg

SEQ ID NO: 18666 - DNA, 120 bp, synthetic construct
  misc_feature 1..120: note = Artificially Synthesized Probe
  source 1..120: mol_type = other DNA
tttcccccatttttcaagtttcctaccttgaggaaaaacacattataaacaaaaacacttacctgaaacatggcaatatgcagctgaacccgctgcaggcttgtcttacaagaagaaata

SEQ ID NO: 18667 - DNA, 120 bp, synthetic construct
  misc_feature 1..120: note = Artificially Synthesized Probe
  source 1..120: mol_type = other DNA
aatccaagtccacatttaccttttcaactaataagctgaaagcagtttcaacttgagcaaacatgccatcgaatgctaccaaaagcatctggccagctgacattttgggtgtttcatcaa

SEQ ID NO: 18668 - DNA, 120 bp, synthetic construct
  misc_feature 1..120: note = Artificially Synthesized Probe
  source 1..120: mol_type = other DNA
ctaccagataaatttctaatggaaaaagagctgtaagatggtatgagattttccttgagattacccaaaaaaagcttctctgaaacaaggcacagacaggctgccatagatccaggcaca

SEQ ID NO: 18669 - DNA, 120 bp, synthetic construct
  misc_feature 1..120: note = Artificially Synthesized Probe
  source 1..120: mol_type = other DNA
acaattcatttctactctctcaattatacttcttctgtgaattagacattggaacgccaaagaaaagaggccctgagtcactaggcacaaagaagcttagggattagctctgagtacaat

SEQ ID NO: 18670 - DNA, 120 bp, synthetic construct
  misc_feature 1..120: note = Artificially Synthesized Probe
  source 1..120: mol_type = other DNA
gtggtctgctcaataagaccgtccagttcatgcagcatactttctaacgtgtattcccctttcattaaacatcgaagtgcttctggaaatatgatttgccggaaattcgaattcaattcc

SEQ ID NO: 18671 - DNA, 120 bp, synthetic construct
  misc_feature 1..120: note = Artificially Synthesized Probe
  source 1..120: mol_type = other DNA
gtatctaaaacaaactaatatttaaaataaaagtgttcacctgaagtgaggtatacactccattggctaagtgaactgtctcagacgcttccatggggttcgggatatctaagtcctgtg

SEQ ID NO: 18672 - DNA, 120 bp, synthetic construct
  misc_feature 1..120: note = Artificially Synthesized Probe
  source 1..120: mol_type = other DNA
agtgatgaactgacacactgttgggggtggctggggagcatattgcatttcatatctataaaaataaggaagaggtgcttgtttataacacaaccacccccaacatacaaaagaatattg

SEQ ID NO: 18673 - DNA, 120 bp, synthetic construct
  misc_feature 1..120: note = Artificially Synthesized Probe
  source 1..120: mol_type = other DNA
ggaggaccttttggtaaaagacattattaaacacagtaaaacagggtcaagtcagctgtcactaaaagcaagcacaaaccaggaccccacacaaacacacatgactataaaactcatagt

SEQ ID NO: 18674 - DNA, 120 bp, synthetic construct
  misc_feature 1..120: note = Artificially Synthesized Probe
  source 1..120: mol_type = other DNA
ttaatggcacatatttagaagaattcaacactgttttaaacctgtgttgcagagtatgagaaggatgatccaccccttcagctccttctagaaactctatttcctccagtagtttgccct

SEQ ID NO: 18675 - DNA, 120 bp, synthetic construct
  misc_feature 1..120: note = Artificially Synthesized Probe
  source 1..120: mol_type = other DNA
agggtctctctgccacgccgcataatgtgtaaaacctgttttcaggagagtttttaaaataaggtctgccacaagtttcatcactaaagtgtggttttcattccacaggttttgctcatt

SEQ ID NO: 18676 - DNA, 120 bp, synthetic construct
  misc_feature 1..120: note = Artificially Synthesized Probe
  source 1..120: mol_type = other DNA
taggatctccttttcatttcctccataactctttccccatcctgccctcggacacagtcatgttcatgcctttataactgtaatattaaactcaaatatacgtctcaaactaccaagtct

SEQ ID NO: 18677 - DNA, 120 bp, synthetic construct
  misc_feature 1..120: note = Artificially Synthesized Probe
  source 1..120: mol_type = other DNA
cccttctctaattactatttgaaattacccttcaataacagttctgcagtctcctgtgcctaggtttaaaacttgcctcctttcaaactcatgctcttttcccctacctacccttatcaa

SEQ ID NO: 18678 - DNA, 120 bp, synthetic construct
  misc_feature 1..120: note = Artificially Synthesized Probe
  source 1..120: mol_type = other DNA
aaacatgcaaaaatggtccagtaagtctacaagtatttcacataataacagagaatagactaatacactgtgtagatgatttaatcaaccttttgtgcttgtaaggcagcttcccgttgt

SEQ ID NO: 18679 - DNA, 120 bp, synthetic construct
  misc_feature 1..120: note = Artificially Synthesized Probe
  source 1..120: mol_type = other DNA
aaaatggaggaagtcttaaatcctacctttgaaaagataaggatagctcttcccatctgatccaagaaagagaagtttctttggcttggttttagtcggtaagattgtgatggttccgcc

SEQ ID NO: 18680 - DNA, 120 bp, synthetic construct
  misc_feature 1..120: note = Artificially Synthesized Probe
  source 1..120: mol_type = other DNA
acaccaaaacaatccagtccttgcaataggtacagctagcagtcggctgtcaggtcgacaaaactttaaaaagccacctgcaaagttattaaccttaaattacaagaaaaaatgaggctc

SEQ ID NO: 18681 - DNA, 120 bp, synthetic construct
  misc_feature 1..120: note = Artificially Synthesized Probe
  source 1..120: mol_type = other DNA
cacaaacagggtttacagggtttcctcctatatcctcttctgattttctaatttgatttactgaaagggaaacaaagaaacaagaaactggtcttagaacacaaggaaacgcaggccggg

SEQ ID NO: 18682 - DNA, 120 bp, synthetic construct
  misc_feature 1..120: note = Artificially Synthesized Probe
  source 1..120: mol_type = other DNA
ttatctttaatgaggtaaataaagcaggcaaccaatatttagctcagggtcacagccccttccttggctaatttcttcatctgttgttcactggtgtgagccttccatacatgaaagatt

SEQ ID NO: 18683 - DNA, 120 bp, synthetic construct
  misc_feature 1..120: note = Artificially Synthesized Probe
  source 1..120: mol_type = other DNA
gagtcaccgtgtccagccaagaattttttgttttttaaaaaaatgcagctcataaaagaggcagctcctcttttcaatgaactaaatgatacaaggaaaatgtgatatcaacatgcaaaa

SEQ ID NO: 18684 - DNA, 120 bp, synthetic construct
  misc_feature 1..120: note = Artificially Synthesized Probe
  source 1..120: mol_type = other DNA
atggcaagtagaatagaggtggccaggaactgaggtgagggggaaatgaagagataatttttaatgagtacagagcttcttctgcttaatataatgaataagttctggaaatggaccgtg

SEQ ID NO: 18685 - DNA, 120 bp, synthetic construct
  misc_feature 1..120: note = Artificially Synthesized Probe
  source 1..120: mol_type = other DNA
atccttattgctatcctgagatgcaggaggacttcctccctcacattcagaaaccagcaattcttctccttgaatattgccaagtaaagttggaattgcagtggaaaatttatttcctgt

SEQ ID NO: 18686 - DNA, 120 bp, synthetic construct
  misc_feature 1..120: note = Artificially Synthesized Probe
  source 1..120: mol_type = other DNA
cagtcatttatactcaaagtagcaatatttgaatattccatacctgaagcctgggattcactactaagcgatatggtacccactattgcaggatacaatatgagatgtggggaatcttga

SEQ ID NO: 18687 - DNA, 120 bp, synthetic construct
  misc_feature 1..120: note = Artificially Synthesized Probe
  source 1..120: mol_type = other DNA
tgtcatcagtgctctgttccactctgtgacttaaatgcagcctagggtcatcctcatctaaaggaatctaagagtgaaagatgaggggaataaataagaaaataactcagaacactactt

SEQ ID NO: 18688 - DNA, 120 bp, synthetic construct
  misc_feature 1..120: note = Artificially Synthesized Probe
  source 1..120: mol_type = other DNA
tcaaaagtttgaagctgaatgtacacagaatacatatactaaacctcattctcttcacagtactgtgcatgtatcagacaccagcttagggagagacttagatacgctgctgtttacagc

SEQ ID NO: 18689 - DNA, 120 bp, synthetic construct
  misc_feature 1..120: note = Artificially Synthesized Probe
  source 1..120: mol_type = other DNA
gcctgtccaagaataccatatattctctctttctcttcctcagttatagtgtctggaagtagattctgaacttcagatttttctctaggcagcagacgaacaccttctccctgactataa

SEQ ID NO: 18690 - DNA, 120 bp, synthetic construct
  misc_feature 1..120: note = Artificially Synthesized Probe
  source 1..120: mol_type = other DNA
acaggggaattatgccttccacaacaggcactcaaacatggacagaatcaactaccctatttgtaaggtatctttgtgttactagcactagcaccagaatgggaaacttgaatctttata

SEQ ID NO: 18691 - DNA, 120 bp, synthetic construct
  misc_feature 1..120: note = Artificially Synthesized Probe
  source 1..120: mol_type = other DNA
tttccattgcatgtgttgactggcctacagaaaaccacaaagtcagaacttagaacctttaaaagcaaatgatggagggaggcacttggattaggaaacaaatatcaacatggtgatgac

SEQ ID NO: 18692 - DNA, 120 bp, synthetic construct
  misc_feature 1..120: note = Artificially Synthesized Probe
  source 1..120: mol_type = other DNA
caatgaagtaaagtcaagtcattcatttcaagaaatttctttttagtttctgaatctttggcaaaaagcctgggccaacgggtagggaaagcaaggaagcagggaaggctaaaccatccc

SEQ ID NO: 18693 - DNA, 120 bp, synthetic construct
  misc_feature 1..120: note = Artificially Synthesized Probe
  source 1..120: mol_type = other DNA
cagcctgccttcttcctcatctttatcttaactctcagcttaaatgttacttccccacaagtctttttctgattcctaggattaaatcaggtgccctcgttatttgctgttccttcttat

SEQ ID NO: 18694 - DNA, 120 bp, synthetic construct
  misc_feature 1..120: note = Artificially Synthesized Probe
  source 1..120: mol_type = other DNA
attctctagccattcatttggagtatttaaaactcaatattcatagcgcattttacgtgacaaagaacttaggttcagaacacaaaaataagtcttatgtcttcattaaaaatgggtgaa

SEQ ID NO: 18695 - DNA, 120 bp, synthetic construct
  misc_feature 1..120: note = Artificially Synthesized Probe
  source 1..120: mol_type = other DNA
aaacctcaataaagcaaaatttaaaaaaagaacacctttaattttctcttacaagaaaaaaaaaccacttacctttaattttctccaacaactgattctggtacatagtataccttaatg

SEQ ID NO: 18696 - DNA, 120 bp, synthetic construct
  misc_feature 1..120: note = Artificially Synthesized Probe
  source 1..120: mol_type = other DNA
tgagattatctcaggttcttccatctgccccatgtacttctcaaatgaaaaactgcctgaaaacagcatgttagatttctggatctactagcttgcccagctacaaatcctatttcaaaa

SEQ ID NO: 18697 - DNA, 120 bp, synthetic construct
  misc_feature 1..120: note = Artificially Synthesized Probe
  source 1..120: mol_type = other DNA
tataagcattactgagagctatataaaaatcatacttcatacaaaattactgtacctcagacccctaaaaagcagttgccttcaaaggccaaaaatcagtaagtcgaggccaggcgtggt

SEQ ID NO: 18698 - DNA, 120 bp, synthetic construct
  misc_feature 1..120: note = Artificially Synthesized Probe
  source 1..120: mol_type = other DNA
cacaatcttgtatctcagtcctggcttctttcactgctggcatccctccgtctctccctttttcacctacttctcttttttcaaagacttcttctctttcatctgcttatatgaaaaata

SEQ ID NO: 18699 - DNA, 120 bp, synthetic construct
  misc_feature 1..120: note = Artificially Synthesized Probe
  source 1..120: mol_type = other DNA
ttccctccagcaacagcttcctatcctcgacttcaagaaaaactcactgaccaaataacttacctcaagcttttcattttcaaatgtctctaccactcaatagtattcaatctagctgct

SEQ ID NO: 18700 - DNA, 120 bp, synthetic construct
  misc_feature 1..120: note = Artificially Synthesized Probe
  source 1..120: mol_type = other DNA
tctctgcccttatatcctactgtttaaggcactcctaaacacagaggcctcccagctatttccagaatactccaagcccaccattctcacatcaggtctagggccaaagggcatcctgat

SEQ ID NO: 18701 - DNA, 120 bp, synthetic construct
  misc_feature 1..120: note = Artificially Synthesized Probe
  source 1..120: mol_type = other DNA
tataacttttgctttatttaaaaatactgaacgctcaccattcagagaatgtttcgggctggcactgttacgcccagcattggctaaggtgagcaccgatttgtcaaagctggagatgca

SEQ ID NO: 18702 - DNA, 120 bp, synthetic construct
  misc_feature 1..120: note = Artificially Synthesized Probe
  source 1..120: mol_type = other DNA
tgtttctcagtgactctcagtatccacaaagatgaagggaagggggtactctattattaagggtataaactgcagccaccttttctgtagagtagcttagcaatagaatatatcataaga

SEQ ID NO: 18703 - DNA, 120 bp, synthetic construct
  misc_feature 1..120: note = Artificially Synthesized Probe
  source 1..120: mol_type = other DNA
atggcaaattttttttttaatattgagtgggaaaaacagatcataaaaccatgtgcctatgtacgctgctgttttggtgaagagtggagaaaacgacatgaaagaaaaaagaattacaaa

SEQ ID NO: 18704 - DNA, 120 bp, synthetic construct
  misc_feature 1..120: note = Artificially Synthesized Probe
  source 1..120: mol_type = other DNA
ttagcagcacatggatgtttgcacccccaccccaaagttacccaaacattcaacctgtgacctctgtaggaacaacacatggagtaaaaagaaagcaaaaattaaatataaataaacagg

SEQ ID NO: 18705 - DNA, 120 bp, synthetic construct
  misc_feature 1..120: note = Artificially Synthesized Probe
  source 1..120: mol_type = other DNA
catgcttttcttattaacagacttaaaatgaatttcaaacacaccacattacctgagataggctggttgttttcatctctgtaagcaagtcaaagccatgtctcactgtcactgcaggct

SEQ ID NO: 18706 - DNA, 120 bp, synthetic construct
  misc_feature 1..120: note = Artificially Synthesized Probe
  source 1..120: mol_type = other DNA
tactctcaaatctttaacaaagatttaagaatccagtatttcttaataaggctttgaaagtattcacatcacaaagcttgagtgagttaccttcaattgtctggaaggtgtcttgagctc

SEQ ID NO: 18707 - DNA, 120 bp, synthetic construct
  misc_feature 1..120: note = Artificially Synthesized Probe
  source 1..120: mol_type = other DNA
cccccaaacatattttctcttcaaaactgcatgtaaagtcaaaagaatcttaaaattatgtttcccagataaaagagtcaaagaaatgccttaccctgttctatgagagttcccatacaa

SEQ ID NO: 18708 - DNA, 120 bp, synthetic construct
  misc_feature 1..120: note = Artificially Synthesized Probe
  source 1..120: mol_type = other DNA
ttcaacaaagagtgagtgcctactatagactaggcactactcttgtccagaattctcactgactgtcacatttgttaaaatgatacattcaacaaaacccacgtaatgtaactgatgggt

SEQ ID NO: 18709 - DNA, 120 bp, synthetic construct
  misc_feature 1..120: note = Artificially Synthesized Probe
  source 1..120: mol_type = other DNA
atgcctgaaagacaaagcacagattatcttttcatctttaatcaaagaaagcaagcaagtccaaagttaaatcaacatacatctttaaaatctatccattaaaaaaaaaaatgttttgtg

SEQ ID NO: 18710 - DNA, 120 bp, synthetic construct
  misc_feature 1..120: note = Artificially Synthesized Probe
  source 1..120: mol_type = other DNA
ttatccttcaaaataggggtatctggacatttttaaattaaaattacagactgcaagggatctagtacactaaacctgggacaaacacttttttatgaagtcagtaaagcctttgcgtgc

SEQ ID NO: 18711 - DNA, 120 bp, synthetic construct
  misc_feature 1..120: note = Artificially Synthesized Probe
  source 1..120: mol_type = other DNA
cagctatggaattatacaaggcaatccaatcaaacaacccagagcacatgtaagcgcaaacatcaagttttacctttttcctcctaaaaactttattccctaattatgtccattactttc

SEQ ID NO: 18712 - DNA, 120 bp, synthetic construct
  misc_feature 1..120: note = Artificially Synthesized Probe
  source 1..120: mol_type = other DNA
atatatataaaatgagatatgtggaggatgggacccaagtctaaacacgaaattcacttatgtttcatagacaccttctattcatagcctgaaggtcattttatgcaatattttaaataa

SEQ ID NO: 18713 - DNA, 120 bp, synthetic construct
  misc_feature 1..120: note = Artificially Synthesized Probe
  source 1..120: mol_type = other DNA
ctgtttgttacacacagtgattctgcagacatcttgacatgacagtgaaatacataaatatgtaatgagaaaaggcttaactgtggataaaacaaagtcattacaattaaagactcaccc

SEQ ID NO: 18714 - DNA, 120 bp, synthetic construct
  misc_feature 1..120: note = Artificially Synthesized Probe
  source 1..120: mol_type = other DNA
tcagaagacatatgcaaacagcagtttaagactgggtttcttaaatctaccaggaaagtctgtggtggatttgactagggggtggttgaaaagccagtcatttttgtttacaaaatatac

SEQ ID NO: 18715 - DNA, 120 bp, synthetic construct
  misc_feature 1..120: note = Artificially Synthesized Probe
  source 1..120: mol_type = other DNA
tatgtacaaatttattatactatgctccctatttttatgtgcttcagaatgtccataataaaagtgaggggaggatatttatggttaagaaattaaaggaggccagccgggcgcggtggc

SEQ ID NO: 18716 - DNA, 120 bp, synthetic construct
  misc_feature 1..120: note = Artificially Synthesized Probe
  source 1..120: mol_type = other DNA
tgtctcaaaaaaaaattgcattaaaaataaaagtaaatagacactaaaatgaaagcacagattataactgatgaatgtactctaagaaaataatataataaagcaaagcccttatttttt

SEQ ID NO: 18717 - DNA, 120 bp, synthetic construct
  misc_feature 1..120: note = Artificially Synthesized Probe
  source 1..120: mol_type = other DNA
atctttatcatgaaatacaccaccacaacagtaatggtattgacagcatgggaatagcctgcccacacatactacaagctagctcttgggcttttgggaatcaatcttttaaaactaaac

SEQ ID NO: 18718 - DNA, 120 bp, synthetic construct
  misc_feature 1..120: note = Artificially Synthesized Probe
  source 1..120: mol_type = other DNA
aattaaatttaaaaaaaaaaaaccaccattctaccattctcaaaggcctaaaagatcctcataaatcaatatacacctatcctataaattatgtcccttttattttatgtctgaagtaat

SEQ ID NO: 18719 - DNA, 120 bp, synthetic construct
  misc_feature 1..120: note = Artificially Synthesized Probe
  source 1..120: mol_type = other DNA
tgatggaggagggacatcttcatccactgattccccagaggccacatggctgaggtcctagatgtgaattcacagcattcttaataagtagtacattgttttaaataaaaaaaaaaaaaa

SEQ ID NO: 18720 - DNA, 120 bp, synthetic construct
  misc_feature 1..120: note = Artificially Synthesized Probe
  source 1..120: mol_type = other DNA
gctttaaacgtgggctgtgaaaaaaagacgttctaggtgtgggggcaaagaaaaaacaacacagaagcgaaacacttccttgcttttctaggaaagagtaaacaaatcagtacagctaaa

SEQ ID NO: 18721 - DNA, 120 bp, synthetic construct
  misc_feature 1..120: note = Artificially Synthesized Probe
  source 1..120: mol_type = other DNA
cacccttggaatcgtataagaaattgtgaaagggtaggggggaaaaaaacaccaaaaaatccaaattaaaaaaaaataagaggcttgttttaagaggtatctggttttcaagcagcatac

SEQ ID NO: 18722 - DNA, 120 bp, synthetic construct
  misc_feature 1..120: note = Artificially Synthesized Probe
  source 1..120: mol_type = other DNA
gaattagttttcttgcattattaaagaaatggtattgatagatggtcactgggggaccactgctcctccccgacagtatttaaataactggtataggctgcaagacttaccagatacctg

SEQ ID NO: 18723 - DNA, 120 bp, synthetic construct
  misc_feature 1..120: note = Artificially Synthesized Probe
  source 1..120: mol_type = other DNA
attaggttcattatttactgactacataaaaaactgaatatgagaccaagaaaaatagattctgtagttttagttaaaaaaaaaaaaaattgacttgtaaatcccaactacctgggaggc

SEQ ID NO: 18724 - DNA, 120 bp, synthetic construct
  misc_feature 1..120: note = Artificially Synthesized Probe
  source 1..120: mol_type = other DNA
ttttcacaagagctgggaaaatgttcataattgtgcatgcagaataagcccgagctggtggcattctgtttagttacaggtaattttctgaatcttccctcaaatttttctcaaacctct

SEQ ID NO: 18725 - DNA, 120 bp, synthetic construct
  misc_feature 1..120: note = Artificially Synthesized Probe
  source 1..120: mol_type = other DNA
tataccatttggaataagaatttggggcacgttagcaaaccaaaaggctcagaaagaagttgtgatatttagttcttgtctccctctacaaatgtgaagcactcttctatccagcattcc

SEQ ID NO: 18726 - DNA, 120 bp, synthetic construct
  misc_feature 1..120: note = Artificially Synthesized Probe
  source 1..120: mol_type = other DNA
ttctatgtttcccttcttcaagctcccctccaaggacatgtgttaagggacaattttcttcccaagtacatcatgcatttttcccccttcattcttacctgcattacagatgaaaaggct

SEQ ID NO: 18727 - DNA, 120 bp, synthetic construct
  misc_feature 1..120: note = Artificially Synthesized Probe
  source 1..120: mol_type = other DNA
ctcttacccaaagaaggaaactcctttttacctctattctccaagcagtttcaaattctctagtttacaaaaactaattttattcattcatgcctgcatcaagagtttatgccattccat

SEQ ID NO: 18728 - DNA, 120 bp, synthetic construct
  misc_feature 1..120: note = Artificially Synthesized Probe
  source 1..120: mol_type = other DNA
tgtcttcccctccaaattctaattcaacagtactttagtttctttattattcccactccccaatgagcatgtatcaggaatgtcatgtttcctttcagactatgaaagaaattcacccac

SEQ ID NO: 18729 - DNA, 120 bp, synthetic construct
  misc_feature 1..120: note = Artificially Synthesized Probe
  source 1..120: mol_type = other DNA
aaattctttcaactgctttacagtagccaatcttcggtctctgtcgtcttcccgggtgatcctccgaagaagattcgacagtcgagactcatcagaataagacatcgatctctctgtgaa

SEQ ID NO: 18730 - DNA, 120 bp, synthetic construct
  misc_feature 1..120: note = Artificially Synthesized Probe
  source 1..120: mol_type = other DNA
gtcaataaaagctcagggaatataggtcctatcactcttttgttcatctctatattccagatcccagcagagtacctggcaaataacagaccctcaaaaaaatatttgctgaaggaaaca

SEQ ID NO: 18731 - DNA, 120 bp, synthetic construct
  misc_feature 1..120: note = Artificially Synthesized Probe
  source 1..120: mol_type = other DNA
actgtgctatttaccataattagccaatacatacgtaaacaacaaatcacaaagggtctgacagtttcatttctaaggtatgagaaaacattggtaaaaaaagaaaccagaaggctgggc

SEQ ID NO: 18732 - DNA, 120 bp, synthetic construct
  misc_feature 1..120: note = Artificially Synthesized Probe
  source 1..120: mol_type = other DNA
agccactgcacctggccaatcctctgaacttccaaggcactcacctatacagtgaggctacatcataaggcagaaatgctatcagtgtatttaactttagaaaagtgcccactctaggca

SEQ ID NO: 18733 - DNA, 120 bp, synthetic construct
  misc_feature 1..120: note = Artificially Synthesized Probe
  source 1..120: mol_type = other DNA
cttttctgtaagatcttatccagtcttctaatcttgttttaagaggcttctcttttaaaatgtactataacctttctagtgggaaatgaatgtaaacaatttttacctgcacagtaggct

SEQ ID NO: 18734 - DNA, 120 bp, synthetic construct
  misc_feature 1..120: note = Artificially Synthesized Probe
  source 1..120: mol_type = other DNA
taacactgcatttgttattcatattttaaatatattagaagaaagcaagaaagttgggggtataagaaggcaggaaggtgagacaggtaggttcaaaaaacatgcttgtagcaataagaa

SEQ ID NO: 18735 - DNA, 120 bp, synthetic construct
  misc_feature 1..120: note = Artificially Synthesized Probe
  source 1..120: mol_type = other DNA
aactatcaagaaagaagacaacaaaataatctattatagcatacgaaaaatccaagtaagttcttcccctactgattttctcctgagaggaacaactttgagaaaaaaaaaaaaaagaaa

SEQ ID NO: 18736 - DNA, 120 bp, synthetic construct
  misc_feature 1..120: note = Artificially Synthesized Probe
  source 1..120: mol_type = other DNA
aatatagagcaacttaaatacttcactgaagaaaccgggtaatctgttgctaccaacaatgtgtttccaactacgaagcatctgatttcaaactaaactgtaaaaccaggagccgcttcc

SEQ ID NO: 18737 - DNA, 120 bp, synthetic construct
  misc_feature 1..120: note = Artificially Synthesized Probe
  source 1..120: mol_type = other DNA
atttccccacaacgatcaaactgaagttaaagcctgatgtacatgccacatgagaggtaagtttctaaagctcatacctcaaaaatcgcatactgtataatatggagcctttgtgatgtt

SEQ ID NO: 18738 - DNA, 120 bp, synthetic construct
  misc_feature 1..120: note = Artificially Synthesized Probe
  source 1..120: mol_type = other DNA
attcaaggttttcccctgtaatgcctcttacctggattcaaacatgctttaatgaggaataagagaaagggtgaaactatgaataaccctgggccttgtatcattacattaaaaacactg

SEQ ID NO: 18739 - DNA, 120 bp, synthetic construct
  misc_feature 1..120: note = Artificially Synthesized Probe
  source 1..120: mol_type = other DNA
aaccatggaaccccagtaaaaactttggacataaaaaacagagtgagcttccctggtaggcaataattcatgagtattgtcgcacaccagtgccaccaggaaggtatcatttttcacaac

SEQ ID NO: 18740 - DNA, 120 bp, synthetic construct
  misc_feature 1..120: note = Artificially Synthesized Probe
  source 1..120: mol_type = other DNA
tattttccttccaaggaacctctaatattctctattttcagacctccaatcaaattagccagaaggagcaaacgaagccagtaactccaggagggcagtagatctgattttaacctttgt

SEQ ID NO: 18741 - DNA, 120 bp, synthetic construct
  misc_feature 1..120: note = Artificially Synthesized Probe
  source 1..120: mol_type = other DNA
taatatatccacaaattcacctgcatctgcacatacagcttttcttcccatcatcttcgcataatggaacaaataaacctcctatccatagagatcatctggatctgtctattcccccca

SEQ ID NO: 18742 - DNA, 120 bp, synthetic construct
  misc_feature 1..120: note = Artificially Synthesized Probe
  source 1..120: mol_type = other DNA
attccagcctgggcaacagagagactccatctcaaaaaacaataataataataaaataaatctaaaaattaagaaaataaggccgggcacggtggcttacgcctgtaatcccagcacttt

SEQ ID NO: 18743 - DNA, 120 bp, synthetic construct
  misc_feature 1..120: note = Artificially Synthesized Probe
  source 1..120: mol_type = other DNA
ttcaacaacactcttgcctatacccttaactcttaaggttttcatcacacccatctggtaaaaccccagtcctggataaactcaatgatccatcaacaagcaccatactcccaggtcctc

SEQ ID NO: 18744 - DNA, 120 bp, synthetic construct
  misc_feature 1..120: note = Artificially Synthesized Probe
  source 1..120: mol_type = other DNA
atgtatcccatttaaaaatacaaaaacatataaaaaggaaaaactccatcaatcccacatgtccctccatcaaacaatctgcctttacttgctgcagccaaactaaagttgtctagactc

SEQ ID NO: 18745 - DNA, 120 bp, synthetic construct
  misc_feature 1..120: note = Artificially Synthesized Probe
  source 1..120: mol_type = other DNA
aaaaaaaaaaaagagaccctacttcagctctcaattgcatcacttatcttccccttttgtcagtaagtcctggaagtaccctagaaacatatcatttggcctgggaaattgccaagattg

SEQ ID NO: 18746 - DNA, 120 bp, synthetic construct
  misc_feature 1..120: note = Artificially Synthesized Probe
  source 1..120: mol_type = other DNA
ataaagttcctttagccaacaggttgaagcacattcccagggaatgacatgtttataagattttctaacaattacatatgttaaatcttctctttaaaaataatcctggccaggcacggt

SEQ ID NO: 18747 - DNA, 120 bp, synthetic construct
  misc_feature 1..120: note = Artificially Synthesized Probe
  source 1..120: mol_type = other DNA
gaggtctcaagtaattccagaagatatggtctcacaaatcaaatactgaaaaaggaagatgcctttcaagataatcacactattaactgtaggaaaatgtattaaatgaagacagctttt

SEQ ID NO: 18748 - DNA, 120 bp, synthetic construct
  misc_feature 1..120: note = Artificially Synthesized Probe
  source 1..120: mol_type = other DNA
tttgcttagaagatgcgtgtggttcttctccaccccctcaagtacttaaaactatcacattggcagaatacaacctttcaatgtttctggcatcctccctcctcccattaaaaaataaaa

SEQ ID NO: 18749 - DNA, 120 bp, synthetic construct
  misc_feature 1..120: note = Artificially Synthesized Probe
  source 1..120: mol_type = other DNA
tgtcttcccattcttagtccacagcttttttcatgacaccagcctctccctaagataaatatctgtgaaggattaactttttaaaatacacacattctagctaggcacgggggctcactt

SEQ ID NO: 18750 - DNA, 120 bp, synthetic construct
  misc_feature 1..120: note = Artificially Synthesized Probe
  source 1..120: mol_type = other DNA
gaacttccactattaaaatcaaattagggcctggaaattaagtgttaacacttcagacaagaaattccagggtttgtatcatcaggaatataaaccagggacaccctcaagaggctgaag

SEQ ID NO: 18751 - DNA, 120 bp, synthetic construct
  misc_feature 1..120: note = Artificially Synthesized Probe
  source 1..120: mol_type = other DNA
aaaaatctagtgtctccccttaataaacaaagaatgagcataacttaggaagttcggtaacaaaaacaatctataattctggtaccagaaatccctctgaggctgggcgaggtggtttac

SEQ ID NO: 18752 - DNA, 120 bp, synthetic construct
  misc_feature 1..120: note = Artificially Synthesized Probe
  source 1..120: mol_type = other DNA
ggcacgcaactgacaagaagtgtgtttccccaggcattctaatgggatgccagaaggctcaacccagtgcttaaatttttagtgattacattgcttaaataatgtagacagatacaatag

SEQ ID NO: 18753 - DNA, 120 bp, synthetic construct
  misc_feature 1..120: note = Artificially Synthesized Probe
  source 1..120: mol_type = other DNA
ccagatccatgcacatatgcaggttgtattttactggagatggcacacataaaaattccagatagtggtaaggatatgaaaaaaacgtggcaggaatgggtgtcatagtgaaaaagtcac

SEQ ID NO: 18754 - DNA, 120 bp, synthetic construct
  misc_feature 1..120: note = Artificially Synthesized Probe
  source 1..120: mol_type = other DNA
aggagcctcagggatttgttttaggcgattaggataaggaacaagagtcaggtaacaaaggcagaaaatcctaaagaattgtaacaattcaatgttcccaaaagacaccatggaccacac

SEQ ID NO: 18755 - DNA, 120 bp, synthetic construct
  misc_feature 1..120: note = Artificially Synthesized Probe
  source 1..120: mol_type = other DNA
cgcccagcccacacactttttcaagaagcaactagatttaatcttcctaaattgtgccactctcccgcagctaatatgattccctaaagtcactccaaatacacttgaactgggccaggg

SEQ ID NO: 18756 - DNA, 120 bp, synthetic construct
  misc_feature 1..120: note = Artificially Synthesized Probe
  source 1..120: mol_type = other DNA
tgagaattgtatcacaaaatccacatgctctcccctttacaaagccctttacttttctcccataataacttatagcctccttgaagacagtggttttacaagtcataaaaatcctggccg

SEQ ID NO: 18757 - DNA, 120 bp, synthetic construct
  misc_feature 1..120: note = Artificially Synthesized Probe
  source 1..120: mol_type = other DNA
tatttactgaattagagtatttcattacctgttataaaaaacaaacaaaccttccattatactaatttgtaaaggaatcaaaacaaaaggggttgggggggtccaggcacggtgtctcac

SEQ ID NO: 18758 - DNA, 120 bp, synthetic construct
  misc_feature 1..120: note = Artificially Synthesized Probe
  source 1..120: mol_type = other DNA
tttcagaaaaagagagaggaagccaggcatggtggctcacgtctgtaatcccagcactttgggaggccgaagccggtggatcacctgaggtcagcagttcaagaccagcctggccaacat

SEQ ID NO: 18759 - DNA, 120 bp, synthetic construct
  misc_feature 1..120: note = Artificially Synthesized Probe
  source 1..120: mol_type = other DNA
tctaatttcacaacacatttccatttcttggtctttcacaacagagaagatgtgtgtacttttgaatactttaatctgtctacaatctaccaaaattggaaggtctttttattatacagt

SEQ ID NO: 18760 - DNA, 120 bp, synthetic construct
  misc_feature 1..120: note = Artificially Synthesized Probe
  source 1..120: mol_type = other DNA
agaccctgttctcaaaaaaatttacagaagagttgactgggagcacagtgaatgaaaaggaagactataagccagtgccatataaatgcttactgttggaggtatgcttctatggaacac

SEQ ID NO: 18761 - DNA, 120 bp, synthetic construct
  misc_feature 1..120: note = Artificially Synthesized Probe
  source 1..120: mol_type = other DNA
caggaaggaaaaaaaaaaggcctacatcaaggaaaacagaaccaaaacaccagggacaaaatggtacataagaggcaaaaaaaaattaatcaaaattattcagatgaaccataataaatg

SEQ ID NO: 18762 - DNA, 120 bp, synthetic construct
  misc_feature 1..120: note = Artificially Synthesized Probe
  source 1..120: mol_type = other DNA
ttacatgtaactatcaggaaacaaaagggcttcccaacaacttgcgcgttctacattatttggccagtttctggacaattataacaattgtgctccaaagtaggagagttccatgaatca

SEQ ID NO: 18763 - DNA, 120 bp, synthetic construct
  misc_feature 1..120: note = Artificially Synthesized Probe
  source 1..120: mol_type = other DNA
ttgtttttttcaatattaacacgtgggggtcacagaaaggaacagaggttagaagagctctcacgtggcggctgaaagagtggggaaccgagaaagtgaatgagtaacagggagggtcct

SEQ ID NO: 18764 - DNA, 120 bp, synthetic construct
  misc_feature 1..120: note = Artificially Synthesized Probe
  source 1..120: mol_type = other DNA
cattaggccagggtgaagcaggggaaccacttaggagtctgttaagatgatctgaacttcagaacaagatgttattaacagagtgaaagtatttggattctgggtatattttgaaatcgg

SEQ ID NO: 18765 - DNA, 120 bp, synthetic construct
  misc_feature 1..120: note = Artificially Synthesized Probe
  source 1..120: mol_type = other DNA
gtgagccaccacgaaattttattataaatggagggtagagaaattgggcaataaatggagggggaagtgagttaagaggaattttaattatgtgtgtgtggttttaaaagaggggggtct

SEQ ID NO: 18766 - DNA, 120 bp, synthetic construct
  misc_feature 1..120: note = Artificially Synthesized Probe
  source 1..120: mol_type = other DNA
gcacccacagagtaaatggagagttgaaattaatgcagttgtgattttaccacgtggatatgaagaagtgagggggagaagtacaaaggagttctcttaatgattgaccatggaatttaa

SEQ ID NO: 18767 - DNA, 120 bp, synthetic construct
  misc_feature 1..120: note = Artificially Synthesized Probe
  source 1..120: mol_type = other DNA
cctagaaggtgatggttaagagagtgggattcttgaaactgcatttatggagaggttgtggttattggttataataaataaatacagttgaagtgagtgagtagctgagatttggggatg

SEQ ID NO: 18768 - DNA, 120 bp, synthetic construct
  misc_feature 1..120: note = Artificially Synthesized Probe
  source 1..120: mol_type = other DNA
gagaaaagaggaaacatctatcatttgagatggctgcgaaaggaaaaggcatcctcagggagctagattttacttagagcaagaaatgaagggatgattcagaggttaaaagagtggatt

SEQ ID NO: 18769 - DNA, 120 bp, synthetic construct
  misc_feature 1..120: note = Artificially Synthesized Probe
  source 1..120: mol_type = other DNA
tctttttttcatgtagtctcatgaagatttctttatgtggtttcaatgtgtgggctggtttggatttccttatagcatggtggcctcagttggattgctgttttgtgatccttttcatcc

SEQ ID NO: 18770 - DNA, 120 bp, synthetic construct
  misc_feature 1..120: note = Artificially Synthesized Probe
  source 1..120: mol_type = other DNA
aatcttaattttgctgaaatctaatttttcagttttttctttgatggttttgagagaggaggtaaaaaaagactaggtaagccgatagttagacagagtcctcggtagaacttcccttct

SEQ ID NO: 18771 - DNA, 120 bp, synthetic construct
  misc_feature 1..120: note = Artificially Synthesized Probe
  source 1..120: mol_type = other DNA
ttgatttcctcagcgtgagaccaagaacctcgggtgccaccccaggcaacaaggccatttcagtttgttcttttgttataggcaatccatgatcacagatttttctctcttttttttttt

SEQ ID NO: 18772 - DNA, 120 bp, synthetic construct
  misc_feature 1..120: note = Artificially Synthesized Probe
  source 1..120: mol_type = other DNA
tgaaacctgtcttagctacttctggtttacagtcttaaagttagataatgtaaattgtccagctttggtttatttttgtccttagtagttccatataaattttagaatcagcttttcaat

SEQ ID NO: 18773 - DNA, 120 bp, synthetic construct
  misc_feature 1..120: note = Artificially Synthesized Probe
  source 1..120: mol_type = other DNA
cttctgtcgctttgttttctgttcgttttgaaattacttgtttcctggtctggcaataacagttgagatatgaggagtttgagctgccatctgtctatgtatcttgctttaagactgcac

SEQ ID NO: 18774 - DNA, 120 bp, synthetic construct
  misc_feature 1..120: note = Artificially Synthesized Probe
  source 1..120: mol_type = other DNA
aggctgggattattaagtactttttatcatacagcaagattgacattttatattggaatacatttgtctctatataacggagattaacaggaaaatgacaagcctgggtgcggtggctca

SEQ ID NO: 18775 - DNA, 120 bp, synthetic construct
  misc_feature 1..120: note = Artificially Synthesized Probe
  source 1..120: mol_type = other DNA
tagtgttatttttgcttccatgccttttttgttgttgttcatgctcttacttggaatgcgttctattttgtctacctatgcacatcctgttgggttttttttttttttgggggttttttt

SEQ ID NO: 18776 - DNA, 120 bp, synthetic construct
  misc_feature 1..120: note = Artificially Synthesized Probe
  source 1..120: mol_type = other DNA
ttgttttttgttttgtcttgtgtgatagtcttaaatccctagttagataataactggagagtaccatgtttctatatatctctcagtgacttgcacagtgctagcagatagtgctaaaaa

SEQ ID NO: 18777 - DNA, 120 bp, synthetic construct
  misc_feature 1..120: note = Artificially Synthesized Probe
  source 1..120: mol_type = other DNA
ttggatcataggttctgaggtcagaacagcattcccgtagtctagatgaagtcaagttttatctgatcttaattgaaataaatatagctggccttgaacaaatctactcatggtatgtgg

SEQ ID NO: 18778 - DNA, 120 bp, synthetic construct
  misc_feature 1..120: note = Artificially Synthesized Probe
  source 1..120: mol_type = other DNA
aagtgttcctattgggtaggaatatacagttcttttaggaaatgtagtatggttctgtgtctcaaacaggacacttacacagttggccaacatcatcaccttctccattctctgagatgt

SEQ ID NO: 18779 - DNA, 120 bp, synthetic construct
  misc_feature 1..120: note = Artificially Synthesized Probe
  source 1..120: mol_type = other DNA
tggggctcgatgtgggatgggttggtgatattgcagggagaagtaatctgagtaaaggaggaaaagaactgatttgggaaaacgatagttttagtagtgagtttgagtatgaattaagtt

SEQ ID NO: 18780 - DNA, 120 bp, synthetic construct
  misc_feature 1..120: note = Artificially Synthesized Probe
  source 1..120: mol_type = other DNA
gacggagccttgagactagcttatagtagtaactgggttatgtcgtgacttttattctgtgcaccaccctgtaacatgtacatttttattcctattttcgtagcatgctctaaagaatgg

SEQ ID NO: 18781 - DNA, 120 bp, synthetic construct
  misc_feature 1..120: note = Artificially Synthesized Probe
  source 1..120: mol_type = other DNA
ttgcatttacccagctaccattgcttcaattgattttaagagagaaacctgtgttgtggtttacactggatatggaaatagagaggagcaaaatctgtccgatctactttccccaatctg

SEQ ID NO: 18782 - DNA, 120 bp, synthetic construct
  misc_feature 1..120: note = Artificially Synthesized Probe
  source 1..120: mol_type = other DNA
actttatatgaaagatttatccagttaacttttgtggagtattaggtattagactaataattagcacacttacttaagttagaaagtataataatgcgccggacgcggtagctcacgcct

SEQ ID NO: 18783 - DNA, 120 bp, synthetic construct
  misc_feature 1..120: note = Artificially Synthesized Probe
  source 1..120: mol_type = other DNA
ttggttttgagtcctttttattcctatcatattgaaattggtaagttaattttcctttgaaatattccttatagccaggtctaaaattcaatggcccaccaccgccaccgccaccaccac

SEQ ID NO: 18784 - DNA, 120 bp, synthetic construct
  misc_feature 1..120: note = Artificially Synthesized Probe
  source 1..120: mol_type = other DNA
gctgccgcacccagctgtaaactggatttctaatggtagatttttaggtattaacaatagataaaaagatactttttggcatactgtgtattgggatggggttagaacaggtgttctacc

SEQ ID NO: 18785 - DNA, 120 bp, synthetic construct
  misc_feature 1..120: note = Artificially Synthesized Probe
  source 1..120: mol_type = other DNA
caccacctcccatatgtccagattctcttgatgatgctgatgctttgggaagtatgttaatttcatggtacatgagtggctatcatactggctattatatggtaagtaatcactcagcat

SEQ ID NO: 18786 - DNA, 120 bp, synthetic construct
  misc_feature 1..120: note = Artificially Synthesized Probe
  source 1..120: mol_type = other DNA
tcttgtgccctgctaaaattatgatgtgatattgtaggcacttgtatttttagtaaattaatatagaagaaacaactgacttaaaggtgtatgtttttaaatgtatcatctgtgtgtgcc

SEQ ID NO: 18787 - DNA, 120 bp, synthetic construct
  misc_feature 1..120: note = Artificially Synthesized Probe
  source 1..120: mol_type = other DNA
aaaaatacataatgtatatataaagtattggtataatttatgttctaaataactttcttgagaaataattcacatggtgtgcagtttacctttgaaagtatacaagttggctgggcacaa

SEQ ID NO: 18788 - DNA, 120 bp, synthetic construct
  misc_feature 1..120: note = Artificially Synthesized Probe
  source 1..120: mol_type = other DNA
cgtcattgccttaagctaacaattcttaacctttgttctactgaagccacgtggttgagataggctctgagtctagcttttaacctctatctttttgtcttagaaatctaagcagaatgc

SEQ ID NO: 18789 - DNA, 120 bp, synthetic construct
  misc_feature 1..120: note = Artificially Synthesized Probe
  source 1..120: mol_type = other DNA
ttgcaccattgcactccagcctgggcaacaagagcgaaactccgtctcaaaaaaaaaaggaagaaaaatatttttttaaattaattagtttatttattttttaagatggagttttgccct

SEQ ID NO: 18790 - DNA, 120 bp, synthetic construct
  misc_feature 1..120: note = Artificially Synthesized Probe
  source 1..120: mol_type = other DNA
tgggttcaagtgattctcctgcctcagcctcccaagtagctgggattagaggtccccaccaccatgcctggctaattttttgtactttcagtagaaatggggttttgccatgttggccag

SEQ ID NO: 18791 - DNA, 120 bp, synthetic construct
  misc_feature 1..120: note = Artificially Synthesized Probe
  source 1..120: mol_type = other DNA
ttttttattgtgatatgggataacctaggcatactgcactgtacactctgacatatgaagtgctctagtcaagtttaactggtgtccacagaggacatggtttaactggaattcgtcaag

SEQ ID NO: 18792 - DNA, 120 bp, synthetic construct
  misc_feature 1..120: note = Artificially Synthesized Probe
  source 1..120: mol_type = other DNA
ctttcattagagaaaaggtagtacatcttattcttcatggtgtctacaatatctggcagtttttggaagtcaagcgtgagcttagagcatagactggtgggattgtcaaagaagagggca

SEQ ID NO: 18793 - DNA, 120 bp, synthetic construct
  misc_feature 1..120: note = Artificially Synthesized Probe
  source 1..120: mol_type = other DNA
gccagggtgaagcaggggaaccacttaggagtctgttaagatgatctgaacttcagaacaagatgttattaacagagtgaaagtatttggattctgggtatattttgaaatcggaggcaa

SEQ ID NO: 18794 - DNA, 120 bp, synthetic construct
  misc_feature 1..120: note = Artificially Synthesized Probe
  source 1..120: mol_type = other DNA
aggagtgagccaccacgaaattttattataaatggagggtagagaaattgggcaataaatggagggggaagtgagttaagaggaattttaattatgtgtgtgtggttttaaaagaggggg

SEQ ID NO: 18795 - DNA, 120 bp, synthetic construct
  misc_feature 1..120: note = Artificially Synthesized Probe
  source 1..120: mol_type = other DNA
gattgtgtatgagggcacccacagagtaaatggagagttgaaattaatgcagttgtgattttaccacgtggatatgaagaagtgagggggagaagtacaaaggagttctcttaatgattg

SEQ ID NO: 18796 - DNA, 120 bp, synthetic construct
  misc_feature 1..120: note = Artificially Synthesized Probe
  source 1..120: mol_type = other DNA
aaaaaaaaaaaaaaaagtgggaggatcaatgtactgccagtcctaatgaagtggaatgattgtccccatcaaatcactagtaggagtaagttgcagagcctagaaggtgatggttaagag

SEQ ID NO: 18797 - DNA, 120 bp, synthetic construct
  misc_feature 1..120: note = Artificially Synthesized Probe
  source 1..120: mol_type = other DNA
atttgagatggctgcgaaaggaaaaggcatcctcagggagctagattttacttagagcaagaaatgaagggatgattcagaggttaaaagagtggattttatgaattactcaagggagca

SEQ ID NO: 18798 - DNA, 120 bp, synthetic construct
  misc_feature 1..120: note = Artificially Synthesized Probe
  source 1..120: mol_type = other DNA
aggctatctctttttttcatgtagtctcatgaagatttctttatgtggtttcaatgtgtgggctggtttggatttccttatagcatggtggcctcagttggattgctgttttgtgatcct

SEQ ID NO: 18799 - DNA, 120 bp, synthetic construct
  misc_feature 1..120: note = Artificially Synthesized Probe
  source 1..120: mol_type = other DNA
tcttaattttgctgaaatctaatttttcagttttttctttgatggttttgagagaggaggtaaaaaaagactaggtaagccgatagttagacagagtcctcggtagaacttcccttctaa

SEQ ID NO: 18800 - DNA, 120 bp, synthetic construct
  misc_feature 1..120: note = Artificially Synthesized Probe
  source 1..120: mol_type = other DNA
agatggcaacacctggtcctaactggttttttgctccctatgtgtagataagctacccccttcccattagctcatttataaaaatgcttgcatttcactgtggaatgggaactcttttca

SEQ ID NO: 18801 - DNA, 120 bp, synthetic construct
  misc_feature 1..120: note = Artificially Synthesized Probe
  source 1..120: mol_type = other DNA
tcttaaagttagataatgtaaattgtccagctttggtttatttttgtccttagtagttccatataaattttagaatcagcttttcaatttaatacactactttcctcttagatccacaat

SEQ ID NO: 18802 - DNA, 120 bp, synthetic construct
  misc_feature 1..120: note = Artificially Synthesized Probe
  source 1..120: mol_type = other DNA
tctgtcgctttgttttctgttcgttttgaaattacttgtttcctggtctggcaataacagttgagatatgaggagtttgagctgccatctgtctatgtatcttgctttaagactgcactc

SEQ ID NO: 18803 - DNA, 120 bp, synthetic construct
  misc_feature 1..120: note = Artificially Synthesized Probe
  source 1..120: mol_type = other DNA
tgttgcccaggctgggattattaagtactttttatcatacagcaagattgacattttatattggaatacatttgtctctatataacggagattaacaggaaaatgacaagcctgggtgcg

SEQ ID NO: 18804 - DNA, 120 bp, synthetic construct
  misc_feature 1..120: note = Artificially Synthesized Probe
  source 1..120: mol_type = other DNA
cttatagttagtgttatttttgcttccatgccttttttgttgttgttcatgctcttacttggaatgcgttctattttgtctacctatgcacatcctgttgggttttttttttttttgggg

SEQ ID NO: 18805 - DNA, 120 bp, synthetic construct
  misc_feature 1..120: note = Artificially Synthesized Probe
  source 1..120: mol_type = other DNA
gttttttgttttgtcttgtgtgatagtcttaaatccctagttagataataactggagagtaccatgtttctatatatctctcagtgacttgcacagtgctagcagatagtgctaaaaaat

SEQ ID NO: 18806 - DNA, 120 bp, synthetic construct
  misc_feature 1..120: note = Artificially Synthesized Probe
  source 1..120: mol_type = other DNA
ggatcataggttctgaggtcagaacagcattcccgtagtctagatgaagtcaagttttatctgatcttaattgaaataaatatagctggccttgaacaaatctactcatggtatgtggat

SEQ ID NO: 18807 - DNA, 120 bp, synthetic construct
  misc_feature 1..120: note = Artificially Synthesized Probe
  source 1..120: mol_type = other DNA
gtgttcctattgggtaggaatatacagttcttttaggaaatgtagtatggttctgtgtctcaaacaggacacttacacagttggccaacatcatcaccttctccattctctgagatgttt

SEQ ID NO: 18808 - DNA, 120 bp, synthetic construct
  misc_feature 1..120: note = Artificially Synthesized Probe
  source 1..120: mol_type = other DNA
gggctcgatgtgggatgggttggtgatattgcagggagaagtaatctgagtaaaggaggaaaagaactgatttgggaaaacgatagttttagtagtgagtttgagtatgaattaagttga

SEQ ID NO: 18809 - DNA, 120 bp, synthetic construct
  misc_feature 1..120: note = Artificially Synthesized Probe
  source 1..120: mol_type = other DNA
cggagccttgagactagcttatagtagtaactgggttatgtcgtgacttttattctgtgcaccaccctgtaacatgtacatttttattcctattttcgtagcatgctctaaagaatggtg

SEQ ID NO: 18810 - DNA, 120 bp, synthetic construct
  misc_feature 1..120: note = Artificially Synthesized Probe
  source 1..120: mol_type = other DNA
agctaccattgcttcaattgattttaagagagaaacctgtgttgtggtttacactggatatggaaatagagaggagcaaaatctgtccgatctactttccccaatctgtgaagtagctaa

SEQ ID NO: 18811 - DNA, 120 bp, synthetic construct
  misc_feature 1..120: note = Artificially Synthesized Probe
  source 1..120: mol_type = other DNA
tcaactctaaaaagatttttattataggttagattatgtcatggaaccttaaggcttgtccctttctagttcttttgtgtaaagcggtgatttcttccatggagggaatggtatttaggc

SEQ ID NO: 18812 - DNA, 120 bp, synthetic construct
  misc_feature 1..120: note = Artificially Synthesized Probe
  source 1..120: mol_type = other DNA
caccaccaccaccccacttactatcatgctggctgcctccatttccttctggaccaccagtaagtaaaaaagagtataggttagattttgctttcacatacaatttgataattagcagaa

SEQ ID NO: 18813 - DNA, 120 bp, synthetic construct
  misc_feature 1..120: note = Artificially Synthesized Probe
  source 1..120: mol_type = other DNA
ctgccgcacccagctgtaaactggatttctaatggtagatttttaggtattaacaatagataaaaagatactttttggcatactgtgtattgggatggggttagaacaggtgttctaccc

SEQ ID NO: 18814 - DNA, 120 bp, synthetic construct
  misc_feature 1..120: note = Artificially Synthesized Probe
  source 1..120: mol_type = other DNA
cacctcccatatgtccagattctcttgatgatgctgatgctttgggaagtatgttaatttcatggtacatgagtggctatcatactggctattatatggtaagtaatcactcagcatctt

SEQ ID NO: 18815 - DNA, 120 bp, synthetic construct
  misc_feature 1..120: note = Artificially Synthesized Probe
  source 1..120: mol_type = other DNA
tgtgccctgctaaaattatgatgtgatattgtaggcacttgtatttttagtaaattaatatagaagaaacaactgacttaaaggtgtatgtttttaaatgtatcatctgtgtgtgccccc

SEQ ID NO: 18816 - DNA, 120 bp, synthetic construct
  misc_feature 1..120: note = Artificially Synthesized Probe
  source 1..120: mol_type = other DNA
aatacataatgtatatataaagtattggtataatttatgttctaaataactttcttgagaaataattcacatggtgtgcagtttacctttgaaagtatacaagttggctgggcacaatgg

SEQ ID NO: 18817 - DNA, 120 bp, synthetic construct
  misc_feature 1..120: note = Artificially Synthesized Probe
  source 1..120: mol_type = other DNA
tgcacctggccttaagtgtttttaatacgtcattgccttaagctaacaattcttaacctttgttctactgaagccacgtggttgagataggctctgagtctagcttttaacctctatctt

SEQ ID NO: 18818 - DNA, 120 bp, synthetic construct
  misc_feature 1..120: note = Artificially Synthesized Probe
  source 1..120: mol_type = other DNA
gcgaaactccgtctcaaaaaaaaaaggaagaaaaatatttttttaaattaattagtttatttattttttaagatggagttttgccctgtcacccaggctggggtgcaatggtgcaatctc

SEQ ID NO: 18819 - DNA, 120 bp, synthetic construct
  misc_feature 1..120: note = Artificially Synthesized Probe
  source 1..120: mol_type = other DNA
taggcatgagccactgcaagaaaaccttaactgcagcctaataattgttttctttgggataacttttaaagtacattaaaagactatcaacttaatttctgatcatattttgttgaataa

SEQ ID NO: 18820 - DNA, 120 bp, synthetic construct
  misc_feature 1..120: note = Artificially Synthesized Probe
  source 1..120: mol_type = other DNA
tctaatttctcatttgcaggaaatgctggcatagagcagcactaaatgacaccactaaagaaacgatcagacagatctggaatgtgaagcgttatagaagataactggcctcatttcttc

SEQ ID NO: 18821 - DNA, 120 bp, synthetic construct
  misc_feature 1..120: note = Artificially Synthesized Probe
  source 1..120: mol_type = other DNA
tctgtatttcctctttcattagagaaaaggtagtacatcttattcttcatggtgtctacaatatctggcagtttttggaagtcaagcgtgagcttagagcatagactggtgggattgtca

SEQ ID NO: 18822 - DNA, 120 bp, synthetic construct
  misc_feature 1..120: note = Artificially Synthesized Probe
  source 1..120: mol_type = other DNA
tcgcctgccggcgaggctggagcaggtaggacgcagcgtgcgcgcctgggacccggctgggatgggcttctggggaccctgcccgccggggtcctgctgcggctgcgacgggctcctcgg

SEQ ID NO: 18823 - DNA, 120 bp, synthetic construct
  misc_feature 1..120: note = Artificially Synthesized Probe
  source 1..120: mol_type = other DNA
acagccgtcttttttaagtggccggggacttgtcctaaaggtgtttattgtattgaaaataaagatggttgaaataagctgtggtcggttctgcctttcagcaaatttaaaacagtcatg

SEQ ID NO: 18824 - DNA, 120 bp, synthetic construct
  misc_feature 1..120: note = Artificially Synthesized Probe
  source 1..120: mol_type = other DNA
agtctagaaaatcaagaagtagttgagttacaaagtaactgaggcaggcctgaaatctgactggtcgctgggagatgtgagatgtgcaggatttttcagtgtgctcatctcttttcaaat

SEQ ID NO: 18825 - DNA, 120 bp, synthetic construct
  misc_feature 1..120: note = Artificially Synthesized Probe
  source 1..120: mol_type = other DNA
aatggcattcttaagtgtgtccaatgcgctcttaatttggatgcaggtcaatttcttccttgaagaaggaggtacattgaatgccacaccgtgcccattttcctttttatttctgtgaat

SEQ ID NO: 18826 - DNA, 120 bp, synthetic construct
  misc_feature 1..120: note = Artificially Synthesized Probe
  source 1..120: mol_type = other DNA
tgtggtttggaatgcgtacctcatcctgttttgatatagttctcactcagccttggatcttcaagggaattactgtgattttttttcctttcttcttccattgcaaatgccttgagtcca

SEQ ID NO: 18827 - DNA, 120 bp, synthetic construct
  misc_feature 1..120: note = Artificially Synthesized Probe
  source 1..120: mol_type = other DNA
gaggagaaaattaaagaaatagtctttagaactgccagcccttatgtttctccaattgatggcattgagtaatagagcaagatcccagcattagtcattgtgtgtctgtaacatatgtac

SEQ ID NO: 18828 - DNA, 120 bp, synthetic construct
  misc_feature 1..120: note = Artificially Synthesized Probe
  source 1..120: mol_type = other DNA
acatttttggggggaaaggggtaggcaaactcttaacatttgaggttcttagaaaagagtcttccaataataacaaagtttctgaaggtggaagagttgtaggtaaacacgatggcctgt

SEQ ID NO: 18829 - DNA, 120 bp, synthetic construct
  misc_feature 1..120: note = Artificially Synthesized Probe
  source 1..120: mol_type = other DNA
tgctggctaccctgtctccactgaggcaatgaggcttatgcacatcttttgctaaactccctcttcctaccataagccttgcgatacatatttacgttttaaagtaaagtactaattaac

SEQ ID NO: 18830 - DNA, 120 bp, synthetic construct
  misc_feature 1..120: note = Artificially Synthesized Probe
  source 1..120: mol_type = other DNA
tttaagtacaattaaaactaacctaaaatgtaccttggaaaaaagaagttagtatcctttcattttgcggtggctggcagcttgggactgtcagataaaccgtgcatggccattctttgg

SEQ ID NO: 18831 - DNA, 120 bp, synthetic construct
  misc_feature 1..120: note = Artificially Synthesized Probe
  source 1..120: mol_type = other DNA
ttggtcacttaaacccgaacgtgaccttgtgaggtggcactagttggtgatcagataataatcctaagtgtctccaaatttaagattctgctaaaccagtttccaccactcattgttttt

SEQ ID NO: 18832 - DNA, 120 bp, synthetic construct
  misc_feature 1..120: note = Artificially Synthesized Probe
  source 1..120: mol_type = other DNA
ctccctctctgggtgtatattttctaggtttttgtaaacatcttaggctaaggaaactgagcaatctctctgacctgaacatacacgtccgttaagttctttctttttaggatacgcaga

SEQ ID NO: 18833 - DNA, 120 bp, synthetic construct
  misc_feature 1..120: note = Artificially Synthesized Probe
  source 1..120: mol_type = other DNA
ctgggatatgcatgttacattcaggattactacccacatatcagataagagtatcatgttattgaagcagaattttggttttaaaataaccagagtaagcagggggagtgtgaggcgggc

SEQ ID NO: 18834 - DNA, 120 bp, synthetic construct
  misc_feature 1..120: note = Artificially Synthesized Probe
  source 1..120: mol_type = other DNA
ctgattctatctcttggtctctgtcattctccatctctgtcctctatctctctccgtctctctgtttgtctctcattctttctctggatctctgccattctccatctctgtctctctatc

SEQ ID NO: 18835 - DNA, 120 bp, synthetic construct
  misc_feature 1..120: note = Artificially Synthesized Probe
  source 1..120: mol_type = other DNA
ttcttgggattttctaaacacacattctggggaacagaggaggctttgatgaagaaagggaaaagaaaacccactaaaatatgtgaaaaaaatcataccacagcactccgggtgtgtctt

SEQ ID NO: 18836 - DNA, 120 bp, synthetic construct
  misc_feature 1..120: note = Artificially Synthesized Probe
  source 1..120: mol_type = other DNA
agatttcattattatctctggggtgtcactcaaaattactgatgttgaatatcacagaaaggacatagaatgagccattatctcctggaggtccgaaaccttgaacttagaggaagacct

SEQ ID NO: 18837 - DNA, 120 bp, synthetic construct
  misc_feature 1..120: note = Artificially Synthesized Probe
  source 1..120: mol_type = other DNA
atgttctggctagtactggatttcaaaacgcgccccaggtcaggctgatctcagagaagcctccttacatttttaggagggtgcttccagattgtgggacatcaggtactgttaacagga

SEQ ID NO: 18838 - DNA, 120 bp, synthetic construct
  misc_feature 1..120: note = Artificially Synthesized Probe
  source 1..120: mol_type = other DNA
ggcctggaatttttccaagcctgttttgttctctcttccctcctctttctaatgagtctaatagaaacattccagttgtttcttttttcatggtggtatttcacggtcatttcaaggtgg

SEQ ID NO: 18839 - DNA, 120 bp, synthetic construct
  misc_feature 1..120: note = Artificially Synthesized Probe
  source 1..120: mol_type = other DNA
tttctgcaccctgcagtggtctgaacgcccactcctcggtgtaaaggaggcagagagcaggaagatgtttgcttatactaattctcattgtataataattaaagctaattcattgtatta

SEQ ID NO: 18840 - DNA, 120 bp, synthetic construct
  misc_feature 1..120: note = Artificially Synthesized Probe
  source 1..120: mol_type = other DNA
gtattctccggttgtggggaagatgagttccttcggtcatgcctgggttgatcccagtgagttgatgaaacaggatcctggcaccctcacatgtgaaaatgaagcagaacttgggtctgt

SEQ ID NO: 18841 - DNA, 120 bp, synthetic construct
  misc_feature 1..120: note = Artificially Synthesized Probe
  source 1..120: mol_type = other DNA
caggtgtcttgtctcagcttcaccaacttccttccacactcctttgctggcttgacatttaaaggtgaattaatgccacattttaacattgaagttgatcatgatctctgtatcaaccct

SEQ ID NO: 18842 - DNA, 120 bp, synthetic construct
  misc_feature 1..120: note = Artificially Synthesized Probe
  source 1..120: mol_type = other DNA
catttcggatgttaattaaaatcttgactctagtagcacattcagtcgggtcaagcgtcactatttgacataaatggagacatctggctgtcacccaagtttgataagctgaatacccat

SEQ ID NO: 18843 - DNA, 120 bp, synthetic construct
  misc_feature 1..120: note = Artificially Synthesized Probe
  source 1..120: mol_type = other DNA
tcattactgagtgatttagatccctagaacccatcagtttagcttgcttttaggacacagggattccagttctgtgaagtgtaatgaagactatgtccgtattctgaagttcatgctaag

SEQ ID NO: 18844 - DNA, 120 bp, synthetic construct
  misc_feature 1..120: note = Artificially Synthesized Probe
  source 1..120: mol_type = other DNA
tacatttttcaagtaatgcatgtcgacatttaagggaatttgataatcagaatatggaggaatgtgaagatgtggggagtgatgtatccccaggagccaggggagtgtgagaaaatgaag

SEQ ID NO: 18845 - DNA, 120 bp, synthetic construct
  misc_feature 1..120: note = Artificially Synthesized Probe
  source 1..120: mol_type = other DNA
tagtaatgttttgaaggtttccagatttctctccagattgtgctagttaacttcattctgccgtcatagaacaattaaacagaagcatttgggagaggaataaaaaaagtgccagggagg

SEQ ID NO: 18846 - DNA, 120 bp, synthetic construct
  misc_feature 1..120: note = Artificially Synthesized Probe
  source 1..120: mol_type = other DNA
tgtttcctccaaaatttccgggctcttcatgaagagatttttctcgaatggtcaagatttagatgaaacttaggaacacacagttctctgctaagaagccatcagatcagccggaaaaaa

SEQ ID NO: 18847 - DNA, 120 bp, synthetic construct
  misc_feature 1..120: note = Artificially Synthesized Probe
  source 1..120: mol_type = other DNA
aggtcacttccaactttctccctttgctcttctcagttgtagtgagtttccaaaaatctcaagaaaaacagcatatttgtcatagtatttgtgcatgcgctttgtctgggctttctgcat

SEQ ID NO: 18848 - DNA, 120 bp, synthetic construct
  misc_feature 1..120: note = Artificially Synthesized Probe
  source 1..120: mol_type = other DNA
tggtatgtgaaatagatttcactaaagccataccaaattatatttttatgtgagatgtcctattgagtttattcggttacttttcctgttgatcaatgattattttccttttgatactcc

SEQ ID NO: 18849 - DNA, 120 bp, synthetic construct
  misc_feature 1..120: note = Artificially Synthesized Probe
  source 1..120: mol_type = other DNA
tgttctaaagtgttggcaggactttcaggtcagtgattttcaaaactttggagccaagggaatccccccattcagaatgtgcagatgttccttaaggaaaacctataaccactcctgcca

SEQ ID NO: 18850 - DNA, 120 bp, synthetic construct
  misc_feature 1..120: note = Artificially Synthesized Probe
  source 1..120: mol_type = other DNA
gcaattttgtaaatctttctgttcgtaaatggtgtcctgaaatcaataaactttagcaattcaaatcatcgtgcaaacccaggcttgtacggaaagccaaatcacaagcctctgcttctc

SEQ ID NO: 18851 - DNA, 120 bp, synthetic construct
  misc_feature 1..120: note = Artificially Synthesized Probe
  source 1..120: mol_type = other DNA
aggtctcagaatcacagtctcagtctgccagtatcagtctctgctgtgagtccttttggacatagtttcctactctttccgttataaagcgtcttcacattttaatgaaaaaatacctgt

SEQ ID NO: 18852 - DNA, 120 bp, synthetic construct
  misc_feature 1..120: note = Artificially Synthesized Probe
  source 1..120: mol_type = other DNA
tgtatgcatacaccacctttagcttatgccttcatctgtccgtggatacttgggctaatgctgctatggacatgagtatctcttcaacaccttgctttcagttctcacggatatatacat

SEQ ID NO: 18853 - DNA, 120 bp, synthetic construct
  misc_feature 1..120: note = Artificially Synthesized Probe
  source 1..120: mol_type = other DNA
ttaaaaagtattggagattgtaggatgggcagcagactctcatctttgaattatgagtgtggctgcttaaggtaacaatgtcacatgtttattctgataagactttccgtgttgctgcaa

SEQ ID NO: 18854 - DNA, 120 bp, synthetic construct
  misc_feature 1..120: note = Artificially Synthesized Probe
  source 1..120: mol_type = other DNA
tacctgaaacgtctccaggtgactgtgtgggcaggacttttggaagcgcattgaactccaggtgacagagaagaccagcgactctgtctttgttagaaacagaccaaaacttgagaattt

SEQ ID NO: 18855 - DNA, 120 bp, synthetic construct
  misc_feature 1..120: note = Artificially Synthesized Probe
  source 1..120: mol_type = other DNA
aacagggtaggacacgacagttattgctgctgatgttctgtgtagaaaacgtgtaacaaatgacacgtccttaaccttttgaggcatttatattactccgtatttggatactgaagtgcc

SEQ ID NO: 18856 - DNA, 120 bp, synthetic construct
  misc_feature 1..120: note = Artificially Synthesized Probe
  source 1..120: mol_type = other DNA
tgtgtggaaggcagcttggatagtcctggcatgtttgatggatgtcacatttcaatgcctttccttcctcttctctgtggacgtagattaaattcactctcatttattcctgaagcattt

SEQ ID NO: 18857 - DNA, 120 bp, synthetic construct
  misc_feature 1..120: note = Artificially Synthesized Probe
  source 1..120: mol_type = other DNA
gaggcagttgggaaatacatgagagtcttggctgcactttagatttgggagttaacagatatggcggaaataactatgatgggagtgtttttgacccacaattttcgtgatatatagtta

SEQ ID NO: 18858 - DNA, 120 bp, synthetic construct
  misc_feature 1..120: note = Artificially Synthesized Probe
  source 1..120: mol_type = other DNA
aacctctattttctactaagagaattgacaagtacagaggaaagttctggacatataacagagccctttctctttctttcgtggacagctcaagtcctaaacggaaaatgatgatggagc

SEQ ID NO: 18859 - DNA, 120 bp, synthetic construct
  misc_feature 1..120: note = Artificially Synthesized Probe
  source 1..120: mol_type = other DNA
gtatactagagacagagttttagggaagtctttaaatgtgtggagaatgtgcacctgtaagaggaggtcaatgtgggtaagcacagcattaggaaataaggttggaaaatggtagtaaag

SEQ ID NO: 18860 - DNA, 120 bp, synthetic construct
  misc_feature 1..120: note = Artificially Synthesized Probe
  source 1..120: mol_type = other DNA
agaacagccctgggttacagagaatgattctgccattgatcagcaatttaagatacaatgttcgatttgtacttgtgagcattgggaagactatgtataggagatcttttggaaacctgt

SEQ ID NO: 18861 - DNA, 120 bp, synthetic construct
  misc_feature 1..120: note = Artificially Synthesized Probe
  source 1..120: mol_type = other DNA
aaggatcagcaaacttaaagacaggaaaatggaaatcactgagtctgagaaatatattttttttaatggaagaaaaggcaaaagagactaagggacctgtgggacagcatcaagtggacc

SEQ ID NO: 18862 - DNA, 120 bp, synthetic construct
  misc_feature 1..120: note = Artificially Synthesized Probe
  source 1..120: mol_type = other DNA
cttcgatgtacagaatgtatgaagatgtgattttgtaacatagtagcagaatgaacagggtaaaaaacatgatctcaaatagaaataaaacaacaatcgaaaggtaggaacagagctgct

SEQ ID NO: 18863 - DNA, 120 bp, synthetic construct
  misc_feature 1..120: note = Artificially Synthesized Probe
  source 1..120: mol_type = other DNA
accaagactaactaatgaaaaactctaagtaaatttataacttttataacatgattgagccagtgaccaaaaatctctggacagagaaaacctgtggacctcacggcttcactggtgaat

SEQ ID NO: 18864 - DNA, 120 bp, synthetic construct
  misc_feature 1..120: note = Artificially Synthesized Probe
  source 1..120: mol_type = other DNA
tcaattgcacttctgtacactaatgatggacactctgaaaaggaaatcataaaaacaattctgttcaaaataatattaaaaagtaaaatgctttggaataatcaaataatgtgacagatt

SEQ ID NO: 18865 - DNA, 120 bp, synthetic construct
  misc_feature 1..120: note = Artificially Synthesized Probe
  source 1..120: mol_type = other DNA
cactaaggacatgaaaacatgctcagaacacatgcttagcatcatggaaatgcacagaaaaactacaatgaggtgccaacccacacccattataatagctactgttttaaaaacagaaaa

SEQ ID NO: 18866 - DNA, 120 bp, synthetic construct
  misc_feature 1..120: note = Artificially Synthesized Probe
  source 1..120: mol_type = other DNA
agggctgaggaggttgtgtggaaataggggctgtgactgctaatagctatgtttttttgggggggagatgatgaaaaaaattttaatatcgattgtgttaatagtgttgtggaactctga

SEQ ID NO: 18867 - DNA, 120 bp, synthetic construct
  misc_feature 1..120: note = Artificially Synthesized Probe
  source 1..120: mol_type = other DNA
tgcttcacagaagctttgcactccaacatttgcaaaggacccacacattcccttgtgcaattgaactcaagagagaaaaaagaaataaaatcatgaaaggactgcaccatgtcttctctt

SEQ ID NO: 18868 - DNA, 120 bp, synthetic construct
  misc_feature 1..120: note = Artificially Synthesized Probe
  source 1..120: mol_type = other DNA
gtcagggtgatgggcaaggcagtctttatttcagaatataagagatgctgtgccaacagtatttgggaattgcttctatatggtgcattttagtatttattgagctatctcatgcaccga

SEQ ID NO: 18869 - DNA, 120 bp, synthetic construct
  misc_feature 1..120: note = Artificially Synthesized Probe
  source 1..120: mol_type = other DNA
cccaggttctcaatcgaatcgtctgggtccccttggatcacactgttttagagtggaatatattgagtcatctgggtccccttgcatcacacagttttagaaggaaatatatcaaatcgt

SEQ ID NO: 18870 - DNA, 120 bp, synthetic construct
  misc_feature 1..120: note = Artificially Synthesized Probe
  source 1..120: mol_type = other DNA
ggatcacactgttttagagggaaatatatcgaatcatctgggtccccttggatcacactgttttagagtgaaatatatcaaatcatctgggtccccttggatcacactgttttagagtga

SEQ ID NO: 18871 - DNA, 120 bp, synthetic construct
  misc_feature 1..120: note = Artificially Synthesized Probe
  source 1..120: mol_type = other DNA
aagtggtgtgccaagtgagatttcaggatttagccttgataggatcttagaaattgctccttgcaagcccctaggtttatcagtggattgaggggtagaattgagatttttaaaatgtca

SEQ ID NO: 18872 - DNA, 120 bp, synthetic construct
  misc_feature 1..120: note = Artificially Synthesized Probe
  source 1..120: mol_type = other DNA
tttggatgctaagataatgcaaagatgttagtttccataacatccgaatcatgggatgagagtcaagagaagaattaggaaaggaggtctccaagacctcatggcagtctgagaagtttc

SEQ ID NO: 18873 - DNA, 120 bp, synthetic construct
  misc_feature 1..120: note = Artificially Synthesized Probe
  source 1..120: mol_type = other DNA
caatgggttgatcaaatctgaccaatctcaacttcacaaagtcactcttacaggtgtcactcaaaaccaacaactcagtccagtgataagggtgaaaaagtgtggcagaaaatatacaca

SEQ ID NO: 18874 - DNA, 120 bp, synthetic construct
  misc_feature 1..120: note = Artificially Synthesized Probe
  source 1..120: mol_type = other DNA
gaatgatgtatggatggcaaagtaagtgacaagtttccagaagcgaaggaaaactgttactgttcagaaaatgatgttcaaagtacaaaggccaagatatcttcagaatggaaaccactg

SEQ ID NO: 18875 - DNA, 120 bp, synthetic construct
  misc_feature 1..120: note = Artificially Synthesized Probe
  source 1..120: mol_type = other DNA
tgaaaagagtgaatactttgcctctcttcttccttctcctctttttctgaatttaacacctagatagacttcttcttggctttagccgaaacactttactagggctaaagtgcccatcag

SEQ ID NO: 18876 - DNA, 120 bp, synthetic construct
  misc_feature 1..120: note = Artificially Synthesized Probe
  source 1..120: mol_type = other DNA
accgctggggtcgcttccagagctccaacattttccttgggaacctgagtttttaattctatctctttgtcacatttaatttttctataaagtacagatcgtagatgtgggatgctgtga

SEQ ID NO: 18877 - DNA, 120 bp, synthetic construct
  misc_feature 1..120: note = Artificially Synthesized Probe
  source 1..120: mol_type = other DNA
ggactcaacacatagcaaatgagcgactgtcttcagattttacttcattttagttaatttaaacgtgaatagattcatgtggctaatggtttgtgtgttggactgtccaagcctggggga

SEQ ID NO: 18878 - DNA, 120 bp, synthetic construct
  misc_feature 1..120: note = Artificially Synthesized Probe
  source 1..120: mol_type = other DNA
tggtcttgtcaggaaaacctggctcagatgaagtgagagacaaactcggttttcgggttattcaatcatcgccctgcattggcagctaagcattcttagttttgaggtctccttacaacc

SEQ ID NO: 18879 - DNA, 120 bp, synthetic construct
  misc_feature 1..120: note = Artificially Synthesized Probe
  source 1..120: mol_type = other DNA
gcgggtagtttagctgtgccagaaaatgtcgaggctatcagcgaatttgtgaattatatactgtaataaaaacagagctacttcttcagtaaaagaggtcaggtcattggggttgtctgt

SEQ ID NO: 18880 - DNA, 120 bp, synthetic construct
  misc_feature 1..120: note = Artificially Synthesized Probe
  source 1..120: mol_type = other DNA
attttcagatacttctcatttaacctctgtaatcttgtcactgggtaatcactccccaggtagcatgtttgcttttgctatcagtaaaggtcggagtttatctgatcttttgtgcgttgc

SEQ ID NO: 18881 - DNA, 120 bp, synthetic construct
  misc_feature 1..120: note = Artificially Synthesized Probe
  source 1..120: mol_type = other DNA
agaagaagaaaaaagaaaaaagagatgacatccgaagagggttgagcaagagaaggggagactgaagtaggaggagagggaactctgaatgctggaggtgttttgtacttggtgttggcg

SEQ ID NO: 18882 - DNA, 120 bp, synthetic construct
  misc_feature 1..120: note = Artificially Synthesized Probe
  source 1..120: mol_type = other DNA
aattaacatggatgtggagacagggaaggaaaataaacacaaaataaatgttttggaaaaggagaagagagttgcagagcaaaaagtacaataaagcaccatccgtcccttgctgcggtg

SEQ ID NO: 18883 - DNA, 120 bp, synthetic construct
  misc_feature 1..120: note = Artificially Synthesized Probe
  source 1..120: mol_type = other DNA
tctgcccacagccaccttctgcgtatttattgggtttgtggctgtaatctagtcatgcagattaaaacaaattcatctcattcaattgtttgctcttggttttaaggtcctatggatacc

SEQ ID NO: 18884 - DNA, 120 bp, synthetic construct
  misc_feature 1..120: note = Artificially Synthesized Probe
  source 1..120: mol_type = other DNA
caaatgccctccccgcatggtggttttcttcatggtactcgtccacatatgaaagagctcgttattttatcctcacagctacctcaaaggtgacaaggtattattactctcattttacag

SEQ ID NO: 18885 - DNA, 120 bp, synthetic construct
  misc_feature 1..120: note = Artificially Synthesized Probe
  source 1..120: mol_type = other DNA
catcttttaggaagcagcagatatccccccagatcagctttgactgatcttccctctgagccactcaggcacctgtgttcttccttatacagcgtggtcatttgtggatgtacatttctg

SEQ ID NO: 18886 - DNA, 120 bp, synthetic construct
  misc_feature 1..120: note = Artificially Synthesized Probe
  source 1..120: mol_type = other DNA
ttagcatttaagttttgtattgcgggctctgaaacaggatttccatatttgcttggaagatttaggttctgtgttctaaaagagtaggaccctgttttctgaaatctgaggaagtccagg

SEQ ID NO: 18887 - DNA, 120 bp, synthetic construct
  misc_feature 1..120: note = Artificially Synthesized Probe
  source 1..120: mol_type = other DNA
tttcttctggcccaaacccagtaatttattaagaagaaacatagaccatgactttgatccattgagtctgtctgactggttttctaatgtgtgagctacttggtgtccacaaagacactt

SEQ ID NO: 18888 - DNA, 120 bp, synthetic construct
  misc_feature 1..120: note = Artificially Synthesized Probe
  source 1..120: mol_type = other DNA
acatagagaccacctcttaaacataaaaattaacaggatttaggttattccatcttttcatctacagtaggagaaagctattaatagggccggcccctgtttgaaacgaaggcacctggg

SEQ ID NO: 18889 - DNA, 120 bp, synthetic construct
  misc_feature 1..120: note = Artificially Synthesized Probe
  source 1..120: mol_type = other DNA
tcaagatttatcttcaagatagcagagcagccctttttaaaagaactgagacttaacccacagtggtgctgacagccctatgtgacaataatataaaagtgagtgcaatttccacagcca

SEQ ID NO: 18890 - DNA, 120 bp, synthetic construct
  misc_feature 1..120: note = Artificially Synthesized Probe
  source 1..120: mol_type = other DNA
gaacaatagtccaattgagtgcagtctagtccaattgaatgtagatttcacctaccttcagagaatgtagatgaaattgtgtggcaccatttaaatcaggaaggattccctcccatttcc

SEQ ID NO: 18891 - DNA, 120 bp, synthetic construct
  misc_feature 1..120: note = Artificially Synthesized Probe
  source 1..120: mol_type = other DNA
tcatagtatctaggaaaaaagaccacaaagactaaagatgcctttgagatgaagttctgcatcatctggcagttagcttcagcaatcctcttaaatgaaacaaaacagcagccacactgc

SEQ ID NO: 18892 - DNA, 120 bp, synthetic construct
  misc_feature 1..120: note = Artificially Synthesized Probe
  source 1..120: mol_type = other DNA
taatggagcagatgtagaaacctgttggatggcgcttgatattggcattgcgatcaagtaggggaaatgactgatgttcagtaatgatgctgggacattctgttttccatatgaaaagat

SEQ ID NO: 18893 - DNA, 120 bp, synthetic construct
  misc_feature 1..120: note = Artificially Synthesized Probe
  source 1..120: mol_type = other DNA
ccctggcgtgctttagaaaggaccacaaatggaggggtgagctactttcaaagggaaaatggaactttaattcactgattaacctcaatatgctactgagattgcaaggaacaaaatgca

SEQ ID NO: 18894 - DNA, 120 bp, synthetic construct
  misc_feature 1..120: note = Artificially Synthesized Probe
  source 1..120: mol_type = other DNA
tcaataagtcctgacatttacttgatattaatacattcagtaaattggcgttttcttcttactgaatgattccttgaagagcgctgaggctgcgagtgagtccatgctgttctccatcag

SEQ ID NO: 18895 - DNA, 120 bp, synthetic construct
  misc_feature 1..120: note = Artificially Synthesized Probe
  source 1..120: mol_type = other DNA
ctgaccgacgtgtgtgagactcacactggagaaagactcagatgtgatttgataccttggctgtagttataaatctcagctatctgtgctgagaaaggagaaacaatttaagaataaatt

SEQ ID NO: 18896 - DNA, 120 bp, synthetic construct
  misc_feature 1..120: note = Artificially Synthesized Probe
  source 1..120: mol_type = other DNA
atataagggagaagtaggcaaaaataaaatggacctaaccaaagtaggtctcacttaaatctaaaggattctgttggaaagaacgcacagacacctgtagtcttcagaatctcgtgtgtg

SEQ ID NO: 18897 - DNA, 120 bp, synthetic construct
  misc_feature 1..120: note = Artificially Synthesized Probe
  source 1..120: mol_type = other DNA
aaagccaaaaaaaaaaaaaagccaaatgccaggagaacttggaactattttgagatttctggaaacagatattggacaaaagcagcttccttggagatctgaggaccaagagcttctgaa

SEQ ID NO: 18898 - DNA, 120 bp, synthetic construct
  misc_feature 1..120: note = Artificially Synthesized Probe
  source 1..120: mol_type = other DNA
aaaaaaggttactgccacgatgaggtttagagactgttctttccgttggtgaacccctggagtgatacacgcagaagtttactcccatggccaagtgatggttgtaacaggaatctaact

SEQ ID NO: 18899 - DNA, 120 bp, synthetic construct
  misc_feature 1..120: note = Artificially Synthesized Probe
  source 1..120: mol_type = other DNA
agtgtgaatgtgtgaatgtgtgagagggcgtttctgttgcatgtgtgtatgcctgaggtgtgtgtgcgtgagtgcgaatgtgtgttcatgtgcattgtgtgcatgtgtgattgtgtatgc

SEQ ID NO: 18900 - DNA, 120 bp, synthetic construct
  misc_feature 1..120: note = Artificially Synthesized Probe
  source 1..120: mol_type = other DNA
tttcttcttccagcagacacagttatcagaagcaacttcaatcggatttgtgcttgtgtcttgcagaaactctacccagagtatgtttaccttaactcgcttatggtattttaacacgtc

SEQ ID NO: 18901 - DNA, 120 bp, synthetic construct
  misc_feature 1..120: note = Artificially Synthesized Probe
  source 1..120: mol_type = other DNA
taaaatactacaacttttaaaacacagtgtctgccttcatttgatgccaaaatcaataaaagccatgccactctgagggctatcattgccgtggccactacaaagacaccatatgtgtcc

SEQ ID NO: 18902 - DNA, 120 bp, synthetic construct
  misc_feature 1..120: note = Artificially Synthesized Probe
  source 1..120: mol_type = other DNA
gagccactgtgccaggtctccatgacatatcttgatatgtaaacaagcttgtaatctgattggagcctattttgttttgtaactgagagagatgaaatatcatccaacaggtagaaataa

SEQ ID NO: 18903 - DNA, 120 bp, synthetic construct
  misc_feature 1..120: note = Artificially Synthesized Probe
  source 1..120: mol_type = other DNA
caaagtactatgaaaccatttcatcccagtcagatggttacaacagtgtaacaaagacaaaataaattctgggtggataaacacttgtgtctgttggctggacatacaacggtttagcac

SEQ ID NO: 18904 - DNA, 120 bp, synthetic construct
  misc_feature 1..120: note = Artificially Synthesized Probe
  source 1..120: mol_type = other DNA
tatttttagtagagacggggtttcaccttgttagccaggatggtctcgatctcctgacctcaagatccacccgcctcggcctcccaaagtgctgggattacaggcgtgagccaccgcgcc

SEQ ID NO: 18905 - DNA, 120 bp, synthetic construct
  misc_feature 1..120: note = Artificially Synthesized Probe
  source 1..120: mol_type = other DNA
aggcacttctctgtagtaaagatcttgaacctgatttaacacgagatatccagaataaggaatagcaaatctgtggaataagccgcaaccctgtagcagttttacttcataagatgactg

SEQ ID NO: 18906 - DNA, 120 bp, synthetic construct
  misc_feature 1..120: note = Artificially Synthesized Probe
  source 1..120: mol_type = other DNA
ttttttaaaaaggaaagccattttttcaagttttaaaattcaaataagctatatggtgtgatggtcccaagaagtaaagcatgcatgtgtgttctgcttccggggaggcggcccatggca

SEQ ID NO: 18907 - DNA, 120 bp, synthetic construct
  misc_feature 1..120: note = Artificially Synthesized Probe
  source 1..120: mol_type = other DNA
ccgaacagaagaagcagcgggtttgttctctggggaaatcagccttctgcattttagaagttaattcgtaatgagcctacttggcataaatagacacataaatgaaggtgtgtgtttatt

SEQ ID NO: 18908 - DNA, 120 bp, synthetic construct
  misc_feature 1..120: note = Artificially Synthesized Probe
  source 1..120: mol_type = other DNA
gttgagaaagtcagccagctctccgttttgagtgtgtcaatgctgttaactccttattaaggaaaaacaaagtactaacatacaatgctaactggcacaggggcagaaagagcagaaaaa

SEQ ID NO: 18909 - DNA, 120 bp, synthetic construct
  misc_feature 1..120: note = Artificially Synthesized Probe
  source 1..120: mol_type = other DNA
aagatagccctgcatctgatcatgatgggttaagatgattcaggtcccttaattgtttaaaataaccgcaaggacttggagtcaccagtggaaatgaccaaatgttttctttggccaaaa

SEQ ID NO: 18910 - DNA, 120 bp, synthetic construct
  misc_feature 1..120: note = Artificially Synthesized Probe
  source 1..120: mol_type = other DNA
agtatcatctcactgtatagaaatattcctttttttttaactgcctacgtggaacgtttggtccaaggaatggactggggaagagagtagatggccctttgcatatagaagtctggtgtt

SEQ ID NO: 18911 - DNA, 120 bp, synthetic construct
  misc_feature 1..120: note = Artificially Synthesized Probe
  source 1..120: mol_type = other DNA
ggcatgattcctggagagcagagaaagcccttgccccaaagcctcccagcttttcagttgtctcagaaagatctttaataggaaatggattcctttatttcataatcatgtattcttaaa

SEQ ID NO: 18912 - DNA, 120 bp, synthetic construct
  misc_feature 1..120: note = Artificially Synthesized Probe
  source 1..120: mol_type = other DNA
gtcaattttgtgattgcagagggggctgacttggggagtccttttcctgctctggaaaatgtcttcacaggttttggttgataataattcattacgtgtacatttatcttttgtgcactt

SEQ ID NO: 18913 - DNA, 120 bp, synthetic construct
  misc_feature 1..120: note = Artificially Synthesized Probe
  source 1..120: mol_type = other DNA
aaagatttgaagcctaacattgctgggggcaggattagaggttgaaaacaaaggcctttttgccaagagagggtgtttgcaacccattctccagtatttggatatagcttcaggttttta

SEQ ID NO: 18914 - DNA, 120 bp, synthetic construct
  misc_feature 1..120: note = Artificially Synthesized Probe
  source 1..120: mol_type = other DNA
tgctcatcccagagatttctaaatctgggtttggggaaggccctgttataaatgatggatgatcttggagtcgcatgaatctcagtacatgatatacatttatttaactatgacttctgc

SEQ ID NO: 18915 - DNA, 120 bp, synthetic construct
  misc_feature 1..120: note = Artificially Synthesized Probe
  source 1..120: mol_type = other DNA
tcaactgatactaaatttaaaaacataataataaataaaatgttaaagaaaaagaccacagggtgtaggtttagtctgacaagccgcttcaggccggcttgggaagagtgggaggtccct

SEQ ID NO: 18916 - DNA, 120 bp, synthetic construct
  misc_feature 1..120: note = Artificially Synthesized Probe
  source 1..120: mol_type = other DNA
gtggccctttagcaagagtgatacagctgtactcagacatttttctcctgccattgaatcagggtctcaaatcagaaatcagtaaattcagaacattccttttatcagatgcacctcaaa

SEQ ID NO: 18917 - DNA, 120 bp, synthetic construct
  misc_feature 1..120: note = Artificially Synthesized Probe
  source 1..120: mol_type = other DNA
aggaaggaggtcctaccacttccagtcatgttatcttgaggattatttgaccatgggcactcaggaaaatagaaaataggtgatattcctcctgtgcaaattgcttctccactaagcctc

SEQ ID NO: 18918 - DNA, 120 bp, synthetic construct
  misc_feature 1..120: note = Artificially Synthesized Probe
  source 1..120: mol_type = other DNA
gtctatttcttagctgtaagccggtcctatctagggagagcagtgttcatcctaatacagcagtctgcaggcttgagaagcacttgcttagctgaaagccggtcctatttagagagagca

SEQ ID NO: 18919 - DNA, 120 bp, synthetic construct
  misc_feature 1..120: note = Artificially Synthesized Probe
  source 1..120: mol_type = other DNA
ggagtggggtgaccgctgctggaatctgggggagcggggtggcccctgctggaatctggggcagtggggtgacccctgctggaatgtgggggagtggggtgacccctgctggaatgtggg

SEQ ID NO: 18920 - DNA, 120 bp, synthetic construct
  misc_feature 1..120: note = Artificially Synthesized Probe
  source 1..120: mol_type = other DNA
ttagatcaaaaaacttaaattttatttataaacatgaaaatcactgtgtgtagaaaaccatctcttgtctagccagagaggcacctgtttgagctgccactgacagagaatccccacggg

SEQ ID NO: 18921 - DNA, 120 bp, synthetic construct
  misc_feature 1..120: note = Artificially Synthesized Probe
  source 1..120: mol_type = other DNA
ctacattaaatgacttcaagtctgtgaaggacatagcagggattggcacacagtaagagctatatagacatcagctgtgtacacggttgcaatagacattgcttgagtaaattctgttta

SEQ ID NO: 18922 - DNA, 120 bp, synthetic construct
  misc_feature 1..120: note = Artificially Synthesized Probe
  source 1..120: mol_type = other DNA
tgtactttgtggcttcttccaccagaaattcgtatccccattatgacaaaacccacccctttagaatagcatttagatggaatgggatctcacaaatgggagcaattcagatgtgtcctt

SEQ ID NO: 18923 - DNA, 120 bp, synthetic construct
  misc_feature 1..120: note = Artificially Synthesized Probe
  source 1..120: mol_type = other DNA
ataaactgatgactgagaagcttaagctctttaagaaatgtggatttgtaaagagatgatccaaaagggagaaacaagcaaaggaggattttgagagcttcaggaggtggccacacagtg

SEQ ID NO: 18924 - DNA, 120 bp, synthetic construct
  misc_feature 1..120: note = Artificially Synthesized Probe
  source 1..120: mol_type = other DNA
acttcagtaccccaacatgggtatgtatgttatggctatgatgacatttttgaggtgaagagactaatatattgggttttaaggtcttatatacatgtgcaaccccttagcgccagaagc

SEQ ID NO: 18925 - DNA, 120 bp, synthetic construct
  misc_feature 1..120: note = Artificially Synthesized Probe
  source 1..120: mol_type = other DNA
tgcccttgcctcggccaacacccttcagtaccaggacacatttctgcttttctcttacatcagcctttaaagtcagacgttgttttcaagatgagaagaaatactttagtaccaaaattt

SEQ ID NO: 18926 - DNA, 120 bp, synthetic construct
  misc_feature 1..120: note = Artificially Synthesized Probe
  source 1..120: mol_type = other DNA
tatgatatttattgtacccactgtaaaaaaaaaaaatctagaggaattagtacatgggcatgaaagtgagttaaggaaagaacacaccccccactttaggccggaatacgcagaggggat

SEQ ID NO: 18927 - DNA, 120 bp, synthetic construct
  misc_feature 1..120: note = Artificially Synthesized Probe
  source 1..120: mol_type = other DNA
atcctgccaggtctctgagccatttaaaacctctttctttaccagggggcccaatgtgtgtgtgtcaattaattaaatacagattcttcacttggaaaatgcgagtctatgggtggtgta

SEQ ID NO: 18928 - DNA, 120 bp, synthetic construct
  misc_feature 1..120: note = Artificially Synthesized Probe
  source 1..120: mol_type = other DNA
gttgatctgtggggactgagtgcaagtcctcagcatccacccgtatgcacacttacttaacttactctcataattgtagtctccttgcaaatcttttccgttctgaattcagatgatgcc

SEQ ID NO: 18929 - DNA, 120 bp, synthetic construct
  misc_feature 1..120: note = Artificially Synthesized Probe
  source 1..120: mol_type = other DNA
taacaaaaccttaaaatgtagaactgcattatgctttgcaaataataataatgactgatgctgcgtggtcctaagcgctacacaatgtgtgatctgctgccatgagtccctggaccttct

SEQ ID NO: 18930 - DNA, 120 bp, synthetic construct
  misc_feature 1..120: note = Artificially Synthesized Probe
  source 1..120: mol_type = other DNA
agatgcttgtcatttcattttggttcatagatattgcatcacgttaccctaccctttggactgaacaggttaaaagtcggcagaacaaaaccaataagaattcaggtaagatgctgcctg

SEQ ID NO: 18931 - DNA, 120 bp, synthetic construct
  misc_feature 1..120: note = Artificially Synthesized Probe
  source 1..120: mol_type = other DNA
tcttactgaagggaagtagctctgtaggtttaaagtagttcagctgctgaggaaatacggagttagtaacagcttgaattttctgcgatcagctttgggtgaaaaaattgcaaacattca

SEQ ID NO: 18932 - DNA, 120 bp, synthetic construct
  misc_feature 1..120: note = Artificially Synthesized Probe
  source 1..120: mol_type = other DNA
tgtcaccccatttaaaaaagttattttgatttatttctgtttcatacaaatttgtatatgagagattaattaaaacactgtatgtttcaggtttactggttgatatggttgggcgttgtg

SEQ ID NO: 18933 - DNA, 120 bp, synthetic construct
  misc_feature 1..120: note = Artificially Synthesized Probe
  source 1..120: mol_type = other DNA
ttgatttacagacacggggcatgaagctactggactatgtttgtgtttaataccagttttctagctacatgttctttctgaggggctgaagaaacacctagttggtattttaggacatta

SEQ ID NO: 18934 - DNA, 120 bp, synthetic construct
  misc_feature 1..120: note = Artificially Synthesized Probe
  source 1..120: mol_type = other DNA
tccacgggccctactgtagcatcattactctttttaaaacaagctgaatgaaacaaacaaaataaccaaattaatacataactggaaaagagagaatctaggcacccctagaggttgcct

SEQ ID NO: 18935 - DNA, 120 bp, synthetic construct
  misc_feature 1..120: note = Artificially Synthesized Probe
  source 1..120: mol_type = other DNA
caagacaggaggaccagataagccccatcatgtgatacttactctatgcagatttcttaaagtcatgctgaaaaacttgtctcgatttccatcaattaattaacaccttggggtgtccta

SEQ ID NO: 18936 - DNA, 120 bp, synthetic construct
  misc_feature 1..120: note = Artificially Synthesized Probe
  source 1..120: mol_type = other DNA
gactttccttcttcggtaacatgtctccaccgggcctgcaatcattagccagccgggatgagactaagtgcttaaaggctatttcatgttggagatttaaaaaagcacatattgcaaaag

SEQ ID NO: 18937 - DNA, 120 bp, synthetic construct
  misc_feature 1..120: note = Artificially Synthesized Probe
  source 1..120: mol_type = other DNA
agctgaagtgttcccgggggtccgcggctgtgcgggagggaaggagggactcaggtgggggtcccagctccgagggcgtccgtggcctctcccggctggggtggggctgcccacaggact

SEQ ID NO: 18938 - DNA, 120 bp, synthetic construct
  misc_feature 1..120: note = Artificially Synthesized Probe
  source 1..120: mol_type = other DNA
ttctgttcaatgtccaggaagagtccttgatgttcaggacatcccgcagttcatggagcccctcagtggaaatacttctttgctttatttagggatgataatttttgttatatcggacat

SEQ ID NO: 18939 - DNA, 120 bp, synthetic construct
  misc_feature 1..120: note = Artificially Synthesized Probe
  source 1..120: mol_type = other DNA
tagaagctgattcttagaatagccatgtgaacttggagctgcttgtctcataggaagttcatttttcaaaatctcttaagtggctgaggccaggatttagcccagagttgtgatttccaa

SEQ ID NO: 18940 - DNA, 120 bp, synthetic construct
  misc_feature 1..120: note = Artificially Synthesized Probe
  source 1..120: mol_type = other DNA
catgttgttatgaaatttgtgtcgtcgtgattacagatttggcttgaagcataaactgagtgaaatatctctttttgccattcacacttaagaatagtaatttagggccaggtgtggtgt

SEQ ID NO: 18941 - DNA, 120 bp, synthetic construct
  misc_feature 1..120: note = Artificially Synthesized Probe
  source 1..120: mol_type = other DNA
tatgtacctgcagcctacatttgtgtctcagataaaatctagtatagacatggatctctctgcttttgcctgaaagtcacattagtaactaatgccagaatacgtcacgtcaggctattg

SEQ ID NO: 18942 - DNA, 120 bp, synthetic construct
  misc_feature 1..120: note = Artificially Synthesized Probe
  source 1..120: mol_type = other DNA
ttttcataccctgagacacgaggctctcactgcgttcttggaggaggtgtcattttcctgccctgagacacgaggctctcactgcattcttggaggaggtgtcattttcctgccctgaga

SEQ ID NO: 18943 - DNA, 120 bp, synthetic construct
  misc_feature 1..120: note = Artificially Synthesized Probe
  source 1..120: mol_type = other DNA
cattttcataccctgagacacgaggctctcactgtgttctcggaggaggtgtcattttcctgccctgagacacaaggctctcactgcattcttggaggaggtgtcattttcataccctga

SEQ ID NO: 18944 - DNA, 120 bp, synthetic construct
  misc_feature 1..120: note = Artificially Synthesized Probe
  source 1..120: mol_type = other DNA
tctctctgcatggtgtggatcctgtgtttaactcacactgatcacttgttcacttttcattttatggcattcctgagcttaagcacacacgtgcattcatacacaatatcgatgtatgta

SEQ ID NO: 18945 - DNA, 120 bp, synthetic construct
  misc_feature 1..120: note = Artificially Synthesized Probe
  source 1..120: mol_type = other DNA
ctggggtgggtggggccttggagacgcaatttaagcagcttctcaggtaaattgttttatcttaaaatgtacagatcactgtgacacatggcaactattatcaataaggttttgtacata

SEQ ID NO: 18946 - DNA, 120 bp, synthetic construct
  misc_feature 1..120: note = Artificially Synthesized Probe
  source 1..120: mol_type = other DNA
ttaacctggacctggaggggtaggacttgaagttaatcccactgggtaattttttccttcagtcttgaacatgtttttttaagctagtgaagctggtaaaagtaacatcaacagcatctc

SEQ ID NO: 18947 - DNA, 120 bp, synthetic construct
  misc_feature 1..120: note = Artificially Synthesized Probe
  source 1..120: mol_type = other DNA
ctaagaaaaaatccacgtcttttacgaagctatggcaatgcgtctaccaccttggccggcagggaggtttctcttgaaagaaacctctatcctattatttatcctagaataaataattct

SEQ ID NO: 18948 - DNA, 120 bp, synthetic construct
  misc_feature 1..120: note = Artificially Synthesized Probe
  source 1..120: mol_type = other DNA
gcagagttagactttgcaaagtgtagagtgggtggcacatgacggaatcatacttgaaacacacagcagtatttggcaaactgtttggaagacactataaaaaaagacagaatgatacac

SEQ ID NO: 18949 - DNA, 120 bp, synthetic construct
  misc_feature 1..120: note = Artificially Synthesized Probe
  source 1..120: mol_type = other DNA
tttatttttagagcagttttacttttagagaaaaaaattatgcagaaagcgcagagtttccaggtacctccagagcacccacacctccaccacttttcctggaatgaacatcatgcatta

SEQ ID NO: 18950 - DNA, 120 bp, synthetic construct
  misc_feature 1..120: note = Artificially Synthesized Probe
  source 1..120: mol_type = other DNA
aacactcatatgtaggtttttgtggacatcagggttcagcacatttggctaaataactaagaacacgattggtggatggtacagtaaaactctgtgtgtcttcataagaaactgccaagc

SEQ ID NO: 18951 - DNA, 120 bp, synthetic construct
  misc_feature 1..120: note = Artificially Synthesized Probe
  source 1..120: mol_type = other DNA
ctcctaatggtgtatttgcagagcggaagttttccactttgaggaagtcccgtttatcaatgatttctttcatacattgtgcctttgaggttgtctttaaagagtcatcaccgaatccaa

SEQ ID NO: 18952 - DNA, 120 bp, synthetic construct
  misc_feature 1..120: note = Artificially Synthesized Probe
  source 1..120: mol_type = other DNA
ttgttgttaacccccgagcatggaccgctgtgtgtattacctgagaattggttctgctgaggtgcaagattgactatgttcagaatggcagttgaatacatctttttgtttagtaaaaaa

SEQ ID NO: 18953 - DNA, 120 bp, synthetic construct
  misc_feature 1..120: note = Artificially Synthesized Probe
  source 1..120: mol_type = other DNA
gtgccctgccgagggagactgatgtttccgacgttgagtcctcatttgtttgttcactgaacgcaatgttcactttctccccgcatccctgggtgctgggaccagggctgcgtgctccct

SEQ ID NO: 18954 - DNA, 120 bp, synthetic construct
  misc_feature 1..120: note = Artificially Synthesized Probe
  source 1..120: mol_type = other DNA
ggggaccagggctgcgtgctccttggacgcgatgctcatttccttcccacatccccgggtgctgggaccagggctgcgtggtccctgaatgcgatgttcacttcctccccgcatccccgg

SEQ ID NO: 18955 - DNA, 120 bp, synthetic construct
  misc_feature 1..120: note = Artificially Synthesized Probe
  source 1..120: mol_type = other DNA
cacaggtttcattgtccatcccactaacgatccagtggaggctttttgtttttgttttaaaatagaagtcccagatcttatctccagtgactgtcttgggtcacacgtccacccctgaac

SEQ ID NO: 18956 - DNA, 120 bp, synthetic construct
  misc_feature 1..120: note = Artificially Synthesized Probe
  source 1..120: mol_type = other DNA
tcgcttttgctgctgaacatttcaggctgttcttctgtggcttaaaatgacagtaggttataaagtgagcactcaacatgcatttcggatgtttcctgcagaatattttttccctcctta

SEQ ID NO: 18957 - DNA, 120 bp, synthetic construct
  misc_feature 1..120: note = Artificially Synthesized Probe
  source 1..120: mol_type = other DNA
agtcagccctgtgtaggtttcctcaactctgctcattcaaacaggtaaatacataacacacaacccttattctcaaatagctcaagtttatggtctaattcagcagctcccacacttttt

SEQ ID NO: 18958 - DNA, 120 bp, synthetic construct
  misc_feature 1..120: note = Artificially Synthesized Probe
  source 1..120: mol_type = other DNA
actatgcacgtttcaaaaacatcttaaaaccaaagttccaccaggatgacttattccatctaaacatgctttcttctcatctctgtaagactctgctggaccaggacgccatctaaacat

SEQ ID NO: 18959 - DNA, 120 bp, synthetic construct
  misc_feature 1..120: note = Artificially Synthesized Probe
  source 1..120: mol_type = other DNA
ggcacatcctaagcctcaggaagtcttagcaattatacttgaatgaggtcatgaatgggaagtgtttggagctggaaagtgctgtcaaaatgttattgtttccttcaaattccattgagg

SEQ ID NO: 18960 - DNA, 120 bp, synthetic construct
  misc_feature 1..120: note = Artificially Synthesized Probe
  source 1..120: mol_type = other DNA
gtcctgttcccctcggggtgggcagtggcattgggttcccaagcatctgccatttttatcaaaatgctattttgatgtttcctttttctcatcttaattttttaaagccactattttttc

SEQ ID NO: 18961 - DNA, 120 bp, synthetic construct
  misc_feature 1..120: note = Artificially Synthesized Probe
  source 1..120: mol_type = other DNA
gcttaagacgtagttttccctcctccaccagggcctaggattcatgtttcagaatggaaattaacttacaggtctatggttactttatgtctgagtttgttgctatgggaaatacatgtg

SEQ ID NO: 18962 - DNA, 120 bp, synthetic construct
  misc_feature 1..120: note = Artificially Synthesized Probe
  source 1..120: mol_type = other DNA
gcaaccagtcagaaatgaatgcccgtcataggcacagccttcgcctctgattcccccctggtttttataccaaaagtaaacatatgaagaattttattccaacagaagtataagtttcaa

SEQ ID NO: 18963 - DNA, 120 bp, synthetic construct
  misc_feature 1..120: note = Artificially Synthesized Probe
  source 1..120: mol_type = other DNA
aacaatcagcattagcttgtctgcttgcttcatggagttcttccgagattatctgggtcatttgcccgtttcctgatttcttcattacatctcaagctccagtttggagactttctctca

SEQ ID NO: 18964 - DNA, 120 bp, synthetic construct
  misc_feature 1..120: note = Artificially Synthesized Probe
  source 1..120: mol_type = other DNA
tcgcagctgaagtcagtgattctgaactgttttgaacaggaggagccatgctacttacttaagaaaagttaccattgcttgctttttctcagttcaaaagtaattcatgctagccataga

SEQ ID NO: 18965 - DNA, 120 bp, synthetic construct
  misc_feature 1..120: note = Artificially Synthesized Probe
  source 1..120: mol_type = other DNA
ctttctaatgaaaacctcctcttgccaataaagtcagcacttcaaggcccacaagtgttcttataaacaaaacgaaacttgcatagataaagccaaacttggcaagagttgggaatgctc

SEQ ID NO: 18966 - DNA, 120 bp, synthetic construct
  misc_feature 1..120: note = Artificially Synthesized Probe
  source 1..120: mol_type = other DNA
tggaatcaagcataagtacccctttgttcctgtctttttttcgatccagtaatggttttgagcttcatcctcactgcgtgcattacccattcattctctgcaatttacatgcatgattgt

SEQ ID NO: 18967 - DNA, 120 bp, synthetic construct
  misc_feature 1..120: note = Artificially Synthesized Probe
  source 1..120: mol_type = other DNA
tttcacctttgttaaatttggataaggctgttcacctttggtgttgatttgcagacgttgtttatagcacctggagtctttgtcagctgtgtatattagggatctcttctcccagtctgt

SEQ ID NO: 18968 - DNA, 120 bp, synthetic construct
  misc_feature 1..120: note = Artificially Synthesized Probe
  source 1..120: mol_type = other DNA
tgcaaaatgctttatctttctttctaaatacactcatatattcttccactaactcctcccgcccaccttgtgagacaattagacaggtttgacactgttgtgaacccaaagtatctgtga

SEQ ID NO: 18969 - DNA, 120 bp, synthetic construct
  misc_feature 1..120: note = Artificially Synthesized Probe
  source 1..120: mol_type = other DNA
atgggaatttcctgcaggcaaacagcgagggaggtctgtagcttttttacctttgtagccctcttattcaggaataaactgaggggcaggtttgccgaacacagttcctggcttgacttc

SEQ ID NO: 18970 - DNA, 120 bp, synthetic construct
  misc_feature 1..120: note = Artificially Synthesized Probe
  source 1..120: mol_type = other DNA
taattcctgaagaactcttaaggtgttggctgacactaaataacaatgttatgcatttctttaaaaacaaggtatgtctggggcagcatagtgttcccagagcagactggatgtggagaa

SEQ ID NO: 18971 - DNA, 120 bp, synthetic construct
  misc_feature 1..120: note = Artificially Synthesized Probe
  source 1..120: mol_type = other DNA
tggtggtcaggtgtggcattagtttagggagcagccggtctggtggtggtcaggtgtggcattagtttagggggcagccggtctggtggtggtcaggtgtggcattagtttagggggcag

SEQ ID NO: 18972 - DNA, 120 bp, synthetic construct
  misc_feature 1..120: note = Artificially Synthesized Probe
  source 1..120: mol_type = other DNA
acacttatagaagtaaattggaatgggaatcacattgctagcctaatatttaatgagacaatatggaggaaggctgtctccaatgtgctaattacttttcgggagtgtgttcaggaaggg

SEQ ID NO: 18973 - DNA, 120 bp, synthetic construct
  misc_feature 1..120: note = Artificially Synthesized Probe
  source 1..120: mol_type = other DNA
acttatagtaatatgattagtttaaaacttgaactttggttccttgtccccacttaacagaaccaagtgtctctgtcttgacatttccaccttggtgtcctgtgtctaccggtccctgtg

SEQ ID NO: 18974 - DNA, 120 bp, synthetic construct
  misc_feature 1..120: note = Artificially Synthesized Probe
  source 1..120: mol_type = other DNA
tcacgggcatctttctagaggatctccgagctcctccttcttcctgaggcctcacgggcatctttctagaggatctccgagctcctcctccttcctgaggcctcacgggcatctttctag

SEQ ID NO: 18975 - DNA, 120 bp, synthetic construct
  misc_feature 1..120: note = Artificially Synthesized Probe
  source 1..120: mol_type = other DNA
gagctcctcctccttcctgaggcctcacgggcatctttctagaggatggccgagctcctcctccttcctgaggcctcacgggcatctttctagaggatcgccgagctcctcctccttcct

SEQ ID NO: 18976 - DNA, 120 bp, synthetic construct
  misc_feature 1..120: note = Artificially Synthesized Probe
  source 1..120: mol_type = other DNA
cttcctgaggcctcacgggcatctttctagaggatcgccgagctcctcctccttcctgaggcctcacgagcatctttctagaggatggccgagctcctcctccttcctgaggcctcacgg

SEQ ID NO: 18977 - DNA, 120 bp, synthetic construct
  misc_feature 1..120: note = Artificially Synthesized Probe
  source 1..120: mol_type = other DNA
aacaatttctatagatgcagtatgttcctggataaagcacagaaagtatgtcgtgtctggatcatcaaaccataaattctgtgcactaataaaatttctgaagaagcgctgcggcggtgc

SEQ ID NO: 18978 - DNA, 120 bp, synthetic construct
  misc_feature 1..120: note = Artificially Synthesized Probe
  source 1..120: mol_type = other DNA
gttctgagcttattctaaaaaatgttgataagagcattgtcatcgtgaagacacgatgacttcactttaatgtttatcatccactctttcaagtggctgagtacagcgtatgaggttgcc

SEQ ID NO: 18979 - DNA, 120 bp, synthetic construct
  misc_feature 1..120: note = Artificially Synthesized Probe
  source 1..120: mol_type = other DNA
aacaaaaagagaccaacctttgcacatggcaatatgaggtcctagaatttttaagtcattgttttatttgcatgtgagtgagtgtcagtattcatgtagcacaatgcctggtgcacaggc

SEQ ID NO: 18980 - DNA, 120 bp, synthetic construct
  misc_feature 1..120: note = Artificially Synthesized Probe
  source 1..120: mol_type = other DNA
ctggatcctgctcaccttttgccttcttcttccccgcagtgtcatcctgtgaccaagagcaccagtctgccctggaggaagccaagcagcccaagaacgacaatgtggtgatccctgagt

SEQ ID NO: 18981 - DNA, 120 bp, synthetic construct
  misc_feature 1..120: note = Artificially Synthesized Probe
  source 1..120: mol_type = other DNA
cacagtcacacacaaccactaatactctcacacactcatacccacactcatacaatcccccaaacacccccccacacacaaacatacccacagtcacacattcaccccacacacacacac

SEQ ID NO: 18982 - DNA, 120 bp, synthetic construct
  misc_feature 1..120: note = Artificially Synthesized Probe
  source 1..120: mol_type = other DNA
gggttttcacagtagctcctgaagaacaagagctgtgtgttcatggaaattgtataaccgtgagtagaaatggttttgcagctctttgtaacatgaatttgacttcgatgtgtcctagat

SEQ ID NO: 18983 - DNA, 120 bp, synthetic construct
  misc_feature 1..120: note = Artificially Synthesized Probe
  source 1..120: mol_type = other DNA
tttattattattcattcattcagcacaaatactgattatcaacaacattcaaaccctctttcagggactgaggaaatagcattgaataagagaggagaggccccacctctcctgcggttt

SEQ ID NO: 18984 - DNA, 120 bp, synthetic construct
  misc_feature 1..120: note = Artificially Synthesized Probe
  source 1..120: mol_type = other DNA
gtctgtggctaagacagtcttggttttgttacaaaagtggaaggggaggcagcctgcagggtctggttcctcgtgcaaacagttagacaggtggtagacacaaagatggtagaggtggtg

SEQ ID NO: 18985 - DNA, 120 bp, synthetic construct
  misc_feature 1..120: note = Artificially Synthesized Probe
  source 1..120: mol_type = other DNA
gaacccagtgcagtttttatcaaaaggtggggtgtatcagttaggaagcttttggtttcatgtagtgagatgagaaactgatgaatgaatataaatgaccagagatggcatgatctccct

SEQ ID NO: 18986 - DNA, 120 bp, synthetic construct
  misc_feature 1..120: note = Artificially Synthesized Probe
  source 1..120: mol_type = other DNA
taaacataaattgcatcgtctttgatatgtgacctctcttatcctcatgtcaccatgcatgagaattaaaaggcgttagttttgtggcagactcatcccaaggaccacaagtacatgcca

SEQ ID NO: 18987 - DNA, 120 bp, synthetic construct
  misc_feature 1..120: note = Artificially Synthesized Probe
  source 1..120: mol_type = other DNA
tcttgtgacctcttggagctgacccccacccccacattttcaaagaatatgagttaatggctttcagttagaatgtgatagcttaactgtttgccagagtgtgtcagagactttaatttc

SEQ ID NO: 18988 - DNA, 120 bp, synthetic construct
  misc_feature 1..120: note = Artificially Synthesized Probe
  source 1..120: mol_type = other DNA
gaaaaaaatagaacctaaagtgatctctgtgaagtaaataggatcttgtagccctttctttaagaatgaaaaaagaaaatagggcagagggagaggatgagaactggcggaacgctggcc

SEQ ID NO: 18989 - DNA, 120 bp, synthetic construct
  misc_feature 1..120: note = Artificially Synthesized Probe
  source 1..120: mol_type = other DNA
tcgtttttttttttttaacactgaggcagactttcgtagcttcacgaggtggattggaaatgagttggcctttggtgctacaggaatctaaatcctgaagtcctttgcatcctttccttg

SEQ ID NO: 18990 - DNA, 120 bp, synthetic construct
  misc_feature 1..120: note = Artificially Synthesized Probe
  source 1..120: mol_type = other DNA
cacactacagcgtactttgtttagagtacgtgcttgatcttgtctcatacagaaactggatgaattccggatgagtaaacttttgtgcttcctgtactatttgtactgtcattggtagaa

SEQ ID NO: 18991 - DNA, 120 bp, synthetic construct
  misc_feature 1..120: note = Artificially Synthesized Probe
  source 1..120: mol_type = other DNA
ggaagaccttttcctggtggaatctaatctgttacactctagacccagactattgatttaaagatgacacagtcatttgtccagtgagaacaactggtccttgatattgagaaacatgat

SEQ ID NO: 18992 - DNA, 120 bp, synthetic construct
  misc_feature 1..120: note = Artificially Synthesized Probe
  source 1..120: mol_type = other DNA
attctaaaaagaggcacaaaaccacaccttcttaaaccacaccttcctaaaccagatcttcttaaaccagcccttcctaaaccacaccttcttcttggacaggttcacctcactttattt

SEQ ID NO: 18993 - DNA, 120 bp, synthetic construct
  misc_feature 1..120: note = Artificially Synthesized Probe
  source 1..120: mol_type = other DNA
atgtaggcagttttcttttcctactagaagactttttggctaagtgatactggtaagctttgacttactagccatgtggttttgcttatctagggccccgcagcactggtcttgaatggg

SEQ ID NO: 18994 - DNA, 120 bp, synthetic construct
  misc_feature 1..120: note = Artificially Synthesized Probe
  source 1..120: mol_type = other DNA
tacaatggagactttgatctaaagtgaagtcaaaataagtgatttcatggcctagagtgcagggtttcctctcacctttcctgatcatgcaattgtgtctttcactctcggatacggttt

SEQ ID NO: 18995 - DNA, 120 bp, synthetic construct
  misc_feature 1..120: note = Artificially Synthesized Probe
  source 1..120: mol_type = other DNA
acagccagcacagggggcctcttcacacctacagccagcacagggcctcttcacacctacagccagcacagggggcctcttcacacctacagccagcacagggcctcttcacacctacag

SEQ ID NO: 18996 - DNA, 120 bp, synthetic construct
  misc_feature 1..120: note = Artificially Synthesized Probe
  source 1..120: mol_type = other DNA
tcacacctacagccagcacagggggcctcttcacacctacagccagcacagtacctcttcacacctacagccagcacagggcctcttcacacctacagccagcacagggcctcttcatac

SEQ ID NO: 18997 - DNA, 120 bp, synthetic construct
  misc_feature 1..120: note = Artificially Synthesized Probe
  source 1..120: mol_type = other DNA
ttttttgaagattagttatggttttctgagagagcataaaatgaaccttaccttgccctaagtggagcttaggacattttccaaaaggtagttagatcaggagcaacacattcctgccag

SEQ ID NO: 18998 - DNA, 120 bp, synthetic construct
  misc_feature 1..120: note = Artificially Synthesized Probe
  source 1..120: mol_type = other DNA
gcaccggagagatgagaactaagaaggagcgatatggctactcttgcagcaaggccagcagaattctcagtgggattttattacaatatttcttttggctgatattttgtcttcatgttt

SEQ ID NO: 18999 - DNA, 120 bp, synthetic construct
  misc_feature 1..120: note = Artificially Synthesized Probe
  source 1..120: mol_type = other DNA
tttattgctgtgctatcaccacgatgaaataattaatttttaaacgcgaggcctccgtgctccattttgcactgagccctacaaacaagccgatcatgattagtaacaacacacagcttg

SEQ ID NO: 19000 - DNA, 120 bp, synthetic construct
  misc_feature 1..120: note = Artificially Synthesized Probe
  source 1..120: mol_type = other DNA
gcgatggcaggaaagctggagtgcccttcagtcactactccacagactccactaaactgggaaccaatttctgaaattatgggctgcattttatttgtttattcaatataataagacaat

SEQ ID NO: 19001 - DNA, 120 bp, synthetic construct
  misc_feature 1..120: note = Artificially Synthesized Probe
  source 1..120: mol_type = other DNA
taatatttgcctgtggtctctcccctccaccaaaccaagcaattcagatgccttgagcgttctttagctatcggtatttcatctcttcactgaatcatgtttattgttttcacttggaag

SEQ ID NO: 19002 - DNA, 120 bp, synthetic construct
  misc_feature 1..120: note = Artificially Synthesized Probe
  source 1..120: mol_type = other DNA
ctagaataaaggcaagactaatagaaatggcccagctgataggagcaattgagttatgttcttcctgataattccttaagaatttaattggacagactaaggctgcagtgcccagatgca

SEQ ID NO: 19003 - DNA, 120 bp, synthetic construct
  misc_feature 1..120: note = Artificially Synthesized Probe
  source 1..120: mol_type = other DNA
aaccatatcaccactcattgcgttacacaggggtaaaattgtttattcaaaggcagcagaatagcattgttgtctttggaatttctctaatggattaatcttctttttttttttcttgag

SEQ ID NO: 19004 - DNA, 120 bp, synthetic construct
  misc_feature 1..120: note = Artificially Synthesized Probe
  source 1..120: mol_type = other DNA
tgacttccgtagcttgtccatctggacagtgagttagctctgctgctacataaatttaagtaagtgagatgatctgtttaattctgttcgtgctctattgtccagggtatctctatagaa

SEQ ID NO: 19005 - DNA, 120 bp, synthetic construct
  misc_feature 1..120: note = Artificially Synthesized Probe
  source 1..120: mol_type = other DNA
caccacaacattcaaaatggcaaatatttactgagaacttagacggtgtcagcctaggtgctttccctatatgagttcatttacgactcatgacagtgctgtgaggaagtgttattgatt

SEQ ID NO: 19006 - DNA, 120 bp, synthetic construct
  misc_feature 1..120: note = Artificially Synthesized Probe
  source 1..120: mol_type = other DNA
acacacacattcacagaaacacacacacaaacacagatacataaacacacatgtacacagacacacacatccccacacacagacacacaaacacatgcactcacacagacacatgcacac

SEQ ID NO: 19007 - DNA, 120 bp, synthetic construct
  misc_feature 1..120: note = Artificially Synthesized Probe
  source 1..120: mol_type = other DNA
gagaaattattcaagtagcccccacgtgaagcagaggtcttgccacgtgaaggaggcaagttccttacactgcttaggaaaagacaatctacattgtggaggaattaattctttttactt

SEQ ID NO: 19008 - DNA, 120 bp, synthetic construct
  misc_feature 1..120: note = Artificially Synthesized Probe
  source 1..120: mol_type = other DNA
ataggagtcttagtttatgtgattctcaagacaaggagcttctcatttaaccagcttcagagaagagacacactccaggccccataaccttggaggagctagatatttgtaaaaatctag

SEQ ID NO: 19009 - DNA, 120 bp, synthetic construct
  misc_feature 1..120: note = Artificially Synthesized Probe
  source 1..120: mol_type = other DNA
aacaagaaatcaattataaacttccattcaatggagtgatatattgctttgtcactggtagattcaaaatggcctttagctctgagcctgtggtcctcatctcagggacaggcagcaaga

SEQ ID NO: 19010 - DNA, 120 bp, synthetic construct
  misc_feature 1..120: note = Artificially Synthesized Probe
  source 1..120: mol_type = other DNA
gtatccaacataaattatacttttatttgaccaattccttctcctaagtccccacgtctcactcttgtctgcctattcaacatggattctggaggacctgctgcaagattactaaactgt

SEQ ID NO: 19011 - DNA, 120 bp, synthetic construct
  misc_feature 1..120: note = Artificially Synthesized Probe
  source 1..120: mol_type = other DNA
ttaaagctccgctgaagtgtaagcatttctggtgtttatgaagctgacttggtaaatccttttgccatcttacttacattccctttcaaagcttattcttttgcttgaaacaccggggtg

SEQ ID NO: 19012 - DNA, 120 bp, synthetic construct
  misc_feature 1..120: note = Artificially Synthesized Probe
  source 1..120: mol_type = other DNA
ctccagtctcctatagtgctcccaggcttattaggaagaggaaattcccacctaataaattttgatcagacggtctgctctcaaaaccctgtctcctgataagatgttatcaatgacaat

SEQ ID NO: 19013 - DNA, 120 bp, synthetic construct
  misc_feature 1..120: note = Artificially Synthesized Probe
  source 1..120: mol_type = other DNA
aataaaactaacagtacgtgcttgggaaaagcttttcttgaaggaatgcagacattggtttggtgagcttgtttctggttggttgtgttttcatatttcctcctcgtcttgaaggaatgc

SEQ ID NO: 19014 - DNA, 120 bp, synthetic construct
  misc_feature 1..120: note = Artificially Synthesized Probe
  source 1..120: mol_type = other DNA
tttatgcaatttctgtttgatatacagatggttaatgtccttcttcatccacaacattgtaactggttttggaaaaggagcaggctaaggacagaattctgtggctcgtcctcagaagct

SEQ ID NO: 19015 - DNA, 120 bp, synthetic construct
  misc_feature 1..120: note = Artificially Synthesized Probe
  source 1..120: mol_type = other DNA
aactcaataatttaagaattaccccaaacaaaaaaaaatacagaagctgtcacaatacaatgcttggccacttgtcattgaggcagaagaagaagtgagtcctccttgcaggagacacag

SEQ ID NO: 19016 - DNA, 120 bp, synthetic construct
  misc_feature 1..120: note = Artificially Synthesized Probe
  source 1..120: mol_type = other DNA
atcgtagacactgtttctctgtgtgaatacagggacagcaaacatttgggagctctcagcctgatttctgatttcctttgactttaaaaaatgtgtgtggcttttagttactttctaagc

SEQ ID NO: 19017 - DNA, 120 bp, synthetic construct
  misc_feature 1..120: note = Artificially Synthesized Probe
  source 1..120: mol_type = other DNA
tttatatcctcctaatttgaaagcaattttacataaaattgaaatctggcaatgaaggaggaatagcatgtctgttgtgtgactgatgaggacagcccccagcctgtgagaagtgtctgc

SEQ ID NO: 19018 - DNA, 120 bp, synthetic construct
  misc_feature 1..120: note = Artificially Synthesized Probe
  source 1..120: mol_type = other DNA
ttccaagtcctctctgtgcatccactcaagtcaactcaatccagacgtagatgtgagggacacgaggaaatggagtttgtttattttttcacttttttgatctttctaactgaggtagtt

SEQ ID NO: 19019 - DNA, 120 bp, synthetic construct
  misc_feature 1..120: note = Artificially Synthesized Probe
  source 1..120: mol_type = other DNA
tacgtataatttgtgaaagaccatgacatttacctccatttaaaaactgcttcttccaaacaaaactgcaaaaccagtgcctgagaccttgagaggagagaaggattcctgtctgtttgt

SEQ ID NO: 19020 - DNA, 120 bp, synthetic construct
  misc_feature 1..120: note = Artificially Synthesized Probe
  source 1..120: mol_type = other DNA
tccgtagtgcatgagccccgagaggagaaaatgattcctgcctgtttgtgtcatatgcatttattgtgtgtagacctggcttcgttacaaatctagatggaaaaaagcaaatttaaaaca

SEQ ID NO: 19021 - DNA, 120 bp, synthetic construct
  misc_feature 1..120: note = Artificially Synthesized Probe
  source 1..120: mol_type = other DNA
tttatctaaccgtagcttaagtcaatcttttcattgaaaatgaggaactgttcttaaatgaagacattctggcaaatacttggaatgcgttcgattccatcatcaggtggaccagagtcc

SEQ ID NO: 19022 - DNA, 120 bp, synthetic construct
  misc_feature 1..120: note = Artificially Synthesized Probe
  source 1..120: mol_type = other DNA
aaaacagattaggagtctggaaagaaaagtttctcttttgacttgaaagcatttcctaaactacatatgcggggaaagaaagagacaaaaacgctagcctgagcctgaacatctggacac

SEQ ID NO: 19023 - DNA, 120 bp, synthetic construct
  misc_feature 1..120: note = Artificially Synthesized Probe
  source 1..120: mol_type = other DNA
cactggaggaacttcctaattcttttcaggcactgacttctaaccaagtgcccacttctatcagtgtattagttatcagtgttaattcatcaaagcactatctaaagcctatggacctct

SEQ ID NO: 19024 - DNA, 120 bp, synthetic construct
  misc_feature 1..120: note = Artificially Synthesized Probe
  source 1..120: mol_type = other DNA
cttttttttcttatgtttaaactgcatggaaagttaaaagttggaaagccaagtgttacatgtaatgacaggcgtcaaatgcttaatggagcaagtggggtacttgggaaacatctcgca

SEQ ID NO: 19025 - DNA, 120 bp, synthetic construct
  misc_feature 1..120: note = Artificially Synthesized Probe
  source 1..120: mol_type = other DNA
aatctgcgcttggaataaaacaaagaagcacagcatttaataaatgagcatttactatgtagaaggagtggtctgtttcggctggggatggagcattgagattgcggtgctttttaactc

SEQ ID NO: 19026 - DNA, 120 bp, synthetic construct
  misc_feature 1..120: note = Artificially Synthesized Probe
  source 1..120: mol_type = other DNA
tttgttagtgtcaagacaaaactggatttaatcgcaaaggagaaattctcagcgcctttcttacagatttctggagaaggagagaaggagtcacaaaaacatcttagtaacattatttcc

SEQ ID NO: 19027 - DNA, 120 bp, synthetic construct
  misc_feature 1..120: note = Artificially Synthesized Probe
  source 1..120: mol_type = other DNA
gtgcacacaccactcctcagaagcatctgaacaacttagagaagaaagctcctttgtcatccattcttttctcctcatttctcatctataccagtttcctaaacattggaactaaacatg

SEQ ID NO: 19028 - DNA, 120 bp, synthetic construct
  misc_feature 1..120: note = Artificially Synthesized Probe
  source 1..120: mol_type = other DNA
tggattctgcagatcagctggagcacctgaggatacttgggctaagctactcccttcattgttttgccacagattggatataaattggtgaacttattctgtttctagctttgaaaagaa

SEQ ID NO: 19029 - DNA, 120 bp, synthetic construct
  misc_feature 1..120: note = Artificially Synthesized Probe
  source 1..120: mol_type = other DNA
tgattgcttgtaatctttcatttttgttcgccttttttcttcagaagtagttttgaagtacagtcgtccgtcatcagtaacaagcattattccaggtcctggggtgactgtgacatggga

SEQ ID NO: 19030 - DNA, 120 bp, synthetic construct
  misc_feature 1..120: note = Artificially Synthesized Probe
  source 1..120: mol_type = other DNA
actgttacttctttcttggaaagtagcatttgccccgtggccgtgatgctttttgctatagattttgatctcctttttcagttgtgtgcaaagagactaacacagacctttttgcactct

SEQ ID NO: 19031 - DNA, 120 bp, synthetic construct
  misc_feature 1..120: note = Artificially Synthesized Probe
  source 1..120: mol_type = other DNA
tataaaaatttaacaaaatgtaaatggtaacaagctccgtttgtcacctctcccctggatatttacacacaaatagacccagttggaatcggcaaattttgctccctgcttgtgaagctc

SEQ ID NO: 19032 - DNA, 120 bp, synthetic construct
  misc_feature 1..120: note = Artificially Synthesized Probe
  source 1..120: mol_type = other DNA
tgaacattacatattggcaaccttctcagcttatttggacacagtagggccttaaaaaggagccttctgcaaacacaggaagttgcttagcaggttttcttgtagcaagactaaatcact

SEQ ID NO: 19033 - DNA, 120 bp, synthetic construct
  misc_feature 1..120: note = Artificially Synthesized Probe
  source 1..120: mol_type = other DNA
tctcctctcactgtctgtctgctaaagaagacttaaggaaataaaaaggcaatactaacagaaaatgtcatgaatgtgtaggaaattaaatttaatagagcaggccgggcgcaggggctc

SEQ ID NO: 19034 - DNA, 120 bp, synthetic construct
  misc_feature 1..120: note = Artificially Synthesized Probe
  source 1..120: mol_type = other DNA
gctaaaaatgttcttctaaattatttctttaaattgttatatctgatgaccagtgctgcaggctgagacaccaggaccatgagaactacaagcaggggttatgggtttgagggaaggaca

SEQ ID NO: 19035 - DNA, 120 bp, synthetic construct
  misc_feature 1..120: note = Artificially Synthesized Probe
  source 1..120: mol_type = other DNA
aactgcgtgttggtttgcaatgagcctttttactgttcagaccacggttggcttcccccagaatggattgtcttctggtatttgaggtgcaaacctgggaaccactggaataaccaaccc

SEQ ID NO: 19036 - DNA, 120 bp, synthetic construct
  misc_feature 1..120: note = Artificially Synthesized Probe
  source 1..120: mol_type = other DNA
agatgttaggaactcaccaaccctgcacctgagctccaaccagatgttaggaactcaccaaccctgcacctgagctccaaccagatgttaggaactcaccaaccctgcacctgagctcca

SEQ ID NO: 19037 - DNA, 120 bp, synthetic construct
  misc_feature 1..120: note = Artificially Synthesized Probe
  source 1..120: mol_type = other DNA
ggggatctgtttcctgatttgtgtaatacttgctgggtagggctagtagacaccgctcaaatctctgtcgtttatgactcttttatttgttgtcaactcgataacaaatgtggaagagaa

SEQ ID NO: 19038 - DNA, 120 bp, synthetic construct
  misc_feature 1..120: note = Artificially Synthesized Probe
  source 1..120: mol_type = other DNA
aattagggcaagcctagatctgtgtcatggcgacgcacttcctgctaatttctctgtgaaaagtcagctctgaaaaattaagctttagtttgaagctttttgtatagggtctttgtggtt

SEQ ID NO: 19039 - DNA, 120 bp, synthetic construct
  misc_feature 1..120: note = Artificially Synthesized Probe
  source 1..120: mol_type = other DNA
gctcaccttcagaccataacaggctgctttcttcacttcctgtgctttttctcttattttggtccctgctcaggatcccagaagacaaatggtgttttgctctttgagacttaaaaccta

SEQ ID NO: 19040 - DNA, 120 bp, synthetic construct
  misc_feature 1..120: note = Artificially Synthesized Probe
  source 1..120: mol_type = other DNA
gggttttcaggtagagtaattgggcccagagctgtgattatggtgacagaattttgaaaatttcgggatgaaacgatttcaagatggatccacagcagttaagaagatgttctgttctcc

SEQ ID NO: 19041 - DNA, 120 bp, synthetic construct
  misc_feature 1..120: note = Artificially Synthesized Probe
  source 1..120: mol_type = other DNA
ttgtaggttgggtgaggttgtagattataggctgagtgagggtggaggttgtagattgggtgagggtgaaggttgttgactgggtaagggtagaggttgtaggttgtgtgaggatggaga

SEQ ID NO: 19042 - DNA, 120 bp, synthetic construct
  misc_feature 1..120: note = Artificially Synthesized Probe
  source 1..120: mol_type = other DNA
tggagcacagcgcgatctcttctgatgccattgtcttaggtgaaaagtttaagttgctgcagaagttagagttctcttcttcagatccctctgaataatctgatatgtctcatttttact

SEQ ID NO: 19043 - DNA, 120 bp, synthetic construct
  misc_feature 1..120: note = Artificially Synthesized Probe
  source 1..120: mol_type = other DNA
actccaatagtatttgaatttgaaccgttggctgaaaagcctatattttttcctgtaaagtagtcattccaggcaagacaagtagaggaacagcagcactcattttggcacttagaccat

SEQ ID NO: 19044 - DNA, 120 bp, synthetic construct
  misc_feature 1..120: note = Artificially Synthesized Probe
  source 1..120: mol_type = other DNA
aatacgtcagaaagtaggtttgcaagggaagataatgagtccagttgggtcctgtttcttttgagctgcctattgaatgaaactccacatggagataacgaagttggatctgataatctg

SEQ ID NO: 19045 - DNA, 120 bp, synthetic construct
  misc_feature 1..120: note = Artificially Synthesized Probe
  source 1..120: mol_type = other DNA
cagctctccagggaaggtggatttaccttagagtttggggtaaagtaaaacattcttctaaggctggactagagaatctgtatgttagaaagtacttacatagttactttcatgatccag

SEQ ID NO: 19046 - DNA, 120 bp, synthetic construct
  misc_feature 1..120: note = Artificially Synthesized Probe
  source 1..120: mol_type = other DNA
aagcccctgtatttgttgtggatttaagtggaggcggccagcacacaccttggatgtaatttaaaaccatttcctgaggaaagatgtgtgatatgctttcctttgtttagcaaatgttta

SEQ ID NO: 19047 - DNA, 120 bp, synthetic construct
  misc_feature 1..120: note = Artificially Synthesized Probe
  source 1..120: mol_type = other DNA
actttgacgggttgtctttctgtgcaactaatttaaacctcaagtttagtgtaggagatgggtttgtcttctcacctcttcagatctttatcaagggggaataaaagccaacccagaaac

SEQ ID NO: 19048 - DNA, 120 bp, synthetic construct
  misc_feature 1..120: note = Artificially Synthesized Probe
  source 1..120: mol_type = other DNA
tacaatgtatgtgtcctcttttgaccttggaaatctgtatgtggtggagaagtatttgaatgcatttaggcttaatttcttcgccttccacatgttaacagtagagctctatgcactccg

SEQ ID NO: 19049 - DNA, 120 bp, synthetic construct
  misc_feature 1..120: note = Artificially Synthesized Probe
  source 1..120: mol_type = other DNA
gcatcgcgtaaggcttcttgcttatttaaactgtgcaaggtaaaaatcaagcctttggagccacagaaccagctcaagtacatgccaatgttgtttaagaaacagttatgatcctaaact

SEQ ID NO: 19050 - DNA, 120 bp, synthetic construct
  misc_feature 1..120: note = Artificially Synthesized Probe
  source 1..120: mol_type = other DNA
aataaattttaaaaaaagctggtgcttttctccaagttatacaactagaagcctgagcccactcctcgcattcccctcccccacaccctgcatcccccacacacctagcattcccctccc

SEQ ID NO: 19051 - DNA, 120 bp, synthetic construct
  misc_feature 1..120: note = Artificially Synthesized Probe
  source 1..120: mol_type = other DNA
caaaccatcccccactctcctccttatgtctgaaaaggcttgcctgcatttttgtcaaaaatatcttggttggacatttattttagaagcatactgaccaactcataaatcatgcccatc

SEQ ID NO: 19052 - DNA, 120 bp, synthetic construct
  misc_feature 1..120: note = Artificially Synthesized Probe
  source 1..120: mol_type = other DNA
aacaggagattgtacgtgtaaagcctgatgtgaaacaggcactcaacacaggccatcaggaactcaaatatgggtgtcagaaccattttgtgtcaaatgattctgaattttcctcttgaa

SEQ ID NO: 19053 - DNA, 120 bp, synthetic construct
  misc_feature 1..120: note = Artificially Synthesized Probe
  source 1..120: mol_type = other DNA
atggcacatttcatgattttagttttcccctgtcccgtctagtggaagtctgctggatttcactggccactgacgtctcttcttggcgtctctggcttcagagttttaactggacatttt

SEQ ID NO: 19054 - DNA, 120 bp, synthetic construct
  misc_feature 1..120: note = Artificially Synthesized Probe
  source 1..120: mol_type = other DNA
caaggtccttaacgcacagcctacaacttaagcattttctatccccacagcacctcataatcatgtgaaaaagacactcaaaaactaccatttgaatggatggatgaaaataacctccgt

SEQ ID NO: 19055 - DNA, 120 bp, synthetic construct
  misc_feature 1..120: note = Artificially Synthesized Probe
  source 1..120: mol_type = other DNA
cgtatttttactagttgatgggaaagacattgggaaagacctgggctggatttgtgatgagctgtgtttactgagcatgatgaagtaaagctcaacgtgattactctgaagtccagcctt

SEQ ID NO: 19056 - DNA, 120 bp, synthetic construct
  misc_feature 1..120: note = Artificially Synthesized Probe
  source 1..120: mol_type = other DNA
gggaaccgctgggacgccaactgggtaatacggatttcttttttgaagtctattctggttcccaccctaaataactccctcttcaccttcttatttttaaataactaaactattgattga

SEQ ID NO: 19057 - DNA, 120 bp, synthetic construct
  misc_feature 1..120: note = Artificially Synthesized Probe
  source 1..120: mol_type = other DNA
cttcagctttataatgatgccctcccacggttagggattgtgcatttttctccagacattcgagcaaagcaattcttgcttttaatcattgtaattatagcggaagcgttgaagtggatt

SEQ ID NO: 19058 - DNA, 120 bp, synthetic construct
  misc_feature 1..120: note = Artificially Synthesized Probe
  source 1..120: mol_type = other DNA
tacaatgtgcgaagtgtgtcttgcttgtagcttcaaagactactattggttgatgtttacagcacatttgctgcttttaaatgacaacacttcttcagtctggggcgctggaagaattat

SEQ ID NO: 19059 - DNA, 120 bp, synthetic construct
  misc_feature 1..120: note = Artificially Synthesized Probe
  source 1..120: mol_type = other DNA
tgtggaatgtgtgcttgggttccgaaggtcactttgtatctgattccaaatccctcagaaactcactctttaattagttctagaggtatttttgttgagtgagacacaacaaggaaggtg

SEQ ID NO: 19060 - DNA, 120 bp, synthetic construct
  misc_feature 1..120: note = Artificially Synthesized Probe
  source 1..120: mol_type = other DNA
aaaggtgaccctccactgtcaagattctgagtatcaactctgggagttaccaacattcactcgacatttgggtgaacatcatttgatgatggcaccgaatcgtgttattataaaaacaat

SEQ ID NO: 19061 - DNA, 120 bp, synthetic construct
  misc_feature 1..120: note = Artificially Synthesized Probe
  source 1..120: mol_type = other DNA
ttccaaaactcctctctgcagctcagtccggagcagggttgtgttctgcccttcccaggctggagcataaccactcaccccgtggctgcatccttcctccctcgggccttcacacacctt

SEQ ID NO: 19062 - DNA, 120 bp, synthetic construct
  misc_feature 1..120: note = Artificially Synthesized Probe
  source 1..120: mol_type = other DNA
agcataggtcatatggtcttgaaagaaatccaagtctggttttattcctaaaacgatcatggtctgcagcaaggtagatagagaaagtccagcctttgtattacctcctcagaaacacta

SEQ ID NO: 19063 - DNA, 120 bp, synthetic construct
  misc_feature 1..120: note = Artificially Synthesized Probe
  source 1..120: mol_type = other DNA
cagcccctccccacacacatagcagtgaaatgatgttgagatcatgcagagtactatgtgatattctccagatttggtgcttcaagatggatttttcataaaaagactctgcaaagatat

SEQ ID NO: 19064 - DNA, 120 bp, synthetic construct
  misc_feature 1..120: note = Artificially Synthesized Probe
  source 1..120: mol_type = other DNA
acaaacccactaggaaacagctgcatatgtgaattacgtgctttgtaagcgctgggatgtaaatattcttttatgcaactcttccttattgaattgaggagaggaccagcacagatctat

SEQ ID NO: 19065 - DNA, 120 bp, synthetic construct
  misc_feature 1..120: note = Artificially Synthesized Probe
  source 1..120: mol_type = other DNA
ttctcattataaaatgataattttcatagtttgctaagaaatatccatcaattaccatcatccccctgcttaaggttcttctgtatcagtggagaggcttcgggcaggtgttcccgtagg

SEQ ID NO: 19066 - DNA, 120 bp, synthetic construct
  misc_feature 1..120: note = Artificially Synthesized Probe
  source 1..120: mol_type = other DNA
tgaacttttctataacgtagcatctgcattagtacagctgctgggagttaacacaccacggtgtgcccaggaaatgttacattttaattttcttactcagaatggtaggattagccattg

SEQ ID NO: 19067 - DNA, 120 bp, synthetic construct
  misc_feature 1..120: note = Artificially Synthesized Probe
  source 1..120: mol_type = other DNA
ctcagcttcttcatttgtgtccttcgctgtatccagttgctggagtagctgcatttgaaaccatatgagcctctgcaatgcagaaaaataattagatgaagtaaggaatttatccatggt

SEQ ID NO: 19068 - DNA, 120 bp, synthetic construct
  misc_feature 1..120: note = Artificially Synthesized Probe
  source 1..120: mol_type = other DNA
aacattagttcttctgggaaaagtattaggaaggcgagcaagtcagtttccacgctttacacacttatatgtaaatgaggtgaccagggttatcacctatgtttggtatacgtgtaccca

SEQ ID NO: 19069 - DNA, 120 bp, synthetic construct
  misc_feature 1..120: note = Artificially Synthesized Probe
  source 1..120: mol_type = other DNA
cagggttactgatttgcttcaggtgcctttaggatttttgcaggaaaagagtcaatatttaacattttacttccaggagagcagtcccaaacaaatccttctcatccatattgctgactg

SEQ ID NO: 19070 - DNA, 120 bp, synthetic construct
  misc_feature 1..120: note = Artificially Synthesized Probe
  source 1..120: mol_type = other DNA
cagtcctcctccttggacccttgtttctcctccttgatcccttggcctccttggtctccctgttcctgttggttgcctcctcctccttgacttggtcctcctccttgatcctctggtctt

SEQ ID NO: 19071 - DNA, 120 bp, synthetic construct
  misc_feature 1..120: note = Artificially Synthesized Probe
  source 1..120: mol_type = other DNA
cttgtcccacctcccttctctgtgccacattctgtgtggggtcttcagttacttctgggtcatcaaaactggttagttttgatatttttaaaatgtttgttgttgcacttacaataactt

SEQ ID NO: 19072 - DNA, 120 bp, synthetic construct
  misc_feature 1..120: note = Artificially Synthesized Probe
  source 1..120: mol_type = other DNA
tgagaaaatatgcgccctgttcaggcagaccagggacaggagtgcagactctgtgtgtgtttcttttatttctcttttagcaactggtactctttttcttttttttctattgacctattg

SEQ ID NO: 19073 - DNA, 120 bp, synthetic construct
  misc_feature 1..120: note = Artificially Synthesized Probe
  source 1..120: mol_type = other DNA
tgtttttcctgattcttaaggtggagtcttatgtttctgatctggggtatttcttgccttttattgccagtgtttaccaccatgtattacctatagagtggtgctttaatcccttcccat

SEQ ID NO: 19074 - DNA, 120 bp, synthetic construct
  misc_feature 1..120: note = Artificially Synthesized Probe
  source 1..120: mol_type = other DNA
atttcacctccctgcttagctgtgcttctagatattttatttttgtgtgtgattatggtgaacaggattgcttcttgatttggcacttgctttggaagttattggtgtttagaaatgcta

SEQ ID NO: 19075 - DNA, 120 bp, synthetic construct
  misc_feature 1..120: note = Artificially Synthesized Probe
  source 1..120: mol_type = other DNA
gaggattttttttaattatttaagttgtagggtacatgtgcacaatgtgcaggttagttacatatgtatacatgtgccatgctggtgcgctgcacccactaactcatcatctagcattag

SEQ ID NO: 19076 - DNA, 120 bp, synthetic construct
  misc_feature 1..120: note = Artificially Synthesized Probe
  source 1..120: mol_type = other DNA
ctggctagcagtatatccatcttatttatttttttaaagagcaaatttgtggttttgctaatcttttgtatgttttttcatgtgtgtttccattgcattcagttcaactctaattttgtt

SEQ ID NO: 19077 - DNA, 120 bp, synthetic construct
  misc_feature 1..120: note = Artificially Synthesized Probe
  source 1..120: mol_type = other DNA
gtgctcctgtgttgagtccatacacatttagcatagttaagtctccttgatgtgaaccctttaccattgtatgaggtccttctttgtcttctttgattgtcgttggtttaaattctgttt

SEQ ID NO: 19078 - DNA, 120 bp, synthetic construct
  misc_feature 1..120: note = Artificially Synthesized Probe
  source 1..120: mol_type = other DNA
tttggaactctttattattaactctttgaacatgcctctgcctttttctttttctcctctctttctagaactgtaactgcctgttactgagtttctgattttcccacagctctgatatgt

SEQ ID NO: 19079 - DNA, 120 bp, synthetic construct
  misc_feature 1..120: note = Artificially Synthesized Probe
  source 1..120: mol_type = other DNA
gattttctgaatcattcatgaagctctaggttttcaaaggtgtcttatcagctgaagtttctaaaatgttgctggcttcctcccagcttgttttttggcagcatttcctactctggagct

SEQ ID NO: 19080 - DNA, 120 bp, synthetic construct
  misc_feature 1..120: note = Artificially Synthesized Probe
  source 1..120: mol_type = other DNA
ccatgagcaaacagcaacagttcccctgtgactcttaggagatttgcaggagaaagtctctggggcaaggagtattgagtacattgacatctactatataataagctctaaagattaatt

SEQ ID NO: 19081 - DNA, 120 bp, synthetic construct
  misc_feature 1..120: note = Artificially Synthesized Probe
  source 1..120: mol_type = other DNA
attttatcatgaaataacatttgtgtttgagtggtattttgagttgtgaaggtttgaagctggggaggaagagaaacacgagccagcacgctgtgacatatcgatgttgtgatgagcttg

SEQ ID NO: 19082 - DNA, 120 bp, synthetic construct
  misc_feature 1..120: note = Artificially Synthesized Probe
  source 1..120: mol_type = other DNA
aatattatgtaagaaaccattgtacttttcttgttatggcttatttgccctgcgttagaagattttcaaacatgttagtaaaggtgcctgcctggtaatgtctgtgaaggtggtccaggg

SEQ ID NO: 19083 - DNA, 120 bp, synthetic construct
  misc_feature 1..120: note = Artificially Synthesized Probe
  source 1..120: mol_type = other DNA
tgatggggagttggggtgtctgttcccacactttatcatagctcagtatacgtggaaaatagtggagaaaagtacattagtaaaagtgattcaggcattattcaacgttcttttttccag

SEQ ID NO: 19084 - DNA, 120 bp, synthetic construct
  misc_feature 1..120: note = Artificially Synthesized Probe
  source 1..120: mol_type = other DNA
ttcattaccagtttgcagcattccccagtatttaacagtgctctgccgtgctggtgcaatgaagaattcaaggagataattgattaagtaagaaggtagcatttaggtacaaatgctgca

SEQ ID NO: 19085 - DNA, 120 bp, synthetic construct
  misc_feature 1..120: note = Artificially Synthesized Probe
  source 1..120: mol_type = other DNA
gtgagcaggtgggagaggagagtttcctagtaaacacgagaaagaataagcatccttgagtaaactaaaacagctgatgatgaataattcatacaacgattctgtttcctatggatctgt

SEQ ID NO: 19086 - DNA, 120 bp, synthetic construct
  misc_feature 1..120: note = Artificially Synthesized Probe
  source 1..120: mol_type = other DNA
tgttcagactcattctattgtagctttgcttttcatgatcaaggtgtttgtatctaacaggagtgtgactttgagcaagggacaaaatatgtgaacaaatagctgcctgttctcctcaag

SEQ ID NO: 19087 - DNA, 120 bp, synthetic construct
  misc_feature 1..120: note = Artificially Synthesized Probe
  source 1..120: mol_type = other DNA
atataaagtaagccttacagttaccagttagaggaattcacgttccacactttttctttgagaataattggtgtttcaaagatgtgccctattaatctggatgctccctgcacaccccct

SEQ ID NO: 19088 - DNA, 120 bp, synthetic construct
  misc_feature 1..120: note = Artificially Synthesized Probe
  source 1..120: mol_type = other DNA
caggatgaagaagctgcagaggtggtgtcaggatgaagaagttgcagaggtggaggttgggatgaagcagaggctctcttctgtagaagttgtggaagtggtggtcaggatgaagaagct

SEQ ID NO: 19089 - DNA, 120 bp, synthetic construct
  misc_feature 1..120: note = Artificially Synthesized Probe
  source 1..120: mol_type = other DNA
taatagcacactttcatgcagttaattaagataaaatgaaaacaaagggcaaaatctcctctctggttggtgatggaaatgggaagtgcgtgtttcttctaccaagggaaggaggctcaa

SEQ ID NO: 19090 - DNA, 120 bp, synthetic construct
  misc_feature 1..120: note = Artificially Synthesized Probe
  source 1..120: mol_type = other DNA
gggttccatcaaagaaaagcgacggaaatgcatgtgcctgcagccattaaacagaaagacaagttgatttttttttttggcaaatttagaaactggtgagaaaacgtttcatgctagagc

SEQ ID NO: 19091 - DNA, 120 bp, synthetic construct
  misc_feature 1..120: note = Artificially Synthesized Probe
  source 1..120: mol_type = other DNA
agacctccttctcacacgctctaccagggttgtttgggatgcaatgacaaaggtaactttaccctttagagaagagaaaatctcacctggaatcaggtttctgttttcatttttaacatt

SEQ ID NO: 19092 - DNA, 120 bp, synthetic construct
  misc_feature 1..120: note = Artificially Synthesized Probe
  source 1..120: mol_type = other DNA
atatgtttttacaaataattttcagacacatgtgtttgaagtgttgctcatgtccttagcatgtgctgggtgctttgggaaatgcaaaagttctagaaaacacagcctctatcctccagg

SEQ ID NO: 19093 - DNA, 120 bp, synthetic construct
  misc_feature 1..120: note = Artificially Synthesized Probe
  source 1..120: mol_type = other DNA
tttccagatgtcaaataagtagaattttaccacgtggagttttgattttttttggcttcttttttcagacttctttggcttatcgcaatgcttccaaaactcacccgtgaggatgcgggg

SEQ ID NO: 19094 - DNA, 120 bp, synthetic construct
  misc_feature 1..120: note = Artificially Synthesized Probe
  source 1..120: mol_type = other DNA
aatgttaaaaagacaagagaggggagtatcctagtggtgttcctgatttcagggataaatagtccctttttctccattaattgtcacactcagtagattgtcagtttgagaaggtccctg

SEQ ID NO: 19095 - DNA, 120 bp, synthetic construct
  misc_feature 1..120: note = Artificially Synthesized Probe
  source 1..120: mol_type = other DNA
cacgcagctttatgcctttgctaacctttgacctttcttttaaaaatccgcttttattgctgccatcttttccttctattctttactaaaggcaaagagctcatgggttctcactgccat

SEQ ID NO: 19096 - DNA, 120 bp, synthetic construct
  misc_feature 1..120: note = Artificially Synthesized Probe
  source 1..120: mol_type = other DNA
tcttaatttgcctgtttctgctggtaatgagatgatttagtaccagagacagagaaaaccagatggcaattgtgttgttccataactgcagggattatagctagttctccctgaaagtct

SEQ ID NO: 19097 - DNA, 120 bp, synthetic construct
  misc_feature 1..120: note = Artificially Synthesized Probe
  source 1..120: mol_type = other DNA
ccatcaactgacccaaatctaccttctctcagacttcatttctgaataactttggaatatcttcccaatttacaagagtgagattaggaccaggaatttgctccccttccacattgcatt

SEQ ID NO: 19098 - DNA, 120 bp, synthetic construct
  misc_feature 1..120: note = Artificially Synthesized Probe
  source 1..120: mol_type = other DNA
ctttagcacccttaatataaaaccccatgtccattaagcaatcagtcctgattacccctccccccaaatcctggcaacatcaaatctactttatatctctaaagatttgccttctgtgga

SEQ ID NO: 19099 - DNA, 120 bp, synthetic construct
  misc_feature 1..120: note = Artificially Synthesized Probe
  source 1..120: mol_type = other DNA
ttgtggatatccagagagcccagcatcatattttcaaaagtcttttcttctctcctttgaattgtcctggaaatcctgttgaaaatcaaattatataatacatgtgagggtttatttctg

SEQ ID NO: 19100 - DNA, 120 bp, synthetic construct
  misc_feature 1..120: note = Artificially Synthesized Probe
  source 1..120: mol_type = other DNA
cttttttcctcctaatattcctttgataggcacacccagtaaaatgttaaatggaagtggcaagaataaacgtatttgtcccattcttgattttagcagaaaaacactcagactttcttc

SEQ ID NO: 19101 - DNA, 120 bp, synthetic construct
  misc_feature 1..120: note = Artificially Synthesized Probe
  source 1..120: mol_type = other DNA
taagagaacttttcaaacacttacctttctggcaacttcgactgccagaaatcagctcagaagtgagcaacttctttcctcttagatggtgccctcaatttctaattcaacagaattcct

SEQ ID NO: 19102 - DNA, 120 bp, synthetic construct
  misc_feature 1..120: note = Artificially Synthesized Probe
  source 1..120: mol_type = other DNA
tcacaaataaacagaataattttataaaatgttaaggggtatgtaggatatagagcagaaggatatgagaacatgtactgggggcgtgacaagctctaggttaagctgggtgccctctct

SEQ ID NO: 19103 - DNA, 120 bp, synthetic construct
  misc_feature 1..120: note = Artificially Synthesized Probe
  source 1..120: mol_type = other DNA
atagccaaggagttcacgcagaatctttgccattgaaggcacctaaaaagccagatgactctacacaacatacattatagtcacatcctcaagggtgaaaaaattcatccaaatgaaagt

SEQ ID NO: 19104 - DNA, 120 bp, synthetic construct
  misc_feature 1..120: note = Artificially Synthesized Probe
  source 1..120: mol_type = other DNA
cctgtaaaggagagtccatcaaatttctaagcctatcaatggacttataaagagaaacctcacaaaccagaagagactagggttctactttcaggcttcttaatgataaaaactgtcaac

SEQ ID NO: 19105 - DNA, 120 bp, synthetic construct
  misc_feature 1..120: note = Artificially Synthesized Probe
  source 1..120: mol_type = other DNA
aaaccaaacccaaagctaacagaagaaaataaataaagataaaagcaaaaccaaataaaattgagaccaaaaaaatcatacaaagcatcatcaaaacaaaaagttgtttctttgaaagga

SEQ ID NO: 19106 - DNA, 120 bp, synthetic construct
  misc_feature 1..120: note = Artificially Synthesized Probe
  source 1..120: mol_type = other DNA
ttcaacatagtactgaaagttttagccagatcagtcagtaaagagaaagacataaaagacatcccaattggaaaagaggatgtcaaattatctctgtttgctgatgatgtgatcttatac

SEQ ID NO: 19107 - DNA, 120 bp, synthetic construct
  misc_feature 1..120: note = Artificially Synthesized Probe
  source 1..120: mol_type = other DNA
ggaaaacatcccaaaaatagacaaattgaactaaaatgcttctgcacagtgaaagacaaaattgacatagtgaacagacaacttatagaatgggggaaaatatttgcaaactgcatttag

SEQ ID NO: 19108 - DNA, 120 bp, synthetic construct
  misc_feature 1..120: note = Artificially Synthesized Probe
  source 1..120: mol_type = other DNA
attcaaaaagaaaaaaataatggatttgcacgagtatatgaatctattatgggaggatgacagtgtatagtcaagagtgtggcctggaattgggtaaggtgagggacggaggtttgcaaa

SEQ ID NO: 19109 - DNA, 120 bp, synthetic construct
  misc_feature 1..120: note = Artificially Synthesized Probe
  source 1..120: mol_type = other DNA
ggcttctcccctttattccttaatgtgtactgtattctggggcttctgaaatccccatgcaaactgaatgcttaatttaatacctgtcatgacctgaattacttcatttgggaagagagc

SEQ ID NO: 19110 - DNA, 120 bp, synthetic construct
  misc_feature 1..120: note = Artificially Synthesized Probe
  source 1..120: mol_type = other DNA
aaggggctgtgcacatgtgggggcggtgggggtacgtgaattctctgtaccgtcctcgtcctctcagtttctctgtgaagctaaaacccctctaagaatgaaatctattttaaaatatta

SEQ ID NO: 19111 - DNA, 120 bp, synthetic construct
  misc_feature 1..120: note = Artificially Synthesized Probe
  source 1..120: mol_type = other DNA
tattttgagtggacctcagtatcatcatttacttagagaatttaccgttgtctacttttagttatacttttctgtatagacttggcccgccacatccgtgggttcaaccaactgtggatg

SEQ ID NO: 19112 - DNA, 120 bp, synthetic construct
  misc_feature 1..120: note = Artificially Synthesized Probe
  source 1..120: mol_type = other DNA
acacattgttgtgaagattgaagatgatgtctttaaatcacccaccacaaggcatagtagacaaggtgagcaaggaattttctgagtaaatgtagcattacctcctaagactgcttctct

SEQ ID NO: 19113 - DNA, 120 bp, synthetic construct
  misc_feature 1..120: note = Artificially Synthesized Probe
  source 1..120: mol_type = other DNA
tgtgagccacaacacccgaccaggtttttattttgtggggggcttgttatttcttggccttactgatcttggcatttatttaaaaggcttgataataacttatattgaagacactgtttt

SEQ ID NO: 19114 - DNA, 120 bp, synthetic construct
  misc_feature 1..120: note = Artificially Synthesized Probe
  source 1..120: mol_type = other DNA
tagcccattagaaagaaatgcacctttttttagagcacctaggaaaatattttctagagaaactcctggtatcaaaatccctaaagctgtgtgagcagctggctctaaaggcagtcacgt

SEQ ID NO: 19115 - DNA, 120 bp, synthetic construct
  misc_feature 1..120: note = Artificially Synthesized Probe
  source 1..120: mol_type = other DNA
caacctacttgcatttactgagggaatagataacataaataagttgtatatgccaagactggacctggtctagctgggtgtgaaccacaaatgcagaattgtggctgttgtaaataaagg

SEQ ID NO: 19116 - DNA, 120 bp, synthetic construct
  misc_feature 1..120: note = Artificially Synthesized Probe
  source 1..120: mol_type = other DNA
cacataggcaacacacttgcgtctgagcactttctcagctgctaggtccaatttctggttacacagataagctttggtgaaagaatagaacaattcaagacatgccttttagtacataaa

SEQ ID NO: 19117 - DNA, 120 bp, synthetic construct
  misc_feature 1..120: note = Artificially Synthesized Probe
  source 1..120: mol_type = other DNA
ctctaaatcaagcaatctctaaatcataagcaaatttcattgctattgagataataatctgcctcctcttctccctgacaatcaatacgagcaacgatcacagtggtcccagtggagaag

SEQ ID NO: 19118 - DNA, 120 bp, synthetic construct
  misc_feature 1..120: note = Artificially Synthesized Probe
  source 1..120: mol_type = other DNA
gaagggtggtctgtagagggatttataagggcagagagaagggtggtctggagagggatttatatgggcagagagaagggtggtctgtagagggatttataagggcagagagaagggtgg

SEQ ID NO: 19119 - DNA, 120 bp, synthetic construct
  misc_feature 1..120: note = Artificially Synthesized Probe
  source 1..120: mol_type = other DNA
gaagggtggtctgtagagggatttatatgggcagagagaagggtggtctggagaaggatttatatgggcagagagaagggtggtctgtagagggatttatatgggcagagagaagggtgg

SEQ ID NO: 19120 - DNA, 120 bp, synthetic construct
  misc_feature 1..120: note = Artificially Synthesized Probe
  source 1..120: mol_type = other DNA
cagctgggaccatgttggtggctgttcagatgcaaagaagtaaatggattcaagagcctcaaatggattcaatgtctagttaaaggcttgatagaagggatttttagatgccattaaaaa

SEQ ID NO: 19121 - DNA, 120 bp, synthetic construct
  misc_feature 1..120: note = Artificially Synthesized Probe
  source 1..120: mol_type = other DNA
acattactgttaaaatggattaattggggctatctccatcaacatatctaaatatgttacagctttgagaaaggcagttatagagcacagtatatagtatgacccccttcctgtaattaa

SEQ ID NO: 19122 - DNA, 120 bp, synthetic construct
  misc_feature 1..120: note = Artificially Synthesized Probe
  source 1..120: mol_type = other DNA
tatgagtattttaatctttcttatctctaggctagtgctggttcagctgctacagaaaaagaaaatcttgtggcagtgagtatacggtttactaagagcagggtgcacaactcacccttt

SEQ ID NO: 19123 - DNA, 120 bp, synthetic construct
  misc_feature 1..120: note = Artificially Synthesized Probe
  source 1..120: mol_type = other DNA
attcacagttcttttaaaaatcccattaaggctggctgattgctgaagtggctcttacgttctgttcagtgcatcaaagcaagggaaacatcatcttgcagaaagtagtgaggagacaag

SEQ ID NO: 19124 - DNA, 120 bp, synthetic construct
  misc_feature 1..120: note = Artificially Synthesized Probe
  source 1..120: mol_type = other DNA
tgatgggcaatgaggttgaaatcagacaggccagatatcatgtctgtgagtcttggagggtcttggagaacatgctaagaagttttcattttaatccatcaatgagtgtgtttagagcaa

SEQ ID NO: 19125 - DNA, 120 bp, synthetic construct
  misc_feature 1..120: note = Artificially Synthesized Probe
  source 1..120: mol_type = other DNA
aggcatgaatctcttctgatattaacaatggtgcatttcaagtacacaagctgatgatgaataaaatcccattttatacacatacgtgcatgctcttccagccttcatagacgtggggtg

SEQ ID NO: 19126 - DNA, 120 bp, synthetic construct
  misc_feature 1..120: note = Artificially Synthesized Probe
  source 1..120: mol_type = other DNA
ttacggtagctactatctttgacagttaaatagacccaaatgtgattagtaggaggttcaagctggtttctgtatcttgttgacctgcacccataaaagtctgttgatcagtagctcctt

SEQ ID NO: 19127 - DNA, 120 bp, synthetic construct
  misc_feature 1..120: note = Artificially Synthesized Probe
  source 1..120: mol_type = other DNA
tatccgaaggaaaggaaatcctgcgctcctgtgaatccctaggttcttgcaagtccctgatttcctgtgagtccctgcgttcccatgaatccctttgttcccataaattcctttgttttt

SEQ ID NO: 19128 - DNA, 120 bp, synthetic construct
  misc_feature 1..120: note = Artificially Synthesized Probe
  source 1..120: mol_type = other DNA
cctgtagtgtgaggtgagtggccatgacattgggctgaattgatgctgtgttggaggctggatggtggtaaatctatttttatttaaattttctgcagtcagaatgtgcaaatagttgat

SEQ ID NO: 19129 - DNA, 120 bp, synthetic construct
  misc_feature 1..120: note = Artificially Synthesized Probe
  source 1..120: mol_type = other DNA
tggcaccacaggggcctcccagattcaatccgtgggccacagattgaaaatgaagcagaaaaagatatttatttgaaaaatcgtaatactaaaagtgagggaccaatatgaagaaaacaa

SEQ ID NO: 19130 - DNA, 120 bp, synthetic construct
  misc_feature 1..120: note = Artificially Synthesized Probe
  source 1..120: mol_type = other DNA
tctgctacatacactctacgtggattagataacttatctaaaagatcaaaatatgaaacacccccactcacactgccaaaatcaaactatgttccccaccagaacactgaagggatgttg

SEQ ID NO: 19131 - DNA, 120 bp, synthetic construct
  misc_feature 1..120: note = Artificially Synthesized Probe
  source 1..120: mol_type = other DNA
tgcagacacgtgtcttttaattgaaccccactctagcattgttttatggtaattcaggattattaatcagactctcaattggcgttcctcttcagcacttagcgtgaacactgaagaaca

SEQ ID NO: 19132 - DNA, 120 bp, synthetic construct
  misc_feature 1..120: note = Artificially Synthesized Probe
  source 1..120: mol_type = other DNA
ttggcctccttctctcctgacttagtgtctgcacagcagccttgctgatttactgtctgcactccttggcttagtatctgcatagcagacagagtggttcttccacagtaacttggctca

SEQ ID NO: 19133 - DNA, 120 bp, synthetic construct
  misc_feature 1..120: note = Artificially Synthesized Probe
  source 1..120: mol_type = other DNA
gcctggtgtcagtcacttacaatgtccaaaccttctcagctttctcttctttgaaaggtccagaaaccctctgctttcccttcatgtggatctatctttccttatgctttactcgaaaag

SEQ ID NO: 19134 - DNA, 120 bp, synthetic construct
  misc_feature 1..120: note = Artificially Synthesized Probe
  source 1..120: mol_type = other DNA
gacagcaggcccccacgtttccgggctttccagcaaccccagcctacttatctttatctccccaaatcatatatcgaaaaccccagtttatttctataaataattcatatttacttttat

SEQ ID NO: 19135 - DNA, 120 bp, synthetic construct
  misc_feature 1..120: note = Artificially Synthesized Probe
  source 1..120: mol_type = other DNA
cttcttttgtacatcgatcataaataacttgtagctctcattgcatgcactggttgttgctttagctgtttgcattttcctgtgtcactggctgtatttgatgctgaacttcttgagctg

SEQ ID NO: 19136 - DNA, 120 bp, synthetic construct
  misc_feature 1..120: note = Artificially Synthesized Probe
  source 1..120: mol_type = other DNA
aatgtttactttaggtagcaaatataaaagcagccacctgacttctggagatccttggttttgtttttgttgagtggactttacgtgcagagggttgagttgttgagttacacggttgga

SEQ ID NO: 19137 - DNA, 120 bp, synthetic construct
  misc_feature 1..120: note = Artificially Synthesized Probe
  source 1..120: mol_type = other DNA
cacggcgcctcatgattgatatgaccaagaacttcttaagcaaaaccgcaaaagccaaataagtaggccagattacactgtacagtgaaacacacagtgaataaatgtaaccgagaaatg

SEQ ID NO: 19138 - DNA, 120 bp, synthetic construct
  misc_feature 1..120: note = Artificially Synthesized Probe
  source 1..120: mol_type = other DNA
ggagacggggatggaaacagggtatgttaaaatatcataaagcttactcttcccagcgttcagatactttgcttagtaaaatctcctctgatcactgctagcctttgatcaacttttgga

SEQ ID NO: 19139 - DNA, 120 bp, synthetic construct
  misc_feature 1..120: note = Artificially Synthesized Probe
  source 1..120: mol_type = other DNA
gtttcttcctaaccccaccagaaactgatttttttaaatgaatgtgttaagtatagtgatttcataaaacttgaaatattattttcttctttcttgttttttatttctctttctttttaa

SEQ ID NO: 19140 - DNA, 120 bp, synthetic construct
  misc_feature 1..120: note = Artificially Synthesized Probe
  source 1..120: mol_type = other DNA
atcctttattttattcagtgcattgcttccttcgttattgttcctccaagtcaaggagcattcaatattgtatttgctgagtgtctgaggctcttctctcatcagggagtggaattctgt

SEQ ID NO: 19141 - DNA, 120 bp, synthetic construct
  misc_feature 1..120: note = Artificially Synthesized Probe
  source 1..120: mol_type = other DNA
agctagtcacactccccactgtggtttttaatttgattctatgtttctatggcaggttattttacccatattcctttctgcctgggtttatagaagtgacattttcttaagtggtatcac

SEQ ID NO: 19142 - DNA, 120 bp, synthetic construct
  misc_feature 1..120: note = Artificially Synthesized Probe
  source 1..120: mol_type = other DNA
ttctctgaaggaggaatccacatccccaggctatgctgccatagccctggcccacagatctgagccagacatggatttaaagggtgtgattcagtgtttttattatattcacagagttgt

SEQ ID NO: 19143 - DNA, 120 bp, synthetic construct
  misc_feature 1..120: note = Artificially Synthesized Probe
  source 1..120: mol_type = other DNA
tttgggcaagattcattttctgtaaccacgttctcatagaatgaacctaggagtttctactttcagactggcaaaaataaagcccacagctaattgtaggggaaaatgtaatcctgggat

SEQ ID NO: 19144 - DNA, 120 bp, synthetic construct
  misc_feature 1..120: note = Artificially Synthesized Probe
  source 1..120: mol_type = other DNA
aaaataggagtcattcaacagcatgaagttctaccattatttttctttgaaaatgccccctaagtaggtcattattgactggtcttccttgttttctttgagggccatcaatcttggggg

SEQ ID NO: 19145 - DNA, 120 bp, synthetic construct
  misc_feature 1..120: note = Artificially Synthesized Probe
  source 1..120: mol_type = other DNA
agtcagtaaagttcaggggtctttctggttggagtttctgccggccattgccgaaatccacattgatctaccaaacacattaacctgttgataatagaaaaactttgcttcctgaaacat

SEQ ID NO: 19146 - DNA, 120 bp, synthetic construct
  misc_feature 1..120: note = Artificially Synthesized Probe
  source 1..120: mol_type = other DNA
gtaaagaacagttaaccatagttggatttgtcagcctttaccacgtggtgtttgctttttctgcctgcaaggaaactttgctaagccccaacagtcaggaagatctttattttaaaagct

SEQ ID NO: 19147 - DNA, 120 bp, synthetic construct
  misc_feature 1..120: note = Artificially Synthesized Probe
  source 1..120: mol_type = other DNA
gtcaaaatcaagtctccttggaatgatggggctgatttggggtcctctgttctgttcttttggttgattttctaagcctgcaccatctttttcccagagttccaattattatgacttaat

SEQ ID NO: 19148 - DNA, 120 bp, synthetic construct
  misc_feature 1..120: note = Artificially Synthesized Probe
  source 1..120: mol_type = other DNA
tgcccatttttaaaatggggttgtttgtttcttttgttagatttgttgaagtttcctataatggggttgtttgtttcttttgttagatttgtttaagtttcctatggattctggatatta

SEQ ID NO: 19149 - DNA, 120 bp, synthetic construct
  misc_feature 1..120: note = Artificially Synthesized Probe
  source 1..120: mol_type = other DNA
gctctcagcttggacattaatgttatatagaaatgctactaattttgcacattgattttgtattctgaaacttggctgaagttgtttctcagatctaggagcctttgggcagagacaatg

SEQ ID NO: 19150 - DNA, 120 bp, synthetic construct
  misc_feature 1..120: note = Artificially Synthesized Probe
  source 1..120: mol_type = other DNA
acatctgttacaattaggctgtgaatacatcttatccagtgctttttctggtcagttttttttttgttaattattaataagaattcaattttggaaactaacattggtatattcagggtt

SEQ ID NO: 19151 - DNA, 120 bp, synthetic construct
  misc_feature 1..120: note = Artificially Synthesized Probe
  source 1..120: mol_type = other DNA
gagatgggttccttgaagactgcatttgtttaggtgttgcttttatccaacttgccatctgtgcctttttaatgggacatcagcatgtttacattgaggtttaagattgatatgtgctgg

SEQ ID NO: 19152 - DNA, 120 bp, synthetic construct
  misc_feature 1..120: note = Artificially Synthesized Probe
  source 1..120: mol_type = other DNA
tatcagatcagtttggttctttttaaaatgggtatttcatctttaatctcttggatagttttactggattccataaattctttggcttgggtttcaactttgtcctgaatcctgatgatc

SEQ ID NO: 19153 - DNA, 120 bp, synthetic construct
  misc_feature 1..120: note = Artificially Synthesized Probe
  source 1..120: mol_type = other DNA
tcagtgttttactgatatacaatatgcaaagggaaaagtgtccaaatcatatgaatagctcagtgaattttcactaagacctccttatgtggccagcgctgacatcccgacatccagcac

SEQ ID NO: 19154 - DNA, 120 bp, synthetic construct
  misc_feature 1..120: note = Artificially Synthesized Probe
  source 1..120: mol_type = other DNA
tactatctccatagtgtgccttttccaggtcagatagttggactcgcacaatatggagcctttacagactggctctttcccttactaacatgaatttaagctttctttgtgtctttatgt

SEQ ID NO: 19155 - DNA, 120 bp, synthetic construct
  misc_feature 1..120: note = Artificially Synthesized Probe
  source 1..120: mol_type = other DNA
ctagaatcccattgctgttttaactggcagttctccagtgacatgttattgaatatcttcccatatgcttatctgccatctgtatgaatcatttgatgagaaatctattcagatctttgc

SEQ ID NO: 19156 - DNA, 120 bp, synthetic construct
  misc_feature 1..120: note = Artificially Synthesized Probe
  source 1..120: mol_type = other DNA
tgttgagcaccctttgctcattccttttctcaggaattttcaagctttacgctgagtatgacatgtgctgtaagtcttttgtagacgtctctaaccagttatggaagctctcttattaaa

SEQ ID NO: 19157 - DNA, 120 bp, synthetic construct
  misc_feature 1..120: note = Artificially Synthesized Probe
  source 1..120: mol_type = other DNA
cctttcctcatctggctgcttctgtgtgttctctccttatttctcacttcttccagagaactgttctttggctttgttcattagttgatttgtcttctgtttcatgtatttctgctctta

SEQ ID NO: 19158 - DNA, 120 bp, synthetic construct
  misc_feature 1..120: note = Artificially Synthesized Probe
  source 1..120: mol_type = other DNA
tgagcacagtgttcaacagacatcagtcagcttccattccttcactgtgcttttcagatcagtgcaatgctgatttgttcatgcttctaaaatgtaggtaagcaggcttatttttaattc

SEQ ID NO: 19159 - DNA, 120 bp, synthetic construct
  misc_feature 1..120: note = Artificially Synthesized Probe
  source 1..120: mol_type = other DNA
actcttcttcgtgccaaggaattggttaattcttctaggatctagcatttttaattatctaactctaatgaggggtttacgtagagggcttcggggattttcagtatggctctctatttg

SEQ ID NO: 19160 - DNA, 120 bp, synthetic construct
  misc_feature 1..120: note = Artificially Synthesized Probe
  source 1..120: mol_type = other DNA
ttttttttccctattgattcctttggtctttatttcattcagaaaacaattgcctctcacctcctctatccagcctgcgtcaggtactgctgtgtgagtctataaatgctgttacctcct

SEQ ID NO: 19161 - DNA, 120 bp, synthetic construct
  misc_feature 1..120: note = Artificially Synthesized Probe
  source 1..120: mol_type = other DNA
agaatgagcaggtgtctttaggagtgaggctggggcacgactgaatgcaaattagcccttgcccagacagaagacagtctcatctcaccagcggtatttcctggagggtctgatctgtcc

SEQ ID NO: 19162 - DNA, 120 bp, synthetic construct
  misc_feature 1..120: note = Artificially Synthesized Probe
  source 1..120: mol_type = other DNA
ggccaggcctgtcctgcaagcagctggcctatttctgctagaagctgtgaattacaactgtaatgtatttattctaaggactaacatggcactattcataaaagactgtgttaatatttg

SEQ ID NO: 19163 - DNA, 120 bp, synthetic construct
  misc_feature 1..120: note = Artificially Synthesized Probe
  source 1..120: mol_type = other DNA
aagataatgaatggagatgtatgtcttctcaatgagggtagtgtctctgtcttgtctctgacctttgtgtccacagcatgtggtaaaagtacaggcagagtaggcattggattttttttt

SEQ ID NO: 19164 - DNA, 120 bp, synthetic construct
  misc_feature 1..120: note = Artificially Synthesized Probe
  source 1..120: mol_type = other DNA
tacaaacctgtttttagatttgatcttgagaaggaatgtaggagtttcctgggaaagccaaatatcacaggtccttctcctcctggactgagttttcagctgcaaaagggcaaaaaaaaa

SEQ ID NO: 19165 - DNA, 120 bp, synthetic construct
  misc_feature 1..120: note = Artificially Synthesized Probe
  source 1..120: mol_type = other DNA
ggaaagaatggttagccacatgaagtaggattacattttatccctaccttacatcatatcaaaaaaataatacaaactggaatgtactcttacctgcaggccttagtgtaggaaagatgt

SEQ ID NO: 19166 - DNA, 120 bp, synthetic construct
  misc_feature 1..120: note = Artificially Synthesized Probe
  source 1..120: mol_type = other DNA
acaaaaggtgaacaggttaaagagatgtgacagcacaaagccgtgtgatcctgggttggacgctggggtggaaagaatgatgataaacatttttaaggcaattaacaaaaatggaatatg

SEQ ID NO: 19167 - DNA, 120 bp, synthetic construct
  misc_feature 1..120: note = Artificially Synthesized Probe
  source 1..120: mol_type = other DNA
agtaactctgatggccacgtttgtcattgtctcctaaatttgaacatgatcaagcccactctcagccgtgcaccaaggatatacttttgttgttgtctagatggagacatagaaataaaa

SEQ ID NO: 19168 - DNA, 120 bp, synthetic construct
  misc_feature 1..120: note = Artificially Synthesized Probe
  source 1..120: mol_type = other DNA
tctatgcaagagctttctaaaaaagaagcatacttttttttaaaattcgtaaagtataaacccttcctagaggagcagatatccaccggtgatgctgccgggctcctcacagatgagcta

SEQ ID NO: 19169 - DNA, 120 bp, synthetic construct
  misc_feature 1..120: note = Artificially Synthesized Probe
  source 1..120: mol_type = other DNA
gtagattcccagaagaatggaacagaagggatatttgaacatacaatggccacgaatttatgaaatcagtgagagttatcagtacatgtcctgaaaagttcactggaccccaaatagcat

SEQ ID NO: 19170 - DNA, 120 bp, synthetic construct
  misc_feature 1..120: note = Artificially Synthesized Probe
  source 1..120: mol_type = other DNA
tcagacccttcaccacaaggcatctgacatagtgactgccctctgttctaggtgggtgaccatatagttaattgtctaaaccataaatagtcacagggaacatattcatgattacattga

SEQ ID NO: 19171 - DNA, 120 bp, synthetic construct
  misc_feature 1..120: note = Artificially Synthesized Probe
  source 1..120: mol_type = other DNA
agagcctctaacaagatgtttggattttggtgagaaactcaccttcgtttggctttggtggtttttgttgccaaatgaagataacttacaggttacaaaaataatcacacaagattatct

SEQ ID NO: 19172 - DNA, 120 bp, synthetic construct
  misc_feature 1..120: note = Artificially Synthesized Probe
  source 1..120: mol_type = other DNA
aaattccaacaatgcggaaactgctattacttttgcaccaatgggtaatgagataaaatcacttccatttaatgtttataacatcaccggtttatcactatgtcatagttagtacttcac

SEQ ID NO: 19173 - DNA, 120 bp, synthetic construct
  misc_feature 1..120: note = Artificially Synthesized Probe
  source 1..120: mol_type = other DNA
tcacatagcagggcgcccgtaactgtgtcagcaggccttgtttttaaaaattttcttgaaagtcgaggttcaagcagatatagatagaataaaatattcctcggatccgttgagttttct

SEQ ID NO: 19174 - DNA, 120 bp, synthetic construct
  misc_feature 1..120: note = Artificially Synthesized Probe
  source 1..120: mol_type = other DNA
ggtcttatctctgatattttataagatgctaagcaccttaacacgaaaatcgtgtctgaaagattcatcctgcaagactgtgctgctttgttctgagctgaactcaggcaaatatgccaa

SEQ ID NO: 19175 - DNA, 120 bp, synthetic construct
  misc_feature 1..120: note = Artificially Synthesized Probe
  source 1..120: mol_type = other DNA
aagctgtggaacttctcgaagcttttgttcactcctctgtaaaatgagggtgtttaggaaaaccttactcattagccgttgatgagggttaaatggaataatgctcatgagcttcttagc

SEQ ID NO: 19176 - DNA, 120 bp, synthetic construct
  misc_feature 1..120: note = Artificially Synthesized Probe
  source 1..120: mol_type = other DNA
actgtggtattttatactgcagcaagcatgtgatccctgatgagggtgtgcagtgcctgctgctggtgaactggcttgcgtcctgcctctatgtgcatttaacaaatgacattttgtgtc

SEQ ID NO: 19177 - DNA, 120 bp, synthetic construct
  misc_feature 1..120: note = Artificially Synthesized Probe
  source 1..120: mol_type = other DNA
cttctattggaagaagacgccatccaggactttcatagctggagaggagaagtcagttcctggctttgaattttcaaaggacaagctgactctctgactctcttattctgggctaatgga

SEQ ID NO: 19178 - DNA, 120 bp, synthetic construct
  misc_feature 1..120: note = Artificially Synthesized Probe
  source 1..120: mol_type = other DNA
taagaggtttgacctcaattttgaaagaagttgtactgtgtgtaaaattctaccaaacagcatcaaatgctacagagaaatctttcatgaaaggaagagttaatctatgtggcacacttc

SEQ ID NO: 19179 - DNA, 120 bp, synthetic construct
  misc_feature 1..120: note = Artificially Synthesized Probe
  source 1..120: mol_type = other DNA
tttagctcgtatgtggctgttgaaccttaattttgacaagataaagatgttggatggactctcaatattgatatgtgggttcaaaaggaaaccgcccagataggttcccagactcagtaa

SEQ ID NO: 19180 - DNA, 120 bp, synthetic construct
  misc_feature 1..120: note = Artificially Synthesized Probe
  source 1..120: mol_type = other DNA
ttagccaaagtcacataactaagaaaaatggatcagatgagggttggagtataattaaacagacacatgtgtgcatgtttttaagtggagaagtgctcactgagtccccagcctgtccta

SEQ ID NO: 19181 - DNA, 120 bp, synthetic construct
  misc_feature 1..120: note = Artificially Synthesized Probe
  source 1..120: mol_type = other DNA
ttggtagacccagttgaccaagtcagaaggcacagtattagaagtttagaattcttgataaccaagcacttcttacagctcccttagctgttaacttctagaaactgggctaaattggaa

SEQ ID NO: 19182 - DNA, 120 bp, synthetic construct
  misc_feature 1..120: note = Artificially Synthesized Probe
  source 1..120: mol_type = other DNA
cagtgccaagtctgattgtatgtttaggatgaattcttagaagtaaaaatgccacattaaaaccgaggcctagtcaacgttcacatctgtttctgagtgttttctgggaacattctgtgc

SEQ ID NO: 19183 - DNA, 120 bp, synthetic construct
  misc_feature 1..120: note = Artificially Synthesized Probe
  source 1..120: mol_type = other DNA
tgttagaattgtaaggctacacttcaaagttgtctgtactggatttttattggaactgcatggataaagttacaagggtggaagtaggcttcctgtggcattccgtttgagaactgtctt

SEQ ID NO: 19184 - DNA, 120 bp, synthetic construct
  misc_feature 1..120: note = Artificially Synthesized Probe
  source 1..120: mol_type = other DNA
aggggcacagaaagcagtgcctggagggcatattactgcatattacggcaaataattctctctggaaaactaaggccaatttgacataatgtgtgttagtatagaagaaagggattagca

SEQ ID NO: 19185 - DNA, 120 bp, synthetic construct
  misc_feature 1..120: note = Artificially Synthesized Probe
  source 1..120: mol_type = other DNA
tagcaggatgatatggcctctgtatgcactcagagtgagtgcgtccttccagacactgcctgtgacttatttttataggaatttgacttttactttgagttttgggttccaactttacaa

SEQ ID NO: 19186 - DNA, 120 bp, synthetic construct
  misc_feature 1..120: note = Artificially Synthesized Probe
  source 1..120: mol_type = other DNA
agaattctgttttcccagtcgagtgttcacttataagagttacacgttacacacactcatggggaaatactgaggagggtcttcctgcccttagggatatgtctacatttcttcatctct

SEQ ID NO: 19187 - DNA, 120 bp, synthetic construct
  misc_feature 1..120: note = Artificially Synthesized Probe
  source 1..120: mol_type = other DNA
aacaagcccaacaagcccttcctaccgcactgtgctacttaatggaggcatttgatgagctggttttctaaatccttttgctatttgatgagctggttttttaaatccttttgctatttg

SEQ ID NO: 19188 - DNA, 120 bp, synthetic construct
  misc_feature 1..120: note = Artificially Synthesized Probe
  source 1..120: mol_type = other DNA
caattattcaacattttattattttttgcataaatgaatcaaatccttatcggttgagcacagatctgtgcacacgcgagcactacacgtgcattttaggattgtcttgagcaggaggcg

SEQ ID NO: 19189 - DNA, 120 bp, synthetic construct
  misc_feature 1..120: note = Artificially Synthesized Probe
  source 1..120: mol_type = other DNA
aaaagaaaaagaaatacccccaaaagccaccatgtgagatgtggaatgttttcagtgtgtttttgaaaatattccaaaaaccatttccattcctacgttctaggctggccctttctgggg

SEQ ID NO: 19190 - DNA, 120 bp, synthetic construct
  misc_feature 1..120: note = Artificially Synthesized Probe
  source 1..120: mol_type = other DNA
ggctcatacaagattcccacaaccctgaggctttttttccccgacatgtagataaatcgcatgtctgcttttatgtcgtctaatcactaaccattattttttttcctccacttgttctaa

SEQ ID NO: 19191 - DNA, 120 bp, synthetic construct
  misc_feature 1..120: note = Artificially Synthesized Probe
  source 1..120: mol_type = other DNA
tttataatctaagggatgctctctgataagttagtgaagaccacacaagaaacagacaaccacaagcagcaccaacacaaacagtgctgggtgactattaaaatagtgtgagtttagaga

SEQ ID NO: 19192 - DNA, 120 bp, synthetic construct
  misc_feature 1..120: note = Artificially Synthesized Probe
  source 1..120: mol_type = other DNA
tttcctctctttcttcttcccagaagagttcgtgtagcatggctgttctgtctgtcctataggaaggctttgtcagggtaatgtaagtctgtagacttaactatcagaattcaaagtaca

SEQ ID NO: 19193 - DNA, 120 bp, synthetic construct
  misc_feature 1..120: note = Artificially Synthesized Probe
  source 1..120: mol_type = other DNA
ttattagtttgttaactcttccatttttctcagatcccaacacagaatctgtttctttccagtttctgaaaaccagtttctgtgtgcttcttcatgcactgagtcagctctgatgcctgt

SEQ ID NO: 19194 - DNA, 120 bp, synthetic construct
  misc_feature 1..120: note = Artificially Synthesized Probe
  source 1..120: mol_type = other DNA
ataccttcaggagaaaagtggacagtcttgctgaaaaggcttctgaaacaattaacaaaatgcagtcgtcagcaaaacatctagaatttatctgtcatcacttggatagtggccgactct

SEQ ID NO: 19195 - DNA, 120 bp, synthetic construct
  misc_feature 1..120: note = Artificially Synthesized Probe
  source 1..120: mol_type = other DNA
caacatatttattttaataagcctaactttgcaatgatgtgtacattcgctagaagttaatctggggctcatatgtggtgagttcttgttaccagctgtgaatccacaaccgtctgcagc

SEQ ID NO: 19196 - DNA, 120 bp, synthetic construct
  misc_feature 1..120: note = Artificially Synthesized Probe
  source 1..120: mol_type = other DNA
tcatgtctgctctgtgatatggttgtgaagagcgaagttgaagggcgatgacaggcccattcgcatctgtgactaatcttggtgggtgcccagctgactggcaagagcagtgctgccagg

SEQ ID NO: 19197 - DNA, 120 bp, synthetic construct
  misc_feature 1..120: note = Artificially Synthesized Probe
  source 1..120: mol_type = other DNA
gactcaacagccccctcacatagccccagggcgaagtctgttagcacattgttttctgaaataaaactctatgagtatttttgaaagtatctttcatgtgtgggtgtgaaatagaatact

SEQ ID NO: 19198 - DNA, 120 bp, synthetic construct
  misc_feature 1..120: note = Artificially Synthesized Probe
  source 1..120: mol_type = other DNA
cattagaaatgccttttgatgacattagtttgtctagatatcagctaacagagcactatggaaatgctacccagaaccttaaattaaagtgatcagctgtgggttgcctctggggtcata

SEQ ID NO: 19199 - DNA, 120 bp, synthetic construct
  misc_feature 1..120: note = Artificially Synthesized Probe
  source 1..120: mol_type = other DNA
tctcaccgttctgggaggtggaagtccaacaccaaggtgctgtgggtttggttactggcaagggctgccttcctggcttgcaggcgaaggccttataggtgtgtcctcatatggtagagt

SEQ ID NO: 19200 - DNA, 120 bp, synthetic construct
  misc_feature 1..120: note = Artificially Synthesized Probe
  source 1..120: mol_type = other DNA
cccattcccagcacttcctattagggctcacagtacagctctcactttccagatgcagaaacttgattttagagagatttagagacctaaatacctaaatggctagtacaaatgtacaca

SEQ ID NO: 19201 - DNA, 120 bp, synthetic construct
  misc_feature 1..120: note = Artificially Synthesized Probe
  source 1..120: mol_type = other DNA
tatgcctcccacatgcaggagtaactccctctccctcctctatagaggatatccttggaaaccctctgtccacataatgggatttatttattcagctttattgagctacaactaataaaa

SEQ ID NO: 19202 - DNA, 120 bp, synthetic construct
  misc_feature 1..120: note = Artificially Synthesized Probe
  source 1..120: mol_type = other DNA
atatacacactttaacacaggtatatttgctctaatttttggtttctttcctttgagtttatgaagtatttccccctaagaaggacattcctggggtatctcaggctgcggaagccctca

SEQ ID NO: 19203 - DNA, 120 bp, synthetic construct
  misc_feature 1..120: note = Artificially Synthesized Probe
  source 1..120: mol_type = other DNA
tgaattcactttctgatagtgcattttaacctaaacttggtttgttttctaaaatgttttaaagcgcagaactgttacactccgcagacagccagttggcggcttgggcctgagtataaa

SEQ ID NO: 19204 - DNA, 120 bp, synthetic construct
  misc_feature 1..120: note = Artificially Synthesized Probe
  source 1..120: mol_type = other DNA
gaataatcacaagaataactgacattcatagggagagattactctgtgtagaatcgaaaagtgagggtgggatttctggccacacattccactatcgggtagactgtttctcatacaatt

SEQ ID NO: 19205 - DNA, 120 bp, synthetic construct
  misc_feature 1..120: note = Artificially Synthesized Probe
  source 1..120: mol_type = other DNA
aggaaacctagaaatttaagtgtgataagaaatacaggttagttgtaaccaagatggcgggaaaagtgagagagctatgcaggcctctgaatgaaaggacgattcttttccagggttttt

SEQ ID NO: 19206 - DNA, 120 bp, synthetic construct
  misc_feature 1..120: note = Artificially Synthesized Probe
  source 1..120: mol_type = other DNA
ctgggatccatttcatcagctgtgccagaattcatgttttagagacacatttatatcctcgttttatgcacattcaggaacagaaagtcctggcaatgaattgggagtttttagggatca

SEQ ID NO: 19207 - DNA, 120 bp, synthetic construct
  misc_feature 1..120: note = Artificially Synthesized Probe
  source 1..120: mol_type = other DNA
tacagaggagacggggagagggcgctgttttttgtaatgtggttaatgcttttatcctgtgagtaagagagtcagctgaagttggtttaaaattagtgtgattagggtagcttctcattt

SEQ ID NO: 19208 - DNA, 120 bp, synthetic construct
  misc_feature 1..120: note = Artificially Synthesized Probe
  source 1..120: mol_type = other DNA
gagaggctgggaggtcgagataggtctgagactctcctcagtgcagatatagggttgagcacatatgtctagacattgtttaatacctagtgagattgtatattttggggagatctataa

SEQ ID NO: 19209 - DNA, 120 bp, synthetic construct
  misc_feature 1..120: note = Artificially Synthesized Probe
  source 1..120: mol_type = other DNA
tgggtcatcgtccggtgctgcccctctttcaaacgtttgtaaagaaccagtgcaatgtggttacgacgttttttcatttattctttacttttacacatttcttcggttattgctctatgt

SEQ ID NO: 19210 - DNA, 120 bp, synthetic construct
  misc_feature 1..120: note = Artificially Synthesized Probe
  source 1..120: mol_type = other DNA
caacttagataagggtggttgccatatgatgttctgcatgaggtccaccttaggtgcttagacatttaaattcttagatatggtgtccttcacactttaattcaccgctttagtgaggtg

SEQ ID NO: 19211 - DNA, 120 bp, synthetic construct
  misc_feature 1..120: note = Artificially Synthesized Probe
  source 1..120: mol_type = other DNA
gtcactcgggtgcagggtatggagagctccttggtaatagtggacacatgctgtcactcgggttcagggtatggagagctccttggtaatagtggatgcgtgctgtcactcgggtgcagg

SEQ ID NO: 19212 - DNA, 120 bp, synthetic construct
  misc_feature 1..120: note = Artificially Synthesized Probe
  source 1..120: mol_type = other DNA
cagggtatggagagctccttgataataatggacacgtgctgtcactcgggtgcagggtatggagagctccttggtaagagtggacacgtgctgtcactcgggtgcagggtatggagagct

SEQ ID NO: 19213 - DNA, 120 bp, synthetic construct
  misc_feature 1..120: note = Artificially Synthesized Probe
  source 1..120: mol_type = other DNA
gagctccttggtaagagtggacacgtgctgtcactcgggtgcagggtatggagagctgcttggtaatagtggacacgtgctgtcactcgggtgcagggtatggagagctccttggtaaga

SEQ ID NO: 19214 - DNA, 120 bp, synthetic construct
  misc_feature 1..120: note = Artificially Synthesized Probe
  source 1..120: mol_type = other DNA
tcatacttaatgaaatgaggaagaatgaagctctcctctatgactggatggaatttacatgtggtgtttccaacacagcaaaactttcgaaaccgaagccaggctccatataacacacag

SEQ ID NO: 19215 - DNA, 120 bp, synthetic construct
  misc_feature 1..120: note = Artificially Synthesized Probe
  source 1..120: mol_type = other DNA
agatctgtgattaatttctttctgtgttaaatttatttcacctgttctgctgaatttgctgtgaagcctttctcccctaataccttctcctctgcctccctccctcccatgtaaatattg

SEQ ID NO: 19216 - DNA, 120 bp, synthetic construct
  misc_feature 1..120: note = Artificially Synthesized Probe
  source 1..120: mol_type = other DNA
ttgacaaggataatataaaatggacttagtagctgaatgagaaatgccgaaacctcaaaaagaatcacaagaaacatcagaagccctgaagtgtgcgtgctgtgcactgcaggtcaaatt

SEQ ID NO: 19217 - DNA, 120 bp, synthetic construct
  misc_feature 1..120: note = Artificially Synthesized Probe
  source 1..120: mol_type = other DNA
actaagtgaggtttaagccttacactgctttgagaaggatcgtgtgtactaagggaggtttaacccttacagtcctttgaggaggatcgtgtgtactaagtgaggtttaacccttgcagt

SEQ ID NO: 19218 - DNA, 120 bp, synthetic construct
  misc_feature 1..120: note = Artificially Synthesized Probe
  source 1..120: mol_type = other DNA
cctcacagtacttggaggaggatcatgtatactaagtgaggtttaatacttacatttcattgaggaggattttgtgtactaagtgaggttaaaccttgcagtcctttgtgaaggatcatg

SEQ ID NO: 19219 - DNA, 120 bp, synthetic construct
  misc_feature 1..120: note = Artificially Synthesized Probe
  source 1..120: mol_type = other DNA
gtgtgtactaagtgaggtttaacccttacggtcctttgaggaggatcgtgtgtaactaagtgaggtttaacccttacggtcctttgaggaggatcttgtgtactaagtgaggtttaaccc

SEQ ID NO: 19220 - DNA, 120 bp, synthetic construct
  misc_feature 1..120: note = Artificially Synthesized Probe
  source 1..120: mol_type = other DNA
ggtttaacccttacagtcgtttgaggaggatcgtgtgtgccaagtgaggtttaacccttacagtcctttgagaaggatcgtgtgtactaatgtttaacccctatagttctttgaggagaa

SEQ ID NO: 19221 - DNA, 120 bp, synthetic construct
  misc_feature 1..120: note = Artificially Synthesized Probe
  source 1..120: mol_type = other DNA
tgagttaagggagcttggtggtcacgggttttagggctttctttctgagaagcagagctatcgattgctacctaattgaaaagattgtgtgagtctgtaatgtttttctcttattcacta

SEQ ID NO: 19222 - DNA, 120 bp, synthetic construct
  misc_feature 1..120: note = Artificially Synthesized Probe
  source 1..120: mol_type = other DNA
tctggtgcgtgggtgctttgctgtatggatgctgtgatgtgcaggtttattttccaaaagttaggtaagaacatcactcaagatgattgagtctttttctaattccaaaggcactttaag

SEQ ID NO: 19223 - DNA, 120 bp, synthetic construct
  misc_feature 1..120: note = Artificially Synthesized Probe
  source 1..120: mol_type = other DNA
ctgcacagagactatacccctgcaccctgtccaaccagcaccctcaggcccatctgtatgtgaaaatcttcccctacaaaaggcactacttaaaaattagaagagataagaatcagatag

SEQ ID NO: 19224 - DNA, 120 bp, synthetic construct
  misc_feature 1..120: note = Artificially Synthesized Probe
  source 1..120: mol_type = other DNA
aaggagtacttcaagcagctagaaaagtgtaatcactatcacaaatacacttgaaggtaccaaactcacgggtagaaggaagtacgtagtcaaattcagcatagtccagtgtcatcatgg

SEQ ID NO: 19225 - DNA, 120 bp, synthetic construct
  misc_feature 1..120: note = Artificially Synthesized Probe
  source 1..120: mol_type = other DNA
catcaaaagacatatagtggtgaagtagactgaaaaagagatgatcccaactatatactggctataagagacccgctttatctttaaggacacacacatattaaaagtgaagatagggaa

SEQ ID NO: 19226 - DNA, 120 bp, synthetic construct
  misc_feature 1..120: note = Artificially Synthesized Probe
  source 1..120: mol_type = other DNA
tgccctgaacaatcaatgggtcacagaaggaatcaaaagtgaaatttgaaaactatctatcttgagacaaacaacaacagaaatacaacctaccagaacttctgggatgccgcaaaaaca

SEQ ID NO: 19227 - DNA, 120 bp, synthetic construct
  misc_feature 1..120: note = Artificially Synthesized Probe
  source 1..120: mol_type = other DNA
cctgccaagtttgagtcaggaaaaaatagaaagactgaactgaccaaaaccaaatagggacatagaaaaagtaatcaaatcctttcaacaaaagaaagcatgggaccagatggcttcatg

SEQ ID NO: 19228 - DNA, 120 bp, synthetic construct
  misc_feature 1..120: note = Artificially Synthesized Probe
  source 1..120: mol_type = other DNA
attaatagcattgtcatacacaaataatagctgaaaaagaaatcaaaacaatcccatttattaatgcaagcatcagaaaaaaataaaatatttagcaataagtataaccaaggagataaa

SEQ ID NO: 19229 - DNA, 120 bp, synthetic construct
  misc_feature 1..120: note = Artificially Synthesized Probe
  source 1..120: mol_type = other DNA
gattggagaatggggagatgacggtcagagggcacagactctcagttgtgcaggaagaattttttttaagttctattgcacagtgtggcaaagatagctttttaatagattattgtacat

SEQ ID NO: 19230 - DNA, 120 bp, synthetic construct
  misc_feature 1..120: note = Artificially Synthesized Probe
  source 1..120: mol_type = other DNA
ttgcttcttccctctccctcccttcctttgccttcaaagcacccatgcatttgtgcatatttttatttgtatccttaggtttgaagtttgctgctttcttctaatatcttggtgttagtc

SEQ ID NO: 19231 - DNA, 120 bp, synthetic construct
  misc_feature 1..120: note = Artificially Synthesized Probe
  source 1..120: mol_type = other DNA
gctgtaactgtgtatccttaaaaaaatctctccacatctctcttacctcctccccttcccaacatctagtaacctctattctactccttagttctatgagaccagcttccgcatatgagt

SEQ ID NO: 19232 - DNA, 120 bp, synthetic construct
  misc_feature 1..120: note = Artificially Synthesized Probe
  source 1..120: mol_type = other DNA
atctattttgagttgatttttttatacaaagtgagagatgggagtccagtttccttcttctgcaagtgaatagccagttctcccagcaccatttattgaagagaaaatgttctcaatgta

SEQ ID NO: 19233 - DNA, 120 bp, synthetic construct
  misc_feature 1..120: note = Artificially Synthesized Probe
  source 1..120: mol_type = other DNA
agatgatcatatggtttttaatttgccattctataaggaatgcaatttattcattttcgcatactgtgaataatggaatcaagattatatctcgagtctattcatttcaccatttggggc

SEQ ID NO: 19234 - DNA, 120 bp, synthetic construct
  misc_feature 1..120: note = Artificially Synthesized Probe
  source 1..120: mol_type = other DNA
agtcttctaacaaatgatttcctaagaaaactacaggtggttctcactatttagctcctctgcagaacatccttctttgacgctgttttagaaagtcactggcctttaccagaagtcttt

SEQ ID NO: 19235 - DNA, 120 bp, synthetic construct
  misc_feature 1..120: note = Artificially Synthesized Probe
  source 1..120: mol_type = other DNA
tttacacaatatgagcaatgaaagtatttctgagtctgtgagtctctggcttcctttactgcttctcctgagtaaataggctgtcactcatcatggacatggacatcccagattcataga

SEQ ID NO: 19236 - DNA, 120 bp, synthetic construct
  misc_feature 1..120: note = Artificially Synthesized Probe
  source 1..120: mol_type = other DNA
gtcagctttctgtggggttgacgcaggtttccaactgtaagacattctggtctgttaagatcatacatgcactgtctgatttattcctgggtgaatttgctgaagtcagttttaattaga

SEQ ID NO: 19237 - DNA, 120 bp, synthetic construct
  misc_feature 1..120: note = Artificially Synthesized Probe
  source 1..120: mol_type = other DNA
tgagtttgcagaaggtatgacttcagatcaccccagctgctcttgtttcgacaccacgcagactacttgtaaagaaaaaattctctcttgatgtaggcaattttcccttatgttttgtca

SEQ ID NO: 19238 - DNA, 120 bp, synthetic construct
  misc_feature 1..120: note = Artificially Synthesized Probe
  source 1..120: mol_type = other DNA
tttcacctgtggggtgatgattatgccttacacatggggttgtgatgtggtttaaatacgtccataaggactatgaaggttgtctgacctgtaagaaatgctcagtaattttagtcatta

SEQ ID NO: 19239 - DNA, 120 bp, synthetic construct
  misc_feature 1..120: note = Artificially Synthesized Probe
  source 1..120: mol_type = other DNA
tgtggtctcgctggcttcaggagtgaagctggagacctttgcggtgagtgttacagctcataaaggcagcgtggacccaaagagtgagcagcagcaaatttattgcaaaaagcaaaagaa

SEQ ID NO: 19240 - DNA, 120 bp, synthetic construct
  misc_feature 1..120: note = Artificially Synthesized Probe
  source 1..120: mol_type = other DNA
gttagttccagacaagaaatggcagctccattctgaaaactctagataccattcttttctgggaatttggttatgcattttggtgcctggctctggacagtcatttttttctgctgttct

SEQ ID NO: 19241 - DNA, 120 bp, synthetic construct
  misc_feature 1..120: note = Artificially Synthesized Probe
  source 1..120: mol_type = other DNA
taccacatgtgtaatttcacatggaatccacatattctgtgtgtactttcttctgttagcctttgattcccttaaaatttaggtttgtaatgcttctgaggccccggcttgagagtccat

SEQ ID NO: 19242 - DNA, 120 bp, synthetic construct
  misc_feature 1..120: note = Artificially Synthesized Probe
  source 1..120: mol_type = other DNA
ctgtaatgaaaccctttgttacgaggaagtgacattcgttttccacactaaacaagtcttctgtgactggaaggcagctctcttaatgcacgtaaatcaatctagctttccttatgaaga

SEQ ID NO: 19243 - DNA, 120 bp, synthetic construct
  misc_feature 1..120: note = Artificially Synthesized Probe
  source 1..120: mol_type = other DNA
gtctatccatagatgcagtgttagaattggaaagaaagctcaaaggtttagtaaatcatgttacaaaaggaccttaataaactgcccactgtcgactgttgtgtgctgactggggcactt

SEQ ID NO: 19244 - DNA, 120 bp, synthetic construct
  misc_feature 1..120: note = Artificially Synthesized Probe
  source 1..120: mol_type = other DNA
aagtgctgttatccttttgcttattgtgggaaaacacatcacaattgatagagaggcaagacacaccttcatgacttctatcctagcccagagagagtaaaattcttgtgagcaacagtt

SEQ ID NO: 19245 - DNA, 120 bp, synthetic construct
  misc_feature 1..120: note = Artificially Synthesized Probe
  source 1..120: mol_type = other DNA
catatagtttcccctttttagtacatctatgcattttcatccacactggcatataatactgtagccagctacagccgagtaaactgtccgtatgttcactgggcaaattctgagacatgt

SEQ ID NO: 19246 - DNA, 120 bp, synthetic construct
  misc_feature 1..120: note = Artificially Synthesized Probe
  source 1..120: mol_type = other DNA
ttccatgttagcagaagaaggggttcctaatacagagctgaagcttgctttcctgttacgccaggttttccatttaatgacatgtgttatggttaatactgaaacaggacgttacatcct

SEQ ID NO: 19247 - DNA, 120 bp, synthetic construct
  misc_feature 1..120: note = Artificially Synthesized Probe
  source 1..120: mol_type = other DNA
acctggagatttttcacctacgcaaatcaattgcaactgcaatgtattccccatctatttcaaacctaagagctccatgatcaattagccatggctagatagatctgcaggtcaaaccat

SEQ ID NO: 19248 - DNA, 120 bp, synthetic construct
  misc_feature 1..120: note = Artificially Synthesized Probe
  source 1..120: mol_type = other DNA
tgcccatcaatgccctaactgtagagagactcactgcctgatagatagaattactcagccacctgcaaaatcagatatgggcttgagttttcagaagtcttaactctgtagttataagaa

SEQ ID NO: 19249 - DNA, 120 bp, synthetic construct
  misc_feature 1..120: note = Artificially Synthesized Probe
  source 1..120: mol_type = other DNA
aaaaacggttgacatctcctctttacctcctaaatctttaatgagtttctttcagcaaactctcaccccgagacatatgggaaaggatctggagaaacatagaacctggtttctctttct

SEQ ID NO: 19250 - DNA, 120 bp, synthetic construct
  misc_feature 1..120: note = Artificially Synthesized Probe
  source 1..120: mol_type = other DNA
acagccaaaccatatcagatactgtacagtgtctgctcttaaaccaaaatggagttaaactagagatcaataacagatagctgggaagtcacaaaatgcttggagaataaacagtacgct

SEQ ID NO: 19251 - DNA, 120 bp, synthetic construct
  misc_feature 1..120: note = Artificially Synthesized Probe
  source 1..120: mol_type = other DNA
tcaggaacaatacaaggatgtctcttctcatcagttcttttcaacaccatactgaaagtccttggatgtggaatgcaaggttatttattatatacaatttaattgccttgcttggtacca

SEQ ID NO: 19252 - DNA, 120 bp, synthetic construct
  misc_feature 1..120: note = Artificially Synthesized Probe
  source 1..120: mol_type = other DNA
atttccagttgtacaaaggatagttgtattatgttaggtataattataacctcattattgtctatatttgaggactatttttgatctcaggagatgtatatggattcaaattgacaaggg

SEQ ID NO: 19253 - DNA, 120 bp, synthetic construct
  misc_feature 1..120: note = Artificially Synthesized Probe
  source 1..120: mol_type = other DNA
tgaatgtgattttaaaagaagagagccaattacttgaagaattcatctgtttttgcattataaggaccgaagtagtaaccttgtctggaagagagggtgctggaatgaatgagctggtgg

SEQ ID NO: 19254 - DNA, 120 bp, synthetic construct
  misc_feature 1..120: note = Artificially Synthesized Probe
  source 1..120: mol_type = other DNA
ttaaaacgagtcttgtggacatgagtttggaaagcaaagtaaattctggattccatggttcatacaccaggggtcgctgggcaagttggcagttagattgaaattaaaacatacatgttc

SEQ ID NO: 19255 - DNA, 120 bp, synthetic construct
  misc_feature 1..120: note = Artificially Synthesized Probe
  source 1..120: mol_type = other DNA
tgcctcctagagatctgtgggcagtgctaacaagcatcttactttgtatctattggggatcgaaaaggctgtctgtcactcatgagtgagtgaaatgtataaaagtaaatttagctgttt

SEQ ID NO: 19256 - DNA, 120 bp, synthetic construct
  misc_feature 1..120: note = Artificially Synthesized Probe
  source 1..120: mol_type = other DNA
gtatcagtgaaagtgcatgattttggaagaaacaagccttaactgcacagttactgttccttcaattgttctcatattgtggaaatgagctctgtcttcagcccaaatgtaaggcatgtg

SEQ ID NO: 19257 - DNA, 120 bp, synthetic construct
  misc_feature 1..120: note = Artificially Synthesized Probe
  source 1..120: mol_type = other DNA
atgtgtagttctggcattatttatctggattataaagagatcatcaatgtgctgactcctaattagatggttacaggccaggcaatcagtcaatcatggtgtccactctcgaattgtgtg

SEQ ID NO: 19258 - DNA, 120 bp, synthetic construct
  misc_feature 1..120: note = Artificially Synthesized Probe
  source 1..120: mol_type = other DNA
caacaacacctagactggtgtttggttgaataactgggcactgcccagccaagttgaccacaggaaactaacatttatagccagtaagaaaccgtgacatcttttttttattatccattt

SEQ ID NO: 19259 - DNA, 120 bp, synthetic construct
  misc_feature 1..120: note = Artificially Synthesized Probe
  source 1..120: mol_type = other DNA
caaaacagaatgttacttatataagcaaaaaacaggaaatcttaaaagtttcagaaaaccttagcagatgcaaagtgtcttgagccaatgaggaagagggcagggagccaacaggaagct

SEQ ID NO: 19260 - DNA, 120 bp, synthetic construct
  misc_feature 1..120: note = Artificially Synthesized Probe
  source 1..120: mol_type = other DNA
cacatatacatgccccacatcacacacacgtgtacacacaccacatatgtacacacacaccagacacaagcatattccgtctaccagagaaatactacagccagtaatttcagaaggtta

SEQ ID NO: 19261 - DNA, 120 bp, synthetic construct
  misc_feature 1..120: note = Artificially Synthesized Probe
  source 1..120: mol_type = other DNA
agatcaggagtacacagatgttcacttttatttgcacagtgaactgagagctgtgatcagcagctgaacaggtggaggcttcagtgaagagaaggaaggaaacacccatcttgggatagg

SEQ ID NO: 19262 - DNA, 120 bp, synthetic construct
  misc_feature 1..120: note = Artificially Synthesized Probe
  source 1..120: mol_type = other DNA
atgcagacaggaaaagtcatttgctccaggaagctgcaggtccctgcatggattcactcagcataccccatgtgcacttcaatcccgtacattactgtttagcagaaatagtcaaaactc

SEQ ID NO: 19263 - DNA, 120 bp, synthetic construct
  misc_feature 1..120: note = Artificially Synthesized Probe
  source 1..120: mol_type = other DNA
gggctcatggtgattagtagattcagcatcatgctcaaagggcccagttgcataaactgttttttgtcttaaatgatgtgctgctgactatggcagtatgtaaggatacttgaatcattt

SEQ ID NO: 19264 - DNA, 120 bp, synthetic construct
  misc_feature 1..120: note = Artificially Synthesized Probe
  source 1..120: mol_type = other DNA
gtgtatgtggggggtgtatatgtgtgactgtgtttgttctcatgggtctttattcaacataaactcacattttttttccagaacacgtggggcattaacaattatttaggccacaaggaa

SEQ ID NO: 19265 - DNA, 120 bp, synthetic construct
  misc_feature 1..120: note = Artificially Synthesized Probe
  source 1..120: mol_type = other DNA
tggggcaaataaatgggatacatggtgtacatggtgtatgaaaattcttgtactgacctctttattcccacatactcacacatctacacgtgtggctgctggattaaaatgcacatacat

SEQ ID NO: 19266 - DNA, 120 bp, synthetic construct
  misc_feature 1..120: note = Artificially Synthesized Probe
  source 1..120: mol_type = other DNA
gtgaatccaatggcttcagagtcattttacaggtgttgggagatttcatttcatagttgactcctttctaaggaagaaatggacttggcttacctgtcagagtttgacatgctggtgaat

SEQ ID NO: 19267 - DNA, 120 bp, synthetic construct
  misc_feature 1..120: note = Artificially Synthesized Probe
  source 1..120: mol_type = other DNA
ttgttttcaggctactctgcctctctctattgattggttctgttacttctgacaaaattgtccattgtaataagtgcagattcctgtaagcaagggatggcagattttcctgcttcaatc

SEQ ID NO: 19268 - DNA, 120 bp, synthetic construct
  misc_feature 1..120: note = Artificially Synthesized Probe
  source 1..120: mol_type = other DNA
ggatagaatcagacaaatctgctagtggttaagctttgacactttctgggagttggtcagaggagggcttctatttcacagtcactttgtactgcagcagcctgtatgaagacaggatgt

SEQ ID NO: 19269 - DNA, 120 bp, synthetic construct
  misc_feature 1..120: note = Artificially Synthesized Probe
  source 1..120: mol_type = other DNA
ccagatagaaatgtcctcaggtgaaataggaaggcatttatgttggatctcaggccatgggaactttcaaactttctaaatccagtcttcaaaacccattcaagctacatcaggtgtctt

SEQ ID NO: 19270 - DNA, 120 bp, synthetic construct
  misc_feature 1..120: note = Artificially Synthesized Probe
  source 1..120: mol_type = other DNA
tagatgctgtgttgaaacgtaggggattgtatgtgaggtgactgaaacagtttgtataatttgaaactccagcacagagctaagttccatccttttgaagtgatagccactaatttcctg

SEQ ID NO: 19271 - DNA, 120 bp, synthetic construct
  misc_feature 1..120: note = Artificially Synthesized Probe
  source 1..120: mol_type = other DNA
aaatgttttagtgaagatagttgttgtaacttttactaatgttattcagctgtcatggctttataaaggttggagtcaccaccgttcctttgatttagcagagggcatcactgccctctc

SEQ ID NO: 19272 - DNA, 120 bp, synthetic construct
  misc_feature 1..120: note = Artificially Synthesized Probe
  source 1..120: mol_type = other DNA
ttgagctgattaacataggccacccacagacagcagaactgaagcctacaagccacccacggatggcagaactgaaacctacaggccgcccacagatggcggaactgaagcctacaagcc

SEQ ID NO: 19273 - DNA, 120 bp, synthetic construct
  misc_feature 1..120: note = Artificially Synthesized Probe
  source 1..120: mol_type = other DNA
gaactgaaacctacaggccgcccacagacggcagtactgaagcctacaggccgcccacagacggcagaactgaaacctacaagccgcccacagatggcagaactgaagcctagaagctgc

SEQ ID NO: 19274 - DNA, 120 bp, synthetic construct
  misc_feature 1..120: note = Artificially Synthesized Probe
  source 1..120: mol_type = other DNA
acaggctcacgaaggaagaaactaagacttttcatagatttttgccagaaagaaaagaagagaagatagtggcttggacaggaggaggtggcattgataaaggaggagacagacagaaag

SEQ ID NO: 19275 - DNA, 120 bp, synthetic construct
  misc_feature 1..120: note = Artificially Synthesized Probe
  source 1..120: mol_type = other DNA
ctccagtgagtggggaaagagagtatcacggcagatctgtgcggaaaatgtccagtttccacattttaaaacgtttatcaaagagaaaataaacaaccgtttgagactgagtcaaagtag

SEQ ID NO: 19276 - DNA, 120 bp, synthetic construct
  misc_feature 1..120: note = Artificially Synthesized Probe
  source 1..120: mol_type = other DNA
gaagcgtgactgtcaaatgtaaatttattgactatttacctgttagctcattcagtcaatggtggcttggatctgctgccattagtcatgtgtctcctttgtctatagcatgaactttgg

SEQ ID NO: 19277 - DNA, 120 bp, synthetic construct
  misc_feature 1..120: note = Artificially Synthesized Probe
  source 1..120: mol_type = other DNA
ggaatatggtatgaagtgttttctaaaaatatgagtctttgtagatattatacagctggacaaagggtaacagcgagccatggtaactcgctgaacgttgcacatcacatttgcagaggc

SEQ ID NO: 19278 - DNA, 120 bp, synthetic construct
  misc_feature 1..120: note = Artificially Synthesized Probe
  source 1..120: mol_type = other DNA
gcctcctctcccctctttgacagcggtttgcatctgaacggaaactccagtaccacagtaagcatatagatttttgttaaattttattttaacagaaatatcagtagcccagagataatc

SEQ ID NO: 19279 - DNA, 120 bp, synthetic construct
  misc_feature 1..120: note = Artificially Synthesized Probe
  source 1..120: mol_type = other DNA
aaaacaaatgcccatgaaattgcagttctaagcaataattagaatattgtccctagctttccatctgtgcagtcttccatactccattttctggcctgcccagagatataaggcatcctg

SEQ ID NO: 19280 - DNA, 120 bp, synthetic construct
  misc_feature 1..120: note = Artificially Synthesized Probe
  source 1..120: mol_type = other DNA
acgtttgcttttcacattagatctctaaatcccatgagatctgcttttattaaagctgtgaaaggtagagttccaggtgcatttttatgggtaaccagttgtctcaacactatttctggg

SEQ ID NO: 19281 - DNA, 120 bp, synthetic construct
  misc_feature 1..120: note = Artificially Synthesized Probe
  source 1..120: mol_type = other DNA
gaggggacatgggtagagtgactagcctaatgcttggaatatgtcatcttcagacatcctcatcctccttatcagcaagagaaagagaaaaagaagtgctaaccttaaaattctttgtag

SEQ ID NO: 19282 - DNA, 120 bp, synthetic construct
  misc_feature 1..120: note = Artificially Synthesized Probe
  source 1..120: mol_type = other DNA
aacacatagatcaacccaaatgcccatcaatgatagacttgataaaggaaatgtggtagagatacaccatggaatactatgcagccataaaaaggagcaagactatgtcctttgcaggga

SEQ ID NO: 19283 - DNA, 120 bp, synthetic construct
  misc_feature 1..120: note = Artificially Synthesized Probe
  source 1..120: mol_type = other DNA
ttttgaggcatgctagttggttttctggatggtactttaatcatgtaaaagccaatttgctgtgcagtgagttgaccattgggctctctcttgtagagacgatttaaagcattgtgacaa

SEQ ID NO: 19284 - DNA, 120 bp, synthetic construct
  misc_feature 1..120: note = Artificially Synthesized Probe
  source 1..120: mol_type = other DNA
tttcttctagattttctagtttatttgcatagaggtgtttgtagtattctttgatggtagtttgcatttctgtgggatcggtggtgatatcccttttatcattttttattgcatctattt

SEQ ID NO: 19285 - DNA, 120 bp, synthetic construct
  misc_feature 1..120: note = Artificially Synthesized Probe
  source 1..120: mol_type = other DNA
attaattcaagatggattaaagacttaaacattagacctaaaaccataaaaaccctagaagaaaacctaggcattaccattcaggacataggcatgggcaaggacttcatgtctaaaaca

SEQ ID NO: 19286 - DNA, 120 bp, synthetic construct
  misc_feature 1..120: note = Artificially Synthesized Probe
  source 1..120: mol_type = other DNA
aaaacagatggtgcaatttctttcttgaaagaggtgagttggaaactttctagactcaaaggatttaagttgctttgttggctgcattttcagactcaccagcttcactttcatcctccc

SEQ ID NO: 19287 - DNA, 120 bp, synthetic construct
  misc_feature 1..120: note = Artificially Synthesized Probe
  source 1..120: mol_type = other DNA
ttaatatcatgcgtttaggtttggaagtacagaatccattgatctttcacctgttgctgaatccattgctgcttcttcccatcttctgcaaattctgtcctgactggcttgttaattggt

SEQ ID NO: 19288 - DNA, 120 bp, synthetic construct
  misc_feature 1..120: note = Artificially Synthesized Probe
  source 1..120: mol_type = other DNA
attggggcctattacatataaaaccattatgattcatttgtgcacatgtcttttaggggatgtagtatccatttcttctgggtgtctgctcaggagtgcagtttcagggtgatatgatac

SEQ ID NO: 19289 - DNA, 120 bp, synthetic construct
  misc_feature 1..120: note = Artificially Synthesized Probe
  source 1..120: mol_type = other DNA
tttcctacaaaaaatataaaatagttattgcttggcttgtagaatttcagcgagttgaatggagatgaactgaatgtggagtgttgagttacaagcactcaaggattgtgggggccaccc

SEQ ID NO: 19290 - DNA, 120 bp, synthetic construct
  misc_feature 1..120: note = Artificially Synthesized Probe
  source 1..120: mol_type = other DNA
atgggagaattcagctcaaacaaaagggctgcaggccccatgcaagtctgaaacccaaaagggcagtcagtaaatcttaaagctccaaaataatctcttttgactccatgtctcacatcc

SEQ ID NO: 19291 - DNA, 120 bp, synthetic construct
  misc_feature 1..120: note = Artificially Synthesized Probe
  source 1..120: mol_type = other DNA
atgctttgctgctcagaaatttcttccaccagataccccatatcataactctcaagttcaatgttgcacagatccctagagcaggggcacaatgcctccaacctctttgctataagtgta

SEQ ID NO: 19292 - DNA, 120 bp, synthetic construct
  misc_feature 1..120: note = Artificially Synthesized Probe
  source 1..120: mol_type = other DNA
gacagaccgaagacgtctagcacatgctcacccatcaaggtgtctgaaccatgtgctacttgaaaggatggaggagaggcaacatttgaatacataattaatgataattttctggagata

SEQ ID NO: 19293 - DNA, 120 bp, synthetic construct
  misc_feature 1..120: note = Artificially Synthesized Probe
  source 1..120: mol_type = other DNA
ccactgttgactgtgtccagtgtcttaggttaagaaaaaacagacacagcgtgctgaaaacaatagcttacaattcagaatgaggtgagtggatgtaaagtacattctgaagtgctcata

SEQ ID NO: 19294 - DNA, 120 bp, synthetic construct
  misc_feature 1..120: note = Artificially Synthesized Probe
  source 1..120: mol_type = other DNA
caagacagttctcaacatatttgtaagagcaaagtcccagcatagtcaaggtattattgaagcaggagttgggggtcttgttcttcttgttcttccagaccttttatttgaagatactgc

SEQ ID NO: 19295 - DNA, 120 bp, synthetic construct
  misc_feature 1..120: note = Artificially Synthesized Probe
  source 1..120: mol_type = other DNA
agccaccgtgcccggccgggactctatcttatatggaatacttcatataacagagggtgtcttagagaacacttggaaaaataaggaagcttagaataaaaaatacatttcacatggttt

SEQ ID NO: 19296 - DNA, 120 bp, synthetic construct
  misc_feature 1..120: note = Artificially Synthesized Probe
  source 1..120: mol_type = other DNA
aaatggaagcaaagaacaagaaagaaaatgagggcttcagggccccttaattgcattgggccctaggaggaacactagtgatgtcttcccatgacttttacatttgtaaaatttgcaatt

SEQ ID NO: 19297 - DNA, 120 bp, synthetic construct
  misc_feature 1..120: note = Artificially Synthesized Probe
  source 1..120: mol_type = other DNA
attaacatatttttagataaaaatgaagtagttgtatataaacagcagctctgttaagaaccacgcatgggctctgagaagatagaaggactgggcccagaaggcattgcaatcccagga

SEQ ID NO: 19298 - DNA, 120 bp, synthetic construct
  misc_feature 1..120: note = Artificially Synthesized Probe
  source 1..120: mol_type = other DNA
agaatttgggcaccctgttctagaggttttgtgatgataaaatgtgtacgttcactgtcagatttatggcagataaaggaatgtttccacacaatttgtcctgttaatcagaaggtgccc

SEQ ID NO: 19299 - DNA, 120 bp, synthetic construct
  misc_feature 1..120: note = Artificially Synthesized Probe
  source 1..120: mol_type = other DNA
gagtgttgtttccacttttcattttttatcattcattatcctctctttataagaagctgtaactcccagagagttagaagtaggaggaagcagagtgagctctgcacaagggaagaagca

SEQ ID NO: 19300 - DNA, 120 bp, synthetic construct
  misc_feature 1..120: note = Artificially Synthesized Probe
  source 1..120: mol_type = other DNA
aaagacatgaattcatcctttttaatggctgcatagtactccatggtatatatgtggcacattttctttatccagtctatctttgatgggcatttgggttggttccaagtctttgctatt

SEQ ID NO: 19301 - DNA, 120 bp, synthetic construct
  misc_feature 1..120: note = Artificially Synthesized Probe
  source 1..120: mol_type = other DNA
agtttggaatcttttttttgtgtcatgcataactcaaactttgcatatcaccttcttcttaatctccagtgagtaactgctttatagtttcagactccaagttaggtcagaatactcaat

SEQ ID NO: 19302 - DNA, 120 bp, synthetic construct
  misc_feature 1..120: note = Artificially Synthesized Probe
  source 1..120: mol_type = other DNA
agaaatgaagtcttctcagacaagcaaaaacataaaattagtcaccattagactggttctacacaaaatgattaagggagccctacacctggaagtgaaaggaccacatctaccatcatg

SEQ ID NO: 19303 - DNA, 120 bp, synthetic construct
  misc_feature 1..120: note = Artificially Synthesized Probe
  source 1..120: mol_type = other DNA
catgagccaacatgcctgacccagagcacccataaatatatagcaactatttattagttctaaataatgaaataaactccaatatgaaaataattggggatttcaacactgctttctcag

SEQ ID NO: 19304 - DNA, 120 bp, synthetic construct
  misc_feature 1..120: note = Artificially Synthesized Probe
  source 1..120: mol_type = other DNA
gcatttgatagaattcaacaatgctttatgataaaagtactcaaattagggaagggataaacttcagcataaggtcatatatgacaggcccatgactagtattgtagtgaatggggaaaa

SEQ ID NO: 19305 - DNA, 120 bp, synthetic construct
  misc_feature 1..120: note = Artificially Synthesized Probe
  source 1..120: mol_type = other DNA
agagagcatgaatagccaaagcaatcttaagcaaaaagaacagaacttaagcaaaaagggcagaatgactttgaaatacactacagagctatagtaatgaaaaaagcatggtactggtat

SEQ ID NO: 19306 - DNA, 120 bp, synthetic construct
  misc_feature 1..120: note = Artificially Synthesized Probe
  source 1..120: mol_type = other DNA
ctagtgggtatttattgaaaggaaaggaaatcagtatatcaaagggatacctgtacccacatgtttattgcatcattatccacaagagtaagatgtggtgttaacctaagtgtccattat

SEQ ID NO: 19307 - DNA, 120 bp, synthetic construct
  misc_feature 1..120: note = Artificially Synthesized Probe
  source 1..120: mol_type = other DNA
gacctacactacaggaaatactaaaacatgctcttcaagctggaaggacattaaaccacgtggaaacttgatacataggaagaagtgaagagcactatgaatggcaaataggtgggtatg

SEQ ID NO: 19308 - DNA, 120 bp, synthetic construct
  misc_feature 1..120: note = Artificially Synthesized Probe
  source 1..120: mol_type = other DNA
gaactacactaccttatgaatcaactgggacctcactgacatttatagagtcctggatccaaagtctccagaatgcaatttcttttcatgtgagcatggaacattcaacaagatagatgg

SEQ ID NO: 19309 - DNA, 120 bp, synthetic construct
  misc_feature 1..120: note = Artificially Synthesized Probe
  source 1..120: mol_type = other DNA
agagaagaaaggtttacacacaagtgatagtgcatcattcgattaataccgagttataaagcagcaaaactagtctataacagcagaaaccagatcagtgactaccttgggctggaggga

SEQ ID NO: 19310 - DNA, 120 bp, synthetic construct
  misc_feature 1..120: note = Artificially Synthesized Probe
  source 1..120: mol_type = other DNA
tagaatgtggttgtatttctatgataatcagagaacgtagacttaagagtgtgctccgaacactactttgtgtccatacatacatgccttgaggaggcaaaaatgctgggatgatacaca

SEQ ID NO: 19311 - DNA, 120 bp, synthetic construct
  misc_feature 1..120: note = Artificially Synthesized Probe
  source 1..120: mol_type = other DNA
agcaagattacaaaaagctgacaggtacaagctatagggtttgtgatcagctggtaggaacatgcctcattatatctgcaagctattgagttgatgtaagatttgggaccacgatgagaa

SEQ ID NO: 19312 - DNA, 120 bp, synthetic construct
  misc_feature 1..120: note = Artificially Synthesized Probe
  source 1..120: mol_type = other DNA
tcctacacaggttgcagtagtctatgtagacaaatggtatttcagcaaagctaatatgaaatacacatcaggtgatcagaaggtatttcagtgtcattctcgtgcatgcaccaaaggtga

SEQ ID NO: 19313 - DNA, 120 bp, synthetic construct
  misc_feature 1..120: note = Artificially Synthesized Probe
  source 1..120: mol_type = other DNA
catttataaggaatgaagtctcaaataacgttctaatacatagtgaacatccagcagcttaacacttacgaacaagcaagtatgaaagacacttcatgccacccttctgagcctccagaa

SEQ ID NO: 19314 - DNA, 120 bp, synthetic construct
  misc_feature 1..120: note = Artificially Synthesized Probe
  source 1..120: mol_type = other DNA
gagaaaatgtcttaaatccgggtagaagagcacttctttctttccagatctttcagaaacaacctcacttgcttttttatcagttgaaatgtgttggacttgagttctgtgttccaggtg

SEQ ID NO: 19315 - DNA, 120 bp, synthetic construct
  misc_feature 1..120: note = Artificially Synthesized Probe
  source 1..120: mol_type = other DNA
cggtctgtatgaatgtgtgtggctatagtatgtatgatgggcagacagtacaacctgaaattccctttactggtccttaaatggaaggaaaagtctagcaaacattgcttttcatgaagc

SEQ ID NO: 19316 - DNA, 120 bp, synthetic construct
  misc_feature 1..120: note = Artificially Synthesized Probe
  source 1..120: mol_type = other DNA
cgtgctctaactgtgaattccttttaaagtgtgtgcttgtggctttcttacaacatgtttctttggtttggggttaatttgggaacaaagtagagatctgggcatgtatctctcttgaca

SEQ ID NO: 19317 - DNA, 120 bp, synthetic construct
  misc_feature 1..120: note = Artificially Synthesized Probe
  source 1..120: mol_type = other DNA
tgtgttattcttggtgacaaaatattttgacccactaagccattcataccacaatcattgggataaatacatgacatccaggagaatgaaatggaacccaagaagtcagccgactgcctg

SEQ ID NO: 19318 - DNA, 120 bp, synthetic construct
  misc_feature 1..120: note = Artificially Synthesized Probe
  source 1..120: mol_type = other DNA
tctcctgagggctcctcagtctaaggagggtaaggaataagtttagaaattgtcaattctaaatcaaacaggttttagaatcttaaaacaaaagctgtaagctgtagcccaggaggaacc

SEQ ID NO: 19319 - DNA, 120 bp, synthetic construct
  misc_feature 1..120: note = Artificially Synthesized Probe
  source 1..120: mol_type = other DNA
catgcagacagacacagagcaaacatgcaaacctcacaaagatattgtttcttctgtcacctgtgcttttgggtcatattcaagaaatcattaaccaaataaaagtcgtggagcttttcc

SEQ ID NO: 19320 - DNA, 120 bp, synthetic construct
  misc_feature 1..120: note = Artificially Synthesized Probe
  source 1..120: mol_type = other DNA
tgaattagatttattgattttgcatgtgttgaaccatgcttgcatccaaggcatgaatcccacttgatcatggtgactgatctttttaatgtgctattgaattcaggtaactagtatttt

SEQ ID NO: 19321 - DNA, 120 bp, synthetic construct
  misc_feature 1..120: note = Artificially Synthesized Probe
  source 1..120: mol_type = other DNA
tgtgtctttatagcagcatgatttatagtcctttgggtatatacccagtaatgggatggctgggtcaaatgctatttctagttctagatccttgaggaatcaccacactgtcttccacaa

SEQ ID NO: 19322 - DNA, 120 bp, synthetic construct
  misc_feature 1..120: note = Artificially Synthesized Probe
  source 1..120: mol_type = other DNA
gagcagggggacttcccattccaccatgtgccgacatcacccttgggtcttttcttttgttaagtaattagaccaatgatggttgaggttccttagttttctcagttctttttttaaaaa

SEQ ID NO: 19323 - DNA, 120 bp, synthetic construct
  misc_feature 1..120: note = Artificially Synthesized Probe
  source 1..120: mol_type = other DNA
aatgtatgtacatttctgttatgtagaaatgtctgttatgcagacatttctctgacatcaggtgaagaaaagcattgttgatggggtggccatggtggtggagatgctagagttttgtct

SEQ ID NO: 19324 - DNA, 120 bp, synthetic construct
  misc_feature 1..120: note = Artificially Synthesized Probe
  source 1..120: mol_type = other DNA
catgacctaggtaactcatgggggctcttgtgatggcttctttgctggtttaaccaagtagggtgggagatgatataatactttactgctttctaagatagtttatgaaggtaagaaaaa

SEQ ID NO: 19325 - DNA, 120 bp, synthetic construct
  misc_feature 1..120: note = Artificially Synthesized Probe
  source 1..120: mol_type = other DNA
ctaaatactctaatttgttttgcaaaggagagtatcatgtttaaatagtcataccaaaaagaatcctgtggtgagttttctggaattcgtccatcccaagagcacagcactcgatgctct

SEQ ID NO: 19326 - DNA, 120 bp, synthetic construct
  misc_feature 1..120: note = Artificially Synthesized Probe
  source 1..120: mol_type = other DNA
cagctctgagttgccttctctgggtggaactgcatctgctccttctttcctgggaattcagaatcattcttgagaaatcactctgcatctgtgtcattctcccaactcacttctctaggc

SEQ ID NO: 19327 - DNA, 120 bp, synthetic construct
  misc_feature 1..120: note = Artificially Synthesized Probe
  source 1..120: mol_type = other DNA
gtcgaggatcttttcttttcacctctgaggattattcgttttttttcattttgactgtaagggattagcgccctgtctatgaaaagatgctgcaaagtctccgcttttggacattaagat

SEQ ID NO: 19328 - DNA, 120 bp, synthetic construct
  misc_feature 1..120: note = Artificially Synthesized Probe
  source 1..120: mol_type = other DNA
tgctggaggtgctggatcgctgtagaggaaagtggtgcagtgatggagggcgtctccctgtcctgcctgctgctggaggtgctggatcgctgtagaggaaagcggtgcagtgatggaggg

SEQ ID NO: 19329 - DNA, 120 bp, synthetic construct
  misc_feature 1..120: note = Artificially Synthesized Probe
  source 1..120: mol_type = other DNA
tgaccccagacttggggatgggagttgctagggacactccacttttaggaattaggccaaacttttccattactatggaagtcacactcttcaaaaactggatttaatttcattttttct

SEQ ID NO: 19330 - DNA, 120 bp, synthetic construct
  misc_feature 1..120: note = Artificially Synthesized Probe
  source 1..120: mol_type = other DNA
tgagttctttataaagctcacttgtgtatgtgtgtccctgccttaaccacttctggccttatgagtcaccttgggaaaattggtgaatctacatcctccttgatttcttcatctttaaca

SEQ ID NO: 19331 - DNA, 120 bp, synthetic construct
  misc_feature 1..120: note = Artificially Synthesized Probe
  source 1..120: mol_type = other DNA
aatctgagggcacacggaggcccattaacaccagccgtgtattcagtgatcagattttatgtgggaaacatttcttgaccaccatttaataccattcactacactggaaaaaagaaaaaa

SEQ ID NO: 19332 - DNA, 120 bp, synthetic construct
  misc_feature 1..120: note = Artificially Synthesized Probe
  source 1..120: mol_type = other DNA
gccctgcgtgctgtctgccctaagggagaggtgcgatgtataagtgtccttgtacattcagcaccaccccaactgtgtattttaaatcagtgtttacatttttatagagttattttatca

SEQ ID NO: 19333 - DNA, 120 bp, synthetic construct
  misc_feature 1..120: note = Artificially Synthesized Probe
  source 1..120: mol_type = other DNA
catgattatgttttacagtcaacttgtataaaatataaacaagttccctggtgattcttctgctcatactggtgccgctattaaagttctgctgggtgtaagcgagggcactttgctgca

SEQ ID NO: 19334 - DNA, 120 bp, synthetic construct
  misc_feature 1..120: note = Artificially Synthesized Probe
  source 1..120: mol_type = other DNA
caggagtgaagctgcagacctctgtgatgagtgttacagctcataaaagcagcgtggacccaaagagtgagcagtagcaggatttattgcaaagagcaaaagaacaaagcttccacagtg

SEQ ID NO: 19335 - DNA, 120 bp, synthetic construct
  misc_feature 1..120: note = Artificially Synthesized Probe
  source 1..120: mol_type = other DNA
aagttttattctttgaaatggaaaaaggaaacaaagatcagtgagcaaacttaggcatgctgttgtgttatgatgacctgcctggtatatcagacacaattttataaacagatggcgcgg

SEQ ID NO: 19336 - DNA, 120 bp, synthetic construct
  misc_feature 1..120: note = Artificially Synthesized Probe
  source 1..120: mol_type = other DNA
aaatagatctgaaaggtgacctacttaggataatgacagtgcctcttccatagggtaactgcgggggtgaaatagatccaaaaggtgaattacttaggataatgacaatgcctcttccat

SEQ ID NO: 19337 - DNA, 120 bp, synthetic construct
  misc_feature 1..120: note = Artificially Synthesized Probe
  source 1..120: mol_type = other DNA
gacaccacaggggagaaattctctttcttggacctattgaacttttctttgtctcgagtgaacactttatttgtggcctgaatttctggtaaaaatgacttttttttttcccctgagacg

SEQ ID NO: 19338 - DNA, 120 bp, synthetic construct
  misc_feature 1..120: note = Artificially Synthesized Probe
  source 1..120: mol_type = other DNA
cacattttgactttctccggcattgaagctttgacgagcaattaagaattctcagtttttagggtcaaattttatagttactggaatcccacagcacaagggaagcagaaggttggaaga

SEQ ID NO: 19339 - DNA, 120 bp, synthetic construct
  misc_feature 1..120: note = Artificially Synthesized Probe
  source 1..120: mol_type = other DNA
aaagcagattgcgtgacttacactagttacccggcttctataacaataaaccaaacagtgaaccaacagtgagccacgctgtgaactttctttccctgtttcattaacatgttagtatct

SEQ ID NO: 19340 - DNA, 120 bp, synthetic construct
  misc_feature 1..120: note = Artificially Synthesized Probe
  source 1..120: mol_type = other DNA
gtctctactcacatcttattcctgctacatcaatgatggtgtaaacctccaaaggcagagttaggactctggactcagattccttctcaccactgactttacgaggatgaccacagtact

SEQ ID NO: 19341 - DNA, 120 bp, synthetic construct
  misc_feature 1..120: note = Artificially Synthesized Probe
  source 1..120: mol_type = other DNA
agggaacttggctgtcgtccgcaataatctacttgacccagctgtttattaaccactagattaaggtcagccttgctttgtatatgtcgcaccagttaacatgaacaaatgagaaatgat

SEQ ID NO: 19342 - DNA, 120 bp, synthetic construct
  misc_feature 1..120: note = Artificially Synthesized Probe
  source 1..120: mol_type = other DNA
gtgttataccatctctgtttcctaccccttctcctacacaccccaccttgcctaagaaagcagcgatgacactcacatttgaaagattattagaacatagcttagtgatgacttattttt

SEQ ID NO: 19343 - DNA, 120 bp, synthetic construct
  misc_feature 1..120: note = Artificially Synthesized Probe
  source 1..120: mol_type = other DNA
gctgacacttcagaacgtgagcacacggtgtttctgagtctctgctgatgctcattcgtgcatgaaaaataatggagacatcatgtttctgatgatttatgattaacccgaaacagaaaa

SEQ ID NO: 19344 - DNA, 120 bp, synthetic construct
  misc_feature 1..120: note = Artificially Synthesized Probe
  source 1..120: mol_type = other DNA
gcttcctttctgcaagcagagaaggaagtaccaggaccttcctaacattgtagttttcaaacgcaacactttaaattccaaagttatctcaataaatagggaagaaaggatggtgcttga

SEQ ID NO: 19345 - DNA, 120 bp, synthetic construct
  misc_feature 1..120: note = Artificially Synthesized Probe
  source 1..120: mol_type = other DNA
tttcagactgcatttggtggtctctgccctgcctgttaattctataaaactgctctttctgtgggaatagcataggtcattctgatctcctgtgtatagattatttctctattggcagtt

SEQ ID NO: 19346 - DNA, 120 bp, synthetic construct
  misc_feature 1..120: note = Artificially Synthesized Probe
  source 1..120: mol_type = other DNA
tttttgaaacagaagttctgaaacttttccacaaagtacatatctctctatggttcacacaggaaacagcctttatcaaggctggtgggacagtgggccaaagttttgacatgatctcta

SEQ ID NO: 19347 - DNA, 120 bp, synthetic construct
  misc_feature 1..120: note = Artificially Synthesized Probe
  source 1..120: mol_type = other DNA
actttgaatttacttagcagcttggagtagtttatttggaaattgatcttagagctgagcttcattatgtaggatgatgaagaactagccctgctatatccggatgcgcttttggtggag

SEQ ID NO: 19348 - DNA, 120 bp, synthetic construct
  misc_feature 1..120: note = Artificially Synthesized Probe
  source 1..120: mol_type = other DNA
cttgtgtgatttaattaagctcatgcaactaacaggcatttcagattactggcggtctattattgccatcttgggccaacagtagctctttattcactccttaatacataactctccttg

SEQ ID NO: 19349 - DNA, 120 bp, synthetic construct
  misc_feature 1..120: note = Artificially Synthesized Probe
  source 1..120: mol_type = other DNA
gaagtggaggaagtaaaaccagcagagtttgccctgcaggcaaaagaaaaacatcactttaaatctctctaccccgtatgaatctaattaggctgtgacccttagaatttctcatcagaa

SEQ ID NO: 19350 - DNA, 120 bp, synthetic construct
  misc_feature 1..120: note = Artificially Synthesized Probe
  source 1..120: mol_type = other DNA
ataagcttgtttttgcctgctgcagttatccagcagccagctgctccgaagatttagatttgaagatatggtcatcattgtttgtgaaacctcgcctaataaggccataaaaaatgatga

SEQ ID NO: 19351 - DNA, 120 bp, synthetic construct
  misc_feature 1..120: note = Artificially Synthesized Probe
  source 1..120: mol_type = other DNA
gagcctccatgggacgtaagtataacccactaggaacttggaagttcatgatccagtgaaatatttgggttactttgaaaagccttctaaatccagaacagtcaagaaagacaaaactaa

SEQ ID NO: 19352 - DNA, 120 bp, synthetic construct
  misc_feature 1..120: note = Artificially Synthesized Probe
  source 1..120: mol_type = other DNA
caaaactgaatttttaattcaagatgtgattcattcctattgtgtgaacttgatttggaaacttggacatctccacgtttctcccgtctcctgattctgggtgtgttgacctgatgggat

SEQ ID NO: 19353 - DNA, 120 bp, synthetic construct
  misc_feature 1..120: note = Artificially Synthesized Probe
  source 1..120: mol_type = other DNA
tagaagtttatcaatttaaacagctttacttttgagagtctgaccatcagaactgcaagcaaactaaaaacctgagagcttcaggtacctacacgttttggatgcatgtcacgtgcagtg

SEQ ID NO: 19354 - DNA, 120 bp, synthetic construct
  misc_feature 1..120: note = Artificially Synthesized Probe
  source 1..120: mol_type = other DNA
taacgtgcgtaaactcctttgtagcttgtagtgcacttctgtccattatataatttgattcttgagacaactgaaggcccctcattttagtgatgagtggcaagagcacacaatatcaga

SEQ ID NO: 19355 - DNA, 120 bp, synthetic construct
  misc_feature 1..120: note = Artificially Synthesized Probe
  source 1..120: mol_type = other DNA
tctccgccacctggctttgccatggtttgttagggtttctttcttggtcatttaaactatttgaaaacaataaaaaactagcagacaaaccctgtatgtttcctctggcaacatctgctt

SEQ ID NO: 19356 - DNA, 120 bp, synthetic construct
  misc_feature 1..120: note = Artificially Synthesized Probe
  source 1..120: mol_type = other DNA
ggaacattcctagaacatgattgttttcattaacttcttatttctagtaatttctgcagaagatgacttggcaccatctccattctctcttcagagccatcagcagggcttctttccatc

SEQ ID NO: 19357 - DNA, 120 bp, synthetic construct
  misc_feature 1..120: note = Artificially Synthesized Probe
  source 1..120: mol_type = other DNA
aactgtgggatgtactcattggtgagtgctggatctttgtaagtttgaaatgtttaaagatttccaaagggaggtttttgagtagagttagatccaccaggcttgagttcagagacaaga

SEQ ID NO: 19358 - DNA, 120 bp, synthetic construct
  misc_feature 1..120: note = Artificially Synthesized Probe
  source 1..120: mol_type = other DNA
tttaacatcagtatcttaaatgtattttatcctgacataaacatgaggtttttggatcagagacaggttgttaattactcacagaacgtctcaatgctggttccccatccctgccccaga

SEQ ID NO: 19359 - DNA, 120 bp, synthetic construct
  misc_feature 1..120: note = Artificially Synthesized Probe
  source 1..120: mol_type = other DNA
gagctgagattaaagccgggactctcaacaactcacacaccctactctccctcgttagccagagtatttatttctgatttgtacattagaatctgaaagatgtttcagttattcctgttt

SEQ ID NO: 19360 - DNA, 120 bp, synthetic construct
  misc_feature 1..120: note = Artificially Synthesized Probe
  source 1..120: mol_type = other DNA
aggaaaaccatagtgatgatatatagttacaaaaccacccatcttgtctaccatccgttacgtctcttttgttccatgagagtctggagaaaatccaggaatctgcatacctcgtgtttc

SEQ ID NO: 19361 - DNA, 120 bp, synthetic construct
  misc_feature 1..120: note = Artificially Synthesized Probe
  source 1..120: mol_type = other DNA
acaaacacactaggagtgccctgcttcagaacagtactccaggctttcagtattgtcactgcatcatgggctatgcacacctagaattttgagctttacattaatcttctaattatatgt

SEQ ID NO: 19362 - DNA, 120 bp, synthetic construct
  misc_feature 1..120: note = Artificially Synthesized Probe
  source 1..120: mol_type = other DNA
cttttttttttttaattaatacacttgttttttggacgattttagatttacagaaaacagtggaaggtgaagagtagcctgtgcccctcactgcccccacctcccctgttcctaacactt

SEQ ID NO: 19363 - DNA, 120 bp, synthetic construct
  misc_feature 1..120: note = Artificially Synthesized Probe
  source 1..120: mol_type = other DNA
tttacagccttcaaaaataagcagcattgtcctaactgggaaagataaaaatggtggatccacaattctgtatttgccagtaataaaaccagcacctgagctctgacattaggcagtagc

SEQ ID NO: 19364 - DNA, 120 bp, synthetic construct
  misc_feature 1..120: note = Artificially Synthesized Probe
  source 1..120: mol_type = other DNA
tgaggtggacacacatgcagtcacactattgtaaatttttaaatttttcaactaaaagtagcatgctgcttttcatggaacgttctctgtttcttgcaggtgagcacattcgattgggtg

SEQ ID NO: 19365 - DNA, 120 bp, synthetic construct
  misc_feature 1..120: note = Artificially Synthesized Probe
  source 1..120: mol_type = other DNA
tttattccaagaactttagattttgttactgctgctgctgttattgaaattgttttcaacaaatcagatacaaatttgccccagggtctggccagtttgctgctcatggttcctagggta

SEQ ID NO: 19366 - DNA, 120 bp, synthetic construct
  misc_feature 1..120: note = Artificially Synthesized Probe
  source 1..120: mol_type = other DNA
ccttccgtgcacctgagatgttctttaggtactggggtgtctttgagagattattgtatcttacatatgtggttcattagtaagctatagagccatctcattttcccaggaagattataa

SEQ ID NO: 19367 - DNA, 120 bp, synthetic construct
  misc_feature 1..120: note = Artificially Synthesized Probe
  source 1..120: mol_type = other DNA
ttaagagttctagaacgtgttctccacggatcttcggggtagtcctgtttggataatatcaacactgagaggaagaattcctaaatgattttcctaaagccatgtcaggacaaaactgca

SEQ ID NO: 19368 - DNA, 120 bp, synthetic construct
  misc_feature 1..120: note = Artificially Synthesized Probe
  source 1..120: mol_type = other DNA
tctttgtgaggctaaacagtggaaaaacaatcccttgcttgatcaagcagtctcactcctcagaattgaatctaaagaagagtccattacaacactgagttcagaggaatcaaagagcta

SEQ ID NO: 19369 - DNA, 120 bp, synthetic construct
  misc_feature 1..120: note = Artificially Synthesized Probe
  source 1..120: mol_type = other DNA
aggctctgagagagtgaattgctcaagatcaaacagctaatactgggcaaagaaaggcctcaaattttatctgactccaaaacctggtgttcttctattataatacacagctgcccaaat

SEQ ID NO: 19370 - DNA, 120 bp, synthetic construct
  misc_feature 1..120: note = Artificially Synthesized Probe
  source 1..120: mol_type = other DNA
cctaacccctgggttgttcaaggcccaactataatgagccattcaatgggggatgtgcgttcccacataaatatcttccaaaagtttttctttatcagttttgacatttaagttcagtgg

SEQ ID NO: 19371 - DNA, 120 bp, synthetic construct
  misc_feature 1..120: note = Artificially Synthesized Probe
  source 1..120: mol_type = other DNA
cagcatatttcaagtaaaactatttggccaactgctgagttcatgtggattttgggactggaccttgagcgtaagtgtgagtggggactgtccagcttggctggttggcacaagtgaatg

SEQ ID NO: 19372 - DNA, 120 bp, synthetic construct
  misc_feature 1..120: note = Artificially Synthesized Probe
  source 1..120: mol_type = other DNA
acaggaaagtgtgtggtgaccagtattttaagggaaaggcacttacagagaattaagcatttgacaaaatttatttacagatatttgtctgtggaccacttccgcaccagctgtgcatga

SEQ ID NO: 19373 - DNA, 120 bp, synthetic construct
  misc_feature 1..120: note = Artificially Synthesized Probe
  source 1..120: mol_type = other DNA
ctgacaacagcaaatacatcactcacaaatttgaatgtataccatgtgaagggatgaggaagaatgcattataatcctccttatcctaaatagcgggatgatccttcagggaggatgtgt

SEQ ID NO: 19374 - DNA, 120 bp, synthetic construct
  misc_feature 1..120: note = Artificially Synthesized Probe
  source 1..120: mol_type = other DNA
atctatgggaaggtgacaggttacaggagaagatatcctgaataagagcaatcatagaattacagtgttggagggagggtgaaaggttagtaatttcatctagtacccagatgtagtgaa

SEQ ID NO: 19375 - DNA, 120 bp, synthetic construct
  misc_feature 1..120: note = Artificially Synthesized Probe
  source 1..120: mol_type = other DNA
atttggcagaatgaaagatctaagattcaggctaggactcagcaggcagcaatgtgcccaggtgaattttagaggaaacattttcaataatccaggattgagataatgaagacctttcgt

SEQ ID NO: 19376 - DNA, 120 bp, synthetic construct
  misc_feature 1..120: note = Artificially Synthesized Probe
  source 1..120: mol_type = other DNA
gacattccttcacagtcgtttctgaatgcacctatgtgaggtcagtacattttacagaaaagttctccatcatcaggatagtagcttcatgcaagtccttgactgccttatcaacattat

SEQ ID NO: 19377 - DNA, 120 bp, synthetic construct
  misc_feature 1..120: note = Artificially Synthesized Probe
  source 1..120: mol_type = other DNA
tggctaattggcttctcatcaagggaatgccattggctgattggcttctcgtcaaggaaacaccattggctgattggcttctcgtcaagggaacgctattggatgattggcttctgtgaa

SEQ ID NO: 19378 - DNA, 120 bp, synthetic construct
  misc_feature 1..120: note = Artificially Synthesized Probe
  source 1..120: mol_type = other DNA
cctgctccatttctggacttaggtttgctctctggtctgagctgctctcacagaacaccaatctcttctgcctgtttccaagtttcagaaatttttctgataatttctcctttttgttta

SEQ ID NO: 19379 - DNA, 120 bp, synthetic construct
  misc_feature 1..120: note = Artificially Synthesized Probe
  source 1..120: mol_type = other DNA
tggcacacccagcttgacagtgtcttaaatgtaaagacaaattcgccacaagatccagaaactttctcgttaccctggtgtatgcaaaaatgctcataacagcttcatttgtaaacaaca

SEQ ID NO: 19380 - DNA, 120 bp, synthetic construct
  misc_feature 1..120: note = Artificially Synthesized Probe
  source 1..120: mol_type = other DNA
gagtcctaacatgcagtagatcaaagaggaagccgacatgtgcaaaggggccaaatatgaagtgtgtcctggctttacgacagcctatccttgtaaaaactaattcattcctgaaaaatc

SEQ ID NO: 19381 - DNA, 120 bp, synthetic construct
  misc_feature 1..120: note = Artificially Synthesized Probe
  source 1..120: mol_type = other DNA
acaatactcctttaagccaaagcctaatccagaacaaggccctagctctcttcaattctatgaaggcttagagaagggaggaagctgcagaagaaaaactggaagctagcagaggtgggt

SEQ ID NO: 19382 - DNA, 120 bp, synthetic construct
  misc_feature 1..120: note = Artificially Synthesized Probe
  source 1..120: mol_type = other DNA
caaaaataaaagtgaaggctgaagatgattgaattgctgcaatctcaggataaacttagaacagatgaggagttactcttatggataagcaaagaaagtggtttcttgagatggaatcta

SEQ ID NO: 19383 - DNA, 120 bp, synthetic construct
  misc_feature 1..120: note = Artificially Synthesized Probe
  source 1..120: mol_type = other DNA
ttccatcctctctggaaaggcggggaagataacgcttttctggttttccaatgagtagcattctctctgacacttcgtggcaagtattaacttcaccacattactaaaatggtgattatt

SEQ ID NO: 19384 - DNA, 120 bp, synthetic construct
  misc_feature 1..120: note = Artificially Synthesized Probe
  source 1..120: mol_type = other DNA
tggccatttctagtgcagtggtagtcaagaaaagaaataccaatgcttctttctcttttgtcagaacgaagagcaaagaaaacccaagtgaagatgtaaagcctgtttatgtaagtgtga

SEQ ID NO: 19385 - DNA, 120 bp, synthetic construct
  misc_feature 1..120: note = Artificially Synthesized Probe
  source 1..120: mol_type = other DNA
cagctgcgaagcaaagtcttttctgagcaccatagctagatacattgtatatgagagagactgatgcacatgctgcctttttaaaattcataagtggctgggaagatcgttttgaataag

SEQ ID NO: 19386 - DNA, 120 bp, synthetic construct
  misc_feature 1..120: note = Artificially Synthesized Probe
  source 1..120: mol_type = other DNA
caaatccgataattactagtttgcatattcaaactcagatattcacaaatgaagttatatgctgctgctgtgcacgtggacacgtagctagctattcaggctcatgggaaaggcctactg

SEQ ID NO: 19387 - DNA, 120 bp, synthetic construct
  misc_feature 1..120: note = Artificially Synthesized Probe
  source 1..120: mol_type = other DNA
tctggcttgcatataaacatccagccttatagcctgcctggagctgtcagttttgcattatcaaaaccgtaataaatattaagatcatatggatgtgttttaaacgtgtgcccaccttac

SEQ ID NO: 19388 - DNA, 120 bp, synthetic construct
  misc_feature 1..120: note = Artificially Synthesized Probe
  source 1..120: mol_type = other DNA
acatctattttctaaattaagatcaaaaatagccaaaaggcacaaaatacagatatcaagacagaagtggccacggaaggtgagtagctaagctcagaggatcccagcctctggattttc

SEQ ID NO: 19389 - DNA, 120 bp, synthetic construct
  misc_feature 1..120: note = Artificially Synthesized Probe
  source 1..120: mol_type = other DNA
acctatccaaatataaaatagagctgctgagagaaacagggctagaacattggtgctgcactgtggctgggaattatgtttgacagctttaaactgagtacctcacggtagatatttgaa

SEQ ID NO: 19390 - DNA, 120 bp, synthetic construct
  misc_feature 1..120: note = Artificially Synthesized Probe
  source 1..120: mol_type = other DNA
gatgtcatgttttctctgagtaaggcaagattaaattggccttatcttttaaaatttcacttaaacatatgtttatacaaaacaagtagaaagttaaagctgacgtcaactaaatcacca

SEQ ID NO: 19391 - DNA, 120 bp, synthetic construct
  misc_feature 1..120: note = Artificially Synthesized Probe
  source 1..120: mol_type = other DNA
ccttacctctgttgtggagtagtagactgatttcatcttgatactccaggtcaatcgccccagccaacactgtaactcctctcttagcctcttgacttaaagttaggagaagcccaaagt

SEQ ID NO: 19392 - DNA, 120 bp, synthetic construct
  misc_feature 1..120: note = Artificially Synthesized Probe
  source 1..120: mol_type = other DNA
aattgtgaaaacttttgaacaatttaatttctttagagaaaagctgataattggaaatagaaatagtccaacaggaggcaccagggcctctgtggatgcagcgggtgctcctttgtctga

SEQ ID NO: 19393 - DNA, 120 bp, synthetic construct
  misc_feature 1..120: note = Artificially Synthesized Probe
  source 1..120: mol_type = other DNA
tatttatgagtgattggtatttatacagcttaagatggtgcctggcacatggtaaatgccatccaacttggctatttttactcagcaagtgttttttgggcggcacttatgttctaggcc

SEQ ID NO: 19394 - DNA, 120 bp, synthetic construct
  misc_feature 1..120: note = Artificially Synthesized Probe
  source 1..120: mol_type = other DNA
gatttctggtctactcttacgcctgattcctttcagccttggcctttgagattgttgattactgctccttaattagcctctattccacgatcatcttgatcattttctgattttctcacg

SEQ ID NO: 19395 - DNA, 120 bp, synthetic construct
  misc_feature 1..120: note = Artificially Synthesized Probe
  source 1..120: mol_type = other DNA
gtgaaatatacatcacataaaacgtaacactttaaagtatacagtgcacagtcattgaggacattcacagtggtgttcagctgtcaccaccatcaccagaaccctgtcatcttgcaaagc

SEQ ID NO: 19396 - DNA, 120 bp, synthetic construct
  misc_feature 1..120: note = Artificially Synthesized Probe
  source 1..120: mol_type = other DNA
gttcagttgtaggagttcttatgtattctagacatcaaccccttaatagatatatgatttacaaactttcacattctctgggttggatttccactctttggtggtgtcctctgatacaca

SEQ ID NO: 19397 - DNA, 120 bp, synthetic construct
  misc_feature 1..120: note = Artificially Synthesized Probe
  source 1..120: mol_type = other DNA
gcattgaatttgcagatagctttgagtggtatggacatccgaacatcattaagtctaacaatccatgagcacaagatgtcttttcttcaatggtgtgttctttaatttttgtcatcaatg

SEQ ID NO: 19398 - DNA, 120 bp, synthetic construct
  misc_feature 1..120: note = Artificially Synthesized Probe
  source 1..120: mol_type = other DNA
gattttagctatttgaatcttctctatgttttatttggtcaatacagataaagcattgccattttaaaaaatatttttgaagaatcaagttttgcatccattgattttctatattgtttt

SEQ ID NO: 19399 - DNA, 120 bp, synthetic construct
  misc_feature 1..120: note = Artificially Synthesized Probe
  source 1..120: mol_type = other DNA
tgatagaattttaatcttttaacattttttaaggcttgttttgcggccgagcatgtggagcgaaccttgtaaagtatgatatctacatgggagaagtgaccctctggcaggcttcctttt

SEQ ID NO: 19400 - DNA, 120 bp, synthetic construct
  misc_feature 1..120: note = Artificially Synthesized Probe
  source 1..120: mol_type = other DNA
caggtatatgagggaagtgagtgtcatcgtttgctttataaataacacagtgtctggaggaagaaatcaagcctgcagaatcataaaaccactcgctaacataacactctacagtttaca

SEQ ID NO: 19401 - DNA, 120 bp, synthetic construct
  misc_feature 1..120: note = Artificially Synthesized Probe
  source 1..120: mol_type = other DNA
tctgtgctaatgctgatctactcatcctggaattggttagaataatgacagcaagcacagctgctgaccaactgggtgcttattgcctactaggcactgttaaataacggtatatttatt

SEQ ID NO: 19402 - DNA, 120 bp, synthetic construct
  misc_feature 1..120: note = Artificially Synthesized Probe
  source 1..120: mol_type = other DNA
gtatttgtagagcacaggtagcaatgcccattttttgccctttttgcttcaattccagatacaggacacagaaaattatttgacactttctcaagaaagcagaacagaacatccagcctc

SEQ ID NO: 19403 - DNA, 120 bp, synthetic construct
  misc_feature 1..120: note = Artificially Synthesized Probe
  source 1..120: mol_type = other DNA
tgcaaggggtgacggacagaagactgggctggtgcttcttccagagtaggggcaggtgggatttcaatctatcagcatgtcagcacagtgtattttatatacatttcattcatttattta

SEQ ID NO: 19404 - DNA, 120 bp, synthetic construct
  misc_feature 1..120: note = Artificially Synthesized Probe
  source 1..120: mol_type = other DNA
accctgactaatacaagatacttttatcccataaggcgcaacatcgggagccaacagtcagaggcaggaacatgccctgcactgctgctttccgggccgtggaaacacatctgtcactag

SEQ ID NO: 19405 - DNA, 120 bp, synthetic construct
  misc_feature 1..120: note = Artificially Synthesized Probe
  source 1..120: mol_type = other DNA
tgtaaaatgaggatgaaagcaccatctcgtgagtttaccatgagaattcaacgtaaggcacttagcctagttccaggcatgcaagaagggtgccttaaatgacggcactgtgaccatcac

SEQ ID NO: 19406 - DNA, 120 bp, synthetic construct
  misc_feature 1..120: note = Artificially Synthesized Probe
  source 1..120: mol_type = other DNA
aaaaattaagtaaaaggtatttaagggaactctaattgattgtgcttctcaagagccctagaaaatttgatgagtcattaggctgactgtgtgcgagaggaaattctccaccgacagcct

SEQ ID NO: 19407 - DNA, 120 bp, synthetic construct
  misc_feature 1..120: note = Artificially Synthesized Probe
  source 1..120: mol_type = other DNA
aaatgatgaaagaaggaacctgggaacatcaggagggaagaagggccatggtgagcgagagtgcaggtgacaccacagacatttcttgtcctactgagttttcttacttttttttttttt

SEQ ID NO: 19408 - DNA, 120 bp, synthetic construct
  misc_feature 1..120: note = Artificially Synthesized Probe
  source 1..120: mol_type = other DNA
aaaagaatccagtaaacatttatggaatccccccaccacatactacgggataataaacattatcttcaagtgtccatgcaacttttagcaggatcagccatatctgggggcataaacaag

SEQ ID NO: 19409 - DNA, 120 bp, synthetic construct
  misc_feature 1..120: note = Artificially Synthesized Probe
  source 1..120: mol_type = other DNA
atgaataactctacacatataaatctcgcaacttaaactgaagagactgtttcctcgtaaaccacgaactgccacaactccatcactgtagagtctttgggtagccttaccattactaag

SEQ ID NO: 19410 - DNA, 120 bp, synthetic construct
  misc_feature 1..120: note = Artificially Synthesized Probe
  source 1..120: mol_type = other DNA
cggtcacttgtggaaggaggtacttagaacttttttttttttcttgaactcattaattgattcagaagctttgctgtaagcccagagctgtggtctacagttggtcatttttctatgggt

SEQ ID NO: 19411 - DNA, 120 bp, synthetic construct
  misc_feature 1..120: note = Artificially Synthesized Probe
  source 1..120: mol_type = other DNA
ttttataatcactagatttaaattctagagattgagtagctttcaaacctgagctgtgagaatgtcacctcctgtggcctttcacatagaacctcagtccttatcacactctgggtcagg

SEQ ID NO: 19412 - DNA, 120 bp, synthetic construct
  misc_feature 1..120: note = Artificially Synthesized Probe
  source 1..120: mol_type = other DNA
catggactgtgtgtgtgggggaatgtgtgagtgtgtgaaccatgcactgtgtgtgtgtggtgtgtgagccatgtgctctgtgtgtgtggtgggagccatgtgctgtgtgtgtgtgtgtgt

SEQ ID NO: 19413 - DNA, 120 bp, synthetic construct
  misc_feature 1..120: note = Artificially Synthesized Probe
  source 1..120: mol_type = other DNA
aaaagtgaacatattccccaataggtacaatgagctagcagaaagaaaattcagtggtttactgtgttttcaaacacgcgtaggagaatagagattggctgggctctgtgcatttgttct

SEQ ID NO: 19414 - DNA, 120 bp, synthetic construct
  misc_feature 1..120: note = Artificially Synthesized Probe
  source 1..120: mol_type = other DNA
ggagtgagacccatttccaccccatctgagtattctcctaactacgtaagtgttaaggaaatgctttgtgaggacaatccactgttttgtcataatattttttaaaacctactctctgtg

SEQ ID NO: 19415 - DNA, 120 bp, synthetic construct
  misc_feature 1..120: note = Artificially Synthesized Probe
  source 1..120: mol_type = other DNA
gtgacttgctcttaatattatttggaagccagttcttcataaccttactgtgcatgtccttctgagataagggaggtaatgaagcaactattcaagtgtaaggacaaactctccatacag

SEQ ID NO: 19416 - DNA, 120 bp, synthetic construct
  misc_feature 1..120: note = Artificially Synthesized Probe
  source 1..120: mol_type = other DNA
caatccagtcaacttttaaaatagctataatttgtttcttaatgctgtgcaagatggggttgtgagcccttagggtaaagcagcagtgttttaaatccttggtaaccagaccgtccaact

SEQ ID NO: 19417 - DNA, 120 bp, synthetic construct
  misc_feature 1..120: note = Artificially Synthesized Probe
  source 1..120: mol_type = other DNA
ggtcagatttcttgattgcccacttctgcttgccagataaagacaagcaattatttcccaggctgaatccattcaccatcaactatctattttcaatgttgagaaaggaggtaagcagga

SEQ ID NO: 19418 - DNA, 120 bp, synthetic construct
  misc_feature 1..120: note = Artificially Synthesized Probe
  source 1..120: mol_type = other DNA
tgcctgtggcatctccaccgtgaaggattcaaggattatcttccatgatcggtgtgttaacaatcagactgtgttgcagaggaagtattaccttccattgtcagtatattaataatcaga

SEQ ID NO: 19419 - DNA, 120 bp, synthetic construct
  misc_feature 1..120: note = Artificially Synthesized Probe
  source 1..120: mol_type = other DNA
gctgacgagatccttgtcctccatcacccagacaagagctagatggtaaaattaggacataattttaagcatatatactggatatgtatgcctcatgaggaagggttattctcaaatctg

SEQ ID NO: 19420 - DNA, 120 bp, synthetic construct
  misc_feature 1..120: note = Artificially Synthesized Probe
  source 1..120: mol_type = other DNA
cacagctaaaccatatcacatgggaagcagtgactgaagcatgattttggaatattctctttctagatagtgtctggcaattctaatgctaaaaggatcctgatgcccaaagtctgtcca

SEQ ID NO: 19421 - DNA, 120 bp, synthetic construct
  misc_feature 1..120: note = Artificially Synthesized Probe
  source 1..120: mol_type = other DNA
agaactggaacttttagtgattttttctgaagttctccaagcagaaaaaggaacaatgctcataggatgttttaaggctgtgtacaggaaaacacaagggaagaccagaggggtcgactg

SEQ ID NO: 19422 - DNA, 120 bp, synthetic construct
  misc_feature 1..120: note = Artificially Synthesized Probe
  source 1..120: mol_type = other DNA
agaaggctgggattctggaacatttagcatgaggccagcattggagaaggttgggattctggaacatttagcgtccggccagcattggagaaggttgggattctggagcatttagcatca

SEQ ID NO: 19423 - DNA, 120 bp, synthetic construct
  misc_feature 1..120: note = Artificially Synthesized Probe
  source 1..120: mol_type = other DNA
atgaacacatacggtgtggaaacagattgtcaatactttgcacacatttttttctctgatggaattaatctgagcaacatgtcacacatggcatttttatacgtgaaagtttaggtcaac

SEQ ID NO: 19424 - DNA, 120 bp, synthetic construct
  misc_feature 1..120: note = Artificially Synthesized Probe
  source 1..120: mol_type = other DNA
cttcaggacctccagcagctcccatggcatctgaaacacccttttgacagtgtctgttgaggttaaatgtatttgtgttttatttgttaatgatcagtcagctcttgattatctgttaat

SEQ ID NO: 19425 - DNA, 120 bp, synthetic construct
  misc_feature 1..120: note = Artificially Synthesized Probe
  source 1..120: mol_type = other DNA
atggcagctgggaaatgaaaactctagaagctaatgcaagacttaaggagtccacgggaatgaattctgagttgaaactcatagctattgcaaatcttggatgttagcaatatgttgtct

SEQ ID NO: 19426 - DNA, 120 bp, synthetic construct
  misc_feature 1..120: note = Artificially Synthesized Probe
  source 1..120: mol_type = other DNA
cgaaagatacccagggaggcccccccatgtttctgtgtatattgcttatattttgcatatttctttataattccatttttgcctctaggctgagcctccaaagggaaactttagtttagc

SEQ ID NO: 19427 - DNA, 120 bp, synthetic construct
  misc_feature 1..120: note = Artificially Synthesized Probe
  source 1..120: mol_type = other DNA
tgaaccaggggctcctaaatgttctcatgcagacggatatcaaaaggaagagcataaacaattaatatgatacatgtgaagcacaacgcccccttccctaatacagatctgaaattattt

SEQ ID NO: 19428 - DNA, 120 bp, synthetic construct
  misc_feature 1..120: note = Artificially Synthesized Probe
  source 1..120: mol_type = other DNA
aggccatttcattcatagggcacattcactttgtaaaactcatgagccaaccccttacttttctcaataaccctgtaaattagacatgatctaccccaggtccacacattttaacagatt

SEQ ID NO: 19429 - DNA, 120 bp, synthetic construct
  misc_feature 1..120: note = Artificially Synthesized Probe
  source 1..120: mol_type = other DNA
ttgggacagtgttgcagagtggcagaaatgagccttcagtcaagtctctgattttcatagctgctgttgcttattgaatcatctctagtctttggaatgccacagtttaagttttctcag

SEQ ID NO: 19430 - DNA, 120 bp, synthetic construct
  misc_feature 1..120: note = Artificially Synthesized Probe
  source 1..120: mol_type = other DNA
ataaagtgcagcaataataatgactggccacatgggttccttctacgttggttttgccagaatattttcttagggaatttcagattagactctttaaagactcttgaggctgggaagcca

SEQ ID NO: 19431 - DNA, 120 bp, synthetic construct
  misc_feature 1..120: note = Artificially Synthesized Probe
  source 1..120: mol_type = other DNA
gttaaaacgactttttatgtgatattgtttctcttatgatttttacataccaaggaaacgtaatatgcctttcttggacttgcaggagccctatttggacttccagaggtcttaatgttc

SEQ ID NO: 19432 - DNA, 120 bp, synthetic construct
  misc_feature 1..120: note = Artificially Synthesized Probe
  source 1..120: mol_type = other DNA
tttctttcttcttttattctttccattaaatgcaaccttagaataacctttacattaggcaaagccactttcctgtaataaaatcacacccccaagtctttcttgaaatcttccttacaa

SEQ ID NO: 19433 - DNA, 120 bp, synthetic construct
  misc_feature 1..120: note = Artificially Synthesized Probe
  source 1..120: mol_type = other DNA
catgggacattagacaaatccagccattgtgtcaagttaaattttctgttaaccatttttatattactgtatgttatgcaggtatcgtaaaagcaagaaccttaaagttaaatgcaagca

SEQ ID NO: 19434 - DNA, 120 bp, synthetic construct
  misc_feature 1..120: note = Artificially Synthesized Probe
  source 1..120: mol_type = other DNA
aattctatcaactagtggagaaacacacaaaatgagtgcattggttagcaggggtttaagaaaagagggactctgtcaccaagatgctttcatagaaagaacagaagcctcaaaacgtgt

SEQ ID NO: 19435 - DNA, 120 bp, synthetic construct
  misc_feature 1..120: note = Artificially Synthesized Probe
  source 1..120: mol_type = other DNA
tgtcaagacagttgcttggggactgtgctcacatagtatttttgcaaagaaccacaaatcctatatagtgactaaacaaagaaaagagcatttccaggcttccaagaggtgggaaaatgt

SEQ ID NO: 19436 - DNA, 120 bp, synthetic construct
  misc_feature 1..120: note = Artificially Synthesized Probe
  source 1..120: mol_type = other DNA
ctgcaatggactcttctcttcagggcaaaagaactcactgtcattcaccttttagtttggagctaatggaaattggtcccaaatgaaatgacaggtcctaattacaaacactagaaagca

SEQ ID NO: 19437 - DNA, 120 bp, synthetic construct
  misc_feature 1..120: note = Artificially Synthesized Probe
  source 1..120: mol_type = other DNA
gtctcatctccaggcctttgttgggttccagttctcagcttgtcttcctgtgaagttgtgtccttcctttctacattcatttggtaaacatatgtcaaaaatttactatgtccaaaggtc

SEQ ID NO: 19438 - DNA, 120 bp, synthetic construct
  misc_feature 1..120: note = Artificially Synthesized Probe
  source 1..120: mol_type = other DNA
gcctactctcaccacttctattcaccatagtactgaagtcctagccagagcaatcagacaagaaaaacaaatcaatgacatctaaaattttgaagaggaggtcaaactatcgctgtttgc

SEQ ID NO: 19439 - DNA, 120 bp, synthetic construct
  misc_feature 1..120: note = Artificially Synthesized Probe
  source 1..120: mol_type = other DNA
caaagcaaatgcaacaaaaagcaaaaacaaatagatgagacctaattaaactaaaaagctcctgcacagcaaaagaaatgatcagcagagtgaacagacaacccacggaaagggataaaa

SEQ ID NO: 19440 - DNA, 120 bp, synthetic construct
  misc_feature 1..120: note = Artificially Synthesized Probe
  source 1..120: mol_type = other DNA
aatggttatgttgtttcttcttgattataatcttatcccactaattgcccttttcataaagagattcatgtgtttttgtctctcaacttggggcccagccactgtgaccctaaagcgcac

SEQ ID NO: 19441 - DNA, 120 bp, synthetic construct
  misc_feature 1..120: note = Artificially Synthesized Probe
  source 1..120: mol_type = other DNA
ttcaaacccgtcttctgggtgtccttagagagaggttggtgtgttttacatttcttttaggtacatcacagtcatggtttacgtcaccagatcaaacaaatcatattctcattgctttgt

SEQ ID NO: 19442 - DNA, 120 bp, synthetic construct
  misc_feature 1..120: note = Artificially Synthesized Probe
  source 1..120: mol_type = other DNA
ccccgttgtgtgttcttgccacccttgtaaaggagcaactgatggtaaaagcgtggatttatctttggggtctcaattctgtttttgtctatatttctgttttagcactagtaccatgct

SEQ ID NO: 19443 - DNA, 120 bp, synthetic construct
  misc_feature 1..120: note = Artificially Synthesized Probe
  source 1..120: mol_type = other DNA
atttctgattgaatcacagacttacatggcaccacataggccaggttttacttctgtgctctctggtgtattccattcatctgtatgtctctctttataccagtacagtgttttgataac

SEQ ID NO: 19444 - DNA, 120 bp, synthetic construct
  misc_feature 1..120: note = Artificially Synthesized Probe
  source 1..120: mol_type = other DNA
gaatacccatgggagtgaatttcctaggtcatatcataactctatttaactttcttatggaactgctcatctgttctccacagcgcctatacttgtttacattccaactggcaatgaagg

SEQ ID NO: 19445 - DNA, 120 bp, synthetic construct
  misc_feature 1..120: note = Artificially Synthesized Probe
  source 1..120: mol_type = other DNA
tctccatggcctctgacaattttctgtatgttcccaaggtcttctctctcctccccacaaaaaactggagctaacaattaaagcaaatcctcacatctgtctaaatttactgatttaggt

SEQ ID NO: 19446 - DNA, 120 bp, synthetic construct
  misc_feature 1..120: note = Artificially Synthesized Probe
  source 1..120: mol_type = other DNA
gctgccatttttgatgtttaaattgtgccagagtttacgtgcagtatctcacttaattctcccaatagacacagactggggtttgccccaatttataggtgagaaaaccaagttttggaa

SEQ ID NO: 19447 - DNA, 120 bp, synthetic construct
  misc_feature 1..120: note = Artificially Synthesized Probe
  source 1..120: mol_type = other DNA
gtaattcagactctggaaaagatattttcctttaatatttaaaaccttcttgaggacctaattaatgcaaatcagagccttcgtagcaagtcctctgtgaagacctcagggcagggatct

SEQ ID NO: 19448 - DNA, 120 bp, synthetic construct
  misc_feature 1..120: note = Artificially Synthesized Probe
  source 1..120: mol_type = other DNA
caggacatgcataggaagagtggactcgcacttttccccctgttctgggcacgcctggcccagctctgtaggacagcagcagcttcctctcactgggacttttaatttgggaagcaggac

SEQ ID NO: 19449 - DNA, 120 bp, synthetic construct
  misc_feature 1..120: note = Artificially Synthesized Probe
  source 1..120: mol_type = other DNA
actgggacttttaatttgggaagcaggacatgcataggaagagtggactggcacttttcccctgttctgggcacgcctggcccagctctgtaggacagcagcagcttcctctcactggga

SEQ ID NO: 19450 - DNA, 120 bp, synthetic construct
  misc_feature 1..120: note = Artificially Synthesized Probe
  source 1..120: mol_type = other DNA
gacagcggcagcttcctctcactgggacttttaatttgggaagcaggacatgcataggaagagtggactcgcacttttccccctgttctgggcacgcctggcccagctctgtaggacagc

SEQ ID NO: 19451 - DNA, 120 bp, synthetic construct
  misc_feature 1..120: note = Artificially Synthesized Probe
  source 1..120: mol_type = other DNA
cacgcctggcccagctctgtaggacagcagcagcttcctctcactgggacttttaatttgggaagcaggacatgcataggaagagtggactggcacttttccccctgttctgggcacgcc

SEQ ID NO: 19452 - DNA, 120 bp, synthetic construct
  misc_feature 1..120: note = Artificially Synthesized Probe
  source 1..120: mol_type = other DNA
aggaacactgaagttaagatgaagtcatctgcatccaccacgtcatgctgtaccagagtcagggtggaaagtcaaccacatcatacagattaattaaaaaaaaaatctgttcaaggggat

SEQ ID NO: 19453 - DNA, 120 bp, synthetic construct
  misc_feature 1..120: note = Artificially Synthesized Probe
  source 1..120: mol_type = other DNA
gaaactgcctcttttttttttttaaggtccttttgtaactgcagctttttggagtgtatattcagggcaatttaaatctgtatccccgggttgcaactctcaagcttggctcaaacaaag

SEQ ID NO: 19454 - DNA, 120 bp, synthetic construct
  misc_feature 1..120: note = Artificially Synthesized Probe
  source 1..120: mol_type = other DNA
aaagagtttaattattgcaaggcaactgagcaggaggagacaggaggtacttttcaaatcttccttatgaagaattcagaggctaggattttaaaggatagtcttccggcaaggggttag

SEQ ID NO: 19455 - DNA, 120 bp, synthetic construct
  misc_feature 1..120: note = Artificially Synthesized Probe
  source 1..120: mol_type = other DNA
gggatgagtgtaagtatcttgcttagggtaaaagaattattaaacatagaatcaaagttaagcttaagtcatctaagactcacagcccgcccaggctcaggtcttgtcaacatttggaaa

SEQ ID NO: 19456 - DNA, 120 bp, synthetic construct
  misc_feature 1..120: note = Artificially Synthesized Probe
  source 1..120: mol_type = other DNA
caccatctccccacgaaattgaccttgttcggccgataagtgtaggagttatttatctttgtcagaacttggaaatttccaaataaaatatttatacaagcagaagaaagcaggcccaca

SEQ ID NO: 19457 - DNA, 120 bp, synthetic construct
  misc_feature 1..120: note = Artificially Synthesized Probe
  source 1..120: mol_type = other DNA
ttggttcctgcctttttctggaacctcttccacccacaccatgcccaactgtaaaaatcatttactcctccaaggtgcaatgaaaatgacgagttgcaaccaaagccatcttctgctcaa

SEQ ID NO: 19458 - DNA, 120 bp, synthetic construct
  misc_feature 1..120: note = Artificially Synthesized Probe
  source 1..120: mol_type = other DNA
tagctttgaggctaaggatgccttattaatttgacaaagatggtttggtgaaaatagcaatgtctgctgggtattgatgttgtaccggaaaccttaccattctcatcagccacctcattc

SEQ ID NO: 19459 - DNA, 120 bp, synthetic construct
  misc_feature 1..120: note = Artificially Synthesized Probe
  source 1..120: mol_type = other DNA
cattttgacaagcacaggatagagcctcatggcgtcctaaaagttttacctaattagggaaaaattcagggtgttaaagcactcagctgttgaaaactgtgccaagatgtgggtcatatt

SEQ ID NO: 19460 - DNA, 120 bp, synthetic construct
  misc_feature 1..120: note = Artificially Synthesized Probe
  source 1..120: mol_type = other DNA
aagccctacaacacatttcacaccgtggttcttattcatctctcaacgttagtgccatttataccttccactgtgtgacctgggaaatcacgtaatctttctggttttcgtatttgttta

SEQ ID NO: 19461 - DNA, 120 bp, synthetic construct
  misc_feature 1..120: note = Artificially Synthesized Probe
  source 1..120: mol_type = other DNA
gctgtaatgaacaggggagtgcaggtctctcttggagatactgattccattttcctcggatgcattcctagagaagggattgctaagtcatctcgtggttgtcttttaatttttttgaga

SEQ ID NO: 19462 - DNA, 120 bp, synthetic construct
  misc_feature 1..120: note = Artificially Synthesized Probe
  source 1..120: mol_type = other DNA
cagaaggggcaaaagtgggcataatcttagagaaaaagatttcagcctctcaccatagagtatgatgttagtcatggacttttgacatagtgcctttgttacgttcgggtaattttcttc

SEQ ID NO: 19463 - DNA, 120 bp, synthetic construct
  misc_feature 1..120: note = Artificially Synthesized Probe
  source 1..120: mol_type = other DNA
tcctgaggatggatttctttctctattgcagatgttcactttttttctgtgccctcacatgcagagacagtgagcactcaggtctcctttcctctacttacaaagactctaattccaata

SEQ ID NO: 19464 - DNA, 120 bp, synthetic construct
  misc_feature 1..120: note = Artificially Synthesized Probe
  source 1..120: mol_type = other DNA
agatactaggtatgatgtcagtcttcttatatttgttaatatgtggcttgaagtctatggcctgtcctggagaatgctcctgtacacatttgagaagcttgtgttttctactgctgttag

SEQ ID NO: 19465 - DNA, 120 bp, synthetic construct
  misc_feature 1..120: note = Artificially Synthesized Probe
  source 1..120: mol_type = other DNA
aacaaattaacacaaatatagtagattagagacacacatttatcctcttacagttctctaagaacttgtctcttagggctaaaatcaaggtgttggctgctttctcctgcagcctctggg

SEQ ID NO: 19466 - DNA, 120 bp, synthetic construct
  misc_feature 1..120: note = Artificially Synthesized Probe
  source 1..120: mol_type = other DNA
ctgtgcttcagccactggattcagattccattgtcccatctgtgggggccaacgtgaagctttaaataaacatgtaaacatcttttatttgttacagcctgtgacattatgattacatca

SEQ ID NO: 19467 - DNA, 120 bp, synthetic construct
  misc_feature 1..120: note = Artificially Synthesized Probe
  source 1..120: mol_type = other DNA
agaacttccatgagatacaccgatgctgagcatttcagtagaacttccacgaaggtcaccaacactgagtgtttcagtagaacttccgtgaaagtcaccgacgctaagcatttcaataga

SEQ ID NO: 19468 - DNA, 120 bp, synthetic construct
  misc_feature 1..120: note = Artificially Synthesized Probe
  source 1..120: mol_type = other DNA
accgatgctgagcatttcagtagaacttccacgaaaatgactgacactgagcatttcagtagaatttccatggaagtcaccaacgctgagcatttcagtagaacttccatgaaagtcacc

SEQ ID NO: 19469 - DNA, 120 bp, synthetic construct
  misc_feature 1..120: note = Artificially Synthesized Probe
  source 1..120: mol_type = other DNA
gctggtaatacttggttagaaaattaaccagaccagagatatcatgactcagcttttggctgaattgaagatgttcagtgaaatgcccacaggatgcttgtttattcagtatctggatca

SEQ ID NO: 19470 - DNA, 120 bp, synthetic construct
  misc_feature 1..120: note = Artificially Synthesized Probe
  source 1..120: mol_type = other DNA
tttttcctctaacagggataagtcaaaatgaataaaagattttgagtacagtctcacgctttgggtatgattggcgaatccagcttgaattaaagtttaacacaagggctgggcaggccc

SEQ ID NO: 19471 - DNA, 120 bp, synthetic construct
  misc_feature 1..120: note = Artificially Synthesized Probe
  source 1..120: mol_type = other DNA
agcttaaaggagcatgtctgtggaactgacaggccttagcgttgctcttcttcttgaaaatgatttatctttctttctggtgtcatctcagcagtttagaatatgctagaattttggtga

SEQ ID NO: 19472 - DNA, 120 bp, synthetic construct
  misc_feature 1..120: note = Artificially Synthesized Probe
  source 1..120: mol_type = other DNA
tacggggtctgacttaatcaagacccatcactgaagatgcaaaataaaggaagtgagcattagcccccgttaggtgcaagaaaacaagtaagttacattctcagcgttgtaataaaaaat

SEQ ID NO: 19473 - DNA, 120 bp, synthetic construct
  misc_feature 1..120: note = Artificially Synthesized Probe
  source 1..120: mol_type = other DNA
tgatgaggtgggtgagctcatacctggtggccccagacccaggacacctgttggaccagaaccaggaacgggctcccaaacactaaatcctaaatggaatggacacacgccatgtcacag

SEQ ID NO: 19474 - DNA, 120 bp, synthetic construct
  misc_feature 1..120: note = Artificially Synthesized Probe
  source 1..120: mol_type = other DNA
acaccccagctggtatgtgctcacgaaacacaaactcattttactatcagccaaaacaaatgacaattaggaagacaaaagtgtttccagaaacacacattagaaagccacacggcaagg

SEQ ID NO: 19475 - DNA, 120 bp, synthetic construct
  misc_feature 1..120: note = Artificially Synthesized Probe
  source 1..120: mol_type = other DNA
tgaccccagctctgacaccagccctgccaactgcatgactgctcccagccacagctgggagccaaaaggcacagccctgcctctcatggcacctggcgacttccagacgctaccacagca

SEQ ID NO: 19476 - DNA, 120 bp, synthetic construct
  misc_feature 1..120: note = Artificially Synthesized Probe
  source 1..120: mol_type = other DNA
tgaatcaagctcatccctcaacacgtgggtttctcaccaacacaagggcctgggaaaacttcgaaccccgtttgcaaacagcccccattgttcttagggctaaagcacagcctggcgccg

SEQ ID NO: 19477 - DNA, 120 bp, synthetic construct
  misc_feature 1..120: note = Artificially Synthesized Probe
  source 1..120: mol_type = other DNA
cacctgcttgaatctgactcgacaacgtcaactgtaaaacatcctcctgcaacgagtgccacatttccttggaggaagcaagaatctgaaatttaagtaaacatgtaaaacaaagacaga

SEQ ID NO: 19478 - DNA, 120 bp, synthetic construct
  misc_feature 1..120: note = Artificially Synthesized Probe
  source 1..120: mol_type = other DNA
ctcctttccaggaacagaataacaacaggtaaggcttgaacaaatcaggaagtgccctgccgaaaacgtggcctgctctagccgtggagacccagagggctgaaggagacggggatgaca

SEQ ID NO: 19479 - DNA, 120 bp, synthetic construct
  misc_feature 1..120: note = Artificially Synthesized Probe
  source 1..120: mol_type = other DNA
tgggtacaggccttgggcccccaaccccttggccgccagcccaattcctcacttgcatcccctgacggtagggattctggagacctccgggtagggctcggagcaccgggacgccatgaa

SEQ ID NO: 19480 - DNA, 120 bp, synthetic construct
  misc_feature 1..120: note = Artificially Synthesized Probe
  source 1..120: mol_type = other DNA
tccaaattcagaaagctccggcgccaggtgtttgctcacctccccgctgaactccaggagccgccctgcgctgggcttgagtcccccagtacatacttttggggggatgacggagggaag

SEQ ID NO: 19481 - DNA, 120 bp, synthetic construct
  misc_feature 1..120: note = Artificially Synthesized Probe
  source 1..120: mol_type = other DNA
tttttgtttccctaaagccctcggaatgtcatcaaacctgtgactctcctgccgttgacaacacgtgtaattactgctaattaatcacagatgcagatggtgcggcctctcagttttttc

SEQ ID NO: 19482 - DNA, 120 bp, synthetic construct
  misc_feature 1..120: note = Artificially Synthesized Probe
  source 1..120: mol_type = other DNA
agacgcctgcacccgaccctggaactggcgtcttttcctcgctaatctgcgaggaaaaaaaaaatgtttttcagggcaacgcgagggaagaaggtggcggctcccactcgcttctccctc

SEQ ID NO: 19483 - DNA, 120 bp, synthetic construct
  misc_feature 1..120: note = Artificially Synthesized Probe
  source 1..120: mol_type = other DNA
cggctgcctgtttgttctatgggactcagtttccccgagtgtaaaatgaggaggtagggcggatggtctttaagggctgcctctggtgagggaccaggctggagaggaggttcccagaat

SEQ ID NO: 19484 - DNA, 120 bp, synthetic construct
  misc_feature 1..120: note = Artificially Synthesized Probe
  source 1..120: mol_type = other DNA
ggatgtcaggcgtcaggcttggggagggagcaggacctgggcttggctgggctcgggagcggggagctgagctccaggtgaggccaaggcttgcggcccaggcaggtggcttcagctgca

SEQ ID NO: 19485 - DNA, 120 bp, synthetic construct
  misc_feature 1..120: note = Artificially Synthesized Probe
  source 1..120: mol_type = other DNA
agagaaaggtaaggagctctcagtccagacccacagagcttgattctcttctttctttttattattagttccacctttccaaatccagtggagacttctgcgatgggaagtctcaggaga

SEQ ID NO: 19486 - DNA, 120 bp, synthetic construct
  misc_feature 1..120: note = Artificially Synthesized Probe
  source 1..120: mol_type = other DNA
tattgcaatagatatagagattactgcaatagggtcttgcagtaatctccagtttccatatattcaggtttccctctgaatagaaattttatagccacagagcagggtggaggggtggta

SEQ ID NO: 19487 - DNA, 120 bp, synthetic construct
  misc_feature 1..120: note = Artificially Synthesized Probe
  source 1..120: mol_type = other DNA
tgccctgcataagagcctgttaataaaaagacagggtaaaaactggaagaaaagtgcaaaccacacctgataaaccatatctgacaaggagctcatatctagaatattgtttaaagtttt

SEQ ID NO: 19488 - DNA, 120 bp, synthetic construct
  misc_feature 1..120: note = Artificially Synthesized Probe
  source 1..120: mol_type = other DNA
cctggtacataagccaaaatttcagagtcaactacagattttcaaaggctatgaaataggtaacctcaagccaccgactccaatagataaaaggaaccaggtaatatctgtgttccaggg

SEQ ID NO: 19489 - DNA, 120 bp, synthetic construct
  misc_feature 1..120: note = Artificially Synthesized Probe
  source 1..120: mol_type = other DNA
cagacccacagagcttgattctcttctttctttttattattagttccacctttccaaatccagtggagacttctgcgatgggaagtctcaggagagaccagaacagcatgcttccaggga

SEQ ID NO: 19490 - DNA, 120 bp, synthetic construct
  misc_feature 1..120: note = Artificially Synthesized Probe
  source 1..120: mol_type = other DNA
ggtaaggctctgccagggcacactagagttaatttgatctcatctgtccgggagggaactgactctgaagaagtcagttgaaaaaacctgaggtgggggctcctaggaaggaaatcagaa

SEQ ID NO: 19491 - DNA, 120 bp, synthetic construct
  misc_feature 1..120: note = Artificially Synthesized Probe
  source 1..120: mol_type = other DNA
gggccacaccttgaaaaaggtgactttggtcagctctctggtccagacccgccaggtgaggtgggcaaaagaacacctgatggagcctcccggtcctctcatgagcctatggaagatgct

SEQ ID NO: 19492 - DNA, 120 bp, synthetic construct
  misc_feature 1..120: note = Artificially Synthesized Probe
  source 1..120: mol_type = other DNA
actttccagtcagtcctgaactctggagacaactggagcaatacatggggcaacgtggaaggatccaagagtctctggatctgatgcagcttcaggatgaattgccagggacaagtcagg

SEQ ID NO: 19493 - DNA, 120 bp, synthetic construct
  misc_feature 1..120: note = Artificially Synthesized Probe
  source 1..120: mol_type = other DNA
acaacccacagtccccttgggaacctgtatgagagcaaacctccaagccacaagtgaggatgtgcgtggtttcaaggctccaggcgccagcaaaagctctctactccctagaatgtctgt

SEQ ID NO: 19494 - DNA, 120 bp, synthetic construct
  misc_feature 1..120: note = Artificially Synthesized Probe
  source 1..120: mol_type = other DNA
gctgagagccaaaaaacagtaaaaaacagatcatgcgtgtacggcagcagtgctgaagctgagaggctcatgacagcagttggacagataccggaggagaacatgtcactttgccatgcg

SEQ ID NO: 19495 - DNA, 120 bp, synthetic construct
  misc_feature 1..120: note = Artificially Synthesized Probe
  source 1..120: mol_type = other DNA
cgctgaactggtaggtgagcttcttcttcaccttcttgacctcgcccgtcttgccgtagttgcgcagcgcgcgcgccatcttctggtaggtcatcttcttgcggttgcccttctggatgc

SEQ ID NO: 19496 - DNA, 120 bp, synthetic construct
  misc_feature 1..120: note = Artificially Synthesized Probe
  source 1..120: mol_type = other DNA
tcacacactcatgttcacacacctgctcatacacctcacaccaggtctcataatcacacctgcttatacttgcttacacatgcttgcacaaacacacctgcttacacatcttacactgct

SEQ ID NO: 19497 - DNA, 120 bp, synthetic construct
  misc_feature 1..120: note = Artificially Synthesized Probe
  source 1..120: mol_type = other DNA
atccatacacacacttcctcacacacctcacaccaagtctcacacacacttatgcttacaaactcatgctcacacacatgctaacacttcacacatgctaacacctcacacattcacacc

SEQ ID NO: 19498 - DNA, 120 bp, synthetic construct
  misc_feature 1..120: note = Artificially Synthesized Probe
  source 1..120: mol_type = other DNA
aacatgttcacacccactcacacatccactgacacacacctatgcccattcacacacacttatatcacacacatccctgcttacatacacattcacacatatacacttgctcacacacct

SEQ ID NO: 19499 - DNA, 120 bp, synthetic construct
  misc_feature 1..120: note = Artificially Synthesized Probe
  source 1..120: mol_type = other DNA
tagaggtcagcagaggtcactgatccgggttagggtcagtagggagggtcactggggagaggcagggtcagtagaggtgttcagtgacttggtgtgggatccatgagggctagtgaatgg

SEQ ID NO: 19500 - DNA, 120 bp, synthetic construct
  misc_feature 1..120: note = Artificially Synthesized Probe
  source 1..120: mol_type = other DNA
atttacttgctgtgtgacctcaggcacatatgtggcctctctaacctcagttgagttgcctgtaaaatggggatcacagttattgggaagatacgaatgagtacacatttgtaaaacacc

SEQ ID NO: 19501 - DNA, 120 bp, synthetic construct
  misc_feature 1..120: note = Artificially Synthesized Probe
  source 1..120: mol_type = other DNA
gaactggggaagatcttcagcatgaacaccttttccaggaacaaaaactgccacacatctgcgggacttcctgggcgcaattcggggtccaaaatgaagcgtggtaataaagtgacaaga

SEQ ID NO: 19502 - DNA, 120 bp, synthetic construct
  misc_feature 1..120: note = Artificially Synthesized Probe
  source 1..120: mol_type = other DNA
gttaaatggggctaacaattacacccatctcacaggcttgttttgagaagcaaatgacctattgcttgcaaagtgcttagactagaacttggcacaaagacagaccttgataaacattaa

SEQ ID NO: 19503 - DNA, 120 bp, synthetic construct
  misc_feature 1..120: note = Artificially Synthesized Probe
  source 1..120: mol_type = other DNA
aaaaaaagcctggattagcacttgaacaagcatagagcaaatgcttttaatacatgtttctttcctcttgttctccctgctcctggccaccttagtcaatggcccagagaaataacttta

SEQ ID NO: 19504 - DNA, 120 bp, synthetic construct
  misc_feature 1..120: note = Artificially Synthesized Probe
  source 1..120: mol_type = other DNA
tgctgggattacaggcgtctggccttaatttgcattttcatcttgcagtgagctaacaggatcccgaaactctcctcgctgtaggagagtttgctctgctctttagtgaggaggctgtcc

SEQ ID NO: 19505 - DNA, 120 bp, synthetic construct
  misc_feature 1..120: note = Artificially Synthesized Probe
  source 1..120: mol_type = other DNA
ctggacatggctctggaccctcatttctacagaccggtaggcacccaacaggcagtagatctcaatcgctatttgattaaatgatcaacaaaagttagcttttagcatattttttatata

SEQ ID NO: 19506 - DNA, 120 bp, synthetic construct
  misc_feature 1..120: note = Artificially Synthesized Probe
  source 1..120: mol_type = other DNA
cagttcttaatctggggccaaagtcctacccacacatccctagtcttactcacttttttggtgtcactaacacctgtacgtcaccagtataaaaataaaatcatattcaaaacaacccca

SEQ ID NO: 19507 - DNA, 120 bp, synthetic construct
  misc_feature 1..120: note = Artificially Synthesized Probe
  source 1..120: mol_type = other DNA
atacttagtatatatttattagatggataggccagtgcaagatggagggcttggtaggtagagggaaggatagttggaaaggtggctaagtggatgattagatgggtgtgtgaataaatt

SEQ ID NO: 19508 - DNA, 120 bp, synthetic construct
  misc_feature 1..120: note = Artificially Synthesized Probe
  source 1..120: mol_type = other DNA
gtattcccagcactttgcgaggccaagacgggcagatcgcctgaggtcaggagttcgagaccagcctggccaacatggcaaaatctgtctctactaaaaatacaaaaattacccgggcat

SEQ ID NO: 19509 - DNA, 120 bp, synthetic construct
  misc_feature 1..120: note = Artificially Synthesized Probe
  source 1..120: mol_type = other DNA
attgcaatagtttcctcaatgttcttttttccagctcctattcttgcctcttttccatctgctctccacccagagtgaccttttaaaaagcttactcagttgaatcatgagacattggga

SEQ ID NO: 19510 - DNA, 120 bp, synthetic construct
  misc_feature 1..120: note = Artificially Synthesized Probe
  source 1..120: mol_type = other DNA
aaacacaaaataaaaccatcaccaccacaacaaaaacctcacctcccacacaccctttcttaggagacgaccatgataacaaatctgtacaaaacatttgctatttccaggcactgttct

SEQ ID NO: 19511 - DNA, 120 bp, synthetic construct
  misc_feature 1..120: note = Artificially Synthesized Probe
  source 1..120: mol_type = other DNA
tgtggctcagctgtgagtaatagccacatggtcataacagtggaaaattcaaatactgatttaacaaatgttaccatatagagtaatgaattggggatgtgtggagaaatgtgagtgtgt

SEQ ID NO: 19512 - DNA, 120 bp, synthetic construct
  misc_feature 1..120: note = Artificially Synthesized Probe
  source 1..120: mol_type = other DNA
ttctcttagctcagctgccacctcaaaggccttccctgaccactcaaatgaaagcagccccccatgtagacactccgcattacatctgcagaaaatggtctctttgtctgattctttttt

SEQ ID NO: 19513 - DNA, 120 bp, synthetic construct
  misc_feature 1..120: note = Artificially Synthesized Probe
  source 1..120: mol_type = other DNA
taccttacctcagagattatatgccttacctcgctgaatcatcacagccctaggaggtaagtattttcatgctgtcagttttataaatggggaaatagggactcagaaaggttatgttac

SEQ ID NO: 19514 - DNA, 120 bp, synthetic construct
  misc_feature 1..120: note = Artificially Synthesized Probe
  source 1..120: mol_type = other DNA
agctggggatggagttgggggagggggactttctctctacattgcctgggtttcccaccaagaggatgtgttttttacataattacaaataagcttgaaggaattaaaaaggatatttta

SEQ ID NO: 19515 - DNA, 120 bp, synthetic construct
  misc_feature 1..120: note = Artificially Synthesized Probe
  source 1..120: mol_type = other DNA
tgtgaccttgtgcaagtctcctagcaccctaagcctgtttccttgtttataaagaagaccacaaggacagaaccagcagataaccatggaagaaatgaaccccgcaccttgacacactgc

SEQ ID NO: 19516 - DNA, 120 bp, synthetic construct
  misc_feature 1..120: note = Artificially Synthesized Probe
  source 1..120: mol_type = other DNA
ctgcacactatccctcacacacacatcttcatacccactcagaggtcacccacctcacagagacattgtacactcagctcatgcacacacgcagagtctccttgattgacactcacatga

SEQ ID NO: 19517 - DNA, 120 bp, synthetic construct
  misc_feature 1..120: note = Artificially Synthesized Probe
  source 1..120: mol_type = other DNA
ccatctagctccacctggagttcagaattgagaggtcagggatcagagacagtgggcctgtggctttcttgaggcagaattggctctttctgagacaacctccgtcaccctctgcctggg

SEQ ID NO: 19518 - DNA, 120 bp, synthetic construct
  misc_feature 1..120: note = Artificially Synthesized Probe
  source 1..120: mol_type = other DNA
tttggtcaacaatcatgtcctctgtgccaggccccagactgggcgttggggacccagagttccatcagctttggtttccaggagccccaaggccatgggccaagacttctgcccattgcc

SEQ ID NO: 19519 - DNA, 120 bp, synthetic construct
  misc_feature 1..120: note = Artificially Synthesized Probe
  source 1..120: mol_type = other DNA
gcaggaagtattcaggttggctgtgtcagatgctaatgtgctgaatcaacagtcattgcagatcacgaagtgtccatcataactggaacattccatcagcttgcagtgctgtggtgtgtg

SEQ ID NO: 19520 - DNA, 120 bp, synthetic construct
  misc_feature 1..120: note = Artificially Synthesized Probe
  source 1..120: mol_type = other DNA
gaactgtgtgatccctgaatgtgaacctgaagttcaaaggacttggaaagctctggaatgtgttggtttttcccccccaaaatgggtcctaaggagggtaaagtgacttgtttcaagttg

SEQ ID NO: 19521 - DNA, 120 bp, synthetic construct
  misc_feature 1..120: note = Artificially Synthesized Probe
  source 1..120: mol_type = other DNA
caaattcttaagtcctttggtccatttcactgcttcttttggggagggtcagattcctcaggggctcagtggcagaaccagcctgatgtcgcctccctgcccgtgagtcaccacggcccc

SEQ ID NO: 19522 - DNA, 120 bp, synthetic construct
  misc_feature 1..120: note = Artificially Synthesized Probe
  source 1..120: mol_type = other DNA
ggcatggggggaggggcgttgtgtttggaggacgcggtagccgggaccaagagctggctcagatcagggtctggaacggggacgggccgtgcctgggcctggtccccacctttggggcca

SEQ ID NO: 19523 - DNA, 120 bp, synthetic construct
  misc_feature 1..120: note = Artificially Synthesized Probe
  source 1..120: mol_type = other DNA
atccctcagaccgccccccctccaccctctccaaatctcccagtacagcccataatacttctcaggactgcgagtctctccgcccatcactgtacagcctgggactccgtcctggctcac

SEQ ID NO: 19524 - DNA, 120 bp, synthetic construct
  misc_feature 1..120: note = Artificially Synthesized Probe
  source 1..120: mol_type = other DNA
aacattttgctgccaagagaagctagtaaccaaaaacaaaacaactgggaggaggggcgggagaggaagaaaagttgtgccctggtggcttatccctccccggctttgatcccctttgat

SEQ ID NO: 19525 - DNA, 120 bp, synthetic construct
  misc_feature 1..120: note = Artificially Synthesized Probe
  source 1..120: mol_type = other DNA
gagaagcggtcttggaggtattgatttaggtggttggattttttccgtggatctatcaattcacaattcgaatttggaagaaagaaggaaaacatgacgtctccagccaaattcaaaaag

SEQ ID NO: 19526 - DNA, 120 bp, synthetic construct
  misc_feature 1..120: note = Artificially Synthesized Probe
  source 1..120: mol_type = other DNA
agacatgcttttaaagccccatttccctctcctgaaaaatgtgaagggtaaagcaaaatgtggactaggagaaaccaagtgacctgtcttctcatctagtcgactgacttgactcatgaa

SEQ ID NO: 19527 - DNA, 120 bp, synthetic construct
  misc_feature 1..120: note = Artificially Synthesized Probe
  source 1..120: mol_type = other DNA
actgttgccatcgggagtgttaataactttgatcttcccagatttctctccagaagcacgccatttgactaaggtgcaaagtgactttaaatgtttaatttttggaaggttcaaggctga

SEQ ID NO: 19528 - DNA, 120 bp, synthetic construct
  misc_feature 1..120: note = Artificially Synthesized Probe
  source 1..120: mol_type = other DNA
tatgcagtttggtttggttgttaagtgcaatttttagagtcaaagtgattcaggtttaaatcttggttctgacagtagctagcctttcacttcaggcaagttacatgacttgtctgagcc

SEQ ID NO: 19529 - DNA, 120 bp, synthetic construct
  misc_feature 1..120: note = Artificially Synthesized Probe
  source 1..120: mol_type = other DNA
agcctgccttgtagtgtcttcttaaaaaccatcattgtttctggtttgtgggtgcccagattccttggaaagttcatgcctctcaatgtctgacttgaaagcaataatattcttagtctt

SEQ ID NO: 19530 - DNA, 120 bp, synthetic construct
  misc_feature 1..120: note = Artificially Synthesized Probe
  source 1..120: mol_type = other DNA
tttttttttttttaatgtcttaggagaacagtgtgtgtgcaccacagagctggaagcgaaattttgtaatttccatctggagcattttgatagaaaaagtgcaggcctttgcttggaaca

SEQ ID NO: 19531 - DNA, 120 bp, synthetic construct
  misc_feature 1..120: note = Artificially Synthesized Probe
  source 1..120: mol_type = other DNA
attaaacaacagctccctattccctcctgcccctgtctctggcaagcaccattgtactttgtctctatttgataactccagatactgcaggtaagtggaatcatattgtatatatttttt

SEQ ID NO: 19532 - DNA, 120 bp, synthetic construct
  misc_feature 1..120: note = Artificially Synthesized Probe
  source 1..120: mol_type = other DNA
aggctttgacatatataatacccatgaaaccagcacaatcaagatagtgaatgtaatcattacccccaaagtttcttcattataatgtattaataaaccagtactattggccaggcacag

SEQ ID NO: 19533 - DNA, 120 bp, synthetic construct
  misc_feature 1..120: note = Artificially Synthesized Probe
  source 1..120: mol_type = other DNA
taattgtgtctcagccgttactctgcttttaggagggaaggtacaggatggagtgagaaagaaaagaaaaaaaatcatggccatgttaggagtggacaaatgacagtgtctgtttccata

SEQ ID NO: 19534 - DNA, 120 bp, synthetic construct
  misc_feature 1..120: note = Artificially Synthesized Probe
  source 1..120: mol_type = other DNA
aagaaatctcacctttctggtaaagcccaacgtttctgggattccttccttaattgctctgaccagaaataacccttctctctatttcacccacacagttcttctcttaatagatctcat

SEQ ID NO: 19535 - DNA, 120 bp, synthetic construct
  misc_feature 1..120: note = Artificially Synthesized Probe
  source 1..120: mol_type = other DNA
agagtgatttttaaaaactcattttttttttgctaacatcgtagcataaaagactgttaatattaatcacttcccacttaccctgcttacattttatactgccttacagctgaactgcct

SEQ ID NO: 19536 - DNA, 120 bp, synthetic construct
  misc_feature 1..120: note = Artificially Synthesized Probe
  source 1..120: mol_type = other DNA
gtttttcttaaccatatcttctaaatgcattaatcagtggagaggtgacccagaaatcactgtgaaagttgggaccttatctttgctgtttgagcccagatcttgcatttagaatcatgg

SEQ ID NO: 19537 - DNA, 120 bp, synthetic construct
  misc_feature 1..120: note = Artificially Synthesized Probe
  source 1..120: mol_type = other DNA
gctagtaagtgatgaggacagattatgaacccaagctgacttaacactggtgtgaagctgaaatgaaagaattcagttgaaactatgagatgctgtacacactcagttgattgtcctcat

SEQ ID NO: 19538 - DNA, 120 bp, synthetic construct
  misc_feature 1..120: note = Artificially Synthesized Probe
  source 1..120: mol_type = other DNA
tttggacttccagtaagctcagagacttctagagttagaaaattccctgctgtaactggtttgtatggttttccccatccatgttggtaggtcagaaatggaatttgtgtaactcttagt

SEQ ID NO: 19539 - DNA, 120 bp, synthetic construct
  misc_feature 1..120: note = Artificially Synthesized Probe
  source 1..120: mol_type = other DNA
agagtctagatgttgattattgtcctgggggaaggatagaaaccagagaatagatagcacaggttcttcctactcccctcttctacttctggtttaaggtttcatctttttttttttttc

SEQ ID NO: 19540 - DNA, 120 bp, synthetic construct
  misc_feature 1..120: note = Artificially Synthesized Probe
  source 1..120: mol_type = other DNA
gaacttgaaatagtttaaagaagagacttgatgaattgaactcatgtttttgctgctgtggccacaccctctttacagacatttgcttcatttgggttctcagcaacttgggaaggagga

SEQ ID NO: 19541 - DNA, 120 bp, synthetic construct
  misc_feature 1..120: note = Artificially Synthesized Probe
  source 1..120: mol_type = other DNA
gttacctagtatttacagggcacaaggcagtcgaagtgccttgccatactttatctcatttaacctcagaattgtacaacacagggcaggatgatatccggccttttttttttttttttt

SEQ ID NO: 19542 - DNA, 120 bp, synthetic construct
  misc_feature 1..120: note = Artificially Synthesized Probe
  source 1..120: mol_type = other DNA
atcctgtctccaaaaaaaaaaagatggaggtagttttttgtaatggcaagattgtacattagaagatagaaaagtaggttttgcatcttactcgggaagatatatgtatatttctctccc

SEQ ID NO: 19543 - DNA, 120 bp, synthetic construct
  misc_feature 1..120: note = Artificially Synthesized Probe
  source 1..120: mol_type = other DNA
atctttttccccattgatttgtaatgtctcatttgtacatacattaagtttattatacatatttgtgggcaagatgagttctccatcatgctgtagcggtgctgccgctggatgtgcatc

SEQ ID NO: 19544 - DNA, 120 bp, synthetic construct
  misc_feature 1..120: note = Artificially Synthesized Probe
  source 1..120: mol_type = other DNA
ctatacgaaagtagttaaaaaaaaaataacccacagcaatacaagaaatgacatcagccagcagatgactgaaaatgagtggtgttgataagaacttgaggaattttgagatgggagagg

SEQ ID NO: 19545 - DNA, 120 bp, synthetic construct
  misc_feature 1..120: note = Artificially Synthesized Probe
  source 1..120: mol_type = other DNA
tttgcagcttcttacctttcactttcagaaatattctcccttgaaggggcttcgtgtttgtttgcaggaattaatagcattttctttccctgtgccctgtagggaaagagcacagctaaa

SEQ ID NO: 19546 - DNA, 120 bp, synthetic construct
  misc_feature 1..120: note = Artificially Synthesized Probe
  source 1..120: mol_type = other DNA
agaagaaagtggaccatctcttggtgtttgttttgatgagacttgacctatataacactggctcaagtatgtttgttaaagtgaatcacctgttgctttctgggccatacgtgaaatgac

SEQ ID NO: 19547 - DNA, 120 bp, synthetic construct
  misc_feature 1..120: note = Artificially Synthesized Probe
  source 1..120: mol_type = other DNA
tctttgctgttggtgtattcctattcatgagttaaatcccaaacaaaacatactctaatcagggcagtcgaacttgaaaagagtcagtgagaaatctgaaaggaggaaaagcctggccac

SEQ ID NO: 19548 - DNA, 120 bp, synthetic construct
  misc_feature 1..120: note = Artificially Synthesized Probe
  source 1..120: mol_type = other DNA
gataaattagggtaaacaaaatcaaatacttgtaaaaatactgtacaaaggaatgacatatgtatgctggttccctagcagggtaattccatcagcgctttaaaaaaaaaaaaaaaaaga

SEQ ID NO: 19549 - DNA, 120 bp, synthetic construct
  misc_feature 1..120: note = Artificially Synthesized Probe
  source 1..120: mol_type = other DNA
aggatttctatagcttcttttagagactcaaagtgcttccagttttgttacctcatttattctctaggggcaggaattaaggtcttgatggagatgaagtggtacatcacttactgggct

SEQ ID NO: 19550 - DNA, 120 bp, synthetic construct
  misc_feature 1..120: note = Artificially Synthesized Probe
  source 1..120: mol_type = other DNA
aacacatgattatgtatgcctactatgtaccaggctctggtctggtgctagagatagagttattaacaagacagaggaagtccctgctttcatggagctgtatttttttttttttttgag

SEQ ID NO: 19551 - DNA, 120 bp, synthetic construct
  misc_feature 1..120: note = Artificially Synthesized Probe
  source 1..120: mol_type = other DNA
agatgtaagtcatcatgcccggcctcgtttcctaattttaaaaatgaaattgttggagtagatcatcacaatcccttttagttaagtctgctcactgggtagatttgtacctaactgccc

SEQ ID NO: 19552 - DNA, 120 bp, synthetic construct
  misc_feature 1..120: note = Artificially Synthesized Probe
  source 1..120: mol_type = other DNA
gttttgacaaatggtatatacttgtgtagccacaattataatcaataggttgaacatttctatcaccccaaaaagtcccttcacggtccttggctttaatcttcctctttccttccccaa

SEQ ID NO: 19553 - DNA, 120 bp, synthetic construct
  misc_feature 1..120: note = Artificially Synthesized Probe
  source 1..120: mol_type = other DNA
ataatagaaactttcatagcagatcgggtcctagacagatccctccctctgtaactgagttaggttttgaggggagatatcccccattatactgttcctaaatcctagattttgactgta

SEQ ID NO: 19554 - DNA, 120 bp, synthetic construct
  misc_feature 1..120: note = Artificially Synthesized Probe
  source 1..120: mol_type = other DNA
ttccatttctcattggggttaggtttccaaaggtccatgaaggttttattcgttttcgtgccccaagagagctttccatagtaatgaaagaaatgttaagaactgcaggaaatgggtaag

SEQ ID NO: 19555 - DNA, 120 bp, synthetic construct
  misc_feature 1..120: note = Artificially Synthesized Probe
  source 1..120: mol_type = other DNA
aagagagggattttaattagaagtcgtctaggcctacccctaatgaagaaaataagttgaagttgaaactgaaaatgcctcctcatcctctcattgaggatcccatcagttttgggatct

SEQ ID NO: 19556 - DNA, 120 bp, synthetic construct
  misc_feature 1..120: note = Artificially Synthesized Probe
  source 1..120: mol_type = other DNA
ctgcacttgatctacttgagaagtatttaacaggtctattttataaaatcccaaggcagccttttctgctacctgcttggattgggctgcatgaatataaactcattttgctatcagcct

SEQ ID NO: 19557 - DNA, 120 bp, synthetic construct
  misc_feature 1..120: note = Artificially Synthesized Probe
  source 1..120: mol_type = other DNA
atttaatatgtaattaaaataacaagtatacctagcgtgaactaactactgaccctgaagcagccaacctggctggtgggagtagatgtgagtaatacacaaccagcctccagtgtgcta

SEQ ID NO: 19558 - DNA, 120 bp, synthetic construct
  misc_feature 1..120: note = Artificially Synthesized Probe
  source 1..120: mol_type = other DNA
tttccatttatagatgaggtctctttgggagccagcaaggaggtggtacaaggtctaatctttgaacagttgagaaatgggtagtttgttttcatagtgctgcttcttattttcaaggtt

SEQ ID NO: 19559 - DNA, 120 bp, synthetic construct
  misc_feature 1..120: note = Artificially Synthesized Probe
  source 1..120: mol_type = other DNA
agccattgctctcagccaaatgaaaagatttttgatgtactttttagccagagggagtttatgctgctgtgtggccagtttttccacatgtctgcaacagttacaatttttgacagatat

SEQ ID NO: 19560 - DNA, 120 bp, synthetic construct
  misc_feature 1..120: note = Artificially Synthesized Probe
  source 1..120: mol_type = other DNA
aaacaaacatagcaactatcccataccaccttagtgaggtggatattattgtcctcttttcagaagtgaggaaactaaggctcagaaattaagatacgtgctcatggtaacacaggtcct

SEQ ID NO: 19561 - DNA, 120 bp, synthetic construct
  misc_feature 1..120: note = Artificially Synthesized Probe
  source 1..120: mol_type = other DNA
gtgcttgggtcagtgtctctttagaaattaatgtatagataaaatatttcatattagggagagctctgtgctgccctttcccaaagctttggttatttgatgggagggaaagtcttctcg

SEQ ID NO: 19562 - DNA, 120 bp, synthetic construct
  misc_feature 1..120: note = Artificially Synthesized Probe
  source 1..120: mol_type = other DNA
gctggggatttaaagacaaagaaatacagtttctgcctctgagcgtgcatcatctcactggtgaggctcacatacaaacaaacaggcagaattcagtgtaattgagaaatgttgtaattg

SEQ ID NO: 19563 - DNA, 120 bp, synthetic construct
  misc_feature 1..120: note = Artificially Synthesized Probe
  source 1..120: mol_type = other DNA
tggagcagctcctctcattctgagtgggtttagcatttgagaaatagaggggcaccttggctgactggactaaaccttctttggcaatttataataaatgctctctgatttattgtttat

SEQ ID NO: 19564 - DNA, 120 bp, synthetic construct
  misc_feature 1..120: note = Artificially Synthesized Probe
  source 1..120: mol_type = other DNA
tttttgtttcttttttactcagaacaccaagccccttcagccacctcaaaagaggttatagccagggcgcccctcttagaagaaaagacatttttttttttccttaagattggtgcatgg

SEQ ID NO: 19565 - DNA, 120 bp, synthetic construct
  misc_feature 1..120: note = Artificially Synthesized Probe
  source 1..120: mol_type = other DNA
tttgtgattgcaaagtgttgaatcagtctttggtgtggatacagaatatttgaagctagttgaagtgtaggggtgttgggacaggagaaatgatgagatgaagtcttatcagaggctgaa

SEQ ID NO: 19566 - DNA, 120 bp, synthetic construct
  misc_feature 1..120: note = Artificially Synthesized Probe
  source 1..120: mol_type = other DNA
ttgtgctttaaatagtcctcagacggtaatgtggatagtagatgaacacaattcttgtgaatccatttgccttgtgcttgggagttctattcttagaccacaatcaccggaatagaaagc

SEQ ID NO: 19567 - DNA, 120 bp, synthetic construct
  misc_feature 1..120: note = Artificially Synthesized Probe
  source 1..120: mol_type = other DNA
tgagagacagaggcagagaagttaaataattagtccaaggtcacatcaaatgatttccaactcagctgatgaatctgtctaggtctcggtctccaaatattgcagcttcccttacaatgt

SEQ ID NO: 19568 - DNA, 120 bp, synthetic construct
  misc_feature 1..120: note = Artificially Synthesized Probe
  source 1..120: mol_type = other DNA
tggacactaggtgacagagatgaacaaatccctaatcttgggatttcaccgtggatgttggaatttagtaccgtttagctttattaggttctgcagtagtcccaagattttccaagatca

SEQ ID NO: 19569 - DNA, 120 bp, synthetic construct
  misc_feature 1..120: note = Artificially Synthesized Probe
  source 1..120: mol_type = other DNA
ggaaaagaaaaaaaaagtcaccttatcaagaccctctaggctactctgcataaaatataccccacttcatatttcctatttgatgtctgactccccctcctccttcactaaaacgtaagc

SEQ ID NO: 19570 - DNA, 120 bp, synthetic construct
  misc_feature 1..120: note = Artificially Synthesized Probe
  source 1..120: mol_type = other DNA
gtgtagggtggaaaggaaaccaaaatcaagaccctttgttgctccagttcttttattacatgtcacagtcgaatgtgtctccatttaaattcagattttttgatgaatggccagaccagc

SEQ ID NO: 19571 - DNA, 120 bp, synthetic construct
  misc_feature 1..120: note = Artificially Synthesized Probe
  source 1..120: mol_type = other DNA
tacattaggtgggcaaaataagaaaggccagaaaagtttaggacagttttctgagacactcagcaaaactatgaggcctagaattgagaactgggtattaccctgtagatgatgtctttt

SEQ ID NO: 19572 - DNA, 120 bp, synthetic construct
  misc_feature 1..120: note = Artificially Synthesized Probe
  source 1..120: mol_type = other DNA
ctctctcttttttttttcccccagtaacagtttaaaattggtgccttagacgcaagcaaaaagatattagcgcagctttagaaataagtgtgagtccacatgtaattttttagtttctcc

SEQ ID NO: 19573 - DNA, 120 bp, synthetic construct
  misc_feature 1..120: note = Artificially Synthesized Probe
  source 1..120: mol_type = other DNA
atctttttttagctgcttttgataaagtagtctgtactacaggattcattgtgactttttcccttaacctgtgcatacttctttgctagcctttgtgaaagagagttcaggccctcttgc

SEQ ID NO: 19574 - DNA, 120 bp, synthetic construct
  misc_feature 1..120: note = Artificially Synthesized Probe
  source 1..120: mol_type = other DNA
ttaataagtatctcttcaagttgactcccatggccttttgacgtgatcctgttggacttggatggcttccttgctttctggcaaaaaaaaaaaaaagatgttccaggatctatatcctgc

SEQ ID NO: 19575 - DNA, 120 bp, synthetic construct
  misc_feature 1..120: note = Artificially Synthesized Probe
  source 1..120: mol_type = other DNA
ttcttgattcccatgttgatataggcagatccttgacaggaattttgaatggtcccaaatgtggtaaatcgctggtacatcaagtcatcctcacagttgtctgtgtaactgtgttgaatg

SEQ ID NO: 19576 - DNA, 120 bp, synthetic construct
  misc_feature 1..120: note = Artificially Synthesized Probe
  source 1..120: mol_type = other DNA
gtagacacttggaatccatggagaatccctaagttgcattttagccttcatgttatgtctcctttcctaacctttttaccagagctgatcacaggaaacagcatgatagatttgcatgac

SEQ ID NO: 19577 - DNA, 120 bp, synthetic construct
  misc_feature 1..120: note = Artificially Synthesized Probe
  source 1..120: mol_type = other DNA
ggtgtgagccactatatttggtctcatttgtatttttgaaagatcactggtggcagtgaagataccagtgggttggagggagggagactagaggcaataacaatttagataatagatatt

SEQ ID NO: 19578 - DNA, 120 bp, synthetic construct
  misc_feature 1..120: note = Artificially Synthesized Probe
  source 1..120: mol_type = other DNA
taagggagtgccagtgaatatgaaggggaagtgaggttttgagaaatatttaggaggtaaaaaatcagtgcagcttattgttgacaaggtgaatagaaataggagtaggacagaaggagg

SEQ ID NO: 19579 - DNA, 120 bp, synthetic construct
  misc_feature 1..120: note = Artificially Synthesized Probe
  source 1..120: mol_type = other DNA
agttgggttgactggggcagtggtggaggtttcttcccagactctctgctaaggttggaacatttgtggccttttaattctgtaggtgattcatatttgcatttatctttttttttttta

SEQ ID NO: 19580 - DNA, 120 bp, synthetic construct
  misc_feature 1..120: note = Artificially Synthesized Probe
  source 1..120: mol_type = other DNA
ccaccctgtagaacccctgctccttattgtgggtgtcactcttaatagttccttatatatctgtgcagtgtttctttatgtaaataaaaggagatatgaacatatgttcttacccctcca

SEQ ID NO: 19581 - DNA, 120 bp, synthetic construct
  misc_feature 1..120: note = Artificially Synthesized Probe
  source 1..120: mol_type = other DNA
aggagaataacagtttctgccaggtgagcagttaaaaaaaaggcagactggaaaaataactgtggaatggtgtttcttatttacaaggctaacataaagtctccctgtgtgttggggatg

SEQ ID NO: 19582 - DNA, 120 bp, synthetic construct
  misc_feature 1..120: note = Artificially Synthesized Probe
  source 1..120: mol_type = other DNA
ggagagttgtgactggaggttatctcactgtaagagactgactggtggagattaaaaaaaaaaaaagcttgtctggcaggaatgaaatcttgcttgctgtatatctgcaggaaataccaa

SEQ ID NO: 19583 - DNA, 120 bp, synthetic construct
  misc_feature 1..120: note = Artificially Synthesized Probe
  source 1..120: mol_type = other DNA
agccactgaaattttgggggttagttgttcatgcagcagaacccagcccattcttactgccttaatagtcatttaatacatatgtattgagtatttaactttgtgctgggcactgttagg

SEQ ID NO: 19584 - DNA, 120 bp, synthetic construct
  misc_feature 1..120: note = Artificially Synthesized Probe
  source 1..120: mol_type = other DNA
cacctattctgccttgataggaagaaatgagaaaagtgttacttgggagttgtaatggggaaaggagagctttatctgcttttcttttcttccttttctttggggcaaaccaaagcaatg

SEQ ID NO: 19585 - DNA, 120 bp, synthetic construct
  misc_feature 1..120: note = Artificially Synthesized Probe
  source 1..120: mol_type = other DNA
tttgggcttgagaggcacttagaaaattgctcctaaagtcctagaaagacggtcacagaaataccaagagagaaggaatgcttgatattcttggtgataggaatcaccaagaatagtgta

SEQ ID NO: 19586 - DNA, 120 bp, synthetic construct
  misc_feature 1..120: note = Artificially Synthesized Probe
  source 1..120: mol_type = other DNA
tgagccaccacgcccgaccttctgtattttttattgcttaaaatatgatgagatgcctggacattcagctgccatcttgtgatgtaaagtgctgtgttaactcactgaagaaaaatagat

SEQ ID NO: 19587 - DNA, 120 bp, synthetic construct
  misc_feature 1..120: note = Artificially Synthesized Probe
  source 1..120: mol_type = other DNA
ctctcattccctgactgggttaaggatcttgattggatggccagttttcttagctccatctcagaagcaaaggacgatcctcttggagaagtcttaaattatttctctaatttctatatt

SEQ ID NO: 19588 - DNA, 120 bp, synthetic construct
  misc_feature 1..120: note = Artificially Synthesized Probe
  source 1..120: mol_type = other DNA
tgggagcataatggaggaaggcagataaaaaggggagaatagaatcagactgtcacaaagttaataaataattgggagtcaaagaattcattattgaaagctgacaaaccagatagtagg

SEQ ID NO: 19589 - DNA, 120 bp, synthetic construct
  misc_feature 1..120: note = Artificially Synthesized Probe
  source 1..120: mol_type = other DNA
ggcttggggtaaagtcccatggaatagctggacttagagtcatcagagagaatgatttttaattccaatttctatgaacactgcctctaggctctaaaggccattttcttttctttatga

SEQ ID NO: 19590 - DNA, 120 bp, synthetic construct
  misc_feature 1..120: note = Artificially Synthesized Probe
  source 1..120: mol_type = other DNA
cagcaaaaaattggaaacaatggcaggtaccaccaaaaaaaagagactggttgaataaacaaaagcatagctatgcagtggaatgctatgcagctggtagaaagaaggggcagattgata

SEQ ID NO: 19591 - DNA, 120 bp, synthetic construct
  misc_feature 1..120: note = Artificially Synthesized Probe
  source 1..120: mol_type = other DNA
gactggttgtatcctaatagcactggtccatttttctgtggtgtgcattttagcttttttcctaacaaaaaaatcttaccacatgattctctgccaacagattttcctgagctggaagga

SEQ ID NO: 19592 - DNA, 120 bp, synthetic construct
  misc_feature 1..120: note = Artificially Synthesized Probe
  source 1..120: mol_type = other DNA
ctggacatgcccaggggtaaaatatatccaagtagaaatcttccttctcagaacatacccagaaataatgattctctattttgagtactttcttgtgcagtatactaaccaggtgcctac

SEQ ID NO: 19593 - DNA, 120 bp, synthetic construct
  misc_feature 1..120: note = Artificially Synthesized Probe
  source 1..120: mol_type = other DNA
gtccttgggtttttaaaatggaacctctttgttgtaaaatattagttgtacagttgaatttttcagagtagaattgggatccagagtgagaaactttctccctgaaggggctccctggac

SEQ ID NO: 19594 - DNA, 120 bp, synthetic construct
  misc_feature 1..120: note = Artificially Synthesized Probe
  source 1..120: mol_type = other DNA
ctaaaacaaacaaacaaaaaactagggtggttaaaaaaaaatcttggtgaacaacctctcttgtggattgtaatttctcaaagaaaaatatgatgtaaagattctttcttttactctccc

SEQ ID NO: 19595 - DNA, 120 bp, synthetic construct
  misc_feature 1..120: note = Artificially Synthesized Probe
  source 1..120: mol_type = other DNA
taatgtctatgggtttaaccccctagagagcaattcctttggggtgaggagactggaggggatattcttcccttccaggggtcttctcattgccttctttttaattttttaaatttaaat

SEQ ID NO: 19596 - DNA, 120 bp, synthetic construct
  misc_feature 1..120: note = Artificially Synthesized Probe
  source 1..120: mol_type = other DNA
gaagaaaattgcctgggttgaaaagccagtgactgatgtgagattaccttgtagtgatgttgctttgggcatatggattatgaccagatacagattaacccgttcctctataattgtttt

SEQ ID NO: 19597 - DNA, 120 bp, synthetic construct
  misc_feature 1..120: note = Artificially Synthesized Probe
  source 1..120: mol_type = other DNA
ttttgtcttaaatccctcctgtctttgctcttttcccttcctttgtggtggctgccaatcctaccttgcagataacttctccctcatgaaaacagaggaggatctgatattattaattta

SEQ ID NO: 19598 - DNA, 120 bp, synthetic construct
  misc_feature 1..120: note = Artificially Synthesized Probe
  source 1..120: mol_type = other DNA
ttgcattttaaaataaggggtagggagcttttagatgaggcctcatggaataggtcacatttgtgcaaaaatttaaaggaggtaagagtgtaagccgcgtggatattgggggaagggcat

SEQ ID NO: 19599 - DNA, 120 bp, synthetic construct
  misc_feature 1..120: note = Artificially Synthesized Probe
  source 1..120: mol_type = other DNA
aaatgaactttctgacagcatctcattaaatgaaataatagaagtgaaagcactttgaaactcagaaagtccaggaagaaatcggctggttgtctccactctcttcattacccacctgca

SEQ ID NO: 19600 - DNA, 120 bp, synthetic construct
  misc_feature 1..120: note = Artificially Synthesized Probe
  source 1..120: mol_type = other DNA
gggtgagtgtgcatgtgttcacatactggatcacattataacatgtattgctcattatgggttgtggtcagaaaaaattcagaaaacgctgtctcagactgtcccaaagttgtatttgct

SEQ ID NO: 19601 - DNA, 120 bp, synthetic construct
  misc_feature 1..120: note = Artificially Synthesized Probe
  source 1..120: mol_type = other DNA
atacacacctgcccagggaacctggagacctgtaaaataatttaaaaccatttttttttttatcatatctttaaaaaatactggcaaacatagtaataagaatttgagactgggtgcggt

SEQ ID NO: 19602 - DNA, 120 bp, synthetic construct
  misc_feature 1..120: note = Artificially Synthesized Probe
  source 1..120: mol_type = other DNA
atcttttccacttatgttattgaggcatgtggttgaaaagtggcctttaaatggtgtgaggtgggtaggcaggggataaattcttaccacagtttctaggatgaggaaagtgaaactcag

SEQ ID NO: 19603 - DNA, 120 bp, synthetic construct
  misc_feature 1..120: note = Artificially Synthesized Probe
  source 1..120: mol_type = other DNA
cctttggaaggcaggcccaagaagctggtttaaattactggagtctgactaaaaagacttttatattagactggtatttcccaacatttaaaaatttatgaacttgggcagggcatggtg

SEQ ID NO: 19604 - DNA, 120 bp, synthetic construct
  misc_feature 1..120: note = Artificially Synthesized Probe
  source 1..120: mol_type = other DNA
atggtagcggttaccacagagagtttcaactgcatatctacaagggagtaacaccttgtagctatggaatgcctttcctctaacagttacaaagccaatttggatatggttatctctata

SEQ ID NO: 19605 - DNA, 120 bp, synthetic construct
  misc_feature 1..120: note = Artificially Synthesized Probe
  source 1..120: mol_type = other DNA
tcactggggctcacacgggtacttttaaatcttcttctcactggcctctgtgattctgtgaacctggttattacatgttcaaaaagtgtcagcttatttgaaagggatattcttattttg

SEQ ID NO: 19606 - DNA, 120 bp, synthetic construct
  misc_feature 1..120: note = Artificially Synthesized Probe
  source 1..120: mol_type = other DNA
tcggggatcagcagggaacaaagtgaagtccctaccatcatggaacttacactctagtgggaggagaaaatgataaacacctaaatagatttacaagtggcatgaagaaaaattaaaatg

SEQ ID NO: 19607 - DNA, 120 bp, synthetic construct
  misc_feature 1..120: note = Artificially Synthesized Probe
  source 1..120: mol_type = other DNA
agatacagatttgggaatcaccagacatagaatggaatgggatctgataggaagcaaggagagatagaaaacagatcctatgactgaatcatgcatggggcatttcagcatttagatgtt

SEQ ID NO: 19608 - DNA, 120 bp, synthetic construct
  misc_feature 1..120: note = Artificially Synthesized Probe
  source 1..120: mol_type = other DNA
gtttctttttttgccttggcaattttctaacatttacattccaacttgcatgctcccattttttggtcttggtgccatatgtagccacttgttctttgatcgtggctttcctgttcctgt

SEQ ID NO: 19609 - DNA, 120 bp, synthetic construct
  misc_feature 1..120: note = Artificially Synthesized Probe
  source 1..120: mol_type = other DNA
tactaaatatataacaacattgccttgtggtgtttagatcagcaacttctttgctccaaaggtacagtgaatgatgacggttgctgggcctcaaaataaggaagacgaaactaagagaac

SEQ ID NO: 19610 - DNA, 120 bp, synthetic construct
  misc_feature 1..120: note = Artificially Synthesized Probe
  source 1..120: mol_type = other DNA
tgtgtgtgtgcatgtgtgttggattgccaaagtttgaagccactagttttgttcaattcctatcactttctgtaccttctttatcgaaaagttaaaggatcaaagaacctatgggataga

SEQ ID NO: 19611 - DNA, 120 bp, synthetic construct
  misc_feature 1..120: note = Artificially Synthesized Probe
  source 1..120: mol_type = other DNA
cagtggagtggctgctattacaaactccattttgtagataatgaaaacgacttagagagattaagtgtcttgttcagggagacacaggtaccaggtggcagaactacaattaaaatccaa

SEQ ID NO: 19612 - DNA, 120 bp, synthetic construct
  misc_feature 1..120: note = Artificially Synthesized Probe
  source 1..120: mol_type = other DNA
tcatctggggtgatgcataaactgaatctggcagagcaggccctcaataatgatagacttctcattgccaaggttaatgagctctttgccttgctgtcttatttaaatactccatagtta

SEQ ID NO: 19613 - DNA, 120 bp, synthetic construct
  misc_feature 1..120: note = Artificially Synthesized Probe
  source 1..120: mol_type = other DNA
aatccccccctacccaaggtctcaagaggtccatgctagattttactgatttcttcctctcttaatgtagtctgggaccattattttggcacttaggatgccagtcttatactcttaaat

SEQ ID NO: 19614 - DNA, 120 bp, synthetic construct
  misc_feature 1..120: note = Artificially Synthesized Probe
  source 1..120: mol_type = other DNA
tgtaaggggaggagtgtttctttctttcatagctttggaataatctaccgcacagggcagacagttttgaagatggccatgtttaaagtccatcagagaaaactacagtcaaaaggaaag

SEQ ID NO: 19615 - DNA, 120 bp, synthetic construct
  misc_feature 1..120: note = Artificially Synthesized Probe
  source 1..120: mol_type = other DNA
ccactgtgctcgaccaaatttcttcttttcaagaagtttagactacctccagaagcctgactatagtaatgggattccccactgatcttcctgagctttcaacactttcattgtagtatt

SEQ ID NO: 19616 - DNA, 120 bp, synthetic construct
  misc_feature 1..120: note = Artificially Synthesized Probe
  source 1..120: mol_type = other DNA
ggagagggcaggggtgggatcagttttactgaaagcatgtggaccgagagtggggaaaacatggatataaggaatgaaaaacaattatttcagaaacataatagctatttgttggttggt

SEQ ID NO: 19617 - DNA, 120 bp, synthetic construct
  misc_feature 1..120: note = Artificially Synthesized Probe
  source 1..120: mol_type = other DNA
aaagcctcaattgtattcttatgtaacattctctggaaaggtactaggaattaatattcctgagatggctgaggtgtttgtgaaggggctaaaagcaggtgaggcagattgggtggaaaa

SEQ ID NO: 19618 - DNA, 120 bp, synthetic construct
  misc_feature 1..120: note = Artificially Synthesized Probe
  source 1..120: mol_type = other DNA
aatccgttcctccttttggctcctgtttgttgggttattttccccttcactggcagatggtgctcaacagaatatgctatgtggtggggttaaattttttaatctgtttttttcagtgag

SEQ ID NO: 19619 - DNA, 120 bp, synthetic construct
  misc_feature 1..120: note = Artificially Synthesized Probe
  source 1..120: mol_type = other DNA
tgagtctttgagtgtgtacacatgatgtgcacatgcatgatcgcctaagcacatgagggaactgtgaggagttcctctatgtttttaaattgcctctttcttctttctgcccttttgttt

SEQ ID NO: 19620 - DNA, 120 bp, synthetic construct
  misc_feature 1..120: note = Artificially Synthesized Probe
  source 1..120: mol_type = other DNA
tagctccagctcctgttgcataattgttgaccctttggtaaattacttaaagagtcttacttcagttttctccttagtgtaatcaggataattgtggataccttacagactacctgtgag

SEQ ID NO: 19621 - DNA, 120 bp, synthetic construct
  misc_feature 1..120: note = Artificially Synthesized Probe
  source 1..120: mol_type = other DNA
agtaatattagtaagcattctgaatgccctctcaatgtacagtctgcccacccaatggctattactatcagcttttcactaatatattgaagggggacagatgcctacaggaatagtctc

SEQ ID NO: 19622 - DNA, 120 bp, synthetic construct
  misc_feature 1..120: note = Artificially Synthesized Probe
  source 1..120: mol_type = other DNA
gaccctgaccagccagaaatctgcatgctagagcttaaccagaagtatttctagctatgacactatagaggcactacagcatctatgaagattaagcaacacagatatgagtgatatttg

SEQ ID NO: 19623 - DNA, 120 bp, synthetic construct
  misc_feature 1..120: note = Artificially Synthesized Probe
  source 1..120: mol_type = other DNA
ctggcttcagattggttgaaagccctcaaggacttctcgttttccagatcagtcttatgtgcaattcaacatttcgtagagatgagagtagatgatgaaccatgctaataataacagcaa

SEQ ID NO: 19624 - DNA, 120 bp, synthetic construct
  misc_feature 1..120: note = Artificially Synthesized Probe
  source 1..120: mol_type = other DNA
tatacaactggcccattcacttggttcccagtgccattgccctagtttagatcatcatcttttttgcctgaatgattgcagtatttactagatcttctatagcagagattttcaaccctg

SEQ ID NO: 19625 - DNA, 120 bp, synthetic construct
  misc_feature 1..120: note = Artificially Synthesized Probe
  source 1..120: mol_type = other DNA
catgtcttaagacccatctcaggtgctccctgttccaggaaactttcctgattctcccagaaggaagaaagttctccatcttctgaattcttacagcattttatttgttcttctcttagg

SEQ ID NO: 19626 - DNA, 120 bp, synthetic construct
  misc_feature 1..120: note = Artificially Synthesized Probe
  source 1..120: mol_type = other DNA
ctaaatttaaaatagcatttgatttttagtactatatcatattctcagcttatggacgtatttgttacaaattaaggttcagatgtgttaatctccaagtcatcttgtgtccggaattgg

SEQ ID NO: 19627 - DNA, 120 bp, synthetic construct
  misc_feature 1..120: note = Artificially Synthesized Probe
  source 1..120: mol_type = other DNA
caggagcccagttggcttcatctagtggatcccgcaccggggctgcaggtggagctgcctgccagtcctgcgctgtgcgctcgcattcctcagcccttgggtggtcgatgggactgggcg

SEQ ID NO: 19628 - DNA, 120 bp, synthetic construct
  misc_feature 1..120: note = Artificially Synthesized Probe
  source 1..120: mol_type = other DNA
gagcataaagcagtaatgatctcattaattggtgttatgtacaacatagatctgatgagaggtcagagatggttaaaggttctggaatagtctggaaagttgtcatgaagcaggtgggac

SEQ ID NO: 19629 - DNA, 120 bp, synthetic construct
  misc_feature 1..120: note = Artificially Synthesized Probe
  source 1..120: mol_type = other DNA
gcattttagtgggtcctctgggttcttaggtggggagagagacacgaggaaaacagaaggccaggatgaaggttttggggtaatctacacacaaagtaagagcaaaaaaaaaaaaaaaaa

SEQ ID NO: 19630 - DNA, 120 bp, synthetic construct
  misc_feature 1..120: note = Artificially Synthesized Probe
  source 1..120: mol_type = other DNA
cctgatatatttttagcattgtataccttgtctttagttctgtttgtttttccacaattaaactcgtggcctgcctgctcaagttcagtgaatacctaaagagtccacgtagctgatgag

SEQ ID NO: 19631 - DNA, 120 bp, synthetic construct
  misc_feature 1..120: note = Artificially Synthesized Probe
  source 1..120: mol_type = other DNA
tgattggaggactggatagggctttagggaggtcaagttcaatggatgggagataaaaaaattaaaatgccagtgctaggcattgatcctttaagcttaatacagttgagacaatggaga

SEQ ID NO: 19632 - DNA, 120 bp, synthetic construct
  misc_feature 1..120: note = Artificially Synthesized Probe
  source 1..120: mol_type = other DNA
tgcagatagaactgtagcgattatttgaccctatgttattctgctttgtttaagacaggtaacatggcttcccccatccctgtgaattgtgggaagaccctgctaatgtctgaaattctg

SEQ ID NO: 19633 - DNA, 120 bp, synthetic construct
  misc_feature 1..120: note = Artificially Synthesized Probe
  source 1..120: mol_type = other DNA
ctcacttggttttgatctcctgcttttaatagctcatttttttaggtagcttttttttttctgttgagtttttagagcaatacttctacatttctgtcctgctgtgttccttgcagagac

SEQ ID NO: 19634 - DNA, 120 bp, synthetic construct
  misc_feature 1..120: note = Artificially Synthesized Probe
  source 1..120: mol_type = other DNA
tttctagtagttgacaaaatgaatggctgtatgcagggctaaagagattttttggctgttggtagagatttgcacacgtgcacagaggggatggttgaaactgtggaaatatttgtgatt

SEQ ID NO: 19635 - DNA, 120 bp, synthetic construct
  misc_feature 1..120: note = Artificially Synthesized Probe
  source 1..120: mol_type = other DNA
ttcagtgggaggttagttacacaattaattaaagaaaaattattgtagagtctgtgttctcggcttcaggcccagtatttgaatgtgcgccatctctgtagttacatcactactgcggat

SEQ ID NO: 19636 - DNA, 120 bp, synthetic construct
  misc_feature 1..120: note = Artificially Synthesized Probe
  source 1..120: mol_type = other DNA
ggcacatagtaaatgtaaatagtagcaactattatccctatccttaggatttgggcctgagcacagctgtactgggtaaaacactggtatattagatacactagtcattccttgtgcaga

SEQ ID NO: 19637 - DNA, 120 bp, synthetic construct
  misc_feature 1..120: note = Artificially Synthesized Probe
  source 1..120: mol_type = other DNA
gtgttaagtgggagggtttacaagataagaagaaaagacagtctctgccatacgtgtttttataattgaaatgggggaaatcgggcaggctgagagagaataataagaacacatgtgcac

SEQ ID NO: 19638 - DNA, 120 bp, synthetic construct
  misc_feature 1..120: note = Artificially Synthesized Probe
  source 1..120: mol_type = other DNA
tttttatacattgactggatttgtcagtcttgttcttgctcctgttttctccggtaatgcgtggaaatgtgtgtcctttcttaccacagagtcctagatacatgtgcatacaaatacaca

SEQ ID NO: 19639 - DNA, 120 bp, synthetic construct
  misc_feature 1..120: note = Artificially Synthesized Probe
  source 1..120: mol_type = other DNA
gtccccaagcacacataccgagtttccagccagatgataagtgcttaggaaaccttctactttacagcatagttcagggaagccataatagaaaaaatataatacatctttggtaggctt

SEQ ID NO: 19640 - DNA, 120 bp, synthetic construct
  misc_feature 1..120: note = Artificially Synthesized Probe
  source 1..120: mol_type = other DNA
tgtatgtgctctgataaggcgtagacttccaggttgaggagacagaattgttgggttatgagtcaccctgttagtcacctttattatatgtgaatcagtaataaacacttgacttcattc

SEQ ID NO: 19641 - DNA, 120 bp, synthetic construct
  misc_feature 1..120: note = Artificially Synthesized Probe
  source 1..120: mol_type = other DNA
cattccttctacatttatcagttgcaattctactgtaaggaagagcttttccatcacccccactttttggtctggttgttggtttatatcagtgtggacttgtggattattattttattc

SEQ ID NO: 19642 - DNA, 120 bp, synthetic construct
  misc_feature 1..120: note = Artificially Synthesized Probe
  source 1..120: mol_type = other DNA
ttcctgttctctgaacagtgagaaacctggttcctattatccataacacacattttcacttaattgctcagtcctagagtgtacagaaagttgtttcagaattactaacccaggccgggc

SEQ ID NO: 19643 - DNA, 120 bp, synthetic construct
  misc_feature 1..120: note = Artificially Synthesized Probe
  source 1..120: mol_type = other DNA
tatttaatgttttcctctccggaatggggtcttgacatttctcactgccaaaccttttctcttgactaaaaaagatggagcagattcaggagaagtgagagacccatgtatccatagatt

SEQ ID NO: 19644 - DNA, 120 bp, synthetic construct
  misc_feature 1..120: note = Artificially Synthesized Probe
  source 1..120: mol_type = other DNA
gtactgataggtttaaccatcaggatgggactgtgttgataatcaagctagggctgttggttgtttttctagacgtttatacccttttaaaatcttccatctaggactagggaccttatg

SEQ ID NO: 19645 - DNA, 120 bp, synthetic construct
  misc_feature 1..120: note = Artificially Synthesized Probe
  source 1..120: mol_type = other DNA
gtgctgggaatgcaagtgtgaggcactgcatccaggctacttttttctgttattctcttctactgttgcctacttaattttttgagaaatgctagttggtgacctataagttgatttttt

SEQ ID NO: 19646 - DNA, 120 bp, synthetic construct
  misc_feature 1..120: note = Artificially Synthesized Probe
  source 1..120: mol_type = other DNA
ctgagcattgtccattaactctttcagcaccagccctttgagatgctaagggcttttgaatgaaatgtaataaccaccacaatgaaataagaaaacggttactagtcaggagacctggat

SEQ ID NO: 19647 - DNA, 120 bp, synthetic construct
  misc_feature 1..120: note = Artificially Synthesized Probe
  source 1..120: mol_type = other DNA
ttgtagaacactttcatgtttataaagtttgtttaagggcatcaccttgtttgattggatcttcacaaaagtcatgtgtgttaggcagggcaggtctgctgtccctgcttatcccattta

SEQ ID NO: 19648 - DNA, 120 bp, synthetic construct
  misc_feature 1..120: note = Artificially Synthesized Probe
  source 1..120: mol_type = other DNA
atagcagcatgatttatagtcatttgggtatatacccagtaatgcgatggctgggtcaaatggtatttctagttctagatccctgaggaatcgccacactgacttccacaatggttgaac

SEQ ID NO: 19649 - DNA, 120 bp, synthetic construct
  misc_feature 1..120: note = Artificially Synthesized Probe
  source 1..120: mol_type = other DNA
ggcgatgcgggctcttttttggttccatatgaactttaaagtagttttttccaattctgtgaagaaagtcattggtagcttgatggggatggcattgaatctgtaaattaccttgggcag

SEQ ID NO: 19650 - DNA, 120 bp, synthetic construct
  misc_feature 1..120: note = Artificially Synthesized Probe
  source 1..120: mol_type = other DNA
gtgtctctgcccggctttggtatcagaatgatgctggcctcataaaatgagttagggaggattccctctttttctattgattggaatagtttcagaaggaatggtaccagttcctccttg

SEQ ID NO: 19651 - DNA, 120 bp, synthetic construct
  misc_feature 1..120: note = Artificially Synthesized Probe
  source 1..120: mol_type = other DNA
tgtatattctgttgatttggggtggagagttctgtagatgtctattaggtccgcttggtgcagagctgagttcaattcctgggtatccttgttgactttctgtctcgttgatctgtctaa

SEQ ID NO: 19652 - DNA, 120 bp, synthetic construct
  misc_feature 1..120: note = Artificially Synthesized Probe
  source 1..120: mol_type = other DNA
tctgacaattatgtgtcttggagttgctcttctcgaggagtatctttgtggcgttccctgtatttcctgaatctgaacgttggcctgccttgctagattggggaagttctcctggataat

SEQ ID NO: 19653 - DNA, 120 bp, synthetic construct
  misc_feature 1..120: note = Artificially Synthesized Probe
  source 1..120: mol_type = other DNA
actgaatcatttattttgagccagggcttgaagcagacaatccaagcatccttctaaactatcctcagtcttgtcaacagctgttatcttcagcttcttcaaggtatcactgagattatc

SEQ ID NO: 19654 - DNA, 120 bp, synthetic construct
  misc_feature 1..120: note = Artificially Synthesized Probe
  source 1..120: mol_type = other DNA
ttcctcctgcacccccacacaaaaagagacttccttctaataaaggcaagataaatatccaaataacacatgagaactgataatgacacatgcagccaatctgatgactgtgtagacttc

SEQ ID NO: 19655 - DNA, 120 bp, synthetic construct
  misc_feature 1..120: note = Artificially Synthesized Probe
  source 1..120: mol_type = other DNA
attatattggggtggcattgtagcatgtagattgtaccaagagggtttaaaagcctctttattcattcctccctatagttctgggaatgctagtgctaacacatgggatgtaaacaaagg

SEQ ID NO: 19656 - DNA, 120 bp, synthetic construct
  misc_feature 1..120: note = Artificially Synthesized Probe
  source 1..120: mol_type = other DNA
ttgtccctgaaaatttgaaagttcatttctccatatgtagactatattatttttgcctttggcacttttctctgtctctgaactctcctcctctgatctcattgctggcaacgctgaagc

SEQ ID NO: 19657 - DNA, 120 bp, synthetic construct
  misc_feature 1..120: note = Artificially Synthesized Probe
  source 1..120: mol_type = other DNA
attttcagcaggcagcaatcttggccctggcccagagccgggtgagaagcatgttggaaattgatgaaagctgagtcctagtttgtttggaaataaaaataataatatttcttcacattt

SEQ ID NO: 19658 - DNA, 120 bp, synthetic construct
  misc_feature 1..120: note = Artificially Synthesized Probe
  source 1..120: mol_type = other DNA
attcctaagggatgcagaccctttcctttaaaggcccaagtattatacaacctaaggctctgggggtggggaaagtaaagagactgtgcaaacaaatgatagatggaaaagatataaaga

SEQ ID NO: 19659 - DNA, 120 bp, synthetic construct
  misc_feature 1..120: note = Artificially Synthesized Probe
  source 1..120: mol_type = other DNA
attaattggataagccccaacatgtataataggcatcgcaacaactgatgatgagatggtatgatattaagcatgttgattttcgctacccaaccacggtctaacatgaacccagcctag

SEQ ID NO: 19660 - DNA, 120 bp, synthetic construct
  misc_feature 1..120: note = Artificially Synthesized Probe
  source 1..120: mol_type = other DNA
tccttttgatctgcggtctacctttctgagctagctggccttttgtttgtaccaccattaaagttctactttactataggtctttctttgtctcccttactatattgcagcatttgcact

SEQ ID NO: 19661 - DNA, 120 bp, synthetic construct
  misc_feature 1..120: note = Artificially Synthesized Probe
  source 1..120: mol_type = other DNA
cagtactgactcaataaccaagctactctcaactcactttctttgtagtaggagtctgactggagcagggaagagaggaaagggggaaagaaacagatagttattatttgcagtgaatga

SEQ ID NO: 19662 - DNA, 120 bp, synthetic construct
  misc_feature 1..120: note = Artificially Synthesized Probe
  source 1..120: mol_type = other DNA
ctgtagtgatttttgtctctagacaaaatctctaactttggtttctaaccctagagacaaaccaaatgacttagtggctaaaatgatggacttcagaatcaccttagacctggtctagcc

SEQ ID NO: 19663 - DNA, 120 bp, synthetic construct
  misc_feature 1..120: note = Artificially Synthesized Probe
  source 1..120: mol_type = other DNA
tggcccacttcataggctttccactagtcattccctaccacatacttgcggagaaaaaaaatatttgaattggcattcctttcttcctttctgagctgaattaatagtagccttgggaaa

SEQ ID NO: 19664 - DNA, 120 bp, synthetic construct
  misc_feature 1..120: note = Artificially Synthesized Probe
  source 1..120: mol_type = other DNA
atcaaataactgatttggaatcttccatctacctaattgcatccgtgaaggtgctttccctgtgtcttagagacagaatattgagggtacaatcatctgacgacgaaaagaaggcagaga

SEQ ID NO: 19665 - DNA, 120 bp, synthetic construct
  misc_feature 1..120: note = Artificially Synthesized Probe
  source 1..120: mol_type = other DNA
agcccctcatattcccttctagtcatctccccaccctaaatccccaaggataacaactgtcttgacttttaacagcagagattagctttgcttggtttcatactttatataagtagaatt

SEQ ID NO: 19666 - DNA, 120 bp, synthetic construct
  misc_feature 1..120: note = Artificially Synthesized Probe
  source 1..120: mol_type = other DNA
cctgactcctaaaaaaaaaaaattgattcattctcttttggctgggtaaagagcctctctgctttctagtaatgggcaaacaaacattcttcataccacaccccagttttttaacctctt

SEQ ID NO: 19667 - DNA, 120 bp, synthetic construct
  misc_feature 1..120: note = Artificially Synthesized Probe
  source 1..120: mol_type = other DNA
ccactgtactctagcctgagtaacagagccagaccctgtctgtttaaaaaaaaaaaaacaacaaaaaaacaaaaaacaaaacagagggctgagagcggtggctcacgcctgtaatcgcag

SEQ ID NO: 19668 - DNA, 120 bp, synthetic construct
  misc_feature 1..120: note = Artificially Synthesized Probe
  source 1..120: mol_type = other DNA
tttcatgtaatgaaagctcagtctgtctaacctctgttggaaccagggtttgggcaaatattattgctgccaccttcatttgtttaatgcggtggcttcaaaaaccatgggcaaaaactg

SEQ ID NO: 19669 - DNA, 120 bp, synthetic construct
  misc_feature 1..120: note = Artificially Synthesized Probe
  source 1..120: mol_type = other DNA
ataccatacattcactaggatggttaaaattaaaacatctggcaataccaagtgttaaggaagttggccagaaccctcatatgttgctagtgagagtgtgaaagtggtacaaccactttg

SEQ ID NO: 19670 - DNA, 120 bp, synthetic construct
  misc_feature 1..120: note = Artificially Synthesized Probe
  source 1..120: mol_type = other DNA
ttagaaaaaacaaatctgatctatagtgatagagaatagatcattgattgccttggggccaggatggggatgaaggattgactgctaagggacacaagggagtttgtagggtttttatag

SEQ ID NO: 19671 - DNA, 120 bp, synthetic construct
  misc_feature 1..120: note = Artificially Synthesized Probe
  source 1..120: mol_type = other DNA
tgtgatggtcataaataagaagaggagaagtggtgacccacaatgctggtatagttgaatgtccctggtaagtgctgtggattgaatgaatggaggaaaagaatggttttccaaaggttg

SEQ ID NO: 19672 - DNA, 120 bp, synthetic construct
  misc_feature 1..120: note = Artificially Synthesized Probe
  source 1..120: mol_type = other DNA
ttatgctgctaggtgcttaaaagagcttgaaaatcaaattgaggagtaagatttgcctcccaagggagcttggggtttttggtttatttaggtctctcaaaactttctgtgggatgatga

SEQ ID NO: 19673 - DNA, 120 bp, synthetic construct
  misc_feature 1..120: note = Artificially Synthesized Probe
  source 1..120: mol_type = other DNA
cgtgagctgccatgcccagcccttctttatttggctgcttccaatatttattcattatctttggtttttagttctttgattatcataagagtgtaagcgtggttttcattgtattccttt

SEQ ID NO: 19674 - DNA, 120 bp, synthetic construct
  misc_feature 1..120: note = Artificially Synthesized Probe
  source 1..120: mol_type = other DNA
ggctttatacttcattacagtgggtatattttggttttgcccttcgtcttagaaaatactgtatacttaaggcatggcctttctggggttttcatgggaagcccaagatgtttatcaagc

SEQ ID NO: 19675 - DNA, 120 bp, synthetic construct
  misc_feature 1..120: note = Artificially Synthesized Probe
  source 1..120: mol_type = other DNA
ttctttccatgaaactgatttgttgaaaaggccaagccagatgtcctgcaaaatctcccatcttctagatttgtttggttgtttacttgtgttgttaagcttctgcccgtatcccatatt

SEQ ID NO: 19676 - DNA, 120 bp, synthetic construct
  misc_feature 1..120: note = Artificially Synthesized Probe
  source 1..120: mol_type = other DNA
caacgacactttgagatgagtactggttttatcatccccatttgtagataagagcatgggcaaagggtttaagcaatttactgaagattatacagctggttgatgggagaaatgggattc

SEQ ID NO: 19677 - DNA, 120 bp, synthetic construct
  misc_feature 1..120: note = Artificially Synthesized Probe
  source 1..120: mol_type = other DNA
catggtctcaagagctcccagaatcatcctcttggtaagctaagtagttattagtaaggcccagggacaggactgagaagtaacatcttctattttttatttcagttttcctttaagttg

SEQ ID NO: 19678 - DNA, 120 bp, synthetic construct
  misc_feature 1..120: note = Artificially Synthesized Probe
  source 1..120: mol_type = other DNA
gagttctttcaccatgctgagtttcactttcctcatctttacactaatgaaattactcataccctcactgttccttctcagaatgctataggcatcagtaaaacctgggaacaaagtgct

SEQ ID NO: 19679 - DNA, 120 bp, synthetic construct
  misc_feature 1..120: note = Artificially Synthesized Probe
  source 1..120: mol_type = other DNA
tacagaaatatcttttgaagatttccatattatctgattccaagttcctttcctgcctctttgtccccattagagatgtcactcatgaggacagtctgacagcagagacttccttttgac

SEQ ID NO: 19680 - DNA, 120 bp, synthetic construct
  misc_feature 1..120: note = Artificially Synthesized Probe
  source 1..120: mol_type = other DNA
ttatatagggtggtcagagacggcttcactgataaattggcattggaactgattcttggaggaaatgagggattttgctgtttagctctttgaggaaggtatttcaggcagagataatag

SEQ ID NO: 19681 - DNA, 120 bp, synthetic construct
  misc_feature 1..120: note = Artificially Synthesized Probe
  source 1..120: mol_type = other DNA
gagaagaagactcaatgatgagttctatgaaggggtcaggaagaatgggaactgaacaaatgtcattagatttgggttttagaatcttgggaaactgtggtgcctacaacttaacctcct

SEQ ID NO: 19682 - DNA, 120 bp, synthetic construct
  misc_feature 1..120: note = Artificially Synthesized Probe
  source 1..120: mol_type = other DNA
ttcatacgaagagtgggaaatagtgggaatggaaattaattgtacctgctggcattattaaagttatcagtgcgtatcccctcttgggccaggaagattaaaaaggctgttgtaatcaga

SEQ ID NO: 19683 - DNA, 120 bp, synthetic construct
  misc_feature 1..120: note = Artificially Synthesized Probe
  source 1..120: mol_type = other DNA
ccttatgatgtcctttgtatcttaggaagaatgggagtgtaggagaggggagcataggggatttctgggagataaaaccatttatgcagaaagcaaggaagtataatagatgaaaagcgt

SEQ ID NO: 19684 - DNA, 120 bp, synthetic construct
  misc_feature 1..120: note = Artificially Synthesized Probe
  source 1..120: mol_type = other DNA
aggcagtgagaggaggagtagagaagacagaagagccatttaggctatgtttggaatcaataagcagggtttacattttgtgctatagatttaaatgctggaaaaattctgaaatggggg

SEQ ID NO: 19685 - DNA, 120 bp, synthetic construct
  misc_feature 1..120: note = Artificially Synthesized Probe
  source 1..120: mol_type = other DNA
ctgggagtttaatttggtttataacattacttaaagataactttgaaattggtctaagaacttagggttgttcctgaccccaggtcaatggcctacttgacctaggcgagaggagaaaga

SEQ ID NO: 19686 - DNA, 120 bp, synthetic construct
  misc_feature 1..120: note = Artificially Synthesized Probe
  source 1..120: mol_type = other DNA
tctcaactcctccagaatatttagggttaactaaaaattataaaaacataccacagagctagtccactctttatgcctagggtttacccaaaaggtgtgcatgctctggcttggagaccc

SEQ ID NO: 19687 - DNA, 120 bp, synthetic construct
  misc_feature 1..120: note = Artificially Synthesized Probe
  source 1..120: mol_type = other DNA
tgagttcaattccaacttcaccaattaatagttgttctcatggacaaattttttgacctctctaagctttagcgtctgtaagtactaagtgctttttgtgcagagagatgtagagaggtg

SEQ ID NO: 19688 - DNA, 120 bp, synthetic construct
  misc_feature 1..120: note = Artificially Synthesized Probe
  source 1..120: mol_type = other DNA
ccagatggccccatatagagcttttatacgtgccaatttttagaatttcttgtagagttcctccatttggtggtcaccagaggatctctgagattagtatctggattcttaatcattcag

SEQ ID NO: 19689 - DNA, 120 bp, synthetic construct
  misc_feature 1..120: note = Artificially Synthesized Probe
  source 1..120: mol_type = other DNA
tcatgatgtttggcactcagttataaataattaggcctatgaggaaataagaactgtgaccaaaagctaagagaaacagctagacccacaggagatcctagtaatggtgttaacagatgc

SEQ ID NO: 19690 - DNA, 120 bp, synthetic construct
  misc_feature 1..120: note = Artificially Synthesized Probe
  source 1..120: mol_type = other DNA
tggccaggcgtgatggcaggcacctgtggtcccagctactggggaagctgaggcaggagaatggcgtgaacccaggaggcggagcttgcagtgagcagagatcgcaccactgcactccag

SEQ ID NO: 19691 - DNA, 120 bp, synthetic construct
  misc_feature 1..120: note = Artificially Synthesized Probe
  source 1..120: mol_type = other DNA
gagaaatacaaagaaaatacaaacagctagaggtaaaaaagacgtattatcttcagtggagcaacagcatggttgacagctgacttctgaacaaaagcaatggaaagcagatgacagtgg

SEQ ID NO: 19692 - DNA, 120 bp, synthetic construct
  misc_feature 1..120: note = Artificially Synthesized Probe
  source 1..120: mol_type = other DNA
atgagccaccacaccaggccaaccctgtggggttttaaatatgtataaaattaatataaatggcaacaatgaaatcaacaatagaatctgtgtctgggtgggggtagggaaatgggttta

SEQ ID NO: 19693 - DNA, 120 bp, synthetic construct
  misc_feature 1..120: note = Artificially Synthesized Probe
  source 1..120: mol_type = other DNA
agagtgtatgttgcttgtaagagaacagatacactttaaatataaggataaagaaagatttaaagcaaagtgataggaaaagatagctacaataaaatcaggccaggtagattcctttct

SEQ ID NO: 19694 - DNA, 120 bp, synthetic construct
  misc_feature 1..120: note = Artificially Synthesized Probe
  source 1..120: mol_type = other DNA
ctagaccaaaaaagtcagtaaaaatacagaagagttgaaaaacaacaaacttgacctaaatgacatatatggatactgcgcctgacaactgcgggtagatacacattctttttttttttt

SEQ ID NO: 19695 - DNA, 120 bp, synthetic construct
  misc_feature 1..120: note = Artificially Synthesized Probe
  source 1..120: mol_type = other DNA
gctcatagatttccttattgtagaagggcatatgttttcaagtaccttatcattctggctctttcccccgattctctcccagttccaagccattgattgtttttcctccttagttcattt

SEQ ID NO: 19696 - DNA, 120 bp, synthetic construct
  misc_feature 1..120: note = Artificially Synthesized Probe
  source 1..120: mol_type = other DNA
ccacagtcgaaccatatcctagttgtacagccaagaaggatcttttctgtttaatctatctggaggaatagaaggtaattgtatcctccttattttcattctgccacccctaccttcatc

SEQ ID NO: 19697 - DNA, 120 bp, synthetic construct
  misc_feature 1..120: note = Artificially Synthesized Probe
  source 1..120: mol_type = other DNA
tggccactgtgcacaaagcaatgggctgggtaccacagaggattcagaaaaatgcttaaaaagttaaaacctatctcttccattagctttagatggtttcatattgtagttgctttgaga

SEQ ID NO: 19698 - DNA, 120 bp, synthetic construct
  misc_feature 1..120: note = Artificially Synthesized Probe
  source 1..120: mol_type = other DNA
ttgccagcattcaataattgaacctgctttgaaacatctgatcagccacttcaagacggcaagttattttagctcctgtctaaataagttagtgggctccagtccttaaaccactatttt

SEQ ID NO: 19699 - DNA, 120 bp, synthetic construct
  misc_feature 1..120: note = Artificially Synthesized Probe
  source 1..120: mol_type = other DNA
atatttgtgttttatacatccttgggcttctcatagtttaaggtcctaactggagttcagtctttctcagagccgtctcatggtatcctcactgatgaatgaatgctgaatagaaagagc

SEQ ID NO: 19700 - DNA, 120 bp, synthetic construct
  misc_feature 1..120: note = Artificially Synthesized Probe
  source 1..120: mol_type = other DNA
agagatcccagcctgagcacaccatcacacttcccatccgatagaaccagcattgttaactgtaccacatctctattctaaatttaggcatctttttttttttccaggcaaagattacta

SEQ ID NO: 19701 - DNA, 120 bp, synthetic construct
  misc_feature 1..120: note = Artificially Synthesized Probe
  source 1..120: mol_type = other DNA
tcacttcagcagcctgttcaaataaacagggataatagttgagtggtcctcccaactaatcagtacatgaaaggaaacatctgcctgggcttaattgctgttgtttttggttacactttt

SEQ ID NO: 19702 - DNA, 120 bp, synthetic construct
  misc_feature 1..120: note = Artificially Synthesized Probe
  source 1..120: mol_type = other DNA
agggctccttccacccctttccccactatcagatgtaaaaattcatgcttactcatgacagaggccacacataggttatattccataatgaataccttaatagaaaaatgggcagagaac

SEQ ID NO: 19703 - DNA, 120 bp, synthetic construct
  misc_feature 1..120: note = Artificially Synthesized Probe
  source 1..120: mol_type = other DNA
ctttccctctcaatgacccatgctgccaatcagttttagctctcttaggtttggcatacaacacttagtatagaaggtgtgacaatttccttcctgcttcctcctttctttccttttctt

SEQ ID NO: 19704 - DNA, 120 bp, synthetic construct
  misc_feature 1..120: note = Artificially Synthesized Probe
  source 1..120: mol_type = other DNA
tcgtcttttcaaaacggaatgagtcaaaaaatacttcctcaaaataagttttctcctcagctatgcaagctcaccctggctttatttggggcataattactagagaccagccaaagtcta

SEQ ID NO: 19705 - DNA, 120 bp, synthetic construct
  misc_feature 1..120: note = Artificially Synthesized Probe
  source 1..120: mol_type = other DNA
agatgttgctgatccagaagcctaggtgtggccattttgtcatggcaactgttaagcaagtaaatagggtagagtagtcatctgacttatctccagagatgttcagtttgttttgaattt

SEQ ID NO: 19706 - DNA, 120 bp, synthetic construct
  misc_feature 1..120: note = Artificially Synthesized Probe
  source 1..120: mol_type = other DNA
aatgtgatgttttcctctagtaggcaatggaaagagggaaaaaaaagagtagaggcactaggaagtttcagagaagtcaaaacattctggtccaaatggagttttaagcagagggagttt

SEQ ID NO: 19707 - DNA, 120 bp, synthetic construct
  misc_feature 1..120: note = Artificially Synthesized Probe
  source 1..120: mol_type = other DNA
gcagttcagagaatagaattatttcttctggagattaagataggtttaggactggtctgaataaggcaccatgggattacggtgactaactgtccctctttgcctagtactgaagagttt

SEQ ID NO: 19708 - DNA, 120 bp, synthetic construct
  misc_feature 1..120: note = Artificially Synthesized Probe
  source 1..120: mol_type = other DNA
taatagtctctcaactctgcttgcctatttgactctggcactaggcactagggagacaagaacaaataagagatgtttctgacctcaaggcgtttagttttaatagggagagacagaaaa

SEQ ID NO: 19709 - DNA, 120 bp, synthetic construct
  misc_feature 1..120: note = Artificially Synthesized Probe
  source 1..120: mol_type = other DNA
tgtatcccctagtccatggaccctctctaacagaataaacctctcatctagtcttccactacaatgggagggggatcttggggcctcactgttctcagacttcctttttttttttttttt

SEQ ID NO: 19710 - DNA, 120 bp, synthetic construct
  misc_feature 1..120: note = Artificially Synthesized Probe
  source 1..120: mol_type = other DNA
aattgttttggcatcacttatttaagcttcagcttctaggtacctcagttttctcttgagctggaaggcactaataaagcttctccagtatttacccagaagagagattcagtgtcattc

SEQ ID NO: 19711 - DNA, 120 bp, synthetic construct
  misc_feature 1..120: note = Artificially Synthesized Probe
  source 1..120: mol_type = other DNA
tactttgattttgtcagtgtcccagtattctttattctttcatctgcctctagctgatcgtaggggctagattagtatacccacaaagtctttctaagctagattttctcagcgtcagca

SEQ ID NO: 19712 - DNA, 120 bp, synthetic construct
  misc_feature 1..120: note = Artificially Synthesized Probe
  source 1..120: mol_type = other DNA
taaggatgaaatgagaaaatgtgttgtgtggtacttggcataaagccaggaatatactaagtgctcagtaaatgataactggcattgcagttgctgtgagagggtgtttgatctggataa

SEQ ID NO: 19713 - DNA, 120 bp, synthetic construct
  misc_feature 1..120: note = Artificially Synthesized Probe
  source 1..120: mol_type = other DNA
aatactaggtattggaagaactgggcacgtgggatccaagtttctagcctctagcagaaaaccaagaaacagcagtcacctttcccaatccattttccaaatagagctcaatatcctatt

SEQ ID NO: 19714 - DNA, 120 bp, synthetic construct
  misc_feature 1..120: note = Artificially Synthesized Probe
  source 1..120: mol_type = other DNA
atatttttacagattaacagagagtttagatgacttagtcagagtcagttaacaaatgacagaggcaaaatttgcacctaggcctgatgactcaacccaggctcataaccactacactcg

SEQ ID NO: 19715 - DNA, 120 bp, synthetic construct
  misc_feature 1..120: note = Artificially Synthesized Probe
  source 1..120: mol_type = other DNA
aattccctggtattaaaatctggcctcacgtaagagttgcttggggaacttctctaaaatacagattcctgtctccctttagccgaggatttttgattcagtagatttcagccacttaat

SEQ ID NO: 19716 - DNA, 120 bp, synthetic construct
  misc_feature 1..120: note = Artificially Synthesized Probe
  source 1..120: mol_type = other DNA
taccttattttcatcatttaaaaaaaaaaaaacgtctgctaagagcctaatttcacaggatgtggtgtgacatgccattgaaaaagaggctgccttagtacttggcagggtgtgggtcta

SEQ ID NO: 19717 - DNA, 120 bp, synthetic construct
  misc_feature 1..120: note = Artificially Synthesized Probe
  source 1..120: mol_type = other DNA
tttgtaacctatgtcaagatatagaataaatattttgataagagatatctttccattgcctcagaaagtttctcttgtctcttcccagccaatcccccaccccaaggcaaccactgttat

SEQ ID NO: 19718 - DNA, 120 bp, synthetic construct
  misc_feature 1..120: note = Artificially Synthesized Probe
  source 1..120: mol_type = other DNA
agtcatcatacatctggatgggctgtcattaacttcttacaaaaatttgatttcccctgagagatttttcatcaaacatttatataacccagaaatggccaggggagtccagcgtggcca

SEQ ID NO: 19719 - DNA, 120 bp, synthetic construct
  misc_feature 1..120: note = Artificially Synthesized Probe
  source 1..120: mol_type = other DNA
ccaaatatctgtaaatatattgcctgttagcctacaacaaactgtgtggctggtgttatcctcatttgaggcccagaaggattaagtagcttgcttatggccatatagctgatttgaaga

SEQ ID NO: 19720 - DNA, 120 bp, synthetic construct
  misc_feature 1..120: note = Artificially Synthesized Probe
  source 1..120: mol_type = other DNA
atcatgatgagaggaaaaggctgtggggagagttaatttgatgcttgcttgtgcaatgaaatggcaatcaggcagatggccttactctatgcatagattcttctttgaggtttcttctca

SEQ ID NO: 19721 - DNA, 120 bp, synthetic construct
  misc_feature 1..120: note = Artificially Synthesized Probe
  source 1..120: mol_type = other DNA
ccctgaaatggcctggcttggttgctatatagtgatttaaccacagtaaccctcagtgagtggcaggttgtatttttattgttgaattttgttataatgacaaccccagataaacctgaa

SEQ ID NO: 19722 - DNA, 120 bp, synthetic construct
  misc_feature 1..120: note = Artificially Synthesized Probe
  source 1..120: mol_type = other DNA
gggaagcgagggctaggcagggaatgctgtgatcttttggcatttggcagagttctgaataatcttattctcctgaaattagaagactgtgatgaagtgtatagtttgggtattgaataa

SEQ ID NO: 19723 - DNA, 120 bp, synthetic construct
  misc_feature 1..120: note = Artificially Synthesized Probe
  source 1..120: mol_type = other DNA
tagaaatgtggagttggtttccttcctttccttcctggggaaaatcaaaccatttacagttcatttccattgctgtggcttaggaaatgtcagtgtctgaacagatggagaagtgagatg

SEQ ID NO: 19724 - DNA, 120 bp, synthetic construct
  misc_feature 1..120: note = Artificially Synthesized Probe
  source 1..120: mol_type = other DNA
ccatttgaagaaaggttttttcttttcaagcaagggaatggtccgtgggcatgtgaatgtgcccactctttgctgaggaggaaggagaccatttctatccagatgtctctctgcagacaa

SEQ ID NO: 19725 - DNA, 120 bp, synthetic construct
  misc_feature 1..120: note = Artificially Synthesized Probe
  source 1..120: mol_type = other DNA
tttcatgtactgtttggtcctggaagaggctcacacaagttggctttgggttttgcttcaacatagaaaccacgagccttataccttgaatatgggtagtttcattgccagtaatgggaa

SEQ ID NO: 19726 - DNA, 120 bp, synthetic construct
  misc_feature 1..120: note = Artificially Synthesized Probe
  source 1..120: mol_type = other DNA
agcaaacaagttcatcagtttgttgaaggtcatgaaacagaacctggggctttgcagtactaggcccatcacacattttaattagctgtttgtatgagggggttggtttagatttatttt

SEQ ID NO: 19727 - DNA, 120 bp, synthetic construct
  misc_feature 1..120: note = Artificially Synthesized Probe
  source 1..120: mol_type = other DNA
tttttttttttttaagtattgttaacaatcctttggaagtcactactggtctttgtgtgctgctttttaataattgagttattttgagcttgccaagtaggatctattgcctggactaaa

SEQ ID NO: 19728 - DNA, 120 bp, synthetic construct
  misc_feature 1..120: note = Artificially Synthesized Probe
  source 1..120: mol_type = other DNA
gatcattttttgaggatttactattgccagacactgtgctacaagctgggaatgctgacagtataagataaagagggaaatgatgggggatgggtcatgtaaagggagaactttcatttt

SEQ ID NO: 19729 - DNA, 120 bp, synthetic construct
  misc_feature 1..120: note = Artificially Synthesized Probe
  source 1..120: mol_type = other DNA
gtgactggtacttgaagtgcatcagatgattaatttcatgataagagggctttttggggtggtgaaatagacatttatggaaaatgggatacccacattaagcagggtgactacctgttt

SEQ ID NO: 19730 - DNA, 120 bp, synthetic construct
  misc_feature 1..120: note = Artificially Synthesized Probe
  source 1..120: mol_type = other DNA
agggctcaggaacagctcagcaatttttgcctcttatttgccctcagtggtgacatgtttcctgatcttcttggctttgtgtttatcgcttatcttttataacacatagttcatcaatgt

SEQ ID NO: 19731 - DNA, 120 bp, synthetic construct
  misc_feature 1..120: note = Artificially Synthesized Probe
  source 1..120: mol_type = other DNA
ccagcctaagtatttccttttatagggagttggagaattaggttcttttatgggggatagaacagtgaaggggttaaggatcatggccgataaagtaacaaagctaaacagtctgaattc

SEQ ID NO: 19732 - DNA, 120 bp, synthetic construct
  misc_feature 1..120: note = Artificially Synthesized Probe
  source 1..120: mol_type = other DNA
gggggttaaatgatttgcccaaggttaggagagttagtaagtggtaggactagaatattccaactcatgctttttcattttaatgcaactaaaacgtctatcaaggagggaatgtgcaga

SEQ ID NO: 19733 - DNA, 120 bp, synthetic construct
  misc_feature 1..120: note = Artificially Synthesized Probe
  source 1..120: mol_type = other DNA
atggaaaactcccaactgtggtttccacgccagtattagggatacagttcataccttgacacagttatgatccttcaggatttaatgaaacccgaagaggtaatccatcatacatcttta

SEQ ID NO: 19734 - DNA, 120 bp, synthetic construct
  misc_feature 1..120: note = Artificially Synthesized Probe
  source 1..120: mol_type = other DNA
tgggtgaacatgggagggctagggactgcatcccagagaaagcagatttttcttttgtttttaaacaagagagagaatcagatgcaagctcttagttaaaagttcacactgtacagaaaa

SEQ ID NO: 19735 - DNA, 120 bp, synthetic construct
  misc_feature 1..120: note = Artificially Synthesized Probe
  source 1..120: mol_type = other DNA
agcattaatactacaaaatttagttctgcttctctccttctcctgctctgtaccatgatggatggggcattttgtcgtaatggttaagagcacatgctgtattgtcaaactgcctgtatt

SEQ ID NO: 19736 - DNA, 120 bp, synthetic construct
  misc_feature 1..120: note = Artificially Synthesized Probe
  source 1..120: mol_type = other DNA
attgggtcagaaaccaaatgacctctatataggggaattgtccagctgagcatctgtgatttttttcttcttcttcaggagtctgattgctctttttcctcctcctctcttacagaaaat

SEQ ID NO: 19737 - DNA, 120 bp, synthetic construct
  misc_feature 1..120: note = Artificially Synthesized Probe
  source 1..120: mol_type = other DNA
ctgtacttacacagagatctgacattttaaaataaattcttgagcactctttagacaaactgcaaagtttaggaaagtgtgcaatactccttggctcattggccccaggaattggagcct

SEQ ID NO: 19738 - DNA, 120 bp, synthetic construct
  misc_feature 1..120: note = Artificially Synthesized Probe
  source 1..120: mol_type = other DNA
tgcattcatatgcgctcacatttgtgtgtgtgagtgaatgggtttactcacacatttatgcaccaaatgtgctactatggagggatgaaggctgatcattagtgctgcaaattgtcttaa

SEQ ID NO: 19739 - DNA, 120 bp, synthetic construct
  misc_feature 1..120: note = Artificially Synthesized Probe
  source 1..120: mol_type = other DNA
gtgtgtatactcaggagcaagtaaacttggccttccaccccaccacacacacatccaacataagagaagctgaatttcatctctgggagggcttctaataatttattctattaagtatga

SEQ ID NO: 19740 - DNA, 120 bp, synthetic construct
  misc_feature 1..120: note = Artificially Synthesized Probe
  source 1..120: mol_type = other DNA
taattagtagtgactgttgctggataatgaaatattacattgcattggctcgccaaagagtattggtagaaatatttgcctgatgtacaagtatgcacccctcccaatctttccccacct

SEQ ID NO: 19741 - DNA, 120 bp, synthetic construct
  misc_feature 1..120: note = Artificially Synthesized Probe
  source 1..120: mol_type = other DNA
gatgttctacactctaaacccagaaaaattgttccctgtaaagatagcgatctttaaggatttcctagagaaacaaaacaaaaagcatcctttggtgtttcccagtgtctcctagcaggc

SEQ ID NO: 19742 - DNA, 120 bp, synthetic construct
  misc_feature 1..120: note = Artificially Synthesized Probe
  source 1..120: mol_type = other DNA
aagtattttttgcagtagcaaaattgacttcctaattatactttatggcaaatactgaaatgattttatgtcccctaagctcataccagctatgcagtagacagcagggagggcgggtgg

SEQ ID NO: 19743 - DNA, 120 bp, synthetic construct
  misc_feature 1..120: note = Artificially Synthesized Probe
  source 1..120: mol_type = other DNA
tcattctgctgccccagtttctctctagcagttcatatctactagtggatcagcaagaagttttcctaagatggtcaggaagataaaatagatagtaagttacttggaaggtgagtaatc

SEQ ID NO: 19744 - DNA, 120 bp, synthetic construct
  misc_feature 1..120: note = Artificially Synthesized Probe
  source 1..120: mol_type = other DNA
cctttctgattgttttctcctgcaaattactggaccactgctttactatgttttccaacttaggccctacctttctccctctacttttggtttaaagttcccttaatctgattggatgag

SEQ ID NO: 19745 - DNA, 120 bp, synthetic construct
  misc_feature 1..120: note = Artificially Synthesized Probe
  source 1..120: mol_type = other DNA
tgcaggttaatatttttcttgccctgtttcctgccaaccctttgtacttgcctttaactaccactgatattccatttcctgcaggccaaattttgtactcacacaatttgttgaagccag

SEQ ID NO: 19746 - DNA, 120 bp, synthetic construct
  misc_feature 1..120: note = Artificially Synthesized Probe
  source 1..120: mol_type = other DNA
aacctcacttcttgacccctcactccccgctacccttcccagtctccagaaaccgtcattctactctctgccttcatgcaatcaaattttttagcttatagatacaagtgagaatatgca

SEQ ID NO: 19747 - DNA, 120 bp, synthetic construct
  misc_feature 1..120: note = Artificially Synthesized Probe
  source 1..120: mol_type = other DNA
acagaagtctgtaaacataaaaagactccccccagattgagcttttctggcattttcatagtggaacccagtttcttccttagaatagggaagagaagacaaagattcttcccctgagat

SEQ ID NO: 19748 - DNA, 120 bp, synthetic construct
  misc_feature 1..120: note = Artificially Synthesized Probe
  source 1..120: mol_type = other DNA
gtctctgtcctgaacatctaaagccctttctagttaagttcggtcccctctccctgatctctttcttccacacagctgaattattgtacattcagctgcattataaaaccctactggttt

SEQ ID NO: 19749 - DNA, 120 bp, synthetic construct
  misc_feature 1..120: note = Artificially Synthesized Probe
  source 1..120: mol_type = other DNA
gcgaccgcacctggcctcactttttcattttaatgagtataataataataatatgtactccataggattgttaccagcactagtccatctaaaggacttagtacatggcctcacacctct

SEQ ID NO: 19750 - DNA, 120 bp, synthetic construct
  misc_feature 1..120: note = Artificially Synthesized Probe
  source 1..120: mol_type = other DNA
gcagacatgacagaatattaattaattaggtggtggagaaggtggtgagaaactggtttggggcagaagatgatcagttttgtttaggacatgctaactttaaggcatctgtgtagcatt

SEQ ID NO: 19751 - DNA, 120 bp, synthetic construct
  misc_feature 1..120: note = Artificially Synthesized Probe
  source 1..120: mol_type = other DNA
aacaccattcctcaccagctactggtctcattggacagaatttagcgatcgaaataattgccagagaattgatttcccagggattagagtgtttataaaggacagaactagtgctatgaa

SEQ ID NO: 19752 - DNA, 120 bp, synthetic construct
  misc_feature 1..120: note = Artificially Synthesized Probe
  source 1..120: mol_type = other DNA
ccttcataaaccttacattccactgaaaggtggataagcaaatgaccaattgatcagccagtaaatacagtatgtcaggtattggtgaatgtcatgaagaaaagtaaagcagggtgaggg

SEQ ID NO: 19753 - DNA, 120 bp, synthetic construct
  misc_feature 1..120: note = Artificially Synthesized Probe
  source 1..120: mol_type = other DNA
ctgactgggagctgtggctctttgttgccgccaagcattataagagaatatcgtactatattttgctagcacaagaaaagatcaacattggaagtatttctcctgaatgcatatcatttt

SEQ ID NO: 19754 - DNA, 120 bp, synthetic construct
  misc_feature 1..120: note = Artificially Synthesized Probe
  source 1..120: mol_type = other DNA
aataggggcttaaggtgctcatgaactccctaaaaaaccatagtaaaaatttttgtgtataggcatctaatgaggatagagctcataacctgtgtcagtcttgaaagagtctgtggccca

SEQ ID NO: 19755 - DNA, 120 bp, synthetic construct
  misc_feature 1..120: note = Artificially Synthesized Probe
  source 1..120: mol_type = other DNA
gaatttgtgcaatggcttcaccaactagaacatagtgagtagcctggtttccgagatgacatttgcttataccatgttgtgacatgtggctgtttctctcaaagcacttgttgtttacat

SEQ ID NO: 19756 - DNA, 120 bp, synthetic construct
  misc_feature 1..120: note = Artificially Synthesized Probe
  source 1..120: mol_type = other DNA
tataacattcatgcatgtttgtctttagagtaaagctgtagtcaggaaccagtgcctagcacaatgtctggcaatactatctgttgactgatcacttcatagcaagcttgttcaacctgt

SEQ ID NO: 19757 - DNA, 120 bp, synthetic construct
  misc_feature 1..120: note = Artificially Synthesized Probe
  source 1..120: mol_type = other DNA
cttaaatacatgctggctgggggagacagatattcaactaagcttggcactatgcttgtgaatttgctttttcttcttcttgatcacttttctgtgtatttccaggactacagcatgaag

SEQ ID NO: 19758 - DNA, 120 bp, synthetic construct
  misc_feature 1..120: note = Artificially Synthesized Probe
  source 1..120: mol_type = other DNA
tcagtaagtaccattctggcttcagattggcttctgggctacagcaccggtagcaagagagaaaaagtttccacagggtctgtgtgttctcataagcttttcaatgaagtttttcttttc

SEQ ID NO: 19759 - DNA, 120 bp, synthetic construct
  misc_feature 1..120: note = Artificially Synthesized Probe
  source 1..120: mol_type = other DNA
gcctcttactctaaaatttgggtcttgaaaagctattcctagccatttggtttagcttgtggtactggaacaccctctcatttgtttgccagggaaaacaatcaatggaaacttggatta

SEQ ID NO: 19760 - DNA, 120 bp, synthetic construct
  misc_feature 1..120: note = Artificially Synthesized Probe
  source 1..120: mol_type = other DNA
tagttcagtttaatattaataatgtgtaataacgagtttggatttggatttggcacagttccctgtgcccaagaagtatacaccttacatccggcaatggtaaatgtctggagcccagca

SEQ ID NO: 19761 - DNA, 120 bp, synthetic construct
  misc_feature 1..120: note = Artificially Synthesized Probe
  source 1..120: mol_type = other DNA
cgcacccggcatgttactatctgatttgtgtattttatttttttaaaaactgccaactgctttgtggagaagttactggaaagggtcatgaagagaaacagggagaccctatcccaaggt

SEQ ID NO: 19762 - DNA, 120 bp, synthetic construct
  misc_feature 1..120: note = Artificially Synthesized Probe
  source 1..120: mol_type = other DNA
cccccaatcctgaggctgaattcagttgctatttatcatcactcttgttttgtggttttcatagagaacaaaaatgtttctctggatccatgaatctatcagagtaggggaaacaaaagg

SEQ ID NO: 19763 - DNA, 120 bp, synthetic construct
  misc_feature 1..120: note = Artificially Synthesized Probe
  source 1..120: mol_type = other DNA
tgctgtgagtcctggatgtatgtgtactttatttctggctactgtttgttcttggattggacacattgtcaatctcaaggaaccaaaaaagctaatatctcagtttctgtgggtctggaa

SEQ ID NO: 19764 - DNA, 120 bp, synthetic construct
  misc_feature 1..120: note = Artificially Synthesized Probe
  source 1..120: mol_type = other DNA
atttatatgcgcacatatgtgaatttttctggggagagaatccctagtttttgtcaagttattgaaggaacttgtgtcccctaaatagttaagaaccactgctttaggacaggcgcagta

SEQ ID NO: 19765 - DNA, 120 bp, synthetic construct
  misc_feature 1..120: note = Artificially Synthesized Probe
  source 1..120: mol_type = other DNA
gaagtagacttagaaacttcccctagtcttttctaaatctctgctctctttgaactcaggatccggggaaggattatacacttttaagaactcctgtgaagcaatccaatgagatttgta

SEQ ID NO: 19766 - DNA, 120 bp, synthetic construct
  misc_feature 1..120: note = Artificially Synthesized Probe
  source 1..120: mol_type = other DNA
taataagtctagaggctagaaaggaatatccctaataatttgattattttgttatgcaagaaggtacacaatgcacagtgcctgtgcctctgaccatatctttaccagggcagcctgagg

SEQ ID NO: 19767 - DNA, 120 bp, synthetic construct
  misc_feature 1..120: note = Artificially Synthesized Probe
  source 1..120: mol_type = other DNA
ggccaggttttccatgacctagcttcggaacagagatctaaaaggaatccctgggatatatgtttgctagacccctctgtttgacaaagaacaaatcactatttctattttatggatgaa

SEQ ID NO: 19768 - DNA, 120 bp, synthetic construct
  misc_feature 1..120: note = Artificially Synthesized Probe
  source 1..120: mol_type = other DNA
ccttcctccagtttcctccaagatagtctcccaacctacccacctgtttcttgtgcactcaacatttattagcagcctctggaaaaaccacaagattagtcagggaacattactaccgca

SEQ ID NO: 19769 - DNA, 120 bp, synthetic construct
  misc_feature 1..120: note = Artificially Synthesized Probe
  source 1..120: mol_type = other DNA
catcagatggtttttagccctagaaaacagtgagaaattgtgcctacattttttgacaaagaggaatctccgtttatattcttctagaatgttctctggagcctgggaaacctccttgga

SEQ ID NO: 19770 - DNA, 120 bp, synthetic construct
  misc_feature 1..120: note = Artificially Synthesized Probe
  source 1..120: mol_type = other DNA
ctatgactcaccttccactttttcaccagttcacagtctgaactgcaaagcaacctagaggcatcaagcaaaatgagaaagaaggaaagcaagtactatttattaaacacccactctgtg

SEQ ID NO: 19771 - DNA, 120 bp, synthetic construct
  misc_feature 1..120: note = Artificially Synthesized Probe
  source 1..120: mol_type = other DNA
tctcaatttcattcccttccttccttggagaggtagcccaccttctcaaatagaatcgctcgtattaaaccagaggtgaagaactaggcctttcatagcccttcaaccttcttgctccac

SEQ ID NO: 19772 - DNA, 120 bp, synthetic construct
  misc_feature 1..120: note = Artificially Synthesized Probe
  source 1..120: mol_type = other DNA
ctttatatatgttatctcttaatctgtagtgaaaaagatatggccgctattttacagttgagaaaatgcaggtcagggaggtcgagtaacgtacccgaggctgtagagaactaactgagg

SEQ ID NO: 19773 - DNA, 120 bp, synthetic construct
  misc_feature 1..120: note = Artificially Synthesized Probe
  source 1..120: mol_type = other DNA
aaaaaaaaaaaaaatgggatgcttgagttgtgttttgatgtgcttcatcaggcagataagagagaagaagattcctggtggagggaacagtgtgagcaaaggcaggtaaaaggtgatacc

SEQ ID NO: 19774 - DNA, 120 bp, synthetic construct
  misc_feature 1..120: note = Artificially Synthesized Probe
  source 1..120: mol_type = other DNA
ttttttttaaacaactatgctcaccccaacctgttgagccactcttccacttgcaaattaaaatgactggttttctaggagaaatccggcttaagcagccttatggaagtgacctagttc

SEQ ID NO: 19775 - DNA, 120 bp, synthetic construct
  misc_feature 1..120: note = Artificially Synthesized Probe
  source 1..120: mol_type = other DNA
gtcatgtagccgatatttatcttgcaaacatcaacaagtaagctctgcttttcattttctgctcccctgaatgacttgcaacacccagcctcaccctctggcctaacccccatctccatt

SEQ ID NO: 19776 - DNA, 120 bp, synthetic construct
  misc_feature 1..120: note = Artificially Synthesized Probe
  source 1..120: mol_type = other DNA
gtacagtttttattcccctctggcttttgaggaatgaaatgatttgcactttgaaaacctgttaaccgtagcctctggacactgagactggaaggagaataaaggatgcttgttgttttt

SEQ ID NO: 19777 - DNA, 120 bp, synthetic construct
  misc_feature 1..120: note = Artificially Synthesized Probe
  source 1..120: mol_type = other DNA
tgtagagagtaataactgaaatggtaaacagaagaagaaaaaaaaagagtatctgtagacagttaaggtggttcccttgaactccttgtttgctggtgtcaggagtcttgggatggggtt

SEQ ID NO: 19778 - DNA, 120 bp, synthetic construct
  misc_feature 1..120: note = Artificially Synthesized Probe
  source 1..120: mol_type = other DNA
agcccccatctctcttagattcaagatcagagctgttcagcagccatccaaatcagaagtttcattgcctcttagattagaccttttcagatctgattccaagacaaaatgaaattatcc

SEQ ID NO: 19779 - DNA, 120 bp, synthetic construct
  misc_feature 1..120: note = Artificially Synthesized Probe
  source 1..120: mol_type = other DNA
ctgtgggctcctggacagacagcatgagtctacattcatcactaccacttagtgccacccacctaattatgacaggacttgaaacagaatgattattttgtatgtgatatactgagtata

SEQ ID NO: 19780 - DNA, 120 bp, synthetic construct
  misc_feature 1..120: note = Artificially Synthesized Probe
  source 1..120: mol_type = other DNA
ggagatggagttcttcctgagcattttaaaggtttgagaatgtcatagggatgagtgaaactgaatcactgtgaacagaaagcatgcatcggtctgtacgacaaagaaaccttaaccaaa

SEQ ID NO: 19781 - DNA, 120 bp, synthetic construct
  misc_feature 1..120: note = Artificially Synthesized Probe
  source 1..120: mol_type = other DNA
atccccatgtactcatcaccaaactcctggccattcttactttgtccgtgtttctcttccccactagattatatgtcacttcgtcgataagtatttcaatatctatctctaaaacctagg

SEQ ID NO: 19782 - DNA, 120 bp, synthetic construct
  misc_feature 1..120: note = Artificially Synthesized Probe
  source 1..120: mol_type = other DNA
cggtgatgccttgaccagatggttggctactgccatccagctttcagtggcatcttgttttgggaactgattatagagaatcatatatagtccagtcttcattttacatacacacacata

SEQ ID NO: 19783 - DNA, 120 bp, synthetic construct
  misc_feature 1..120: note = Artificially Synthesized Probe
  source 1..120: mol_type = other DNA
aagaaaattaaaatttgaatgctgaatattctggctctactctggccttttttctggttcccttccaaaatgcacaaatcatacccttgtctgctccaattcagtctccaaacctggtgc

SEQ ID NO: 19784 - DNA, 120 bp, synthetic construct
  misc_feature 1..120: note = Artificially Synthesized Probe
  source 1..120: mol_type = other DNA
ggtgcagatctacttcccatgcagaagagaagtcacatcttccagggaatcgcaatgttgtggcgtctgacttgtatgtcacatttgtgtaaaatggtatattctttaaaatagtgttga

SEQ ID NO: 19785 - DNA, 120 bp, synthetic construct
  misc_feature 1..120: note = Artificially Synthesized Probe
  source 1..120: mol_type = other DNA
tgggctcctctggacaccttaggccaggctctcccgccacaggcccggcctagcgccgcgggccattacttgggaccttgaagatctgctaagagtagttgttactattccctttttttt

SEQ ID NO: 19786 - DNA, 120 bp, synthetic construct
  misc_feature 1..120: note = Artificially Synthesized Probe
  source 1..120: mol_type = other DNA
aattactgctgtggatctcaggttgactttttaatttcccatctttaaaattgaactataccagaaggctggtacttgaatctttttttggagaactgtacagaggtgaagctcccttcc

SEQ ID NO: 19787 - DNA, 120 bp, synthetic construct
  misc_feature 1..120: note = Artificially Synthesized Probe
  source 1..120: mol_type = other DNA
acatggagaaggggtacaaaaaattaataattaaatacgagttccagaaggggataatacagctgactgcagaagagcaataatcaaatagtagaagaaaatttactacgttggtggaaa

SEQ ID NO: 19788 - DNA, 120 bp, synthetic construct
  misc_feature 1..120: note = Artificially Synthesized Probe
  source 1..120: mol_type = other DNA
ctcttcattggagggctgagctttgaaacaaccaatgagagcctgaggagccattctgagcaatggggaacactcgcggactgtgtggtaatgagagatccaaacaccaagcactccagg

SEQ ID NO: 19789 - DNA, 120 bp, synthetic construct
  misc_feature 1..120: note = Artificially Synthesized Probe
  source 1..120: mol_type = other DNA
ttcatgggtcaaaaaagaaaacaagactaaaatcttggattatttagaaattataataatgaaaatattgcataatggaatccatgatattaaagcacttctcagaggaaaaatcctata

SEQ ID NO: 19790 - DNA, 120 bp, synthetic construct
  misc_feature 1..120: note = Artificially Synthesized Probe
  source 1..120: mol_type = other DNA
tcaaatctgattttcctgtcaaatacttatttcttctcctgttttaaatctcaacaaattgtaccaccatttaagtcaaaacccaggagttactctttttaaagaaaaatttttggctgg

SEQ ID NO: 19791 - DNA, 120 bp, synthetic construct
  misc_feature 1..120: note = Artificially Synthesized Probe
  source 1..120: mol_type = other DNA
tacccagaatttttttaactgaaactgagaaagaaaattccccttcagtgtggaagccataaaatgtaaaacatacgagctgtcagcagccacgtgtcagttggttccatatggaaccaa

SEQ ID NO: 19792 - DNA, 120 bp, synthetic construct
  misc_feature 1..120: note = Artificially Synthesized Probe
  source 1..120: mol_type = other DNA
ctgtcacccaggctggagtgcagtggcatgatcttggctcactgcaaactccgcctcccgggttcatgccattctcctgcctcagcctcccgagtagctgggactacaggtgcccgccac

SEQ ID NO: 19793 - DNA, 120 bp, synthetic construct
  misc_feature 1..120: note = Artificially Synthesized Probe
  source 1..120: mol_type = other DNA
gtctggccaatggaacaaaatacaatagccccaaccattcatagaaatttaatttttgataaatagagcatttcagaggaaaaggattctgtcagtaaatggtgtgttaagaaggctggg

SEQ ID NO: 19794 - DNA, 120 bp, synthetic construct
  misc_feature 1..120: note = Artificially Synthesized Probe
  source 1..120: mol_type = other DNA
atataggacccttctggagatcagtttggcagtgggtatcagatttcttagaaatatgtatgccttttgatacaaaataccatttggtgaaatctaccctaaggactgacggaggtacac

SEQ ID NO: 19795 - DNA, 120 bp, synthetic construct
  misc_feature 1..120: note = Artificially Synthesized Probe
  source 1..120: mol_type = other DNA
tcataatactgtctgacaaaaaaagaagttaccaaacctaccaaagagttttgtctgcatatgtagttgggcctggaaaggtaaaccactggatagcaactgtctttaggtaggaaggtt

SEQ ID NO: 19796 - DNA, 120 bp, synthetic construct
  misc_feature 1..120: note = Artificially Synthesized Probe
  source 1..120: mol_type = other DNA
aaacaaaaaaaaagaaaatgcagagggaaataaagaaaatgaacatagttatttaaatggaatagtctagctattttttctttatcaaataatttgttaaatttttattaaaaattaaaa

SEQ ID NO: 19797 - DNA, 120 bp, synthetic construct
  misc_feature 1..120: note = Artificially Synthesized Probe
  source 1..120: mol_type = other DNA
caacattcgagattctatccacctcacaccagtgctaacaagctccattttgaatcaactaacagggcgcaatcttttcttcaaatgtgaactcttccagaaaacaggatcttttaaggt

SEQ ID NO: 19798 - DNA, 120 bp, synthetic construct
  misc_feature 1..120: note = Artificially Synthesized Probe
  source 1..120: mol_type = other DNA
gcaggcaaattggaaagtgttatcactctgtatatgacccaagtttaagcattcactgtatcaacttgctacacatggatacattatcaatataaaagatctaagcctgggccacacggc

SEQ ID NO: 19799 - DNA, 120 bp, synthetic construct
  misc_feature 1..120: note = Artificially Synthesized Probe
  source 1..120: mol_type = other DNA
ctagaaaagctccttgctttccaaaacaatgttttaatcaaatatgtgaattcaccatccctctttttcagattcgtggtgctctcaatgccgtcagaagcttggttcctgatgctttag

SEQ ID NO: 19800 - DNA, 120 bp, synthetic construct
  misc_feature 1..120: note = Artificially Synthesized Probe
  source 1..120: mol_type = other DNA
taagtttctattctaaattctcctgactttttcctctcgttttcctctcccaggaattcctgcttatattgtggtgccccagacagctccagactgtaaaaaacttgcaatacaagccta

SEQ ID NO: 19801 - DNA, 120 bp, synthetic construct
  misc_feature 1..120: note = Artificially Synthesized Probe
  source 1..120: mol_type = other DNA
ccaaatctcagtctgctttcaacatatttccataacccaactgcttctgtgtctaccgttagcactctgattcaaaccaacatcaattctcacctatattcaattcagtagccaaactgg

SEQ ID NO: 19802 - DNA, 120 bp, synthetic construct
  misc_feature 1..120: note = Artificially Synthesized Probe
  source 1..120: mol_type = other DNA
taacctttttagctgttcctcagaaaggccaagcactcctactttgtagtctttgcactgttaccccctctctggaatattctagacatccacagcacttgttcagatcttttaaaatgt

SEQ ID NO: 19803 - DNA, 120 bp, synthetic construct
  misc_feature 1..120: note = Artificially Synthesized Probe
  source 1..120: mol_type = other DNA
tgttctgtatacacgtgctcaacattctgcacacattaccattccttccccttattcctttgggacttgagatgaaggcccatctctgcctcactactctatttactattattattattt

SEQ ID NO: 19804 - DNA, 120 bp, synthetic construct
  misc_feature 1..120: note = Artificially Synthesized Probe
  source 1..120: mol_type = other DNA
tcagatgtgatccaggcaatggaaggctagtatcagacatataatttatttataaagtgcttgaagatattttcattacatccacaaaagggaaggctcttacttgggcagaaatgtatt

SEQ ID NO: 19805 - DNA, 120 bp, synthetic construct
  misc_feature 1..120: note = Artificially Synthesized Probe
  source 1..120: mol_type = other DNA
gtaaagaacatttgtattgtgctcagtggtggaaatgtagacttaacctcctccataacttgggtgaagcaggctgaaaggccagcttcttatcagtctgtttctgtttaatttacagaa

SEQ ID NO: 19806 - DNA, 120 bp, synthetic construct
  misc_feature 1..120: note = Artificially Synthesized Probe
  source 1..120: mol_type = other DNA
acctctgttgaagaacatgtaacgtactactgccatcttagtaaaaattttgaaaggatgaccactcagaacaactctcttgatgaccattctgtctggatctactgacataagatggcc

SEQ ID NO: 19807 - DNA, 120 bp, synthetic construct
  misc_feature 1..120: note = Artificially Synthesized Probe
  source 1..120: mol_type = other DNA
ctcccggcctctcctccccacgacgggggccacagcggggctggctcctggagctggaggagggtgggtaaggctggggagggctcggagcctggggctgggggccggaagtggcactca

SEQ ID NO: 19808 - DNA, 120 bp, synthetic construct
  misc_feature 1..120: note = Artificially Synthesized Probe
  source 1..120: mol_type = other DNA
cttacgacagaggaaacaggtcagaacgcttgtcctgggagcacaggcctggctccggggcctttggaggggctggggcctgtagtcttagctagggtgtcccccgacgtttgcccctgc

SEQ ID NO: 19809 - DNA, 120 bp, synthetic construct
  misc_feature 1..120: note = Artificially Synthesized Probe
  source 1..120: mol_type = other DNA
gcgtaattttatgattcagaggatactgcttccaaataacggctcttgcagaattatgttccaagagtcaggtacagcaataatggtctatttgtgtcctttgctgctctgaagtctaac

SEQ ID NO: 19810 - DNA, 120 bp, synthetic construct
  misc_feature 1..120: note = Artificially Synthesized Probe
  source 1..120: mol_type = other DNA
ccctccctctctccctctctcctcccctccccctccctctccctccctctctccctctctcctccccgcctccccatccctctccctctccctcctctctctctccccctaccctgtttt

SEQ ID NO: 19811 - DNA, 120 bp, synthetic construct
  misc_feature 1..120: note = Artificially Synthesized Probe
  source 1..120: mol_type = other DNA
gccaaatgtatttcctaacattttatccatgctgtctctgtggatcctgcacatatttaaacatagcctaagcgtacctgtttgctcgttatttttatctccctgagatggatccatggg

SEQ ID NO: 19812 - DNA, 120 bp, synthetic construct
  misc_feature 1..120: note = Artificially Synthesized Probe
  source 1..120: mol_type = other DNA
actgcacccagccggagtatcatttttatgaatgatttcaaacatgcagaaaaatacaaaaacaatatacgaggtacacacgtgcccatggccttggacccacagacgtcaccattccca

SEQ ID NO: 19813 - DNA, 120 bp, synthetic construct
  misc_feature 1..120: note = Artificially Synthesized Probe
  source 1..120: mol_type = other DNA
tccttcctctcctggcttattttccaaacaatttgcttaacgtgattcccggccaagctaaacatgactaatcgtgtttacccggtgatcccgcgcctcctggcaggcggggctggggcc

SEQ ID NO: 19814 - DNA, 120 bp, synthetic construct
  misc_feature 1..120: note = Artificially Synthesized Probe
  source 1..120: mol_type = other DNA
cgggcttatgcagaccagcaagctgtgagagtgcaggcggggggtgggcggccccgtgtcacccccaggagcggaggttgcactgcggtgacccccacccatgacctgccagtcaggatg

SEQ ID NO: 19815 - DNA, 120 bp, synthetic construct
  misc_feature 1..120: note = Artificially Synthesized Probe
  source 1..120: mol_type = other DNA
tgctttggggcaggggctctggcccgggagagggaacggggacaggagcagaggacggtcatccaggcgcagcggggagctgctccccaggccacagcagacagcactgctgagaggcag

SEQ ID NO: 19816 - DNA, 120 bp, synthetic construct
  misc_feature 1..120: note = Artificially Synthesized Probe
  source 1..120: mol_type = other DNA
cacgaactgttcagaagctgccctgaggtcaccaagtgagctaggaagaggcgtgggctcgatctctgccacatccacctcgggaaaccacaaggtctcgatgggtgattttgcctaaag

SEQ ID NO: 19817 - DNA, 120 bp, synthetic construct
  misc_feature 1..120: note = Artificially Synthesized Probe
  source 1..120: mol_type = other DNA
aattcttgattttcctcggcccagtccatggcgtcactgaagtggatgttcaatgagaaaataataaggatgaatgctgcagttggagttcaagagaggaggcatttttgacgccacaga

SEQ ID NO: 19818 - DNA, 120 bp, synthetic construct
  misc_feature 1..120: note = Artificially Synthesized Probe
  source 1..120: mol_type = other DNA
ttctttctttctttctttctttctttctttctttctttctctctttctttctctctctctctctatttccttctttctttctttctctctctctctctttctttctctctctctttcttt

SEQ ID NO: 19819 - DNA, 120 bp, synthetic construct
  misc_feature 1..120: note = Artificially Synthesized Probe
  source 1..120: mol_type = other DNA
tctctcctcttttctttcccaatcaggcccttcctggtgtgcagaagggaaagctgattccacagcagctgggcctgcccgacccaggaggctacatctgtcacccctctgtctgtctct

SEQ ID NO: 19820 - DNA, 120 bp, synthetic construct
  misc_feature 1..120: note = Artificially Synthesized Probe
  source 1..120: mol_type = other DNA
aactttagggaacaacaaacctgtctgacgggtttgagattccacatgggacaggctttctcacctccgcactgacgctaggacagctgggttgaaggggcccagtgacacccctgacat

SEQ ID NO: 19821 - DNA, 120 bp, synthetic construct
  misc_feature 1..120: note = Artificially Synthesized Probe
  source 1..120: mol_type = other DNA
tgagatcaggagttcgagaccagcctcaccaacgtggtgaaaccctttctctactaaaaaaaaaaaacaaaaacaaaattagccaggcatggtggcacgcacccataatcccagctactc

SEQ ID NO: 19822 - DNA, 120 bp, synthetic construct
  misc_feature 1..120: note = Artificially Synthesized Probe
  source 1..120: mol_type = other DNA
aactgtgaggagtctgaccacctcctctgagggccagtttctgctgcgtcccacggggacttggggaaaacttggactccccagccccagccctggcatcattttttttttttttttgag

SEQ ID NO: 19823 - DNA, 120 bp, synthetic construct
  misc_feature 1..120: note = Artificially Synthesized Probe
  source 1..120: mol_type = other DNA
ataaaatgaggataatcgtggtacctcctttggaagccttttgtgagaatttggtaagttctggtatgtgttaagtgtttggagtggggcttggggtatggtgaagagtttatattaaaa

SEQ ID NO: 19824 - DNA, 120 bp, synthetic construct
  misc_feature 1..120: note = Artificially Synthesized Probe
  source 1..120: mol_type = other DNA
tcttattttttttttcttcaacagactttgcctttatggggaaaagatgatgccataagccccaaatctcatctgcccatcatcttaacagccctggcaggagtcaacacctcttcccaa

SEQ ID NO: 19825 - DNA, 120 bp, synthetic construct
  misc_feature 1..120: note = Artificially Synthesized Probe
  source 1..120: mol_type = other DNA
gagattacatcactgccctccggcctgggtgacggggtaagactctgtctcaaaaaaaaaaaaaaagggccgagtgcggtggctcacgcctgtaatcccagcactttgggaggctgaggc

SEQ ID NO: 19826 - DNA, 120 bp, synthetic construct
  misc_feature 1..120: note = Artificially Synthesized Probe
  source 1..120: mol_type = other DNA
caggccacccatcccatggaagggctggcatggaggcagcaccagtagacatcagaggatgaatgagtgggatccagtgctgctcaatgaatacatgcgggttgttttgtttttgttttt

SEQ ID NO: 19827 - DNA, 120 bp, synthetic construct
  misc_feature 1..120: note = Artificially Synthesized Probe
  source 1..120: mol_type = other DNA
gtgtgagccactacacccagcctcttttttttctttttctttttgagacagggtttcgctttgccatgcaggctggagggcagtggtgcaaacagggctcacaggcagaggctgctctgc

SEQ ID NO: 19828 - DNA, 120 bp, synthetic construct
  misc_feature 1..120: note = Artificially Synthesized Probe
  source 1..120: mol_type = other DNA
aacttcaagtgattcttgaaggagacaattatgtgggtccatggggaggagcctttgaggtggcaggagggaaccagtcctgatgagggaagattaaaggacagtggggctggggatggt

SEQ ID NO: 19829 - DNA, 120 bp, synthetic construct
  misc_feature 1..120: note = Artificially Synthesized Probe
  source 1..120: mol_type = other DNA
aaaaaaaaaggacattattagagttggaaggaaatgaccataggcccagggttccacggtccagaccaccacacacaactgatgcaggatataaccgagtcattccatcccaggtaatac

SEQ ID NO: 19830 - DNA, 120 bp, synthetic construct
  misc_feature 1..120: note = Artificially Synthesized Probe
  source 1..120: mol_type = other DNA
gtgtgagctactgtgtccggcccaaattgtctaatttttaaaaatagtttctgggttatggatctgaataaagcgtgcaattagtgaacagtttataaacctcttgtgtgcttttaattt

SEQ ID NO: 19831 - DNA, 120 bp, synthetic construct
  misc_feature 1..120: note = Artificially Synthesized Probe
  source 1..120: mol_type = other DNA
acttgtagaacttacctgtaagcccaggcttcacctgaaaccccagtcccccacctggaacccaggccctcacctacactgtcagcccctccacctggaactttagaacttacctgtagc

SEQ ID NO: 19832 - DNA, 120 bp, synthetic construct
  misc_feature 1..120: note = Artificially Synthesized Probe
  source 1..120: mol_type = other DNA
agcctcccgagtagcttggactacaggcgcccgccaccacgcccggctaattttttgtatttttaatagagacagggtttcaccgtgttagccaggatggtctcgatctcctgaccccgt

SEQ ID NO: 19833 - DNA, 120 bp, synthetic construct
  misc_feature 1..120: note = Artificially Synthesized Probe
  source 1..120: mol_type = other DNA
gtggcgccatctcggcgcactgcaacctctacctcccgggttcaagcgattctcctgcctcagcctcccgagtagctgggactacaggcgcccgccaccgcgcccggctaattttttgta

SEQ ID NO: 19834 - DNA, 120 bp, synthetic construct
  misc_feature 1..120: note = Artificially Synthesized Probe
  source 1..120: mol_type = other DNA
ctcaaagaaaaaaaaaaggaaaacccagttccccacctagaacccaggccccgacctgaaacctgggcccctccacttgtaaccagggacccccacctagtatctgagcctctcccatct

SEQ ID NO: 19835 - DNA, 120 bp, synthetic construct
  misc_feature 1..120: note = Artificially Synthesized Probe
  source 1..120: mol_type = other DNA
tgatccacccgcctcggcctcccaaagtgctgggattacaggcgtgagccaccgcgcccggccaaggccccgacttttagaccactagtggaggaggtctgggacacgggtctgcggcca

SEQ ID NO: 19836 - DNA, 120 bp, synthetic construct
  misc_feature 1..120: note = Artificially Synthesized Probe
  source 1..120: mol_type = other DNA
ctataattgaggccctcacctgtaacttaagcccacacttgtaacctggggctctctgctataacttggggcccccacccataagccagttcccttaacagaacctgcagtttggtgagg

SEQ ID NO: 19837 - DNA, 120 bp, synthetic construct
  misc_feature 1..120: note = Artificially Synthesized Probe
  source 1..120: mol_type = other DNA
tcaggagttcgagaccagcctgggcaacatggtgaaactccgtctttactaaaaatacaaaaattagctgggcatggtggtgggcacctgtaatcccagctactcgagaggctgagacag

SEQ ID NO: 19838 - DNA, 120 bp, synthetic construct
  misc_feature 1..120: note = Artificially Synthesized Probe
  source 1..120: mol_type = other DNA
cagagccaccagggacctggagtgtagacctgggcagggagcttgctctctgccagctgcagtgggctcacctgtgagggaggatgttagaatagttcttttttaaaaaaaaaaattttt

SEQ ID NO: 19839 - DNA, 120 bp, synthetic construct
  misc_feature 1..120: note = Artificially Synthesized Probe
  source 1..120: mol_type = other DNA
tgaaaattcatgcgtgtttgtgtgaacaggtttctagttctctcgggcatatatcttggggtggaattgccagtacatatagcaactctatgtttaaacttttgactcttttccaaaggg

SEQ ID NO: 19840 - DNA, 120 bp, synthetic construct
  misc_feature 1..120: note = Artificially Synthesized Probe
  source 1..120: mol_type = other DNA
gatcttggttcactgcaagctccgcctcctgggttcacgcctttctcctgtctcagcctcccgagtagctgggattacaggtgcccgccaccacgcccagctaatttttgtatttttagt

SEQ ID NO: 19841 - DNA, 120 bp, synthetic construct
  misc_feature 1..120: note = Artificially Synthesized Probe
  source 1..120: mol_type = other DNA
aaatgtcctcgtatgccctcttcgcgcagacctgccaggaagagcacaagaagaaacacccggactcttctgtcaatttcgtggaattctccaagaagtgtttggagagatggaagacca

SEQ ID NO: 19842 - DNA, 120 bp, synthetic construct
  misc_feature 1..120: note = Artificially Synthesized Probe
  source 1..120: mol_type = other DNA
agatgaggaggaagagggtgaagatgaagaataaatggctatcctttaatgatgcctgtgcagtgggcttgttttgctaagaatgtgaattctagtacagctcagtattagcttcagtat

SEQ ID NO: 19843 - DNA, 120 bp, synthetic construct
  misc_feature 1..120: note = Artificially Synthesized Probe
  source 1..120: mol_type = other DNA
tccagattccaagaagttggggtgtgagccagcaatcagtacagaaaagagataccaaaataagtttgagttggggagtgttccttcaacttcagttttctggaagagatcttttttttt

SEQ ID NO: 19844 - DNA, 120 bp, synthetic construct
  misc_feature 1..120: note = Artificially Synthesized Probe
  source 1..120: mol_type = other DNA
ccctcgccgctccgcctcctccacacgcgcggcggccgcggcgagggggacgcgccgcccggggcccggcaccttcgggaaccccccggcccggagcctgcggcctgcgccgcctcggcc

SEQ ID NO: 19845 - DNA, 120 bp, synthetic construct
  misc_feature 1..120: note = Artificially Synthesized Probe
  source 1..120: mol_type = other DNA
tccgcagaccctgcaccgggcttggactcgcagccgggactgacgtgtagaacaatcgtttctgttggaagaagggtttttcccttccttttggggtttttgttgccttttttttttctt

SEQ ID NO: 19846 - DNA, 120 bp, synthetic construct
  misc_feature 1..120: note = Artificially Synthesized Probe
  source 1..120: mol_type = other DNA
aatgtgatttgtttatcctgtcagaggggaaccctgggctgccaaaaataactgtttgcaccggcttatcagtcagcaggagggaaacgtagcctttcctcatttgccagggatgtgacg

SEQ ID NO: 19847 - DNA, 120 bp, synthetic construct
  misc_feature 1..120: note = Artificially Synthesized Probe
  source 1..120: mol_type = other DNA
cgcttcttaatcagcatgcaggctgtgacatgcggaaaccaggggcacaggctctgaagtttgtactctggagctggagcagtcagggttaaatgggagcggctgggaagggtgtgtttc

SEQ ID NO: 19848 - DNA, 120 bp, synthetic construct
  misc_feature 1..120: note = Artificially Synthesized Probe
  source 1..120: mol_type = other DNA
aaataaataaataaatctggcttgagttttgacaaatgtatatgcagggtcaatgggaagacagacgctggagggtggaagcctgactgtgagagtgagccccctgctttcctgaacagt

SEQ ID NO: 19849 - DNA, 120 bp, synthetic construct
  misc_feature 1..120: note = Artificially Synthesized Probe
  source 1..120: mol_type = other DNA
acgcctgtaatcccagcactttgggaggccgaggcggtttgatcacaaggtcagaagtttgagaccagcgtggccaacatggtgaaaccctctctctactaaaaatagaaaaactagcca

SEQ ID NO: 19850 - DNA, 120 bp, synthetic construct
  misc_feature 1..120: note = Artificially Synthesized Probe
  source 1..120: mol_type = other DNA
tcctgtcacttccacctgttgcaaaacactgtgctttcgtatcttttctttctacctgtttggaaatgtgaaaatcactgctgccgtaggaaacgggcccagatccgggctgtggctctc

SEQ ID NO: 19851 - DNA, 120 bp, synthetic construct
  misc_feature 1..120: note = Artificially Synthesized Probe
  source 1..120: mol_type = other DNA
aggctggtcttgaacccctgaccttaagtaatcctctctggcctcccaaagtgctgggattacaggtgtaagccatagtactgggcctaaagttcacctttttttttttttttttttttt

SEQ ID NO: 19852 - DNA, 120 bp, synthetic construct
  misc_feature 1..120: note = Artificially Synthesized Probe
  source 1..120: mol_type = other DNA
gtatgatctgtttctaggcagacggaggctcctagccccacctctctgtgagcttgagtggcgtttatgactctccttcctatttcctgtcctgctaatcaacaagtcagctaaacagtc

SEQ ID NO: 19853 - DNA, 120 bp, synthetic construct
  misc_feature 1..120: note = Artificially Synthesized Probe
  source 1..120: mol_type = other DNA
gtgcgtccgagcatctggcctctgctgtctgaaaacagcaccttccccgccccccggccaccgcatctcctctgaatagaaggcaagtcttgcctcccaggaatggcctgtgaccttcat

SEQ ID NO: 19854 - DNA, 120 bp, synthetic construct
  misc_feature 1..120: note = Artificially Synthesized Probe
  source 1..120: mol_type = other DNA
tacattcacacggctgtgcaaccactacttctaattccagaacgttcggtcaccccaaaagcaagccccattcccattgtgtcactctccatcccctccaccagctcctggccactctga

SEQ ID NO: 19855 - DNA, 120 bp, synthetic construct
  misc_feature 1..120: note = Artificially Synthesized Probe
  source 1..120: mol_type = other DNA
aaaaaaaaaagtgcatcacacactgtgtgtcctttagtgtctcactgtgacatcctcaaggtgcagctaggctgtggctcgagtcagagcctcactggtttttgtggctgagtcttgttg

SEQ ID NO: 19856 - DNA, 120 bp, synthetic construct
  misc_feature 1..120: note = Artificially Synthesized Probe
  source 1..120: mol_type = other DNA
actcaccctggctcctgccacagtctgggctccatctgtgctaccattgcagtagtctggtttctaggaagcaaaactgttactgagttacaaagctcaattaagagtgtcctttgggag

SEQ ID NO: 19857 - DNA, 120 bp, synthetic construct
  misc_feature 1..120: note = Artificially Synthesized Probe
  source 1..120: mol_type = other DNA
tctgtggacacccccatgggtcttacgggcacagcctccctacggggactttgcttcctaaggccctgtgcccagagcaagagccagaagtggtcctgaggctggggctgtgttccctga

SEQ ID NO: 19858 - DNA, 120 bp, synthetic construct
  misc_feature 1..120: note = Artificially Synthesized Probe
  source 1..120: mol_type = other DNA
gccttgtaaaggcccaagtttttaaaaacagttttggggtcccccatgtgtggcatccacaggcagggctgctgccaacctcccgcctccatctttgctgggcctgctgcctgaggccag

SEQ ID NO: 19859 - DNA, 120 bp, synthetic construct
  misc_feature 1..120: note = Artificially Synthesized Probe
  source 1..120: mol_type = other DNA
gggcgtcaaccaccttgactgaccacgcctttcttccctcccctcgaaatgaagctacaacatcaccacgggtctgtaccccttcgaaggggacaacatctacaagttgtttgagaacat

SEQ ID NO: 19860 - DNA, 120 bp, synthetic construct
  misc_feature 1..120: note = Artificially Synthesized Probe
  source 1..120: mol_type = other DNA
aacagaggctgggcaggcggggacggttggtggggtctcaggcctgtgcccagctgacaggctcctcgccggcttctcctcagggatgcttgagtacgaaccggccaagaggttctccat

SEQ ID NO: 19861 - DNA, 120 bp, synthetic construct
  misc_feature 1..120: note = Artificially Synthesized Probe
  source 1..120: mol_type = other DNA
gcacggcctggtcccagctcctgagtgtgtggcaggtaccctgggcccagaggagctgggtcggaaaactggaccgccctggtgccagcctgacaggcgccactgcttctgggcgtttgc

SEQ ID NO: 19862 - DNA, 120 bp, synthetic construct
  misc_feature 1..120: note = Artificially Synthesized Probe
  source 1..120: mol_type = other DNA
agggctgggccgtgtcataaagagttttgcagtgtatctgcagggtggatgcttgctgcgctcgggctggagcctgagggggctttctgctttactgtttcagcgggaagtggtgggcag

SEQ ID NO: 19863 - DNA, 120 bp, synthetic construct
  misc_feature 1..120: note = Artificially Synthesized Probe
  source 1..120: mol_type = other DNA
tgcagagctggggcaccttgtccacagggtctgccccaccagagacgggctgggcccaagctcagacctatgggtgcaattggtgcctcctcaccaaggtcttttttatctttttttttt

SEQ ID NO: 19864 - DNA, 120 bp, synthetic construct
  misc_feature 1..120: note = Artificially Synthesized Probe
  source 1..120: mol_type = other DNA
tgcttttttaaagctagtgacttcctgtgcacatggggtgggtgtgtggcaagttctggaagctgctgagtcagccactggtccattctcggagctggggctctgcactgggcacatgag

SEQ ID NO: 19865 - DNA, 120 bp, synthetic construct
  misc_feature 1..120: note = Artificially Synthesized Probe
  source 1..120: mol_type = other DNA
tctggccagcgtgctggtcatggaggcctacgtgtggcggggctctgggggggcgtgccgtcctcacagccacctctcagagtgggtgcattccgaggaccctgccctgggcctggcgcc

SEQ ID NO: 19866 - DNA, 120 bp, synthetic construct
  misc_feature 1..120: note = Artificially Synthesized Probe
  source 1..120: mol_type = other DNA
cgccgcagaccagctggcgggtgtggagaccaggctcctgaccccgccatgcatgcagcgccacctggaagccgcgcggccgctttggttttttgtttggttggttccattttctttttt

SEQ ID NO: 19867 - DNA, 120 bp, synthetic construct
  misc_feature 1..120: note = Artificially Synthesized Probe
  source 1..120: mol_type = other DNA
cggtggtgggggaaagtgagtgcctctccggggccgggctctggcgtccggtgtgggacgggggtcggggacgcacgggctctgggatcctgggtttcatggcggctgggagttgggggc

SEQ ID NO: 19868 - DNA, 120 bp, synthetic construct
  misc_feature 1..120: note = Artificially Synthesized Probe
  source 1..120: mol_type = other DNA
ttctcctcttttcattcacctaaaacatgtttatcgagtggcaccttttgccccagcactctgccacttagacactcaggatgcgtaggtgagttacatgttgcctaagaatctgtttcc

SEQ ID NO: 19869 - DNA, 120 bp, synthetic construct
  misc_feature 1..120: note = Artificially Synthesized Probe
  source 1..120: mol_type = other DNA
catccatctgtccatccatctggacaggtgcttatcatggatcacccaagcatgcgcatcttgtcttcctgctgcaaaatgtcagatatcctggctgagggcatcaccagtgagtgaacg

SEQ ID NO: 19870 - DNA, 120 bp, synthetic construct
  misc_feature 1..120: note = Artificially Synthesized Probe
  source 1..120: mol_type = other DNA
tctgttcctactagttgttgaagacatcaacaaacggcgggaacccattcccagtctggaggccatttatttgctgagccccacggagaaggtgcctacatgagtgagcgtgtgtgtatg

SEQ ID NO: 19871 - DNA, 120 bp, synthetic construct
  misc_feature 1..120: note = Artificially Synthesized Probe
  source 1..120: mol_type = other DNA
agtgatccaccttccccagtcggttcaggccctgatcaaagacttccaggggaccccgactttcacctacaaagcggcccatatcttcttcaccgacagtgagtgaggagagcctagggt

SEQ ID NO: 19872 - DNA, 120 bp, synthetic construct
  misc_feature 1..120: note = Artificially Synthesized Probe
  source 1..120: mol_type = other DNA
acccccccttaaccgcgtgcaacacctaacctttaacctctcttgtgaccccagccccggccctaccctggcccctgactctcaccttcaaacccatccttgaccccatcccctgatgat

SEQ ID NO: 19873 - DNA, 120 bp, synthetic construct
  misc_feature 1..120: note = Artificially Synthesized Probe
  source 1..120: mol_type = other DNA
actgcctggcttcgccccccaatccctaccctcttccccctacttccccaggcgaacatcaaagacctatcccagatcctgaaaaagatgccgcagtaccagaaggagctgaataaggtg

SEQ ID NO: 19874 - DNA, 120 bp, synthetic construct
  misc_feature 1..120: note = Artificially Synthesized Probe
  source 1..120: mol_type = other DNA
ggtgggacctgggagaggaatggagccttggagaggtgggccctgggagaggggcggagccttggagaggtgggacctgggtgaggggcggagccttggagaggtgggacctgggtgagg

SEQ ID NO: 19875 - DNA, 120 bp, synthetic construct
  misc_feature 1..120: note = Artificially Synthesized Probe
  source 1..120: mol_type = other DNA
tgacacatagcggccggtggacggctgaccccatgcccgcaggacctggccatgggctccgacgcagagggggagaagatcaaggactccatgaagctgatcgttccggtgctgctggac

SEQ ID NO: 19876 - DNA, 120 bp, synthetic construct
  misc_feature 1..120: note = Artificially Synthesized Probe
  source 1..120: mol_type = other DNA
tcaccccgtccccatctctcccccatccctcatccatctcgctgtgcactgtttctccatatctctctctctcacccttctctctgccttcccctttctctctgttctctgtcttgctcc

SEQ ID NO: 19877 - DNA, 120 bp, synthetic construct
  misc_feature 1..120: note = Artificially Synthesized Probe
  source 1..120: mol_type = other DNA
ctgaggtgctaagcctcagggcttaggggaaaatgctcattgctggcattcccttggcaccgatctgctctgctgaggggggcacgccaagcccgcagctgaggaattggggtgacagcg

SEQ ID NO: 19878 - DNA, 120 bp, synthetic construct
  misc_feature 1..120: note = Artificially Synthesized Probe
  source 1..120: mol_type = other DNA
tgcacagtgcccgcttcggtcactggcacaagaacaaggctggcatagaagcccgggcgggcccccggctcatcgtgtatgtcatgggcggtgtggccatgtcagagatgagggccgcct

SEQ ID NO: 19879 - DNA, 120 bp, synthetic construct
  misc_feature 1..120: note = Artificially Synthesized Probe
  source 1..120: mol_type = other DNA
ttcatattttattcttgagccgcttggtcaggtttgattcgcacactccctctgcagtgactccaggagcccctctcacagctcagagcggaagctgaggctgcagcctgccatcttctc

SEQ ID NO: 19880 - DNA, 120 bp, synthetic construct
  misc_feature 1..120: note = Artificially Synthesized Probe
  source 1..120: mol_type = other DNA
ttttgaatctcccttttcgggttctgagcagcagagggcccctcagtggaggctcggattactgattcaggaaaagtaaaaggggtccccttctctaacctcagaggcgatctggccact

SEQ ID NO: 19881 - DNA, 120 bp, synthetic construct
  misc_feature 1..120: note = Artificially Synthesized Probe
  source 1..120: mol_type = other DNA
ttcccagaagaacaggaccaaagctgggctgagccagggcctccttccctggattcacatgccccacacctggacctttgctttttctttttattgtgggatttattttattttatttta

SEQ ID NO: 19882 - DNA, 120 bp, synthetic construct
  misc_feature 1..120: note = Artificially Synthesized Probe
  source 1..120: mol_type = other DNA
tcacacacctgagggaatccctggggctttgaactcaaggaagggcacccgcatgaagatgggagctcggtgacacttctccaggtcaccaccctggtagatcatgtccagaatctggct

SEQ ID NO: 19883 - DNA, 120 bp, synthetic construct
  misc_feature 1..120: note = Artificially Synthesized Probe
  source 1..120: mol_type = other DNA
cacagtccatctgggctccaggacaaacacggcccattgaggaactgagctgctactaggggccagagctgctgtgggaatgaacaaaactctgatgactcagcaaaagcacaggcctag

SEQ ID NO: 19884 - DNA, 120 bp, synthetic construct
  misc_feature 1..120: note = Artificially Synthesized Probe
  source 1..120: mol_type = other DNA
gctggagacaagcttaaagtgatctccaaagccacgactgagtttgctgtgtagaaaacagaagaatgaaaggggaaaggcccaatggtgggtttgtttttgtaggttttttttttctgt

SEQ ID NO: 19885 - DNA, 120 bp, synthetic construct
  misc_feature 1..120: note = Artificially Synthesized Probe
  source 1..120: mol_type = other DNA
taagtccctgaaaaataggatgaggaccaagctggctacgaccaaccagacacaacatggcgctgtatttgatgtaggtttcacctaggatctcattgtatgatcagtaacatatgaaac

SEQ ID NO: 19886 - DNA, 120 bp, synthetic construct
  misc_feature 1..120: note = Artificially Synthesized Probe
  source 1..120: mol_type = other DNA
acaaaacaaaacaaaaaaaagcgtggaaacgggctgaggtcgatgtcccaccggtctttgatgacctcccctaggccaccagtatctggaggggattagggacactgagctccagcaggg

SEQ ID NO: 19887 - DNA, 120 bp, synthetic construct
  misc_feature 1..120: note = Artificially Synthesized Probe
  source 1..120: mol_type = other DNA
gttggggtgggagagactaacgagagtcataaagcacctagccggtgagatagtaagtattcaggtaaagaagcagacggggaagtacacaagaggtgcaattttattttatatttttag

SEQ ID NO: 19888 - DNA, 120 bp, synthetic construct
  misc_feature 1..120: note = Artificially Synthesized Probe
  source 1..120: mol_type = other DNA
ccagaaatactatcatccccatcttagagacggggacagggccgcaaaagtgtcagggcgtttcctggctcctcaacaaacagctggatccgaagtggtctgggggatgagccgccctgc

SEQ ID NO: 19889 - DNA, 120 bp, synthetic construct
  misc_feature 1..120: note = Artificially Synthesized Probe
  source 1..120: mol_type = other DNA
attgacgcaagaggctcgggactggggccccacgttcagagcaggcggcttttagatgaggaggtagcagttgaactgagccgcagtcacatcccgagactggttcttgttttctttcat

SEQ ID NO: 19890 - DNA, 120 bp, synthetic construct
  misc_feature 1..120: note = Artificially Synthesized Probe
  source 1..120: mol_type = other DNA
acagaaacttgaataaacttggctctaccgcccagtgtccttatttacagtttcactgtggcatatgttaagggcatggtatcagctgtgcttagaaagacgtattacgttgtttaatac

SEQ ID NO: 19891 - DNA, 120 bp, synthetic construct
  misc_feature 1..120: note = Artificially Synthesized Probe
  source 1..120: mol_type = other DNA
aaaaaaaaaatcttgactgactttcatcatacctgtattaggaatgtctggatctgtattaggatgtcatcatatctgtattaggatgtattaggattctgttttggctgactacaattt

SEQ ID NO: 19892 - DNA, 120 bp, synthetic construct
  misc_feature 1..120: note = Artificially Synthesized Probe
  source 1..120: mol_type = other DNA
taacatggtctcggttgatatttttctgacaagtaagtttagatcatgtttggattttgtttcctattacctagagccaacacagatctatagatttcttcgaactcggaatctcatagc

SEQ ID NO: 19893 - DNA, 120 bp, synthetic construct
  misc_feature 1..120: note = Artificially Synthesized Probe
  source 1..120: mol_type = other DNA
ttcccaagtagctggggttacaggcgcctgccaccacagctggctaagttttgtatttttagtagagacaaggtttccccatgttggccaggctggtctcgaactcctgacctcaggtga

SEQ ID NO: 19894 - DNA, 120 bp, synthetic construct
  misc_feature 1..120: note = Artificially Synthesized Probe
  source 1..120: mol_type = other DNA
ccacagcgcccggccttggtggtggtcttattgaaggggaaacacttttgaaatcaataggatgaaggttttttaaaaacaatgaagtcttaaatcattagattttaaagtggggtctgg

SEQ ID NO: 19895 - DNA, 120 bp, synthetic construct
  misc_feature 1..120: note = Artificially Synthesized Probe
  source 1..120: mol_type = other DNA
agcgtgcatgagcaagtttgcattgcagttaataggtgaaaattgctgagcacctaagtaactaaaaaggaggtgatgaattaggttacagaattagttttgtccaccctttacctgtct

SEQ ID NO: 19896 - DNA, 120 bp, synthetic construct
  misc_feature 1..120: note = Artificially Synthesized Probe
  source 1..120: mol_type = other DNA
acaggtgtgaaacaccacgtcctgctaaaaagtacacatttaaaatctaagttccattttcccgtcatgtttattaatttgtcccattgcaggatatgtttctgttgtccgcatgggtag

SEQ ID NO: 19897 - DNA, 120 bp, synthetic construct
  misc_feature 1..120: note = Artificially Synthesized Probe
  source 1..120: mol_type = other DNA
tcaacttctataggctaacactgccccaacaaagtaaaaatataggtcacgagaagggcatcttttattgaatccattttgctagatttcgtgtgagctgtttctgaagtctcccaagaa

SEQ ID NO: 19898 - DNA, 120 bp, synthetic construct
  misc_feature 1..120: note = Artificially Synthesized Probe
  source 1..120: mol_type = other DNA
cacaaaactctctttgaggaatgagattattcgtaatttttggtgtctgcattcaagcattataaagtaataaattgatgtggagtacatttggcttttcaagtcctaaagaggaaggga

SEQ ID NO: 19899 - DNA, 120 bp, synthetic construct
  misc_feature 1..120: note = Artificially Synthesized Probe
  source 1..120: mol_type = other DNA
aaccaagtaccatgggtaaggagaaatcactggtttgggaataattgggtaaaaggtttaatgaaaacaagttagcgttttagatggggcttgaaggctcgtgtgctgtattatacaccg

SEQ ID NO: 19900 - DNA, 120 bp, synthetic construct
  misc_feature 1..120: note = Artificially Synthesized Probe
  source 1..120: mol_type = other DNA
ctctgacttctgccgttggtcttaactctaccacctcatttaaagagggatactcacatttatagtatatgtgctaggtactgtggcagggacttcacaatatcacgtatcttgtaagtt

SEQ ID NO: 19901 - DNA, 120 bp, synthetic construct
  misc_feature 1..120: note = Artificially Synthesized Probe
  source 1..120: mol_type = other DNA
tgttccttttgacctggtgggttcaatagcaactcaaacattaaaatcagagggttacataaattcctgctggtagttttggaagagaattttttgagtctttagggtctagctaggacc

SEQ ID NO: 19902 - DNA, 120 bp, synthetic construct
  misc_feature 1..120: note = Artificially Synthesized Probe
  source 1..120: mol_type = other DNA
ctgcgcccagcctcctttaatctatttcttatttcaaattaaggtaatcttatttttctcctaaacctatcacacagggttgtaggaaggaccctaaacaccagtatatgatgccagcaa

SEQ ID NO: 19903 - DNA, 120 bp, synthetic construct
  misc_feature 1..120: note = Artificially Synthesized Probe
  source 1..120: mol_type = other DNA
ggtctagtctgggagtcttccactagaattcatattcctttagcactgccaaagttatagtatgtctgctcctgagcccaatatatttcattcctcaaagttcaaggggtatcaagataa

SEQ ID NO: 19904 - DNA, 120 bp, synthetic construct
  misc_feature 1..120: note = Artificially Synthesized Probe
  source 1..120: mol_type = other DNA
gcctggcctttattttctttacagaaggtctgatataatgccttacatcctttccagctcttgtttctggtactccagttttgaatttttcatggattttgaccaggcactatggctgat

SEQ ID NO: 19905 - DNA, 120 bp, synthetic construct
  misc_feature 1..120: note = Artificially Synthesized Probe
  source 1..120: mol_type = other DNA
gatttttaaatctgagttgcttccaagtgtttaccagggccaaacgaagcaaaatgtcacttctctcttgcccttattcctcttctattcctggtcttctgttagtagctggagaaaaat

SEQ ID NO: 19906 - DNA, 120 bp, synthetic construct
  misc_feature 1..120: note = Artificially Synthesized Probe
  source 1..120: mol_type = other DNA
cctttttaagcatttatttttacaataagaaggcctgcatctatattcttgggggcgcgtttcatttatgtagtgtgcaatgtcctaggcactatactaagccctcgggtatataagggt

SEQ ID NO: 19907 - DNA, 120 bp, synthetic construct
  misc_feature 1..120: note = Artificially Synthesized Probe
  source 1..120: mol_type = other DNA
aagtctccttgagagtggtatgagaagaagctggagcagatggccagggccagacagtgcattgtcttcaaggtaatttaaggatgttggtcttaagaaagtcgtttgttcgttcttttt

SEQ ID NO: 19908 - DNA, 120 bp, synthetic construct
  misc_feature 1..120: note = Artificially Synthesized Probe
  source 1..120: mol_type = other DNA
agccgccgcacccagtcagtttttaaatatatatagttattgtttctgcattgttctgtttcttctaacattagaccagtagtacatatgatggttaggattgtaatctgagttccagga

SEQ ID NO: 19909 - DNA, 120 bp, synthetic construct
  misc_feature 1..120: note = Artificially Synthesized Probe
  source 1..120: mol_type = other DNA
agtggcacgatcactggctcactgcagtctcaacctcctgggatgaagagatcctctctcctcagcctcttgattagctgggactacctggctacattttttgttttttttttttctctt

SEQ ID NO: 19910 - DNA, 120 bp, synthetic construct
  misc_feature 1..120: note = Artificially Synthesized Probe
  source 1..120: mol_type = other DNA
gacctattaaattatttttaagagaactattgtattaatgatttttccctacttttctattttgtacatttagctgcagtttaaaatctttaggctggcccaggcatggtgactcacgcc

SEQ ID NO: 19911 - DNA, 120 bp, synthetic construct
  misc_feature 1..120: note = Artificially Synthesized Probe
  source 1..120: mol_type = other DNA
cttcacagtacttctgcagagtgatccatttgtaattaatagacacacacacatcatccaccattgagctttatcttctcattagaaagtgcgtctaacccctatattttgagatcctgg

SEQ ID NO: 19912 - DNA, 120 bp, synthetic construct
  misc_feature 1..120: note = Artificially Synthesized Probe
  source 1..120: mol_type = other DNA
gagggcagagggaagggagagaaaactttgcccttttccttggaacaaaccacctatggaagggatcattggtacactttattctagtacatatcagagtgtttactttttttttttgag

SEQ ID NO: 19913 - DNA, 120 bp, synthetic construct
  misc_feature 1..120: note = Artificially Synthesized Probe
  source 1..120: mol_type = other DNA
gcagcatgtgcctgactcccagctattcaggaggctgaggcaggagaatggcttgaaccctgggaggcagaagttacagtgagccgagatcacgccattgaactccagcctgggtgacag

SEQ ID NO: 19914 - DNA, 120 bp, synthetic construct
  misc_feature 1..120: note = Artificially Synthesized Probe
  source 1..120: mol_type = other DNA
gtgcttgtaaagggataaagtggtcatttagctcttgattgattgggtttagggtctttgtagaagagggagagagtattttgctggatactttattattttctgcaagcctgaccaggc

SEQ ID NO: 19915 - DNA, 120 bp, synthetic construct
  misc_feature 1..120: note = Artificially Synthesized Probe
  source 1..120: mol_type = other DNA
aggctttcgtagaacaggaaatgagaaccatttcagcagttagacaaaagatttggtaggtggggtctcagtagatgtggagaaaggaatgatagataaaaagtagattcttatgaaagt

SEQ ID NO: 19916 - DNA, 120 bp, synthetic construct
  misc_feature 1..120: note = Artificially Synthesized Probe
  source 1..120: mol_type = other DNA
accgcacccagcccctagcatactttctagaacatacttttctagaacatactttctgtactactgttctagaaatgcctgtcaaaatcccaactctgtaggtttttttttttgagactg

SEQ ID NO: 19917 - DNA, 120 bp, synthetic construct
  misc_feature 1..120: note = Artificially Synthesized Probe
  source 1..120: mol_type = other DNA
gaggagtcctggtcaaatttacagggcaacctcttcataatatgtccttatttccagtcattacttgttccttagtactctcttgccacaatgtctttctgtaactgttcccatctgact

SEQ ID NO: 19918 - DNA, 120 bp, synthetic construct
  misc_feature 1..120: note = Artificially Synthesized Probe
  source 1..120: mol_type = other DNA
aggcatacctgctgtcattttataggtagaacactaaaacacagtaaattacctggcctccaacttggtagtctgatttttttctgccttggtctggtgtttttgtggttttgttcttac

SEQ ID NO: 19919 - DNA, 120 bp, synthetic construct
  misc_feature 1..120: note = Artificially Synthesized Probe
  source 1..120: mol_type = other DNA
tggcatatctttttattatgcaatggaataaaaccattattagaaacatgccaggttggttgtcttggtatcgtttagtaagaaacaaagattgaaaatgagtcctggtgggccgggcac

SEQ ID NO: 19920 - DNA, 120 bp, synthetic construct
  misc_feature 1..120: note = Artificially Synthesized Probe
  source 1..120: mol_type = other DNA
gggagaacctgtctgtaagaagtaaaaaaagattaactgggcacagtggcacatgcctgtagtcccagctattctgtagtctcagctactcaggaggctgaggtgggaggattgcttgag

SEQ ID NO: 19921 - DNA, 120 bp, synthetic construct
  misc_feature 1..120: note = Artificially Synthesized Probe
  source 1..120: mol_type = other DNA
tctgtggtacttctgacgtgtctagactttaattcttcagaaacttataatttgaattttatacattcattagccctttgttctcagggacctgtgtagaacacatagtttatccatcac

SEQ ID NO: 19922 - DNA, 120 bp, synthetic construct
  misc_feature 1..120: note = Artificially Synthesized Probe
  source 1..120: mol_type = other DNA
taaggtgtttttatcctggatgcaacttccgaagaaactgatcaaatgtgttttacacacacacccccaataagaatgtttttaagtagaaaaaaagtgttgccggccaggcgcaatggc

SEQ ID NO: 19923 - DNA, 120 bp, synthetic construct
  misc_feature 1..120: note = Artificially Synthesized Probe
  source 1..120: mol_type = other DNA
aactgtagagaaattctggggaaagcatctaaaaatagctctgatagctctgtctctacgttttataatgtttaatgttttttgaaatccattttttatccttttggccacaagtcttgg

SEQ ID NO: 19924 - DNA, 120 bp, synthetic construct
  misc_feature 1..120: note = Artificially Synthesized Probe
  source 1..120: mol_type = other DNA
acctggccctcctgcaactgttttcatttatgctttctgccaagaagctttaactgtatttgtcaaaattacttttgactagcagtgtattatcataaatgttaaatcttcaagccggcc

SEQ ID NO: 19925 - DNA, 120 bp, synthetic construct
  misc_feature 1..120: note = Artificially Synthesized Probe
  source 1..120: mol_type = other DNA
aaggcttttaaagagtttgctgtaagtttggaactgatttgaggaaaaaagaatgagtgaacttttgagaagtcttactgtgggaaatctctgtttgaagttccctgacttgttagcaaa

SEQ ID NO: 19926 - DNA, 120 bp, synthetic construct
  misc_feature 1..120: note = Artificially Synthesized Probe
  source 1..120: mol_type = other DNA
ggtgaagttatttcaccatagaaacaagtgttaagatgtttcctggtcaaccgatcaaagccaacatatgtacctttagttgcctcaagtcctcgagtgtttcaagaggagtaggagctg

SEQ ID NO: 19927 - DNA, 120 bp, synthetic construct
  misc_feature 1..120: note = Artificially Synthesized Probe
  source 1..120: mol_type = other DNA
attcttatgttcaaaaaaatgtatcggggtaatcattttcctggaagaatatacacagccaactgctagtattagtcatctccggagcgtaagacctgggggggtgggtgagaattcata

SEQ ID NO: 19928 - DNA, 120 bp, synthetic construct
  misc_feature 1..120: note = Artificially Synthesized Probe
  source 1..120: mol_type = other DNA
actggagactaagatggtcattgaaaatgattgtaccagtgttccttcatgatagtcatggtgctgagtcttaaagcaaacagtgaattcacctccacctcaacattttgttgtgcaaat

SEQ ID NO: 19929 - DNA, 120 bp, synthetic construct
  misc_feature 1..120: note = Artificially Synthesized Probe
  source 1..120: mol_type = other DNA
tagacattaagaaggcaacaaaatccctgccttcaccatggagcttaacttttagtggaggaaacagaccaccacccaaaaaatcaactaatgtcacttagtgatgagtgttgtgaagaa

SEQ ID NO: 19930 - DNA, 120 bp, synthetic construct
  misc_feature 1..120: note = Artificially Synthesized Probe
  source 1..120: mol_type = other DNA
aaagaatgtctgggaagcaaatccagcattttttctttttgggattggagaaagaaacctatgccgtcatttcttgtaccaggctgcgtgctggtagttaacagtttattgtcaggtata

SEQ ID NO: 19931 - DNA, 120 bp, synthetic construct
  misc_feature 1..120: note = Artificially Synthesized Probe
  source 1..120: mol_type = other DNA
tgtctgtgggggaaacaattagaatgaggcgcattggacttcatcgatgctgttaattgttctattttaggcagcatggggtatgttctattttcttttttaatcactgtacctgacaca

SEQ ID NO: 19932 - DNA, 120 bp, synthetic construct
  misc_feature 1..120: note = Artificially Synthesized Probe
  source 1..120: mol_type = other DNA
gcctttctccctaccttctgtgacatttttcccccagtataggcctgtagttttgcagaatgtatctcaattaggacttctgtggtgatttcctcttgattagcttcaggttaaatattt

SEQ ID NO: 19933 - DNA, 120 bp, synthetic construct
  misc_feature 1..120: note = Artificially Synthesized Probe
  source 1..120: mol_type = other DNA
tgcgccccggcctaccttcttcttttcttacctctgctctgaagttgtgatttcttcaaggagtcctgattccttatagaagaatagtatttttaagccaaaatctgcatgttagatgtg

SEQ ID NO: 19934 - DNA, 120 bp, synthetic construct
  misc_feature 1..120: note = Artificially Synthesized Probe
  source 1..120: mol_type = other DNA
gagacagacacctggattcatttgctggatctggctatttacggtttgattttaaggcaagttatttaaccttttcttgcctcagttttctcttctggcagtggagtaattgtacatagt

SEQ ID NO: 19935 - DNA, 120 bp, synthetic construct
  misc_feature 1..120: note = Artificially Synthesized Probe
  source 1..120: mol_type = other DNA
agtatatgtgtttgtctaacaggcgcttacagcttttagatggggaatatgaagtagccatgcaggaaatggaagaatgtccaataagcaagaaaagagcaacatgggagactattcttg

SEQ ID NO: 19936 - DNA, 120 bp, synthetic construct
  misc_feature 1..120: note = Artificially Synthesized Probe
  source 1..120: mol_type = other DNA
agagccagactgcctgattcaaatgtctgctcctagctatgtggcgtttggcaagttacttatccatgtctcagtttcttctcctgtaacatgagacatagaattgatggattagatgaa

SEQ ID NO: 19937 - DNA, 120 bp, synthetic construct
  misc_feature 1..120: note = Artificially Synthesized Probe
  source 1..120: mol_type = other DNA
tacttttgagagttcgacaaagattaaaagtttgacagtttctagtgttttagggacgtgaggacacatatactctcaaataatattttgatgtaacagtaagttggggccgggctcagt

SEQ ID NO: 19938 - DNA, 120 bp, synthetic construct
  misc_feature 1..120: note = Artificially Synthesized Probe
  source 1..120: mol_type = other DNA
atatattttccctgtttctaaaatttataatagtggttaactccaggtgatgagatttcaaataatttttatctatactgtttgggttttctgcatggatttatctttatgatctttttc

SEQ ID NO: 19939 - DNA, 120 bp, synthetic construct
  misc_feature 1..120: note = Artificially Synthesized Probe
  source 1..120: mol_type = other DNA
ggcgtgtgccattgcgcccggtcctctaatctaaatagttttaagaggattactttgtaataatgatatagaaggagtttaggcctctgtggcagtaaaataaattgaagctcattgaag

SEQ ID NO: 19940 - DNA, 120 bp, synthetic construct
  misc_feature 1..120: note = Artificially Synthesized Probe
  source 1..120: mol_type = other DNA
attcttgaggatggttgagtgattcggtcagatggctaaaagttagctattttcaatagctcagtgttgtaaaatcaaagaagggaagcactggcagtcattgtcagtgaaactgagaga

SEQ ID NO: 19941 - DNA, 120 bp, synthetic construct
  misc_feature 1..120: note = Artificially Synthesized Probe
  source 1..120: mol_type = other DNA
taaatctacggctcctattgccaaacctcttgccactagaaattcagagagtctccatcaggaaaacaagcctggttcagttaaacctactcaaactattggtaagaaaacattgcaatc

SEQ ID NO: 19942 - DNA, 120 bp, synthetic construct
  misc_feature 1..120: note = Artificially Synthesized Probe
  source 1..120: mol_type = other DNA
ttgaagtggggtcctcatggtaagttagagcaagtttttccactaaacaaatttgccagaaacttacaagaaaactattggttttcagattagcttttaagattttggaatcacaactac

SEQ ID NO: 19943 - DNA, 120 bp, synthetic construct
  misc_feature 1..120: note = Artificially Synthesized Probe
  source 1..120: mol_type = other DNA
agtactgggattacaggcatgagccatcgcgcccagccagtttttaagaggaaaaaacatttacaaatagagttaactttctgctgagtttaaggcccaagttgcagtgttctatcattt

SEQ ID NO: 19944 - DNA, 120 bp, synthetic construct
  misc_feature 1..120: note = Artificially Synthesized Probe
  source 1..120: mol_type = other DNA
aatataataagtataacttactttctgataaaccaacacttagtgcctgctcacacctgggatctgagaatacaaacaccaattaaaaccacactctgggctgggcacggtgactcatat

SEQ ID NO: 19945 - DNA, 120 bp, synthetic construct
  misc_feature 1..120: note = Artificially Synthesized Probe
  source 1..120: mol_type = other DNA
ctcaacaacaacaaaaaaacacattctgacctcagagtgcttaaaacagcatggtaatgacatataattacttggagttacttttataattgtttaggacataggaggtggttttttgtt

SEQ ID NO: 19946 - DNA, 120 bp, synthetic construct
  misc_feature 1..120: note = Artificially Synthesized Probe
  source 1..120: mol_type = other DNA
tagtttctctataacaacaatacaaggcaacaaactgaagcaagagatgacctgcattgcccttggtgtactctgaactgccgcaaactttatagtttactcaagcatcttaaactctgc

SEQ ID NO: 19947 - DNA, 120 bp, synthetic construct
  misc_feature 1..120: note = Artificially Synthesized Probe
  source 1..120: mol_type = other DNA
ttacatttttgttgcagtatcatccaaaaggtgctaggatagatgtttctatcaatgagtgttatgatggctcctatgcaggaaatcctcaggatattcatcgccaacctggatttgctt

SEQ ID NO: 19948 - DNA, 120 bp, synthetic construct
  misc_feature 1..120: note = Artificially Synthesized Probe
  source 1..120: mol_type = other DNA
aggccaaaacgaacaaaagcaagcatgtctgaatttcttgaatctgaagatggggaagtagaacagcaaagaacatatagtagtggccacaatcgtctgtatttccatagtgatacctgc

SEQ ID NO: 19949 - DNA, 120 bp, synthetic construct
  misc_feature 1..120: note = Artificially Synthesized Probe
  source 1..120: mol_type = other DNA
tttaataggtgtttttctttctttttcccagcaaattgaagagttttctgatgttaatgaaggagagaaagaagtgatgaaactctggaatctccatgtcatgaagcatgggtagggtat

SEQ ID NO: 19950 - DNA, 120 bp, synthetic construct
  misc_feature 1..120: note = Artificially Synthesized Probe
  source 1..120: mol_type = other DNA
cagaaggcaagacagagctgtaggttcatttaatgacccaattttcatgccttttagtgccacgtgtttcatgtctggaaatcctgaaaattaccacagttattaccacaatttttaacc

SEQ ID NO: 19951 - DNA, 120 bp, synthetic construct
  misc_feature 1..120: note = Artificially Synthesized Probe
  source 1..120: mol_type = other DNA
atgtcaatagataaagctgttaccaagctccgtgaaatgcagcaaaaattagaaaagggggaatctgcttcccctgcaaacgaagaaataactgaagaacaaaatgggacagcaaatgga

SEQ ID NO: 19952 - DNA, 120 bp, synthetic construct
  misc_feature 1..120: note = Artificially Synthesized Probe
  source 1..120: mol_type = other DNA
catttatgaacggctgtttttctactttgtaattgtgagacattttcttggggagggaaaattggaatggttcccttttttagaaattgaagtggtcttcatatgtcaactacagaaaag

SEQ ID NO: 19953 - DNA, 120 bp, synthetic construct
  misc_feature 1..120: note = Artificially Synthesized Probe
  source 1..120: mol_type = other DNA
ttacagattccttgattggtaagctctccaaatgatgagttctagtaaactctgatttttgcctctggatagtagatctcgagcgtttatctcgggctttaatttgctaaagctgtgcac

SEQ ID NO: 19954 - DNA, 120 bp, synthetic construct
  misc_feature 1..120: note = Artificially Synthesized Probe
  source 1..120: mol_type = other DNA
gcaagaagaatggatttggccctagagtacgggttctccaaatgtaacctcggccctacagatctctgagactatgtcagggggtttgtgagattttataacaaaattaagatgttagta

SEQ ID NO: 19955 - DNA, 120 bp, synthetic construct
  misc_feature 1..120: note = Artificially Synthesized Probe
  source 1..120: mol_type = other DNA
gggtccttgatgatttttaagaggtcctgagagaaaaaaattttgagaaccactgtcctagagctccaagaaggtgaatgccataagatgtgtgttttttaaaaaagcatttctcgggcc

SEQ ID NO: 19956 - DNA, 120 bp, synthetic construct
  misc_feature 1..120: note = Artificially Synthesized Probe
  source 1..120: mol_type = other DNA
gagaggaaggtggtgaggaattcaggatattaaaaggcagttgaggtgtacatggtcagtttagagacatataaactatcatgggcacagatgatgggagaaggatgaggctaatatttt

SEQ ID NO: 19957 - DNA, 120 bp, synthetic construct
  misc_feature 1..120: note = Artificially Synthesized Probe
  source 1..120: mol_type = other DNA
cctgaaatttttttagtgccaacatgatgccacaagtggaaaatcccacagctgccctcatgtgatgggtcacatatattattaaaaatattgtggtcgggtgcagcggttcacacctgt

SEQ ID NO: 19958 - DNA, 120 bp, synthetic construct
  misc_feature 1..120: note = Artificially Synthesized Probe
  source 1..120: mol_type = other DNA
tttaaaatccctacacccaaggaaacatatagattaagtagcatgctcaaagagtcctacagttaggatatagtgccaggttttaacccagatcagtgtgaattccaagcctaggttctg

SEQ ID NO: 19959 - DNA, 120 bp, synthetic construct
  misc_feature 1..120: note = Artificially Synthesized Probe
  source 1..120: mol_type = other DNA
cagaactaaagaaggttaggtttcttctcctgaaatagggaacccactgtctctccattggtgcgtcacagaaatacccatgtcaaagcccctcaaatttccaggaaacttctagcctcc

SEQ ID NO: 19960 - DNA, 120 bp, synthetic construct
  misc_feature 1..120: note = Artificially Synthesized Probe
  source 1..120: mol_type = other DNA
gaccgggttcaaatcccctctgcagcttatttatatggccttgggccacttcctttttccatggctcagcttcctaatctctaaaattaaaagttgatgataataatagtacctacttca

SEQ ID NO: 19961 - DNA, 120 bp, synthetic construct
  misc_feature 1..120: note = Artificially Synthesized Probe
  source 1..120: mol_type = other DNA
attctcagtctctccttcaactccttcttcacactgtagccaaacaaagtgactacaagtctgatcccatcacctacctgtttaaaaatcccaaatatgggccagacgcagtggttcatg

SEQ ID NO: 19962 - DNA, 120 bp, synthetic construct
  misc_feature 1..120: note = Artificially Synthesized Probe
  source 1..120: mol_type = other DNA
atggacttgctggttaacttggaaaaatcatttaacctgtattttcctcactagtccaaagatctgacctttgcctatcttttaaaagaatcaagtaaaataacaggctttttccgggca

SEQ ID NO: 19963 - DNA, 120 bp, synthetic construct
  misc_feature 1..120: note = Artificially Synthesized Probe
  source 1..120: mol_type = other DNA
agattggagacccctgatctaaatactccatgtacatgaaggtcactttcactgctgtttcttcccagaaatgtctaggtccttcaggtagaagtaatctttttcttcttgtaattattt

SEQ ID NO: 19964 - DNA, 120 bp, synthetic construct
  misc_feature 1..120: note = Artificially Synthesized Probe
  source 1..120: mol_type = other DNA
ccttccgagtagctgggattacaggcatgcaccaccatgcctggctaattttgtatttttagtacagacggggtttctccatgttggtcaggctggtcttgaactttcgacctcaggtga

SEQ ID NO: 19965 - DNA, 120 bp, synthetic construct
  misc_feature 1..120: note = Artificially Synthesized Probe
  source 1..120: mol_type = other DNA
gatcttggaccctggagagatttcatttctaattttacatcagtacaacagctttcattttcttaaatccctgatcaagcagaaatgcttgaaaagaaagagcacagcaggccgggcgtg

SEQ ID NO: 19966 - DNA, 120 bp, synthetic construct
  misc_feature 1..120: note = Artificially Synthesized Probe
  source 1..120: mol_type = other DNA
tctgatttaatcggccaagctaagcatgggattgaatcaggtttcagtatattttagaaacctccaacagtgtggactgagaactgctgagtcctaactcattcttggtgctaaaaagta

SEQ ID NO: 19967 - DNA, 120 bp, synthetic construct
  misc_feature 1..120: note = Artificially Synthesized Probe
  source 1..120: mol_type = other DNA
tttttttttttaactgggtgagggctagaaggagcggtagagattgattcattctagccaaaccacctctcttaacaaaaaaaggaaactgaaccccgattggcgaaatgtcttgctcaa

SEQ ID NO: 19968 - DNA, 120 bp, synthetic construct
  misc_feature 1..120: note = Artificially Synthesized Probe
  source 1..120: mol_type = other DNA
gtgtagagaaggaagttgcagctgtagagtcaccgccgggaaaggggctggaagggcagcgttcggggaacttcaaatgcacagactaccccgtagtgagactcactttacaaaggggaa

SEQ ID NO: 19969 - DNA, 120 bp, synthetic construct
  misc_feature 1..120: note = Artificially Synthesized Probe
  source 1..120: mol_type = other DNA
atatcagggtcagagtgaagggaactaagtttgctaggatggttaccgttgtatttgaaaggtacattgcactcctcagtttgatcttccaagtcatgtttccttcatattcttttgtcc

SEQ ID NO: 19970 - DNA, 120 bp, synthetic construct
  misc_feature 1..120: note = Artificially Synthesized Probe
  source 1..120: mol_type = other DNA
cagagattgaaaacttctggacccaaaggaaaataaaaccaaaggcagagatatattttggcaagaaaagggggtgcccccgttcacattcaatcctttctggacagagccttccctgtt

SEQ ID NO: 19971 - DNA, 120 bp, synthetic construct
  misc_feature 1..120: note = Artificially Synthesized Probe
  source 1..120: mol_type = other DNA
tgcccggcggggctcatggcaggcgggtttcgcagcactgtctgggcgatgaagacctgcaaaggggagagctgtcagcctgggcccccgcctccagccccgcccgccccggtccctgcc

SEQ ID NO: 19972 - DNA, 120 bp, synthetic construct
  misc_feature 1..120: note = Artificially Synthesized Probe
  source 1..120: mol_type = other DNA
gatctgccctcctcggcctcccaaagtgctgggattacaggtgtgagccaccacacctggccataaataaaatatttaaataataaaaattatatttatctataggtcaggattgatggg

SEQ ID NO: 19973 - DNA, 120 bp, synthetic construct
  misc_feature 1..120: note = Artificially Synthesized Probe
  source 1..120: mol_type = other DNA
tctctaaataaattaaatcaatcaatcaatcaaatcatttcctgagcagtaggtcctgtaggctgaatgaagcagcaacagcagctgaggaactcccagggcgcaccctcataggctcac

SEQ ID NO: 19974 - DNA, 120 bp, synthetic construct
  misc_feature 1..120: note = Artificially Synthesized Probe
  source 1..120: mol_type = other DNA
tgatctcggctcactgcaacttccgcctcctgggttcaagcgattctcttgcctcagcctcccaagtagctgggactacaggcgtgcgccaccacgcccggctaattttttgtattttta

SEQ ID NO: 19975 - DNA, 120 bp, synthetic construct
  misc_feature 1..120: note = Artificially Synthesized Probe
  source 1..120: mol_type = other DNA
gtctcggactcctggcctcaagcgatcctcccgcctcagcctcccagagttctgggattaccggcgtgagccaccgcgcccggtcccaccatcaggatctaaatccaccctgggtgacca

SEQ ID NO: 19976 - DNA, 120 bp, synthetic construct
  misc_feature 1..120: note = Artificially Synthesized Probe
  source 1..120: mol_type = other DNA
aggcgagagaagatttgcttgtgattaattctgcatttcagtgtaagtagctctggtgaactcctacacaaccttcaatgccccagctcaaatatcctctccggtttttttttttttttt

SEQ ID NO: 19977 - DNA, 120 bp, synthetic construct
  misc_feature 1..120: note = Artificially Synthesized Probe
  source 1..120: mol_type = other DNA
ccaacaaacaaaaacgctaaaaaccccaaaaaacaaaaaaatggggccaggtgtgatgagtgaagtaaaaataaaatgagatggttcaaaaaccagcttctggctgggtgcagtggctaa

SEQ ID NO: 19978 - DNA, 120 bp, synthetic construct
  misc_feature 1..120: note = Artificially Synthesized Probe
  source 1..120: mol_type = other DNA
acaaaacaaaacaaaaccagctccccataccccatgggtcatgtcaaagtccagagggttgtggctggttgtaaagtcacccaggaggctaggatggaacccgggtctcctgcctcttgc

SEQ ID NO: 19979 - DNA, 120 bp, synthetic construct
  misc_feature 1..120: note = Artificially Synthesized Probe
  source 1..120: mol_type = other DNA
atctcacttgtgacgctttggcctggcttctggccttggctacgctgtatccagcctcataaattatccagctcctgacagcggcactgaactcccttcctgggaagacagctaaggcca

SEQ ID NO: 19980 - DNA, 120 bp, synthetic construct
  misc_feature 1..120: note = Artificially Synthesized Probe
  source 1..120: mol_type = other DNA
ttctagaatcccaagaggctgaggtcctgcaactcccaagaggctgaggtcctgcaactttgatgggaatctgcctgggtcccgggttccagaaatctctgtcttaattcctggcttctt

SEQ ID NO: 19981 - DNA, 120 bp, synthetic construct
  misc_feature 1..120: note = Artificially Synthesized Probe
  source 1..120: mol_type = other DNA
gaaacatgacagacacacaggcagaaatgtgacagacagaaacacagtagacagacgcacaggcatgcacagacacacatacagaaacatggcaaatacatagacacatacagatagaca

SEQ ID NO: 19982 - DNA, 120 bp, synthetic construct
  misc_feature 1..120: note = Artificially Synthesized Probe
  source 1..120: mol_type = other DNA
ggcgcccagggcaggcctcagggcaccatgccacccgccgggccacacaggggacacctggcacctggccgctgtcaccgcgggctttgcgacacacccacagcagggcagggccagcgc

SEQ ID NO: 19983 - DNA, 120 bp, synthetic construct
  misc_feature 1..120: note = Artificially Synthesized Probe
  source 1..120: mol_type = other DNA
tgttgacacgtatacaattattttctttaaaaaaatttttttgaaaaccatcttgaggcactcagatcacaccccccaccccccataattgtggttcccaggaactgctgtttcttcctc

SEQ ID NO: 19984 - DNA, 120 bp, synthetic construct
  misc_feature 1..120: note = Artificially Synthesized Probe
  source 1..120: mol_type = other DNA
gggctcaggtttacacggggtctttttaatacaacgtttaatcatctggttgatcaagaaatgcaatgctcagtctaggaacagcagcagaaatagcgagagacacgggacttttataca

SEQ ID NO: 19985 - DNA, 120 bp, synthetic construct
  misc_feature 1..120: note = Artificially Synthesized Probe
  source 1..120: mol_type = other DNA
ggttttgtttactggaaaaaaaaaaaatgctcctgtcagcccaggcaacagggccaagatgcagtttcaggatccatgggacaggtcacagagtgacacggtggctgagattcggggaca

SEQ ID NO: 19986 - DNA, 120 bp, synthetic construct
  misc_feature 1..120: note = Artificially Synthesized Probe
  source 1..120: mol_type = other DNA
tccagctacttgtgtttgtgctggtgtgggcagcagtgtgggtacacggctggtgttggtgggcacagcagtgtgggcagcagtgcaggtacatggcttacattggtgggcacagcagtg

SEQ ID NO: 19987 - DNA, 120 bp, synthetic construct
  misc_feature 1..120: note = Artificially Synthesized Probe
  source 1..120: mol_type = other DNA
gctcctctctttgttcttccctcccaagatgatgactttccctgctcagagcagccacttgcggggtgatggacagctaggcctggccagactcactgtggacagaggaggccttgaaga

SEQ ID NO: 19988 - DNA, 120 bp, synthetic construct
  misc_feature 1..120: note = Artificially Synthesized Probe
  source 1..120: mol_type = other DNA
tctgtctgtatccttcctccccctggccctgggaaatgggggtgataggaagtttccctatcaccttcagatagggaaactgagtcagagacaggggatgggctcatgtggccttgcgtg

SEQ ID NO: 19989 - DNA, 120 bp, synthetic construct
  misc_feature 1..120: note = Artificially Synthesized Probe
  source 1..120: mol_type = other DNA
aacaaaaaaccaacaaccagaactggatccctacctcacgccatgtgtagctaccaatgccagacagattaaggaccacaagatgaaagggaaacagttttaccacctttggaacaaagt

SEQ ID NO: 19990 - DNA, 120 bp, synthetic construct
  misc_feature 1..120: note = Artificially Synthesized Probe
  source 1..120: mol_type = other DNA
agaaaagcatttgccaaagaatagaagacacccaccacagatgtagccaaccaggaggtgatctcccacaatcaatgggaaaggacaaaaagaaagtaactcagtagaaaaataagcaag

SEQ ID NO: 19991 - DNA, 120 bp, synthetic construct
  misc_feature 1..120: note = Artificially Synthesized Probe
  source 1..120: mol_type = other DNA
aacataagccagcaaaccagcgtgtaaagaacacgctagtgggacgccgtgttcatgaagctcaagaacaataattgcaaaacatgtggcttaagggtacacagtgccccaaatgaatgc

SEQ ID NO: 19992 - DNA, 120 bp, synthetic construct
  misc_feature 1..120: note = Artificially Synthesized Probe
  source 1..120: mol_type = other DNA
tctgcctgaaaccctcctcctccaggtacttgcctactcttgcctcctcccagatgctgcccaaacaccaccttgtggcctcatgggccaccatcttcaaagccatacaaaacccccaac

SEQ ID NO: 19993 - DNA, 120 bp, synthetic construct
  misc_feature 1..120: note = Artificially Synthesized Probe
  source 1..120: mol_type = other DNA
agcacacacaaaatgtgtgtgccttggcggccacgaggcctcaataacagcttggggcttatttacaagaaactaacaaaaaggtttctccttctcaaggagcgtctgtcctgcaaattc

SEQ ID NO: 19994 - DNA, 120 bp, synthetic construct
  misc_feature 1..120: note = Artificially Synthesized Probe
  source 1..120: mol_type = other DNA
gtcctcacagggataggagggtctgccctcccatgccggagcaccgcacagggtaaacagtcagtacctaataaatacccagtgggtgagcaaatggcaacacgcacacattctagagtc

SEQ ID NO: 19995 - DNA, 120 bp, synthetic construct
  misc_feature 1..120: note = Artificially Synthesized Probe
  source 1..120: mol_type = other DNA
gcctctttcccagctgtaaggcgggaaagccgctcctcaaagatctgtttccagacatcccaagcccaacgcacgtggcaggccctgcagacagcggacaatgagaactgacaacaaccc

SEQ ID NO: 19996 - DNA, 120 bp, synthetic construct
  misc_feature 1..120: note = Artificially Synthesized Probe
  source 1..120: mol_type = other DNA
tccctgaacttctgacctttgtacttgaggacttggatctggctctgcctactaaacctttttcctccttaatccagaaaactcctatcgacccatcaaaaccccagctccaacacccca

SEQ ID NO: 19997 - DNA, 120 bp, synthetic construct
  misc_feature 1..120: note = Artificially Synthesized Probe
  source 1..120: mol_type = other DNA
agccaccacacccagcacaattgtgccctttctaaaggggcctcagccaccaggactgcctttctctcaaaacaagacagacagaggctggacctagggaaggacttccccgccttccct

SEQ ID NO: 19998 - DNA, 120 bp, synthetic construct
  misc_feature 1..120: note = Artificially Synthesized Probe
  source 1..120: mol_type = other DNA
agcagcaacaacaacaaaaagccccgggtctatttatacggctccaaagatgtcgaagaaccacgatggttttctcccgcgacgcgcagtttggaaaacgaggagttggtggattctaag

SEQ ID NO: 19999 - DNA, 120 bp, synthetic construct
  misc_feature 1..120: note = Artificially Synthesized Probe
  source 1..120: mol_type = other DNA
tccattcaagaaaaaactgcaaaggccgaagccactcagacccgccctgcagtgggtgatgccccttctgcctgtcacggtgtttctctgtgacacctgctgtgtttttctgacttgaga

SEQ ID NO: 20000 - DNA, 120 bp, synthetic construct
  misc_feature 1..120: note = Artificially Synthesized Probe
  source 1..120: mol_type = other DNA
aaaaaaaaaaaaaagaatcatctgttctatcatcatccagtggccccacggggtggcccagcgcccaggacagggccttctcccgaggcccggcctgtcctgagcccgcaccctgtgtgg

SEQ ID NO: 20001 - DNA, 120 bp, synthetic construct
  misc_feature 1..120: note = Artificially Synthesized Probe
  source 1..120: mol_type = other DNA
ccaagcccagcctggtttcgctatcaggaagcaaacataacctagctaagccaggagagcttctgcagatcagagagggtgggtgacagatttgtttaaaatcaaaatacaccccagccc

SEQ ID NO: 20002 - DNA, 120 bp, synthetic construct
  misc_feature 1..120: note = Artificially Synthesized Probe
  source 1..120: mol_type = other DNA
gagctcacagggggtgaggcggaaaggggacagcagagctcacaggggatgaggcgggaaggggacagcagagctcacagggggtgaggcgggaaggggacagcagagctcacgggggtg

SEQ ID NO: 20003 - DNA, 120 bp, synthetic construct
  misc_feature 1..120: note = Artificially Synthesized Probe
  source 1..120: mol_type = other DNA
actggggctgctgtgaggggctgggacgcgcgatcgagtaatgtacattattctcaaagcaggaaaaaaatttcccgatttttgaattttaaaagttcaacgatttcccaactcctggaa

SEQ ID NO: 20004 - DNA, 120 bp, synthetic construct
  misc_feature 1..120: note = Artificially Synthesized Probe
  source 1..120: mol_type = other DNA
aagcagcgcacacccccactgcaccacgaaaagccagcagaaacactgcctcaaaccgtcgggttccagagaagggaaggatcccgcatcccaggatgactgagggatgaaaccacaaat

SEQ ID NO: 20005 - DNA, 120 bp, synthetic construct
  misc_feature 1..120: note = Artificially Synthesized Probe
  source 1..120: mol_type = other DNA
gagggtccctttcccacagtggggaaactgaggctcagaagaggatggcgcttgcccaggttccgtggtggggtgggaccagacaccaggcctgagtcttcattctttttttttttttaa

SEQ ID NO: 20006 - DNA, 120 bp, synthetic construct
  misc_feature 1..120: note = Artificially Synthesized Probe
  source 1..120: mol_type = other DNA
tcggagcacttacaggtccataaacttaaattaactcttccgtcggctctctgctggccaactcctacccacccactaaagccccagctttcataccctccttgggcaaagacctcactc

SEQ ID NO: 20007 - DNA, 120 bp, synthetic construct
  misc_feature 1..120: note = Artificially Synthesized Probe
  source 1..120: mol_type = other DNA
caccagaaacttctttcaaatcgcatccttctatttcggtgcctttgtgttaatcattccccccggggagtattggtgtttaattgctgtctgatttgcataattatgcatattaatctc

SEQ ID NO: 20008 - DNA, 120 bp, synthetic construct
  misc_feature 1..120: note = Artificially Synthesized Probe
  source 1..120: mol_type = other DNA
tcataatgcatccattgctcctgttctaattaaaatgtactaatagaataagacactgctgtcagagtgtggttttctgtgatttctttggtgaagcaccgcagagttttacccgggaag

SEQ ID NO: 20009 - DNA, 120 bp, synthetic construct
  misc_feature 1..120: note = Artificially Synthesized Probe
  source 1..120: mol_type = other DNA
aacacagctgacgcccccaaaacacccaccctcaacgtcttcattttactcataaataactgtgcttccaagaacattttcctggaggatcaaaatattctccacctctgctgtccaata

SEQ ID NO: 20010 - DNA, 120 bp, synthetic construct
  misc_feature 1..120: note = Artificially Synthesized Probe
  source 1..120: mol_type = other DNA
ctcagacccattcccagcccctctgggggtcatgacgggtgagatcagacagaggtttgaatccgggggtggcctttccttgggtggagcagtattttaaaaaattttttttttcttttg

SEQ ID NO: 20011 - DNA, 120 bp, synthetic construct
  misc_feature 1..120: note = Artificially Synthesized Probe
  source 1..120: mol_type = other DNA
acagatgttaagtaacaactcagagaaacagggccccgctttgaatttcagtgaccacagagataaccgagaccccatcccgctcttgcttccatgtctatgggcatcaccagtgacacc

SEQ ID NO: 20012 - DNA, 120 bp, synthetic construct
  misc_feature 1..120: note = Artificially Synthesized Probe
  source 1..120: mol_type = other DNA
ggctacattacccctaccctacagataaggaaactgacgcaaaagatagatgccatttgctcaagccctcacagtaagtagcaaagtcactatttaatgatacaaatgtttcctagtaag

SEQ ID NO: 20013 - DNA, 120 bp, synthetic construct
  misc_feature 1..120: note = Artificially Synthesized Probe
  source 1..120: mol_type = other DNA
ctgctctcagcctgacattaaacagattaaaaatctaaatatggttcaaaggcctcgcagctccacatccaactatccctcaagtactcacaaagaaggacaaaaataatccatgtttca

SEQ ID NO: 20014 - DNA, 120 bp, synthetic construct
  misc_feature 1..120: note = Artificially Synthesized Probe
  source 1..120: mol_type = other DNA
aaatacggtaataattacacctatttcgctaacctgttagaactgagaattcccagtgaataagccaagctttgtgtccaatgcacagtgctcaagaaacactgatgtaagcagtggctc

SEQ ID NO: 20015 - DNA, 120 bp, synthetic construct
  misc_feature 1..120: note = Artificially Synthesized Probe
  source 1..120: mol_type = other DNA
gctggatctccagggaattatgctaacgtaacagaataaaagctaatctcagaaggttgcaaactataggattccatttacacaaaatactcaaagtgaaaaattgggctgggcacagtg

SEQ ID NO: 20016 - DNA, 120 bp, synthetic construct
  misc_feature 1..120: note = Artificially Synthesized Probe
  source 1..120: mol_type = other DNA
taggtgagaggagaacactctgccacttcctgtgaatcccgaaagacttcagaataaaaagtggatcaacttcaaggacgagggcccaagagagtaacagaaaattcaccagagagccat

SEQ ID NO: 20017 - DNA, 120 bp, synthetic construct
  misc_feature 1..120: note = Artificially Synthesized Probe
  source 1..120: mol_type = other DNA
gtgggtgggagaaggcgtacgaaaattattcccgttttaaatgtcttccgatccagacaaccagaaaatcttggtttcctattcgttaatctctaatgccttttttgtttcgtttctgtt

SEQ ID NO: 20018 - DNA, 120 bp, synthetic construct
  misc_feature 1..120: note = Artificially Synthesized Probe
  source 1..120: mol_type = other DNA
ttcaaatgaacttaagaaaagcgaggtgacttaaaagggagctagaacagggcacatgaagaaggggccaaggtggagaatgcggctggggtaccccatcagccatcagcgttggggact

SEQ ID NO: 20019 - DNA, 120 bp, synthetic construct
  misc_feature 1..120: note = Artificially Synthesized Probe
  source 1..120: mol_type = other DNA
gcaaagcgatgtctctccatgtgggggtgcaagtgcccaagtacagaaccccctttgcccaccactcaaaaccccgacactccagccagggcccacccctgggggattctggagataact

SEQ ID NO: 20020 - DNA, 120 bp, synthetic construct
  misc_feature 1..120: note = Artificially Synthesized Probe
  source 1..120: mol_type = other DNA
cctgcttaaatgaaagtcgtcgaggctcacaaggtgggtgggatccagtgagagccgggatcccgcaccacgccctctccagagcctcagtttcccccttatggattgactggagaaacg

SEQ ID NO: 20021 - DNA, 120 bp, synthetic construct
  misc_feature 1..120: note = Artificially Synthesized Probe
  source 1..120: mol_type = other DNA
ttgacagtgatacaaagttgtctttacgtttcagctctgaaaagtgagaggtttacactcaacaggtggacatgtggagagtccccggatgcctgagccctggctgactcctcgtttcct

SEQ ID NO: 20022 - DNA, 120 bp, synthetic construct
  misc_feature 1..120: note = Artificially Synthesized Probe
  source 1..120: mol_type = other DNA
gcaggacaaaggcgcgctgggaacagcctgggttagcgttctccctcgtatttatttggagttccctgttctctcactttatacgcatctggtccagggaagtaagtgcttcccctagga

SEQ ID NO: 20023 - DNA, 120 bp, synthetic construct
  misc_feature 1..120: note = Artificially Synthesized Probe
  source 1..120: mol_type = other DNA
atgaattcccactcaatcccaatccagcctcctcctggcccaagctcggcttctggcagcttaacttcagcacccacgtgtgactaattaaccacacagtcagtttcatgcccgcatcct

SEQ ID NO: 20024 - DNA, 120 bp, synthetic construct
  misc_feature 1..120: note = Artificially Synthesized Probe
  source 1..120: mol_type = other DNA
caaccagactggagtgcagtgatcttttacttacttttaatttttgtatctacaatgaggtaagcgaccctgatcaggcccattttacagatcagaagatcaaggccgcattttgcttac

SEQ ID NO: 20025 - DNA, 120 bp, synthetic construct
  misc_feature 1..120: note = Artificially Synthesized Probe
  source 1..120: mol_type = other DNA
agaaaaccccaacagtattcaggaaagaaaaaaaaaacagccctagattgctttactgtcgcgatgtatccgggaattatttttaagcaaaactttgacaacatcccttgcctgccctcc

SEQ ID NO: 20026 - DNA, 120 bp, synthetic construct
  misc_feature 1..120: note = Artificially Synthesized Probe
  source 1..120: mol_type = other DNA
gaagtgcccggcccgacgggggcgacgcgggcctggcgagctccgggctcctccacgtcgccgcccccccggcgccgcgcgaagttggagaacaatgactcccgggccgcggggcgcccc

SEQ ID NO: 20027 - DNA, 120 bp, synthetic construct
  misc_feature 1..120: note = Artificially Synthesized Probe
  source 1..120: mol_type = other DNA
ctcggccaaacactcactcaggcctcagactcccagcggtgcgggcctgggtgtgggccgcccctccctccctgggacgtagagcccggcgtgacagggctgctggtgtctgctctcggc

SEQ ID NO: 20028 - DNA, 120 bp, synthetic construct
  misc_feature 1..120: note = Artificially Synthesized Probe
  source 1..120: mol_type = other DNA
gacagaaatgttttcttcggcttctccaggtgaaatttccacaacacagaaagaacagaaagtagaagctgttaagctcaggaccgcaggttcgacatggcttgaatttcagacggatca

SEQ ID NO: 20029 - DNA, 120 bp, synthetic construct
  misc_feature 1..120: note = Artificially Synthesized Probe
  source 1..120: mol_type = other DNA
gtgtgaggacccatcatctcatctcactgacaccgagacaccgacttggcttctgtgtgtaggttaagttcctactaaatgtttctttccaagaaactgcatttgtcagtcttctttgtt

SEQ ID NO: 20030 - DNA, 120 bp, synthetic construct
  misc_feature 1..120: note = Artificially Synthesized Probe
  source 1..120: mol_type = other DNA
tcaagccagcaccccggtttcagcctctcagtaactctgctgaggtgggatgtcttttccccatttagcaacaacggaagccaggcccagaatgtttttaaacaaataaataagcctaag

SEQ ID NO: 20031 - DNA, 120 bp, synthetic construct
  misc_feature 1..120: note = Artificially Synthesized Probe
  source 1..120: mol_type = other DNA
actcgggttaaaaaccattttcatggtacgaccttgtaatggaaaactctcccgtgagcccttgctgggtttccacgatagacgacgacctcatttcacatcaagtgtgcacggtaattc

SEQ ID NO: 20032 - DNA, 120 bp, synthetic construct
  misc_feature 1..120: note = Artificially Synthesized Probe
  source 1..120: mol_type = other DNA
ggaggctgttcacctagagtcgccaagaaagagtgagaaacggtagaaacctctctgggattttaagtttttactttttgctttatcatccattcagatggaacaagaaagaggaacatt

SEQ ID NO: 20033 - DNA, 120 bp, synthetic construct
  misc_feature 1..120: note = Artificially Synthesized Probe
  source 1..120: mol_type = other DNA
gcccacaggagagggagtggacatggatgcccacaggagagggggagtggacacggatgcccacaggagagagggagtggacgcagatgcccacaggagagggggagtggacacggacgc

SEQ ID NO: 20034 - DNA, 120 bp, synthetic construct
  misc_feature 1..120: note = Artificially Synthesized Probe
  source 1..120: mol_type = other DNA
accaggacctggctagtgatgttgagtgtatccaaacctcgcacggccgtgtttgtgcactcatcatctgccctgatgagatctgcacataactcagccaaaaacacataataaactgtg

SEQ ID NO: 20035 - DNA, 120 bp, synthetic construct
  misc_feature 1..120: note = Artificially Synthesized Probe
  source 1..120: mol_type = other DNA
tgccattaaacattcttcaaaaattctttgaaaaatgtttaatggcagagcaagttttgtgatgcataatatctccttagccctgtatttgggcaggttcgtgacttgctgtggcaagtc

SEQ ID NO: 20036 - DNA, 120 bp, synthetic construct
  misc_feature 1..120: note = Artificially Synthesized Probe
  source 1..120: mol_type = other DNA
gaaaattcccatcttaccacttttcctttttcacttttcttaatcattttgcctgttttcttctcccagatgcccttcaagcctctgctgtatacttcagacacagaggatgtgagttca

SEQ ID NO: 20037 - DNA, 120 bp, synthetic construct
  misc_feature 1..120: note = Artificially Synthesized Probe
  source 1..120: mol_type = other DNA
tttcagaggaaggcacccccagttccggcctctagcacagcaccagtaaatattatcgaaggacagaataaaaaaacacctgtccactatggttttggaatgctgatacttttttttttt

SEQ ID NO: 20038 - DNA, 120 bp, synthetic construct
  misc_feature 1..120: note = Artificially Synthesized Probe
  source 1..120: mol_type = other DNA
ctcatgtgtccccatggcaacaccacaatcccgttatagactcatctgtggtccggggcagactaaaatctggacaagaaattgccaccatcccaccttcttttaagacgtttctcaacg

SEQ ID NO: 20039 - DNA, 120 bp, synthetic construct
  misc_feature 1..120: note = Artificially Synthesized Probe
  source 1..120: mol_type = other DNA
cctgtgcctgattttagtttgattcacaaaaatcaactctgaaacccactcctagccatctccgtggttcaagacagcagcactcagcaaatccaaattctcccaccgatcccaaacaac

SEQ ID NO: 20040 - DNA, 120 bp, synthetic construct
  misc_feature 1..120: note = Artificially Synthesized Probe
  source 1..120: mol_type = other DNA
atcatccaccaaacgcaggagcagcctaaaataagggaaaatacacagcaaggttaactttacactttttacgtagtatctgtctacgagggactgaatgtcaaacaatttacacagcca

SEQ ID NO: 20041 - DNA, 120 bp, synthetic construct
  misc_feature 1..120: note = Artificially Synthesized Probe
  source 1..120: mol_type = other DNA
aaaaacccggagtcttcgagagaaatggctgtgtggcctgcaggcttcctgacgcatccttcactaactgtctgcttgttcagtgatactattttcataaaaaaataactgctgtccaca

SEQ ID NO: 20042 - DNA, 120 bp, synthetic construct
  misc_feature 1..120: note = Artificially Synthesized Probe
  source 1..120: mol_type = other DNA
tccagccacaggtgtgaccacatccttgctctgaatcatcaaggttttctttcattaaggtttcttaaatcttagagtttattcacagaaccagacacttgacccggaatgaatgcttaa

SEQ ID NO: 20043 - DNA, 120 bp, synthetic construct
  misc_feature 1..120: note = Artificially Synthesized Probe
  source 1..120: mol_type = other DNA
tcaacgcaagcagatacgcccctgtgagcacatgggatgggaaactctctctgttcttagtttttggggcaacaggttttgaagacgtttttattcagaggccaaactggaccacgatgg

SEQ ID NO: 20044 - DNA, 120 bp, synthetic construct
  misc_feature 1..120: note = Artificially Synthesized Probe
  source 1..120: mol_type = other DNA
gtgattacttataatgcaataattaatagttatatttttaaataaaagcttccgaagctgtgcacagtcctttatccgctggagacgatcccagagagaggcctccacgttccacctgac

SEQ ID NO: 20045 - DNA, 120 bp, synthetic construct
  misc_feature 1..120: note = Artificially Synthesized Probe
  source 1..120: mol_type = other DNA
acacctttcctttggcctcaagatcaaaactggcagagaagacatttagcaaatcatgaacaaaggcactgcggaactggagagaggccgcgcagtcaaacgtgagcaggtgcctgaatg

SEQ ID NO: 20046 - DNA, 120 bp, synthetic construct
  misc_feature 1..120: note = Artificially Synthesized Probe
  source 1..120: mol_type = other DNA
cgaggacgcaaagtagctacagacacacctgggactccacctgcagctaccacacatcagacccctgtgaccgatcaccatccacagtcaccacatcagaccccacgaccgccatccaca

SEQ ID NO: 20047 - DNA, 120 bp, synthetic construct
  misc_feature 1..120: note = Artificially Synthesized Probe
  source 1..120: mol_type = other DNA
acagtcaccacatcagaccccacgaccgccatccacagtcaccacatcagaccccacgaccgccatccacagtcaccacacatcagacccccgggaccaaccgccatccacagtcaccac

SEQ ID NO: 20048 - DNA, 120 bp, synthetic construct
  misc_feature 1..120: note = Artificially Synthesized Probe
  source 1..120: mol_type = other DNA
cctcgggatccctgctttagagggaaaacggcaacttcagatgcttgtttagaaaagaaagttcaaacatccataatcgaaacttttccttcaaggagccggaaaaacaacaataaacaa

SEQ ID NO: 20049 - DNA, 120 bp, synthetic construct
  misc_feature 1..120: note = Artificially Synthesized Probe
  source 1..120: mol_type = other DNA
agttcaaaggaagatatggtctcctcaataaagctgttggagcacctgcagacccactacaggaagaaagctcgccttgaactctgtgttaccccactcataaaaaccaatcccacagat

SEQ ID NO: 20050 - DNA, 120 bp, synthetic construct
  misc_feature 1..120: note = Artificially Synthesized Probe
  source 1..120: mol_type = other DNA
aacagctttagccacaaacagctgataaagtggactgcgttactggactgtgttagtggactgcgatagaagtacaatcttccagtcctcaaaaggcttgacttgagagcacaaaagcaa

SEQ ID NO: 20051 - DNA, 120 bp, synthetic construct
  misc_feature 1..120: note = Artificially Synthesized Probe
  source 1..120: mol_type = other DNA
ctgggctctagtgactttctacacctgggcacaggtggtggccatcagctttccatgagggtaaaattctgctgagatttgcaagtagctgcgatagctcaagaagtcagagaaagaggt

SEQ ID NO: 20052 - DNA, 120 bp, synthetic construct
  misc_feature 1..120: note = Artificially Synthesized Probe
  source 1..120: mol_type = other DNA
cacgcatatcacagatgtgtaaatcatggaagtacctccaccacagaaacgcatcacagacacgactgcattctagacacattcatatcccagagacacacatcctggacacgactatca

SEQ ID NO: 20053 - DNA, 120 bp, synthetic construct
  misc_feature 1..120: note = Artificially Synthesized Probe
  source 1..120: mol_type = other DNA
gaacccctcccagcttcctcagaccctgtttgaaacgggttcctggccgcatgtgtgttgcacacgggatcctcatgccacacctctgtccacctcaccccacactctcctcagatgacg

SEQ ID NO: 20054 - DNA, 120 bp, synthetic construct
  misc_feature 1..120: note = Artificially Synthesized Probe
  source 1..120: mol_type = other DNA
acctggacacctggtcctatagtcaaccctggggacgcccagtccggcggtcaacccccagggtgactgtcccaccatcagcaccagggagcctggtcccaggctgcatctggggccacg

SEQ ID NO: 20055 - DNA, 120 bp, synthetic construct
  misc_feature 1..120: note = Artificially Synthesized Probe
  source 1..120: mol_type = other DNA
cactgatgcaaatccagcttgaatctgtcacaatctcacactctcatcagccgaacattgcagacaaaatctcacagccattcaaatgcagccacctagaagttagctcatggtggaact

SEQ ID NO: 20056 - DNA, 120 bp, synthetic construct
  misc_feature 1..120: note = Artificially Synthesized Probe
  source 1..120: mol_type = other DNA
gatacagtacctgattccaatgctttgcaacttgctccagacactcttccggtagaaaaagagcctgttcttttgaaacgtggtctccgtgacataaaagaaagacctgagcagctcgac

SEQ ID NO: 20057 - DNA, 120 bp, synthetic construct
  misc_feature 1..120: note = Artificially Synthesized Probe
  source 1..120: mol_type = other DNA
gcgacctcaccccggacctgcaccatccggacaccccacatccagctcaccgaaggccttggctacctcaccccggacctgcaccatccagacaccgcacatccagctcacagcagggcc

SEQ ID NO: 20058 - DNA, 120 bp, synthetic construct
  misc_feature 1..120: note = Artificially Synthesized Probe
  source 1..120: mol_type = other DNA
ccatccagacaccgcacatccagctcaccgcagggtctggcgacctcaccccggacctgcaccatctggacactgcacatccagctcaccgagggcctggcgacctcactccagacctgc

SEQ ID NO: 20059 - DNA, 120 bp, synthetic construct
  misc_feature 1..120: note = Artificially Synthesized Probe
  source 1..120: mol_type = other DNA
gatcccgcagacaaagctcaaaaaatgtcaaatgtcctgtgagtgatgctcccaccaataacaccctaaaatgatgaggtgtggacatgctgggcttcagtaaaatctattattacatta

SEQ ID NO: 20060 - DNA, 120 bp, synthetic construct
  misc_feature 1..120: note = Artificially Synthesized Probe
  source 1..120: mol_type = other DNA
gaactaagtcagcagggaaaacagcacacaggctggggggtggccagagctaaaatacactaagggtcttattgctcaggacaagggtagcaatgtttcagacttcattttaaaagatca

SEQ ID NO: 20061 - DNA, 120 bp, synthetic construct
  misc_feature 1..120: note = Artificially Synthesized Probe
  source 1..120: mol_type = other DNA
gagacatagaagtctccaaaagattcactcatcaggaagataaaaattctaccacgtgcatgcacctaacaatgcctcacataaatgctaccaaacgagaagaaatgaacagacccatcc

SEQ ID NO: 20062 - DNA, 120 bp, synthetic construct
  misc_feature 1..120: note = Artificially Synthesized Probe
  source 1..120: mol_type = other DNA
tagaaaaggaatgaaagaataaaccaagaaaaagcatacaatggagagatagaaacgtcagaggtaaatcagtgaaattcaaaactaagacccaagagggaagtctgacgaaggctggcg

SEQ ID NO: 20063 - DNA, 120 bp, synthetic construct
  misc_feature 1..120: note = Artificially Synthesized Probe
  source 1..120: mol_type = other DNA
caccctacacgtgacagggacacccggggacggcgcctcactcaccctacacgtgacagggacacccggggacggcgcctcactcaccctgcacgtgacagggacacgcggggacggcgc

SEQ ID NO: 20064 - DNA, 120 bp, synthetic construct
  misc_feature 1..120: note = Artificially Synthesized Probe
  source 1..120: mol_type = other DNA
gcgcctcactcaccctgcacgtgacagggacacccggggacggtgcctcactcaccctacacgtgacagggacacccggggaccgcgcctcactcaccctgaacgtgacagggacacccg

SEQ ID NO: 20065 - DNA, 120 bp, synthetic construct
  misc_feature 1..120: note = Artificially Synthesized Probe
  source 1..120: mol_type = other DNA
agattgtgacctcatctgaagtcagagaacagcaatgacaggcagagtcctgatcagagaactcaaactctcctcaacgaaggaagctggagcacaaaaagcaaaactgggttgcatgac

SEQ ID NO: 20066 - DNA, 120 bp, synthetic construct
  misc_feature 1..120: note = Artificially Synthesized Probe
  source 1..120: mol_type = other DNA
atgtggccctcttcatacctaaagatgggaccaggatctgtgctggagaacagtcttatctccctccctctaccctgtcctggcacaatcaacgaacactttttttttttaaagacagag

SEQ ID NO: 20067 - DNA, 120 bp, synthetic construct
  misc_feature 1..120: note = Artificially Synthesized Probe
  source 1..120: mol_type = other DNA
tgccaggggctgctgtgctggcggagcagctgcaccaggcgacgggggtctgtgtcctcctcctcgggggccgccacagagccctggggcttctcccgggcacagacaccggctgctggg

SEQ ID NO: 20068 - DNA, 120 bp, synthetic construct
  misc_feature 1..120: note = Artificially Synthesized Probe
  source 1..120: mol_type = other DNA
caccgtgttgggcaggtagctgcgcacgctggtggtgaaggcctcgggggggcccccgcgggccccgtccagcagcgcgaagccgaaggccagcacgttcttcgcgccgcgctcgcacag

SEQ ID NO: 20069 - DNA, 120 bp, synthetic construct
  misc_feature 1..120: note = Artificially Synthesized Probe
  source 1..120: mol_type = other DNA
ttcaaagccaaagtcttcctcaaccttaatctgcaggagataaggaacaaggtgttaacaggcctgggaatctagaaaatcccatcagcttcaccatttttgttttcattttgttttgct

SEQ ID NO: 20070 - DNA, 120 bp, synthetic construct
  misc_feature 1..120: note = Artificially Synthesized Probe
  source 1..120: mol_type = other DNA
gacaccctcggctggatgttgcagcggtgacactgaagtagtgacaccagacgatttctgtacttaatgtgatgtcagcacttagtaaacattcatatgtgagttataatttttattgat

SEQ ID NO: 20071 - DNA, 120 bp, synthetic construct
  misc_feature 1..120: note = Artificially Synthesized Probe
  source 1..120: mol_type = other DNA
catgatattggtgctgcccttagttgataggaaacagctcagagaagggacactgcttgcttagagtcacacagcaaaaaaaaaagaaaatacttgcagtcaggtctgtgctcgtgtgcc

SEQ ID NO: 20072 - DNA, 120 bp, synthetic construct
  misc_feature 1..120: note = Artificially Synthesized Probe
  source 1..120: mol_type = other DNA
gttcctctacctggaccctctccccagtcatccgcacaacttactccccactccaagtcttaggtcaactgttacctgctcagagagcctgaacctcccattaagtcgaaacacaccagg

SEQ ID NO: 20073 - DNA, 120 bp, synthetic construct
  misc_feature 1..120: note = Artificially Synthesized Probe
  source 1..120: mol_type = other DNA
agaagtgcttggtgaataccaaagagtcagacatgctggaggttagggcaggaggtgcgactttagttacgacctgcagagaaggcccgtgggcccagacttgaataaggaggagacaaa

SEQ ID NO: 20074 - DNA, 120 bp, synthetic construct
  misc_feature 1..120: note = Artificially Synthesized Probe
  source 1..120: mol_type = other DNA
aaaaaaaaaaaaaaatctcagatctgccactgctgagctctgagcttgggtgcattacttaacctctctgagccttgattttctatacttgtaaaatagtagtaatctattcctgggggt

SEQ ID NO: 20075 - DNA, 120 bp, synthetic construct
  misc_feature 1..120: note = Artificially Synthesized Probe
  source 1..120: mol_type = other DNA
aaaaaaaagttgaattatttcccccaaaagagggtgttgaggctttaacccccagtacctcaggatcaccttatatggagacagtgtcgttacaaaagtaatcaagttcaaatgaagcca

SEQ ID NO: 20076 - DNA, 120 bp, synthetic construct
  misc_feature 1..120: note = Artificially Synthesized Probe
  source 1..120: mol_type = other DNA
gccagacacataatgcatgctaaatgactgaatatataagctaaatgactgaatatatcagcaagccaagaaaggctgggcatgtggaaaggcagagattgcggggggcggtagtttagg

SEQ ID NO: 20077 - DNA, 120 bp, synthetic construct
  misc_feature 1..120: note = Artificially Synthesized Probe
  source 1..120: mol_type = other DNA
agggttctaaggtaaagcagttgcatgaactacaacccccatcagacctcagcgtaaaagctcatatggttgcacacaatgcagctgcactgttttctgggattcgcactttttcacaag

SEQ ID NO: 20078 - DNA, 120 bp, synthetic construct
  misc_feature 1..120: note = Artificially Synthesized Probe
  source 1..120: mol_type = other DNA
attgttcctgtttggcatagaaatgtgatgactattaacagaaaggggaaaaagatttgccccctatccatcatcagacagacagacttctcttactaaaccccttatgtggagtgggat

SEQ ID NO: 20079 - DNA, 120 bp, synthetic construct
  misc_feature 1..120: note = Artificially Synthesized Probe
  source 1..120: mol_type = other DNA
cgcgtcacacccatttgcaaggatgtttgttctttgatgaaactgcatctctactgcacatgagggctttcattgtaggacaagaggagagttcgtttatttttgtaactgttttacatg

SEQ ID NO: 20080 - DNA, 120 bp, synthetic construct
  misc_feature 1..120: note = Artificially Synthesized Probe
  source 1..120: mol_type = other DNA
aaaaaaaagcaataaacaattagcataactgggccatgggtagtgatttattttgttttacctagaaccagaaatataattactttaattaaagatgagatctatcatatggatggatgg

SEQ ID NO: 20081 - DNA, 120 bp, synthetic construct
  misc_feature 1..120: note = Artificially Synthesized Probe
  source 1..120: mol_type = other DNA
ggatggatgagatatatgggtgggtggatgaatgatatggatggatgggaggaaatgagatgccttgaaagacatcctaacataaggagaagaaaacctccacagaagcaagcagataaa

SEQ ID NO: 20082 - DNA, 120 bp, synthetic construct
  misc_feature 1..120: note = Artificially Synthesized Probe
  source 1..120: mol_type = other DNA
attaaaaacaaaacaatccaagctgaccaaatgaaatggctgcttggaatgtgcagggggctcatgtgtggtattgtgcattaggtttattgccctgatgtacagcttttgtaagtggaa

SEQ ID NO: 20083 - DNA, 120 bp, synthetic construct
  misc_feature 1..120: note = Artificially Synthesized Probe
  source 1..120: mol_type = other DNA
cacatgctaattctgcaaagatgcagttattttaattgcaggtgttctcccctgcctggggtattcattaggagaaaatatggttatcatcccaaaacaaagcagattgtatattctcct

SEQ ID NO: 20084 - DNA, 120 bp, synthetic construct
  misc_feature 1..120: note = Artificially Synthesized Probe
  source 1..120: mol_type = other DNA
tataataaagtaagattattaaaataactgtgcctggagttaaaattaataaagacaaaagtggggtctctggactgggctagtcctgctgaaacactctgcagccacagtggtgcagag

SEQ ID NO: 20085 - DNA, 120 bp, synthetic construct
  misc_feature 1..120: note = Artificially Synthesized Probe
  source 1..120: mol_type = other DNA
gagaggattatgaggtcccatttcatagaccaagtctataaaataaaatggtttactgaaatttcagagacttcagagcggcaggtgcatgtacctgtcaaggttatttaggcagacagt

SEQ ID NO: 20086 - DNA, 120 bp, synthetic construct
  misc_feature 1..120: note = Artificially Synthesized Probe
  source 1..120: mol_type = other DNA
agattgcaatgtactgaattagctatcacgtggcctgccgttttggaggaaaggcaagttggattgaatatctcatcatattcttcaactagtttccgttctgttcaagaacatactcca

SEQ ID NO: 20087 - DNA, 120 bp, synthetic construct
  misc_feature 1..120: note = Artificially Synthesized Probe
  source 1..120: mol_type = other DNA
agaatgtgttgagtgtcaggggagaagaaactcatattgcatggacccacagctttaagaggcccaaagtcattgccctttttccagcagcagatttaagatgatctccgtgcatacata

SEQ ID NO: 20088 - DNA, 120 bp, synthetic construct
  misc_feature 1..120: note = Artificially Synthesized Probe
  source 1..120: mol_type = other DNA
agaatagtgctgagatttgagttgaataaatgttttcaattgaaatcattgaaaactccatgttatcctgtctttgtggagctcatggaaaactcccaaggccccatggaggggactgat

SEQ ID NO: 20089 - DNA, 120 bp, synthetic construct
  misc_feature 1..120: note = Artificially Synthesized Probe
  source 1..120: mol_type = other DNA
gcattgatactgaagttacaaaaatataaactagcactgaactaaacaataccatcagtgacagtgtcacaaatgacagagcaaaatgttacacggcagcgagtccacaggaagagccag

SEQ ID NO: 20090 - DNA, 120 bp, synthetic construct
  misc_feature 1..120: note = Artificially Synthesized Probe
  source 1..120: mol_type = other DNA
tcatttaatcttatagtagtgtaaaaatgaaaggagcttatcaaaattcagaataaaacatgaaacttgccaatgcctccaattgcgacccttaaaatgcatgcattgggccgggcgcgg

SEQ ID NO: 20091 - DNA, 120 bp, synthetic construct
  misc_feature 1..120: note = Artificially Synthesized Probe
  source 1..120: mol_type = other DNA
tttcttagaaaaatggtaatattttaaatgttgccataaaggcaagtctatcactcatggtggtgtcagccttgcccatcactggctcctcagcagaaggagaggaggtcttctattttt

SEQ ID NO: 20092 - DNA, 120 bp, synthetic construct
  misc_feature 1..120: note = Artificially Synthesized Probe
  source 1..120: mol_type = other DNA
gaagagaatgacaaggtattgctctgagagaacatgggagagaaaagaggctttagtggtgctttccttcccacagacttcagctcataaatcaaaatgccaaagcttataaacgtttaa

SEQ ID NO: 20093 - DNA, 120 bp, synthetic construct
  misc_feature 1..120: note = Artificially Synthesized Probe
  source 1..120: mol_type = other DNA
ttatattttcaaatgatattttgtgtcagtttgtggcatttccatgtctgaccttcttaaggcataaaactgcactaaaacattttggggcaccctgtgcggtggactgagtggcagtcc

SEQ ID NO: 20094 - DNA, 120 bp, synthetic construct
  misc_feature 1..120: note = Artificially Synthesized Probe
  source 1..120: mol_type = other DNA
cgcgtagcctgtctggcactcgcacttgtacatggggtcgctgaagtggcccaggtagatgcactccgcgtgcttgtggcagttgtgtgtcttgtccttgcatgggttttcgggctcaca

SEQ ID NO: 20095 - DNA, 120 bp, synthetic construct
  misc_feature 1..120: note = Artificially Synthesized Probe
  source 1..120: mol_type = other DNA
ggccgtcaaacactctgggatgtctttgtcatcgaattgtgtagtcaggaacactctggtgtgattctggatgatcatcaagaggcatcatctccaagaccgcattgctcaggtggacac

SEQ ID NO: 20096 - DNA, 120 bp, synthetic construct
  misc_feature 1..120: note = Artificially Synthesized Probe
  source 1..120: mol_type = other DNA
aggtgctataccacacaactacctacatgccacattctagaccacacaactacccatgtaccatgttccagaccatacaactgcccacgcaccaccttctacaacacataactacatgca

SEQ ID NO: 20097 - DNA, 120 bp, synthetic construct
  misc_feature 1..120: note = Artificially Synthesized Probe
  source 1..120: mol_type = other DNA
atggtggattccgggagtgactcagaagccagtgtttccaatggctttgctgcgatctcttggcctccagaagacaaatcataccacctcttctttttaataaaagaatttttttaatag

SEQ ID NO: 20098 - DNA, 120 bp, synthetic construct
  misc_feature 1..120: note = Artificially Synthesized Probe
  source 1..120: mol_type = other DNA
caagcgctctgtaactcacaccctagtctgcacagacgcagggaaaggctatttcagagagacacagttctgtgcatctgcggcatcctctgtccacactcactactcagtccaaactca

SEQ ID NO: 20099 - DNA, 120 bp, synthetic construct
  misc_feature 1..120: note = Artificially Synthesized Probe
  source 1..120: mol_type = other DNA
ctggatcattcttcctttaattacagtctgtcctgaactggaatgaaacggggctatctcagaggaggtttgcgctgagcacaggtgagcagaattaatcacaaaggatgggttcattac

SEQ ID NO: 20100 - DNA, 120 bp, synthetic construct
  misc_feature 1..120: note = Artificially Synthesized Probe
  source 1..120: mol_type = other DNA
cctttctgggtctactattagggtgctgaggggagctaaatccatgtgtgtccaggaaagtctcttaatcgattttataaaatagcttgccaaagacagtgttgaatcttttctacatga

SEQ ID NO: 20101 - DNA, 120 bp, synthetic construct
  misc_feature 1..120: note = Artificially Synthesized Probe
  source 1..120: mol_type = other DNA
cattttctgcatgttacaggcaataaatttgaaactcagaaaaatcccattttattcaaaatcacagagtggcagagcgtgagctctgagtcccttcattctctgtccacatcagaggta

SEQ ID NO: 20102 - DNA, 120 bp, synthetic construct
  misc_feature 1..120: note = Artificially Synthesized Probe
  source 1..120: mol_type = other DNA
tgttatctaaggtaatgctgaggccattgtcagcagaaatagagtaacattaaaagctaaattgtctgtctgtaagacttcaggcagtggcttgtatttcccccaaacgtttctgctgag

SEQ ID NO: 20103 - DNA, 120 bp, synthetic construct
  misc_feature 1..120: note = Artificially Synthesized Probe
  source 1..120: mol_type = other DNA
acatatttagtcatcatgcttgtggatgaaaaacaaagttcctccttcattaaaaagctctaaagtcaagtaagacttgactcatccctgggtggaagttccggaagttgtcctccatcc

SEQ ID NO: 20104 - DNA, 120 bp, synthetic construct
  misc_feature 1..120: note = Artificially Synthesized Probe
  source 1..120: mol_type = other DNA
cctacagatttaccaaggaggtaaatttcccaaaattaagaatttattttggagactgtgcccaggactgttttccttgggaatacttcccaagatctacccaacttccctctaacaatg

SEQ ID NO: 20105 - DNA, 120 bp, synthetic construct
  misc_feature 1..120: note = Artificially Synthesized Probe
  source 1..120: mol_type = other DNA
ccatatgttctgacggctcctctcgactcttcatcctttttttttcatccccaaacaccctttcttatggctccttgctctgctttaaagaaaattcactatcctcttgctcaaacagcc

SEQ ID NO: 20106 - DNA, 120 bp, synthetic construct
  misc_feature 1..120: note = Artificially Synthesized Probe
  source 1..120: mol_type = other DNA
ttttcattcctctaaaagttaaacaaaagaccgcatatatctttgcttctgctctggctctgacaggaatgtagttttacctggtagtaaaaccttccagctaacttgcatttctccagg

SEQ ID NO: 20107 - DNA, 120 bp, synthetic construct
  misc_feature 1..120: note = Artificially Synthesized Probe
  source 1..120: mol_type = other DNA
tcactgaccattatgacaactgactcaacatgccatggacaaccttagctctagtttaactgaacccacgtgaaattatagtacaaacatgtgattaggaacaccgcgaagggtatattt

SEQ ID NO: 20108 - DNA, 120 bp, synthetic construct
  misc_feature 1..120: note = Artificially Synthesized Probe
  source 1..120: mol_type = other DNA
tcacaattgtaactaacagaaaagatgagatcatctgtcaatgatttaagtagcatagatttccatcatatgatggagtcaacaactatgaacagtataagaaaacttctaggccgggcg

SEQ ID NO: 20109 - DNA, 120 bp, synthetic construct
  misc_feature 1..120: note = Artificially Synthesized Probe
  source 1..120: mol_type = other DNA
ggccagtcctatatggtatggaactcctggacacccatgagaaattgactcaacaacaagctatgcatctctagaccttttactcaaattactgagtttaaccatgtacttatttccaag

SEQ ID NO: 20110 - DNA, 120 bp, synthetic construct
  misc_feature 1..120: note = Artificially Synthesized Probe
  source 1..120: mol_type = other DNA
tgtgtacatgtgtggttctgtgtatgcatctatatgatgttcatgtgtttatgtgtgggggatgtgtgagtgtatgtatggtgtttgtgtaggtatgtaaatgtgatgtgtgtgactgtg

SEQ ID NO: 20111 - DNA, 120 bp, synthetic construct
  misc_feature 1..120: note = Artificially Synthesized Probe
  source 1..120: mol_type = other DNA
actgcttggcgccaatggtcttgcggttgatgttgctgatactgaaaaggtcgaaggtcgtgtctttgtcctggtgaccagctgcaaagggaaccgcagtggagaagggtgacgtagggg

SEQ ID NO: 20112 - DNA, 120 bp, synthetic construct
  misc_feature 1..120: note = Artificially Synthesized Probe
  source 1..120: mol_type = other DNA
atgtattctccaactcttaatgcaccctgtgggtaaggatctgaaagagtggtcagtatcaagtacagaaacaaatggttttaagtcaccacctaagctattggcaagaaaagtgatcag

SEQ ID NO: 20113 - DNA, 120 bp, synthetic construct
  misc_feature 1..120: note = Artificially Synthesized Probe
  source 1..120: mol_type = other DNA
tcatgtcatattggctcagaagtaagttactatttgatttataaaggagctagaaggtcctcacgggtaagattgtccaaccacacactttattttgtcatctctccccttgcagctaag

SEQ ID NO: 20114 - DNA, 120 bp, synthetic construct
  misc_feature 1..120: note = Artificially Synthesized Probe
  source 1..120: mol_type = other DNA
tatttagaatatcaaaggccgttaacttctcattgttaatccaaggactctccctctccagaaacaacatttggtaacctggaaatcctcaccttccaggaatagagaaacattcctcag

SEQ ID NO: 20115 - DNA, 120 bp, synthetic construct
  misc_feature 1..120: note = Artificially Synthesized Probe
  source 1..120: mol_type = other DNA
acaggatggtaaatgcgaaagttctggatgcccagcttcataaggacaggttagaaaaactaaatcaaactcctttgacgaaaccagatcctactgtctctgccttgaggtagattctta

SEQ ID NO: 20116 - DNA, 120 bp, synthetic construct
  misc_feature 1..120: note = Artificially Synthesized Probe
  source 1..120: mol_type = other DNA
atattccgggagttgtttctaattctctcctcaataacaaactctcatgtggaatcttcttcttcggaaactgaaaacataaagcgtttacccgggttcccaggcaggtatatacattga

SEQ ID NO: 20117 - DNA, 120 bp, synthetic construct
  misc_feature 1..120: note = Artificially Synthesized Probe
  source 1..120: mol_type = other DNA
tgctctctggctcgccaccgcccaactccccctgcccccaccctggattttttttccccttctctcaaacctctaaacaggaaatagcccgaatcacaataatatacgggagcagccgcg

SEQ ID NO: 20118 - DNA, 120 bp, synthetic construct
  misc_feature 1..120: note = Artificially Synthesized Probe
  source 1..120: mol_type = other DNA
ttctatagggagctctcagtcaaaaccgagttggagatctttatgttggaaaaaggccactgaattccaggcattcttcgagcttgagaagggcattttcaagactattttgaagtttgc

SEQ ID NO: 20119 - DNA, 120 bp, synthetic construct
  misc_feature 1..120: note = Artificially Synthesized Probe
  source 1..120: mol_type = other DNA
aaccttcaagcgtttcctattttgactgaaatggaatggagttacccagtgctcaacctgctctaattaactaggcatagatgcttgatgatctgtaactctgtgattcttttaactggc

SEQ ID NO: 20120 - DNA, 120 bp, synthetic construct
  misc_feature 1..120: note = Artificially Synthesized Probe
  source 1..120: mol_type = other DNA
ggtgtgagcccccgctattttttcttgacccttgcctcttcttgtgttacgactttcatcacaatgaggttatcaacttgtagtaagaatttacagcttcctttgattgaaaagtccctt

SEQ ID NO: 20121 - DNA, 120 bp, synthetic construct
  misc_feature 1..120: note = Artificially Synthesized Probe
  source 1..120: mol_type = other DNA
acagttcaagtttggcaaatctaattggcaccttttgatattgatcatcactgaactttagaatccccagtgtccagaactactggtctccataggagatatcaaggtactggactagta

SEQ ID NO: 20122 - DNA, 120 bp, synthetic construct
  misc_feature 1..120: note = Artificially Synthesized Probe
  source 1..120: mol_type = other DNA
aggtgtggaagaactgacctctgctacaaccagctgaatgaaccacagtaaatctcataagctcgaagctgccacatgctggtatataaaataaaggaaataattatcttgctcctgaat

SEQ ID NO: 20123 - DNA, 120 bp, synthetic construct
  misc_feature 1..120: note = Artificially Synthesized Probe
  source 1..120: mol_type = other DNA
aaaaaaaaaaaaaagatgtttttaatgccccctcagagaacattttccccagtaaaccccctctaccccttagctggctcctgtcaatattccccctctacccctgaccagggtaccagg

SEQ ID NO: 20124 - DNA, 120 bp, synthetic construct
  misc_feature 1..120: note = Artificially Synthesized Probe
  source 1..120: mol_type = other DNA
ttgagccatttgctcttttggaatttattgcggcttaggcctctgggcctagtgtaatacctgatgttcctaaagatttgaatgaagaattaatgaatacgtagtttcttggggttgatg

SEQ ID NO: 20125 - DNA, 120 bp, synthetic construct
  misc_feature 1..120: note = Artificially Synthesized Probe
  source 1..120: mol_type = other DNA
caataatatagtttaaaaatcatattaatacattgtctatatattttattagggtactctttattttattctcaagtactgccaaaagaagagtagactaaggctgggtgcgatgtctca

SEQ ID NO: 20126 - DNA, 120 bp, synthetic construct
  misc_feature 1..120: note = Artificially Synthesized Probe
  source 1..120: mol_type = other DNA
atttagaaaaagaaaacttccatttgagggttctttgagacagtagtgggataggtgagtggaagtgtgtagcgcagtgattctcaaacattagtttgcatctgaaccatctggaaggct

SEQ ID NO: 20127 - DNA, 120 bp, synthetic construct
  misc_feature 1..120: note = Artificially Synthesized Probe
  source 1..120: mol_type = other DNA
gttgttagtagagagcaaagtgatttaatatcagtgcttgtaaaccaactgcctggtgacttgctgtatggtcaggaactgagtagcagctccttagtttagactttccaatttgccttt

SEQ ID NO: 20128 - DNA, 120 bp, synthetic construct
  misc_feature 1..120: note = Artificially Synthesized Probe
  source 1..120: mol_type = other DNA
accaacctgggtaggaatcacacctctactacttattacctgtgtgccttgggcaagttacttagtcacctggtgcctagatttcttcatttcttcatctaaaaacagggagaatttatt

SEQ ID NO: 20129 - DNA, 120 bp, synthetic construct
  misc_feature 1..120: note = Artificially Synthesized Probe
  source 1..120: mol_type = other DNA
cccagcctcatttttctggctcttgaacacacttttctctttacctggatgccccagatttcttttgtcagcctaaggaatatgtactcctattattaagacccaactcaagtactttct

SEQ ID NO: 20130 - DNA, 120 bp, synthetic construct
  misc_feature 1..120: note = Artificially Synthesized Probe
  source 1..120: mol_type = other DNA
gatggtgcacaggtaaacataaatataacaattagagactaagcagtgacacaagtcccacagcaggtgcagggagtctctcctgggaagagggagaaataggaagttggaatgttgata

SEQ ID NO: 20131 - DNA, 120 bp, synthetic construct
  misc_feature 1..120: note = Artificially Synthesized Probe
  source 1..120: mol_type = other DNA
ccgtgcccagccaagtgtagggtcttaatcattatacttgcctgactcttaattaagaagtaaactctaatattattggacgtcagtcaagtgctagttcctgagtgaggagagatatta

SEQ ID NO: 20132 - DNA, 120 bp, synthetic construct
  misc_feature 1..120: note = Artificially Synthesized Probe
  source 1..120: mol_type = other DNA
gaaatattttacaggaaaatttagaacaaagtgtcttaaagactttgcggtgtttctggatcttgactactagggtcatgtgcaagctcagtgaatgcaggaggaaactacatccatttc

SEQ ID NO: 20133 - DNA, 120 bp, synthetic construct
  misc_feature 1..120: note = Artificially Synthesized Probe
  source 1..120: mol_type = other DNA
atttcatttcctctctccagaagactttgggcagctcaatccagacatcttaagatgcccctttgggtctgcttttctgttctgttcttccacagggttagtatagaattgatttttctc

SEQ ID NO: 20134 - DNA, 120 bp, synthetic construct
  misc_feature 1..120: note = Artificially Synthesized Probe
  source 1..120: mol_type = other DNA
ctataaagtatataatgggctcagtcacagggctggacagatccaggccatcaggaacttctgggctttcacctttttccatcacaagacaaaactggatgagaactttacaaaaaaaaa

SEQ ID NO: 20135 - DNA, 120 bp, synthetic construct
  misc_feature 1..120: note = Artificially Synthesized Probe
  source 1..120: mol_type = other DNA
ctaattcaggcagaataagaaattctacctaaaaccaagagagctattaatgcagcagctcatggcacagccaccatctcccattgatgagcagtgagagcgagaccaggtctcccatag

SEQ ID NO: 20136 - DNA, 120 bp, synthetic construct
  misc_feature 1..120: note = Artificially Synthesized Probe
  source 1..120: mol_type = other DNA
gcaagggaactgctagaatcctacaattctaggctcatagtagaaacagcgtaggatcaatttctaccaacagtaatagggagcggtgttccctcacataaggagttcaaagttttttat

SEQ ID NO: 20137 - DNA, 120 bp, synthetic construct
  misc_feature 1..120: note = Artificially Synthesized Probe
  source 1..120: mol_type = other DNA
tggctgcatttattatttaaaacaagccctgtgttgtggtcttagtctagctgtacgaatgatggaacagaggttcagaaaggtcagtaacttgttcaaggtcaccaggtcttaaacagt

SEQ ID NO: 20138 - DNA, 120 bp, synthetic construct
  misc_feature 1..120: note = Artificially Synthesized Probe
  source 1..120: mol_type = other DNA
ttttttcagctcctgaaaagcagaccacaccctataaaacagactgtacagggcattagttcatttccctttttatacttccaaagcacagtaactgttaaaacacccagtgaagaagca

SEQ ID NO: 20139 - DNA, 120 bp, synthetic construct
  misc_feature 1..120: note = Artificially Synthesized Probe
  source 1..120: mol_type = other DNA
taatcaggccaagtgaagtgggagctcttggtcttttgttgtttttggaagaaaacttagccttcatctattcagtcctctcatcttataaacagggaaattgaggcttagggagtagtt

SEQ ID NO: 20140 - DNA, 120 bp, synthetic construct
  misc_feature 1..120: note = Artificially Synthesized Probe
  source 1..120: mol_type = other DNA
aactcaactaaaattaaatttcacaaaagtcaatttattagctttcataaacgataactgtaatctcctagggtgacagtggcctccggcatagctggatccagaagctcgagtgatgtc

SEQ ID NO: 20141 - DNA, 120 bp, synthetic construct
  misc_feature 1..120: note = Artificially Synthesized Probe
  source 1..120: mol_type = other DNA
tgtttaatagatctagctagggctacatagagaacatccaaaggaacagcagcttccattaaagattagttcagttgcttcaggtgaacagtgactgaaatttacaggaccttgtaccga

SEQ ID NO: 20142 - DNA, 120 bp, synthetic construct
  misc_feature 1..120: note = Artificially Synthesized Probe
  source 1..120: mol_type = other DNA
agatttagaaaatacagaaaaataagggggaaaattacccattgtcctatctccccaagagaactactagaatcgtttaggtcagtggttgtcaacggggaggtggaaatagggaatttt

SEQ ID NO: 20143 - DNA, 120 bp, synthetic construct
  misc_feature 1..120: note = Artificially Synthesized Probe
  source 1..120: mol_type = other DNA
ttctgcctcagggtctttcatgaagggattcggcctaaacaagctcccatgattcagatgtgcaagttgattgctagattattaatttttgttcagagataacctctactagcaattgga

SEQ ID NO: 20144 - DNA, 120 bp, synthetic construct
  misc_feature 1..120: note = Artificially Synthesized Probe
  source 1..120: mol_type = other DNA
tgggcttctattctgcaaactgtacagttgcatgattggccaaaacgaatggctaccaaccgacaattgactgagtattgcaagttcattgaaacagagattggatgatttacacatgtg

SEQ ID NO: 20145 - DNA, 120 bp, synthetic construct
  misc_feature 1..120: note = Artificially Synthesized Probe
  source 1..120: mol_type = other DNA
cctgtacaaataaaactgacaccatcttttctttctatttcatcgtgtagggagtagagtgttttgcacagacgccacaatatcagtttgtctagcaaacagaagagtatgtccagaagt

SEQ ID NO: 20146 - DNA, 120 bp, synthetic construct
  misc_feature 1..120: note = Artificially Synthesized Probe
  source 1..120: mol_type = other DNA
tgcccagcctaaaatattttgttctagctattttctcacccgctgatatttgtttaacctgaaaggcgaattcttataagatcttgtttctcagagtgaccctcaggtggactggtgata

SEQ ID NO: 20147 - DNA, 120 bp, synthetic construct
  misc_feature 1..120: note = Artificially Synthesized Probe
  source 1..120: mol_type = other DNA
gcaaattgtatggtatgtggacttcagtgcatttcccaaaatcttaccattgcagggaatgagcatgttggatttttaacaacactgtcttttccagggtgcgaagtaccacattactgt

SEQ ID NO: 20148 - DNA, 120 bp, synthetic construct
  misc_feature 1..120: note = Artificially Synthesized Probe
  source 1..120: mol_type = other DNA
tgtctagttgtccaaatgaggacattcaagtgggggaagtcctcattttccactgaattaacagggctggatgtgggttttgtttactgaaatgttctctctggagctcttttttttttt

SEQ ID NO: 20149 - DNA, 120 bp, synthetic construct
  misc_feature 1..120: note = Artificially Synthesized Probe
  source 1..120: mol_type = other DNA
agatttctagataggatctgttgattattcaaataaattggaggggtactatagagtatggcaaagagagattggagctagcattgtctgttggaggaaaggctctttctgactctagcc

SEQ ID NO: 20150 - DNA, 120 bp, synthetic construct
  misc_feature 1..120: note = Artificially Synthesized Probe
  source 1..120: mol_type = other DNA
tcattttctagatacgaaatctcattgttaggcaatttagataccttaaagttatcactgactcaccccatcatataggcttagaaaagtgagttgaggttggggtcagtggctcacgcc

SEQ ID NO: 20151 - DNA, 120 bp, synthetic construct
  misc_feature 1..120: note = Artificially Synthesized Probe
  source 1..120: mol_type = other DNA
ggattctgtcctcaaatatttaatgagcatctcgcactgtgctgctgagggaaatgtagaggaatattaagcttgtccctggtagactttggagcctaatttggaatcagtaaattgcat

SEQ ID NO: 20152 - DNA, 120 bp, synthetic construct
  misc_feature 1..120: note = Artificially Synthesized Probe
  source 1..120: mol_type = other DNA
aatacatgtaagatttactacattggttccatctggcagagcaggacaactcaaaaggggtagaggggctgccaggtcataggtactctactctaggggtacctaggggctgccaggtca

SEQ ID NO: 20153 - DNA, 120 bp, synthetic construct
  misc_feature 1..120: note = Artificially Synthesized Probe
  source 1..120: mol_type = other DNA
ccaccacgcctggtccttattctttcttgctttctaatgacttaaagctaaacatattttccaaacagaaatcagagtgtgtgcttttttactcatgaaccaacaagacagagtgctggt

SEQ ID NO: 20154 - DNA, 120 bp, synthetic construct
  misc_feature 1..120: note = Artificially Synthesized Probe
  source 1..120: mol_type = other DNA
ggctggaagcttatcttatgatttccatttcatctgataaaattgagatgaagaatttgcttctagttctggctggaatgggggggttcttcactcacatcggttttgattcttcactca

SEQ ID NO: 20155 - DNA, 120 bp, synthetic construct
  misc_feature 1..120: note = Artificially Synthesized Probe
  source 1..120: mol_type = other DNA
attaactctgtcaatacgctttgaaagaggctttgtaaattgttaaagttacatttgtctcttctgatagctttagctcagcagaataaatatggtaatagttggctgggtacagtggct

SEQ ID NO: 20156 - DNA, 120 bp, synthetic construct
  misc_feature 1..120: note = Artificially Synthesized Probe
  source 1..120: mol_type = other DNA
cctggccttcagatcctagattagcaaagaatttgatgtaccttctacaaacctgattttgttcattatgactccacaccttgcttgctttccttcactactctaggaatgtggaaaagt

SEQ ID NO: 20157 - DNA, 120 bp, synthetic construct
  misc_feature 1..120: note = Artificially Synthesized Probe
  source 1..120: mol_type = other DNA
gcagagtatatgtggggccagaactgaacatgatggatgtcacctatgggtgatcaatttaggaatgacatagctgtcaatcttggggtaacatgagctgagcactattatatattatta

SEQ ID NO: 20158 - DNA, 120 bp, synthetic construct
  misc_feature 1..120: note = Artificially Synthesized Probe
  source 1..120: mol_type = other DNA
aatatgtacctacttgtctgtgcagagagatacctggaaaggtgctcagtagttggctctggatggtgacattttagttgtactttaccactttttggtgatctacttactgcatagttt

SEQ ID NO: 20159 - DNA, 120 bp, synthetic construct
  misc_feature 1..120: note = Artificially Synthesized Probe
  source 1..120: mol_type = other DNA
aaatgttttacctgacttcaaaattgtaatctttctgtcttgtgtcagagaattgtaatgatgtccctttagcagaatttcctaaacctctcccatgatgagaatcacctgggggggcat

SEQ ID NO: 20160 - DNA, 120 bp, synthetic construct
  misc_feature 1..120: note = Artificially Synthesized Probe
  source 1..120: mol_type = other DNA
ttttgggggtgaagggagctctgaaactcagttagacaatagaacggcatttgaatcaaggattctctcgttggagtcaaatcgcatttgtggcattgacctttttaatatttcatagga

SEQ ID NO: 20161 - DNA, 120 bp, synthetic construct
  misc_feature 1..120: note = Artificially Synthesized Probe
  source 1..120: mol_type = other DNA
attccatctgcttgaggacaaccatgggcaaactgctttctctgaagcatagtttcttcacgtataaagcaggggcaagaatactgactatatagtcactacattgaatgacttagtata

SEQ ID NO: 20162 - DNA, 120 bp, synthetic construct
  misc_feature 1..120: note = Artificially Synthesized Probe
  source 1..120: mol_type = other DNA
atgcctgtaatcacagcactttgggagaccaaggtaggaggatagctagaagccaggagtttgaggccagcctgtgcaacatagcaagacctcatctctactaaaaataatttttttttc

SEQ ID NO: 20163 - DNA, 120 bp, synthetic construct
  misc_feature 1..120: note = Artificially Synthesized Probe
  source 1..120: mol_type = other DNA
gaatgttcacctaatgtcgaagacaggtattaggactttagtttttaaatttcttggtgctcttctgaactcctcagatgctttataatgagcaccttattcttgcaaaactcagtggtc

SEQ ID NO: 20164 - DNA, 120 bp, synthetic construct
  misc_feature 1..120: note = Artificially Synthesized Probe
  source 1..120: mol_type = other DNA
actgaaaacagtgtcgaagctatttaggatctgggaagtgtacaagttaattacccccaccctcaaaaaagaaaaaagaggaggactttaacaaactttgaaagtgatcatgagggcagg

SEQ ID NO: 20165 - DNA, 120 bp, synthetic construct
  misc_feature 1..120: note = Artificially Synthesized Probe
  source 1..120: mol_type = other DNA
aacacactgtgagcaggctcccttttataaattgtcattatcttctgtatagctaccccagggtatatggtaggcattcaagaaaggtttgttaaaggagagttacgattccagtctact

SEQ ID NO: 20166 - DNA, 120 bp, synthetic construct
  misc_feature 1..120: note = Artificially Synthesized Probe
  source 1..120: mol_type = other DNA
accatcattggacattggtggtttccatcattcattattagatacaggcatatagtgaagtgctgcctcatacctagtcatccactgtaatctaacctccagtcgtatctttccattgaa

SEQ ID NO: 20167 - DNA, 120 bp, synthetic construct
  misc_feature 1..120: note = Artificially Synthesized Probe
  source 1..120: mol_type = other DNA
acttctctctgtgttatttattccccttacctggaaggcttttttccttctttgtgtcttaaaaactcattccgacctctcctttagaatgtataagcaaccccatctctggaaagcctt

SEQ ID NO: 20168 - DNA, 120 bp, synthetic construct
  misc_feature 1..120: note = Artificially Synthesized Probe
  source 1..120: mol_type = other DNA
tggtggcaagtggtcatcttattgaacagtgccgctctagagagaaaaaaggaaatcagtcagtagatgtaactgccacattctggattattttttaaatgttagtggctctaagcccac

SEQ ID NO: 20169 - DNA, 120 bp, synthetic construct
  misc_feature 1..120: note = Artificially Synthesized Probe
  source 1..120: mol_type = other DNA
atcctgtcagataagcacttgtgacctactggcaaccttttataagctgatgatgggagaggagtttcaatctctttattggagttgttggaaatgtgccaaagagataacctggaatat

SEQ ID NO: 20170 - DNA, 120 bp, synthetic construct
  misc_feature 1..120: note = Artificially Synthesized Probe
  source 1..120: mol_type = other DNA
tgtctttgtgttttccttctctatttcaaaccacactcggtattgatgcaaagttacaggcttgtgtacgtgagagaaactgaaaactcatcacagagcagaatcccttttccctttcaa

SEQ ID NO: 20171 - DNA, 120 bp, synthetic construct
  misc_feature 1..120: note = Artificially Synthesized Probe
  source 1..120: mol_type = other DNA
tctgagagcacacacctgggcaggagatcgcttgaagtgagaaattcgtagtggtaaatgtatttgtagcaaagtaccactgcatatcctgcttgagaggatgaaatttgattatttagt

SEQ ID NO: 20172 - DNA, 120 bp, synthetic construct
  misc_feature 1..120: note = Artificially Synthesized Probe
  source 1..120: mol_type = other DNA
aaaaactgaaagagttgttgttcacactctgttaaaaggccttgaaggccataacgaagctttgggtggggggaagtcagaaatccctcatgtattaaatgacttgactttccctacaaa

SEQ ID NO: 20173 - DNA, 120 bp, synthetic construct
  misc_feature 1..120: note = Artificially Synthesized Probe
  source 1..120: mol_type = other DNA
gggcctgtttctccctcataggaatttttgcaatcagcctttttagtagatgcccatatagaaagtgaatttgggagggtctaaggtggtattactattaaactttttgaaaaggctgtg

SEQ ID NO: 20174 - DNA, 120 bp, synthetic construct
  misc_feature 1..120: note = Artificially Synthesized Probe
  source 1..120: mol_type = other DNA
actctgggaatgagtaatatgaggctaaggcaaaaatggtaaagctagcccttgacatctgaggtgtgcataatactgcttaaaatatgagtgtggtgcttacttatagagagcctggta

SEQ ID NO: 20175 - DNA, 120 bp, synthetic construct
  misc_feature 1..120: note = Artificially Synthesized Probe
  source 1..120: mol_type = other DNA
ctagagagatgcatgctcatggcaggcgaatgaatcaaggagaagagaaaatactgtttcagtagactctctagtgatgtgtgtgttcacaccatttatgagaaatcctaagctttcaat

SEQ ID NO: 20176 - DNA, 120 bp, synthetic construct
  misc_feature 1..120: note = Artificially Synthesized Probe
  source 1..120: mol_type = other DNA
aactcttccaggacatgtagcttcaaggaccttctaggttcttctgagggggaaataatgttccacttggggccatttttttccatttgttgagagtcatttgttttcagagtattaaag

SEQ ID NO: 20177 - DNA, 120 bp, synthetic construct
  misc_feature 1..120: note = Artificially Synthesized Probe
  source 1..120: mol_type = other DNA
tcatccagagaattttgtccaaaaaaaattatagaatttcatctagaccatttttgtaatggcatggaagcagcattagctgcaccactgattagctgggtggcttttgctgtcttgtga

SEQ ID NO: 20178 - DNA, 120 bp, synthetic construct
  misc_feature 1..120: note = Artificially Synthesized Probe
  source 1..120: mol_type = other DNA
agggcaagtggcaacacattgaaatgaagaagccccaagtttgcaacacattgaaaggaagaggccccaagttcgttttgagcctaaattgaattttaatcaaaggtctgagagaaatat

SEQ ID NO: 20179 - DNA, 120 bp, synthetic construct
  misc_feature 1..120: note = Artificially Synthesized Probe
  source 1..120: mol_type = other DNA
ttctctcttgccacttttccaatgattaccacacctacctaaaagagaacttctcttctgacttctctcaccgtggaacacttttgcttgaacttgggagaggacccatatataaataaa

SEQ ID NO: 20180 - DNA, 120 bp, synthetic construct
  misc_feature 1..120: note = Artificially Synthesized Probe
  source 1..120: mol_type = other DNA
tctcagttgtaaaataggcctaccctatcagtcatggttcagtcaagaagacatgtcattctagctatttcaaggagaaggggattcaatacagagtattagttgccttcaggacaaaga

SEQ ID NO: 20181 - DNA, 120 bp, synthetic construct
  misc_feature 1..120: note = Artificially Synthesized Probe
  source 1..120: mol_type = other DNA
atgccactgtaagagctccgtgtcacataaggtgttgtttttctggaagggccttccagattctgtatctattgctctgtgattctaggtacttttctaaaggtataagcttgagaaatt

SEQ ID NO: 20182 - DNA, 120 bp, synthetic construct
  misc_feature 1..120: note = Artificially Synthesized Probe
  source 1..120: mol_type = other DNA
ccttgcagagaaatttgaagtgataaggaaggcaaatattcgaaatggaaagataagtataaccagtgactatttcagccactggtttagcagttcaagtgagctggctgtttgtaaagc

SEQ ID NO: 20183 - DNA, 120 bp, synthetic construct
  misc_feature 1..120: note = Artificially Synthesized Probe
  source 1..120: mol_type = other DNA
cagacttagtcggctggctttatatttgtgttgtcaaaactgggatgctgtcatttctgtttctctgtctctttcgtctgttccaatttgagatatactgactatgttagtgtagtctgc

SEQ ID NO: 20184 - DNA, 120 bp, synthetic construct
  misc_feature 1..120: note = Artificially Synthesized Probe
  source 1..120: mol_type = other DNA
ggtccatttgatgaatttgaaacctgtagattctgtcaattccaccagtctctgctttttagaatcacagtggcaagaaaataggagaagctcaaggccctgtgttgattattaggagtt

SEQ ID NO: 20185 - DNA, 120 bp, synthetic construct
  misc_feature 1..120: note = Artificially Synthesized Probe
  source 1..120: mol_type = other DNA
ggaagggtgcttatttctctcctcactgtctttccccaggacccagaattgataggttagttgagtttctgtgggcagtctaaggtagtgttactatttaaaatgttagtaacattttca

SEQ ID NO: 20186 - DNA, 120 bp, synthetic construct
  misc_feature 1..120: note = Artificially Synthesized Probe
  source 1..120: mol_type = other DNA
gaccttaggtcagcttcccctgaagtatgtgattggaaactgaacgagttcagattttagtttaggtaaaaatataaccagagaagttgctaccaagcatagttgactttgagctgacct

SEQ ID NO: 20187 - DNA, 120 bp, synthetic construct
  misc_feature 1..120: note = Artificially Synthesized Probe
  source 1..120: mol_type = other DNA
tgcaacatgtactgttgtgtttctgagttgttgactatttcagttccaaacagttcgttatttcctgtcagaggaaacttcagagtaacaataaagtgctggtgtggcttcaaaggcttg

SEQ ID NO: 20188 - DNA, 120 bp, synthetic construct
  misc_feature 1..120: note = Artificially Synthesized Probe
  source 1..120: mol_type = other DNA
gaaaaaaaaaactttcatgttaaattctcacttgatcctcaccaagaaccctgtgaggtgagtgttattcactggatgcttagagaacctagagatcatacagctggctagtgcgtacca

SEQ ID NO: 20189 - DNA, 120 bp, synthetic construct
  misc_feature 1..120: note = Artificially Synthesized Probe
  source 1..120: mol_type = other DNA
gcatgactgcaccacctagtggataatacatctgttaccaggcagtggcctttgatgatttcctatagctacaaattctacaaaaaggaaaattgggtgcctttttatgctttgaaatca

SEQ ID NO: 20190 - DNA, 120 bp, synthetic construct
  misc_feature 1..120: note = Artificially Synthesized Probe
  source 1..120: mol_type = other DNA
actgtaaattgctgaaagttataggtcattacacatgaagaggcttaaaaatgccgtttgatctatagttaactacaaaatatggagggggagctatatgcacacagtgtctgccatagc

SEQ ID NO: 20191 - DNA, 120 bp, synthetic construct
  misc_feature 1..120: note = Artificially Synthesized Probe
  source 1..120: mol_type = other DNA
ctgatttttttttttttggtctcatatcttatgaaaattggactcatgcaaatttgcattcaaattgtgaccaggcacctgttagctgtggggccttgccatgggcaagttccttgagat

SEQ ID NO: 20192 - DNA, 120 bp, synthetic construct
  misc_feature 1..120: note = Artificially Synthesized Probe
  source 1..120: mol_type = other DNA
tggaaaggatataagctttctagtcacaccagcctgagttagaatctgtcctctgccactttttacttgtatgacctcaatcaacttactttacttctgacttcagtgtcctttctgtaa

SEQ ID NO: 20193 - DNA, 120 bp, synthetic construct
  misc_feature 1..120: note = Artificially Synthesized Probe
  source 1..120: mol_type = other DNA
tcgtaatgctcttctgagaggaagaaaacagactttcttacttgggagtggtcagcttatttgctgctacaatattaatgatggaaaacccttatcaagagtgcttatcctgtgatgggt

SEQ ID NO: 20194 - DNA, 120 bp, synthetic construct
  misc_feature 1..120: note = Artificially Synthesized Probe
  source 1..120: mol_type = other DNA
aaataaaggagaatgtggttaaaaaacacaactcagtaaacctggcactcttcagtagtaggtctgggatctagttgtgttgattctggtgacctatcacaaacccctctctaagcttat

SEQ ID NO: 20195 - DNA, 120 bp, synthetic construct
  misc_feature 1..120: note = Artificially Synthesized Probe
  source 1..120: mol_type = other DNA
actataaaagtcctcttttcatctggaggtaggtttacctaccagcctaggccagctagctgtttctttacactatccctttctaaggatttgagttcgtttgtaaaatgacatagcaga

SEQ ID NO: 20196 - DNA, 120 bp, synthetic construct
  misc_feature 1..120: note = Artificially Synthesized Probe
  source 1..120: mol_type = other DNA
tctcccatttctgaggtgaatatgcattttaaggctcccaagccatagattaagctgttttgacatgtctgtccctgctgagaacgtgaaatcctgtgtgtgttattaaacagtttactg

SEQ ID NO: 20197 - DNA, 120 bp, synthetic construct
  misc_feature 1..120: note = Artificially Synthesized Probe
  source 1..120: mol_type = other DNA
gagggcagtgctttatttgttttgctcttcatttgttcctcagagcacattgcacttggtcgacatttgttgaatgaatgagtaaagaattagtgatggcatatttacatacccatgttc

SEQ ID NO: 20198 - DNA, 120 bp, synthetic construct
  misc_feature 1..120: note = Artificially Synthesized Probe
  source 1..120: mol_type = other DNA
gaggttggagccctcttaatcacctcctaaaagctcctccccttaacacttactgtattgggtcttaggttccagcacatgagttttggtgggacacatacattcaaaccttagcaggtg

SEQ ID NO: 20199 - DNA, 120 bp, synthetic construct
  misc_feature 1..120: note = Artificially Synthesized Probe
  source 1..120: mol_type = other DNA
acctggctggtgtgtacagagcctgcacatgtctgcatagcctaggttgaggtttggacacttgcttagattccaaggtcctcctttgtacccatttatttatataataaataatttatt

SEQ ID NO: 20200 - DNA, 120 bp, synthetic construct
  misc_feature 1..120: note = Artificially Synthesized Probe
  source 1..120: mol_type = other DNA
gtgactttaaaaatcactttcttggctctgcttctccttgtttcctagatggtggccatctcatggtccagatttatatacatctcagcctcaaatcaaatggcacactttacatttgca

SEQ ID NO: 20201 - DNA, 120 bp, synthetic construct
  misc_feature 1..120: note = Artificially Synthesized Probe
  source 1..120: mol_type = other DNA
ggaagcaaaaccattctcacagtgagtcctttatcctcagattgatttgtgcttctggcatctttcagcaacaaattgtgagattgtaggttgtagtcactggtgggtttttaaaaatac

SEQ ID NO: 20202 - DNA, 120 bp, synthetic construct
  misc_feature 1..120: note = Artificially Synthesized Probe
  source 1..120: mol_type = other DNA
tttaccctctttgcccctttcaaattactggtaccatccttcaactcgccctccttccagttgaaattattatcccctcttcactttgcaaaattctaactgcattgaaaaatttgctgt

SEQ ID NO: 20203 - DNA, 120 bp, synthetic construct
  misc_feature 1..120: note = Artificially Synthesized Probe
  source 1..120: mol_type = other DNA
gagctatataaaaatggtatcacactctacaaatccttctggggtgtttttttgctcaactttatgtttgagatgcatcccttttgtggtggtctatgtgactggtttgttcgtcttcat

SEQ ID NO: 20204 - DNA, 120 bp, synthetic construct
  misc_feature 1..120: note = Artificially Synthesized Probe
  source 1..120: mol_type = other DNA
atgttaagtagctaatagttaattttattacccgttaaccataggtaagaagaagcctcgcaatctgattggtttcaggcaccaggcaagttaatagcaaggtctgattggtggtggtag

SEQ ID NO: 20205 - DNA, 120 bp, synthetic construct
  misc_feature 1..120: note = Artificially Synthesized Probe
  source 1..120: mol_type = other DNA
aaggccacatctaaaactgaagttggcaaggagttagtaaggtgttctatggaaatggaaaagggcaaccaattctgacttactgcaggagttcagttgagtgtctgctttctttttctt

SEQ ID NO: 20206 - DNA, 120 bp, synthetic construct
  misc_feature 1..120: note = Artificially Synthesized Probe
  source 1..120: mol_type = other DNA
ttttacataatttagataataatcttttggaatgtttacatatttccttgtgttgatgggccttcatttaatctaaatcttgcacttttgggctgcttgcgtccctggcaccccaggccc

SEQ ID NO: 20207 - DNA, 120 bp, synthetic construct
  misc_feature 1..120: note = Artificially Synthesized Probe
  source 1..120: mol_type = other DNA
ttcttcagtttatgtttcttttacctctcactcatggtgatgtgcatgtttaaattgtgggctcatttccttggatacatactatctggggaatctttgagggctgtgtttgagtgtgat

SEQ ID NO: 20208 - DNA, 120 bp, synthetic construct
  misc_feature 1..120: note = Artificially Synthesized Probe
  source 1..120: mol_type = other DNA
cccaattgggcataccctatgataaggctaaggatatttttagacataaacatgcagaaaacttgcctacgaggtcacctttgacaggaagagggggagaatgattttaaaaaaagaatc

SEQ ID NO: 20209 - DNA, 120 bp, synthetic construct
  misc_feature 1..120: note = Artificially Synthesized Probe
  source 1..120: mol_type = other DNA
gtctgacatctcctagagggaccataagttcctcataggaagagttttcctttgaccctcagaactgtgagcttcaagctttgtcttctatgaaaattaaagacattcccgaatttaatg

SEQ ID NO: 20210 - DNA, 120 bp, synthetic construct
  misc_feature 1..120: note = Artificially Synthesized Probe
  source 1..120: mol_type = other DNA
tcttatttccgatcttccatgcatgaagaaaagggtttagtgctttgcttttcatgagatctcaacacatattttacgttcaaattttatctttaaaatccagttacgggccgggcgcag

SEQ ID NO: 20211 - DNA, 120 bp, synthetic construct
  misc_feature 1..120: note = Artificially Synthesized Probe
  source 1..120: mol_type = other DNA
ttcactgtatgttgaaatgaaactaccaacacatctactttgaagttaaaggtatactttaaaaatataattttaggcagacataagaaagaacgaaatatgtcctttgcagcaacacga

SEQ ID NO: 20212 - DNA, 120 bp, synthetic construct
  misc_feature 1..120: note = Artificially Synthesized Probe
  source 1..120: mol_type = other DNA
aataaatcctgaaagccacttattgaaggatttttaatatttctcctctctgatgtacaggattccaaaagaggatttggaattgcagtgtccggaggcagagacaacccccactttgaa

SEQ ID NO: 20213 - DNA, 120 bp, synthetic construct
  misc_feature 1..120: note = Artificially Synthesized Probe
  source 1..120: mol_type = other DNA
cccagctggtaacaccattttacatgatacatgcctgattcccacaggataacttctcaggacgaagtctaaagttaactgtatggctgcattggataaatagctcaaaagtttaggttt

SEQ ID NO: 20214 - DNA, 120 bp, synthetic construct
  misc_feature 1..120: note = Artificially Synthesized Probe
  source 1..120: mol_type = other DNA
ggccttgggcgccactagacactgagccctttagaaagcctttcaggtctatttgctgcttctatttgttcctaaataaataatttacaatgaatagatgggagtttttcatgacccatt

SEQ ID NO: 20215 - DNA, 120 bp, synthetic construct
  misc_feature 1..120: note = Artificially Synthesized Probe
  source 1..120: mol_type = other DNA
ctattctgccatctttacttggtctctgtatgtatataaacactcatgtctttctgggcaaccatgcgaaggaaagttacagacatgacagttcatttctacttacttcacatgcatttc

SEQ ID NO: 20216 - DNA, 120 bp, synthetic construct
  misc_feature 1..120: note = Artificially Synthesized Probe
  source 1..120: mol_type = other DNA
tctttatccgcctttgcccccttggcagctatgtatagaatgtcacactttctggatttttgttttttgagttttataacttagtgatttgggcctctgagacttttcaaacttgagtag

SEQ ID NO: 20217 - DNA, 120 bp, synthetic construct
  misc_feature 1..120: note = Artificially Synthesized Probe
  source 1..120: mol_type = other DNA
gggtcctcctgatgaaaagcagagcgaacgaaggtaggcatgcttgatgtgggaagaaaagcactgttgtgatatgaataacctttgttttcttaatttttttttttcccccgaaagtgt

SEQ ID NO: 20218 - DNA, 120 bp, synthetic construct
  misc_feature 1..120: note = Artificially Synthesized Probe
  source 1..120: mol_type = other DNA
ctatctcttaattgcacttaaccagcattgtacccagcattgacctaaatgcctaacaccaattcgttcgtttaatcctcagaactacctcatgagggaggactcttgtttctccatttt

SEQ ID NO: 20219 - DNA, 120 bp, synthetic construct
  misc_feature 1..120: note = Artificially Synthesized Probe
  source 1..120: mol_type = other DNA
gtactccgcctaatcattgttgagtttctgctctatgcaagggctatgttgaatattcttttacgtagtcctcacaagaaccttgtgtgttaggaggcttcgtttctgttttgttttgtt

SEQ ID NO: 20220 - DNA, 120 bp, synthetic construct
  misc_feature 1..120: note = Artificially Synthesized Probe
  source 1..120: mol_type = other DNA
taccccttttcttcacccactgaattcctttcaatgccaagcttcatataatctaaaatgctagattttttgcagtgccttcctgtagacagcctcattgtcagcagaacatgcctatta

SEQ ID NO: 20221 - DNA, 120 bp, synthetic construct
  misc_feature 1..120: note = Artificially Synthesized Probe
  source 1..120: mol_type = other DNA
cctataaaccagactaagttttttgaacaaattgataacatacgtgtatgtttatgtgtttgtctcctagagtatggtctccggcttgggagtcagatcttcgtaaaggaaatgacccga

SEQ ID NO: 20222 - DNA, 120 bp, synthetic construct
  misc_feature 1..120: note = Artificially Synthesized Probe
  source 1..120: mol_type = other DNA
agtaaggaaggctgttgcttccccattcttctatttagtgtagctatccagctggaagttaaatttctaaggaaagaccccttgaaaccttaatctccaaaggtcactggttggttgtta

SEQ ID NO: 20223 - DNA, 120 bp, synthetic construct
  misc_feature 1..120: note = Artificially Synthesized Probe
  source 1..120: mol_type = other DNA
aaacttaattcactttccagtgtatcagaagttgttgatgactgttacgggtgcagtgcaggaaaacaaaaggagcatgagaaataatgccagcatgttagggggtttgcagtttatttc

SEQ ID NO: 20224 - DNA, 120 bp, synthetic construct
  misc_feature 1..120: note = Artificially Synthesized Probe
  source 1..120: mol_type = other DNA
tacatgtcattgtgaatgtacacacatatgtatttatgaaactgttatctcttgagacatttacgtatgacatgtgattcagttccagagaggacacgccgagcagattgtccaggatgg

SEQ ID NO: 20225 - DNA, 120 bp, synthetic construct
  misc_feature 1..120: note = Artificially Synthesized Probe
  source 1..120: mol_type = other DNA
tgatttttctatttagaaacgcactcttgttagtccagattgataacagtagatgtttcttaacctacagctcctcaaccaaaagcagccccgagaacttttcttcgtcctagtcctgaa

SEQ ID NO: 20226 - DNA, 120 bp, synthetic construct
  misc_feature 1..120: note = Artificially Synthesized Probe
  source 1..120: mol_type = other DNA
tgcgtcctgtcttctcagtcttggaacccagaactcatccatgtatctgtgagaactgatagtgtttctgcccttgccaagattttattagtctgattaatgtgaaaatattgagactct

SEQ ID NO: 20227 - DNA, 120 bp, synthetic construct
  misc_feature 1..120: note = Artificially Synthesized Probe
  source 1..120: mol_type = other DNA
ttttttcttgttaatgttagtaaaaaatccatatgtagtaaactaaggggtctggtaggggcttctaggctccaaggagaggggagaaaaaagttctagaattctcaaggaagcaagcag

SEQ ID NO: 20228 - DNA, 120 bp, synthetic construct
  misc_feature 1..120: note = Artificially Synthesized Probe
  source 1..120: mol_type = other DNA
ctctctgtaagttgttgttagatggggagagtcgctttggtggataaaaagtcatggtatcagcatttatacttaaggtgttttgtttcttgttatcaccctggcaacacggaaggaact

SEQ ID NO: 20229 - DNA, 120 bp, synthetic construct
  misc_feature 1..120: note = Artificially Synthesized Probe
  source 1..120: mol_type = other DNA
agatggactgaaggactcccaaggtcctcccacagccttgtggccctgtcttatttaagtaaacaaatacaagcatgtatagtacatgtgaaaatatacatatggctatatgtagataca

SEQ ID NO: 20230 - DNA, 120 bp, synthetic construct
  misc_feature 1..120: note = Artificially Synthesized Probe
  source 1..120: mol_type = other DNA
ggacttgaatagtgacattaaggactcatttgcatcttggctttgctctggacaggccctgatgaaaacaaacaaaagggtcagtggcatcttactataaacttctctgttttttctttc

SEQ ID NO: 20231 - DNA, 120 bp, synthetic construct
  misc_feature 1..120: note = Artificially Synthesized Probe
  source 1..120: mol_type = other DNA
tgttaagtgggtgttgagagtgtcctccttgtctgcttcagagcttgattggcaactgtgttaatgttctccagagaaacagaatgataggagatattggaatcaataggaaagaaagag

SEQ ID NO: 20232 - DNA, 120 bp, synthetic construct
  misc_feature 1..120: note = Artificially Synthesized Probe
  source 1..120: mol_type = other DNA
tgtaacttgtactaagctgaatgcaacaaacgatgcttttgtctttcagtgtatagagacatcctggcttgtggcagaggggattcgttttttataagaagccactttgaatgtgagaag

SEQ ID NO: 20233 - DNA, 120 bp, synthetic construct
  misc_feature 1..120: note = Artificially Synthesized Probe
  source 1..120: mol_type = other DNA
ggcctggaaatgaactgactgggctctgagcctgttcacctttattttcagactgtatggtcaagttctaacttatgtatgtcagttatgccaaaggcagtttatagagttgaaatcaaa

SEQ ID NO: 20234 - DNA, 120 bp, synthetic construct
  misc_feature 1..120: note = Artificially Synthesized Probe
  source 1..120: mol_type = other DNA
agacctgtggtcttattcggccccatagctgatatagcaatggaaaaattggctaatgagttacctgactggtttcaaactgctagtaagtctgtcagtgtttttttttcccccaaattt

SEQ ID NO: 20235 - DNA, 120 bp, synthetic construct
  misc_feature 1..120: note = Artificially Synthesized Probe
  source 1..120: mol_type = other DNA
aatgcaaaccatttcactgtgtggaaaccagtcactgttactgttctctggcagtaacatactgtttttttttccagagttcccagcattataccaaataatgtgttaattcattttatc

SEQ ID NO: 20236 - DNA, 120 bp, synthetic construct
  misc_feature 1..120: note = Artificially Synthesized Probe
  source 1..120: mol_type = other DNA
acacccagtggttcccaattgtgatttttttcaacccagactccagacaaggtgtcaaaaccatgagacaaaggttaaatccaacgtccaacaaaagttctcgaaagttatttgatcaag

SEQ ID NO: 20237 - DNA, 120 bp, synthetic construct
  misc_feature 1..120: note = Artificially Synthesized Probe
  source 1..120: mol_type = other DNA
gggagtagatgggattatagacaggacaagactggccaagacttggtagttgttagttgttgaactggttgatatgtacatcggagttcattaaactgctatctgtacttttgtacatat

SEQ ID NO: 20238 - DNA, 120 bp, synthetic construct
  misc_feature 1..120: note = Artificially Synthesized Probe
  source 1..120: mol_type = other DNA
gtgattataaatgaagttaaaactatccccactttattttcccccctgcttttgtctgagtacactaaatagcgagcgtcttccctcagagagttaaatttgggattcacgtgaggatgt

SEQ ID NO: 20239 - DNA, 120 bp, synthetic construct
  misc_feature 1..120: note = Artificially Synthesized Probe
  source 1..120: mol_type = other DNA
cctcgtccctcttagcttgaccaggttttgacttgaggctgtgtgccatgtccagaaacactagtctttacatttgagcagtagaatcttcaggcagaattagtattttatagtttttgt

SEQ ID NO: 20240 - DNA, 120 bp, synthetic construct
  misc_feature 1..120: note = Artificially Synthesized Probe
  source 1..120: mol_type = other DNA
tttgctgttgcatgcccatttagagggggtctagcgtgccactgttaaccgagccacgtgaaaagctttattgagttttgacttagataccatataatccacccattgaaagtatatagt

SEQ ID NO: 20241 - DNA, 120 bp, synthetic construct
  misc_feature 1..120: note = Artificially Synthesized Probe
  source 1..120: mol_type = other DNA
ttagctatgagatgagcacagtaatctttgcagagtaccataataggaatagagaagtccgtggaatcaaagttaattttcttcgggttgtctaatggatcagtttatttcagtgctgta

SEQ ID NO: 20242 - DNA, 120 bp, synthetic construct
  misc_feature 1..120: note = Artificially Synthesized Probe
  source 1..120: mol_type = other DNA
atacagtcagctctccatgtctgtggtttccacattcatgaattcaactagccgtgtataggaaatatttgaggggtaaaatggatggttacatctaaacgtgcagggtttttttcttgt

SEQ ID NO: 20243 - DNA, 120 bp, synthetic construct
  misc_feature 1..120: note = Artificially Synthesized Probe
  source 1..120: mol_type = other DNA
ctccacagcttactaaggacgtgggaaacttagagtgcagatgagaggtgaggttgagcaacttggagaatacggctaaacattaataaaaagaaaagctaatggagttagaattactta

SEQ ID NO: 20244 - DNA, 120 bp, synthetic construct
  misc_feature 1..120: note = Artificially Synthesized Probe
  source 1..120: mol_type = other DNA
aatttgagttcctgcacaaaaacgaccataatatcaacattgtaccaaagccaagtgatctcagggagaaaaataaaagatgccttccctggcgagcacatcaaggtttcagtcgcttgg

SEQ ID NO: 20245 - DNA, 120 bp, synthetic construct
  misc_feature 1..120: note = Artificially Synthesized Probe
  source 1..120: mol_type = other DNA
ttcttaaaaaattgtgctttaaaggaagagactctacattggatgcagccagtttttaaaaatgtgtctgaagcatttggtgatggtttctgcctgttcagtaaagaagcaccggctcag

SEQ ID NO: 20246 - DNA, 120 bp, synthetic construct
  misc_feature 1..120: note = Artificially Synthesized Probe
  source 1..120: mol_type = other DNA
tacccagaatcaccaatcgcagaacgtgtttttcttttgctgtccagctaaagttttctgcccagtctgatttagatgcaccagataattcttactggtgatgtgctaaagagaataatc

SEQ ID NO: 20247 - DNA, 120 bp, synthetic construct
  misc_feature 1..120: note = Artificially Synthesized Probe
  source 1..120: mol_type = other DNA
tgaaaataaacttaaaagcccagggtgaaaacgtgtcattgctctccgcaggccaaaacccagaacaaagaagaatcctatgacttctccaaatcctatgaatataagtcaaacccctct

SEQ ID NO: 20248 - DNA, 120 bp, synthetic construct
  misc_feature 1..120: note = Artificially Synthesized Probe
  source 1..120: mol_type = other DNA
tgcacatagaacttttcaaacaaagaagaatttaactaaaggtctgtggagtatatttgcccagtagatgtgggagttttctttcaggtctagcacaacagcagcagtacatctgagcat

SEQ ID NO: 20249 - DNA, 120 bp, synthetic construct
  misc_feature 1..120: note = Artificially Synthesized Probe
  source 1..120: mol_type = other DNA
tagtttgcttgtgtgctaaaactctgacaaagtgtaatcattgatgtttccagccagtacatttgacacattggagcctggttatgttacattgcacatggttagcacatgagcagaatt

SEQ ID NO: 20250 - DNA, 120 bp, synthetic construct
  misc_feature 1..120: note = Artificially Synthesized Probe
  source 1..120: mol_type = other DNA
ctgaagtctagttttccagtgatagaaaactggaaacaaatttcttctttaccagctgagtggtaacacagtcaaccaggttgcctctggcaacaaagagttcttggttatgatggactg

SEQ ID NO: 20251 - DNA, 120 bp, synthetic construct
  misc_feature 1..120: note = Artificially Synthesized Probe
  source 1..120: mol_type = other DNA
ctataagtgctcaatagcttgaagcccaagaagttggtatcgaaatttgttgtttgtttaaacccaagtgctgcacaaaagcagatacttgaggaaaacactatttccaaaagcacatgt

SEQ ID NO: 20252 - DNA, 120 bp, synthetic construct
  misc_feature 1..120: note = Artificially Synthesized Probe
  source 1..120: mol_type = other DNA
agggtcttttatgatatgaattgacacaaaggagttaggcttgtgttttagtggtggcagaaatttggcttactggtaactgagttatactataaaggtgcccttgcttatgtctcttcc

SEQ ID NO: 20253 - DNA, 120 bp, synthetic construct
  misc_feature 1..120: note = Artificially Synthesized Probe
  source 1..120: mol_type = other DNA
tttctttatatgaagtaaagttggttaggaacagtccatttaagcaatcgcagctgtcttttaagagaaaggttcccagtcaatcttctccctccttttcgaacctcttttcagttgggg

SEQ ID NO: 20254 - DNA, 120 bp, synthetic construct
  misc_feature 1..120: note = Artificially Synthesized Probe
  source 1..120: mol_type = other DNA
ggaactacagactacagaactacagagccaccgcacccggcctatattttgttttaaataaagatgagcaaatttgatgaatagaaaagcattaaaaatgggctggcgtggtggcttatg

SEQ ID NO: 20255 - DNA, 120 bp, synthetic construct
  misc_feature 1..120: note = Artificially Synthesized Probe
  source 1..120: mol_type = other DNA
actttggcatttattttgcgcaataagaagtggaatgtggtttgattgcttctgcactgtcctcggatgccgttccaccttcgagagtccaggttgctctgtctttctgagtttgagtct

SEQ ID NO: 20256 - DNA, 120 bp, synthetic construct
  misc_feature 1..120: note = Artificially Synthesized Probe
  source 1..120: mol_type = other DNA
accacatgctctttcttttccgctttaattcccttccctctgcccccgttccattctcacacatttccattaggaagcacagaggggcccaccatagggtctgtgggaaatggaaatggt

SEQ ID NO: 20257 - DNA, 120 bp, synthetic construct
  misc_feature 1..120: note = Artificially Synthesized Probe
  source 1..120: mol_type = other DNA
ctgagtggtgtctttgattttcttactcttcctccaagtgatgacctactttattatacttaataactatttttaacttgtccctctgtcccttttcccacagccactaccctagttcag

SEQ ID NO: 20258 - DNA, 120 bp, synthetic construct
  misc_feature 1..120: note = Artificially Synthesized Probe
  source 1..120: mol_type = other DNA
ctccactggaggatatccttcctctttctttaccatcttttaaaaccctattatccttctaggtccagttactatgtcacattttctgtcaagccttctctgatgcccccaatcaaattt

SEQ ID NO: 20259 - DNA, 120 bp, synthetic construct
  misc_feature 1..120: note = Artificially Synthesized Probe
  source 1..120: mol_type = other DNA
gacataatgattttctcacatcatgcctggtttaaacttcaacacttgacaccactgacacaaactggaaaacattagtagaagtggagaaaatctgctaagatcttaatttgaccagac

SEQ ID NO: 20260 - DNA, 120 bp, synthetic construct
  misc_feature 1..120: note = Artificially Synthesized Probe
  source 1..120: mol_type = other DNA
atctagagctcccttctggaggatctcttgaaacagtttgttgatcatgtcttatggttctctatttacatttttaaaaagcactttagagctgagtctgcaaactgacagaacccatgg

SEQ ID NO: 20261 - DNA, 120 bp, synthetic construct
  misc_feature 1..120: note = Artificially Synthesized Probe
  source 1..120: mol_type = other DNA
ttgctgttctgaaagattgctgtgttagcaaaggttaggttaggttaaattaggctagattaggttaggtttagcaaaggttaggttaggttaggtttgtggacatggtcctggaaaaag

SEQ ID NO: 20262 - DNA, 120 bp, synthetic construct
  misc_feature 1..120: note = Artificially Synthesized Probe
  source 1..120: mol_type = other DNA
tgtcgataagctgggcaattgacattgtcgggtgcgattgaacagaacttggttttagggctagtttatagggggtgatatttatctggagagatttaggggctcacaagaaatttcctt

SEQ ID NO: 20263 - DNA, 120 bp, synthetic construct
  misc_feature 1..120: note = Artificially Synthesized Probe
  source 1..120: mol_type = other DNA
aacctctttgtgcctcagtttatacttaatactaggtataaaaattgcacctatctcaaagggttgattgtgaggattatatactatagtgcaggtaagcactgagcacagggccaggca

SEQ ID NO: 20264 - DNA, 120 bp, synthetic construct
  misc_feature 1..120: note = Artificially Synthesized Probe
  source 1..120: mol_type = other DNA
taaaaaaacaagttaatggttaaaatgctctttctggacaaatggagcctctttctgtgcatgtttaagtgtcagacaccttagggtaagtgggaaagaaagctatccctgggtcactga

SEQ ID NO: 20265 - DNA, 120 bp, synthetic construct
  misc_feature 1..120: note = Artificially Synthesized Probe
  source 1..120: mol_type = other DNA
agatagggaaatagatgggtagatagatacatgcacagatagacagataaataaatatcaattcagtcctttggggatgggggattctgtcagttgctgtgtagatcttgtgttaggcca

SEQ ID NO: 20266 - DNA, 120 bp, synthetic construct
  misc_feature 1..120: note = Artificially Synthesized Probe
  source 1..120: mol_type = other DNA
aagtaagactttagaaagcaagccatgtatatcaattctagagacagcctaatcaactaacccattactaaatcaccgccagtctggttaaagattactgttccactctacggcctatcc

SEQ ID NO: 20267 - DNA, 120 bp, synthetic construct
  misc_feature 1..120: note = Artificially Synthesized Probe
  source 1..120: mol_type = other DNA
agtttaggtcatatgagtgctgtgatgagaattaaaagggtgatgtgataaagagtgactgggggtagggttactttaggtaggtagggaaaagtctgaagaagtatcacttaagaagag

SEQ ID NO: 20268 - DNA, 120 bp, synthetic construct
  misc_feature 1..120: note = Artificially Synthesized Probe
  source 1..120: mol_type = other DNA
aaaaaaatagaaaacctattttttttcgtgaaaccgtatatatgagggtaaggtggggtgggaggtggggaatatgctggaaagatgtccaaaggaactgactatggttagactactttc

SEQ ID NO: 20269 - DNA, 120 bp, synthetic construct
  misc_feature 1..120: note = Artificially Synthesized Probe
  source 1..120: mol_type = other DNA
agcaaaatgaatgacatccaataagtggatgaagatatgttttttggctttgaacttgcctcttcttccctaaagtattgtccttggagcaaaaccggctattctggccttttccctaag

SEQ ID NO: 20270 - DNA, 120 bp, synthetic construct
  misc_feature 1..120: note = Artificially Synthesized Probe
  source 1..120: mol_type = other DNA
ttgttgtgatgattaaatgaatgtttggagcatatctaacacaataagcgcccaaagaatgtcagccaataatctcctacagaggagaatatccacgtgtttctcaagaagtcccttggg

SEQ ID NO: 20271 - DNA, 120 bp, synthetic construct
  misc_feature 1..120: note = Artificially Synthesized Probe
  source 1..120: mol_type = other DNA
atagggctgagccaggatggggcttgtggagatgatgtgtatgagtgtgcatgcacttgtgtgtgcatgcctaacatccaaaactagatataaattctttaaacttttcattagttggcc

SEQ ID NO: 20272 - DNA, 120 bp, synthetic construct
  misc_feature 1..120: note = Artificially Synthesized Probe
  source 1..120: mol_type = other DNA
tggaggaatcaagctgggatccaggggactgaggaggggatagagcagcacctgggccccacattcccttccaacagagcctggggtgctgtgtttccgggagggttttttttgtttttt

SEQ ID NO: 20273 - DNA, 120 bp, synthetic construct
  misc_feature 1..120: note = Artificially Synthesized Probe
  source 1..120: mol_type = other DNA
gtgtggtggcgggtgcctgtaatcccagccactcaggaggctgaagcaggagaatcgcttgaacttgggaggcagagggtgcagtgagccgagatcatgccactgcactccagcctgggc

SEQ ID NO: 20274 - DNA, 120 bp, synthetic construct
  misc_feature 1..120: note = Artificially Synthesized Probe
  source 1..120: mol_type = other DNA
tgagccattgcgcccagtctcatttaaccttaattactaatttaaaggtgccatcatggccaggcgcggtggctcacacctgtaatcccagcacttttggaggccaaggtgggcggatca

SEQ ID NO: 20275 - DNA, 120 bp, synthetic construct
  misc_feature 1..120: note = Artificially Synthesized Probe
  source 1..120: mol_type = other DNA
attttgttgtcattattactccagggatacctaaaggggaagtttgtttataattcgtacccactccttgtagaaaggattcaagacagccgatgatgaaaacacccatgcttgcaagtg

SEQ ID NO: 20276 - DNA, 120 bp, synthetic construct
  misc_feature 1..120: note = Artificially Synthesized Probe
  source 1..120: mol_type = other DNA
ctgagctaaagaagaagctaccacaggcccaccactgactcttctaaggaaaagctgcattttcaaaagttccaggttcccaactctgattcttctctatttcaaatcaaggataaaaaa

SEQ ID NO: 20277 - DNA, 120 bp, synthetic construct
  misc_feature 1..120: note = Artificially Synthesized Probe
  source 1..120: mol_type = other DNA
tctttcttagggttctagatttttttctccctcccccaaaaatgcctattttaaaaatgtgaataacacctacatagcgtttttctgcagagtcatggagtcattctcccactgaggtca

SEQ ID NO: 20278 - DNA, 120 bp, synthetic construct
  misc_feature 1..120: note = Artificially Synthesized Probe
  source 1..120: mol_type = other DNA
aaaataactaggaaaatttccatcaatgacacatgattacagtgtcataactcatgtccatattgtccaacaccctaagagagtaacagtttctcacactggtacagacgtctgggtcct

SEQ ID NO: 20279 - DNA, 120 bp, synthetic construct
  misc_feature 1..120: note = Artificially Synthesized Probe
  source 1..120: mol_type = other DNA
atgagagccaagcaacctgcttaaaaactctgctccttaggaatcttccccagtgactaggatttaattgtttccttttctgctaacccctgttcacacatacatagtttgcattccatc

SEQ ID NO: 20280 - DNA, 120 bp, synthetic construct
  misc_feature 1..120: note = Artificially Synthesized Probe
  source 1..120: mol_type = other DNA
aatggagacatataccatgttcctgaaccagaagactcaaaatagttaacatgttctccctaaattgatgcaaagatttaaagcaatatcagtcaaaatcctaggagagttttgttatag

SEQ ID NO: 20281 - DNA, 120 bp, synthetic construct
  misc_feature 1..120: note = Artificially Synthesized Probe
  source 1..120: mol_type = other DNA
cagcgggaaaaagtctcttccacaaatggtgccggaacaatgcacatgcaaaacaaaactgccttcactattacttcacaacatattcaaaaattcacttgaaatggagcatgggtctaa

SEQ ID NO: 20282 - DNA, 120 bp, synthetic construct
  misc_feature 1..120: note = Artificially Synthesized Probe
  source 1..120: mol_type = other DNA
atccttatcagtaatcaataggtgaatcaagacaaattgtgttatccatacaaatgagttctattaggtaataaaatgcgtaaatttctgctacatataacatggatgaatctcaaaagc

SEQ ID NO: 20283 - DNA, 120 bp, synthetic construct
  misc_feature 1..120: note = Artificially Synthesized Probe
  source 1..120: mol_type = other DNA
catatatatatgaattaaaataggactagtaatatttgggcagactcatgtcaatgtggatctgaaaaaagtcagcgtcatgacatccccaggaagtggcctgttcccactgtgcagttc

SEQ ID NO: 20284 - DNA, 120 bp, synthetic construct
  misc_feature 1..120: note = Artificially Synthesized Probe
  source 1..120: mol_type = other DNA
gtgcactccagcctgggcaagagagtgagattcggtctcaaaaaaaaaaaattaactgcgtggtggtgtgcgcctgtaatccaagctactcaggagcttgaggcaggagaatcgcttgag

SEQ ID NO: 20285 - DNA, 120 bp, synthetic construct
  misc_feature 1..120: note = Artificially Synthesized Probe
  source 1..120: mol_type = other DNA
tgcaaaagcaatgagtattcagtagaaaccgtaatcccatcataaagggtaaggagttcactgatgatggagttaggtccctagaaacctgtcgtaaagttggaaacttagaagtcaaac

SEQ ID NO: 20286 - DNA, 120 bp, synthetic construct
  misc_feature 1..120: note = Artificially Synthesized Probe
  source 1..120: mol_type = other DNA
cacatcactgacactcaggtgtgccctctccaatcctgccttctttctggattccttcctaggaactactatcctatatttcatcttcaacatatccttttaaaaacagttttacgactt

SEQ ID NO: 20287 - DNA, 120 bp, synthetic construct
  misc_feature 1..120: note = Artificially Synthesized Probe
  source 1..120: mol_type = other DNA
ggtaggagagggaagggatgccctgagaaggtgggggttggagaggggaggggtgctctgggagggtgggggtaggagaggggagaggtgccctgggagggtggccagaggacaggggag

SEQ ID NO: 20288 - DNA, 120 bp, synthetic construct
  misc_feature 1..120: note = Artificially Synthesized Probe
  source 1..120: mol_type = other DNA
ccttcaaatcacggcacctctgagaaagcaccgtctacacacttcagcaacatcaacccccctgacgatctcttctacagaaaacgttcccatcagaaaagtctgttttttttgtttttg

SEQ ID NO: 20289 - DNA, 120 bp, synthetic construct
  misc_feature 1..120: note = Artificially Synthesized Probe
  source 1..120: mol_type = other DNA
tgacagacacttggggggctagggatataacgatgaaaaagatgtaatccctttccttgaggagcttaaagtctagtggggacactgctgacgcaaaaagcaattctttttttttttttt

SEQ ID NO: 20290 - DNA, 120 bp, synthetic construct
  misc_feature 1..120: note = Artificially Synthesized Probe
  source 1..120: mol_type = other DNA
gagtttgctgcagactcgctggattcacagctggtaacagtaagtaccaggcaggggcatccaacttaaggtgtcatggaagcacatggaggaacctaatcctatctggcagaagcaaaa

SEQ ID NO: 20291 - DNA, 120 bp, synthetic construct
  misc_feature 1..120: note = Artificially Synthesized Probe
  source 1..120: mol_type = other DNA
ttttgtgtttcctagacattttatgcatctatttttgtaaaatcaccttcgctaactttcaccaagcactttgagcacagtggaacttcagaagcacaaccagcctaaccccagaatctc

SEQ ID NO: 20292 - DNA, 120 bp, synthetic construct
  misc_feature 1..120: note = Artificially Synthesized Probe
  source 1..120: mol_type = other DNA
ctgggtgtccagggcaccatttccacccatgggtgaaaaagaggcttgaggaagacaacaggttcttcacctgcatctgtggatatatatttttttaagtttattaaatttttttttaaa

SEQ ID NO: 20293 - DNA, 120 bp, synthetic construct
  misc_feature 1..120: note = Artificially Synthesized Probe
  source 1..120: mol_type = other DNA
gcatgcatgcgtttgtgacagcctggtgctcggatgggcccagagcaggggttctcaaccttggcccattagaattacctgaaaatttttaagataattcacatccggccaggcatggtg

SEQ ID NO: 20294 - DNA, 120 bp, synthetic construct
  misc_feature 1..120: note = Artificially Synthesized Probe
  source 1..120: mol_type = other DNA
gagtcttgtcattcagcctgaaaatagcatcaagttcccatccactcgaacaacagtttgtagatcttaggctgctctcatcgagcaaacatggcctccttgcaacacctcaaatgggtg

SEQ ID NO: 20295 - DNA, 120 bp, synthetic construct
  misc_feature 1..120: note = Artificially Synthesized Probe
  source 1..120: mol_type = other DNA
gagcacaggagcatccccatgggattgggtgggctagacccagcgtgggggtctgctagcagccagtggcatctccatctgggtctgacccttttctgggcccatcgctctttgaccatt

SEQ ID NO: 20296 - DNA, 120 bp, synthetic construct
  misc_feature 1..120: note = Artificially Synthesized Probe
  source 1..120: mol_type = other DNA
gtccccacaactcatttgcaactgatatgtctcccctccaagtccctctctaaatttgtctcctgctccagtagatgctacagcatcacccaatggttgacgcatcgctctggtcacaat

SEQ ID NO: 20297 - DNA, 120 bp, synthetic construct
  misc_feature 1..120: note = Artificially Synthesized Probe
  source 1..120: mol_type = other DNA
tccagagccatcctgttccaaactgcatttgagggaaaactcacgaggtgtattcaacatcgcaagcagcaaaaacataaaagaaaaggtgaaagggccaccaaacaaggacaaggaaaa

SEQ ID NO: 20298 - DNA, 120 bp, synthetic construct
  misc_feature 1..120: note = Artificially Synthesized Probe
  source 1..120: mol_type = other DNA
accacgataatctagggccatctcctatccaaagtcagctgactggcaactttaattctacctgcaatcgtaattccccagccacgcaacgtaacgtattcacaggctccatccagtctt

SEQ ID NO: 20299 - DNA, 120 bp, synthetic construct
  misc_feature 1..120: note = Artificially Synthesized Probe
  source 1..120: mol_type = other DNA
cccaggggaggggcctcggggaggaggccaggctgggtagcccggggggaaagtgccttgtctccaacttggtgggtgcccagtgggcaaggaggtcctcctgggcagagaggagcgaag

SEQ ID NO: 20300 - DNA, 120 bp, synthetic construct
  misc_feature 1..120: note = Artificially Synthesized Probe
  source 1..120: mol_type = other DNA
tttcactctgttgcccaggctggtctcgaactcctgggctccagccattctcccaccttggcctcccaaagcattgggactataggcatgagccccaccacacccggtcaaacattgttt

SEQ ID NO: 20301 - DNA, 120 bp, synthetic construct
  misc_feature 1..120: note = Artificially Synthesized Probe
  source 1..120: mol_type = other DNA
acttgatctgaagtgcacgtattgatcagggtcacttgtttggcaaacaaaccctttcaccagccaaggcccacaggagatgtacaggggagtggaggggagcgtcaccctcaggtgacc

SEQ ID NO: 20302 - DNA, 120 bp, synthetic construct
  misc_feature 1..120: note = Artificially Synthesized Probe
  source 1..120: mol_type = other DNA
aaaataaaaagacaggagccaggatgggaagaaaggtcccagttctcagccactgggcatgacccagttgcggagagaggcccagcatcacttttccagggacccagaggtcccaaggct

SEQ ID NO: 20303 - DNA, 120 bp, synthetic construct
  misc_feature 1..120: note = Artificially Synthesized Probe
  source 1..120: mol_type = other DNA
ctgggggaccccaccaggtgcttggtcacaccagcctcatcctaagtaggttcggatacacccggagttaaacaagcagtatcagctccagcaccaaatgattttttcttttttgaaaca

SEQ ID NO: 20304 - DNA, 120 bp, synthetic construct
  misc_feature 1..120: note = Artificially Synthesized Probe
  source 1..120: mol_type = other DNA
agaacccacagcggaatacctggaacattttttaaatgttcctccgctgtctgttccctgctgtgtgtttttcctttgtatcctagactgaggttgtgtcatatacacgttacttttttt

SEQ ID NO: 20305 - DNA, 120 bp, synthetic construct
  misc_feature 1..120: note = Artificially Synthesized Probe
  source 1..120: mol_type = other DNA
tccaagatctggccctccccaggcctcaagttcaaaccacacaggaagcagggaggggtacaagtagtggaaaagaaaccagaaaccaaaaaataaaaccgtgagacaggacaaggggct

SEQ ID NO: 20306 - DNA, 120 bp, synthetic construct
  misc_feature 1..120: note = Artificially Synthesized Probe
  source 1..120: mol_type = other DNA
tccctgtggatgtgggtggcccccagtgaccagaagcccccctacacggaatggctcatgacaggtcacagctctgagctccttgaagcacagaaccccagaaaggcagagaatgttcca

SEQ ID NO: 20307 - DNA, 120 bp, synthetic construct
  misc_feature 1..120: note = Artificially Synthesized Probe
  source 1..120: mol_type = other DNA
ctcatggattgtcccagcccattcagtggtccatcttctcccagagacagcaagcccccctaggacatttaccatcctgccctgagctgagcacagagaatgtttgtggaatacgtagat

SEQ ID NO: 20308 - DNA, 120 bp, synthetic construct
  misc_feature 1..120: note = Artificially Synthesized Probe
  source 1..120: mol_type = other DNA
tgggtaagtggatagttggataggtgagtggatgagagcagacaggtagatggacagaaggaagaaaggaagagggaagaatcaatgaatgggtcgaaagatgaatggatggatgagtgg

SEQ ID NO: 20309 - DNA, 120 bp, synthetic construct
  misc_feature 1..120: note = Artificially Synthesized Probe
  source 1..120: mol_type = other DNA
ggggcgcagcagcggcggcatggtcagggtcggggctgctcaccgcaggctgcgtttctcagccaggcttaagggcatcccgcgaagcatgtggtcccgctgtgccactgccaggctctg

SEQ ID NO: 20310 - DNA, 120 bp, synthetic construct
  misc_feature 1..120: note = Artificially Synthesized Probe
  source 1..120: mol_type = other DNA
ccttcccaggacccaggaaaatcctttcaacaaagacttcaggcaccactgcattccgaaagcctatttttaccccgtgatgactctggagtcatttttggagcccagcgagggccacat

SEQ ID NO: 20311 - DNA, 120 bp, synthetic construct
  misc_feature 1..120: note = Artificially Synthesized Probe
  source 1..120: mol_type = other DNA
tgcccagggttctggcacagagacacctcctttttggagagaaaggtcagagtaggctgtaggccttctctgcgtctgccctgtgacctcaaagaacttcctctagcaggaaattagctg

SEQ ID NO: 20312 - DNA, 120 bp, synthetic construct
  misc_feature 1..120: note = Artificially Synthesized Probe
  source 1..120: mol_type = other DNA
cagtccctagagctggaatcccttcctccagacaggcccttctaagctcagggaacccggggactcgggcacccagcgccccagcactccgccccgaggcccaggcaagtccagcggagt

SEQ ID NO: 20313 - DNA, 120 bp, synthetic construct
  misc_feature 1..120: note = Artificially Synthesized Probe
  source 1..120: mol_type = other DNA
ctggattcattccagcccctggttgaagtccccaatttttctgacgctcagtttccccaagttccaaaaaggggcaatatttccagactcatctgcttcccatggttagggatcgtccaa

SEQ ID NO: 20314 - DNA, 120 bp, synthetic construct
  misc_feature 1..120: note = Artificially Synthesized Probe
  source 1..120: mol_type = other DNA
aggacagagaattggcaaagatatgtcttaaacatctagcctgggagagcatgaatggagccaattcctgagcacttactaccggccaggtgctaggcctgggtcttggcacaaccataa

SEQ ID NO: 20315 - DNA, 120 bp, synthetic construct
  misc_feature 1..120: note = Artificially Synthesized Probe
  source 1..120: mol_type = other DNA
acatccagagtcagatgtggcagatgccgagtcccaggaactgtggggtttgggacacaggctcttccggaagggcaaactgccacgtggagaagagagggaattgtctctccttggggt

SEQ ID NO: 20316 - DNA, 120 bp, synthetic construct
  misc_feature 1..120: note = Artificially Synthesized Probe
  source 1..120: mol_type = other DNA
aggggcgcccctgtcaccacccccgtccaggcagctgcgggagcccgcgggggtgcagaccttgcgctggcagcggtggcagcgccggcggcagacggtggaaaggcgcctgcgggaggc

SEQ ID NO: 20317 - DNA, 120 bp, synthetic construct
  misc_feature 1..120: note = Artificially Synthesized Probe
  source 1..120: mol_type = other DNA
cgccattctgttttataccaggaacttctttccatgacggcaaagccctgcagaagttttccattctattgattgactgttaataattcaccattgacatccatggagctatcaaaaagc

SEQ ID NO: 20318 - DNA, 120 bp, synthetic construct
  misc_feature 1..120: note = Artificially Synthesized Probe
  source 1..120: mol_type = other DNA
ttattaaatagcgtatttgtgagttgcgattttttttagttacttccacttttttcagtttgggtgttcggtcacaatctgggcattgccatggaacatgtgacccatatgaataacgtc

SEQ ID NO: 20319 - DNA, 120 bp, synthetic construct
  misc_feature 1..120: note = Artificially Synthesized Probe
  source 1..120: mol_type = other DNA
atatatagcacttggctagagattaaggatacagtgatgaactacttttccataaaatagtttataggaggaatagaacagtctcagatagaggtaggagctctggagtccagccacctg

SEQ ID NO: 20320 - DNA, 120 bp, synthetic construct
  misc_feature 1..120: note = Artificially Synthesized Probe
  source 1..120: mol_type = other DNA
gaagtctggaccagccccatgcagggtctaatgataataatgaccacaaatagagtggcagcaatcatatattgaactcttgctatatgccaggcatattatatcatatcgtctaaactc

SEQ ID NO: 20321 - DNA, 120 bp, synthetic construct
  misc_feature 1..120: note = Artificially Synthesized Probe
  source 1..120: mol_type = other DNA
tttctcctgcttcagactctgttccacctgtagggctcattcccaaactttgtgtctagaacctctactgaagtgttcttttccctgttttaacatcttacaagagatgttttatcctac

SEQ ID NO: 20322 - DNA, 120 bp, synthetic construct
  misc_feature 1..120: note = Artificially Synthesized Probe
  source 1..120: mol_type = other DNA
taattaatttttccccctttcagcataattgatgtcagttcagacttcggtgtttctgaagtgtttggcctcatagcaaagaaacttaggatcagacagactgactacagagcaaagctg

SEQ ID NO: 20323 - DNA, 120 bp, synthetic construct
  misc_feature 1..120: note = Artificially Synthesized Probe
  source 1..120: mol_type = other DNA
tcccatttactgacttatcagtagcaagcaactttatataggcaagctgcaaagaccaagtaaagcatatatgcaagccctctcatgctggctttatgtcttgcttaacagataagcaca

SEQ ID NO: 20324 - DNA, 120 bp, synthetic construct
  misc_feature 1..120: note = Artificially Synthesized Probe
  source 1..120: mol_type = other DNA
tccacagtgcatgtttccagtgtggttataagttgtggacctgttttatcagatggtcttgtcttttgtttcatcaggcctatattgcaccctttctcttttctttctagttgttctctt

SEQ ID NO: 20325 - DNA, 120 bp, synthetic construct
  misc_feature 1..120: note = Artificially Synthesized Probe
  source 1..120: mol_type = other DNA
taaatgaggagccaagactttcatgtgatctctttaggtttacatgtttacctgagacactgaatgtaccgacagtagccagactctatataaagatgaaccctgacccaaaaatctgca

SEQ ID NO: 20326 - DNA, 120 bp, synthetic construct
  misc_feature 1..120: note = Artificially Synthesized Probe
  source 1..120: mol_type = other DNA
aaaatacttgtatgtacaagacccattagaatgtttatccagtctgcatataatggttgctgcaggtaagtgtcctcaggctcttttccagaattctgttgagggatcgtgtggtctcat

SEQ ID NO: 20327 - DNA, 120 bp, synthetic construct
  misc_feature 1..120: note = Artificially Synthesized Probe
  source 1..120: mol_type = other DNA
tataacacatgtttcttgagtgccgggtggcacctctatagcttcctacagtcaaggtcaatgattctcagatactagccatgtacagcatggctttacaaccttttattattattacct

SEQ ID NO: 20328 - DNA, 120 bp, synthetic construct
  misc_feature 1..120: note = Artificially Synthesized Probe
  source 1..120: mol_type = other DNA
caattttacgtagtcagtggaggagctactgttaaaaagaaataaagcatcttccaatttaataaagggagtgagagagagagatccagttgttgcctgggttaagaatgcatgatctcg

SEQ ID NO: 20329 - DNA, 120 bp, synthetic construct
  misc_feature 1..120: note = Artificially Synthesized Probe
  source 1..120: mol_type = other DNA
accactggtgtaagcccgagagtccaaaagccaaagaacttggaatctgatgttccagggcaggaagcatccatcatgggagaaagatgaaggccagaagactcagcaagtcagcttctt

SEQ ID NO: 20330 - DNA, 120 bp, synthetic construct
  misc_feature 1..120: note = Artificially Synthesized Probe
  source 1..120: mol_type = other DNA
actggaggatttttttctccaaagaaaggatcccctagaattctggtttttaccagaaccaagaaccaggaacaagactctggccaaaacatttggccagactttgttaatttcatgagg

SEQ ID NO: 20331 - DNA, 120 bp, synthetic construct
  misc_feature 1..120: note = Artificially Synthesized Probe
  source 1..120: mol_type = other DNA
atgtaccaaatgtaaaacccatggccataactgtgcaaaactgagagccacccaaatgtccttcactaggttattggatacacaaactatactacatcagaaccatggaatactactcag

SEQ ID NO: 20332 - DNA, 120 bp, synthetic construct
  misc_feature 1..120: note = Artificially Synthesized Probe
  source 1..120: mol_type = other DNA
aaaataaataggaaaaaaaaaaaaaagacaatggctgtgctctaaggtcctacctgctcctgaattctctaactcagggaccctggccttccgccctgaaggtgaaaccttgctgtttct

SEQ ID NO: 20333 - DNA, 120 bp, synthetic construct
  misc_feature 1..120: note = Artificially Synthesized Probe
  source 1..120: mol_type = other DNA
actacttcactgtaacagaacaataagagatgcatttgaaagggcttctgttctttaattttcccctttattcactgcctgggccctgcaaacagatgaggtcatgtgatttcagggaaa

SEQ ID NO: 20334 - DNA, 120 bp, synthetic construct
  misc_feature 1..120: note = Artificially Synthesized Probe
  source 1..120: mol_type = other DNA
agtaacctttgtggttttctctggttttgcccatgtgagttggtgtttatcatgcacatttcctgagctcttctctcttcacatgtgatgctgactttctgagcacctcatacatcccaa

SEQ ID NO: 20335 - DNA, 120 bp, synthetic construct
  misc_feature 1..120: note = Artificially Synthesized Probe
  source 1..120: mol_type = other DNA
gaatcataataccatccatactcatatttcatctgagaacccggtctcttcttcctgcatccatcactcacccagtccatcaattctacctcgtaaatgccaagtctgaattcttctctc

SEQ ID NO: 20336 - DNA, 120 bp, synthetic construct
  misc_feature 1..120: note = Artificially Synthesized Probe
  source 1..120: mol_type = other DNA
gaagaaataatgaatcggtgaggcttgaggaaacaggatacactcagagagggtagcagattgtactttctaaacgtggctctagcagctctccaatcccccatgcccttgttagaatat

SEQ ID NO: 20337 - DNA, 120 bp, synthetic construct
  misc_feature 1..120: note = Artificially Synthesized Probe
  source 1..120: mol_type = other DNA
caatttcctcattttgggaaagataataacagcacctacttcacagacatcgtgggaagactgaagaagataaagcgccatcatcatctggtaacgtgagctgttattaacactttgatc

SEQ ID NO: 20338 - DNA, 120 bp, synthetic construct
  misc_feature 1..120: note = Artificially Synthesized Probe
  source 1..120: mol_type = other DNA
gtgagccgccggaccctgccttaattccacccagttctgagactagctgcttccatcgcacagatcaggaccaacgtcccagctgtggagaaaaaaacaatggctgcttcaagcattaca

SEQ ID NO: 20339 - DNA, 120 bp, synthetic construct
  misc_feature 1..120: note = Artificially Synthesized Probe
  source 1..120: mol_type = other DNA
gaaatagaaatgaatgtgggacagacgtcgatgttctaacagaatccccatgccaccctcacaaggagaaggtggctgagccctgcagttgcgatgctgccgacttcgttctgctgatga

SEQ ID NO: 20340 - DNA, 120 bp, synthetic construct
  misc_feature 1..120: note = Artificially Synthesized Probe
  source 1..120: mol_type = other DNA
ttgcctatagcacagtcttgggcaacacttattgagctagttaatcaaggcaaaattaggaggaagagtttctggtctctcaaaagactggacaggacattattttcatcgtacaacaca

SEQ ID NO: 20341 - DNA, 120 bp, synthetic construct
  misc_feature 1..120: note = Artificially Synthesized Probe
  source 1..120: mol_type = other DNA
tgagtaaatgagtgactgaatgtgtgagtgaatgagtgagtaaatgagtgagtgagtgaatgagtgagtaaatgagtgagtgaatgaatgagtgagtgagtgaatgagtgagcgaataag

SEQ ID NO: 20342 - DNA, 120 bp, synthetic construct
  misc_feature 1..120: note = Artificially Synthesized Probe
  source 1..120: mol_type = other DNA
aatgagtgagtgaatgaatgagtgagtgagggaatgagtgagtgaatgagtaaattgagtgaatgagtaagtgaatgagtaagtgaatgagtgagtgagggagggagggaatgagtgagt

SEQ ID NO: 20343 - DNA, 120 bp, synthetic construct
  misc_feature 1..120: note = Artificially Synthesized Probe
  source 1..120: mol_type = other DNA
gggaatgagtgagtgaatgagtatgtgaatgagtaaatgagtgactgaatgagtgagtgaatgagtaaatgagtgagtgagtgcatgaatgagtgagtgagtgaatgagtgaggaaataa

SEQ ID NO: 20344 - DNA, 120 bp, synthetic construct
  misc_feature 1..120: note = Artificially Synthesized Probe
  source 1..120: mol_type = other DNA
atgaagcatgggacaggtataagcaagtgaacttatgaatgaacaaagactgaatgcgtgcatgaatatataaataagtgaagcaatgagtgagtaaatgaatggatgggtgggtggcaa

SEQ ID NO: 20345 - DNA, 120 bp, synthetic construct
  misc_feature 1..120: note = Artificially Synthesized Probe
  source 1..120: mol_type = other DNA
agaagaggagaggacaagacagaatggaacagaacagatcagaacaaaatggatcagaatagaacagaaccaatccaatggattaaaatacggcaggacagatcgaaacagaatggatcg

SEQ ID NO: 20346 - DNA, 120 bp, synthetic construct
  misc_feature 1..120: note = Artificially Synthesized Probe
  source 1..120: mol_type = other DNA
ctgttttgttttcttcataacactaatcactgtctgaatctctcagatagattattggttcatgggtttatcatctgttcccatgtgagctaggaagggtggagattttcttggccaccc

SEQ ID NO: 20347 - DNA, 120 bp, synthetic construct
  misc_feature 1..120: note = Artificially Synthesized Probe
  source 1..120: mol_type = other DNA
ttcctttgagtgtttgttgaatgactgactgaccgactggcgtggagaatagcacaggtgcatagatgtggatgtcagctataatgatgacaatgctgatgtcatggtggtgtcatgtcg

SEQ ID NO: 20348 - DNA, 120 bp, synthetic construct
  misc_feature 1..120: note = Artificially Synthesized Probe
  source 1..120: mol_type = other DNA
tggacaccagccctagagaatatcagatcaaggatgtagacagcagcaggatttttggaagatacccaggtgattctaagagcagcaagatgacaacccttctctgtcacttaataaacg

SEQ ID NO: 20349 - DNA, 120 bp, synthetic construct
  misc_feature 1..120: note = Artificially Synthesized Probe
  source 1..120: mol_type = other DNA
ctcacgcttcgattcctggacttgcctgagcagtgattccacagcaccatacagctgcccatcactgcccaggtcacaattgcaactttgcattcttttgtgtaatttttttttagacag

SEQ ID NO: 20350 - DNA, 120 bp, synthetic construct
  misc_feature 1..120: note = Artificially Synthesized Probe
  source 1..120: mol_type = other DNA
ccaggcagtgctggtttcgagaatttgtcactgggtgaactattaatgctaatagtaataataatagtgagtggttagaggagatgagaactttgcaatattttcacctccagacatccc

SEQ ID NO: 20351 - DNA, 120 bp, synthetic construct
  misc_feature 1..120: note = Artificially Synthesized Probe
  source 1..120: mol_type = other DNA
gacagttactaacatccttcattcaatcaacaaacacttcccgagcacctactagagctggggaaaatccacactgtcactgcccctacgacgattacttctactgtttctgatgatgat

SEQ ID NO: 20352 - DNA, 120 bp, synthetic construct
  misc_feature 1..120: note = Artificially Synthesized Probe
  source 1..120: mol_type = other DNA
tacaagaacatatttgtcaccacaaggaggagcctcatgcaagctttctgggttttgttttgtttaaagtttttgccagcaccttgattgcatcatgcaagctttttggatgggaaaaag

SEQ ID NO: 20353 - DNA, 120 bp, synthetic construct
  misc_feature 1..120: note = Artificially Synthesized Probe
  source 1..120: mol_type = other DNA
tcaggcaggaaactatgtcagtttctaggaaataagaaaaaaactgagggagcccaatagatgacctcatggcgatgaagaatatagacgtcagagccggattatttgcactctaattca

SEQ ID NO: 20354 - DNA, 120 bp, synthetic construct
  misc_feature 1..120: note = Artificially Synthesized Probe
  source 1..120: mol_type = other DNA
gaatattgattccaagttctgttctacttagaaatgctcccatcgctagccacatctctgaatgcacttggggaagatagtcccctttggaatgtggatatgatgaaaataatcatcatc

SEQ ID NO: 20355 - DNA, 120 bp, synthetic construct
  misc_feature 1..120: note = Artificially Synthesized Probe
  source 1..120: mol_type = other DNA
ctaaatgaaataatatgcatgaaatcttgtaaaccttttggtaatgtggaaagcctgttacaaccaaacacagatctctcaggccgggagacctgattcccattcatcaacaagcctcta

SEQ ID NO: 20356 - DNA, 120 bp, synthetic construct
  misc_feature 1..120: note = Artificially Synthesized Probe
  source 1..120: mol_type = other DNA
tgaggcagtaaattttaaaggaaagcatggagtatttagagtcagacctgagcgtggttcttactagccatgtgacttcagaggagctgcctcaatgagcttcaattttctcatttgaaa

SEQ ID NO: 20357 - DNA, 120 bp, synthetic construct
  misc_feature 1..120: note = Artificially Synthesized Probe
  source 1..120: mol_type = other DNA
tgccctcatggagttcacagatgggcacaggagacagagtagacaggaagcaaggaaacaaagatcattgcaggctgtgacgtgtcacagaggaaataagtgtgaggatgcagaaaaata

SEQ ID NO: 20358 - DNA, 120 bp, synthetic construct
  misc_feature 1..120: note = Artificially Synthesized Probe
  source 1..120: mol_type = other DNA
aaataaaatattggcaggccattgtttcatcaatggtaaacgtgtgtgccccagtgcagagatattttagacgcaaaaatgctttgctacaagtcaagggaaaagcaaccccagaaagaa

SEQ ID NO: 20359 - DNA, 120 bp, synthetic construct
  misc_feature 1..120: note = Artificially Synthesized Probe
  source 1..120: mol_type = other DNA
ggtcacaaatagccccacaagccacactaatgagaaatccaaccacagaggcagccctcttggagcttgctttacatcaacacatgataacattcttcttagaaaaaattaaaacaaggc

SEQ ID NO: 20360 - DNA, 120 bp, synthetic construct
  misc_feature 1..120: note = Artificially Synthesized Probe
  source 1..120: mol_type = other DNA
acgtgcatcttaaaattttgttatatacccacagaaaaggtgtaatattggggagtttctttgaggggggataataaatgacatcctgctgcccataacactctgtaacttgctttcttc

SEQ ID NO: 20361 - DNA, 120 bp, synthetic construct
  misc_feature 1..120: note = Artificially Synthesized Probe
  source 1..120: mol_type = other DNA
agtggacttactttaaatttgaacttttgttagtttaaaatgtggcctttattttttaatgggcacctcagaaaggcagcctgaagctcaggcccttgtgcccagaggattgaagatcca

SEQ ID NO: 20362 - DNA, 120 bp, synthetic construct
  misc_feature 1..120: note = Artificially Synthesized Probe
  source 1..120: mol_type = other DNA
gaaaggaaggaaaaggaaaggaaactgctagggttcaaatcctagaagttctagttactgtgcaaacttagatatcatacctgacttctctatgtctccattgcctcatctgcaaagtga

SEQ ID NO: 20363 - DNA, 120 bp, synthetic construct
  misc_feature 1..120: note = Artificially Synthesized Probe
  source 1..120: mol_type = other DNA
atgagaaacagaacgtctccctttttagggttgctaaggtgggagaggatttagctgaaagcagaacccaaacagaagaaagcaaagcccaaaaagaagaggaaagaaattgagtttaac

SEQ ID NO: 20364 - DNA, 120 bp, synthetic construct
  misc_feature 1..120: note = Artificially Synthesized Probe
  source 1..120: mol_type = other DNA
agaagaaaagaaaagaaaaagaaaaagacacacctgagactgggtaatttataaaggaaagaggtttaatggactcacagttccacatggctggggaggcctcacaatcctggctgaagg

SEQ ID NO: 20365 - DNA, 120 bp, synthetic construct
  misc_feature 1..120: note = Artificially Synthesized Probe
  source 1..120: mol_type = other DNA
ggaataatagcagctaccacttacagcacacttccggaggccagacaccacattaggctctttaaatacactgtcctgttttagcctcacaataaccttacaaaaagagatgacaattat

SEQ ID NO: 20366 - DNA, 120 bp, synthetic construct
  misc_feature 1..120: note = Artificially Synthesized Probe
  source 1..120: mol_type = other DNA
gctccacctacaatataatataatttgcattcactaacatgtttgttcagcaaactttgactcatgggctactatgtgccaggttctatgctaaatattgggaattcagcagtggcaaga

SEQ ID NO: 20367 - DNA, 120 bp, synthetic construct
  misc_feature 1..120: note = Artificially Synthesized Probe
  source 1..120: mol_type = other DNA
agcggagaatggggctggagagggaccctaccaagccttgtgggccatgctaggcacttgtctttatttttttatccccagcctcagtaagtctatcaaaaactgctcatgcctataatc

SEQ ID NO: 20368 - DNA, 120 bp, synthetic construct
  misc_feature 1..120: note = Artificially Synthesized Probe
  source 1..120: mol_type = other DNA
atatatttatatgcaaatttctatcgcaccccactactgcaaagcccttgttctaggcaatgtgaatacaaacaacgctggcatggaatctgtggaatgagacctctctttcaccattca

SEQ ID NO: 20369 - DNA, 120 bp, synthetic construct
  misc_feature 1..120: note = Artificially Synthesized Probe
  source 1..120: mol_type = other DNA
ctcacttcaaaatcctcactttccccagactcctactccctccattcccctgcctcactctccacgaaccctccccacgatcccagatgctcccctctctgcctctgtctctggatttcc

SEQ ID NO: 20370 - DNA, 120 bp, synthetic construct
  misc_feature 1..120: note = Artificially Synthesized Probe
  source 1..120: mol_type = other DNA
gcacttcctatctttcccctccacttcctgtctgccttatgcccttcctgtctccttccttctcttcttattatagtagtccctccttttctgcaattttactttgtgtggtttcagtta

SEQ ID NO: 20371 - DNA, 120 bp, synthetic construct
  misc_feature 1..120: note = Artificially Synthesized Probe
  source 1..120: mol_type = other DNA
tcactgtgttggccaggctggtctcaaactcctgacctcatgatccgcccgccttggcctcccaaagcgctgggattacaggcacgagccaccacacccggtaactttggtattttttat

SEQ ID NO: 20372 - DNA, 120 bp, synthetic construct
  misc_feature 1..120: note = Artificially Synthesized Probe
  source 1..120: mol_type = other DNA
ttcatgtacctctttgctcttacatggacttcctgtagccctaatgcacttcctgtcttccccttctacttcctgtcttcctcttgcatttctgaggaccccttactagctgcttctacc

SEQ ID NO: 20373 - DNA, 120 bp, synthetic construct
  misc_feature 1..120: note = Artificially Synthesized Probe
  source 1..120: mol_type = other DNA
caaatcacaattccctggccagtgcctgagctaatttaccaacatgtgatgccctgagcatgttcactaacttattttctgtttcccaacccatggccttgcatgtgctgttccctctgc

SEQ ID NO: 20374 - DNA, 120 bp, synthetic construct
  misc_feature 1..120: note = Artificially Synthesized Probe
  source 1..120: mol_type = other DNA
ggggcctggacttcagggtctgagggaggaggggctggggcctggacttcagggtctgagggaggaggggctgagggcctcgattccagggtctgagggaggaggggctggggactggac

SEQ ID NO: 20375 - DNA, 120 bp, synthetic construct
  misc_feature 1..120: note = Artificially Synthesized Probe
  source 1..120: mol_type = other DNA
tctttcccagtcccgcccgtcctcaccttcagctgcaattttctcgaggcggagatcttagattttttctgccagggtgagatggagcaaggaaggatcatggagggggattcggagacg

SEQ ID NO: 20376 - DNA, 120 bp, synthetic construct
  misc_feature 1..120: note = Artificially Synthesized Probe
  source 1..120: mol_type = other DNA
gccttagcccgctgctctcaccgcatcgctgctcctggaaggagagaaaccaaggaggggggttagtggtgggctgtgtcctgtctcctaagggacccctggagtcccctctgaacaaga

SEQ ID NO: 20377 - DNA, 120 bp, synthetic construct
  misc_feature 1..120: note = Artificially Synthesized Probe
  source 1..120: mol_type = other DNA
tcaattcaggaagcccattccccaaaatattagccctccctgcccagaggaagcagtgagcaaaacaactgtcacctcttttgggttctatgactggggggcagcggctggtggtcaaag

SEQ ID NO: 20378 - DNA, 120 bp, synthetic construct
  misc_feature 1..120: note = Artificially Synthesized Probe
  source 1..120: mol_type = other DNA
gttgtcggcaccattttgttcatatttgaggccgagagttttaaaatctgtgcccactttctccacatccgagctggagctctcgcatttcccaaggggagagaagggtgtcatgattaa

SEQ ID NO: 20379 - DNA, 120 bp, synthetic construct
  misc_feature 1..120: note = Artificially Synthesized Probe
  source 1..120: mol_type = other DNA
ctctagaaaatatggaaataaaactgtggaagagatggctgcttgcctacctgttagcccttctccctttcttctagaaatagcctcttgtgcattaggctgagttgaaaaactactttg

SEQ ID NO: 20380 - DNA, 120 bp, synthetic construct
  misc_feature 1..120: note = Artificially Synthesized Probe
  source 1..120: mol_type = other DNA
catgtgctaaatctagacattttgccccctggagagcagctgttaaacatttaccatgaagccactttacagcacactagcaaagagtacggactattgcaccagactgccgggttcaaa

SEQ ID NO: 20381 - DNA, 120 bp, synthetic construct
  misc_feature 1..120: note = Artificially Synthesized Probe
  source 1..120: mol_type = other DNA
aaaattctcacccgcattcctggcttgaatttaggtaaaaggcacagcccatcctgagctccaaggcacatcacggagttaacaaaatctcctaaacttgggggagggaagtcatcttgt

SEQ ID NO: 20382 - DNA, 120 bp, synthetic construct
  misc_feature 1..120: note = Artificially Synthesized Probe
  source 1..120: mol_type = other DNA
tgttggacagcaccttctttttcttggcatcatcctctgcccgcttcttggcctcttcctcttccttcctcatcttctcctcctgtgggaagtaaggggttaacctcatggactcccctg

SEQ ID NO: 20383 - DNA, 120 bp, synthetic construct
  misc_feature 1..120: note = Artificially Synthesized Probe
  source 1..120: mol_type = other DNA
ttcattgaatgttccagaaacagtggtttgtccaggctgagccccgtctccttatggtggacatgaggctttttgtacacccagcactccgtacctgaattagtttcctttctgtttttg

SEQ ID NO: 20384 - DNA, 120 bp, synthetic construct
  misc_feature 1..120: note = Artificially Synthesized Probe
  source 1..120: mol_type = other DNA
ccagcctgaaccaacatggagaaaccccatttctactaaaaatacaaaaattagccgagcctggtggcaggtgcctgtaatcccagctactcaggaggctgaggcaggggaattgcttga

SEQ ID NO: 20385 - DNA, 120 bp, synthetic construct
  misc_feature 1..120: note = Artificially Synthesized Probe
  source 1..120: mol_type = other DNA
ctaataaacagattggagtgtggccaccgacttgggtgaattcgcgaaagcctaaggctcagctctgtactaggaggaaaactattatctgcatctcccaagatgcaagggatccacatg

SEQ ID NO: 20386 - DNA, 120 bp, synthetic construct
  misc_feature 1..120: note = Artificially Synthesized Probe
  source 1..120: mol_type = other DNA
tttcatgattgacacaaaggccccttaaagactagcaactgcgcctgcggaggggtctcttgtcacttacatcgaagtcaacgcgctccccttctgggatctttggcgggatcaaaggag

SEQ ID NO: 20387 - DNA, 120 bp, synthetic construct
  misc_feature 1..120: note = Artificially Synthesized Probe
  source 1..120: mol_type = other DNA
gcgcccagccatttttaaattttttgtagagatggcgtttcacagcctgggcgcggtggctcacgcctgtaatcctagcactttgggaggccaaggtgggcgaatcacttgaggtcagga

SEQ ID NO: 20388 - DNA, 120 bp, synthetic construct
  misc_feature 1..120: note = Artificially Synthesized Probe
  source 1..120: mol_type = other DNA
caagtgtacagcagggccgtcatctccatcttggaaaagtcgataagctccatcagggcgtcatgtgtgggaataaaatatggcttaccatattgtacaggaatgaataccggcttgcct

SEQ ID NO: 20389 - DNA, 120 bp, synthetic construct
  misc_feature 1..120: note = Artificially Synthesized Probe
  source 1..120: mol_type = other DNA
agatggggaaggctttgaatgcaggctagttgctttgactgcgtcttaagagtagtggggagttgaggaaagattctgagcagaggaggggcagggttagctctggtgttagaaaagtct

SEQ ID NO: 20390 - DNA, 120 bp, synthetic construct
  misc_feature 1..120: note = Artificially Synthesized Probe
  source 1..120: mol_type = other DNA
gggaatatttaggaagatgtatgactggggccccccaccctgtaggatctcaccttggtttggggcgttcctcttctgttggtggtgggggataaaaagagataattagcaagagtttag

SEQ ID NO: 20391 - DNA, 120 bp, synthetic construct
  misc_feature 1..120: note = Artificially Synthesized Probe
  source 1..120: mol_type = other DNA
acagaagagaaggcgttaggagctgggggagggatgggggcggtggccagagaccagggttccagtctctgctggacgggggtccctctggcctcggctgcgatgggcacgttccccctg

SEQ ID NO: 20392 - DNA, 120 bp, synthetic construct
  misc_feature 1..120: note = Artificially Synthesized Probe
  source 1..120: mol_type = other DNA
gtcctaaagcatgcatgaggacagaccttggtaggtgtggtcctggcacagccaggaggctgcagaccctgccccctcagcacagctgtcctcttttgtcttatgacaagtccatgggaa

SEQ ID NO: 20393 - DNA, 120 bp, synthetic construct
  misc_feature 1..120: note = Artificially Synthesized Probe
  source 1..120: mol_type = other DNA
aaaatctgaaacctcaagaatatgagacccccaaaatcttgatacccaaactcggaggcccagttcatgataccccagataatggcactctaagttttcatgctttctatcataatgtct

SEQ ID NO: 20394 - DNA, 120 bp, synthetic construct
  misc_feature 1..120: note = Artificially Synthesized Probe
  source 1..120: mol_type = other DNA
gcttaggttgccagcttgtggtcgccatgcagacatttgcccaggcccgtcctggccttgccatgcagctctcgcacctgggcctccaacaccgccattttgtagagatgaaaacgagga

SEQ ID NO: 20395 - DNA, 120 bp, synthetic construct
  misc_feature 1..120: note = Artificially Synthesized Probe
  source 1..120: mol_type = other DNA
ctcacccacgtcttgggtttctgggcagaaacgtcttgcctatttctggacacctcagctgccactggctccttataaataacccaccccaggcgagggccacgctgcccccatcttgtg

SEQ ID NO: 20396 - DNA, 120 bp, synthetic construct
  misc_feature 1..120: note = Artificially Synthesized Probe
  source 1..120: mol_type = other DNA
atgcatttttagctgatgaacgtgtgttttccttatacaacactcccaggggggaccgtagctattgtcttcgagtaatctgtactgtgttgtaatgaactttgttttctaaaaccctgg

SEQ ID NO: 20397 - DNA, 120 bp, synthetic construct
  misc_feature 1..120: note = Artificially Synthesized Probe
  source 1..120: mol_type = other DNA
ttctctctctctccctgccccacagtgaacaggtggagggtaagtgtaacagccattttctttctacttcctgctctagaaggaaggctcacatgtgggcagggggctggactgtgcata

SEQ ID NO: 20398 - DNA, 120 bp, synthetic construct
  misc_feature 1..120: note = Artificially Synthesized Probe
  source 1..120: mol_type = other DNA
attaatgatggatgagtcattaaatcatcactaacccctgtctctttaatcgattaatatgcattcacgatccttcattaatccttcatcctccgtgtgccatggtgtgtggagttcact

SEQ ID NO: 20399 - DNA, 120 bp, synthetic construct
  misc_feature 1..120: note = Artificially Synthesized Probe
  source 1..120: mol_type = other DNA
cagctgacagtgaccagctctgctggtgggagtccgtgctccccggggctggccagagatgcaggactgagccccatctttcacccctgccaagcgagccccaggccctcttctcccggc

SEQ ID NO: 20400 - DNA, 120 bp, synthetic construct
  misc_feature 1..120: note = Artificially Synthesized Probe
  source 1..120: mol_type = other DNA
gctgggagcagatgggagggctggggtcccatgcccagatcagcaggcagagccatcactggtgcccagggctgccagcacccttggagggtggaaagaattccatcagggaaagaacga

SEQ ID NO: 20401 - DNA, 120 bp, synthetic construct
  misc_feature 1..120: note = Artificially Synthesized Probe
  source 1..120: mol_type = other DNA
caggccagagtctccgtcctcccttctgtcctctcttgcttcctccctcttgcccaccccttgtgacgtttgccaccaacaactgaacccgttctggcctctgggctggggacagagtga

SEQ ID NO: 20402 - DNA, 120 bp, synthetic construct
  misc_feature 1..120: note = Artificially Synthesized Probe
  source 1..120: mol_type = other DNA
tgtgctcgctccccgaaattgctcagcctcccacccgacctcgccctcctccctggccggccttcccacccggaggggctcctcagccacgcactgcgtccagcaaaaccactaagtcag

SEQ ID NO: 20403 - DNA, 120 bp, synthetic construct
  misc_feature 1..120: note = Artificially Synthesized Probe
  source 1..120: mol_type = other DNA
tggggctgagaccagcaaggagttagacatcacgttgccggcagaggctcctgaggcctgagggctgtagtcattccatgaactgctgggttccacccagtaacacagcctttacaggca

SEQ ID NO: 20404 - DNA, 120 bp, synthetic construct
  misc_feature 1..120: note = Artificially Synthesized Probe
  source 1..120: mol_type = other DNA
tatttcttccctacctcttcctcacccttcctcctggccccaggccctgagctcttcccctccaaccctgccaggggcttttgcaggcctagagcagaaacaggaccctcttgtttctgg

SEQ ID NO: 20405 - DNA, 120 bp, synthetic construct
  misc_feature 1..120: note = Artificially Synthesized Probe
  source 1..120: mol_type = other DNA
ttctcagaagagtgagaacatctgaagggtacagccggcgtattcccaccctttgcactgtatttttcagtgattttaagtacagtaatgctggatcatgagatattttctcattttaga

SEQ ID NO: 20406 - DNA, 120 bp, synthetic construct
  misc_feature 1..120: note = Artificially Synthesized Probe
  source 1..120: mol_type = other DNA
tcttctctgagaactcgtagctacggccattgctcatttgtctcctggtggaggaatctctgtgttttcttagtcatcagtttgcataaggatataagtcttctctgtatttgctgaaaa

SEQ ID NO: 20407 - DNA, 120 bp, synthetic construct
  misc_feature 1..120: note = Artificially Synthesized Probe
  source 1..120: mol_type = other DNA
tctgtctcctcttcagactcactgctcctaagatcccagaaggggagaaagtggacttcgatgtaagtttacaggactctggttaacatgtccacggtttccccacaccccagcttttgg

SEQ ID NO: 20408 - DNA, 120 bp, synthetic construct
  misc_feature 1..120: note = Artificially Synthesized Probe
  source 1..120: mol_type = other DNA
ccatccatttctccaatcatccatctatccacccagtcatctgtctccatcctctctcactcatccacccatccatcagctcatctgttcacatgcctacctatgtatccaacaatttct

SEQ ID NO: 20409 - DNA, 120 bp, synthetic construct
  misc_feature 1..120: note = Artificially Synthesized Probe
  source 1..120: mol_type = other DNA
agaagagaggcaagaagcagacagcccgggaaatgaagaagaagattctggctgagagacgcaagccgctcaacatcgatcaccttggtgaagacaaactgaggtgaggggtgggtgttg

SEQ ID NO: 20410 - DNA, 120 bp, synthetic construct
  misc_feature 1..120: note = Artificially Synthesized Probe
  source 1..120: mol_type = other DNA
ggcggccttggttacccctgccaaaaggactgtcgtggcagagcagccatggccaagtggactcagggttcattttcggaacccctttaagcttatagaaagtccccatcatcacccagc

SEQ ID NO: 20411 - DNA, 120 bp, synthetic construct
  misc_feature 1..120: note = Artificially Synthesized Probe
  source 1..120: mol_type = other DNA
aagctagcccacagccgggcctcgatgccccagccgcccatccagccttgtaaccatcttggtctttctagatcatgaatgtccgggccagagtgcagatgctggccaagttgtaagtag

SEQ ID NO: 20412 - DNA, 120 bp, synthetic construct
  misc_feature 1..120: note = Artificially Synthesized Probe
  source 1..120: mol_type = other DNA
accctccaaggggacctaggacagggaattaagcagtcagggcttcatcaccagcccctctgtgacgctgggcaaaatcatggactcctcaggatggtgaaacctcatccataaaatcgt

SEQ ID NO: 20413 - DNA, 120 bp, synthetic construct
  misc_feature 1..120: note = Artificially Synthesized Probe
  source 1..120: mol_type = other DNA
ggggcatgagctctttcaaggccaagcgtctaggattatatcattatctgctaagacagtcttccccagctcaggggtctgtctgcagtggtacctcaggcaaagaaaggaggacagagg

SEQ ID NO: 20414 - DNA, 120 bp, synthetic construct
  misc_feature 1..120: note = Artificially Synthesized Probe
  source 1..120: mol_type = other DNA
taatgagggtcgcctaattgactcagagaaggcagcactttgatttttcccgtttcttctggaaaaagcagaggctcacagagaggcgttaccctacccaaggtcacacacccagtaagt

SEQ ID NO: 20415 - DNA, 120 bp, synthetic construct
  misc_feature 1..120: note = Artificially Synthesized Probe
  source 1..120: mol_type = other DNA
actgtgcctggccatgcttcacctttccgaatctcagtaaaagggagataatactaaggactgcctggcgggcattgtgaggattcagagagaatccagagtttgtcctcagcacagggc

SEQ ID NO: 20416 - DNA, 120 bp, synthetic construct
  misc_feature 1..120: note = Artificially Synthesized Probe
  source 1..120: mol_type = other DNA
acagttgttttctcttgttgctgggtcagaaaaatcacacttttactggttatcaaacaagtcagaggacaagggattgcgatgctgtagaggctttcagagtaactgaatgcttatgaa

SEQ ID NO: 20417 - DNA, 120 bp, synthetic construct
  misc_feature 1..120: note = Artificially Synthesized Probe
  source 1..120: mol_type = other DNA
tgttcatttattcatgggatatatcagctttgagtcctgtgtgcttgacttctgggctctgcagatacagcagggaacaaaacagtgtggcttctgttcatagcgatcccaggatgtgct

SEQ ID NO: 20418 - DNA, 120 bp, synthetic construct
  misc_feature 1..120: note = Artificially Synthesized Probe
  source 1..120: mol_type = other DNA
ggaccgggacagtgagggaatgggaccttggtagcactcatgaagcctcatggcagtgcctttgggttctagatgccagttctccctgtcactgttgaatccgaggtctggtttgatggg

SEQ ID NO: 20419 - DNA, 120 bp, synthetic construct
  misc_feature 1..120: note = Artificially Synthesized Probe
  source 1..120: mol_type = other DNA
aggttaagagaactgagggtggagcctctgggcacggctcttcgtcagtccccggaggacttgtcttctgcatcctggacgcatttgctgctttgatgcaccgtgttctgaggcctgttg

SEQ ID NO: 20420 - DNA, 120 bp, synthetic construct
  misc_feature 1..120: note = Artificially Synthesized Probe
  source 1..120: mol_type = other DNA
tttattgctgattctctggagtgagctgccttttccccagactttgtactttgacccggtgagcaaggcacactttcttggacaagcaagtgcctgaggcagaggctatgtcagctctcc

SEQ ID NO: 20421 - DNA, 120 bp, synthetic construct
  misc_feature 1..120: note = Artificially Synthesized Probe
  source 1..120: mol_type = other DNA
gcaagaggttgtcattagcgttttttgaatggttggtgtgtttgagaagtgtcaaaaggtgagagagggtacatcagcaagctgtgacctctgggggctgtcttttattttattttattt

SEQ ID NO: 20422 - DNA, 120 bp, synthetic construct
  misc_feature 1..120: note = Artificially Synthesized Probe
  source 1..120: mol_type = other DNA
acctgcccactgagctggtatttttctagccttttccagagtgcattccatgtcttctcagcctgcacaaggtggttgttagataggcagaacaggcaggagcctcccattactgatgag

SEQ ID NO: 20423 - DNA, 120 bp, synthetic construct
  misc_feature 1..120: note = Artificially Synthesized Probe
  source 1..120: mol_type = other DNA
cagaatccactggggtctgtcgggaagcagagccccacaggtgccttgtggagagaatgaacagagggccttaaacaggctccgagaaaccaacagtgaaaggagcccagtggaacccag

SEQ ID NO: 20424 - DNA, 120 bp, synthetic construct
  misc_feature 1..120: note = Artificially Synthesized Probe
  source 1..120: mol_type = other DNA
ggtttttcacctggcacagggactggaccttcctccctgaggggcccgagtccttggtggtcctgcctttggaaggctggagttttctgctaacttttcctatgggacataggagtaaga

SEQ ID NO: 20425 - DNA, 120 bp, synthetic construct
  misc_feature 1..120: note = Artificially Synthesized Probe
  source 1..120: mol_type = other DNA
atggaggctgaaatgtgcgtgtgtgtgtttccggctgggccggctatcattcagcacgtctgcaaaccaggcctgaggttttcctctgtggccagctgtccagtcataaagaactcctac

SEQ ID NO: 20426 - DNA, 120 bp, synthetic construct
  misc_feature 1..120: note = Artificially Synthesized Probe
  source 1..120: mol_type = other DNA
ggttttggttttgtgcaaggagctgacagctctgcgtttctaaaacaagatactgatgaggatgcgagactgcagtggagagcgtggatttgagattgacaggcgccaaagtgtaaacga

SEQ ID NO: 20427 - DNA, 120 bp, synthetic construct
  misc_feature 1..120: note = Artificially Synthesized Probe
  source 1..120: mol_type = other DNA
aacacggggagtcagattcaacgtgagatttggaggggacgcacattcacaccgtgtgagtgttgagcgtgggagcagtgaggctggagggcgctgtgtgagtgtgggggtgtggaggtg

SEQ ID NO: 20428 - DNA, 120 bp, synthetic construct
  misc_feature 1..120: note = Artificially Synthesized Probe
  source 1..120: mol_type = other DNA
actcatggtgtcggcacgctgccagcctagacttcataaagctgagctgttcctgacgacacccctgcttggaagccctcgtggctcttgttgccactagaagcgtggggctctctccct

SEQ ID NO: 20429 - DNA, 120 bp, synthetic construct
  misc_feature 1..120: note = Artificially Synthesized Probe
  source 1..120: mol_type = other DNA
ctattcactgagggtgggtcctctggtttctcctccagccctgttcatccttcctgacaaccaggcttgccctgtaccctctctgactgcagcccccaaggctgcgctggcctactggga

SEQ ID NO: 20430 - DNA, 120 bp, synthetic construct
  misc_feature 1..120: note = Artificially Synthesized Probe
  source 1..120: mol_type = other DNA
ttgtggagatggaaccggctgacagaatctcaggccctcctctgtgtgaccgtccagtgacccctgcagtagcgctgtttgccagagcctgtaccaggtggatggcgtcagtgtgggtgc

SEQ ID NO: 20431 - DNA, 120 bp, synthetic construct
  misc_feature 1..120: note = Artificially Synthesized Probe
  source 1..120: mol_type = other DNA
agactgtggagtcttcaccaattagctcacgtgtccttgggagcccctgactggacagacgaggggacagtgccattttataggtgaggccttggaggcctcagtgctattgatgcggct

SEQ ID NO: 20432 - DNA, 120 bp, synthetic construct
  misc_feature 1..120: note = Artificially Synthesized Probe
  source 1..120: mol_type = other DNA
tttgctgtggttctgagccggcctgcttccaggcaccgtgtccatgcgggtgagcggtctccctgggtgcccactcttgcgcccggagatcctgagtttggtcctgtctggccatgagct

SEQ ID NO: 20433 - DNA, 120 bp, synthetic construct
  misc_feature 1..120: note = Artificially Synthesized Probe
  source 1..120: mol_type = other DNA
ctctgagtcctaggaagtgaccgcagtgggagcaggaccgtctgagtcctaggaagtgaccgcactgggagcagggccgtctgagtcctaggaagtgaccgcactgggagcaggaccgtc

SEQ ID NO: 20434 - DNA, 120 bp, synthetic construct
  misc_feature 1..120: note = Artificially Synthesized Probe
  source 1..120: mol_type = other DNA
accgcagtgggagcaggaccgtctgagtcctaggaagtgaccgcactgggagcaggaccgtctgagtcctaggaagtgaccgcagtgggagcaggaccatctgagtcctaggaagttacc

SEQ ID NO: 20435 - DNA, 120 bp, synthetic construct
  misc_feature 1..120: note = Artificially Synthesized Probe
  source 1..120: mol_type = other DNA
aatggagacctcctttctattgcaaaagcaaatagtgtagcgtcaggatgggagtgggatcaggtactgaggttgtcagtttctgttatttcttttttcttttagtgatgattcctgcgt

SEQ ID NO: 20436 - DNA, 120 bp, synthetic construct
  misc_feature 1..120: note = Artificially Synthesized Probe
  source 1..120: mol_type = other DNA
atcctgtgccggccacccttgcgttggttttgctgctgtactggtggcgcccctgaccgtggctgtctcctcttgaaggaagcctgtttctgatgaacctgctgacagccatcatctaca

SEQ ID NO: 20437 - DNA, 120 bp, synthetic construct
  misc_feature 1..120: note = Artificially Synthesized Probe
  source 1..120: mol_type = other DNA
caggtgtccacaccaccatcctgcttggaaatgagggcagagagcttgagggacattgcagtggaaagttctggtcctgactgctcatagtggtgaagtcagtttgcgccttctcggggg

SEQ ID NO: 20438 - DNA, 120 bp, synthetic construct
  misc_feature 1..120: note = Artificially Synthesized Probe
  source 1..120: mol_type = other DNA
gaactcttctaatgatcagtgctgggattcacctgccagggatcctggctcctagtatgggaactgggaatggagttctctttggctcttggagactggggagatttttatgaaattcac

SEQ ID NO: 20439 - DNA, 120 bp, synthetic construct
  misc_feature 1..120: note = Artificially Synthesized Probe
  source 1..120: mol_type = other DNA
tggcagtttgaatattcacgccatcaaacctctgtttgggacaaggctgggcaatgcgttatcaacttaaggttgacttgaagatacgaaataaattttaccaggtgcagatttcacaga

SEQ ID NO: 20440 - DNA, 120 bp, synthetic construct
  misc_feature 1..120: note = Artificially Synthesized Probe
  source 1..120: mol_type = other DNA
agtcatttctagactacttggaatacctagcacctaggaatgcagtgggagtttggggaataagggtaagaaaacctgtacatgctccgtacagatgctttttccctgagtatgttttga

SEQ ID NO: 20441 - DNA, 120 bp, synthetic construct
  misc_feature 1..120: note = Artificially Synthesized Probe
  source 1..120: mol_type = other DNA
aacaatttagacgtaatagataatgctgaaatctctcttggccaaggtgtccgtctgggttaaacagaaagtgtcatgtacggcagtggcaactacgataaaagagtaactgcaagatgt

SEQ ID NO: 20442 - DNA, 120 bp, synthetic construct
  misc_feature 1..120: note = Artificially Synthesized Probe
  source 1..120: mol_type = other DNA
atgtcgggagccgagaggaagttcgctgatcattggcaccaccagtttgggtctcactggagaatagccactctattcaactggatattttggtgttttccttccagacttttccctgtg

SEQ ID NO: 20443 - DNA, 120 bp, synthetic construct
  misc_feature 1..120: note = Artificially Synthesized Probe
  source 1..120: mol_type = other DNA
atcagggtgacactttgcgtatgtttcaggtgactctaatatcacaacatggtttacttacagcctcagtggatgtttcagttgcttctatttctctttgggtgttacaaagaccactga

SEQ ID NO: 20444 - DNA, 120 bp, synthetic construct
  misc_feature 1..120: note = Artificially Synthesized Probe
  source 1..120: mol_type = other DNA
tgtgtgtgtcacaagcagccacatgagagtgacgtttgctgtagccagcaggcccctcggcacataggtgaagagaaatttgaaaagggccctgcagtctgtccttgactcagtatcttc

SEQ ID NO: 20445 - DNA, 120 bp, synthetic construct
  misc_feature 1..120: note = Artificially Synthesized Probe
  source 1..120: mol_type = other DNA
ttttcttttgtaattaaaggttttggagatctcaactctggctgtgtaccgattgccacacccaggctggtatgtgactgggcagaaccgagggcggctacagcaaacagcaccaccacc

SEQ ID NO: 20446 - DNA, 120 bp, synthetic construct
  misc_feature 1..120: note = Artificially Synthesized Probe
  source 1..120: mol_type = other DNA
ttgttctgagtcattaccttggggggctgacactgtgggtgagaatgggtttgagtttcaacagaaatgaaagcatggaaagaccatgagggatgccaagcggggcttgggtcagggatg

SEQ ID NO: 20447 - DNA, 120 bp, synthetic construct
  misc_feature 1..120: note = Artificially Synthesized Probe
  source 1..120: mol_type = other DNA
gttcacacataattacagccatacaagcacaatcatacatatatacaatacagccaagcacacgtgatctcacacacaaccacacatgtgaccatgcacatgcatatacacacacaatca

SEQ ID NO: 20448 - DNA, 120 bp, synthetic construct
  misc_feature 1..120: note = Artificially Synthesized Probe
  source 1..120: mol_type = other DNA
ctgtgactttaagggaaatggcgcacagcagaccctgcaatcatgccgttttgcttgaagtcgcagtttcccaggacctctcacgtgagtatatacatgctcacgatgacacgcaacgtg

SEQ ID NO: 20449 - DNA, 120 bp, synthetic construct
  misc_feature 1..120: note = Artificially Synthesized Probe
  source 1..120: mol_type = other DNA
gagcatccttccctcccatggcagagactgtttggtaatttttgagtctctcgtgttttctgggttgtggatctcgttgagaaagtaatgacagaaatttaagaggcgcagggctttgct

SEQ ID NO: 20450 - DNA, 120 bp, synthetic construct
  misc_feature 1..120: note = Artificially Synthesized Probe
  source 1..120: mol_type = other DNA
gtggtctactacgtatttgccatcattgggatcaacttgtttagaggcgtcattgtggctcttcctggaaacagcaggtgaggtggggtccgaggtgccacagggagtgtctcaggggtg

SEQ ID NO: 20451 - DNA, 120 bp, synthetic construct
  misc_feature 1..120: note = Artificially Synthesized Probe
  source 1..120: mol_type = other DNA
gttttaatcccagcaccgcctcctgctggcttagctacctcggcagcttgttgcacgtttctaggcctcagttgggttgtttctgagatggaaatagtaacgcgctctgcatcatggtgt

SEQ ID NO: 20452 - DNA, 120 bp, synthetic construct
  misc_feature 1..120: note = Artificially Synthesized Probe
  source 1..120: mol_type = other DNA
atagcctttgtcctgctctcctgctcttggattgggcatatttaaggcaccatccttcagggtccattggatcctgttggatgtaaacaagggacctgaggaaaacgcacccatctcttc

SEQ ID NO: 20453 - DNA, 120 bp, synthetic construct
  misc_feature 1..120: note = Artificially Synthesized Probe
  source 1..120: mol_type = other DNA
ggggatgctggtggtttgacatggagagaaccttgactgtgttttattatttcatggcttgtatgagtgtgactgggtgtgtttctttagggttctgattgccagttattttcatcaata

SEQ ID NO: 20454 - DNA, 120 bp, synthetic construct
  misc_feature 1..120: note = Artificially Synthesized Probe
  source 1..120: mol_type = other DNA
aacaataacaataacaatatggaaaccaccgcaaacttggagaaaagttgtaagcacagtaaagagaagcttccttctgagtcacttgagtggttgccgttctggccctgcaccctctgt

SEQ ID NO: 20455 - DNA, 120 bp, synthetic construct
  misc_feature 1..120: note = Artificially Synthesized Probe
  source 1..120: mol_type = other DNA
tttactttctggtgcaaaaagatgttcaagccttattttatacttgcctgcccctttctctttcatttattggagtgagctgcagctctaagaagacctgttcttttgaatggagagtag

SEQ ID NO: 20456 - DNA, 120 bp, synthetic construct
  misc_feature 1..120: note = Artificially Synthesized Probe
  source 1..120: mol_type = other DNA
cactgcacctggcctgccctgagattatatactgaaatcaattgcttttctagacactagcaataagcttataaattatattcaaggattcagttatattcattttttaaaagatattta

SEQ ID NO: 20457 - DNA, 120 bp, synthetic construct
  misc_feature 1..120: note = Artificially Synthesized Probe
  source 1..120: mol_type = other DNA
ttcacgggaggagattatgtaagggtaaggatcactggggtcatcttggaattctggccaccacagtttttctatcttcatggtcaaaaagaattgatattgtaaaaatgtcagccttct

SEQ ID NO: 20458 - DNA, 120 bp, synthetic construct
  misc_feature 1..120: note = Artificially Synthesized Probe
  source 1..120: mol_type = other DNA
agagtcaagctaagctgaaacaacctctttggaaaattgtttggtgtcatttcttgcaattgaataggacataccttggtaattctctgctagatacactcacaagagaaactgctgccc

SEQ ID NO: 20459 - DNA, 120 bp, synthetic construct
  misc_feature 1..120: note = Artificially Synthesized Probe
  source 1..120: mol_type = other DNA
tggtattaaccttaggaacatgcacatgttacatgtgttcttttgcatgtgccaaatattaaaaggagagcgagaggagaggcactgaagacagtgaggatggacggccctcagggaatc

SEQ ID NO: 20460 - DNA, 120 bp, synthetic construct
  misc_feature 1..120: note = Artificially Synthesized Probe
  source 1..120: mol_type = other DNA
gttgtggcctttttaagcacagctgacgggcacactgacttgtgaggtgggcgggggcccaataacacaagtccatggtgaacattatagagtggttcttatttctgaagctgagaccta

SEQ ID NO: 20461 - DNA, 120 bp, synthetic construct
  misc_feature 1..120: note = Artificially Synthesized Probe
  source 1..120: mol_type = other DNA
atgaaggcaccttctagtgttgaaggcagggaacacatgcccattgtctgcatttcatttcccttaaaaggaatctcaggagagtaataatagtgataattggttggtagacggaagtca

SEQ ID NO: 20462 - DNA, 120 bp, synthetic construct
  misc_feature 1..120: note = Artificially Synthesized Probe
  source 1..120: mol_type = other DNA
gcctctctacactcatgtccttagctctcaatcttcaggatggcggtgggcatatggcctctctcctttcccgtgtcctgtggtaatgaccttgataagtgcagagtggagtgaagagtg

SEQ ID NO: 20463 - DNA, 120 bp, synthetic construct
  misc_feature 1..120: note = Artificially Synthesized Probe
  source 1..120: mol_type = other DNA
tggtttttattcatttcctttgtaaattcttatgtccagagggctcctgccttgggattcatgtctctggttttcagatggaaatgcccattttaaatcccgttacaggtgtgtttgcag

SEQ ID NO: 20464 - DNA, 120 bp, synthetic construct
  misc_feature 1..120: note = Artificially Synthesized Probe
  source 1..120: mol_type = other DNA
cagcctcaaataatgtctttaaatcagccccaaatccacggagccacaaggaaaataattacatcgagcagcagttaacagaatatcccaaaccccaaggtgtgacagagtaaggcctgt

SEQ ID NO: 20465 - DNA, 120 bp, synthetic construct
  misc_feature 1..120: note = Artificially Synthesized Probe
  source 1..120: mol_type = other DNA
attaggttaaacaccttgaggtgaggccatgcgggatttagggttgccctgaatagaatggctggtgccttataagaatagagaaggcagagaccacagaaaagaccacgtgaagacaga

SEQ ID NO: 20466 - DNA, 120 bp, synthetic construct
  misc_feature 1..120: note = Artificially Synthesized Probe
  source 1..120: mol_type = other DNA
tcaggggtgacgtcatcaccttttgaagaagccccagatggtgttgaatagcgatcgccacccccagtgtgcaccagggaaggagcatcgtagacctagcagatgagggcaggcatgact

SEQ ID NO: 20467 - DNA, 120 bp, synthetic construct
  misc_feature 1..120: note = Artificially Synthesized Probe
  source 1..120: mol_type = other DNA
acaacccttgcctaagagaccctaggggaatctgtgtggtggcagtgacaaccaacacttgttagattctagccaggagagagggtagcgtgcttttagtggggagagggtgtgatgagg

SEQ ID NO: 20468 - DNA, 120 bp, synthetic construct
  misc_feature 1..120: note = Artificially Synthesized Probe
  source 1..120: mol_type = other DNA
gcaaaagggattgcatttgttttgggaactgtctgaggttagaagtcacccagtgaagacaggagaacacgggtgggggatattgcctcagtctgagtgcccaaaggtggcggtattagc

SEQ ID NO: 20469 - DNA, 120 bp, synthetic construct
  misc_feature 1..120: note = Artificially Synthesized Probe
  source 1..120: mol_type = other DNA
ccaagtaaagtcacatctgagattccaagtggatgtgaattttaggagcacctgattctacctttccaggtgttttctctctcacaagcattcacgagcaggcagctttttgatttttac

SEQ ID NO: 20470 - DNA, 120 bp, synthetic construct
  misc_feature 1..120: note = Artificially Synthesized Probe
  source 1..120: mol_type = other DNA
tacatttccttggtctgggcctctctgtgtcacatggcgaatgatccctgagcaacagtgccacgtccttggggagcttcggtttgaaggggcccctccatggatcttttgtaacgtgag

SEQ ID NO: 20471 - DNA, 120 bp, synthetic construct
  misc_feature 1..120: note = Artificially Synthesized Probe
  source 1..120: mol_type = other DNA
cgtatcctgctctcagagttcagaagggacttaatctatttttgtcctgttcagccaggatgattatctttaataaggccatcttgaacgtttccttgtcagctcgttttaaggaaatgt

SEQ ID NO: 20472 - DNA, 120 bp, synthetic construct
  misc_feature 1..120: note = Artificially Synthesized Probe
  source 1..120: mol_type = other DNA
aagctaatggctggatgggtagggccatccagtgagggtattttctaaattggaaagtccctgattttttgggagctggagaactttaaagtgggaagggcctgtggagaacttagcatc

SEQ ID NO: 20473 - DNA, 120 bp, synthetic construct
  misc_feature 1..120: note = Artificially Synthesized Probe
  source 1..120: mol_type = other DNA
tgcagtcatcaacaaagtccatttgaacctccaagcacatttttggtctgcctctcctcattccctctcccctgtcccagccccgccatccaacacacctggaggactatagtggtccct

SEQ ID NO: 20474 - DNA, 120 bp, synthetic construct
  misc_feature 1..120: note = Artificially Synthesized Probe
  source 1..120: mol_type = other DNA
cccctgcccctttgggagccccaccacagtctatgatcatgcatttattgatcacttattaacttatttattggctaattacacatttgttgactattgaaaatgcgaactatgtctggt

SEQ ID NO: 20475 - DNA, 120 bp, synthetic construct
  misc_feature 1..120: note = Artificially Synthesized Probe
  source 1..120: mol_type = other DNA
tcaatcctcatgttactttgttaatcatctcctgtatcagtcacagcactggcatctggcacacattatcaaatttaatccttcctactttcccttatgaggccctttatacagatgagg

SEQ ID NO: 20476 - DNA, 120 bp, synthetic construct
  misc_feature 1..120: note = Artificially Synthesized Probe
  source 1..120: mol_type = other DNA
tctttgtagtctatgacaaacattcttgttggtactggggatacaggatggatcctagttcctgctctcaggaggctgggaagctctgaagaaatgattatgcaaatctactagaattgt

SEQ ID NO: 20477 - DNA, 120 bp, synthetic construct
  misc_feature 1..120: note = Artificially Synthesized Probe
  source 1..120: mol_type = other DNA
cagacctttggaacattcctcagcttttatttaatgtaggaagaatcatttctggaattagcatataaattggcagaagtcagcagctctagcagaagtcactctctgtgtcaggacagg

SEQ ID NO: 20478 - DNA, 120 bp, synthetic construct
  misc_feature 1..120: note = Artificially Synthesized Probe
  source 1..120: mol_type = other DNA
ggagcagccacactcatgaatagattctcgttttgcactaatcagattttctagcagagcttccagaaatgtcgttctcttgcagaatcaaaggcaattgcaaggcattaaaaaccaatg

SEQ ID NO: 20479 - DNA, 120 bp, synthetic construct
  misc_feature 1..120: note = Artificially Synthesized Probe
  source 1..120: mol_type = other DNA
tttatagctcagcccagaacataggcggtggagccagatggacctgggctcgagcccagccctcgcagctgtgtgatctgaacaagttacctaacctttctgagcccggttttttcatgt

SEQ ID NO: 20480 - DNA, 120 bp, synthetic construct
  misc_feature 1..120: note = Artificially Synthesized Probe
  source 1..120: mol_type = other DNA
cttctgtctgcaccaggctttgcttaggagagaaaatgccagaaacaaaaaggcttttctcactctcagccttaacataggatttattatgaataaatgaaactcccttgcagggcagtt

SEQ ID NO: 20481 - DNA, 120 bp, synthetic construct
  misc_feature 1..120: note = Artificially Synthesized Probe
  source 1..120: mol_type = other DNA
aattctgccgagagagagctttttccccttcaaggaataaaaagcacacacacacattcctccgaatcaaaggtgtgtccagagagagggagggcaaggccccttgaccagcagctgcca

SEQ ID NO: 20482 - DNA, 120 bp, synthetic construct
  misc_feature 1..120: note = Artificially Synthesized Probe
  source 1..120: mol_type = other DNA
catttatcgtttatcctggggatcagagttttttcctctgtaaagctgaataatgtcgcctggtatagccctaggtagtgttactttgaaggctgagagagagaatgtgaaagcgttttg

SEQ ID NO: 20483 - DNA, 120 bp, synthetic construct
  misc_feature 1..120: note = Artificially Synthesized Probe
  source 1..120: mol_type = other DNA
caaggggaggactaccatgcctctcttctgcactcttgggggcaaggccagagcaggaattgggtgtggtgggggctactgagcttgggtcctatgttcactttctccttccatttattt

SEQ ID NO: 20484 - DNA, 120 bp, synthetic construct
  misc_feature 1..120: note = Artificially Synthesized Probe
  source 1..120: mol_type = other DNA
ccagattcaggggtggagaaataaacttcatctcctggtgggaggagtgacattgtcaaacagtcatatgagggagtgtgaataaattaggggtcattactgtcatgctctaccactgag

SEQ ID NO: 20485 - DNA, 120 bp, synthetic construct
  misc_feature 1..120: note = Artificially Synthesized Probe
  source 1..120: mol_type = other DNA
tgataggaaatttacgtggggtcaaatttcatcctgactgatacatttggcaaagactcttgtctctcagaacgtgaggatttgggtggcctctccccaaagttaagtggatggacttaa

SEQ ID NO: 20486 - DNA, 120 bp, synthetic construct
  misc_feature 1..120: note = Artificially Synthesized Probe
  source 1..120: mol_type = other DNA
ctataatcatggcagcaataagtgtgacatactccaaggtgttataatttaaggaactttcttatgtgagccacacatatacttgcccacatgcacacacaggcacaacacatctataca

SEQ ID NO: 20487 - DNA, 120 bp, synthetic construct
  misc_feature 1..120: note = Artificially Synthesized Probe
  source 1..120: mol_type = other DNA
gtgtactgctccgagggcagtgggaggcattgcttggagaattaaagaagagcgtgatcccaagtggccgagaacttggagtgaagagcagtgtgctcaggacccatgtggaaagtggat

SEQ ID NO: 20488 - DNA, 120 bp, synthetic construct
  misc_feature 1..120: note = Artificially Synthesized Probe
  source 1..120: mol_type = other DNA
atttgggtcccctaagaagcatttgtcattctgtccctgcctctgggctcctcgcctgtgatctcagaaacagggctgggtgtgtctctgcagccttcctggggaagttttcttttaatc

SEQ ID NO: 20489 - DNA, 120 bp, synthetic construct
  misc_feature 1..120: note = Artificially Synthesized Probe
  source 1..120: mol_type = other DNA
tagccttcaaggtctgcagtctctggtctcacttctctcctcccctggttccagtagacagcggccagaggaggcgctcctggggttggattcactgttggttttaggaactgagaaagg

SEQ ID NO: 20490 - DNA, 120 bp, synthetic construct
  misc_feature 1..120: note = Artificially Synthesized Probe
  source 1..120: mol_type = other DNA
tggattcaatgcgtttgattcagtggatgggtttgctggaacgtaaccccatcgtaagttgggcagcatttgtcatgcgaaccacagagataatttacaatttttgagtagccacattaa

SEQ ID NO: 20491 - DNA, 120 bp, synthetic construct
  misc_feature 1..120: note = Artificially Synthesized Probe
  source 1..120: mol_type = other DNA
atgtaaaataattaaaattaaatatatttaaaaaaaacccccacagtttatgagtctcaccagccatgtacagagtgatcagcagctgtgtggccaggggctggtgtgtgggtgacgctg

SEQ ID NO: 20492 - DNA, 120 bp, synthetic construct
  misc_feature 1..120: note = Artificially Synthesized Probe
  source 1..120: mol_type = other DNA
cagcttcagtgtctccaactgtaccatgagtgaatgggaccctctgatggctaagttccatccagctctgagagcctctgcattgcctgttactttttatttttaaagtgattttgtttt

SEQ ID NO: 20493 - DNA, 120 bp, synthetic construct
  misc_feature 1..120: note = Artificially Synthesized Probe
  source 1..120: mol_type = other DNA
ccaggacacactgcgcctgggcccatgatacttgcagggacccacagtgatgttttaatgtcttttaaaatcaaaagaaagaaatgaacttttaggttgaagaaatgatggttaataatg

SEQ ID NO: 20494 - DNA, 120 bp, synthetic construct
  misc_feature 1..120: note = Artificially Synthesized Probe
  source 1..120: mol_type = other DNA
agcgagacttcatcacaaaaacaaaaacaaaaacaaaaaacagaaaacaaaaccacagtgagatatctcatcccacttaaaatagaaataaaattatcaaaaagacaaaaacaaccaaac

SEQ ID NO: 20495 - DNA, 120 bp, synthetic construct
  misc_feature 1..120: note = Artificially Synthesized Probe
  source 1..120: mol_type = other DNA
gtgagagaataattcccacaattctgagccacctgtggtaattggttatggcgggcccaggaaataatacaatgtataatattgatctgtctctactccggcatagttagatcaatagaa

SEQ ID NO: 20496 - DNA, 120 bp, synthetic construct
  misc_feature 1..120: note = Artificially Synthesized Probe
  source 1..120: mol_type = other DNA
aaggatatctgtcttctggagttttccatccatgtttcaaaagagccgagccctccttccttcagagggtgtcctccccagcattgtgttcccctgtgaccgtgtttcgatgtattttat

SEQ ID NO: 20497 - DNA, 120 bp, synthetic construct
  misc_feature 1..120: note = Artificially Synthesized Probe
  source 1..120: mol_type = other DNA
cacacggctactagctgtgtgtcaggcctacgtagatgtactttgcatacactatctccattagagactggggtgtagataggattgcaatccacaattcccagatgaggaaactgaggc

SEQ ID NO: 20498 - DNA, 120 bp, synthetic construct
  misc_feature 1..120: note = Artificially Synthesized Probe
  source 1..120: mol_type = other DNA
agggaatgcagctccttggttgttcagcaccatttctgccacgtaaagagtgttgctcctcttccttcaatgtcattactttcaatgatgaggagagtgaagtgattttttttttttttg

SEQ ID NO: 20499 - DNA, 120 bp, synthetic construct
  misc_feature 1..120: note = Artificially Synthesized Probe
  source 1..120: mol_type = other DNA
tctaatttatgattttgttcttttatactttgtgctttttgagtcctacctaagaattcatgcctgtctcaaagttgcagaacttctgctctgttttcttccaggcttgtagttgtaggt

SEQ ID NO: 20500 - DNA, 120 bp, synthetic construct
  misc_feature 1..120: note = Artificially Synthesized Probe
  source 1..120: mol_type = other DNA
ccagcccaaacacaaacatttttatcagactctacccactctcctcacccgccagcaggttcctggccccatttctcagggtggggggagtgagttatttgtctaaggtggaacagtgtg

SEQ ID NO: 20501 - DNA, 120 bp, synthetic construct
  misc_feature 1..120: note = Artificially Synthesized Probe
  source 1..120: mol_type = other DNA
tccacagcacccggtactcagtaggtggtcccataaatgtttgtggcacaagtgaatgaacttggaaccatccatctagtggaaattgtaaattataacaaaacccaatggaccgtgaaa

SEQ ID NO: 20502 - DNA, 120 bp, synthetic construct
  misc_feature 1..120: note = Artificially Synthesized Probe
  source 1..120: mol_type = other DNA
gggataatgagtttcccagctgtgttacaaacttaataagtcatagaaaccgtggtcactgtgtttaatttcttctttccaggacaagcatgtgtttgcccctttcgggttctaagtttt

SEQ ID NO: 20503 - DNA, 120 bp, synthetic construct
  misc_feature 1..120: note = Artificially Synthesized Probe
  source 1..120: mol_type = other DNA
tttggtttacagtattgtaagccaaaaagtgaccgaagcagatctcagtcaattagaagtttatgttgctaagattgagaatgtgcccggaaaaaacaaacacaagtcccagtgggacct

SEQ ID NO: 20504 - DNA, 120 bp, synthetic construct
  misc_feature 1..120: note = Artificially Synthesized Probe
  source 1..120: mol_type = other DNA
tattttgtagtattcatagagattcaatttccacttagccattgatccaaagtgacatttttgcttgttatgatgagccttctgaagtgaggcgtggtctcaacatcacccgtggtgatt

SEQ ID NO: 20505 - DNA, 120 bp, synthetic construct
  misc_feature 1..120: note = Artificially Synthesized Probe
  source 1..120: mol_type = other DNA
ctttagatcagcacctctggttatttttcagcttgacttacacagaagaaagtcgtatgcattggaatacggtctttctctcacggattattctggtagatttcaaaagccctacaagga

SEQ ID NO: 20506 - DNA, 120 bp, synthetic construct
  misc_feature 1..120: note = Artificially Synthesized Probe
  source 1..120: mol_type = other DNA
aaatggactaatacactgcctgtttatatttttaattggcaagtgcccttacgttgctggagagcggggccagctaactacagcccatgggccaaccctggttccctctccagtttctgc

SEQ ID NO: 20507 - DNA, 120 bp, synthetic construct
  misc_feature 1..120: note = Artificially Synthesized Probe
  source 1..120: mol_type = other DNA
cctgtgtggggactaaacacaagggttttccaggctccctcctcctggcaggacacggctgttcacacatgtcataatattatttaatatcataatgtttctgtcagtattttttcattt

SEQ ID NO: 20508 - DNA, 120 bp, synthetic construct
  misc_feature 1..120: note = Artificially Synthesized Probe
  source 1..120: mol_type = other DNA
tagtaaataaattgttccagttttacactccccagttttcagcaatttacctaaaaactgaagtgacacaatcacagcccccagctgagttagaacaggctcattcaatgggctagatgt

SEQ ID NO: 20509 - DNA, 120 bp, synthetic construct
  misc_feature 1..120: note = Artificially Synthesized Probe
  source 1..120: mol_type = other DNA
aacccattgatgttaacatgaagatgtgctatgggataagtgaagaattaaatgtgcaaaaccacatccttttaggagctacaggaccatgtagtttggacatgcgcctctaagtgatgt

SEQ ID NO: 20510 - DNA, 120 bp, synthetic construct
  misc_feature 1..120: note = Artificially Synthesized Probe
  source 1..120: mol_type = other DNA
cttcatgatgagaaatatcatcttgtcaactgcccaatggaaaactaaagtattttagtgaacaaagcattgcctttgccacagttaccaaaactggtgaagctgaacagctgcaaagga

SEQ ID NO: 20511 - DNA, 120 bp, synthetic construct
  misc_feature 1..120: note = Artificially Synthesized Probe
  source 1..120: mol_type = other DNA
atgatgagcagtttttcatgtgtctgttggctgcataaatgtcttcttttgagaagtgtctgttcatatgctttgcccacttgttgatggggttgtttttttcttgcaaatttgtttgag

SEQ ID NO: 20512 - DNA, 120 bp, synthetic construct
  misc_feature 1..120: note = Artificially Synthesized Probe
  source 1..120: mol_type = other DNA
gtgaatgggagttcactcatgatttggctctttgtttgtgtgtttttggtgtataagaatgcttgtgatttttgcacattgattttgtatcctgagactttgctgaagttgcttatcagc

SEQ ID NO: 20513 - DNA, 120 bp, synthetic construct
  misc_feature 1..120: note = Artificially Synthesized Probe
  source 1..120: mol_type = other DNA
ctagattttctagtttatttgtgtagaggtgtttatagtagtctctgatggtcgtttgtatttctgtgggatcggtggtgatatcccctttatcattttttattgcatctatttgattct

SEQ ID NO: 20514 - DNA, 120 bp, synthetic construct
  misc_feature 1..120: note = Artificially Synthesized Probe
  source 1..120: mol_type = other DNA
cttctttgtctcttttgatctttgttggtttaaagtctgttttatctgagactaggattgcaacccctgcctttttttgttttctatttgcttggtagatcttcctccgtccctttattt

SEQ ID NO: 20515 - DNA, 120 bp, synthetic construct
  misc_feature 1..120: note = Artificially Synthesized Probe
  source 1..120: mol_type = other DNA
tcaatcactgataccctttcttccagttgatcgaattggctactgaagcttgtgcattcatcacatagttcttgtgccttggttttcagcttcagcaggtcctttaaggacttctctgca

SEQ ID NO: 20516 - DNA, 120 bp, synthetic construct
  misc_feature 1..120: note = Artificially Synthesized Probe
  source 1..120: mol_type = other DNA
gtgttagcagtgagcgaggctctgtgggtgtaggaccctccgagccaggcgtagggtataatctcctggtgtgccgtttgctaagaccattggaaaagcgcagtattatggtgggagtga

SEQ ID NO: 20517 - DNA, 120 bp, synthetic construct
  misc_feature 1..120: note = Artificially Synthesized Probe
  source 1..120: mol_type = other DNA
gtttcccagagagtaaagtcatgttcagagacaagagttctacttcccaactgtaattggaatctcagtttcacttactcatccatgtgtctgtgcttaattccctttcatgtaacatgg

SEQ ID NO: 20518 - DNA, 120 bp, synthetic construct
  misc_feature 1..120: note = Artificially Synthesized Probe
  source 1..120: mol_type = other DNA
tttgctattgtgaatagtgctgcaatagacatacgtgtgcatgtgtctttacagtagcatgatttataatcctttgggaatatacccagtaatgggattgctgggtcaaatggtaattct

SEQ ID NO: 20519 - DNA, 120 bp, synthetic construct
  misc_feature 1..120: note = Artificially Synthesized Probe
  source 1..120: mol_type = other DNA
tccagctttgttctttttgcttaggattgttttggcaatgtgggctcttttttgcttccatatgaactttaaagtagttttttccaattctgtgaagaaagtcattggtagcttgatggg

SEQ ID NO: 20520 - DNA, 120 bp, synthetic construct
  misc_feature 1..120: note = Artificially Synthesized Probe
  source 1..120: mol_type = other DNA
ggtctaaaattcactttttttgttgtgtctctgccaggctttgggatcaggatgatgttggcctcataaaatgagttagggaggattccctgtttttctattgattggaatagtgtcaga

SEQ ID NO: 20521 - DNA, 120 bp, synthetic construct
  misc_feature 1..120: note = Artificially Synthesized Probe
  source 1..120: mol_type = other DNA
gaacccgctgatagcaagcctaccttgaagtctgttcaatgctcttccaaataaggcctgtggaaactctcatgagaaaaacaaggcaaaaactgcagaaatacaacagaatagatatac

SEQ ID NO: 20522 - DNA, 120 bp, synthetic construct
  misc_feature 1..120: note = Artificially Synthesized Probe
  source 1..120: mol_type = other DNA
tttcagctattttttcctgtaatataagaaccttgtaatggaacgtataaaggggaaattgactctcagacagtttcattttgacgaccatggagggtacatcatcgggcttcgatgccg

SEQ ID NO: 20523 - DNA, 120 bp, synthetic construct
  misc_feature 1..120: note = Artificially Synthesized Probe
  source 1..120: mol_type = other DNA
actcagaataagaaactcatttccccaaccagccagccacactgtaatccaagcagaacagctctgacacaaagatttcccatgtgaccattcaagattttatacacactaatattcttc

SEQ ID NO: 20524 - DNA, 120 bp, synthetic construct
  misc_feature 1..120: note = Artificially Synthesized Probe
  source 1..120: mol_type = other DNA
atattttttgattcagcagtggagtaactttacattctaagggagcccattgacttgcagaaaggacaggtgtggttatgttctggcaccacataaacatggagggaaattgcagaatga

SEQ ID NO: 20525 - DNA, 120 bp, synthetic construct
  misc_feature 1..120: note = Artificially Synthesized Probe
  source 1..120: mol_type = other DNA
tccctcaattcagagattatcactgcttcccaaccaagttatcccatttttactgcaggaaaacacaagaagcacaaatctgaaacatagggcatgacatgggagttactgacttccata

SEQ ID NO: 20526 - DNA, 120 bp, synthetic construct
  misc_feature 1..120: note = Artificially Synthesized Probe
  source 1..120: mol_type = other DNA
cagcattgcagacatcacaggcggagacctctgtcccttctctgcctccccacagctcagcatttatctagctgggcagggagggtctggacaaaactgcagtgggagaggtcatgaata

SEQ ID NO: 20527 - DNA, 120 bp, synthetic construct
  misc_feature 1..120: note = Artificially Synthesized Probe
  source 1..120: mol_type = other DNA
tatccaaaggagaatctttccaagaccccagtggacacctgaagccatggagagaacaagtcctatgtatgctgtgttttcctacacacatacccacggtgaagcttagtttataaatta

SEQ ID NO: 20528 - DNA, 120 bp, synthetic construct
  misc_feature 1..120: note = Artificially Synthesized Probe
  source 1..120: mol_type = other DNA
atgatgtgcaaaattgcccaagcagcacaaatgaaaacgtaaatttccttcacgtttcagtggaactgatgcaggcttttattgtagctgttagtttatccaagatttttatcagcaaga

SEQ ID NO: 20529 - DNA, 120 bp, synthetic construct
  misc_feature 1..120: note = Artificially Synthesized Probe
  source 1..120: mol_type = other DNA
tgtaggcagcgtgcacatcacaatcaccctgctgaaagaaagtcaccctgataaaagtaaaactttaggcaaaacacattgaagtgagtttacttgaccattagaagactcgtgaattgg

SEQ ID NO: 20530 - DNA, 120 bp, synthetic construct
  misc_feature 1..120: note = Artificially Synthesized Probe
  source 1..120: mol_type = other DNA
tagtgaaagaggaagagtaccccctaaatcccacagggaaggcacaggaagcaagactgctggtaatgcctggccccgtggaatctccagaccccgaaggacctgcttaggaagagacgg

SEQ ID NO: 20531 - DNA, 120 bp, synthetic construct
  misc_feature 1..120: note = Artificially Synthesized Probe
  source 1..120: mol_type = other DNA
ttgcattttttcctttgttttatgaattgcctgctcatgacctaagccctttttttaagtggtgtatttaagtgactacctttactttgtgtttctctgtaacccgcagatggactgccc

SEQ ID NO: 20532 - DNA, 120 bp, synthetic construct
  misc_feature 1..120: note = Artificially Synthesized Probe
  source 1..120: mol_type = other DNA
cttttactgcagcctgtttgggactgaactgtgtccccagggttcctaagttaaagggctgacccccagcatttcagaatgtacctggagataaggttgtcaaagaggtaattaagttaa

SEQ ID NO: 20533 - DNA, 120 bp, synthetic construct
  misc_feature 1..120: note = Artificially Synthesized Probe
  source 1..120: mol_type = other DNA
atttcctcattatttcagcttgtcaggtgccctcttctgttttctcacagattcacccccaagattctaatagggaatgtctcccactccacagaaattaattgcttctttatcttccta

SEQ ID NO: 20534 - DNA, 120 bp, synthetic construct
  misc_feature 1..120: note = Artificially Synthesized Probe
  source 1..120: mol_type = other DNA
agggcacctgtgttacattttgttatctttttgtgactattgtaagacacaaagaacttagcttagccatcctattatccacgtgaatattgtccactaaccaggtccttctctgcttcc

SEQ ID NO: 20535 - DNA, 120 bp, synthetic construct
  misc_feature 1..120: note = Artificially Synthesized Probe
  source 1..120: mol_type = other DNA
atggggcttgtggagacagctgaaaactggtgaaacatttttcaaagtgcatctctgaattgtttctcgaattgaccaagcagatgtgtcctttgtgtagttgtcaatctaacaaaagcc

SEQ ID NO: 20536 - DNA, 120 bp, synthetic construct
  misc_feature 1..120: note = Artificially Synthesized Probe
  source 1..120: mol_type = other DNA
aatcctggttcagtgagcttagctgcctaggcagggtggtaattagagtacggagttttacaggagaatctactgcataattcatgaggaaactgaaacgcaaaaaagatgtgtagttaa

SEQ ID NO: 20537 - DNA, 120 bp, synthetic construct
  misc_feature 1..120: note = Artificially Synthesized Probe
  source 1..120: mol_type = other DNA
attttattttccaaatttgttttaaaatgaattgagctgtaataagagttggaagataacacagagctcccaaacctccttcacccacctgctcagtgttaactctatgcacggccacag

SEQ ID NO: 20538 - DNA, 120 bp, synthetic construct
  misc_feature 1..120: note = Artificially Synthesized Probe
  source 1..120: mol_type = other DNA
ctgcagggagaaaggtggcctttctatggagacatcaagcaaaatgtgtgatttgctgtttctcatgcattgatcaaggtattcagtaatcagatttccccaggatatcaaatagttcat

SEQ ID NO: 20539 - DNA, 120 bp, synthetic construct
  misc_feature 1..120: note = Artificially Synthesized Probe
  source 1..120: mol_type = other DNA
cactcggcattttcaagcgtccttctgtgatgaaaagagcatccagtcagtatttactttacattttaatgctttcttcttcaaactcttccttgagtatttgccccacgctgtctcatt

SEQ ID NO: 20540 - DNA, 120 bp, synthetic construct
  misc_feature 1..120: note = Artificially Synthesized Probe
  source 1..120: mol_type = other DNA
gttatcttcacccatttgaggggtgagtgatgaggattgaggggagaatgttaaaggcaaatcatcacattcttgggcttcagaacatcttctaacaaagattaatgttctgaagccttt

SEQ ID NO: 20541 - DNA, 120 bp, synthetic construct
  misc_feature 1..120: note = Artificially Synthesized Probe
  source 1..120: mol_type = other DNA
ctggaaggcaattaaggcgcccatttcagaagagttacagccgtgaaaattactcagcagtgcagttggctgagaagaggaaaaaaggtcaggttgtaaagctttttatttttccatttt

SEQ ID NO: 20542 - DNA, 120 bp, synthetic construct
  misc_feature 1..120: note = Artificially Synthesized Probe
  source 1..120: mol_type = other DNA
agtagcaaacacattgcggtcttctggccttataaagttatttttcacacttactaaaatagagggcataatggtagctcctgagagtcactttaggcccctgtagtgtatgctttgtta

SEQ ID NO: 20543 - DNA, 120 bp, synthetic construct
  misc_feature 1..120: note = Artificially Synthesized Probe
  source 1..120: mol_type = other DNA
ggacacagtctcggggcccctggagcaggtgacagctcaccgggcaggtccctgggcctctgcacacagtcccggggcccctggagcaggtgacacctcgctgggcaggtccctgggcct

SEQ ID NO: 20544 - DNA, 120 bp, synthetic construct
  misc_feature 1..120: note = Artificially Synthesized Probe
  source 1..120: mol_type = other DNA
aaaacagtttttaaaaattatttttccatatctgggagatttgaccttttcgttttgcttaaacttttggttgacacatcacgagtgcacaggacagcagctgacaactgccccgcgtgc

SEQ ID NO: 20545 - DNA, 120 bp, synthetic construct
  misc_feature 1..120: note = Artificially Synthesized Probe
  source 1..120: mol_type = other DNA
gctcagtctcacagtctcacgtcccaggtctttacagagaaccaacacacatcctcatacttgaagctcgatgataagtactcagcgaaaagtatcaggccagtgccgtgactcacatct

SEQ ID NO: 20546 - DNA, 120 bp, synthetic construct
  misc_feature 1..120: note = Artificially Synthesized Probe
  source 1..120: mol_type = other DNA
tgggtgcaggagagactcttgttccagagcaggatcccctagggtcaaagcacaaagagaaataaacttcagcacctgaaaattctgtaataagagtctttgaaaatggaaaaaaaatct

SEQ ID NO: 20547 - DNA, 120 bp, synthetic construct
  misc_feature 1..120: note = Artificially Synthesized Probe
  source 1..120: mol_type = other DNA
aggcaacttccttcttctttctgaaatgtggtatgttcttgcctaatgtgtccctgaattccacctcttttatgaacaatatgaatatgcataaaggagaatttgggggaaccgtgccat

SEQ ID NO: 20548 - DNA, 120 bp, synthetic construct
  misc_feature 1..120: note = Artificially Synthesized Probe
  source 1..120: mol_type = other DNA
tctcagtgataggatgcatatacacaggtggtgtgagtgacagagctaattttttttctggtacctaaagatcagcaggatcaaaatttcataaaggaagagctgggagcttgagattga

SEQ ID NO: 20549 - DNA, 120 bp, synthetic construct
  misc_feature 1..120: note = Artificially Synthesized Probe
  source 1..120: mol_type = other DNA
actgaccacagaatacaaaatgtgagttgagttgcctgggcagttgcagtgggtttagaaggaaataagaggaaaataaaggaaaattccaggtgtcttatatctcaagcttttgtggga

SEQ ID NO: 20550 - DNA, 120 bp, synthetic construct
  misc_feature 1..120: note = Artificially Synthesized Probe
  source 1..120: mol_type = other DNA
cggaacttcacggtgatacccagaaatgggatcttaacctcttacacattccaggtgctaaaacaaataacacaggagtgctttcattggaaactactggtatagtggaattattttatc

SEQ ID NO: 20551 - DNA, 120 bp, synthetic construct
  misc_feature 1..120: note = Artificially Synthesized Probe
  source 1..120: mol_type = other DNA
aaccagcctctcttctccaggattaggacagattaaggaggaaaagagagacctagatcccagatctttggtgttgtgatataactgtaacattacctgtggcatagaataaagaattaa

SEQ ID NO: 20552 - DNA, 120 bp, synthetic construct
  misc_feature 1..120: note = Artificially Synthesized Probe
  source 1..120: mol_type = other DNA
aaatcaatgccttgatcctaaggatgcattagagtgagggaagaccaggagaggcatcaactggggagactattggaaagatttgccttttgatagctctcaaaaaaatacactatacta

SEQ ID NO: 20553 - DNA, 120 bp, synthetic construct
  misc_feature 1..120: note = Artificially Synthesized Probe
  source 1..120: mol_type = other DNA
tagatcatttcatattctcagaagtccatgcccgttctgtgcagtcatttttctagatgtcgggatacagagatgcgttagatcatttcatattctcagaagtccgtgccccttctgtaa

SEQ ID NO: 20554 - DNA, 120 bp, synthetic construct
  misc_feature 1..120: note = Artificially Synthesized Probe
  source 1..120: mol_type = other DNA
aagtccatgctccttctgtaaagacagacacctgaagaaggcacttcatttagggatgaatttattagatcatcaggaaacatgatggtttgttggttggagaactgacttactttgagt

SEQ ID NO: 20555 - DNA, 120 bp, synthetic construct
  misc_feature 1..120: note = Artificially Synthesized Probe
  source 1..120: mol_type = other DNA
tttctccgcttcataattttataatttcggcatggacagaagaagcgtctgcatgaggaggctgtgggtccgggagaccagaggccgaggaaccaaatgctcccatcagtctcagttgct

SEQ ID NO: 20556 - DNA, 120 bp, synthetic construct
  misc_feature 1..120: note = Artificially Synthesized Probe
  source 1..120: mol_type = other DNA
taatttgagtttgattttcagatattttgctgcaattaagagcctgaaagtgtcacctattaataccttgcttatgttctgaagctgaggtcttaaagtaacatgcagccctgggctggg

SEQ ID NO: 20557 - DNA, 120 bp, synthetic construct
  misc_feature 1..120: note = Artificially Synthesized Probe
  source 1..120: mol_type = other DNA
gttaaatgtcatacgcatttgtatgtacatgaagttatttctaatatatatggtgagtgatttgccccatcccgttggtgataagggagtttttgctcagttacttcacgtgagatctgg

SEQ ID NO: 20558 - DNA, 120 bp, synthetic construct
  misc_feature 1..120: note = Artificially Synthesized Probe
  source 1..120: mol_type = other DNA
acagtccaagccgtaagtgtctatagctttcacacggtgttcagccttcaggctcacagaatgcaggagttaaggaggcttagtagcttcccctagatttcagagaatccatgaaaaagc

SEQ ID NO: 20559 - DNA, 120 bp, synthetic construct
  misc_feature 1..120: note = Artificially Synthesized Probe
  source 1..120: mol_type = other DNA
actgttgcgaatgcgcaattgtattttggaatgtgagaaaggtgtgggatttgggggaacgggtagaataataaggtgtagatgcttttcccccttaaatctcatgttaaaatgtgattc

SEQ ID NO: 20560 - DNA, 120 bp, synthetic construct
  misc_feature 1..120: note = Artificially Synthesized Probe
  source 1..120: mol_type = other DNA
aaaggtgattgactcaacattcagacaagaaggatggtgaacttgatgtagtcctcccttgggtcctggggactcagtaattccattctgcaggtgcctggacaatgctctgatccaccc

SEQ ID NO: 20561 - DNA, 120 bp, synthetic construct
  misc_feature 1..120: note = Artificially Synthesized Probe
  source 1..120: mol_type = other DNA
tatgagaatccaattcattctgatttggcagttttgtaaagggcaagtctgtgccattttcctcatcattcaatactgatgcatcacttacaccctattcctgttcctaaacccagtgac

SEQ ID NO: 20562 - DNA, 120 bp, synthetic construct
  misc_feature 1..120: note = Artificially Synthesized Probe
  source 1..120: mol_type = other DNA
gcgccatgagctacttggcctctgagttcttccttctaactagctatagatcaatttggtgctggttacttagcttttagaataagacaaacttggctaaatcagtattgaccagaattc

SEQ ID NO: 20563 - DNA, 120 bp, synthetic construct
  misc_feature 1..120: note = Artificially Synthesized Probe
  source 1..120: mol_type = other DNA
cacactgcagtccaaggtttacttaactgttcccatagagccattcccgttggactgttagtgagcattcatgattgaaagactagtttgtttctctcatatctgaaaatggaatgcatt

SEQ ID NO: 20564 - DNA, 120 bp, synthetic construct
  misc_feature 1..120: note = Artificially Synthesized Probe
  source 1..120: mol_type = other DNA
aaatacaggcccatcacaggagcttgcaacaacaggtattgtttgtggattttcttaatcttctcgtgaaagttggatctgaacatgactagatgccatcatgaaggaacttctaccacc

SEQ ID NO: 20565 - DNA, 120 bp, synthetic construct
  misc_feature 1..120: note = Artificially Synthesized Probe
  source 1..120: mol_type = other DNA
gatgatggttaagaacaacagctttgcaactggacagccctggatttgaaacctggaatcaccacctatcagagggcagtttgtttcaattctttgagctgtaagagcttgtttgttaag

SEQ ID NO: 20566 - DNA, 120 bp, synthetic construct
  misc_feature 1..120: note = Artificially Synthesized Probe
  source 1..120: mol_type = other DNA
gtggcgttggagatgtgggggcggggctgctctctgaatgggtttcatacttctgattttattaaagaaatataagacattgaattctgcattcctaagcacaattatcttaagaatcag

SEQ ID NO: 20567 - DNA, 120 bp, synthetic construct
  misc_feature 1..120: note = Artificially Synthesized Probe
  source 1..120: mol_type = other DNA
tcacagcatctggatctaaaatctcctacgttcaaggcttcacacattgtattccaccaaaaataaaacatctgctcagaaatcggtcacttgttgttataaaagtgagccacagagggc

SEQ ID NO: 20568 - DNA, 120 bp, synthetic construct
  misc_feature 1..120: note = Artificially Synthesized Probe
  source 1..120: mol_type = other DNA
atccatttctactagttttcttgctttatggtgtgatgtctgcatgtcacaagtggatggcagggtttctaaggcttgtttttcctttgttggtattttcctaattgcctaggacgtatc

SEQ ID NO: 20569 - DNA, 120 bp, synthetic construct
  misc_feature 1..120: note = Artificially Synthesized Probe
  source 1..120: mol_type = other DNA
gagtttgttttgctttacactttgtcataaaggaaattatcagttctctgcataagcccctattttttaacaagggggtgtgtgtgcatgcacggcaagctggtccctttaaacatttta

SEQ ID NO: 20570 - DNA, 120 bp, synthetic construct
  misc_feature 1..120: note = Artificially Synthesized Probe
  source 1..120: mol_type = other DNA
agccagaaaacaaaggggccacgagccactgtttgctctgtggtctaaatcaatggactatcttaccacatgcaatgttagacagtgtattacatatgattattcataagcagaaataca

SEQ ID NO: 20571 - DNA, 120 bp, synthetic construct
  misc_feature 1..120: note = Artificially Synthesized Probe
  source 1..120: mol_type = other DNA
caaacaaaaaattgtgttatttcttgagttttgatctgatgaactactgcagtaaaccactgtgtctcacagtgttggaagggaatggagccagctccttcttgttgtatggtgtaggca

SEQ ID NO: 20572 - DNA, 120 bp, synthetic construct
  misc_feature 1..120: note = Artificially Synthesized Probe
  source 1..120: mol_type = other DNA
ggaacggggcaggctcgttcttgtttgtatgatccaatcactgctgcaggaggcaccgtgttggaagggaatggagctggctccttcttgtttgtatgatccagtcattgctgcaggagg

SEQ ID NO: 20573 - DNA, 120 bp, synthetic construct
  misc_feature 1..120: note = Artificially Synthesized Probe
  source 1..120: mol_type = other DNA
aagggaatgggcaggctccttcctgtttgtatgatccagtcattgctgcaggaggcactgtgttggaagggaatgagcaggctccttcttgtttgtatgatccagtcattgctgcaggag

SEQ ID NO: 20574 - DNA, 120 bp, synthetic construct
  misc_feature 1..120: note = Artificially Synthesized Probe
  source 1..120: mol_type = other DNA
tgtgatccctttcattttggcccttcttgaggggagggtggcatttcctgtggtttaacttcacattttcctggtgactaattgtcttgagcacttttaaaatacattcattggccattt

SEQ ID NO: 20575 - DNA, 120 bp, synthetic construct
  misc_feature 1..120: note = Artificially Synthesized Probe
  source 1..120: mol_type = other DNA
aataaaattctaagtcttgcgatcatctgaattgacccctcctgttggcaagggtgttccaaagctaacctgaaaaactaatctgaccgtgatggggagagtgaggtcagacgtgcctca

SEQ ID NO: 20576 - DNA, 120 bp, synthetic construct
  misc_feature 1..120: note = Artificially Synthesized Probe
  source 1..120: mol_type = other DNA
agtcacttccgtgactctcttcatcctcagagccatccccttcctcatctgtaatgtgggaagaacacccacctcgcagggttgtttctggttgaaaggcagcacttgtcaggctccttg

SEQ ID NO: 20577 - DNA, 120 bp, synthetic construct
  misc_feature 1..120: note = Artificially Synthesized Probe
  source 1..120: mol_type = other DNA
ctttgtttttcatttgcattttgacctaattcatgaaattatccagcagggagagacctgatggagttttgctggaatgaagctccttgacacaatcgtctcctttttagaagtgcctgt

SEQ ID NO: 20578 - DNA, 120 bp, synthetic construct
  misc_feature 1..120: note = Artificially Synthesized Probe
  source 1..120: mol_type = other DNA
agcaggagcacagacctcagtctccctcataaaactctcctccagaaatgtttctctttgttcattttgtcagctttatgagcctttttccaatgctgccattaattcagatctaagaaa

SEQ ID NO: 20579 - DNA, 120 bp, synthetic construct
  misc_feature 1..120: note = Artificially Synthesized Probe
  source 1..120: mol_type = other DNA
tacctcaaggacaaaacggatctttccttcacaaatgttgcccaggttacaaacagttcttagtagaaccttagtcctttcattcctgtgcagaacatctaaatcggtcacatttaatac

SEQ ID NO: 20580 - DNA, 120 bp, synthetic construct
  misc_feature 1..120: note = Artificially Synthesized Probe
  source 1..120: mol_type = other DNA
tggtaattattatgcatagagataaatatttattggaattagtttattgatgagatgggtggagttccagttagttccttcatcagttggctgaacatcacctgtgggccaaggggccat

SEQ ID NO: 20581 - DNA, 120 bp, synthetic construct
  misc_feature 1..120: note = Artificially Synthesized Probe
  source 1..120: mol_type = other DNA
tttattttaattcaaattcatttattaatggttcctttgacaacccgctcacttctgaaatcagaaaaccagcaacttcctcagttcccacaagttcgcctggacaatcacacgggcagg

SEQ ID NO: 20582 - DNA, 120 bp, synthetic construct
  misc_feature 1..120: note = Artificially Synthesized Probe
  source 1..120: mol_type = other DNA
gtaatttaactactcatttcaatgaataagccagcctgtttgctcttgtgccatgttcagtgatgaaattatctagaaatacatcagtggatgttctgtttagcccaaagagcgcaggtg

SEQ ID NO: 20583 - DNA, 120 bp, synthetic construct
  misc_feature 1..120: note = Artificially Synthesized Probe
  source 1..120: mol_type = other DNA
tgtaatcgcatcagcaggctccaaggattagcgaatggatgttgtgcgagaggcatttttctgcctccacagatgacccactgaccctcaaagattcatatccagtccacatgcctaaca

SEQ ID NO: 20584 - DNA, 120 bp, synthetic construct
  misc_feature 1..120: note = Artificially Synthesized Probe
  source 1..120: mol_type = other DNA
tttaaaacgtcaaacagaatggtataaaacaaaatgtgaaagtctgtttctttgtcctattcccaggggtagcagttgtgaatatctggtgcatctcactggaaattccctgggtacacg

SEQ ID NO: 20585 - DNA, 120 bp, synthetic construct
  misc_feature 1..120: note = Artificially Synthesized Probe
  source 1..120: mol_type = other DNA
tactgtgggtacacatatatagcatgtatgatagtgtgggcagatgtgtacatagcatgtatgatactgtgggtacacatatatatagcatgcatgatagtgtgtgggcagatgtgtaca

SEQ ID NO: 20586 - DNA, 120 bp, synthetic construct
  misc_feature 1..120: note = Artificially Synthesized Probe
  source 1..120: mol_type = other DNA
tagtgtgtgggcacatatgtatatggcatataagatactgtgtgggcacatgtgtatataggatataagatagtgtgtgggcacgtgtgtatatagcatataagacagtgtgtggacaca

SEQ ID NO: 20587 - DNA, 120 bp, synthetic construct
  misc_feature 1..120: note = Artificially Synthesized Probe
  source 1..120: mol_type = other DNA
acctgatagatccaggggtaagattgctaagtcacggtggaggtgcctgtggaattttgataaatattgcagaattactctccattaatattgcacaaatgttcactcttaccagaaaag

SEQ ID NO: 20588 - DNA, 120 bp, synthetic construct
  misc_feature 1..120: note = Artificially Synthesized Probe
  source 1..120: mol_type = other DNA
ctatcaggtcttgggttccaggcttgccttgtaacttattatctgcgtgtatataggtttgttgtccataaaaagagtatatttcccaggctggccttgtaacttattagctgcatgtat

SEQ ID NO: 20589 - DNA, 120 bp, synthetic construct
  misc_feature 1..120: note = Artificially Synthesized Probe
  source 1..120: mol_type = other DNA
cgcccccagaggctccttcctccacccacaatactcagttatgtggatggctgcgttcgtataaagataaatatattaatgtgggttcaaacgttctttggcctaaatgtttattatttt

SEQ ID NO: 20590 - DNA, 120 bp, synthetic construct
  misc_feature 1..120: note = Artificially Synthesized Probe
  source 1..120: mol_type = other DNA
ggacacaaactcagggcacagacaagaggcaaaccctcaggggacgacttgaaaatatggaatcacaaggaattgttatcttcattctataaagagctcttataaagcaatgagaaaaaa

SEQ ID NO: 20591 - DNA, 120 bp, synthetic construct
  misc_feature 1..120: note = Artificially Synthesized Probe
  source 1..120: mol_type = other DNA
agctccataaacccaatagatgacacatcataaatcagtgcttttaaatgtttgatgtcctttacactcaaagcatccagtttggtctctgagtatttacggtggagtgagagggtggaa

SEQ ID NO: 20592 - DNA, 120 bp, synthetic construct
  misc_feature 1..120: note = Artificially Synthesized Probe
  source 1..120: mol_type = other DNA
tttatggctgagtagtattccatcgtatataaaaaatcacagtttctttatccactcattgattgatgggcatttgggttgcttccacagtttggcaattgtgaattgtgcggctataaa

SEQ ID NO: 20593 - DNA, 120 bp, synthetic construct
  misc_feature 1..120: note = Artificially Synthesized Probe
  source 1..120: mol_type = other DNA
tctctattctattccattggtctatgtgcttatttttgtaccagtactatgctgttttggtgactatggccttatagtatagtttgaaatcaggtaatgtgatgcctccagatttgttct

SEQ ID NO: 20594 - DNA, 120 bp, synthetic construct
  misc_feature 1..120: note = Artificially Synthesized Probe
  source 1..120: mol_type = other DNA
tggtatgaaacccacctgatcatggtggattatctttttgatatgcattggatttggttagctagtattttgttaaggattttagcatctatgttcatcagggttattggtccgtagttt

SEQ ID NO: 20595 - DNA, 120 bp, synthetic construct
  misc_feature 1..120: note = Artificially Synthesized Probe
  source 1..120: mol_type = other DNA
ccgagtagctgggattataggcatccaccaccatgcccagctaatcttttgtatttttagtagagattgggtttcaccatgttggccagactggtcttgaattcctggtctcaggtgatc

SEQ ID NO: 20596 - DNA, 120 bp, synthetic construct
  misc_feature 1..120: note = Artificially Synthesized Probe
  source 1..120: mol_type = other DNA
tgctatttgttgcctgtaccccttgggtttttgtgattttgctggtttttttaattgtatttttgttgtataggtcctgtgagatttatgctttaaagaggttgtgttttgatgtgtttc

SEQ ID NO: 20597 - DNA, 120 bp, synthetic construct
  misc_feature 1..120: note = Artificially Synthesized Probe
  source 1..120: mol_type = other DNA
ctccttggtttggatccattgccagtgagctagtgtgattttagggggtgttaaagagccttattttgttatattaccagagttggttttctggttccttctcatttgggtagtctctgt

SEQ ID NO: 20598 - DNA, 120 bp, synthetic construct
  misc_feature 1..120: note = Artificially Synthesized Probe
  source 1..120: mol_type = other DNA
ttagatctttgctgcaaacaggtttcaaaggcgaaaaaggtggacaaggagtgagccttggtccttcactctatatgattgcttggcttttcattttgtttacggtgccattattcataa

SEQ ID NO: 20599 - DNA, 120 bp, synthetic construct
  misc_feature 1..120: note = Artificially Synthesized Probe
  source 1..120: mol_type = other DNA
tgataacctctggggtggcagatctttggttatgggctcagttctgggtgcagttagtctattcgagcccataagtctttcctgttctttattttctattaccttcctattacacttttt

SEQ ID NO: 20600 - DNA, 120 bp, synthetic construct
  misc_feature 1..120: note = Artificially Synthesized Probe
  source 1..120: mol_type = other DNA
atatgagtggtcacggtgtgccctttccatgatatgaatgctcacttggctacacctaaagaagtcatgcacaagcatattctcttgaatgttgttaacaaaaacaagactatgctgagt

SEQ ID NO: 20601 - DNA, 120 bp, synthetic construct
  misc_feature 1..120: note = Artificially Synthesized Probe
  source 1..120: mol_type = other DNA
caaatgtttttctacagccccatcaatacagaactgtcagcatgaagcactttcatattttataaggccaggtctacttatgtgttgatggcttctaggctcagttttggttcaggaatc

SEQ ID NO: 20602 - DNA, 120 bp, synthetic construct
  misc_feature 1..120: note = Artificially Synthesized Probe
  source 1..120: mol_type = other DNA
tttattattttatttagaagggatattgatctgtatgccctgtccttgtcctgttttcatcagaggccaatacaaaagtttcgctgactctgtagagtgcactggggcccttttcatctt

SEQ ID NO: 20603 - DNA, 120 bp, synthetic construct
  misc_feature 1..120: note = Artificially Synthesized Probe
  source 1..120: mol_type = other DNA
atttgtaattttattattatttgtgctcttcaatttaattcctctatttcctcccattcttggggcctctgggcctgtatattctgaagggcgtgcactgaagttccggctgtcacggtt

SEQ ID NO: 20604 - DNA, 120 bp, synthetic construct
  misc_feature 1..120: note = Artificially Synthesized Probe
  source 1..120: mol_type = other DNA
tcactggtaataataatgtcctattacgagaagaccgtgatcttcaggaagagtctctttcggaatctgtccaaccccggtgatcttgtgattctggatgagcgatttaacctcctaaat

SEQ ID NO: 20605 - DNA, 120 bp, synthetic construct
  misc_feature 1..120: note = Artificially Synthesized Probe
  source 1..120: mol_type = other DNA
gccaacccgcggcagcagatgaacgggttgacctcgttcctggacgcgtccaccgtgtatggcagctccccggccctagagaggcagctgcggaactggaccagtgccgaagggctgctc

SEQ ID NO: 20606 - DNA, 120 bp, synthetic construct
  misc_feature 1..120: note = Artificially Synthesized Probe
  source 1..120: mol_type = other DNA
ttcattttatgactttcttaagtatcacatgagagggtcttgaatggagagtcaagttggccttttattaattgtgtgatggagaaaagcacttatgcacctggaaatgcggtccctgac

SEQ ID NO: 20607 - DNA, 120 bp, synthetic construct
  misc_feature 1..120: note = Artificially Synthesized Probe
  source 1..120: mol_type = other DNA
ctgactgcgacctccacgggcagatgttcatccatttaattcttgtttctcaggacccacaatttgccaggttgcttcataaatatatgtagagtttgtgaatgaagtagaatctcaaaa

SEQ ID NO: 20608 - DNA, 120 bp, synthetic construct
  misc_feature 1..120: note = Artificially Synthesized Probe
  source 1..120: mol_type = other DNA
taggtcctctttggtgctttttgcaaaaacctttgatacattaaaataataagttgtgtttaacgtgtcgatagagccactgctgcgacttctagccgtatttgaaagatccacggtggc

SEQ ID NO: 20609 - DNA, 120 bp, synthetic construct
  misc_feature 1..120: note = Artificially Synthesized Probe
  source 1..120: mol_type = other DNA
gctcttcaatcccagaaaaccctagctgctttaggtgtgtcataagacaagaactcacaatcagttgctcactttggtgataacttttgtgttctacagacaagaaaagaatgagaaagg

SEQ ID NO: 20610 - DNA, 120 bp, synthetic construct
  misc_feature 1..120: note = Artificially Synthesized Probe
  source 1..120: mol_type = other DNA
caagcatatgggagcctcttattggactaatagggcatgtttgagaaaatgctgagtgatgttctgcgtagagcagggtaggtgactttgaaagcagtcgagagtcagaaagttcagagg

SEQ ID NO: 20611 - DNA, 120 bp, synthetic construct
  misc_feature 1..120: note = Artificially Synthesized Probe
  source 1..120: mol_type = other DNA
aaggggaagaggtgtcttccttaaaatagcttgcacttgaatttgaaattgtctcagtccctgggctaaaaagagagaggccttttcctttctattgtagtgagaagaaaccaaagaatg

SEQ ID NO: 20612 - DNA, 120 bp, synthetic construct
  misc_feature 1..120: note = Artificially Synthesized Probe
  source 1..120: mol_type = other DNA
aatttccaggccctgtgattgcaactgtaattttccatcgacagagctctctgccatacaacatgctttgatttaatcctcacaaaggctctgggaattaggtattattgttgctttgta

SEQ ID NO: 20613 - DNA, 120 bp, synthetic construct
  misc_feature 1..120: note = Artificially Synthesized Probe
  source 1..120: mol_type = other DNA
cgatagtttgctcagaatgatggtttccagctgcatccatgtccctgaaaaggacatgaactcatcgtttttttatggctgcatagtattccttggtgtatatgtgccacattttcttaa

SEQ ID NO: 20614 - DNA, 120 bp, synthetic construct
  misc_feature 1..120: note = Artificially Synthesized Probe
  source 1..120: mol_type = other DNA
cacttctttcttatgactcatcgcagccgtgcagaccttccgtatgggcacacttgctgatcctacacaaggtttttaatatctgtggggaaaataaatgtgtttaaagcattttaaaag

SEQ ID NO: 20615 - DNA, 120 bp, synthetic construct
  misc_feature 1..120: note = Artificially Synthesized Probe
  source 1..120: mol_type = other DNA
gttagaattcagcaaacgcttcttttttttgtaatctttctgttgctgagaaataaaacaaaaagctttaaaaactggtgggctccttctccaggcccctttctttctgagggtccatcc

SEQ ID NO: 20616 - DNA, 120 bp, synthetic construct
  misc_feature 1..120: note = Artificially Synthesized Probe
  source 1..120: mol_type = other DNA
gagagactgatttagaggaaaacaatcacaaatctgaggccttctaagcaacggctcttaaagggctccagttcattcagctaaagtggccacttccagcttttcttagagatagaaatg

SEQ ID NO: 20617 - DNA, 120 bp, synthetic construct
  misc_feature 1..120: note = Artificially Synthesized Probe
  source 1..120: mol_type = other DNA
tcacttttcaccaactgaaatatggccaaaggcaaaaacccatgttcccactggcctgtgggtccccccatagatcgtaagcccaggaggaagggctgtgtttcagggctgtgatcacta

SEQ ID NO: 20618 - DNA, 120 bp, synthetic construct
  misc_feature 1..120: note = Artificially Synthesized Probe
  source 1..120: mol_type = other DNA
ttaattaacctgtggggttcccagttcctcccctgagcgcccaggacagtagagtcaacctcacgtttgagcgttggggacgcaaacacgagagtgcttggtgtgagcacacaggaggag

SEQ ID NO: 20619 - DNA, 120 bp, synthetic construct
  misc_feature 1..120: note = Artificially Synthesized Probe
  source 1..120: mol_type = other DNA
atgagcttcagcctccatgtctttacctcctgcacaggccttgcatattttccctctagagttggaaaaagatgcaaatgtgtttcctcttagagcaataagaaaggaaattacccttct

SEQ ID NO: 20620 - DNA, 120 bp, synthetic construct
  misc_feature 1..120: note = Artificially Synthesized Probe
  source 1..120: mol_type = other DNA
gcacaagagtcagacacacacttgttcctcctgagggtgaaccagggagccacctgctaagaaatggactcaatggcacctgacagcagttttctaaaagctcaggattttttttgtttt

SEQ ID NO: 20621 - DNA, 120 bp, synthetic construct
  misc_feature 1..120: note = Artificially Synthesized Probe
  source 1..120: mol_type = other DNA
tcagttgccctgtagaggcaagaactaagtgcaggctgggcaataacaggaatgcacttagatgtcacggactcagcattcttgctgtctccagctcctttatgaacaaacctgcaaaaa

SEQ ID NO: 20622 - DNA, 120 bp, synthetic construct
  misc_feature 1..120: note = Artificially Synthesized Probe
  source 1..120: mol_type = other DNA
ttaacctagaacagtgtttttataacaatgaagcaactacgaagcacgtagcacttagaatgggagctagcactgatttttcctagatccaaccacacgagcaagcaggcacctaactaa

SEQ ID NO: 20623 - DNA, 120 bp, synthetic construct
  misc_feature 1..120: note = Artificially Synthesized Probe
  source 1..120: mol_type = other DNA
tcatcctatgtatttatgaccacatatctccccaatgcaaaaatgggatcaattaacttacgtatagtggggcctctttttcatgttctaagaggaattcatccctgtgatgggaagcag

SEQ ID NO: 20624 - DNA, 120 bp, synthetic construct
  misc_feature 1..120: note = Artificially Synthesized Probe
  source 1..120: mol_type = other DNA
tcctcaaggtgaagttcggtctcctctcacaccacgttacagcacgtgcatctcatcaaacaaagcttatcttccccaggagctgattttaacttttcactgtttagaaaatagtgtcaa

SEQ ID NO: 20625 - DNA, 120 bp, synthetic construct
  misc_feature 1..120: note = Artificially Synthesized Probe
  source 1..120: mol_type = other DNA
catctgaatgtttccgatataagttaacaatgcaatgtcattgaaaatttcttcgccaaaaggtgcttctgaaactgttatcttcccaggagcaatctggggatagaaagcaagggctct

SEQ ID NO: 20626 - DNA, 120 bp, synthetic construct
  misc_feature 1..120: note = Artificially Synthesized Probe
  source 1..120: mol_type = other DNA
atgtataattcagcacaataacaaaatttccatttcaattttgaaagtccaaaatgtttctccttgaagggttgcagtggtcaactgcttccagaccctcagtcataaagggagaggctg

SEQ ID NO: 20627 - DNA, 120 bp, synthetic construct
  misc_feature 1..120: note = Artificially Synthesized Probe
  source 1..120: mol_type = other DNA
aaatacccagacgtttcacgtgtccattttagcttcattttaagtatgaatgaccccaaagtgctactcacaggcatcttcaaggtgcaaataaaagatgggtgagaccttagagtggat

SEQ ID NO: 20628 - DNA, 120 bp, synthetic construct
  misc_feature 1..120: note = Artificially Synthesized Probe
  source 1..120: mol_type = other DNA
gacatttccgtagccatttaatctgtctcccaaattgctgagcctctgtgtgcctccacggtttcaaatgtgaaatgaggacaggaataaggcattgatttaaattagttataaatgcac

SEQ ID NO: 20629 - DNA, 120 bp, synthetic construct
  misc_feature 1..120: note = Artificially Synthesized Probe
  source 1..120: mol_type = other DNA
atacataaatgctttgtgcatattatggaaaatacagttcgcaaccagtactaatttacttagagaaatggaaacatctgtgcactcactgcatgtggagactggacaccacagccatct

SEQ ID NO: 20630 - DNA, 120 bp, synthetic construct
  misc_feature 1..120: note = Artificially Synthesized Probe
  source 1..120: mol_type = other DNA
ctttagccaagaaagaccttctaggtttaacagccttgacatggttacctgtacatgaaacactttaatagctgctgctagatagagacaattaacagccgatagtcaatagctccaatc

SEQ ID NO: 20631 - DNA, 120 bp, synthetic construct
  misc_feature 1..120: note = Artificially Synthesized Probe
  source 1..120: mol_type = other DNA
acgctacagcttcttttctaaaactggccagaaaaggaacattatttgaacaaaatgtacagcaggttatctggaaacatacgcctaggggatgagatactaggttgtaggattcttgtg

SEQ ID NO: 20632 - DNA, 120 bp, synthetic construct
  misc_feature 1..120: note = Artificially Synthesized Probe
  source 1..120: mol_type = other DNA
ctgttcccctctctctctgtccgtccatttgcgagtttttgtaaaatgaagaaaagtgtgttcaagttaggcaactgtcaatcaccatcttgattgggaagggcggagatgaataagaca

SEQ ID NO: 20633 - DNA, 120 bp, synthetic construct
  misc_feature 1..120: note = Artificially Synthesized Probe
  source 1..120: mol_type = other DNA
tatagaaaaataattatttaccagactcaagttacagacagacttcctttgagctactgtcataggggagagaggtctccagaaagaaccaagtgcaaggctcaaatgcagcaaaggtag

SEQ ID NO: 20634 - DNA, 120 bp, synthetic construct
  misc_feature 1..120: note = Artificially Synthesized Probe
  source 1..120: mol_type = other DNA
ctcacctatgagtgagaacatgcggtgtttggttttttgtccttgggatagtttgctgagaatgatggtttccagtttcatccatgtccctacaaaggacatgaactcatcatttatggc

SEQ ID NO: 20635 - DNA, 120 bp, synthetic construct
  misc_feature 1..120: note = Artificially Synthesized Probe
  source 1..120: mol_type = other DNA
agccagttttcccagcaccatttattaaatagggaatcatttccccattgttgtttttgtcaggtttgtcaaagatcagatagttgtagatatgtggcattattactgagggctctgttc

SEQ ID NO: 20636 - DNA, 120 bp, synthetic construct
  misc_feature 1..120: note = Artificially Synthesized Probe
  source 1..120: mol_type = other DNA
aattttgtcaaaggccttttctgcatctattgagataatcatgtggtttttgtctttgattctgtttatatgctggattacatttatcgatttgcgtatgttgaaccagccttgcatccc

SEQ ID NO: 20637 - DNA, 120 bp, synthetic construct
  misc_feature 1..120: note = Artificially Synthesized Probe
  source 1..120: mol_type = other DNA
ctcttgtttcagggacaccacatcctcctgtttcaggcacaggataccctcttgtttgagggacaccccaccctcttgtttctgggaaaccacaacctcttgtttcaggcacaggatacc

SEQ ID NO: 20638 - DNA, 120 bp, synthetic construct
  misc_feature 1..120: note = Artificially Synthesized Probe
  source 1..120: mol_type = other DNA
attagaaacagcagctcttgcattcagatttttaaataaaatgtttaaatcaatggttcagatgtgaattgcaaaggtagccaggtagcgaagctgccacattcacagagaggagctcag

SEQ ID NO: 20639 - DNA, 120 bp, synthetic construct
  misc_feature 1..120: note = Artificially Synthesized Probe
  source 1..120: mol_type = other DNA
agctctccctacataagtttagatgtagatacacatatagattcaggcgctgatataattatagagggagctctgcttttgcagtgttttgttcctaacgttgcggttaaaggaactgta

SEQ ID NO: 20640 - DNA, 120 bp, synthetic construct
  misc_feature 1..120: note = Artificially Synthesized Probe
  source 1..120: mol_type = other DNA
tgggagacccggttcagcccacgacagccaattggtccatagtgccatcttttaatcttcagaataaaactttagaagaagtgtatacaacaggagcatgagttgcataaactaatttcc

SEQ ID NO: 20641 - DNA, 120 bp, synthetic construct
  misc_feature 1..120: note = Artificially Synthesized Probe
  source 1..120: mol_type = other DNA
ttatgattatactgctgcccctgcaaaaatgaccatggaaaattaggatgctgggcatgacctttctgcatccctgacgcacaagcctaactgttgttgcacggaggccacacacgtccc

SEQ ID NO: 20642 - DNA, 120 bp, synthetic construct
  misc_feature 1..120: note = Artificially Synthesized Probe
  source 1..120: mol_type = other DNA
tagaggtagttacccatacatagacatagttttacatgtgcttctagctctatgtaccgatatgtgaaagcatctctattctgcagaattggtcatgaaattagagaggctgaggagtcc

SEQ ID NO: 20643 - DNA, 120 bp, synthetic construct
  misc_feature 1..120: note = Artificially Synthesized Probe
  source 1..120: mol_type = other DNA
ggctcttgaaattgaaaatgccaagaaacaaaaatttggagcaaagaataaaggaaagtttctgctgtgcggcatctggccttccccctgcccaggctcgtttcacacttttgggtaaac

SEQ ID NO: 20644 - DNA, 120 bp, synthetic construct
  misc_feature 1..120: note = Artificially Synthesized Probe
  source 1..120: mol_type = other DNA
gtatttaaattcttatttaaaagtcagttttcgtttcatcttggatttctcctcggccacctcgaatgggtatccaaacagaaaagtcggtaataaaactgtggtcaaaggagctctgag

SEQ ID NO: 20645 - DNA, 120 bp, synthetic construct
  misc_feature 1..120: note = Artificially Synthesized Probe
  source 1..120: mol_type = other DNA
acaacgtaatagactctccggatctttcattatgctttaaataatgaaagtggagtgatcatttgtacaccttaggtggtgtcaggtatctgtggacgaacattcagcaatatggaacac

SEQ ID NO: 20646 - DNA, 120 bp, synthetic construct
  misc_feature 1..120: note = Artificially Synthesized Probe
  source 1..120: mol_type = other DNA
cacccgataccacatatctatggattatccaggactttcccactctaaggccatcttccagggtgtttctcatcttcccaataatagaaactcaacattctagcaaacttcatttttcta

SEQ ID NO: 20647 - DNA, 120 bp, synthetic construct
  misc_feature 1..120: note = Artificially Synthesized Probe
  source 1..120: mol_type = other DNA
gctgccctgcttctcctcgcgagaagattatattccacatgccagggctgttgtttcaaataatcattaccagtgaagattgaataatcacctactctctctacaagacactatactgat

SEQ ID NO: 20648 - DNA, 120 bp, synthetic construct
  misc_feature 1..120: note = Artificially Synthesized Probe
  source 1..120: mol_type = other DNA
actctggagttctaaaaatacgctaccaagcaccaatttagtttgcaaaatgccacttagctgaaagatatgaaaaagtggatgttaatgtgccatcacacgcttgagaacacaggcagt

SEQ ID NO: 20649 - DNA, 120 bp, synthetic construct
  misc_feature 1..120: note = Artificially Synthesized Probe
  source 1..120: mol_type = other DNA
gtattgatattcctacctatggtatgcattataaattcaagaaagtttgaatcatttgcattaatttccagcaaatccatgggaaagccgcgaggtccttccctaggatgcagccaggtt

SEQ ID NO: 20650 - DNA, 120 bp, synthetic construct
  misc_feature 1..120: note = Artificially Synthesized Probe
  source 1..120: mol_type = other DNA
ttctctgggcagctcccagcccctccctctgtggccccactttcttcacccacttctgagcaagtataggtgggaaatgtgccttcctccctctcctgaccccaggctgtctactccaca

SEQ ID NO: 20651 - DNA, 120 bp, synthetic construct
  misc_feature 1..120: note = Artificially Synthesized Probe
  source 1..120: mol_type = other DNA
acctcaccaaatcccgacactgtgtgcaacctccccaaatcctgcgcactctgtgcaacctccccaaatccgccccaccctgtgcatcctcccaaaatcccccacactgtgtgcaacctc

SEQ ID NO: 20652 - DNA, 120 bp, synthetic construct
  misc_feature 1..120: note = Artificially Synthesized Probe
  source 1..120: mol_type = other DNA
caacaacaccaaatcctgccactgtgtgcaacctcaccaaattccccccactccgtgcaacctccccaaatacccccaactctgtgcaacctcccaaaatcccccaaactgtgtgcaacc

SEQ ID NO: 20653 - DNA, 120 bp, synthetic construct
  misc_feature 1..120: note = Artificially Synthesized Probe
  source 1..120: mol_type = other DNA
ccctcccactgtgtgcaacccccccaaatccccctactgtgtgcaacctgctcaaatccccaaactgtgtgcaacctccccaaatcaccctcactgtgtgcaacctcctcaagtccccca

SEQ ID NO: 20654 - DNA, 120 bp, synthetic construct
  misc_feature 1..120: note = Artificially Synthesized Probe
  source 1..120: mol_type = other DNA
tccccaaatcacccccactctgcaaactccccaaatctcaccccactgtgggcaaccacactaaatcccgccactgtgtgcaacctcaccaaatttccccgtgtgcaacctacccaaatg

SEQ ID NO: 20655 - DNA, 120 bp, synthetic construct
  misc_feature 1..120: note = Artificially Synthesized Probe
  source 1..120: mol_type = other DNA
gagcaacctcctcaaatcccctcactgtgtgccacctccccaaatccccccactttctgcaacctccgcaaatacccccactgtgtgcaacctcctcaaatccccccactctgtgcaacc

SEQ ID NO: 20656 - DNA, 120 bp, synthetic construct
  misc_feature 1..120: note = Artificially Synthesized Probe
  source 1..120: mol_type = other DNA
aaatctccccactgtgtgcaacccccccagatctcccccactgtgagcaaaagcacaaatcccccactgtgtgcaacattcctcaaatccccgcactgtgtgcaacccaaccaaatctca

SEQ ID NO: 20657 - DNA, 120 bp, synthetic construct
  misc_feature 1..120: note = Artificially Synthesized Probe
  source 1..120: mol_type = other DNA
ccccaaatctccccagtgtgtgcaacttccctaaatccccccaactgtgtttaacctctccaaatccccccactgtgtgcaacctccccgaatccccccactgtgtgcaacctccctgaa

SEQ ID NO: 20658 - DNA, 120 bp, synthetic construct
  misc_feature 1..120: note = Artificially Synthesized Probe
  source 1..120: mol_type = other DNA
actctctgcaacctccccaagtctcccacactctgtgcaacctcctcaaatccccccactgtttgcaacctcccaaaatctccctatgcgcaacctcgcaaaatctcccccactatgtgc

SEQ ID NO: 20659 - DNA, 120 bp, synthetic construct
  misc_feature 1..120: note = Artificially Synthesized Probe
  source 1..120: mol_type = other DNA
tgcaaccaccccaaatcgcccccactgtgtgcaaccgcctcatattccccccactgtgtggacccttctcaaatcccccctaatgtcagcaacttccctaaatcccccaactgtgttcaa

SEQ ID NO: 20660 - DNA, 120 bp, synthetic construct
  misc_feature 1..120: note = Artificially Synthesized Probe
  source 1..120: mol_type = other DNA
tcactgtgtgcaacctccccaaataccccccactgtgtgcaccttcctcaagtcccccactgtgtgcaacccccacaaatccccccactgtgcgcaacctcctctaatcccctcactgtg

SEQ ID NO: 20661 - DNA, 120 bp, synthetic construct
  misc_feature 1..120: note = Artificially Synthesized Probe
  source 1..120: mol_type = other DNA
cccccaaaaatccccccactgtgtgcaacctcctcaaatccccctactgcgagcaacctcctcaaatctctccactgtgtgcaacctccccaaatcccccactgtgtgcaacgtccccaa

SEQ ID NO: 20662 - DNA, 120 bp, synthetic construct
  misc_feature 1..120: note = Artificially Synthesized Probe
  source 1..120: mol_type = other DNA
actcagagcaaccttctcaaatccccccaatatgagcaacctcctcacatccccctcgctgtgcgcaacctcatcaaattttcccactgtgtgcaacttccctaagtcgtccaactgtgt

SEQ ID NO: 20663 - DNA, 120 bp, synthetic construct
  misc_feature 1..120: note = Artificially Synthesized Probe
  source 1..120: mol_type = other DNA
cctccccaaatcccccccactgtgtgcaacctccccaaatctcccccactctgtgcaccttccccaaatctacctaactctgtgtaacctcctcacatccccccactctgtgcaacctcc

SEQ ID NO: 20664 - DNA, 120 bp, synthetic construct
  misc_feature 1..120: note = Artificially Synthesized Probe
  source 1..120: mol_type = other DNA
ccccccactgtgtgcaacctcctcaaatccccccactgtgtgcaaccttcccaaatccccccactgtgtgcaaccttcccaaatccccccattatgtgcaacctccccaaatcccccaat

SEQ ID NO: 20665 - DNA, 120 bp, synthetic construct
  misc_feature 1..120: note = Artificially Synthesized Probe
  source 1..120: mol_type = other DNA
caaatcccaactgtttgcaacctcccaaatcccccccaatgtgagcaacctctcaaatccccctgtgtgcaaccccccaatctcccccactgtgtgcaacctcaaatccccccactgtgt

SEQ ID NO: 20666 - DNA, 120 bp, synthetic construct
  misc_feature 1..120: note = Artificially Synthesized Probe
  source 1..120: mol_type = other DNA
tccgacctgatacaaaggaaagcgggttgaattcagaggcacgggcataccctgtccttgtttctaaagtgttcatgaagaagatcgaattcaaatggtgaaatatccatatatgcaatt

SEQ ID NO: 20667 - DNA, 120 bp, synthetic construct
  misc_feature 1..120: note = Artificially Synthesized Probe
  source 1..120: mol_type = other DNA
ccctaccccagtatagactcaccctaactaattacatctgaaaaaaaccttacttccaggcaaggtaacattcccaagttctgggtggatgtgactttgaaatgattatcaagtagatcc

SEQ ID NO: 20668 - DNA, 120 bp, synthetic construct
  misc_feature 1..120: note = Artificially Synthesized Probe
  source 1..120: mol_type = other DNA
atatagtagctgttaagttctgatggaaaagctgttttgtacttacagttaaatcccacagtatttgtgatgtatttccgggtaacttgctcttccctcctcaaaaggtcccagcctcac

SEQ ID NO: 20669 - DNA, 120 bp, synthetic construct
  misc_feature 1..120: note = Artificially Synthesized Probe
  source 1..120: mol_type = other DNA
tgcttccacttaatctgaggatcggctggaagcacaggagaggaaggagaagctgaagcaaaaccctgacttttaaattctgatttttaagtggaatagttataatcagtgtggaaaaat

SEQ ID NO: 20670 - DNA, 120 bp, synthetic construct
  misc_feature 1..120: note = Artificially Synthesized Probe
  source 1..120: mol_type = other DNA
aactaaaaatacaaattttaatttaaacaaagtcacttacttgcatacaggaggggggcattgccaacatgatcggtctcccttctgaaattcagtgtgagattagatcctgtcctcgga

SEQ ID NO: 20671 - DNA, 120 bp, synthetic construct
  misc_feature 1..120: note = Artificially Synthesized Probe
  source 1..120: mol_type = other DNA
gatctcacccacgaatgacaacagtggcacaggagggctatgaacattttgcttcaggatgttttatttcgctctactgttatgtagagaaagcatggtttgctttttataacttttgtg

SEQ ID NO: 20672 - DNA, 120 bp, synthetic construct
  misc_feature 1..120: note = Artificially Synthesized Probe
  source 1..120: mol_type = other DNA
gccgggcgacctctgacccctggggggcgccctcgggccggctgcagttggagccggtggaacccggcggactctgcccgggactgggcgcgcgccggcgtcgagggcgaggagcggggg

SEQ ID NO: 20673 - DNA, 120 bp, synthetic construct
  misc_feature 1..120: note = Artificially Synthesized Probe
  source 1..120: mol_type = other DNA
gacgagatgatagacttttcttagggaagtggactgtgtctcatttaaaattggagacttgcatagttcagcagtagctgtcttttttcctccccagaatatttgtcagctgaaagtctt

SEQ ID NO: 20674 - DNA, 120 bp, synthetic construct
  misc_feature 1..120: note = Artificially Synthesized Probe
  source 1..120: mol_type = other DNA
aatgttaatctctgcatggatggtacactgtcctagaaggtgcaaactttcattcattggagtctcagaagagaagggggcttcagtagactgtcaaagttaacttgaaaaatgatcact

SEQ ID NO: 20675 - DNA, 120 bp, synthetic construct
  misc_feature 1..120: note = Artificially Synthesized Probe
  source 1..120: mol_type = other DNA
taaatgttttaatagactttagcccataattaaacctcctgcctaacgggctcctgtgaagagggactagcacagtaggggccttcttaaactcagaactagttacagcttgtaaatact

SEQ ID NO: 20676 - DNA, 120 bp, synthetic construct
  misc_feature 1..120: note = Artificially Synthesized Probe
  source 1..120: mol_type = other DNA
tctgttgcctgtttcatttttctgagtttctgtatttggggttccaggtctgatattagaaacttttaaaggggaaaacaggcaacagaaatgagcagatatgtagagcttcgtgtctgg

SEQ ID NO: 20677 - DNA, 120 bp, synthetic construct
  misc_feature 1..120: note = Artificially Synthesized Probe
  source 1..120: mol_type = other DNA
tatgtcctaacaagagctgtttgaaaaaaaatatatataagttggaagaaaaaaatattttcatcattcttcctaattgcagcagtgtgctacgtggggggcaggccctgcgggagctct

SEQ ID NO: 20678 - DNA, 120 bp, synthetic construct
  misc_feature 1..120: note = Artificially Synthesized Probe
  source 1..120: mol_type = other DNA
tctggctgagttggttatcttttaatggaaatacaaataactgacttaaggatttttttgtcgtaggaaagtttgttgccagttgacagagtgtcttccctggagtcgcatgccttagtg

SEQ ID NO: 20679 - DNA, 120 bp, synthetic construct
  misc_feature 1..120: note = Artificially Synthesized Probe
  source 1..120: mol_type = other DNA
agatgtggttacaaggtggggtgatcccttcttaggaaaagtccagcctcttctgtgctctctcccttatgtggctttttggacatttgttacatggtgtttaatttctgaatattattt

SEQ ID NO: 20680 - DNA, 120 bp, synthetic construct
  misc_feature 1..120: note = Artificially Synthesized Probe
  source 1..120: mol_type = other DNA
aacaatttcagggttgaaatttttagcagagccttggaactgacaaccacctgtttggatagtaactttaactcaatctgtagcttgccatttgtgggcactgtcagttcacctagacca

SEQ ID NO: 20681 - DNA, 120 bp, synthetic construct
  misc_feature 1..120: note = Artificially Synthesized Probe
  source 1..120: mol_type = other DNA
aatatgtatcaaagtagacagaatattataaagagaccctacaaacctttcacccaactacagcaattaggtgaactgcccaatcttgcttctctatacccctcattctccccagtctta

SEQ ID NO: 20682 - DNA, 120 bp, synthetic construct
  misc_feature 1..120: note = Artificially Synthesized Probe
  source 1..120: mol_type = other DNA
aagtctcttaaaatcttcatgttccctctgtctctttttttttctttataacttgatgaacctggctcatttgtcttgaaaaggtcccactgcctagactttggtagttggagctggagg

SEQ ID NO: 20683 - DNA, 120 bp, synthetic construct
  misc_feature 1..120: note = Artificially Synthesized Probe
  source 1..120: mol_type = other DNA
gattccttttagtgaaaaatagtatttcaagaccatagtctgcaagcttgggctcctagttgctgtgaggccttttcaataggcagagctaggaatagctaggcatttttgtttgtttgt

SEQ ID NO: 20684 - DNA, 120 bp, synthetic construct
  misc_feature 1..120: note = Artificially Synthesized Probe
  source 1..120: mol_type = other DNA
aatctacaaaatgaggtctatttaaagaagccttgtgtatgttctgtcctctccatgctaactcctcccttcctgagtactccatcacagtttttatggttttccttccacgtgaaaaac

SEQ ID NO: 20685 - DNA, 120 bp, synthetic construct
  misc_feature 1..120: note = Artificially Synthesized Probe
  source 1..120: mol_type = other DNA
gtctttacgtgtagtagttccttttctgcaaatttccacagtaggaaacttgatgaacactaatgtatgggttttcttttgaccccacctacagtgggtagtattgtcatatgactgggt

SEQ ID NO: 20686 - DNA, 120 bp, synthetic construct
  misc_feature 1..120: note = Artificially Synthesized Probe
  source 1..120: mol_type = other DNA
tatacatttcctttgacttttttgttcaaaaatagaatcatggaaccttgcttggagggccttaaaattagttcatctcttgtctagtccagtcactccgctgcttttagtcgcaactgg

SEQ ID NO: 20687 - DNA, 120 bp, synthetic construct
  misc_feature 1..120: note = Artificially Synthesized Probe
  source 1..120: mol_type = other DNA
aaatgttcactctgtctgcggaaggccttttggaacccatattttcagccaaccattgttaaaacaactgctgcagagtaagtagtaaacttgttagaattaagaagttgggaaggagca

SEQ ID NO: 20688 - DNA, 120 bp, synthetic construct
  misc_feature 1..120: note = Artificially Synthesized Probe
  source 1..120: mol_type = other DNA
attttgatagatctcctctgtcaccaaaaaaaggagaccttagttattggaataaaaggcctgagttgtctcttaataaatagcctcctgaggcagaacagtgaactgggtgactttgtg

SEQ ID NO: 20689 - DNA, 120 bp, synthetic construct
  misc_feature 1..120: note = Artificially Synthesized Probe
  source 1..120: mol_type = other DNA
gtttattaaaataatggttgtatatgctgagaaaatggtggtgatttttcttcacattgttaatgcagcgcctcagtgggttagaattgggccttcaaatctacgctggggcactgtctt

SEQ ID NO: 20690 - DNA, 120 bp, synthetic construct
  misc_feature 1..120: note = Artificially Synthesized Probe
  source 1..120: mol_type = other DNA
gttcaaacatactgtttttgtgttaacaaaatgtagtaatagtccctttttaaccactatgtgccatgccttgttggaagtgactgacgtgtcttgtctcatttaatcctcaccagagct

SEQ ID NO: 20691 - DNA, 120 bp, synthetic construct
  misc_feature 1..120: note = Artificially Synthesized Probe
  source 1..120: mol_type = other DNA
ttttatgagaacaaaatggatttttcatttctattaaagcaaagataaaagctgaattaacactgagcgtgcagcgtaaagtcggccgcagctggattcctaactcgcgtctgccactgt

SEQ ID NO: 20692 - DNA, 120 bp, synthetic construct
  misc_feature 1..120: note = Artificially Synthesized Probe
  source 1..120: mol_type = other DNA
ttattttgagttaaagactcacttttataggaatgatctgtgattcttcatggttgaccagaatgtcttaaaggcacaggcgttttgcaaaggagacacgtgctcacttagactccacct

SEQ ID NO: 20693 - DNA, 120 bp, synthetic construct
  misc_feature 1..120: note = Artificially Synthesized Probe
  source 1..120: mol_type = other DNA
ttctgaccaccagtttgtgccttagtaacatgagggattaaggtggctttctggagttgacttacccaggtgaatatagtctaatttctgtgctgattatagtgtcttacaagatatgca

SEQ ID NO: 20694 - DNA, 120 bp, synthetic construct
  misc_feature 1..120: note = Artificially Synthesized Probe
  source 1..120: mol_type = other DNA
tagagaacttatctcaggaaaattggatggccccagggaaaagactacgtttttcagaaacaaccttaaaatttgggaaagaaatgtgttaccttagggaagatacgtccacctgaaacc

SEQ ID NO: 20695 - DNA, 120 bp, synthetic construct
  misc_feature 1..120: note = Artificially Synthesized Probe
  source 1..120: mol_type = other DNA
acaattgaaacaaagtttgccagatgcactaaacagctgtatagctgaaaagcaaattagtgagctggaagaattgagcttagagactcgggagatcattgctaaaagcaggaatgggag

SEQ ID NO: 20696 - DNA, 120 bp, synthetic construct
  misc_feature 1..120: note = Artificially Synthesized Probe
  source 1..120: mol_type = other DNA
ccagagtcccattcacatatgttcactgcttgtcatgatacggagataggtgcactgaagtgaatacaaatattttcagacatctataagaacagaaaccttgcgaccctctgagtaatt

SEQ ID NO: 20697 - DNA, 120 bp, synthetic construct
  misc_feature 1..120: note = Artificially Synthesized Probe
  source 1..120: mol_type = other DNA
agtggccctggttaaatgcagtacttggaagaatgtattcctgtgcctgtatccttgaggaaaatgaaagattttgtggaaatggagctttgacctgtacacgtgaactgtgtttaaaat

SEQ ID NO: 20698 - DNA, 120 bp, synthetic construct
  misc_feature 1..120: note = Artificially Synthesized Probe
  source 1..120: mol_type = other DNA
ccgccacagctttcacttgtattttctggttgtgtattcatgaatccagaaagaaccttttcgttcttgacacacttcttctgtcgtgaactaatagaaaattctgtgcggcacttcttc

SEQ ID NO: 20699 - DNA, 120 bp, synthetic construct
  misc_feature 1..120: note = Artificially Synthesized Probe
  source 1..120: mol_type = other DNA
agtcagtcacctttactgatgctcaggttgtcccagatttggccatcaagagtcacttcagactggcacctgtgttcttttgagcactttctaatcatttgaggcataccaagatgtttt

SEQ ID NO: 20700 - DNA, 120 bp, synthetic construct
  misc_feature 1..120: note = Artificially Synthesized Probe
  source 1..120: mol_type = other DNA
gatcaaactaagtttataagttcccatatgcagaactaacatcttgatcacgttgagacatactcaagagcaagggctgcctttccttttgtgcaagtctgcttctgtgttttacacttt

SEQ ID NO: 20701 - DNA, 120 bp, synthetic construct
  misc_feature 1..120: note = Artificially Synthesized Probe
  source 1..120: mol_type = other DNA
agcactggcgctacctggtctctaaggtttggtggaattttgggaaactagctgggccaggtacttttttgtaactctttgatgaaaattggtctgttttcagccatttgctaattttga

SEQ ID NO: 20702 - DNA, 120 bp, synthetic construct
  misc_feature 1..120: note = Artificially Synthesized Probe
  source 1..120: mol_type = other DNA
tatttggtgcttaggtgtttacaacttacagtttttatggagtgaaatatgtcatttacagaatggcttctgggcagtgtatcttgcttagggaggccttgtctgtctgaagagaactga

SEQ ID NO: 20703 - DNA, 120 bp, synthetic construct
  misc_feature 1..120: note = Artificially Synthesized Probe
  source 1..120: mol_type = other DNA
gtatcaatatctttcttttaaaataaaccttgtggccatctacattttcccttccacatgtcgagtgtccaaatttattttctgaagatggctgtagcagcatacccatcccacatgctc

SEQ ID NO: 20704 - DNA, 120 bp, synthetic construct
  misc_feature 1..120: note = Artificially Synthesized Probe
  source 1..120: mol_type = other DNA
gcgtgatataagaactttggatcattgacttctgttttctccctcccagcctttgttattgttgtcatacattttctatacttgttaaaaccccatagtacattgttactattttttgcc

SEQ ID NO: 20705 - DNA, 120 bp, synthetic construct
  misc_feature 1..120: note = Artificially Synthesized Probe
  source 1..120: mol_type = other DNA
tggtctggatttcctgctgaccgaaggatttctgtaaccttgcttgtagtgtaggtctgttacggtaagctctttcagcttttgtacattgggaaagtctattttgccttaatttttgaa

SEQ ID NO: 20706 - DNA, 120 bp, synthetic construct
  misc_feature 1..120: note = Artificially Synthesized Probe
  source 1..120: mol_type = other DNA
aaatagaattacagaaaggtaaattgtgtttttcacagagatgcagtccactggaatcaccaacactggacagctggtagagtatttagagtcctgagaaacaaggaatccaggcatcct

SEQ ID NO: 20707 - DNA, 120 bp, synthetic construct
  misc_feature 1..120: note = Artificially Synthesized Probe
  source 1..120: mol_type = other DNA
tgtgtgtgcgcgcacacgctacatgaagttccataactcactgataatctgttgatattttttgtagtcctttttccctttttcttggtgtttcatttgtgtaattgctgctgctctgtc

SEQ ID NO: 20708 - DNA, 120 bp, synthetic construct
  misc_feature 1..120: note = Artificially Synthesized Probe
  source 1..120: mol_type = other DNA
cttgctgggcttgtttcccatctctgagtgttgaggggaggaatcattgtcctttgttccttggtgtcctggtcttgaaaaccactgattcatgtttcttggtttttggtgttttgtttt

SEQ ID NO: 20709 - DNA, 120 bp, synthetic construct
  misc_feature 1..120: note = Artificially Synthesized Probe
  source 1..120: mol_type = other DNA
ttacatctgtatttcgtgtgtagctgcttgtgtacgtacatacatacatgtacacacgagcccatttcagtccagcactgcaagggtgatcctggtttcctcccttctatgtttgtaact

SEQ ID NO: 20710 - DNA, 120 bp, synthetic construct
  misc_feature 1..120: note = Artificially Synthesized Probe
  source 1..120: mol_type = other DNA
caccagtgctgtaaaatctatgcttcaagtcccaagaactgccgtgctgtggaaaatgtgcactagataattaagttactgttgggtatttatttgcaggaaattgagtttaccagttgg

SEQ ID NO: 20711 - DNA, 120 bp, synthetic construct
  misc_feature 1..120: note = Artificially Synthesized Probe
  source 1..120: mol_type = other DNA
aaatctaaagggagttggactcttctgagtggatttatggaatagaagcgcagttataagtgataacaggcaaagtgtctgttttcctggttctttatggaagagaaccaagctgaaggc

SEQ ID NO: 20712 - DNA, 120 bp, synthetic construct
  misc_feature 1..120: note = Artificially Synthesized Probe
  source 1..120: mol_type = other DNA
ttaattttacctcatttggttaatacttgacatgatacagattgctggcttcctgggtagtaataaatatttactcagcaatctcgagtgagtgtccatggggtgctgtcaaggagacct

SEQ ID NO: 20713 - DNA, 120 bp, synthetic construct
  misc_feature 1..120: note = Artificially Synthesized Probe
  source 1..120: mol_type = other DNA
aatgttgtgagcatccttaattatttcaggataccttccctaaaggaaaattgcttggtaacagattttgtgcattttttgggcttttgctagttacgaggctggtagaggcaagggttg

SEQ ID NO: 20714 - DNA, 120 bp, synthetic construct
  misc_feature 1..120: note = Artificially Synthesized Probe
  source 1..120: mol_type = other DNA
ctgcttcactgttttgtccactgatttataattccatgaatttagccatgcctccaaaggatatgctggggcacggaaaaaaggaacttagagtcagttcattttgctactttttggtaa

SEQ ID NO: 20715 - DNA, 120 bp, synthetic construct
  misc_feature 1..120: note = Artificially Synthesized Probe
  source 1..120: mol_type = other DNA
atgtaaatccctttccccctttccagttgattctatagcaaactctcctttgaatttctgtagaacttactgctcgtgttcatgaccagttcatgatgaagccttttcctaacctggttt

SEQ ID NO: 20716 - DNA, 120 bp, synthetic construct
  misc_feature 1..120: note = Artificially Synthesized Probe
  source 1..120: mol_type = other DNA
ataccacctgaatgaaatgataaggccgcttctgcccatgagaagctgtgtccacctcatgaaatccttggtaagatgttctgagaaatacttagcgtcttttctctgtaaaaaatgatc

SEQ ID NO: 20717 - DNA, 120 bp, synthetic construct
  misc_feature 1..120: note = Artificially Synthesized Probe
  source 1..120: mol_type = other DNA
ctgagtcttgtaaatacttcacaaataaaatgaagttcaacataacttagcagtttctcttgcaaaacacagcccaccactgttttcacgggaaacaggatacaaaggagagctctcagt

SEQ ID NO: 20718 - DNA, 120 bp, synthetic construct
  misc_feature 1..120: note = Artificially Synthesized Probe
  source 1..120: mol_type = other DNA
atgtctcgaaaggatttaggagtctcttgaatgtgatgagcagtcgctgactgaaatggggaagaccgtgggtggagcactttgtgggaaaggttggggttcaggtttccatgtgtaagc

SEQ ID NO: 20719 - DNA, 120 bp, synthetic construct
  misc_feature 1..120: note = Artificially Synthesized Probe
  source 1..120: mol_type = other DNA
aataataataatttaaaaaaactgttttccaggtataaaatgtcctttccacaactcagtggcctgctggtgatgcttcgattctgtccctcgttagaatcagagtggacgtccctttgc

SEQ ID NO: 20720 - DNA, 120 bp, synthetic construct
  misc_feature 1..120: note = Artificially Synthesized Probe
  source 1..120: mol_type = other DNA
cgatggatactggctcatagtgcttctgaagatcaggtctggatatctcactctcctgagatgccagtatagacacagaaccaaagcaaagtgtttactaagtaaaaaaataaaataaaa

SEQ ID NO: 20721 - DNA, 120 bp, synthetic construct
  misc_feature 1..120: note = Artificially Synthesized Probe
  source 1..120: mol_type = other DNA
aagaaatggcaataactggtgcatacattagttgaaaatattaaaatatttacactgagcaccaaatagaataattctcagtcttttcatggagaactcctttgaaagaatgcctagaac

SEQ ID NO: 20722 - DNA, 120 bp, synthetic construct
  misc_feature 1..120: note = Artificially Synthesized Probe
  source 1..120: mol_type = other DNA
gaggaataaagcagaatccctttttttatgatgcttacatgaaggggaaacaggcacagaaaagtaaatctatcacttgctgtccataatagtaagtttgggccgtagaaaggggctcag

SEQ ID NO: 20723 - DNA, 120 bp, synthetic construct
  misc_feature 1..120: note = Artificially Synthesized Probe
  source 1..120: mol_type = other DNA
ttcatagaaaaactggttatgaagctgcctgtttgcccaccatcctcagcctgagcaggaagctcaggaaggtgaagtacctgcaatcagcacctttcatgatgtgtgtttgtttagatg

SEQ ID NO: 20724 - DNA, 120 bp, synthetic construct
  misc_feature 1..120: note = Artificially Synthesized Probe
  source 1..120: mol_type = other DNA
gtgtgtgagtgtgagaatgtagttagtaaaacatttgcccttagagataaattcacccaagcactgaactcttactgtccatagaaccacggacattgtagtgagatgaaaggactgtag

SEQ ID NO: 20725 - DNA, 120 bp, synthetic construct
  misc_feature 1..120: note = Artificially Synthesized Probe
  source 1..120: mol_type = other DNA
gctctctgttcatgtgtacctagggatttcacctgatgttgagatttttgtcttactagccgggaggggggaaaattgaagtattcaagtccaaatgattcagacatgatgtcttctgag

SEQ ID NO: 20726 - DNA, 120 bp, synthetic construct
  misc_feature 1..120: note = Artificially Synthesized Probe
  source 1..120: mol_type = other DNA
gagcggtaacacccgtgaagtgaggccagttctgcgtgagttcaggatcctccttgacagagtatttcctttttttttctgtaacaatttctaattttccctccatttacaaaagttgaa

SEQ ID NO: 20727 - DNA, 120 bp, synthetic construct
  misc_feature 1..120: note = Artificially Synthesized Probe
  source 1..120: mol_type = other DNA
atactttcttgaaggccataatgtgtttgttacaatgattgcccaagtgattttttgggggggtttggaatgtgtttcattcagcgtttgaccttttatcaccttagctgctggttatgt

SEQ ID NO: 20728 - DNA, 120 bp, synthetic construct
  misc_feature 1..120: note = Artificially Synthesized Probe
  source 1..120: mol_type = other DNA
attcacttatcagatcttcattgagcttctgttttgtgccaaccattgtggtaggcactgtattttcagcagagagtgaaatagaattcctggccttatgaagcttacgtgctaaggaat

SEQ ID NO: 20729 - DNA, 120 bp, synthetic construct
  misc_feature 1..120: note = Artificially Synthesized Probe
  source 1..120: mol_type = other DNA
taagaaaactcttgaagataacttgggaaaatgtctttgggaccttaaggttggcaaatattccttaaataggacatgaaacctttatggttatgcaccagccgtgaaggaagagggtcc

SEQ ID NO: 20730 - DNA, 120 bp, synthetic construct
  misc_feature 1..120: note = Artificially Synthesized Probe
  source 1..120: mol_type = other DNA
taggggtatcaaaagagagaagaacaagaatgcctttaattttatacttggaagtggcaagatggcacttgccattgctaatacagcaatcaggagaggaggagggactttaaggaaaat

SEQ ID NO: 20731 - DNA, 120 bp, synthetic construct
  misc_feature 1..120: note = Artificially Synthesized Probe
  source 1..120: mol_type = other DNA
aatgaaaaagtatcactgcaattaggttttaaataaatttgtttcgttaacatgtctggaagtcttagatgtcttactgtggaaggtctcgctgctgtggagcccacctctttcaggccc

SEQ ID NO: 20732 - DNA, 120 bp, synthetic construct
  misc_feature 1..120: note = Artificially Synthesized Probe
  source 1..120: mol_type = other DNA
ttgctctttgcaggaaaaaaatatacaaagaactattctataatcatgccatgcagtaattaatgccactgttggcattttggtggtatcatttgggagcctttctggggtgcacctgtg

SEQ ID NO: 20733 - DNA, 120 bp, synthetic construct
  misc_feature 1..120: note = Artificially Synthesized Probe
  source 1..120: mol_type = other DNA
tgatttgaagagcacaggtgaacacatttcaccaaaactaggacacatcatgaagtcagtgccaccagagaaaaagtcagcattgccacttaaaagtgtaagatgccacttgattaagag

SEQ ID NO: 20734 - DNA, 120 bp, synthetic construct
  misc_feature 1..120: note = Artificially Synthesized Probe
  source 1..120: mol_type = other DNA
taaaacctgataacacatttgaatataggtcacactgcttctctcttcccatgtgaatgtaggtgattagtgttctttgcccctttctctctcctgtagctctgcatatcacagaactgt

SEQ ID NO: 20735 - DNA, 120 bp, synthetic construct
  misc_feature 1..120: note = Artificially Synthesized Probe
  source 1..120: mol_type = other DNA
gctgagcgaccagaaacaggtacttttttgtatatacctgtgtgagtggtgaggtggacagtaatgaaaatgtcctttgcaagttggcacatttaaccgaagttctaagagtaatcatat

SEQ ID NO: 20736 - DNA, 120 bp, synthetic construct
  misc_feature 1..120: note = Artificially Synthesized Probe
  source 1..120: mol_type = other DNA
gaaagagaatgtacataatcatgtagtttccgttggcattggccggtttgtaatttcacaagagtcagatgaggtcatctacctgcagtatgtgaaggtgaatgtaaagtcatgtgactg

SEQ ID NO: 20737 - DNA, 120 bp, synthetic construct
  misc_feature 1..120: note = Artificially Synthesized Probe
  source 1..120: mol_type = other DNA
aaaggagtaatttggacttgggcagagctattgtatttgattttgaaagacttaaattagcaaaactttaaaaaacggcgtaggcagaagtgtggtgggtcagcgtcattcccgggtcat

SEQ ID NO: 20738 - DNA, 120 bp, synthetic construct
  misc_feature 1..120: note = Artificially Synthesized Probe
  source 1..120: mol_type = other DNA
atgactggaagaaggtgtgtacaaagactgcagggtttccattccagctccagctttgaagtttgattccagaaaaactcaaaatttagcgtatttctggtgtgtttcataaaatcagac

SEQ ID NO: 20739 - DNA, 120 bp, synthetic construct
  misc_feature 1..120: note = Artificially Synthesized Probe
  source 1..120: mol_type = other DNA
ggtttcagtgtgttgattatccctagctgtaatgaaagctactgtttgttgactttgcaaggaggaaaaaggctccacaaaaggcagaaatctatcttcaaggagcactgaaaaactacc

SEQ ID NO: 20740 - DNA, 120 bp, synthetic construct
  misc_feature 1..120: note = Artificially Synthesized Probe
  source 1..120: mol_type = other DNA
gcacttctgccaggagatacttgactttgccagccagccgtcagacagcccaggtaagaccagttcttacaacttgactaggaatattttcaaatattacagaagtaaaaaagaatacaa

SEQ ID NO: 20741 - DNA, 120 bp, synthetic construct
  misc_feature 1..120: note = Artificially Synthesized Probe
  source 1..120: mol_type = other DNA
gatggtgcttttttttttttttaaaatgtaacagcattattgtgatattcacaaaccatgtaattcactcatttgaagtttataattcaatggcttttagtctgtttcaggaatatgtgc

SEQ ID NO: 20742 - DNA, 120 bp, synthetic construct
  misc_feature 1..120: note = Artificially Synthesized Probe
  source 1..120: mol_type = other DNA
ctttcgttgatgaatatttaataaatacttaactggtcacttctgcagccttgtgtattttctagacaaaaccaaggtacttacagttcggtcagagagagaagggcccagagagagcat

SEQ ID NO: 20743 - DNA, 120 bp, synthetic construct
  misc_feature 1..120: note = Artificially Synthesized Probe
  source 1..120: mol_type = other DNA
cgtggagcttacaagaactgtctggagtgtgctgtgaattgagtagagtcctttgttctcctaaccctgtttttgtctctgtccttatacaaaaatacactgatgttttctttcgtgttt

SEQ ID NO: 20744 - DNA, 120 bp, synthetic construct
  misc_feature 1..120: note = Artificially Synthesized Probe
  source 1..120: mol_type = other DNA
gctgagatgccaggcttctcataagttttagctgtgtctgcctttaagagatattttgggtaacataatggaaattttgcctgggaactagctgactgcctcttttgtttatctgaatgt

SEQ ID NO: 20745 - DNA, 120 bp, synthetic construct
  misc_feature 1..120: note = Artificially Synthesized Probe
  source 1..120: mol_type = other DNA
ttggagattctaaggaatttgggagctagtatgcctggaaatggggttgaaaactacatgtgtattttacagtgtcacattaggccaagaagcagctaatgtctaccacagggtttcata

SEQ ID NO: 20746 - DNA, 120 bp, synthetic construct
  misc_feature 1..120: note = Artificially Synthesized Probe
  source 1..120: mol_type = other DNA
cagagaaggttttgaatatttgagcagcaccagcacagtcaagttttctttacagtctcttcttaagcctcattatgtgattctcttctactactaatgggcaggcaaattttgtgaccc

SEQ ID NO: 20747 - DNA, 120 bp, synthetic construct
  misc_feature 1..120: note = Artificially Synthesized Probe
  source 1..120: mol_type = other DNA
attcctcagagagtcaagttcactgtcactaccggccattatacgataaagaatggagacagcctgcagcttagcaatgccgaagccatgctcatcctgtgccaggcggagagcagggct

SEQ ID NO: 20748 - DNA, 120 bp, synthetic construct
  misc_feature 1..120: note = Artificially Synthesized Probe
  source 1..120: mol_type = other DNA
tgtctcattttaggctttggtgctggtacttactgacagttacttgagaaagatgtgatttcggtcccagagccacaggatatcagctcatggaatgtgtcgctgcatcatgttactcag

SEQ ID NO: 20749 - DNA, 120 bp, synthetic construct
  misc_feature 1..120: note = Artificially Synthesized Probe
  source 1..120: mol_type = other DNA
atgcttagataattcattaactatggagtagttactgattggctaatgtcatctggaaatacatgactgaaagcactttgtcaaaaccctgtgcacattgcaacatgcatggctccgcgg

SEQ ID NO: 20750 - DNA, 120 bp, synthetic construct
  misc_feature 1..120: note = Artificially Synthesized Probe
  source 1..120: mol_type = other DNA
agttcatattcaggttttcccaactgtctgaaaatgaccttttatggttgctttgtgtgacttggggtccaaaatctccatcagaccactagatctctgttcatcctttcttccctgttt

SEQ ID NO: 20751 - DNA, 120 bp, synthetic construct
  misc_feature 1..120: note = Artificially Synthesized Probe
  source 1..120: mol_type = other DNA
atagtaactattattaatattttcaaagttttgcatgtaatggaaatggatataagccccgcctatcatctctcaatggagagtcttcacctgtaatgaggagggctgctgctgtctccc

SEQ ID NO: 20752 - DNA, 120 bp, synthetic construct
  misc_feature 1..120: note = Artificially Synthesized Probe
  source 1..120: mol_type = other DNA
ttaggaaatatgttcaagtttgtgtccagaatttgtcagaacttgactttcagctgtcagatagttatcttgtagataccggtgatagtaccgacctgcaactagtaccactgaacacgc

SEQ ID NO: 20753 - DNA, 120 bp, synthetic construct
  misc_feature 1..120: note = Artificially Synthesized Probe
  source 1..120: mol_type = other DNA
gccaccacctctagccaagatgtactctttaattaattgatgatatattcccctgttttggagctgcatgggatatgctatatattaattaatatcctttgggcatggtggctcacacct

SEQ ID NO: 20754 - DNA, 120 bp, synthetic construct
  misc_feature 1..120: note = Artificially Synthesized Probe
  source 1..120: mol_type = other DNA
cccccttctctgcattgccggttctctgttggattttccccagcttctgaggaacagctgtctatctccttaaagccgtatacttatgaatttaaagtggaaaatttttttgtaagtgat

SEQ ID NO: 20755 - DNA, 120 bp, synthetic construct
  misc_feature 1..120: note = Artificially Synthesized Probe
  source 1..120: mol_type = other DNA
acaggtgtgtgctgtgttcctttagggagatgatttgacttaatgttttgcaattttgtgatactttcttttcttctctttactatttgaaattatcaaacaatgtttatttgaagtgtt

SEQ ID NO: 20756 - DNA, 120 bp, synthetic construct
  misc_feature 1..120: note = Artificially Synthesized Probe
  source 1..120: mol_type = other DNA
cttaaattttttgctttggacctagaaaatcattgcctttggtcaaaaagattttctcttgcatttccttccaagatgttcgtaatttgagcacttgcatttaggtctgtgatctacttt

SEQ ID NO: 20757 - DNA, 120 bp, synthetic construct
  misc_feature 1..120: note = Artificially Synthesized Probe
  source 1..120: mol_type = other DNA
gggactgctgtttaggctgtgaactcccataaaacggcttcatcttggcctcagactccagacaaatgcttcttaatatactgaaatctcttctttgaacattttacaatgccaatagaa

SEQ ID NO: 20758 - DNA, 120 bp, synthetic construct
  misc_feature 1..120: note = Artificially Synthesized Probe
  source 1..120: mol_type = other DNA
tgtgctatcctttcttcctgtggttgaaaatgttcataatttaaagaaggatgttaaggttcggagtgtaggacttccgaaaacattgcatctccagtgggaattattgagagtgagtgg

SEQ ID NO: 20759 - DNA, 120 bp, synthetic construct
  misc_feature 1..120: note = Artificially Synthesized Probe
  source 1..120: mol_type = other DNA
tgtgggcacctttcgtttgacaatatttttttaaaatctgcatttgtgatctctcagggagggcttggagcatcagaactctttcaagctcacagtggcaagtgtaagttttccaaaatt

SEQ ID NO: 20760 - DNA, 120 bp, synthetic construct
  misc_feature 1..120: note = Artificially Synthesized Probe
  source 1..120: mol_type = other DNA
gtcagcttcctgtgttacacgagatggcacagttgggtgaagctggtgatgaaggtatgtgacccctctactacttttacaacttcttgtgagtctataaacatttcacaattaaaaaaa

SEQ ID NO: 20761 - DNA, 120 bp, synthetic construct
  misc_feature 1..120: note = Artificially Synthesized Probe
  source 1..120: mol_type = other DNA
gcccagctacttgggaggctgaggcaggagaattgcctgaacccaggaggcggaggttgcagtgagccaaaattgcgccactgcactccagcctgggcaacgagcaaaactccgcctcaa

SEQ ID NO: 20762 - DNA, 120 bp, synthetic construct
  misc_feature 1..120: note = Artificially Synthesized Probe
  source 1..120: mol_type = other DNA
ttctgttttcatctttggattccatttttgcatgaactttttgtagttccctcatacgtattctctttccatccttaaaaagcagctctgtgaggctggtggtggtctcagcactataca

SEQ ID NO: 20763 - DNA, 120 bp, synthetic construct
  misc_feature 1..120: note = Artificially Synthesized Probe
  source 1..120: mol_type = other DNA
tttggaagaaaaagtttaccttcagtatttgagcaggtgagcactttgtgcgagaggtgataaacttatgactgagcaggttggagaactagcggcgtgttttcagtgccggtagaaact

SEQ ID NO: 20764 - DNA, 120 bp, synthetic construct
  misc_feature 1..120: note = Artificially Synthesized Probe
  source 1..120: mol_type = other DNA
gagcgcctcagcggtgaggtggtttagggataaatgtttctggaaccctgtggtcccccataatgttgatagaatatcatatgcactgggagttaaatatatttaatttaatgatcatta

SEQ ID NO: 20765 - DNA, 120 bp, synthetic construct
  misc_feature 1..120: note = Artificially Synthesized Probe
  source 1..120: mol_type = other DNA
ggaggaaggaggcacagaccggggaaatatgacagccgtcatttccagtattctctgtgttgtcttttagctcattcaataaataaaggtggtgtgatttttttttcctcctgtcttttt

SEQ ID NO: 20766 - DNA, 120 bp, synthetic construct
  misc_feature 1..120: note = Artificially Synthesized Probe
  source 1..120: mol_type = other DNA
acaacagttccattgtcagcacagcctaggaaggtcagatcctgtattaattactcttagtggagatgccagatatcccatacagaattagcagagaaaatacacacaggcttctattca

SEQ ID NO: 20767 - DNA, 120 bp, synthetic construct
  misc_feature 1..120: note = Artificially Synthesized Probe
  source 1..120: mol_type = other DNA
cagcttgaaagtctccgatcttcatttcttgtccctgaaatgcatgtgggccaacgatggcttcagcaggaggctttcttctgtgccttatggttaacttttgtcttctgacacacaggc

SEQ ID NO: 20768 - DNA, 120 bp, synthetic construct
  misc_feature 1..120: note = Artificially Synthesized Probe
  source 1..120: mol_type = other DNA
aagctgccacacgagtgtgtccccactccccacagggcctgtccgcctccacaacacagcacgaggtgtctgctcatgtcaggattctctcattcatctaataaacatttttggtttttt

SEQ ID NO: 20769 - DNA, 120 bp, synthetic construct
  misc_feature 1..120: note = Artificially Synthesized Probe
  source 1..120: mol_type = other DNA
tatttaacgactgtgtgcctgcattgttctcagtgctgggaatagacagtgaacaaaatggacaaaaagttacccctggtatgctggtaatgctaattttcttttcttttgggatggagt

SEQ ID NO: 20770 - DNA, 120 bp, synthetic construct
  misc_feature 1..120: note = Artificially Synthesized Probe
  source 1..120: mol_type = other DNA
gtgagccacctacccagccccagtcagcagattttgaatctcacttgaagaatgggcacgagtctgtgtggggcagcatctgtgttgtctgcacacacatgtgcttccatgtctgtgggc

SEQ ID NO: 20771 - DNA, 120 bp, synthetic construct
  misc_feature 1..120: note = Artificially Synthesized Probe
  source 1..120: mol_type = other DNA
gctgggattacaggagtgagccaccgtgcctggccttcttatttattatttttttgaggtggagtctcactctgtcgctcaggctggtgtgcaatgatgcaatcttggctcactgcagcc

SEQ ID NO: 20772 - DNA, 120 bp, synthetic construct
  misc_feature 1..120: note = Artificially Synthesized Probe
  source 1..120: mol_type = other DNA
cctcagcctcccaaggtactgggattacaggaatgagacagtgcaccgggttctccccaccccctcgcaagttctatgcatgagaatccctggacttgccccaggccaccctgtggtctg

SEQ ID NO: 20773 - DNA, 120 bp, synthetic construct
  misc_feature 1..120: note = Artificially Synthesized Probe
  source 1..120: mol_type = other DNA
tttcttcatctgcaaaatcacaacagtccctgtctgtggcactgctgggggcactaaacgagtgaggaaagcatagatccaacctattctgaccagcattatcggtgtgccatgtggcat

SEQ ID NO: 20774 - DNA, 120 bp, synthetic construct
  misc_feature 1..120: note = Artificially Synthesized Probe
  source 1..120: mol_type = other DNA
agaaaaaaaagcaaaacggctagggctttcctgctagtgtgagactctgatatgggaaaggagacagcatttcccgggctgacttcatgacaggaccctttaggaacaagggcaagagcc

SEQ ID NO: 20775 - DNA, 120 bp, synthetic construct
  misc_feature 1..120: note = Artificially Synthesized Probe
  source 1..120: mol_type = other DNA
ttgaaaagttgttttaatacagaaaactaaaataatgtggccatgcactcctgtcctggccaaagccactgtccccaaatgaccatgattatcagccatgctcttaggaactatgtgggt

SEQ ID NO: 20776 - DNA, 120 bp, synthetic construct
  misc_feature 1..120: note = Artificially Synthesized Probe
  source 1..120: mol_type = other DNA
ccacgccaggtaccttctctgtcccctacacatattaactcgtacagcacagtggtttgggtctgaactccggggccagattcccaagttcaagtcctggctcagtcatttatttattta

SEQ ID NO: 20777 - DNA, 120 bp, synthetic construct
  misc_feature 1..120: note = Artificially Synthesized Probe
  source 1..120: mol_type = other DNA
tctgtgattactatttggattctagtaaggtcagaaaagtaaaaacttttttctctgtaaaaggtcagaaggtattttaggctttgtgagtcatatgtggtccctactgcatagtcttct

SEQ ID NO: 20778 - DNA, 120 bp, synthetic construct
  misc_feature 1..120: note = Artificially Synthesized Probe
  source 1..120: mol_type = other DNA
ccaggatgctacttatttctggcacagagtatggatcataccataattatctattactcatcacagcaacccctgtaaaactaattttctcagttgacagacaaggaaactggggctcaa

SEQ ID NO: 20779 - DNA, 120 bp, synthetic construct
  misc_feature 1..120: note = Artificially Synthesized Probe
  source 1..120: mol_type = other DNA
ctttttgcgtgtccttctctcctggaaccttgactgcagccacccagaggcacaagtcagagaataacaaggtcccctctgagaaacctccccttaatctccaaaatatcgtccctgaaa

SEQ ID NO: 20780 - DNA, 120 bp, synthetic construct
  misc_feature 1..120: note = Artificially Synthesized Probe
  source 1..120: mol_type = other DNA
ggcaggttactcccgcggcttcacttttcttacctattaaatgagaatcgtggtttctcagatagagcaaagattaaatgacagattcctggaaagtgtgcaaagaaccactctaacatt

SEQ ID NO: 20781 - DNA, 120 bp, synthetic construct
  misc_feature 1..120: note = Artificially Synthesized Probe
  source 1..120: mol_type = other DNA
cagggctcggttctgcttctttcctccccgatgtctcttctatgtgcttctgtctcttcgtgtcactttctgtgtctctgtctttcccttttgggtatttctgtttcattcattcattca

SEQ ID NO: 20782 - DNA, 120 bp, synthetic construct
  misc_feature 1..120: note = Artificially Synthesized Probe
  source 1..120: mol_type = other DNA
cccgagtagctgggactacaggcgcccgccaccacgcccggctaattttttgtattttagtagagacggggtttcaccgtgttggccaggatgatctcgatctcctgaccttgtgatccg

SEQ ID NO: 20783 - DNA, 120 bp, synthetic construct
  misc_feature 1..120: note = Artificially Synthesized Probe
  source 1..120: mol_type = other DNA
atggcttgtaaatgatggataaataaacagatatgcgcttgttggacgtgagtgctcaaaacctttttactgataggtcagtgtggtcaagacaatttaggaaactctggtctggcctga

SEQ ID NO: 20784 - DNA, 120 bp, synthetic construct
  misc_feature 1..120: note = Artificially Synthesized Probe
  source 1..120: mol_type = other DNA
tccgagttgtagctggtaattgaaactggaagtaggtaagacgtcacagggaaaacaacgtgtaaagtcaggggagttgcaaactggcaattctatagccaattgtgtgcgtgtgtttgt

SEQ ID NO: 20785 - DNA, 120 bp, synthetic construct
  misc_feature 1..120: note = Artificially Synthesized Probe
  source 1..120: mol_type = other DNA
ccagaatgagagcctttcagctgtagccagggccacttgtgatacagtcagatgaaacctgaataagggccgttgtatatggagccaggcaggaaattgatgatttttatcaagaacaat

SEQ ID NO: 20786 - DNA, 120 bp, synthetic construct
  misc_feature 1..120: note = Artificially Synthesized Probe
  source 1..120: mol_type = other DNA
accactgcacttgacctgaattttttatttgatttaattttaacttattagaacagaaagagctccatggctacaaagaacccatgcagctatcacattggacagtacaagctccagact

SEQ ID NO: 20787 - DNA, 120 bp, synthetic construct
  misc_feature 1..120: note = Artificially Synthesized Probe
  source 1..120: mol_type = other DNA
atccttgtagcacctctgctatcccttctgtaaaattgctcttaaatctgctcactaggtttgtgtaaatacaggtctcccctgatatctgaactcctggaatctggaacaaagaattta

SEQ ID NO: 20788 - DNA, 120 bp, synthetic construct
  misc_feature 1..120: note = Artificially Synthesized Probe
  source 1..120: mol_type = other DNA
tctcattctccaaacccctgttacttactcaggtgccaatcacctttagaaagcaagagagacttgtgcatttctttaggtgggggaaagttttatatgtggaaactttccaaatggaaa

SEQ ID NO: 20789 - DNA, 120 bp, synthetic construct
  misc_feature 1..120: note = Artificially Synthesized Probe
  source 1..120: mol_type = other DNA
ccccagagggaccttgtgccagtgtgggcgcccccggaccgcccaccccgcagtggccatggaggatgccttcggggcagccgtggtgaccgtgtgggacagcgatgcacacaccacgga

SEQ ID NO: 20790 - DNA, 120 bp, synthetic construct
  misc_feature 1..120: note = Artificially Synthesized Probe
  source 1..120: mol_type = other DNA
gtccccgtctctccgggtctctgtttcccctttactctgggtttctgtccccatctctctgggtctctgtccctctctctctgggtctctgtccctctctctctgggtctctgtccctct

SEQ ID NO: 20791 - DNA, 120 bp, synthetic construct
  misc_feature 1..120: note = Artificially Synthesized Probe
  source 1..120: mol_type = other DNA
tgtgtgtgtctctgtcttattctttgtttctctccccctgcctctgcatgttcctcggcgtctgtgtaggagcctggattgtcactgggggtctgcacacgggcatcggccggcatgttg

SEQ ID NO: 20792 - DNA, 120 bp, synthetic construct
  misc_feature 1..120: note = Artificially Synthesized Probe
  source 1..120: mol_type = other DNA
agtagtttggtctggtcgagatttggggaattacctatggttaagtgtctttccccgtcattattcatggttttaaaaacttctgtctgagagtgagttagctcacatcagtaatcccaa

SEQ ID NO: 20793 - DNA, 120 bp, synthetic construct
  misc_feature 1..120: note = Artificially Synthesized Probe
  source 1..120: mol_type = other DNA
atttttggtggggttttccaattttctgggaatacaagccatgttttcttcaaataggtacttttgtcccttccagctttacaaaaaaccaaaaaccaaaaaatcaattttcacttcagt

SEQ ID NO: 20794 - DNA, 120 bp, synthetic construct
  misc_feature 1..120: note = Artificially Synthesized Probe
  source 1..120: mol_type = other DNA
ataattaagtaaaaaaagaaatgacaattccaatgagcctctgaacagaagattaggacaaggctgatgtttgccgactcctgggaaatgcggttttctcctatctccagcaaaggctga

SEQ ID NO: 20795 - DNA, 120 bp, synthetic construct
  misc_feature 1..120: note = Artificially Synthesized Probe
  source 1..120: mol_type = other DNA
tcttaatatttttcccctttggggctttgcatggtgctatttgggcagttttcccagatgctttcattatgttccagcatctgctttcctctgttggatccatccatccattctttcatc

SEQ ID NO: 20796 - DNA, 120 bp, synthetic construct
  misc_feature 1..120: note = Artificially Synthesized Probe
  source 1..120: mol_type = other DNA
atgcatccactgacaattcctgagaatgccatctgctcattcttctatccatccatcttctcacctgtccatctgcacatccactgaaaattcctgagaattccatctactcattcctcc

SEQ ID NO: 20797 - DNA, 120 bp, synthetic construct
  misc_feature 1..120: note = Artificially Synthesized Probe
  source 1..120: mol_type = other DNA
tcctttatttagtcaacaaatacaatcctaggctccagagactaaagccaacccatttcctgctctcaaagaccccagatcccactaggattgtttggatacaaccttaggtaaaattta

SEQ ID NO: 20798 - DNA, 120 bp, synthetic construct
  misc_feature 1..120: note = Artificially Synthesized Probe
  source 1..120: mol_type = other DNA
ttgataagtcagtagaatttggatttagtaagctaacgagtgggacagataagtattcaggaagattcccagggctctgtgtggggagggtcatttttggtgtcagaagaacttttttct

SEQ ID NO: 20799 - DNA, 120 bp, synthetic construct
  misc_feature 1..120: note = Artificially Synthesized Probe
  source 1..120: mol_type = other DNA
cactaagatagaaactccccagatacacggtggcaatatatacagcattctacctcagctccccacccatgtttgtggtgtggtatatattttaattatttttcttattttaattatttc

SEQ ID NO: 20800 - DNA, 120 bp, synthetic construct
  misc_feature 1..120: note = Artificially Synthesized Probe
  source 1..120: mol_type = other DNA
ggcccaataagagggatctcctcttaatatgattccatttcctctgggggtacatccttcaatataaggtaactctcagtgggcaaatctgattcactctgcggaagttaactcagcagc

SEQ ID NO: 20801 - DNA, 120 bp, synthetic construct
  misc_feature 1..120: note = Artificially Synthesized Probe
  source 1..120: mol_type = other DNA
gcttttcatgtgagtctgtataattctcaagcccattgcaaggggcatgtttggagagaggtcagaggctcgcagggttggtatgtatcattggcatgaagggagtgttggagacaaggc

SEQ ID NO: 20802 - DNA, 120 bp, synthetic construct
  misc_feature 1..120: note = Artificially Synthesized Probe
  source 1..120: mol_type = other DNA
tgagttgagtatggaacacggtgagtctgaagggacaaggtggggccagggtcgagtgcccaggtgacaaatggtgccagattaaggcggaatataaagcaaggtattattattattatt

SEQ ID NO: 20803 - DNA, 120 bp, synthetic construct
  misc_feature 1..120: note = Artificially Synthesized Probe
  source 1..120: mol_type = other DNA
caagatattatgaacaattttgtttccttcttttgaaactgtggggaaagtaggagagcttcatagaatcgtagaaagtcgtggaaaagtccgctctgaatggacgtctgggttttgaaa

SEQ ID NO: 20804 - DNA, 120 bp, synthetic construct
  misc_feature 1..120: note = Artificially Synthesized Probe
  source 1..120: mol_type = other DNA
tatttcccccaatagaaccagcttcttcagggtaggaactgtatctgatttctctctccatccctcccactgcttggtccataacatacctcaataaatattaaatgaataagtgattcc

SEQ ID NO: 20805 - DNA, 120 bp, synthetic construct
  misc_feature 1..120: note = Artificially Synthesized Probe
  source 1..120: mol_type = other DNA
ttagacgcccctcaaccctgccttccattatggcctgtccagccttcccttaattgtccatccatctctgtccatctgccccatcttgtttcctctctccccacccatccatctgtctat

SEQ ID NO: 20806 - DNA, 120 bp, synthetic construct
  misc_feature 1..120: note = Artificially Synthesized Probe
  source 1..120: mol_type = other DNA
atccatccatccatccgtccctcatacccttgcccatctcttgtccttaacctttgagctaatctcttcccctattcatcccaccctgccagtccttccatctcgaagcttccctcatgg

SEQ ID NO: 20807 - DNA, 120 bp, synthetic construct
  misc_feature 1..120: note = Artificially Synthesized Probe
  source 1..120: mol_type = other DNA
gataatatatctcagtgtggatctctgtgaatttctttttctttttcttttttttttttttttgagatggagtcctgctctgttgcccaggctggagtgcagtggcatgatctcggctca

SEQ ID NO: 20808 - DNA, 120 bp, synthetic construct
  misc_feature 1..120: note = Artificially Synthesized Probe
  source 1..120: mol_type = other DNA
agccactgcgcccggcctctgtagtctgtcttttttttttcctggtcccactacaaaactttatttttgattacagtaccattctcaatctcttctacaaaaagcagaaaaaaaagcagc

SEQ ID NO: 20809 - DNA, 120 bp, synthetic construct
  misc_feature 1..120: note = Artificially Synthesized Probe
  source 1..120: mol_type = other DNA
tgctgctcattgtgggtcattgttgtttgtttagtgacttttcttttttctttttcttttttttggggggaggggggatggagtctcactctgtggcccaggctagagtacagtggtgca

SEQ ID NO: 20810 - DNA, 120 bp, synthetic construct
  misc_feature 1..120: note = Artificially Synthesized Probe
  source 1..120: mol_type = other DNA
tattccctccaagtatttcctttcatggcctctttcttcccaagatgcttagtgtatctattactgcctctactgtgagtccttgcctcagatggatgtggttaattcatttgcctttaa

SEQ ID NO: 20811 - DNA, 120 bp, synthetic construct
  misc_feature 1..120: note = Artificially Synthesized Probe
  source 1..120: mol_type = other DNA
ggaaagtgtaatggagaaagagtaattcgcgcagagccggctgtgcgggagacctcagttttattatcactcaaatcagtctcctcgaggattcagggatcagagcttttaaagataatt

SEQ ID NO: 20812 - DNA, 120 bp, synthetic construct
  misc_feature 1..120: note = Artificially Synthesized Probe
  source 1..120: mol_type = other DNA
gcattttcaactgactttcagtttcttccagatccatctccaaacattacttcatccttggcctctgatgaccccagttagtttctgacctctgactctgttccttcccttgacttcagg

SEQ ID NO: 20813 - DNA, 120 bp, synthetic construct
  misc_feature 1..120: note = Artificially Synthesized Probe
  source 1..120: mol_type = other DNA
aggaaatctcacccttcctataggaaatcatctgccttgggaagccctacttgctcccacagtctctccgatcctgacaagttgacattttggaaacattatcaatatttttagtttaaa

SEQ ID NO: 20814 - DNA, 120 bp, synthetic construct
  misc_feature 1..120: note = Artificially Synthesized Probe
  source 1..120: mol_type = other DNA
ctttgggatgactttaggagaccacctctctgtccctctgccatgtctccgggtgaagaagtttgagttttgctggagaatgcctctccaccttctcttcccctcatttcttgctctgtg

SEQ ID NO: 20815 - DNA, 120 bp, synthetic construct
  misc_feature 1..120: note = Artificially Synthesized Probe
  source 1..120: mol_type = other DNA
gctcaagatttggttctgccatcaaggaggccatcaccagaaattgattttcttcatgctacacatacttccatccctctgtagcaagcggaatcagttgattgagggatttttcaccta

SEQ ID NO: 20816 - DNA, 120 bp, synthetic construct
  misc_feature 1..120: note = Artificially Synthesized Probe
  source 1..120: mol_type = other DNA
aaaaaagaacaaaatatgtatcaagagagaagggaaaaactaagataaacatttggaccactgagaaaggttgatagaaggccccagtgtctgaggtcaggatcagtaatggtgtccttc

SEQ ID NO: 20817 - DNA, 120 bp, synthetic construct
  misc_feature 1..120: note = Artificially Synthesized Probe
  source 1..120: mol_type = other DNA
ccggaaatcagttcgtttaattccaacaacccagtgcaatagggcctataattattctcattttgcaggtgaaataatggagtcattcagtcacttgcctcagatcatgtggttggtaaa

SEQ ID NO: 20818 - DNA, 120 bp, synthetic construct
  misc_feature 1..120: note = Artificially Synthesized Probe
  source 1..120: mol_type = other DNA
gcctcacttatttccttccttcctccttccttccttctttccttccttcctttcctttccttttctttccttccttcctttctttccttccctttctttctctctctctttctctctctg

SEQ ID NO: 20819 - DNA, 120 bp, synthetic construct
  misc_feature 1..120: note = Artificially Synthesized Probe
  source 1..120: mol_type = other DNA
ttcattttcaaatattgtcatcactccaacaagaaactctgtacatgcttagcactgcttttcgttttcccagccctaggccaccattcatgtacctgctgtctctgggtttgcctgttt

SEQ ID NO: 20820 - DNA, 120 bp, synthetic construct
  misc_feature 1..120: note = Artificially Synthesized Probe
  source 1..120: mol_type = other DNA
aggttagatacaagagtcaaaacccaagaaattagctctgggcagactgagtttcgggtcaggcagggtgagatgtgccaagccaaaagtctcgatgatggtggagatcaggactcagag

SEQ ID NO: 20821 - DNA, 120 bp, synthetic construct
  misc_feature 1..120: note = Artificially Synthesized Probe
  source 1..120: mol_type = other DNA
taagggtttaacccttgccctgcctgcattatggagtatcctgcattaggatactcctccttttgaggagagcaaacagaaaagtttgtggatacaacctggtgactggttttttgtttg

SEQ ID NO: 20822 - DNA, 120 bp, synthetic construct
  misc_feature 1..120: note = Artificially Synthesized Probe
  source 1..120: mol_type = other DNA
tataaagtgacttttgagatgaaagggctaaggccatatgctaccatgctctaggattgccagtgatattttggacagtttatcaagcctaccactttccaggtgaaaaatggaaagatc

SEQ ID NO: 20823 - DNA, 120 bp, synthetic construct
  misc_feature 1..120: note = Artificially Synthesized Probe
  source 1..120: mol_type = other DNA
ctgcgaccggccaccctcccgtttttttaattggggttcattgatttgtatatgtataaatgtatatactccttatactctggatcctaatcctcggtagttttgttggtcttaatatct

SEQ ID NO: 20824 - DNA, 120 bp, synthetic construct
  misc_feature 1..120: note = Artificially Synthesized Probe
  source 1..120: mol_type = other DNA
atggaccagcttggtactgaataaatttgagtaaaccccgggtgactgggagggtcctggtcctgcccggtggaggctgcagcttcctctgaaggatggcattgggaagacttccatttt

SEQ ID NO: 20825 - DNA, 120 bp, synthetic construct
  misc_feature 1..120: note = Artificially Synthesized Probe
  source 1..120: mol_type = other DNA
tcagggcaaatatttaggctaaattgtgagagctaagaacataaagtacattgatttattttttatggctagtagatatttaagaatgttagcacaggtgtttgaataaattttgtttct

SEQ ID NO: 20826 - DNA, 120 bp, synthetic construct
  misc_feature 1..120: note = Artificially Synthesized Probe
  source 1..120: mol_type = other DNA
ctgatccaatctaatgctgccttctccccaaacccaaccagaccctgcttgtaatttggactttggactgatcctctccctgagcccaggttgaacttccttatttgtatttttttgaga

SEQ ID NO: 20827 - DNA, 120 bp, synthetic construct
  misc_feature 1..120: note = Artificially Synthesized Probe
  source 1..120: mol_type = other DNA
ttttcaatacgttctatcacccagaacagaaagtgtgtccccatgaaacagcaactccccacttcccctccccacaggtcttagtaacctccagtgtattttctgtctctatggatttag

SEQ ID NO: 20828 - DNA, 120 bp, synthetic construct
  misc_feature 1..120: note = Artificially Synthesized Probe
  source 1..120: mol_type = other DNA
gccttttggctattgtgactaatgtttgttggaacattggcatgcaagtatctatttgaatccttgtttttatttcctttgggtgtgtatctcaaagtggaattcctcggtcatgtggta

SEQ ID NO: 20829 - DNA, 120 bp, synthetic construct
  misc_feature 1..120: note = Artificially Synthesized Probe
  source 1..120: mol_type = other DNA
gtcacgtctagtgctttgctggccatctttggcttctagttgcgtcattgaaacttctgctttcatcttccagatttccccttttaataaaacgttacttaaattggattagggaccatg

SEQ ID NO: 20830 - DNA, 120 bp, synthetic construct
  misc_feature 1..120: note = Artificially Synthesized Probe
  source 1..120: mol_type = other DNA
gttttggctattctgggcctcctgcaattctatatgaacttaaagatcagagtttccatgtctgtcaaaaaggttgttggaattttctttttttttccttttttttttttcttttttttg

SEQ ID NO: 20831 - DNA, 120 bp, synthetic construct
  misc_feature 1..120: note = Artificially Synthesized Probe
  source 1..120: mol_type = other DNA
caccattgggtatgacggtagctgtgggtttttcagaagtaccttttctcatgttgagaaagtttatttctattcctagtttacgatttttaaaaattatgatgcatggtggcttgtgcc

SEQ ID NO: 20832 - DNA, 120 bp, synthetic construct
  misc_feature 1..120: note = Artificially Synthesized Probe
  source 1..120: mol_type = other DNA
ggtggagcagtcttctctaaactcccccggggaaagggagactccctttcccggtctgctaagtagtgggtgcttttccttggcactgacgctacctctagaccacggtccgcttggtaa

SEQ ID NO: 20833 - DNA, 120 bp, synthetic construct
  misc_feature 1..120: note = Artificially Synthesized Probe
  source 1..120: mol_type = other DNA
ttcatttctgatgttagttatttgtgtccaggctaactttggagcccaactttaacctgacttcaacctccaccttataccgtgataccatcccaacttgacctctgacatctgaccctt

SEQ ID NO: 20834 - DNA, 120 bp, synthetic construct
  misc_feature 1..120: note = Artificially Synthesized Probe
  source 1..120: mol_type = other DNA
tgaccaaacgcccttggctctaacctgacttctaatcgcatcctgtaacctctgactttagtgatcttgacttctgtctgctgctatagactgaacaattattgcctggcatctaacctt

SEQ ID NO: 20835 - DNA, 120 bp, synthetic construct
  misc_feature 1..120: note = Artificially Synthesized Probe
  source 1..120: mol_type = other DNA
cctctgttcctgtatttttgcgtgtttttctctctcggcacctttccagtgtccctgggtcactctcttggtctcctttgagccttttgtactctcgccttcgtctttcttcttttttgc

SEQ ID NO: 20836 - DNA, 120 bp, synthetic construct
  misc_feature 1..120: note = Artificially Synthesized Probe
  source 1..120: mol_type = other DNA
cctgaccagaaattaaaagggacacttcatgaaaaatgacaagtgaccccaaacagattatgttccaaaagtttacttggaagctgaaacatgtttttcccataggaaattatcagatgc

SEQ ID NO: 20837 - DNA, 120 bp, synthetic construct
  misc_feature 1..120: note = Artificially Synthesized Probe
  source 1..120: mol_type = other DNA
tttggcaaaaaagtcaaaaggttaccctttgattatggtcccgaagcaaagggtaatcttgtgaagcaagtgacgctccagaaaacagatggagggcaagaactgaatacaaagcattta

SEQ ID NO: 20838 - DNA, 120 bp, synthetic construct
  misc_feature 1..120: note = Artificially Synthesized Probe
  source 1..120: mol_type = other DNA
tgtaagggattacagtaaaagatattctattgtgcaccatgcaagatgcagaaaataatggtttacaaataatgttaagcaaccaaggcaataatggttttcctttcattctggttttcc

SEQ ID NO: 20839 - DNA, 120 bp, synthetic construct
  misc_feature 1..120: note = Artificially Synthesized Probe
  source 1..120: mol_type = other DNA
tgaggcactgcgcccagcctgattgctatcgttattagcactgcataaaattaaaggttttgtttgttggctttgttaataatactgtcacctctaaactcttactcaaaaagactactt

SEQ ID NO: 20840 - DNA, 120 bp, synthetic construct
  misc_feature 1..120: note = Artificially Synthesized Probe
  source 1..120: mol_type = other DNA
ttaaagataatacgaacattccattaggattctgttacctctaactccatcctatctgcctatttgcctccactgcaatggctgcaaaaatacaactaacacctagcagaccaaggatac

SEQ ID NO: 20841 - DNA, 120 bp, synthetic construct
  misc_feature 1..120: note = Artificially Synthesized Probe
  source 1..120: mol_type = other DNA
gtaagggctttagatcagcagttcgcaactctttacaaacctcagtacatttaatggatgacttttaaacttgtgatgttctcattggttcaaagataaagtcctgcaattagacaagct

SEQ ID NO: 20842 - DNA, 120 bp, synthetic construct
  misc_feature 1..120: note = Artificially Synthesized Probe
  source 1..120: mol_type = other DNA
aataaaatcaatgccttacgtcaataagctcatagtcatctttggcatataagtgtctcagtaggtaccaacgtgcagttgatgcaatagatttgggatacccaggctgatataccactc

SEQ ID NO: 20843 - DNA, 120 bp, synthetic construct
  misc_feature 1..120: note = Artificially Synthesized Probe
  source 1..120: mol_type = other DNA
tcacactgttggtgcctcctaacacagtgaagaacaaaaactccaagaccttcttcactggaaatgctatcatgccaaacccctcatgccctataaatatgtatcaaattgcctttttaa

SEQ ID NO: 20844 - DNA, 120 bp, synthetic construct
  misc_feature 1..120: note = Artificially Synthesized Probe
  source 1..120: mol_type = other DNA
aagcttgtaaaagaacagccagtggacaaaagcaaagcttcaaggcctcagttgtagcctcttgaaccaaagatggccagtgatcattggaaatgttagcctataaaaatataagacaaa

SEQ ID NO: 20845 - DNA, 120 bp, synthetic construct
  misc_feature 1..120: note = Artificially Synthesized Probe
  source 1..120: mol_type = other DNA
tggcatattaaacaaagtgatcagaatgcacttctgttttcttttcccactacctgttcaacatttatttgagagatactttttctgtgtccctggatgtaaattacattaggccccatg

SEQ ID NO: 20846 - DNA, 120 bp, synthetic construct
  misc_feature 1..120: note = Artificially Synthesized Probe
  source 1..120: mol_type = other DNA
cagcaacataagctgtggggcccagtgcaaaataaagtgtagggccctttgttgaaaaattacgaagagtttcaagatagcaactacagaacattaaatcaagtatgatgccctgtgtaa

SEQ ID NO: 20847 - DNA, 120 bp, synthetic construct
  misc_feature 1..120: note = Artificially Synthesized Probe
  source 1..120: mol_type = other DNA
cctttgagtgtatactcagtaataggattgctgggtcaaatggtagctttaagttgagatatctacaaactgctttccacagtggctgaactaatttacatctccaccaacagtatataa

SEQ ID NO: 20848 - DNA, 120 bp, synthetic construct
  misc_feature 1..120: note = Artificially Synthesized Probe
  source 1..120: mol_type = other DNA
agggtctaatttcattcttctgcaaatgactagccagttgacccaatgcaatttattgaataggggagtcctttctccattgcttatttttgtcagccttgtcaaagatcagatggttgt

SEQ ID NO: 20849 - DNA, 120 bp, synthetic construct
  misc_feature 1..120: note = Artificially Synthesized Probe
  source 1..120: mol_type = other DNA
tgtctgccatttcagtcacttcagattggttaagaaccattgctggggaaccagtaggctacatttggaggtacagggacactctggctgcttgaattgccagagttcttgtgctgattc

SEQ ID NO: 20850 - DNA, 120 bp, synthetic construct
  misc_feature 1..120: note = Artificially Synthesized Probe
  source 1..120: mol_type = other DNA
ggaatgtcccatggctcaaggctgagttcaggttatactggaggattctatatgctacagcaatctatcttgatctgatatctcactttggaatctgatatctagtatcttagccaactt

SEQ ID NO: 20851 - DNA, 120 bp, synthetic construct
  misc_feature 1..120: note = Artificially Synthesized Probe
  source 1..120: mol_type = other DNA
aaaagagtgtctacttctccagttcacatattgaagggcatgttataggtactatgtgcagcttctgtggctcaccagttaccaaggtcataaagacctttgttatatacaaatatgggg

SEQ ID NO: 20852 - DNA, 120 bp, synthetic construct
  misc_feature 1..120: note = Artificially Synthesized Probe
  source 1..120: mol_type = other DNA
tttttcatgatcataattataacatgatcttaccatacagacttttaatgcaagtagtgctagtctcaacagacttgagagcttcccactccaactgccccgttgggatgccaattgtag

SEQ ID NO: 20853 - DNA, 120 bp, synthetic construct
  misc_feature 1..120: note = Artificially Synthesized Probe
  source 1..120: mol_type = other DNA
tgtcaattgtccccaaattaaactgtagattctaaacaatctcaattaagatcccagcagagctttgttgggtgagaattaacaatttacagtagaccctctccttaactgtggtttcag

SEQ ID NO: 20854 - DNA, 120 bp, synthetic construct
  misc_feature 1..120: note = Artificially Synthesized Probe
  source 1..120: mol_type = other DNA
aagggtgttgggacatctcccccgcagataaggtaggactactgcatttggaaatgcaaaagacctaagacaaacttgaaggagaacaaaaagttggaggttttaatgttaccacatatt

SEQ ID NO: 20855 - DNA, 120 bp, synthetic construct
  misc_feature 1..120: note = Artificially Synthesized Probe
  source 1..120: mol_type = other DNA
aagcaagaagatcaactgacagaggcctaggggaagcagttgggttgctagaactgttctgtatcttgatatgggaggtgttaaacaggtatgtcatatatagagtagtacttttaagat

SEQ ID NO: 20856 - DNA, 120 bp, synthetic construct
  misc_feature 1..120: note = Artificially Synthesized Probe
  source 1..120: mol_type = other DNA
ttccttgtattttaatatcaataagaacaaagcacacagtgatcattgtgcatttgtcactgtggataaccagagccacctgaaagagcagatgatctgttgattcaagcatcaatcctg

SEQ ID NO: 20857 - DNA, 120 bp, synthetic construct
  misc_feature 1..120: note = Artificially Synthesized Probe
  source 1..120: mol_type = other DNA
tttctttcttaacctcttaacaaaggtattcactctacatgtctttcttctaggcacagccttttcaagtactgcgagtaagaaaaatgacctattttccccatttccttaagctactgt

SEQ ID NO: 20858 - DNA, 120 bp, synthetic construct
  misc_feature 1..120: note = Artificially Synthesized Probe
  source 1..120: mol_type = other DNA
actgagtagattccagtcacccactcaacaatctccacagtcattctatgtgatccagaactttggaaaactgaagggatactggaaaatatagcattaagaaggaaccaatcagaaatc

SEQ ID NO: 20859 - DNA, 120 bp, synthetic construct
  misc_feature 1..120: note = Artificially Synthesized Probe
  source 1..120: mol_type = other DNA
catccatacacagtttttcaaagttacatgtgccacatgtaccatagactatcctgacaagtggcaggtttctgaaaagtttcatggcaggagtatttgtggctaaataactcaaagcct

SEQ ID NO: 20860 - DNA, 120 bp, synthetic construct
  misc_feature 1..120: note = Artificially Synthesized Probe
  source 1..120: mol_type = other DNA
aaaggataggaaagagacccctaacagtttacattcctaccatggactctgataattctagccataagacaacctcgtgacccttgcaggccctaaaactaacatagggagtacataata

SEQ ID NO: 20861 - DNA, 120 bp, synthetic construct
  misc_feature 1..120: note = Artificially Synthesized Probe
  source 1..120: mol_type = other DNA
caccattagtatttgagcactcctctggggtctgaggttgggcccatccaatctgccgctaacaccgcagctggcactcacttacatgtatcacattgttggcctggagactggtgtgct

SEQ ID NO: 20862 - DNA, 120 bp, synthetic construct
  misc_feature 1..120: note = Artificially Synthesized Probe
  source 1..120: mol_type = other DNA
aagagatttagacatctgaaaacatgaggaggcttagagatgcacaaatatttacaattccaaaagatgttctccatggcacactatagataacccatcaaaagtcaaagacaaagagag

SEQ ID NO: 20863 - DNA, 120 bp, synthetic construct
  misc_feature 1..120: note = Artificially Synthesized Probe
  source 1..120: mol_type = other DNA
gatagcaacaatgtatttgattatgtgtgcttacgtgtgtgtggatgtatacagactcgtatgcttatgtgtaagcaaaagagcaatgacataaaggacaataattaggattgttttact

SEQ ID NO: 20864 - DNA, 120 bp, synthetic construct
  misc_feature 1..120: note = Artificially Synthesized Probe
  source 1..120: mol_type = other DNA
gattaacagcttattctgaccaagattcccaggaggaatcatgggacaatttcaatgctggtttcagtaaaggactctttccaggtcacctttatcctaaaatgctggtaaagtctcaaa

SEQ ID NO: 20865 - DNA, 120 bp, synthetic construct
  misc_feature 1..120: note = Artificially Synthesized Probe
  source 1..120: mol_type = other DNA
gtttatcatcagcgtgacaggctgccattagcccagcccagatagcaggatcacctgaaaacaggaaatacacagtgataagtcttgttaaaatcaacatgttgcttaaaaactatcaaa

SEQ ID NO: 20866 - DNA, 120 bp, synthetic construct
  misc_feature 1..120: note = Artificially Synthesized Probe
  source 1..120: mol_type = other DNA
caaatggggactatttcctagaatttatgatgaaatctgattactatataaagaaaggcacatgacagccttagatctgggtttcaggtctagccgtgccactaattaatgtgtggtagt

SEQ ID NO: 20867 - DNA, 120 bp, synthetic construct
  misc_feature 1..120: note = Artificially Synthesized Probe
  source 1..120: mol_type = other DNA
agccactacacataactacagttatattcattttcattggactctaaggacaagtctcaaacaggcactcatctttgccactcagtcactgttttagcatcttatgggatgtctctgctt

SEQ ID NO: 20868 - DNA, 120 bp, synthetic construct
  misc_feature 1..120: note = Artificially Synthesized Probe
  source 1..120: mol_type = other DNA
tgatcaacagcctatatatgacacagttagctcaggtgaggccataactgtggcatttctaacagttaccacataagatacatccccatccttcaagaagctaactacacgtaaaaatat

SEQ ID NO: 20869 - DNA, 120 bp, synthetic construct
  misc_feature 1..120: note = Artificially Synthesized Probe
  source 1..120: mol_type = other DNA
gctgaactgcttcccatagccaactgatttaccgcagtgtacagtaatgccttctaaataagagaaaagatgttagccaattttcctgatagctccctctctttcaaactgactaaaaga

SEQ ID NO: 20870 - DNA, 120 bp, synthetic construct
  misc_feature 1..120: note = Artificially Synthesized Probe
  source 1..120: mol_type = other DNA
attgacaagatattaaggacttaccaggccaaaactgaaagggaaaactggaattcagagagacaagtgagcaaggaagccgcttctgccatttgcaaatgctaacaatttctttctttt

SEQ ID NO: 20871 - DNA, 120 bp, synthetic construct
  misc_feature 1..120: note = Artificially Synthesized Probe
  source 1..120: mol_type = other DNA
aaagccaccaagaatgaaaatcagtaggaataacgaacaagactcacagatgtcaaacaagtctgtgggtcttgcagacttcagatgttggaattattagtcgtggcaagtgttcaaaac

SEQ ID NO: 20872 - DNA, 120 bp, synthetic construct
  misc_feature 1..120: note = Artificially Synthesized Probe
  source 1..120: mol_type = other DNA
ctgaaaattactaaaaccatcaatctagacagtaccagacaacagactaagaatattacaaacttgggaattaagagctttaatagtaaaacaaagtttgggccttaacctgactaaggg

SEQ ID NO: 20873 - DNA, 120 bp, synthetic construct
  misc_feature 1..120: note = Artificially Synthesized Probe
  source 1..120: mol_type = other DNA
ttaagagatagcaatttccctgactgaagcagttaaaagcatcaatgacttttcacagaccaacaaaagccaaacttattttctggtcattacacctaagtgatatggtttggacctgtg

SEQ ID NO: 20874 - DNA, 120 bp, synthetic construct
  misc_feature 1..120: note = Artificially Synthesized Probe
  source 1..120: mol_type = other DNA
gtaccaggaatcacaagttagaactgagtattctccaaagcggaaattctagagtgtagtatcactagagacaaagactatttggttttcatccctaaattcctaccagaagggttaaac

SEQ ID NO: 20875 - DNA, 120 bp, synthetic construct
  misc_feature 1..120: note = Artificially Synthesized Probe
  source 1..120: mol_type = other DNA
gtaactctttttacaataagagttaatacatatgtgtccaaatatggaagtatgtcagtcagtgtcatgtctagcaaataaccacatggctaatgggtacaactaaaaaagccaaaaagc

SEQ ID NO: 20876 - DNA, 120 bp, synthetic construct
  misc_feature 1..120: note = Artificially Synthesized Probe
  source 1..120: mol_type = other DNA
acaaggaaatgactgtaatggcacaggataggacaaaggcattacatcaaataaacaaatgtaaagtttatcctatagaactggttctcaaccagtaccatctaaccatctccatccccc

SEQ ID NO: 20877 - DNA, 120 bp, synthetic construct
  misc_feature 1..120: note = Artificially Synthesized Probe
  source 1..120: mol_type = other DNA
taccatttaaatagcaatgtcttggctacatccgtttttccttgtttatattcagttattgccagagctgtcaagatatgggctttgtcttgctccgattcaacaatagacaaggctctc

SEQ ID NO: 20878 - DNA, 120 bp, synthetic construct
  misc_feature 1..120: note = Artificially Synthesized Probe
  source 1..120: mol_type = other DNA
ctgctctctttataaagccccttcatgaataaagccaatgcaaaacctatgatgtcttctaacacttcaaggggtgttgacttaaaagcctggatagctttatcatattcaccagtggaa

SEQ ID NO: 20879 - DNA, 120 bp, synthetic construct
  misc_feature 1..120: note = Artificially Synthesized Probe
  source 1..120: mol_type = other DNA
cttgtttttgcctaaagataaaaggaacttgtataagctcaactgccatcatctgaagagaaacactatatctttgagattcttctttctggtatccatcactataacctgaatctgttt

SEQ ID NO: 20880 - DNA, 120 bp, synthetic construct
  misc_feature 1..120: note = Artificially Synthesized Probe
  source 1..120: mol_type = other DNA
aattgaaaggagaggcagtcagaacagttcaatcttccaattttggatataattcaggtacacaattataaaagaaaataactggctacctaaggtctgccaggtagctccttaaaagat

SEQ ID NO: 20881 - DNA, 120 bp, synthetic construct
  misc_feature 1..120: note = Artificially Synthesized Probe
  source 1..120: mol_type = other DNA
cactggggttggttaccattataggtataggaaactgttaacagagcctgtttctatggaaattatgtatcctacatgtaccagtattctaggaactagtcagcatatcagcagtcccat

SEQ ID NO: 20882 - DNA, 120 bp, synthetic construct
  misc_feature 1..120: note = Artificially Synthesized Probe
  source 1..120: mol_type = other DNA
tcaaccatcaaatagttgtttaaagcagaaaacagcagtgatgatcagtcaagaaagtggtacatacacccaagtgactgtggagatgccattttaagcctaaggtgtaaccaatgttag

SEQ ID NO: 20883 - DNA, 120 bp, synthetic construct
  misc_feature 1..120: note = Artificially Synthesized Probe
  source 1..120: mol_type = other DNA
ctggcccttttccctactttaattttctttcttagcaattactatcatcacagatgtttattagcttatcatgtctcttcagccacagaacacatgctccatgagaacagggcctttgtc

SEQ ID NO: 20884 - DNA, 120 bp, synthetic construct
  misc_feature 1..120: note = Artificially Synthesized Probe
  source 1..120: mol_type = other DNA
cctcatcttcctcctgcatctatcacaattaaatgtagtttacctttggtatgcatttgctgcttcctttttcagttgtagatgttcgtttaagtaacccaacattgtgaaagctggggc

SEQ ID NO: 20885 - DNA, 120 bp, synthetic construct
  misc_feature 1..120: note = Artificially Synthesized Probe
  source 1..120: mol_type = other DNA
taagatcaacaactaaggttaaaatcaaatagtcaaagttattcttgaaaaatccttaaagtcacaaaagaaagagtcaacaaaattgagtcataataagcatgagggccaggcacagtg

SEQ ID NO: 20886 - DNA, 120 bp, synthetic construct
  misc_feature 1..120: note = Artificially Synthesized Probe
  source 1..120: mol_type = other DNA
ccaggcaccctgcataacattttgtacaaatcatcttgtttaaacactaagcaataaacactttcctgttgagaattttggtagcatgcccaaggtttcagtcaaggctactaagtggtg

SEQ ID NO: 20887 - DNA, 120 bp, synthetic construct
  misc_feature 1..120: note = Artificially Synthesized Probe
  source 1..120: mol_type = other DNA
gtcactatgataaaacacagcgaagaacatattgaaattatttgctccaatcctaacgagaagaatcaaacgggataaaatgcagaaaacagagccttgcctgatgggctggctttccct

SEQ ID NO: 20888 - DNA, 120 bp, synthetic construct
  misc_feature 1..120: note = Artificially Synthesized Probe
  source 1..120: mol_type = other DNA
aaaaattaaaaagtgattctgataatcatctaagatctactgagctagagcagtactacgcgaagtgaggtcccttggaccagcctcataatcatcacttgggagcagttagaatgcaaa

SEQ ID NO: 20889 - DNA, 120 bp, synthetic construct
  misc_feature 1..120: note = Artificially Synthesized Probe
  source 1..120: mol_type = other DNA
aaaggccccccaagtcagagttaaatccttacaagctacgtggccttaggaatgacacttaggagctctgagtttctatttccacaactataaagagagtataacatcaaccatatctca

SEQ ID NO: 20890 - DNA, 120 bp, synthetic construct
  misc_feature 1..120: note = Artificially Synthesized Probe
  source 1..120: mol_type = other DNA
aaagccaaaatgtaaagcatccaagaaaggttaaatttaagctgctagagagtactaactgtctcccttgtgctcatccactccacctccaacactatctacataggacttctcttacat

SEQ ID NO: 20891 - DNA, 120 bp, synthetic construct
  misc_feature 1..120: note = Artificially Synthesized Probe
  source 1..120: mol_type = other DNA
gatcattcatgttgctgcctgtttctgctagatgttgtgcttggcgataataattaattccaaggtcacaccatgtattagatgtagacatcagttttaatgcacgaccataacacctac

SEQ ID NO: 20892 - DNA, 120 bp, synthetic construct
  misc_feature 1..120: note = Artificially Synthesized Probe
  source 1..120: mol_type = other DNA
taaactcaggtttttgcttttagatcttctctcatgctgtgtagttttgactacatccccacaaagctcatgagttgggaactcaatctccaggacaacaatgttgagaagtaggacctt

SEQ ID NO: 20893 - DNA, 120 bp, synthetic construct
  misc_feature 1..120: note = Artificially Synthesized Probe
  source 1..120: mol_type = other DNA
tcgactattgtgaatagtgctgcaataaacatgagggtacagatgtctctttgatataatgattttctttcctttggataagttcccagtggtggggttgctggatcatacggtagttct

SEQ ID NO: 20894 - DNA, 120 bp, synthetic construct
  misc_feature 1..120: note = Artificially Synthesized Probe
  source 1..120: mol_type = other DNA
ccaccttctaatgggttatgttacatgttatccagaataacatttcctaggctcagagaggcagtatttatagctaaggtactgtcacccaaaggttcacatttactcttaaatagcagt

SEQ ID NO: 20895 - DNA, 120 bp, synthetic construct
  misc_feature 1..120: note = Artificially Synthesized Probe
  source 1..120: mol_type = other DNA
actagcagactgctccttccttcctattctttcctatgcatctaggatgccagccactactaagagcagaagaaattatatctgtttccccaagtgcaaaattaatacaacatgtatgtt

SEQ ID NO: 20896 - DNA, 120 bp, synthetic construct
  misc_feature 1..120: note = Artificially Synthesized Probe
  source 1..120: mol_type = other DNA
gctactaaaaataaattaccttttaaagcaggcacataatcttctttctttttaatgatcatctggtattgagctacagcctccttatatttgcctaggatttgctgtattgctgcaacc

SEQ ID NO: 20897 - DNA, 120 bp, synthetic construct
  misc_feature 1..120: note = Artificially Synthesized Probe
  source 1..120: mol_type = other DNA
taccaggacaggtgtccatctcagtttgtcacatcagcccataatcccccaccagcaatccttttaccaaacagaaataccacagttaaaatatggaaacaataggcatgctttaaatat

SEQ ID NO: 20898 - DNA, 120 bp, synthetic construct
  misc_feature 1..120: note = Artificially Synthesized Probe
  source 1..120: mol_type = other DNA
gcagctccagattcagcatcagtgtcatctaattcaaaggctttcctataacatccacgagctctgtttttatctcccactacgtctctataataatgacctaaatagcagaaaactttg

SEQ ID NO: 20899 - DNA, 120 bp, synthetic construct
  misc_feature 1..120: note = Artificially Synthesized Probe
  source 1..120: mol_type = other DNA
agagcctttgttttatcttttcttgtctcttcacccatgaaccagtatgttaatccaagttggtaatgatattctgcaacttcggtatctttctcaagagctctctgaaaactaagccac

SEQ ID NO: 20900 - DNA, 120 bp, synthetic construct
  misc_feature 1..120: note = Artificially Synthesized Probe
  source 1..120: mol_type = other DNA
agatagtcctttttggtgaaatgaatcaaagcctcaagggcatgaacttcagctaggtcagggtaagaagagagaaggtcttccataatctataaagtagacacctgtcaattctatagc

SEQ ID NO: 20901 - DNA, 120 bp, synthetic construct
  misc_feature 1..120: note = Artificially Synthesized Probe
  source 1..120: mol_type = other DNA
gcccagcctgattgcctttgtgtgatgttagtagccattaacccttgatgcctagatctattaattcactggggattgcaaaatggtgattttctgtcattttctcttattagacagaat

SEQ ID NO: 20902 - DNA, 120 bp, synthetic construct
  misc_feature 1..120: note = Artificially Synthesized Probe
  source 1..120: mol_type = other DNA
gtaaattttgtggtaggcagagaatggttgttgcctggttgattggaaactaactagagttgaagaaaaaaacttgacaagtctacctgatcaagcgtacgaattgcttcctctgaagag

SEQ ID NO: 20903 - DNA, 120 bp, synthetic construct
  misc_feature 1..120: note = Artificially Synthesized Probe
  source 1..120: mol_type = other DNA
tatatgagagaaattaagaactcatgtgtcttggacacaccagaaacttccttgttacaaagacagaggacctccacacccaagcctaaactgactatgtcaatattccaaatgcaggaa

SEQ ID NO: 20904 - DNA, 120 bp, synthetic construct
  misc_feature 1..120: note = Artificially Synthesized Probe
  source 1..120: mol_type = other DNA
gctcaggctatttcacagattcatctctgcctaaaatgttcttcccattcccttcaaccacctacctggcttgtatttaccattcagatctataatttgaatgtaggttcttccagaaac

SEQ ID NO: 20905 - DNA, 120 bp, synthetic construct
  misc_feature 1..120: note = Artificially Synthesized Probe
  source 1..120: mol_type = other DNA
tccagcatccaaggatcacaagataggcgggttactcatcaggacactgcacaaagacttagtcacattcctcttaagtctacaaatttaccagtacatttccacatttttctaaaacta

SEQ ID NO: 20906 - DNA, 120 bp, synthetic construct
  misc_feature 1..120: note = Artificially Synthesized Probe
  source 1..120: mol_type = other DNA
atatatgacctttactattagtcttataacatgtatattctgcccttattgcctctgtggctaaatggtaacctctggagagtacagaccagcatggcatctgatatgtggtaggtgttc

SEQ ID NO: 20907 - DNA, 120 bp, synthetic construct
  misc_feature 1..120: note = Artificially Synthesized Probe
  source 1..120: mol_type = other DNA
tttctcaaaaacgcaagccagatttggggctgatgaatgctcaaattccaagggtagagggtattctgaagaggtccgtgttggatgctgagtaataactatgaaattctgtttcttaaa

SEQ ID NO: 20908 - DNA, 120 bp, synthetic construct
  misc_feature 1..120: note = Artificially Synthesized Probe
  source 1..120: mol_type = other DNA
gggcggctcagacttcagagaccttacagattctcagaagttctcaatacactgaaagtcgggtttagaggagcagtaaaaagaaaaaagcacagattcctattgtcctacattaactat

SEQ ID NO: 20909 - DNA, 120 bp, synthetic construct
  misc_feature 1..120: note = Artificially Synthesized Probe
  source 1..120: mol_type = other DNA
cttaataaaaagcctcacaatcataaactcagttggctcaatctgtcaagacagaccataataatctcacttctgaaatgctctttccctgtcgtcttgtgttgcttctcgtcagagtcc

SEQ ID NO: 20910 - DNA, 120 bp, synthetic construct
  misc_feature 1..120: note = Artificially Synthesized Probe
  source 1..120: mol_type = other DNA
agccaccgcgcccggccagtaacagcattttttaattcagacaccaggaaaaaaaaaaaagtaaaagaggactttaaaggagagttaaaatgaggagaactgagataggtgcaatggtca

SEQ ID NO: 20911 - DNA, 120 bp, synthetic construct
  misc_feature 1..120: note = Artificially Synthesized Probe
  source 1..120: mol_type = other DNA
ccattcctaaaaaatgcacctagctccacatctctgctcatgccagctggaatatatttcacctactcctgtttacctagtttctataaaaaattcaagaccccctccaatttccaccat

SEQ ID NO: 20912 - DNA, 120 bp, synthetic construct
  misc_feature 1..120: note = Artificially Synthesized Probe
  source 1..120: mol_type = other DNA
agagatatgactgaactgttatgaaatcacttctcttatgcagtattagctgactctgaagaacattccatcacttctcttatgcagtattaactggctttgaaggccaacaggccttct

SEQ ID NO: 20913 - DNA, 120 bp, synthetic construct
  misc_feature 1..120: note = Artificially Synthesized Probe
  source 1..120: mol_type = other DNA
gctcaattttttccacaattgaatctatgcacagataaatcatgttatcacacacaaaaaagaaatcttattctcacatttttatccccagctcttaggaccctgcctgacacataatag

SEQ ID NO: 20914 - DNA, 120 bp, synthetic construct
  misc_feature 1..120: note = Artificially Synthesized Probe
  source 1..120: mol_type = other DNA
cagtggctcacgcctgtaatcccaacactttggggggctgaagtgggcgggtcacttgaggtcaggagtttgagatcagcctggccaacatggtgaaaccccatctatactgaaaataca

SEQ ID NO: 20915 - DNA, 120 bp, synthetic construct
  misc_feature 1..120: note = Artificially Synthesized Probe
  source 1..120: mol_type = other DNA
ttgctgagtttcattattctggtcctctgtactttcagccaggaactgagtcaattttctccatagttgatgaagctcttcattttctgcaccttgttcctgccgtgtttttatcaactt

SEQ ID NO: 20916 - DNA, 120 bp, synthetic construct
  misc_feature 1..120: note = Artificially Synthesized Probe
  source 1..120: mol_type = other DNA
cgcgcccagcccatctattattaaaagaagtcagaaaatcattcaccaacctctaggtgtttcttttcttggtaatatagatccacaagtttcttgcagacatcacaccacttctgcttg

SEQ ID NO: 20917 - DNA, 120 bp, synthetic construct
  misc_feature 1..120: note = Artificially Synthesized Probe
  source 1..120: mol_type = other DNA
atcagatatcctaaaccactcagtccattataaaagcagcaatttctctaactgtgttaccagatatcctcaagttcttattcacatgaacctgagacaaacaggttcacaccctccagg

SEQ ID NO: 20918 - DNA, 120 bp, synthetic construct
  misc_feature 1..120: note = Artificially Synthesized Probe
  source 1..120: mol_type = other DNA
aaatgcctccccatgctctttgagaatactgggtataaaaagaacaataactactcaatcatcctgcctgtctccatactgctactggtcaaattcacaaagctgttctccatctcattt

SEQ ID NO: 20919 - DNA, 120 bp, synthetic construct
  misc_feature 1..120: note = Artificially Synthesized Probe
  source 1..120: mol_type = other DNA
tcctaacaaaccacaacaatgatgtaactaccaaagttaagctctaaacactggggccttattaatgcttatgttcccaacaccaggtacaatggctggcacttaacagctgaacaaaat

SEQ ID NO: 20920 - DNA, 120 bp, synthetic construct
  misc_feature 1..120: note = Artificially Synthesized Probe
  source 1..120: mol_type = other DNA
ccatatttttaacctttcttttaaccacaccaagttctgcctcaatgaaaacatggctaattcccctatacatcctacagattgcagatgacttcttttacagctcacatgccacaggcc

SEQ ID NO: 20921 - DNA, 120 bp, synthetic construct
  misc_feature 1..120: note = Artificially Synthesized Probe
  source 1..120: mol_type = other DNA
actttgccaagaaaatagaagccattagagaagaaagcttttcccaacaccaaatctataagcccaacactgtatggatgggcacctatcttctctcctgctaagatggaagaaggatta

SEQ ID NO: 20922 - DNA, 120 bp, synthetic construct
  misc_feature 1..120: note = Artificially Synthesized Probe
  source 1..120: mol_type = other DNA
ctgggtcccaaccccacaagaagctaagttccatgcaggcaagaattttttttttcactgccgcatccccaggacctagtatcttaaattatagatgatcaattaataagtgttgaaatt

SEQ ID NO: 20923 - DNA, 120 bp, synthetic construct
  misc_feature 1..120: note = Artificially Synthesized Probe
  source 1..120: mol_type = other DNA
taggcttcagatgctcaagggagtaaaatgtaccaaaaagatgaatcactgacatggtacactgacagtcctttatatccaaagaagaagctaacacagaagtatgagaccaaagaagtt

SEQ ID NO: 20924 - DNA, 120 bp, synthetic construct
  misc_feature 1..120: note = Artificially Synthesized Probe
  source 1..120: mol_type = other DNA
gctacaatggaaccctctattctcttccaattccttcttcatttgatgcaacatttaacacaatacgctagcactgaggtcctctctcactcatgcatacacacatatatgtacgtaagt

SEQ ID NO: 20925 - DNA, 120 bp, synthetic construct
  misc_feature 1..120: note = Artificially Synthesized Probe
  source 1..120: mol_type = other DNA
caacaactgcacttaaaaagagttagaaagtgacagtcatgccataaaggcaatgatattcctcaaggacaacatatataggtatgatatatatgtccccagttgaggctatgaaacctt

SEQ ID NO: 20926 - DNA, 120 bp, synthetic construct
  misc_feature 1..120: note = Artificially Synthesized Probe
  source 1..120: mol_type = other DNA
agaaaaaaaagtacaaacttgactatttcactggcttctttagccctgctaacacttggctgccctcctcacccaatctagttttatcactcagtcacttcaactctgttcttacaaagt

SEQ ID NO: 20927 - DNA, 120 bp, synthetic construct
  misc_feature 1..120: note = Artificially Synthesized Probe
  source 1..120: mol_type = other DNA
gtaacccaccataagaagcatctgtattcctcaagacagctatcatcaaacatgagtaccctcttcatattagttactacactacatgaatactagagtacagcctacaacagggatcac

SEQ ID NO: 20928 - DNA, 120 bp, synthetic construct
  misc_feature 1..120: note = Artificially Synthesized Probe
  source 1..120: mol_type = other DNA
ctgccaaggggagaaagaagaaaaagatgtattcttgtaagcctgtcatcagagtacatgtcctgtggaaacaaggctgtagagagtaagcacagtttatggaatcagacacaaaattaa

SEQ ID NO: 20929 - DNA, 120 bp, synthetic construct
  misc_feature 1..120: note = Artificially Synthesized Probe
  source 1..120: mol_type = other DNA
gggacagaaatctgcttcttccagaactctccaaaggaattcaacagtcaaaagagaccggtttttattctgcagcaaaacaatgatattctgaacctacgtcaactaactgaacatgtc

SEQ ID NO: 20930 - DNA, 120 bp, synthetic construct
  misc_feature 1..120: note = Artificially Synthesized Probe
  source 1..120: mol_type = other DNA
ccaaagaagtgccttcgtttatttacagggcttaggaaaggaaaaaagctctacaaaagggaaatttcaaaatagggcttcagcaggggcccaggtggagtgagtagttttgataaggtc

SEQ ID NO: 20931 - DNA, 120 bp, synthetic construct
  misc_feature 1..120: note = Artificially Synthesized Probe
  source 1..120: mol_type = other DNA
ccatcctgactaggaccctcggttgtatgtaggtatttgtgtcaaacacaaaaggtacccagatgctgagtgctaatcatgtggacttctggaaaagggtggatttctgtgataagctta

SEQ ID NO: 20932 - DNA, 120 bp, synthetic construct
  misc_feature 1..120: note = Artificially Synthesized Probe
  source 1..120: mol_type = other DNA
gataggaatctactgaatgaatggagaaaaggaccacatatggtgaccggtttcacggagcacttgtgctgatctgtgtggctcaaaaaacaaaacaaacagaaaggagcatttggcaag

SEQ ID NO: 20933 - DNA, 120 bp, synthetic construct
  misc_feature 1..120: note = Artificially Synthesized Probe
  source 1..120: mol_type = other DNA
ttccattactcctcaggagccaggagaggacggctggatcagggaggggggttcaccttgttgtctcttcaactaaaagcagtgaggctctggcctctgctgctttttcttttttttttt

SEQ ID NO: 20934 - DNA, 120 bp, synthetic construct
  misc_feature 1..120: note = Artificially Synthesized Probe
  source 1..120: mol_type = other DNA
agctgatcatggagggagagaacaaccaaccacacactgactggtcacccctgaagttcacagccactaccctgtagaggccccgaggttgccggcaagcccagtatacttccatctaaa

SEQ ID NO: 20935 - DNA, 120 bp, synthetic construct
  misc_feature 1..120: note = Artificially Synthesized Probe
  source 1..120: mol_type = other DNA
cactacgagtatgccacggaaccgctctaagcctttgtttccacacctgtgaaatggagctaatagtcttacctacttcaaaatattactggggaaaggaattgatactgtgtgtaaagc

SEQ ID NO: 20936 - DNA, 120 bp, synthetic construct
  misc_feature 1..120: note = Artificially Synthesized Probe
  source 1..120: mol_type = other DNA
aaattgcttttctgctacaacaagatctatcccatcatgtcattagtaaatgaaacagtctgcccaaataaggagaatccacatatgcccagaaatccaagctgggctatggcacacgcc

SEQ ID NO: 20937 - DNA, 120 bp, synthetic construct
  misc_feature 1..120: note = Artificially Synthesized Probe
  source 1..120: mol_type = other DNA
atacttaaaggtaggattagaattaggatctacaaatcagcgatcgcacaaacattttgggccagtgtatatcacaaacgttatcagtgcctacctgtgtgactggttctgtcctaagta

SEQ ID NO: 20938 - DNA, 120 bp, synthetic construct
  misc_feature 1..120: note = Artificially Synthesized Probe
  source 1..120: mol_type = other DNA
cagtcagactgcctgtctgtgctgctagcagtgtatcgaatatgtactgtgccaaagaattgcacacatctcattgtcctcaaaatgaccactgtagtataccataatactataattctt

SEQ ID NO: 20939 - DNA, 120 bp, synthetic construct
  misc_feature 1..120: note = Artificially Synthesized Probe
  source 1..120: mol_type = other DNA
aaaaaataaaaataaaaaatacccaaaacactaggctctgcaaaagaggggagtgaagaagaaggcgagagtttaaaaactccgtattgaatactatgttcactatttgggtgacgggct

SEQ ID NO: 20940 - DNA, 120 bp, synthetic construct
  misc_feature 1..120: note = Artificially Synthesized Probe
  source 1..120: mol_type = other DNA
aatacaaaaaattagccagggttggcggcatgcacccgtagtcccagctactccaggaggctgaggcaggagaattgcttgaacccgggaggcgggggttgcagtgagccgagattgcgc

SEQ ID NO: 20941 - DNA, 120 bp, synthetic construct
  misc_feature 1..120: note = Artificially Synthesized Probe
  source 1..120: mol_type = other DNA
caagttattctgtttaacatggaggacaagaaagtacaaacactggctatctattccccgctcacacacccagctttggcggcataaggagttgcctggaaaatgccacgatggaaccag

SEQ ID NO: 20942 - DNA, 120 bp, synthetic construct
  misc_feature 1..120: note = Artificially Synthesized Probe
  source 1..120: mol_type = other DNA
aaacacaaactgtccaccaggctgcccgttaccccttcccaggcccttagggatccgggtgccagactattaacctctgttcccagtgacaaaagtaaatccatttacatacaaattttt

SEQ ID NO: 20943 - DNA, 120 bp, synthetic construct
  misc_feature 1..120: note = Artificially Synthesized Probe
  source 1..120: mol_type = other DNA
cagagacttgtgcaccctatagtcagtgaagcatagagacggggtagggaggtcttgtcacacgatagagggcatcggactccgcttcaacgaaacacttgaagctagaaactctgggaa

SEQ ID NO: 20944 - DNA, 120 bp, synthetic construct
  misc_feature 1..120: note = Artificially Synthesized Probe
  source 1..120: mol_type = other DNA
ttgtctgcctcactctgaggacaacatgcctggtaaaaaccaggtgatgaaatatttgctaagtgaataaaaactgaataaataaattcctgctcccaaagcctcacagagccttagaaa

SEQ ID NO: 20945 - DNA, 120 bp, synthetic construct
  misc_feature 1..120: note = Artificially Synthesized Probe
  source 1..120: mol_type = other DNA
atgttagccaggatggtcttgatcttctgaccttgtgatccgcccgcctaggcctcccaaagtgctgggattacaggtgtgagccaccgcacccagccccttctttttgttttttgagac

SEQ ID NO: 20946 - DNA, 120 bp, synthetic construct
  misc_feature 1..120: note = Artificially Synthesized Probe
  source 1..120: mol_type = other DNA
acgcccagcctcttaattttcgtggttgtttcactgaagcctttcacttcaaagaggctcaatataagcctctttggttatgtttaaaggtaaaagtagaagacaaggccttaattttcc

SEQ ID NO: 20947 - DNA, 120 bp, synthetic construct
  misc_feature 1..120: note = Artificially Synthesized Probe
  source 1..120: mol_type = other DNA
agctgggatcacaagtatgtgccaccacgcccggctaatttattttttatttttagaagcaaggtcttggccaggcgcggtggctcacatctgtaatcccagcactttgggaggctgagg

SEQ ID NO: 20948 - DNA, 120 bp, synthetic construct
  misc_feature 1..120: note = Artificially Synthesized Probe
  source 1..120: mol_type = other DNA
ggccccggaaatattaatagtagcaagcttgctggtgctcatatgttcatttctctcttttcccttaaaaacagatgtgcacctgctttaacacggtaaaacaaaacacgaatgccaact

SEQ ID NO: 20949 - DNA, 120 bp, synthetic construct
  misc_feature 1..120: note = Artificially Synthesized Probe
  source 1..120: mol_type = other DNA
gcccggctcaccccgggatggcactgggctgcaagctagcccctttccctttccgaaaagactgcagcctctggcagatgtgcaggcggcaagaaagtgaaaacaggtttttttttgttt

SEQ ID NO: 20950 - DNA, 120 bp, synthetic construct
  misc_feature 1..120: note = Artificially Synthesized Probe
  source 1..120: mol_type = other DNA
ttttaaaatgctcatctccctaatactctcaggcttaatcatttatgcctcacagcacaggctgtggagtgctgccgggatacccttcaagaccaaggcactcattcttctagctgagac

SEQ ID NO: 20951 - DNA, 120 bp, synthetic construct
  misc_feature 1..120: note = Artificially Synthesized Probe
  source 1..120: mol_type = other DNA
ccagcccaaatgttctgatgccacttctgagctcttcctgttttgccacccctgaaaattaattctccatacaatgcttatctttgaaggcaaagagctagaaaatacccaaatgtatta

SEQ ID NO: 20952 - DNA, 120 bp, synthetic construct
  misc_feature 1..120: note = Artificially Synthesized Probe
  source 1..120: mol_type = other DNA
ccaaccactggataaggggcttcttttgttccatgatcttctagatgtgtgttcctcactttcagagcaagcagctcagtttgtaatttcatgttcatcagggtgattatttgatgacta

SEQ ID NO: 20953 - DNA, 120 bp, synthetic construct
  misc_feature 1..120: note = Artificially Synthesized Probe
  source 1..120: mol_type = other DNA
gaagcttgaaaaattgtaagttgaggcagggtacctcagggatggtctaagcagaagtcacctcatgacatcctcccacagtcccgccaggtaatactatgatctccttttataaatgga

SEQ ID NO: 20954 - DNA, 120 bp, synthetic construct
  misc_feature 1..120: note = Artificially Synthesized Probe
  source 1..120: mol_type = other DNA
gggtgtatttcactgtgcagaaccggcaaaacccaagcttgtacctaggagggaatgtagattaattcaaactctgaggagaaacaaaaagaaaagacaccacttcattctctaaaaaga

SEQ ID NO: 20955 - DNA, 120 bp, synthetic construct
  misc_feature 1..120: note = Artificially Synthesized Probe
  source 1..120: mol_type = other DNA
gaggccgaggcgggtggatcacctgaggtcaggagttcgagaccagcctggccaacatggtgaaaccctgtctctactaaaaatacaaaaatagccaggcatgggggcgggtgcctgtaa

SEQ ID NO: 20956 - DNA, 120 bp, synthetic construct
  misc_feature 1..120: note = Artificially Synthesized Probe
  source 1..120: mol_type = other DNA
tcagtttgctaactttaacaattctggtaggggatgctgataaggggggaggccgtgcatgtgtggggaaggggtataggaaaaaaaaaatctctgtatcttcttcaattgtgcagtaaa

SEQ ID NO: 20957 - DNA, 120 bp, synthetic construct
  misc_feature 1..120: note = Artificially Synthesized Probe
  source 1..120: mol_type = other DNA
gaaaaaaaaaaaagtaaacatgctataaaatgagaaggtgtctcctgtcaccctgggaactcctgacaagtgagtcatctccccactggaaaaggatcagacagaagctttgccccggtg

SEQ ID NO: 20958 - DNA, 120 bp, synthetic construct
  misc_feature 1..120: note = Artificially Synthesized Probe
  source 1..120: mol_type = other DNA
tctgggactaatcacacgaagacaaccacagaaccccaccgtgacgccacgtgacagatgacgcacgcctgtaaaagcaagcatgggctgtgtggctcatggccaaagaccacagaacag

SEQ ID NO: 20959 - DNA, 120 bp, synthetic construct
  misc_feature 1..120: note = Artificially Synthesized Probe
  source 1..120: mol_type = other DNA
acaagttacatttatagagcctacctaagcaccttacaaacctgtatttttcaatccccacggccacctgggagctactgtaaaccctgtaataattcccatttagcagacgaggaaact

SEQ ID NO: 20960 - DNA, 120 bp, synthetic construct
  misc_feature 1..120: note = Artificially Synthesized Probe
  source 1..120: mol_type = other DNA
ctgtgctgattctgagctgtttccctctctggcccggagcaggcactcaatagatgtttattgattagtgataacacggattaatgataacactgtcaacaaataaaagatatacccttt

SEQ ID NO: 20961 - DNA, 120 bp, synthetic construct
  misc_feature 1..120: note = Artificially Synthesized Probe
  source 1..120: mol_type = other DNA
cctccacccccctcagcactggcatgttctgaaccaattcccagacatcatattatttcatccaaagcatttctgtaagattctctaacggttcaagactccatgtttaattatgtgata

SEQ ID NO: 20962 - DNA, 120 bp, synthetic construct
  misc_feature 1..120: note = Artificially Synthesized Probe
  source 1..120: mol_type = other DNA
caggcatgtatgatttttactgtattccactggtcaatgtggtcaaagagtctttcacgaggaaaggacaaagacctcaactttagagtgaagtagtggcaagaacttcgcaaccatctt

SEQ ID NO: 20963 - DNA, 120 bp, synthetic construct
  misc_feature 1..120: note = Artificially Synthesized Probe
  source 1..120: mol_type = other DNA
cactgtgcccaagagttctatgccctggcctgtggccatctttaatctgccacaaattgggtatgtggcttttggggtatttttctgtttgcagttgtatgaacttataaattcaaatac

SEQ ID NO: 20964 - DNA, 120 bp, synthetic construct
  misc_feature 1..120: note = Artificially Synthesized Probe
  source 1..120: mol_type = other DNA
gcccagcccatcataattattttaacggctgcaccataatccactcaaagtacttaacccacccccccatactgtttaacatttagttgtttccagtattttaccccaaccaatttttct

SEQ ID NO: 20965 - DNA, 120 bp, synthetic construct
  misc_feature 1..120: note = Artificially Synthesized Probe
  source 1..120: mol_type = other DNA
gggctgaggctcttgtttctcacccaaactccccacagggttgctgtgctgaaacaccccggacttcataccccagggtgaacacagtgatgtgggaacacaccacaacacatactctca

SEQ ID NO: 20966 - DNA, 120 bp, synthetic construct
  misc_feature 1..120: note = Artificially Synthesized Probe
  source 1..120: mol_type = other DNA
acccattttactttccctgccataatcctggaagagatcaaaatattagagatatgaaacttcaacagctcacttccctttaaacccaaggaatcctctaaacagcatgcccatcccaaa

SEQ ID NO: 20967 - DNA, 120 bp, synthetic construct
  misc_feature 1..120: note = Artificially Synthesized Probe
  source 1..120: mol_type = other DNA
aaaaaaaaaaattgtttatctgacgacatcactcccatttaataacctccatgactccccagggcacttaaacacacagacccctggccctcacctgcttccccaggtacacctcacacc

SEQ ID NO: 20968 - DNA, 120 bp, synthetic construct
  misc_feature 1..120: note = Artificially Synthesized Probe
  source 1..120: mol_type = other DNA
ctgtcttaaaaaaaaaagcactcaagagacattcactattatcatcatcatccccactgcaccaatgaggaagctgaggctcaacagttaagagcctgtgtaagaaccagactcagctgg

SEQ ID NO: 20969 - DNA, 120 bp, synthetic construct
  misc_feature 1..120: note = Artificially Synthesized Probe
  source 1..120: mol_type = other DNA
aatgagcaataaacagaaccgctctctgcaagctacaaggtgctgtataaaggactgctgttaggtgatccgatatggtgcacgtggaacctcagcagtcacaccaagatgacaataaaa

SEQ ID NO: 20970 - DNA, 120 bp, synthetic construct
  misc_feature 1..120: note = Artificially Synthesized Probe
  source 1..120: mol_type = other DNA
cggtctcgctgacgtcactgacgccggcccctccttcttccctaaaagttaacacacagatgaaatgtacatcaaacacattaagaagacactctttaaccattttttgtttgtttttgt

SEQ ID NO: 20971 - DNA, 120 bp, synthetic construct
  misc_feature 1..120: note = Artificially Synthesized Probe
  source 1..120: mol_type = other DNA
ttgctggcactcagaactgcctaccttgcatttcagccctttaagtacattccttctataaacacaggagggtgggactctgagtcacctgttcccagtgttgcatgacttttttttttt

SEQ ID NO: 20972 - DNA, 120 bp, synthetic construct
  misc_feature 1..120: note = Artificially Synthesized Probe
  source 1..120: mol_type = other DNA
cagataattgattacgtcacattaataatatctacaaaggctccagagctggtaatttctgggcttgatatcatcaccaatagcttgagttcttcccattttccattttgccatcctcag

SEQ ID NO: 20973 - DNA, 120 bp, synthetic construct
  misc_feature 1..120: note = Artificially Synthesized Probe
  source 1..120: mol_type = other DNA
tgggcatggtggcgggcgcctgtaatcccagctacttgggaggctaaggcaggagaatcgcttgaaccctggaggcagaggttgcaatgagccgagatcgtgccattgcactccagcctt

SEQ ID NO: 20974 - DNA, 120 bp, synthetic construct
  misc_feature 1..120: note = Artificially Synthesized Probe
  source 1..120: mol_type = other DNA
accacaaccacaacaataaaaacccactggcaagggaatgagcatatcaaactggcttaggctaattaggatttattcctgagttggggatatgatcaccttccctgagcaaaattcttg

SEQ ID NO: 20975 - DNA, 120 bp, synthetic construct
  misc_feature 1..120: note = Artificially Synthesized Probe
  source 1..120: mol_type = other DNA
tggagtaattctagccagggccctggctgggcactggagctcaaccatgcctgcacagagtaaggaatgacaaatttatatcatcattaagaacaaaagctgccaccttttttttttttt

SEQ ID NO: 20976 - DNA, 120 bp, synthetic construct
  misc_feature 1..120: note = Artificially Synthesized Probe
  source 1..120: mol_type = other DNA
agattgttttattgttgcttcctcctaaaacagaaaacggaagtggggttaagggtactgagtaacgtgttattatctctcctggttcacgtgaattgatgcatctgaatcttacgtcac

SEQ ID NO: 20977 - DNA, 120 bp, synthetic construct
  misc_feature 1..120: note = Artificially Synthesized Probe
  source 1..120: mol_type = other DNA
acattgtcactttattttctccatggcacttgggttgtaagcaatcatttagtccagtgctactcaaagcatggcccacatgtgagcagcacctggagcttgttagaaatacagattctt

SEQ ID NO: 20978 - DNA, 120 bp, synthetic construct
  misc_feature 1..120: note = Artificially Synthesized Probe
  source 1..120: mol_type = other DNA
taaataaagtaataacaatgtcagtgatgacttcatgttgagcagggcattcgttcacagcggtattgtcactgtccatctccacgcccgcactgggtgacagtaccatgctccacagtg

SEQ ID NO: 20979 - DNA, 120 bp, synthetic construct
  misc_feature 1..120: note = Artificially Synthesized Probe
  source 1..120: mol_type = other DNA
ctctccacaggtacattgcgccctgcaaaagatgccaacagaaacaacacagattgcaaacgaatgggaaacgtgtaggaacaatgaaagtctgggataacaaataataaacataatgat

SEQ ID NO: 20980 - DNA, 120 bp, synthetic construct
  misc_feature 1..120: note = Artificially Synthesized Probe
  source 1..120: mol_type = other DNA
acctggccctgaactcgcaccaggtgacgtgcaggatctggttggcgatgtagccctggatgaccttcacgaaatgctgcatctcgtgcttgaacagctgcagctgacggaactgcacag

SEQ ID NO: 20981 - DNA, 120 bp, synthetic construct
  misc_feature 1..120: note = Artificially Synthesized Probe
  source 1..120: mol_type = other DNA
ctgggcgaactcgccgtcctccatcagcaggaagtgccgcagtgcctcatagtgcgcctccaggtgcagctccacgaagaagtagtcgacagcggccttgttcaccaaggagatgctggc

SEQ ID NO: 20982 - DNA, 120 bp, synthetic construct
  misc_feature 1..120: note = Artificially Synthesized Probe
  source 1..120: mol_type = other DNA
gctgtgtcttcctaacaaaacaccagcctcagaaccacctccccactgcacgctgtccccacaaccagcttgtgccaaaaaaaggaaaatcgcatgtgggacccacccgcgtgacaacct

SEQ ID NO: 20983 - DNA, 120 bp, synthetic construct
  misc_feature 1..120: note = Artificially Synthesized Probe
  source 1..120: mol_type = other DNA
acattctccccgaccctgatgctggcgttggacacatgtccatggatgttccaccgtggccgagtgggagccacatctgacacagactcccctaagctgatgctggcattggatacgtgt

SEQ ID NO: 20984 - DNA, 120 bp, synthetic construct
  misc_feature 1..120: note = Artificially Synthesized Probe
  source 1..120: mol_type = other DNA
aaaagtactccaaaaccacgagctcctcaccacctgtatctgtgcaatttggtggcacacggggagagagagtgctctgccgcaaacgcgaaagccaccagccctctcctagaagagcat

SEQ ID NO: 20985 - DNA, 120 bp, synthetic construct
  misc_feature 1..120: note = Artificially Synthesized Probe
  source 1..120: mol_type = other DNA
tctacaggtacaaacctgagaactgaaaactaatgcaaaaaagcacatgaagcaaaaccaacacaaacgctttatttgctgaattcaaagcctgcttcaccgatcgtgccccatgatttt

SEQ ID NO: 20986 - DNA, 120 bp, synthetic construct
  misc_feature 1..120: note = Artificially Synthesized Probe
  source 1..120: mol_type = other DNA
tgcctggataaggcagaacgcccacagccactctgggttcagcatattggtctttctaccttaatgtatgtttgaaggttttcaaaacaaaaagtaaaatcatcagtaagattaagccag

SEQ ID NO: 20987 - DNA, 120 bp, synthetic construct
  misc_feature 1..120: note = Artificially Synthesized Probe
  source 1..120: mol_type = other DNA
aaagaaaaaaaaagcaacctaatcctctgacccctcacctaggatgcccaggacacctgtggactcagggccggcaggggagacacatggtccaagggttcgaggagggaccaggtgatg

SEQ ID NO: 20988 - DNA, 120 bp, synthetic construct
  misc_feature 1..120: note = Artificially Synthesized Probe
  source 1..120: mol_type = other DNA
aatggtctttccgcagacgtatatgtcgtgggcaatgtgcttcagaaacacgggaacacagtcctccacctctttggagatgagcacgtagccatgtgtccagtacaacttatctaaggt

SEQ ID NO: 20989 - DNA, 120 bp, synthetic construct
  misc_feature 1..120: note = Artificially Synthesized Probe
  source 1..120: mol_type = other DNA
gatcagatcgtgagcaaagtctccacgtatctttatgctccctggggcaactaactttagatgcaggctttaaaaaccacaggcaccccaaccacccagaaacgggctccctgcaggact

SEQ ID NO: 20990 - DNA, 120 bp, synthetic construct
  misc_feature 1..120: note = Artificially Synthesized Probe
  source 1..120: mol_type = other DNA
ccaagtttcttgaagagaaaaccaatggtgaggaggctcagggtgggcggagtggaaaggacgcaggcccggtaatactgcaggtacctcctcaggccactggtgaaggcctgtgggcaa

SEQ ID NO: 20991 - DNA, 120 bp, synthetic construct
  misc_feature 1..120: note = Artificially Synthesized Probe
  source 1..120: mol_type = other DNA
cagcacatgagccagcttcaagactcaccaaacagcagcttccggagccagacttggctcagaactcccagcaatgtaaattcacccaacaggagggccctgcgctgtcagtcatccaca

SEQ ID NO: 20992 - DNA, 120 bp, synthetic construct
  misc_feature 1..120: note = Artificially Synthesized Probe
  source 1..120: mol_type = other DNA
acactgaaaaatacatgtttaaaatgccaagtgtagaaaagggtagaaaaaaacagaacaccttccacaggacacaagtacacagacagcctcctggggcagaagctataaaacatgacg

SEQ ID NO: 20993 - DNA, 120 bp, synthetic construct
  misc_feature 1..120: note = Artificially Synthesized Probe
  source 1..120: mol_type = other DNA
gacgcagtggctcacatctgtaatcccagcactttgggaggccgaagcaagcggatcacttgaggtcaggggtttgagaccagcctcaccaacatggtgaaaacccatctctaataaaaa

SEQ ID NO: 20994 - DNA, 120 bp, synthetic construct
  misc_feature 1..120: note = Artificially Synthesized Probe
  source 1..120: mol_type = other DNA
ccgggaggcggagcttggagtgagccgagatcgcgccactgccctccagcctgggccacagagcgagactccgtctcaaaaaaaaaaaaaaagaaaagatgactatgaaaacaagagaaa

SEQ ID NO: 20995 - DNA, 120 bp, synthetic construct
  misc_feature 1..120: note = Artificially Synthesized Probe
  source 1..120: mol_type = other DNA
agaatggccaccataaaagaacatttaagacaaaggaaggggatgagcacttaaatgaaaaagctgcagagcaagacttcatttttctgaatatatccattcacttctccagtgcccagc

SEQ ID NO: 20996 - DNA, 120 bp, synthetic construct
  misc_feature 1..120: note = Artificially Synthesized Probe
  source 1..120: mol_type = other DNA
gaagtgattcaaaacaataaactctaagaaacatagccaggtatgaatgtcagctcaccacccagccttttgtggatgctgctgctgtgaataccagcacgatcgattctatcaggacaa

SEQ ID NO: 20997 - DNA, 120 bp, synthetic construct
  misc_feature 1..120: note = Artificially Synthesized Probe
  source 1..120: mol_type = other DNA
gcatcatccacaccccctgtccacggcagcatcacccacacccacccatggtaccagcacccacacccccgtccacagcagcatccacatccaggtccacagcagcatcatccacacccc

SEQ ID NO: 20998 - DNA, 120 bp, synthetic construct
  misc_feature 1..120: note = Artificially Synthesized Probe
  source 1..120: mol_type = other DNA
tcctgcagacttgctgtgcagcagtgaaaatacacacagcattacaaagctgtacaactggttaagacggtaaaaacattatataaattttactgccccacctcagaaaaaccgtaagag

SEQ ID NO: 20999 - DNA, 120 bp, synthetic construct
  misc_feature 1..120: note = Artificially Synthesized Probe
  source 1..120: mol_type = other DNA
ctaagttcacaaatttttaagacagtaacaggtaaggtgggctggtacaggcagccctgggcacatgcaactctgaggaaatttgccttctgctggtgctgaggctgtgaaaccacatgt

SEQ ID NO: 21000 - DNA, 120 bp, synthetic construct
  misc_feature 1..120: note = Artificially Synthesized Probe
  source 1..120: mol_type = other DNA
cgcagtctccagcgtattcagaacagggtgatgaggagagtgagtgaccatgtctcctcatcagcaacccgaaaaaatgaacctagaaaagggggagttaataaatgaaatacagccagc

SEQ ID NO: 21001 - DNA, 120 bp, synthetic construct
  misc_feature 1..120: note = Artificially Synthesized Probe
  source 1..120: mol_type = other DNA
ccaaaggccagtttttaaacgtgtgagggattggcagagagcaggaccatgagatttgctttgactgatgcaccagcaggaagtgacacagcaggaaggccctggcagtcaggataaagc

SEQ ID NO: 21002 - DNA, 120 bp, synthetic construct
  misc_feature 1..120: note = Artificially Synthesized Probe
  source 1..120: mol_type = other DNA
attcctctagacatgaatggaaaaggctccttcatcagcaccccatgcccagtgagcatttcttcctggcactaatcacacagcctgccaggcagctctcttgctcttaaggacataact

SEQ ID NO: 21003 - DNA, 120 bp, synthetic construct
  misc_feature 1..120: note = Artificially Synthesized Probe
  source 1..120: mol_type = other DNA
aaggctgccaatttccaattccatgtaacacataagcctcagtggaacttagagtgaaactttttgagatgcctcagacctggaaattccaatgtggggaacccagaattaaaaaaatca

SEQ ID NO: 21004 - DNA, 120 bp, synthetic construct
  misc_feature 1..120: note = Artificially Synthesized Probe
  source 1..120: mol_type = other DNA
actcctagtccactttcatgttccatcctgtacacctggctctgccttctagatagcagtagcaaattagtgaaagtactaaaagtctctgaaatgcagaaataatggtgtaagctgtct

SEQ ID NO: 21005 - DNA, 120 bp, synthetic construct
  misc_feature 1..120: note = Artificially Synthesized Probe
  source 1..120: mol_type = other DNA
tatcgcataagaatagaacgactagtaacaatgtatccttttggcaacactgataaagcaataaaatacaaaactcaaatgaggagctacagcgtaccatggtaaagcctcaggcgacag

SEQ ID NO: 21006 - DNA, 120 bp, synthetic construct
  misc_feature 1..120: note = Artificially Synthesized Probe
  source 1..120: mol_type = other DNA
gaagaagaagaagaagaagaaaggtcacaggaagcattttccaaaccccgagagagatgaaagaggaaaaactaaacattctaccttaatagccagcccagagaggtccgcattgtctgg

SEQ ID NO: 21007 - DNA, 120 bp, synthetic construct
  misc_feature 1..120: note = Artificially Synthesized Probe
  source 1..120: mol_type = other DNA
agtcaaaggacaacatgaggatcttgtttctcgctggtagttttgacatgtcaggctgcagctgttgagtctcatcttgaaaaagatttgtgaaaagagcattgtaggccaccttcttga

SEQ ID NO: 21008 - DNA, 120 bp, synthetic construct
  misc_feature 1..120: note = Artificially Synthesized Probe
  source 1..120: mol_type = other DNA
tgccctctgacaagctgagcaagatccagacgctcaagctggccgccaggtacatagacttcctctaccaggtcctgcagagcgacgagatggacaataagatgaccagctgcagctacg

SEQ ID NO: 21009 - DNA, 120 bp, synthetic construct
  misc_feature 1..120: note = Artificially Synthesized Probe
  source 1..120: mol_type = other DNA
acacagctgccaggagcactccaagttctggtttcctctggaagagcgattagggcgtcctgcaccgggtccttttcaccagacaccttccaagtccctttagacaagctcgagccacgg

SEQ ID NO: 21010 - DNA, 120 bp, synthetic construct
  misc_feature 1..120: note = Artificially Synthesized Probe
  source 1..120: mol_type = other DNA
cctgtctttgtcaaaaacagatggaaagtgtctcaatcacatatttctctaggaaagtttggattggctgagtactaaacgctacagtggggtaatacattaattctggtttttgctgcc

SEQ ID NO: 21011 - DNA, 120 bp, synthetic construct
  misc_feature 1..120: note = Artificially Synthesized Probe
  source 1..120: mol_type = other DNA
tgggggaaggtgaccattacttatcagacatttgtcctgttccctgctgtgtggttaaagaaaacatcttctctaacttctgcatagtgtgcacagattttcagtagatttcctcactca

SEQ ID NO: 21012 - DNA, 120 bp, synthetic construct
  misc_feature 1..120: note = Artificially Synthesized Probe
  source 1..120: mol_type = other DNA
tgcatgctggaatgtctgtttatgtttgtgtcttttcctgggaaaggataaatgtgctgcaaaaagcaaaccaaatacagaactctccgctagcagagagttcacaaatgaggcaataaa

SEQ ID NO: 21013 - DNA, 120 bp, synthetic construct
  misc_feature 1..120: note = Artificially Synthesized Probe
  source 1..120: mol_type = other DNA
accctttggatgagattgagtgatattaaactatgccttacctgaatgctgatttggaaatgagggcggtagcattaacaaggtgaattttaagctcttgtaaactgaggcacagtgtga

SEQ ID NO: 21014 - DNA, 120 bp, synthetic construct
  misc_feature 1..120: note = Artificially Synthesized Probe
  source 1..120: mol_type = other DNA
gttagagatccttttgctctcttccccgtggagaaaaaaatgttgaaactttcgtcgttactactgtttttctgtcgctatccagacaaaatgccaccctagcatttctgttaaatctct

SEQ ID NO: 21015 - DNA, 120 bp, synthetic construct
  misc_feature 1..120: note = Artificially Synthesized Probe
  source 1..120: mol_type = other DNA
atcaaataatcccaaattgcatactacatatatactggtttctaactagtcaacatcttcaacatatgcccagccgcctggctttcctctcgttcatgataatctgcatgcgtagatggg

SEQ ID NO: 21016 - DNA, 120 bp, synthetic construct
  misc_feature 1..120: note = Artificially Synthesized Probe
  source 1..120: mol_type = other DNA
tcagtgttgctgtatgtcatctcctttcttgttttactacagttcacaagtgaataatatcatgtaatttcagtgtggaacaatgtaatttccatgtgcgtccccagcaaccctgtgtac

SEQ ID NO: 21017 - DNA, 120 bp, synthetic construct
  misc_feature 1..120: note = Artificially Synthesized Probe
  source 1..120: mol_type = other DNA
aggaaaggaagtggtaactcagcattgatttcctccccctggatttaatagcgatagatctaaacctgcagtcagatatcactttgaaagccttggctcatctaaagacagcttccaaga

SEQ ID NO: 21018 - DNA, 120 bp, synthetic construct
  misc_feature 1..120: note = Artificially Synthesized Probe
  source 1..120: mol_type = other DNA
ttcttccctttagtaagcttttttgaggtggtatttttctaatttgggaaattttaattaggcagaaaccaaaggctgttgactttgcgagaggcaagctagctccccaagtgactctct

SEQ ID NO: 21019 - DNA, 120 bp, synthetic construct
  misc_feature 1..120: note = Artificially Synthesized Probe
  source 1..120: mol_type = other DNA
agtgctgaacaggtgtggaatttctgtttggaataatacaaaacgctccagaactaggtagtgatgatgccttcacaacaaggtgtatgcactaaattccactatgctttaaaagctcaa

SEQ ID NO: 21020 - DNA, 120 bp, synthetic construct
  misc_feature 1..120: note = Artificially Synthesized Probe
  source 1..120: mol_type = other DNA
gtttctttttaagacatcatcacctttgtggcattattcagccagattttgagacactgatagaagccccagagatggtgttgggctccaggattgtttgaattttcagaatccaaactg

SEQ ID NO: 21021 - DNA, 120 bp, synthetic construct
  misc_feature 1..120: note = Artificially Synthesized Probe
  source 1..120: mol_type = other DNA
tgactaacagcaaagccaggcttcctggtgaatcccgttacagccgtcccgtttatccatggtttcgcttttcgaagtttcaattacagacagtcaaccacagtccaaagttattaaatg

SEQ ID NO: 21022 - DNA, 120 bp, synthetic construct
  misc_feature 1..120: note = Artificially Synthesized Probe
  source 1..120: mol_type = other DNA
gaaaaaatacataattataaaccccagtattgaggaaggtgggggaaccaggccatcctatttgccagagggaagaaaagctgcacaagctttctaaaggaattttgatggtaggtaaga

SEQ ID NO: 21023 - DNA, 120 bp, synthetic construct
  misc_feature 1..120: note = Artificially Synthesized Probe
  source 1..120: mol_type = other DNA
aaaagagtggccttcagaatatatttttgtatcttctgcaatctacattaaagatgcccgtccatcattttcagaagaggcctttcgtgttaggataattcagaaggatgcacccggaat

SEQ ID NO: 21024 - DNA, 120 bp, synthetic construct
  misc_feature 1..120: note = Artificially Synthesized Probe
  source 1..120: mol_type = other DNA
tgtcttcctttacaccctgggctacatttgacgcatatttctggcaaattctgggaccacctttgccagatgaccaaatccttttcggagagatgactgaaatatttgtaagtttccatc

SEQ ID NO: 21025 - DNA, 120 bp, synthetic construct
  misc_feature 1..120: note = Artificially Synthesized Probe
  source 1..120: mol_type = other DNA
tgagtctttgaatttgcagggccagggccagctgtgccatctggtcttttggaacttttttttttttttgctgtggcattagacaggcatcccctaacccagagaaccctcactaccact

SEQ ID NO: 21026 - DNA, 120 bp, synthetic construct
  misc_feature 1..120: note = Artificially Synthesized Probe
  source 1..120: mol_type = other DNA
cagtcactgatctgactccgtcgcttaacctgttaatggaatagcatggacgatgcaccccacactgcatctggtgttactgggacccactgaatgtaggttcctttacccccatttcac

SEQ ID NO: 21027 - DNA, 120 bp, synthetic construct
  misc_feature 1..120: note = Artificially Synthesized Probe
  source 1..120: mol_type = other DNA
ggagggagggggaagccactgtacagcctagcctggagacatcttgggggaaagtgattcatctgatctgggatggaagattattctggggagtaaaatgtcctgccttcaacacacaca

SEQ ID NO: 21028 - DNA, 120 bp, synthetic construct
  misc_feature 1..120: note = Artificially Synthesized Probe
  source 1..120: mol_type = other DNA
catgtagtgaggctcgggaaacgtggaacgaaagaaagatagaaaaaataaatgcagtataatggaagttccaaggaacactgcagttaggaaggtggctggcattccggaattacctcc

SEQ ID NO: 21029 - DNA, 120 bp, synthetic construct
  misc_feature 1..120: note = Artificially Synthesized Probe
  source 1..120: mol_type = other DNA
tgggagaaagtatcggcaaattatccatctgataggagagaactatccagaagagatgcaggactcctatgattcaacaataaaaattagatagcctgcataaaagtaggcaaaggcctt

SEQ ID NO: 21030 - DNA, 120 bp, synthetic construct
  misc_feature 1..120: note = Artificially Synthesized Probe
  source 1..120: mol_type = other DNA
acccccacacaccccacacacccccacacaccccacacaccccacacacaccacacaccccacacacacaccacacaccccacacaccccacacaccccacacacacatcacataccaca

SEQ ID NO: 21031 - DNA, 120 bp, synthetic construct
  misc_feature 1..120: note = Artificially Synthesized Probe
  source 1..120: mol_type = other DNA
cacactccccacacacatcacataccacacacaagccacacaaccccccacacaccacaccccacacacacagtacacactacacacaaaccacacaccccatgcacacaccacacaccc

SEQ ID NO: 21032 - DNA, 120 bp, synthetic construct
  misc_feature 1..120: note = Artificially Synthesized Probe
  source 1..120: mol_type = other DNA
gtgatgcttacagattctcaagaaggttgaatccaaacccttgtaaaaattgggtcctgttgagtgtctttttgtttgtctgcatttagatctagtaacattttggccaacgctgtgcag

SEQ ID NO: 21033 - DNA, 120 bp, synthetic construct
  misc_feature 1..120: note = Artificially Synthesized Probe
  source 1..120: mol_type = other DNA
aggagacaatggaggactcaccatccacatccagccaaggagacaaatctactgacagccattcataacactgcatgtagctgttgtacaacaatggttagcaaacaaagaagacaagga

SEQ ID NO: 21034 - DNA, 120 bp, synthetic construct
  misc_feature 1..120: note = Artificially Synthesized Probe
  source 1..120: mol_type = other DNA
aacacaacttgggaacacggctacccagatgcttttattcaatcctcatcctttacggaatccaggacatgaaaacctaatttgtttaaaaactcaactttcctgctgtgggcatcttaa

SEQ ID NO: 21035 - DNA, 120 bp, synthetic construct
  misc_feature 1..120: note = Artificially Synthesized Probe
  source 1..120: mol_type = other DNA
ggaaggatttatttttctcttgctaccagaagactcaggacacaatgcagaaaatacgaaatacattcattcattagctttcccatctcttaaatggtttgacccaactgggcaagccct

SEQ ID NO: 21036 - DNA, 120 bp, synthetic construct
  misc_feature 1..120: note = Artificially Synthesized Probe
  source 1..120: mol_type = other DNA
gcagcagctagattagaaaaaataaagatgagaaagcctctcagagcatctgtcatggtatctaccaaaacctgtcagggataggagaaactctctctcagtaggagcttagattaaatt

SEQ ID NO: 21037 - DNA, 120 bp, synthetic construct
  misc_feature 1..120: note = Artificially Synthesized Probe
  source 1..120: mol_type = other DNA
ccatctcaaaacagcaacaacaaaatcctaggtagcactcaagtcttttgtataaaagtcagcaggtttctcgccagtatactgttttgtaacattgtctcaaactttaaagaatgattc

SEQ ID NO: 21038 - DNA, 120 bp, synthetic construct
  misc_feature 1..120: note = Artificially Synthesized Probe
  source 1..120: mol_type = other DNA
aaagctcacttatctgggtctggcttgcaggcagcccactcttgccttttacagttattgttacactttactttttcctacaattttctaatctagagtgaaatggccaccagagagtat

SEQ ID NO: 21039 - DNA, 120 bp, synthetic construct
  misc_feature 1..120: note = Artificially Synthesized Probe
  source 1..120: mol_type = other DNA
gtgagaccatagtttaaaaaaattctaattgtataataccatgtcgcatgtatgctttatacagagaagaatccagcgagcacaaaaggcaagctgactgaggttgtctcggccgtcctg

SEQ ID NO: 21040 - DNA, 120 bp, synthetic construct
  misc_feature 1..120: note = Artificially Synthesized Probe
  source 1..120: mol_type = other DNA
agggaccttcacggggctctgggctgccaacattgtagggcgttatttagtgtgagtgttagtgttagtattagtgttggtgttagttttgatattagtgttagtatttatttatactcg

SEQ ID NO: 21041 - DNA, 120 bp, synthetic construct
  misc_feature 1..120: note = Artificially Synthesized Probe
  source 1..120: mol_type = other DNA
agtgttagtattagtgtcggtatttattagtattagtgttagtgtgagtattagtgttagtatctattagtgtgttagtattaatgttggtgttagtatttgttagtattagtgttggtg

SEQ ID NO: 21042 - DNA, 120 bp, synthetic construct
  misc_feature 1..120: note = Artificially Synthesized Probe
  source 1..120: mol_type = other DNA
gaaatgcaaacgccttgtgtcctgtgctgtgccagggtgccctgccttacaaaacagacagctctggagaagcatgtgtaaatttaatttggggtaacattgactcatgttaggatcatt

SEQ ID NO: 21043 - DNA, 120 bp, synthetic construct
  misc_feature 1..120: note = Artificially Synthesized Probe
  source 1..120: mol_type = other DNA
tgaatgtttcttctgtgattccttctcctccaggttctgtttttctgtgaattcttctagaaacccgagcagggcctttgcgtttctgaacctccattttctgcttttttatttacttgg

SEQ ID NO: 21044 - DNA, 120 bp, synthetic construct
  misc_feature 1..120: note = Artificially Synthesized Probe
  source 1..120: mol_type = other DNA
gcattaaatgtgattggcctttcccctggggttaatctgaattcccctagggttaatccaaattcccctagggttaatccgaattcttccagccttcctcccttcggaaatctgtcctca

SEQ ID NO: 21045 - DNA, 120 bp, synthetic construct
  misc_feature 1..120: note = Artificially Synthesized Probe
  source 1..120: mol_type = other DNA
ttatttagtccaggcaaagtggtggaaaatgaaaaaactggccttttgtggctttacagtgcacatttgaccaagggaagaatcagcccagaaatgtacactgatgagtctgctatttct

SEQ ID NO: 21046 - DNA, 120 bp, synthetic construct
  misc_feature 1..120: note = Artificially Synthesized Probe
  source 1..120: mol_type = other DNA
ttatcttctgaagcaccaaaaaccccagggcagagctcttcttagtgttaattatgttttctactcagttcagatacccacaactgagggtagactgtttggggaaaaagtggtttcttt

SEQ ID NO: 21047 - DNA, 120 bp, synthetic construct
  misc_feature 1..120: note = Artificially Synthesized Probe
  source 1..120: mol_type = other DNA
ggtaataaccctcatttcctctcttccaccccaccacatcatcttaataaaacatgaaggtaactgaatgagtacgactccctcattatcaatttaatcctgtgtctctgttgatgtagg

SEQ ID NO: 21048 - DNA, 120 bp, synthetic construct
  misc_feature 1..120: note = Artificially Synthesized Probe
  source 1..120: mol_type = other DNA
atgtaaccattttgcactttgcctaagcattatttgaattcttatctttggctcaaggtcttctgccctgttttcagagtcctgtctccatttcaggttttgttgaagtgttcttccctc

SEQ ID NO: 21049 - DNA, 120 bp, synthetic construct
  misc_feature 1..120: note = Artificially Synthesized Probe
  source 1..120: mol_type = other DNA
ttgttgcaactcatgaagaagtaaatgtgaatatttggaaaaatacacagctatgcatgtcacacgtgcatatgagattcccaccaatgactgtccaatgactgtccaggctgattctag

SEQ ID NO: 21050 - DNA, 120 bp, synthetic construct
  misc_feature 1..120: note = Artificially Synthesized Probe
  source 1..120: mol_type = other DNA
atattaagtgagcacctgctacgtgttctcccacttgcagggcaggtagtaccagcccattttatagatgagaaatggattgccaaggatgatatataagtgtaagaacccacatgtcgg

SEQ ID NO: 21051 - DNA, 120 bp, synthetic construct
  misc_feature 1..120: note = Artificially Synthesized Probe
  source 1..120: mol_type = other DNA
tcagttctgcagttcactcaccacttttagacggaggacgtcgattagatttgtggatcatgacattcgcagtctgatctcaaaaatgaaatgtcaggaattgcagccttttgttagagt

SEQ ID NO: 21052 - DNA, 120 bp, synthetic construct
  misc_feature 1..120: note = Artificially Synthesized Probe
  source 1..120: mol_type = other DNA
gctccgccgatcaccagccaggaccttccccagtcgcctgtccagcctgggctgttcactcatcctgtcctgcccctgaaatttactttttccctctaatatggttttttgtttgttttg

SEQ ID NO: 21053 - DNA, 120 bp, synthetic construct
  misc_feature 1..120: note = Artificially Synthesized Probe
  source 1..120: mol_type = other DNA
gctgaaatctgagttcccagggatttctgggacctggcattgaattataggaggattcttcccattgcttaggtttttgcattcttctgaatataggtgaatagatgcaaaaaatttcaa

SEQ ID NO: 21054 - DNA, 120 bp, synthetic construct
  misc_feature 1..120: note = Artificially Synthesized Probe
  source 1..120: mol_type = other DNA
tgggaatccagaggcctgggttcaaatcctagcaaagcaagcatctcaacctctgtgccgattcctcctctctccaaggggagaataaagttggcctcagtctggagaatctgcctctga

SEQ ID NO: 21055 - DNA, 120 bp, synthetic construct
  misc_feature 1..120: note = Artificially Synthesized Probe
  source 1..120: mol_type = other DNA
agcaagcttgttgcagacctgaacgtacttttattgtacttttattattacatttttgtgatagtgatttgttctgctgcttgtctccccatatgaactgtgagctggctgaggcacgtg

SEQ ID NO: 21056 - DNA, 120 bp, synthetic construct
  misc_feature 1..120: note = Artificially Synthesized Probe
  source 1..120: mol_type = other DNA
gtaaatatggtcattcccacattcccagcaggattcctccttctcaggcgcagcaggcaagccggggtcagaggcatgagtcacggaggggggagagaggggcggggatccggaagacgg

SEQ ID NO: 21057 - DNA, 120 bp, synthetic construct
  misc_feature 1..120: note = Artificially Synthesized Probe
  source 1..120: mol_type = other DNA
aacgttgtaaaaaacaaattaatctcagaattctaattgtttcctgattcccatttgctttcaagagagaacagagcctgctttccatccctttcctcttagcctcaccatcgtcccaca

SEQ ID NO: 21058 - DNA, 120 bp, synthetic construct
  misc_feature 1..120: note = Artificially Synthesized Probe
  source 1..120: mol_type = other DNA
tctgaacagggctgagttgtcacaggagatgaatgacaaggccggatatgttcagcctcatctttctgcccaaaaaacatcttagatgaactggagattttgtcaaagcgcagatgttga

SEQ ID NO: 21059 - DNA, 120 bp, synthetic construct
  misc_feature 1..120: note = Artificially Synthesized Probe
  source 1..120: mol_type = other DNA
tatttagtgagcacttatgaagtgccaggagctgttctagacccagttggggaagaaaacagctccttgctctcttgggctcctgttctcatggcgacatgtgtgttgcccatagaccag

SEQ ID NO: 21060 - DNA, 120 bp, synthetic construct
  misc_feature 1..120: note = Artificially Synthesized Probe
  source 1..120: mol_type = other DNA
tttaattctcttataaaacaagcgggtttgttattcttcgtggggtagatacagacctttgtaacctggtccacatgtctgatggctatcgatacatttgggtttcctgctttttcttgg

SEQ ID NO: 21061 - DNA, 120 bp, synthetic construct
  misc_feature 1..120: note = Artificially Synthesized Probe
  source 1..120: mol_type = other DNA
taaaacttctccttctatttgttttgttgtttccagcagtccttgttttgtttcctaatggttcctttttttgaagcagacaattctggttttctccaggctcctcctcagtaggtgaat

SEQ ID NO: 21062 - DNA, 120 bp, synthetic construct
  misc_feature 1..120: note = Artificially Synthesized Probe
  source 1..120: mol_type = other DNA
gtgttgggtttgtgtgaatcggagtatgtggtgtatgtatgtgtgtagtgtggggtttgtgttaatcagggtgtgtgtgtgatgtgataagtgtgtgatatgggatgtatgtgaattggg

SEQ ID NO: 21063 - DNA, 120 bp, synthetic construct
  misc_feature 1..120: note = Artificially Synthesized Probe
  source 1..120: mol_type = other DNA
taatgtgaggtgtgtgatgtgggatgtgtgatatagtgtgtgtgatgtgaggtatgtttgaggtagtgtgtgtgtaatgtgaggtgtgatttagtgtgtgcgtgatgtgaggtgtgtcta

SEQ ID NO: 21064 - DNA, 120 bp, synthetic construct
  misc_feature 1..120: note = Artificially Synthesized Probe
  source 1..120: mol_type = other DNA
tgtgcataatgtgaggtgtgtttgatgtagtgtgtgtgtgatgggggtgtgtctaatgtgaggtgtgtgtgtgtgatatgggatgtgtgatgtagtgtgtgtgatgtgaggtatgtttga

SEQ ID NO: 21065 - DNA, 120 bp, synthetic construct
  misc_feature 1..120: note = Artificially Synthesized Probe
  source 1..120: mol_type = other DNA
ggagatggataaatggtcttagagtaaaacgcctttcccttggcccaccctgcctccctagccttttccgtaatgcttctgtccctttgttaggccttggggatatagagttgaatgggg

SEQ ID NO: 21066 - DNA, 120 bp, synthetic construct
  misc_feature 1..120: note = Artificially Synthesized Probe
  source 1..120: mol_type = other DNA
cacccccccttattaattatctaattacaaccacattctccaagagagagcagcctttgactttctgcccaggaccacttaaaaaaggcttaaatatttggagtgctctgaactttgaaa

SEQ ID NO: 21067 - DNA, 120 bp, synthetic construct
  misc_feature 1..120: note = Artificially Synthesized Probe
  source 1..120: mol_type = other DNA
ccttggctcaggggagttctccaataattctcgctgaacactcacctcccgcgagctctgcaggtcaactggctgttctcatgtttgtgcaagaggtgtgggagtgagcacttacacggc

SEQ ID NO: 21068 - DNA, 120 bp, synthetic construct
  misc_feature 1..120: note = Artificially Synthesized Probe
  source 1..120: mol_type = other DNA
cacacaaaaacacacaaacactccacatacccacttacacacataaacacacaccacgcgccacacaaatataccacacactacacacacacccccacactgtacatacacaccacatac

SEQ ID NO: 21069 - DNA, 120 bp, synthetic construct
  misc_feature 1..120: note = Artificially Synthesized Probe
  source 1..120: mol_type = other DNA
tcgtgggtgtggtatgtgtggaaactgggtgaaaggcacatgggacatctctgtgttgtctttgcaacttcccgtgtgtctgcaattgttttgaaagcacgcattttaaagcaagaatcc

SEQ ID NO: 21070 - DNA, 120 bp, synthetic construct
  misc_feature 1..120: note = Artificially Synthesized Probe
  source 1..120: mol_type = other DNA
cagccctcttgctggtgacattgtcatggtcatcttgtttctgtttggatttttcttctgggtcttatgtttggggggaggtttattctttctgaaaatgtctagattcaggaacacatt

SEQ ID NO: 21071 - DNA, 120 bp, synthetic construct
  misc_feature 1..120: note = Artificially Synthesized Probe
  source 1..120: mol_type = other DNA
gttccagcaactcagtgagtctcagaactgtcatctgaccctgagcaatgcctatgagctcaaggaatttctacagtataaacaagacaagctcttttcaagaggcaatgaaaggcaggc

SEQ ID NO: 21072 - DNA, 120 bp, synthetic construct
  misc_feature 1..120: note = Artificially Synthesized Probe
  source 1..120: mol_type = other DNA
catctgccacctgggattactgtgaacgttaaactaatattcatagagtaagcgtgagtcaggtgtttgccgttattattaagcctcacagcagattgttcttaccgtccagaatttttt

SEQ ID NO: 21073 - DNA, 120 bp, synthetic construct
  misc_feature 1..120: note = Artificially Synthesized Probe
  source 1..120: mol_type = other DNA
cagactgcaccccgcctggtcaccagaacacggggctgtccccatcctcgcgcacgcggtagtactcgtggccttcgggcacggccttggctaggccaaagtccccgatcttgaccagcc

SEQ ID NO: 21074 - DNA, 120 bp, synthetic construct
  misc_feature 1..120: note = Artificially Synthesized Probe
  source 1..120: mol_type = other DNA
cagatgccaagaaccgcgtactgcagcctggggttgagagtctctaattggctaggccagactggccccgcccacaaggccacacccacgctctaaccacgccccctcaagtctctagga

SEQ ID NO: 21075 - DNA, 120 bp, synthetic construct
  misc_feature 1..120: note = Artificially Synthesized Probe
  source 1..120: mol_type = other DNA
gctaccccaggatccgattctagaggtaagaaaactttttcctgcaacagctgaaagagtccacttattgtacaaaatgatgcagagttggctgcatcaaaactgacacctgtttgggag

SEQ ID NO: 21076 - DNA, 120 bp, synthetic construct
  misc_feature 1..120: note = Artificially Synthesized Probe
  source 1..120: mol_type = other DNA
aatacaaaaattagcccggcgtggtggtgggcgcctgtagtcccagctacccaggaggctgaggcaggacaattacttgaacctgggagacggaggttgcagtgagccaagattgcacca

SEQ ID NO: 21077 - DNA, 120 bp, synthetic construct
  misc_feature 1..120: note = Artificially Synthesized Probe
  source 1..120: mol_type = other DNA
gtagaccacagctccttaatacactgaagcctcagcctttgcacaggccatgcactctgcctaggctgcccttcctagccaggcttgttggcataattctacacttagataaaacctctt

SEQ ID NO: 21078 - DNA, 120 bp, synthetic construct
  misc_feature 1..120: note = Artificially Synthesized Probe
  source 1..120: mol_type = other DNA
tggtcactctgcctaaaactgaaatcaagtctcttacttgccttctgtgtgccaggcacaagtgacttccacaaggacctaaaaaggctgggactacattgagccccagcgagtggccca

SEQ ID NO: 21079 - DNA, 120 bp, synthetic construct
  misc_feature 1..120: note = Artificially Synthesized Probe
  source 1..120: mol_type = other DNA
cccaaactgctgggattacaggtatgagccaccacacctggctatttgtttatttttaaaagatggggccagctgggcgtggtggctcacgcctggaatcccagcactttgggaggctga

SEQ ID NO: 21080 - DNA, 120 bp, synthetic construct
  misc_feature 1..120: note = Artificially Synthesized Probe
  source 1..120: mol_type = other DNA
gttgaaagtgagtttggggagagaagaaatgcggaatgcagcagaggcagcggtggatgagggcattggggtccaagtgggatggggcacggaagaagttgaagttcaagagagaaaggt

SEQ ID NO: 21081 - DNA, 120 bp, synthetic construct
  misc_feature 1..120: note = Artificially Synthesized Probe
  source 1..120: mol_type = other DNA
gtctcacaaaaaaagagataaaggtgagcctacaaagtaagcaactagggatgggggggatgggcatggataagcagaggctaggggcttgaggttggggtgtaggagatgtttgggtac

SEQ ID NO: 21082 - DNA, 120 bp, synthetic construct
  misc_feature 1..120: note = Artificially Synthesized Probe
  source 1..120: mol_type = other DNA
gttgggatgtaagttatgggctggaatatcgttaggggttggggtctaggttgaaggtcaaggtgtagcccgggatcagagtacaggtgagagttgagaaataggcataggttggggtgt

SEQ ID NO: 21083 - DNA, 120 bp, synthetic construct
  misc_feature 1..120: note = Artificially Synthesized Probe
  source 1..120: mol_type = other DNA
ggacaagtgtcagacacagccactcttgtggggacactaactctggacacacagccacttacatggagacacaatgcagcagcaggcacacacctgcttttttgtttatttgtttgtatt

SEQ ID NO: 21084 - DNA, 120 bp, synthetic construct
  misc_feature 1..120: note = Artificially Synthesized Probe
  source 1..120: mol_type = other DNA
caatcacacaagcaaaggacaacgatcccagacacaactaatcacccaatatgacagggcaacataggggccagggcatcccagacacagaggtgacacaaacatgcactataaagtgtc

SEQ ID NO: 21085 - DNA, 120 bp, synthetic construct
  misc_feature 1..120: note = Artificially Synthesized Probe
  source 1..120: mol_type = other DNA
gacaaaaaataaaaaaaaaataagacgtgcacctacacacacaccctgcacagcccctagggctcacagtctagttggcacccttggcggtggcccccagcgccccccacccagcactca

SEQ ID NO: 21086 - DNA, 120 bp, synthetic construct
  misc_feature 1..120: note = Artificially Synthesized Probe
  source 1..120: mol_type = other DNA
atacacatgctggaagccggacccttagggaaggcagagagaagaatcctgaccccctcacacccaggtgccagtccccagatgaaggggttccctggaggtgcagaccccagaaataag

SEQ ID NO: 21087 - DNA, 120 bp, synthetic construct
  misc_feature 1..120: note = Artificially Synthesized Probe
  source 1..120: mol_type = other DNA
attcttaaagtggtggatctcctcctcggtcgacagctcccacagtgatgccacgtcattcacaaactcatgcttgccctgggaacaggaaattgagcagaaagggaggtgtgagaatgc

SEQ ID NO: 21088 - DNA, 120 bp, synthetic construct
  misc_feature 1..120: note = Artificially Synthesized Probe
  source 1..120: mol_type = other DNA
caagcttactctagccagagaactctaatttcctgcgtcttaccaccttgaggaggggagagaccaccatttactggaaaggccaaatacacagcatacacccctcctcttgtcaatctt

SEQ ID NO: 21089 - DNA, 120 bp, synthetic construct
  misc_feature 1..120: note = Artificially Synthesized Probe
  source 1..120: mol_type = other DNA
attctcttgccaccttcaccacccgaggtatgatgaaggcttcttgtgacagatggtgaagctgtaagacagaggtgaaccatccaacctgtacttgattttaagtaaaacttttttttt

SEQ ID NO: 21090 - DNA, 120 bp, synthetic construct
  misc_feature 1..120: note = Artificially Synthesized Probe
  source 1..120: mol_type = other DNA
ccaccaccttcaaatgcaaacctcaaccccaatccagtctccagacttgctgtaatttcccacaccagctacccagggtatctttcttctactgatgtcatttaaaaattgtacctgtcg

SEQ ID NO: 21091 - DNA, 120 bp, synthetic construct
  misc_feature 1..120: note = Artificially Synthesized Probe
  source 1..120: mol_type = other DNA
gaaaaaaaaaaattggctggccatggtggggtgcacctttagtcccagctactccggaggttgacgcaggacaatcgcttgaacccgggaggtggagggtgcagtgagccgagattgtgc

SEQ ID NO: 21092 - DNA, 120 bp, synthetic construct
  misc_feature 1..120: note = Artificially Synthesized Probe
  source 1..120: mol_type = other DNA
aaaaaagttatgaactgtaaatgtgtggtattatactgcagacgtccctctgcaatgtgctttttcaggctacgagaggttataaagcttcatgcagaatgacatgagtaattctggtta

SEQ ID NO: 21093 - DNA, 120 bp, synthetic construct
  misc_feature 1..120: note = Artificially Synthesized Probe
  source 1..120: mol_type = other DNA
tgggtttttttttttttttgaagcaggatcttgctctgacatataggctggaatacagtggtgcaatcatggctcagtgcagccatgacctccctggctcaagcagtcctcctgcctcag

SEQ ID NO: 21094 - DNA, 120 bp, synthetic construct
  misc_feature 1..120: note = Artificially Synthesized Probe
  source 1..120: mol_type = other DNA
cctgacctcaagtgatccacccgccttggcctccctaagcgcaaggattacaagtgtgagctacggcacctggccaatgtttcatatttttgttttttgagaccgagtctctgtcaccca

SEQ ID NO: 21095 - DNA, 120 bp, synthetic construct
  misc_feature 1..120: note = Artificially Synthesized Probe
  source 1..120: mol_type = other DNA
tccagcctgggcgacagagcgagactctgtctcaaacaacacaacaaaacaaaacaaagaatcagccatggccaggctcgagggtgcacacttgtaatcccaacactttgggagtctgag

SEQ ID NO: 21096 - DNA, 120 bp, synthetic construct
  misc_feature 1..120: note = Artificially Synthesized Probe
  source 1..120: mol_type = other DNA
tctacgaaagaaaaaaaaaaaaagactcagccatcaatggggaagtaggaagtgttataaaaattgattacaatgcccccatccagtcatggaaagctgggaatgggggaggtaagagga

SEQ ID NO: 21097 - DNA, 120 bp, synthetic construct
  misc_feature 1..120: note = Artificially Synthesized Probe
  source 1..120: mol_type = other DNA
tggctacattttgtatttttagtagagatgcggtttcactacattggccaggctggtcttgaactcctgatctcaggtgatctgcccgcctcagcctctgaaagtgttgggattacaggc

SEQ ID NO: 21098 - DNA, 120 bp, synthetic construct
  misc_feature 1..120: note = Artificially Synthesized Probe
  source 1..120: mol_type = other DNA
ctgcacctggccaagttttctgatttattatatttcttgctgtcctccctactaaaatttcagctctacaaaggcagtgatttgcagctgccacacagtagatgcttacaaaatgttcac

SEQ ID NO: 21099 - DNA, 120 bp, synthetic construct
  misc_feature 1..120: note = Artificially Synthesized Probe
  source 1..120: mol_type = other DNA
gctgcttgcacacccaccccagtccccatggtgccaacgccccagactcaccaactttatgtgcaatgtggatgcagacttcctcagctgtcagcgatgactcactgaaagtgacccagg

SEQ ID NO: 21100 - DNA, 120 bp, synthetic construct
  misc_feature 1..120: note = Artificially Synthesized Probe
  source 1..120: mol_type = other DNA
ctctgacctcaggtgatccacccgcctcggcctcccaaagtgctgggattacaggcgtgagccactgtgcccggcctctacaagaaatttttaaaatttagccaggcgtgggggtgcaca

SEQ ID NO: 21101 - DNA, 120 bp, synthetic construct
  misc_feature 1..120: note = Artificially Synthesized Probe
  source 1..120: mol_type = other DNA
acagaccctgattcaggcacacacaaaaagaacaaatatgaccaaaacaagaataacataattgttattagtttcatcgtggtgatggcctctttcaggccacaattctcctctcccaca

SEQ ID NO: 21102 - DNA, 120 bp, synthetic construct
  misc_feature 1..120: note = Artificially Synthesized Probe
  source 1..120: mol_type = other DNA
aggcggcgggaagaggagagcactgaagctggcgcgggaacttggtttcctggtggcctcccatccaatccccacgaaccagctttcctcttaaaccttgaaaagagaaattcgggagtt

SEQ ID NO: 21103 - DNA, 120 bp, synthetic construct
  misc_feature 1..120: note = Artificially Synthesized Probe
  source 1..120: mol_type = other DNA
tggagaaaataatgcttagtaggcaattctgataaaagcaggtgcttgcaaaaatctctctgttgtctgaatataaactgtaccacaagcgagtgcggatgaacgaggactgcatttaaa

SEQ ID NO: 21104 - DNA, 120 bp, synthetic construct
  misc_feature 1..120: note = Artificially Synthesized Probe
  source 1..120: mol_type = other DNA
atgtcaaaaacaaaaaaagacaccaccaaaggtcaaagcatatcattcctcaccctcaagcccttagtggctccatttcactcagtaagagccacggtccttatggtgtccgtttttcag

SEQ ID NO: 21105 - DNA, 120 bp, synthetic construct
  misc_feature 1..120: note = Artificially Synthesized Probe
  source 1..120: mol_type = other DNA
cgggacaaactcaacaatagaaagggaggaagcaagatactcagaaataaaatgcattcccctgtttcaacttaatgcttcaattcaggattctaaggaatccttgccaggaatgtcaga

SEQ ID NO: 21106 - DNA, 120 bp, synthetic construct
  misc_feature 1..120: note = Artificially Synthesized Probe
  source 1..120: mol_type = other DNA
taaggtctgggggatgagtcaatgtcacaggagctgatgtatagctttgaccttgtgaggggtggtgccaggttaagccacaattaagcctcatgaaggccgtttcacactctttttttt

SEQ ID NO: 21107 - DNA, 120 bp, synthetic construct
  misc_feature 1..120: note = Artificially Synthesized Probe
  source 1..120: mol_type = other DNA
ctagatccctgaggaatcgccacactgacttccacaatggttgaactagtttacagtcccaccaacagtataaaagtgttcctatttctccacatcctctccagcacctgttgtttcctg

SEQ ID NO: 21108 - DNA, 120 bp, synthetic construct
  misc_feature 1..120: note = Artificially Synthesized Probe
  source 1..120: mol_type = other DNA
ggtagcttgatggggatggcattgaatctataaattaccttgggcagtatggccattttcacgatattgattcttcctacccatgagcatggaatggtcttccatttctttgtatcctct

SEQ ID NO: 21109 - DNA, 120 bp, synthetic construct
  misc_feature 1..120: note = Artificially Synthesized Probe
  source 1..120: mol_type = other DNA
tttttctattgattggaatagtttcagaaggaatggtaccagttcctctttgtacctctggtagaattcggctgtgaatccatctggtcctggactctttttggttggtaagctattgat

SEQ ID NO: 21110 - DNA, 120 bp, synthetic construct
  misc_feature 1..120: note = Artificially Synthesized Probe
  source 1..120: mol_type = other DNA
atactgtgtcatcggcagatagctgcatggttggtgttcgtgctggggaatgggaagttcatcggtgggacaagggacaaaatgcccccattgctttgttgtggctttaatctccctttc

SEQ ID NO: 21111 - DNA, 120 bp, synthetic construct
  misc_feature 1..120: note = Artificially Synthesized Probe
  source 1..120: mol_type = other DNA
atgagatctgttaaatgttagcaacttcaggaagtttaaaaatgctgtgtggacctagaataggcaagttcttaaaggcagaaagtggaatgctagtttccagggactggggaacaggga

SEQ ID NO: 21112 - DNA, 120 bp, synthetic construct
  misc_feature 1..120: note = Artificially Synthesized Probe
  source 1..120: mol_type = other DNA
ccagtttcccccagtgataatatcttgggtaacatcctgtatacattcacattggtgcattcctcagagttgtcagattttgctagttttacgtgcacttgtgtatgtgtgtatttgcaa

SEQ ID NO: 21113 - DNA, 120 bp, synthetic construct
  misc_feature 1..120: note = Artificially Synthesized Probe
  source 1..120: mol_type = other DNA
tgattaatgtatgtacctgtcctctctttttgacaattctacagattattcaggacagggagttgaccaactgcaaagagtgattgacaccatcaaaaccaaccctgacgacagaagaat

SEQ ID NO: 21114 - DNA, 120 bp, synthetic construct
  misc_feature 1..120: note = Artificially Synthesized Probe
  source 1..120: mol_type = other DNA
atgttaacattttaaatggaagcagatgaagttccagctcgctgccacctcactaacatttttaacaattatattgtaaaattcaactctaccagggtgtagagccaggtgtggtggctc

SEQ ID NO: 21115 - DNA, 120 bp, synthetic construct
  misc_feature 1..120: note = Artificially Synthesized Probe
  source 1..120: mol_type = other DNA
gatatgtgtaagtaagaaatgaaccagcttttactttgaaaccttcctcttctggaaggttttctggccctgtggtatacgcactaacagatctatacaggttgtttgtgatacagcttc

SEQ ID NO: 21116 - DNA, 120 bp, synthetic construct
  misc_feature 1..120: note = Artificially Synthesized Probe
  source 1..120: mol_type = other DNA
ggcaataaaaatgtaagttcatctgcttcatgagccttaaggaaaaaaactcagaaccagacactttttagccccttccaggttagatccaggttttaaaagttactcctttgagggagt

SEQ ID NO: 21117 - DNA, 120 bp, synthetic construct
  misc_feature 1..120: note = Artificially Synthesized Probe
  source 1..120: mol_type = other DNA
ggggttgggctggatgccgaggtaaaagttctttttgctctaaaagaaaaaggaactaggtcaaaaatctgtccgtgacctatcagttattaatttttaaggatgttgccactggcaaat

SEQ ID NO: 21118 - DNA, 120 bp, synthetic construct
  misc_feature 1..120: note = Artificially Synthesized Probe
  source 1..120: mol_type = other DNA
tgagacacaccctgatttcaggtgtgaaaagtttcaggagaaaaaaatgtgcaacttagaagtgaacaggtgtaataccttgcatcttctgtcttcttctagaaccaactcaaatggtca

SEQ ID NO: 21119 - DNA, 120 bp, synthetic construct
  misc_feature 1..120: note = Artificially Synthesized Probe
  source 1..120: mol_type = other DNA
taaaaatatgtactatgttctaagcactgccttttaaaaaacagaaacgacacctatgccaaaattttttttttggaagggggagggttgtgaggggagaaagaagccactgagcttaac

SEQ ID NO: 21120 - DNA, 120 bp, synthetic construct
  misc_feature 1..120: note = Artificially Synthesized Probe
  source 1..120: mol_type = other DNA
acgttcatctcctctacttccccatacttctcctccatttctgtaaaaacctcctgaagggagaccacagtggtttaagactcgttatacattacaaagtgtcattagatataactcatg

SEQ ID NO: 21121 - DNA, 120 bp, synthetic construct
  misc_feature 1..120: note = Artificially Synthesized Probe
  source 1..120: mol_type = other DNA
aaacctgaaagcagggtcgatgattaaaagctgatgttcctaactagtcttttatggactgccagccatggtatgctctcaaattcttctgatgtgattaaaatccaagcaaccatgaag

SEQ ID NO: 21122 - DNA, 120 bp, synthetic construct
  misc_feature 1..120: note = Artificially Synthesized Probe
  source 1..120: mol_type = other DNA
ggtgtgagccgccgtgcccggcgcaagtattcttaagttttatattcccaaactattttcatcagtttattcttcataattcacatgtattaggtaaaatcatgtctgttgcgtgggtaa

SEQ ID NO: 21123 - DNA, 120 bp, synthetic construct
  misc_feature 1..120: note = Artificially Synthesized Probe
  source 1..120: mol_type = other DNA
aattttattaagtgtaactactcggacagcctgccaatcatatcacaggatatcccaattggaaagctattgggaatgtaccttcctccccgagtagaaatcaagttataaacggccaaa

SEQ ID NO: 21124 - DNA, 120 bp, synthetic construct
  misc_feature 1..120: note = Artificially Synthesized Probe
  source 1..120: mol_type = other DNA
ctggttcaagggtgtactcaatttaggcttgtggatatccaagggcacctcaatttttactgctttaaaacagaatggtgaatgggaagtgcctatctttggtttggactttctgatttt

SEQ ID NO: 21125 - DNA, 120 bp, synthetic construct
  misc_feature 1..120: note = Artificially Synthesized Probe
  source 1..120: mol_type = other DNA
gggaagagttttgagggttacggtaaatgttcaagagggcaatggtctgaaatacaaaacgcaacaactttatattatggaaaattaaaggtaaacacttaaccggctgcctctggcaag

SEQ ID NO: 21126 - DNA, 120 bp, synthetic construct
  misc_feature 1..120: note = Artificially Synthesized Probe
  source 1..120: mol_type = other DNA
tccagcaccttgtcctgtttgcaacagctctatgtcagcagctcagaagccaacattatttgtctcaattaagagtgggctctttaacaccattgttttaaaaaaatttctccaactgtg

SEQ ID NO: 21127 - DNA, 120 bp, synthetic construct
  misc_feature 1..120: note = Artificially Synthesized Probe
  source 1..120: mol_type = other DNA
ttagtctcaacaatatccacgtgaagcagttttgtaagtggtggttttataaaaccagccagctccatttctagctctgtttaaaggggagtggttgtatgaagagttcctcagtcaaag

SEQ ID NO: 21128 - DNA, 120 bp, synthetic construct
  misc_feature 1..120: note = Artificially Synthesized Probe
  source 1..120: mol_type = other DNA
tcatgttcagagctatcaaaagacagactgctattatactaaccacttggtaattagcataatggagggaaaagccatcatcctcttcccttctaaaaacactgtgtgctgtggggtcgt

SEQ ID NO: 21129 - DNA, 120 bp, synthetic construct
  misc_feature 1..120: note = Artificially Synthesized Probe
  source 1..120: mol_type = other DNA
aatatcaggcacagccaacacacaaacatcaaaaactgatttttaaagtttctctaatgataaaaacaaggagtggtggtctcagaccttccactggaagtcgatcacctgcctcactat

SEQ ID NO: 21130 - DNA, 120 bp, synthetic construct
  misc_feature 1..120: note = Artificially Synthesized Probe
  source 1..120: mol_type = other DNA
aacgaagttcagagtctctctaaacgcatgacaccagaccaacagggagtttcaaaaaataggtctgaagtaaatcaattctcctggtctcaatacactgaaaacaaactattaggggac

SEQ ID NO: 21131 - DNA, 120 bp, synthetic construct
  misc_feature 1..120: note = Artificially Synthesized Probe
  source 1..120: mol_type = other DNA
gttcttcaccctaaactcagaagagtctcttgttccgatagagctggtctattcattcgccaagatcataccgtgagttccttaaggataatatccaaattttacccatgtttaagtctc

SEQ ID NO: 21132 - DNA, 120 bp, synthetic construct
  misc_feature 1..120: note = Artificially Synthesized Probe
  source 1..120: mol_type = other DNA
gtcttcaagaacagtcaccgacttacaaattttcaacttagatgatgggtttatcggggtattaaaggcattttcgattcatgatgggtttatcggaacgcaatcccatggtaaatccag

SEQ ID NO: 21133 - DNA, 120 bp, synthetic construct
  misc_feature 1..120: note = Artificially Synthesized Probe
  source 1..120: mol_type = other DNA
taacacactactctcctacggtggctccctgatttgtttggtatatggaaatttgtgaatttgactcttccttacacctatcaaattccatctacactgtatgcattaccaggattcagc

SEQ ID NO: 21134 - DNA, 120 bp, synthetic construct
  misc_feature 1..120: note = Artificially Synthesized Probe
  source 1..120: mol_type = other DNA
cagacaaaggaaattggcagtcagcattagtgagtcattttacagttctaagatgtaggcattgtgataattactctgtggcacacatctgtatgtttgtgacgaaaaggacagtgtctg

SEQ ID NO: 21135 - DNA, 120 bp, synthetic construct
  misc_feature 1..120: note = Artificially Synthesized Probe
  source 1..120: mol_type = other DNA
ggtgttggcaggacattgttaggactggggaatggggaacatggtcatcatttacaagagaacatggtacaactagattcagcagcaggagtagtttacatgtgttgagtgtgtgtgtgt

SEQ ID NO: 21136 - DNA, 120 bp, synthetic construct
  misc_feature 1..120: note = Artificially Synthesized Probe
  source 1..120: mol_type = other DNA
aattaattggaatgtggatggggagcaaaagtggacaaccagggctgagtcttggtatgaatctaaaccaactgttgagtgtctttcttttttgaaatgaatacattagccctcgtgtct

SEQ ID NO: 21137 - DNA, 120 bp, synthetic construct
  misc_feature 1..120: note = Artificially Synthesized Probe
  source 1..120: mol_type = other DNA
tttccaagttgaaaagaaagcaaaaagatacaacagtcaggcaggactcagaaatcatatagcacaatttaaactggaaggccataagtaatatttccacaggtctgaaggaaagaaagc

SEQ ID NO: 21138 - DNA, 120 bp, synthetic construct
  misc_feature 1..120: note = Artificially Synthesized Probe
  source 1..120: mol_type = other DNA
atccactaccctatatcttttctctctgtgtgtatacatatactaattaaaggtatcgaatggtatatactcagtgtgaatagttatttctgaatgcttattactgagcgtattatcatt

SEQ ID NO: 21139 - DNA, 120 bp, synthetic construct
  misc_feature 1..120: note = Artificially Synthesized Probe
  source 1..120: mol_type = other DNA
gggatgtcctaatttgaggatggagtgagaagtgggtgtgtaataataacacattagcagaatttgagagacagaaggggtcaaaaagctgtaatgtaactctctaaagaaggatacgtt

SEQ ID NO: 21140 - DNA, 120 bp, synthetic construct
  misc_feature 1..120: note = Artificially Synthesized Probe
  source 1..120: mol_type = other DNA
cagtgtataatgagttttgattttcatatggaaagaacattactagctgcattgtctctcccattagtaaaaagctgtgtaccaggattccaggctgtactgaccttctgtggaatctgg

SEQ ID NO: 21141 - DNA, 120 bp, synthetic construct
  misc_feature 1..120: note = Artificially Synthesized Probe
  source 1..120: mol_type = other DNA
aataagggacaactcttctcatgctaactgaaattgttacccccaaggcttaatttaaccaatcaacagggttgtttgcaaactcataaaaacagtttttggagggaagcccaacaaagg

SEQ ID NO: 21142 - DNA, 120 bp, synthetic construct
  misc_feature 1..120: note = Artificially Synthesized Probe
  source 1..120: mol_type = other DNA
cagatgtatcctgcattccctgtgcaaatatttgttgggatcacactggaatcactgatgtatcactttatgactagccaaataactaggggagggtgatatcttaagtgaaaatagatt

SEQ ID NO: 21143 - DNA, 120 bp, synthetic construct
  misc_feature 1..120: note = Artificially Synthesized Probe
  source 1..120: mol_type = other DNA
gtaaatattactgttcataatgctatgtggcttggtaagactagggcagtatccttcgtaatttctatgatctggttttctgtcccaccaagtccagtatcaaggtgtagacacactgat

SEQ ID NO: 21144 - DNA, 120 bp, synthetic construct
  misc_feature 1..120: note = Artificially Synthesized Probe
  source 1..120: mol_type = other DNA
agaaagggaagaagagagggagtagagtggggcctgggaaaggaaggaaggagggaggattttttgttagtgaaaaagaagtaatgtgtaagtgtaatttcacaataataaatcaaccaa

SEQ ID NO: 21145 - DNA, 120 bp, synthetic construct
  misc_feature 1..120: note = Artificially Synthesized Probe
  source 1..120: mol_type = other DNA
acagatctaaaccatctcagtggggaaggcttatgacctggggcatttttgagttttgagaggagtgtgcctggaatccagttacctgatgctagtggaatactgcaaatgtgagaactg

SEQ ID NO: 21146 - DNA, 120 bp, synthetic construct
  misc_feature 1..120: note = Artificially Synthesized Probe
  source 1..120: mol_type = other DNA
tagtctggccctcagagactcttactcttgggcaaaggagggctgtaccacaaccatgcaacttgagaaattaaagggtagagtaaaactaagacaacttgaataattaatataatcaag

SEQ ID NO: 21147 - DNA, 120 bp, synthetic construct
  misc_feature 1..120: note = Artificially Synthesized Probe
  source 1..120: mol_type = other DNA
agtttcataaacctttacaattgttgtagaactttatatgtgattctaaaatccatacggaaaagcaaagagccaaaaataatcaaggaactccagatgaagagatacaagaggaaggaa

SEQ ID NO: 21148 - DNA, 120 bp, synthetic construct
  misc_feature 1..120: note = Artificially Synthesized Probe
  source 1..120: mol_type = other DNA
tatcagtgatggaagatcaaatgaatgaaatgaagcgagaagagaagtttagagaaaaaagaataaaaagaaacgaacaaagcctccaagaaatatgggactatgtgaaaagaccaaatc

SEQ ID NO: 21149 - DNA, 120 bp, synthetic construct
  misc_feature 1..120: note = Artificially Synthesized Probe
  source 1..120: mol_type = other DNA
caaaagagacaaagaaggccattacataatggtaaaaggatcaattcaacaagaagagctagctgtcctaaatatatatgcacccaatacaggagcacccagattcataaagcaagtcct

SEQ ID NO: 21150 - DNA, 120 bp, synthetic construct
  misc_feature 1..120: note = Artificially Synthesized Probe
  source 1..120: mol_type = other DNA
taaactagaaaatctaaaagaaatgaataaattccttgacacgtacaccctcccaagactaaatcaggaagacattgaatctctgaatagaccaataacaggctctgaaattgaggcaat

SEQ ID NO: 21151 - DNA, 120 bp, synthetic construct
  misc_feature 1..120: note = Artificially Synthesized Probe
  source 1..120: mol_type = other DNA
gagtgagctcccattcacaattgcttcaaagagaataaaatacctaggaatccaacttacaagggacgtaaggacctcttcaagaactacaaaccactgctcaatgaaataaaagaggat

SEQ ID NO: 21152 - DNA, 120 bp, synthetic construct
  misc_feature 1..120: note = Artificially Synthesized Probe
  source 1..120: mol_type = other DNA
ccaaaagacacatgaaaaaatgctcatcatcactggccatcagagaaatgcaaaacaaaaccacaatgagataccatctcacaccagttagaatggcgatcattaaaaagtcaggaaaca

SEQ ID NO: 21153 - DNA, 120 bp, synthetic construct
  misc_feature 1..120: note = Artificially Synthesized Probe
  source 1..120: mol_type = other DNA
cacttccattaaatttaaaatctacgattcattatctgatattaaaagataatgagaaaaccatcataaactgtaggaagatatctgcaatatataaaactggctcaggctcatctagaa

SEQ ID NO: 21154 - DNA, 120 bp, synthetic construct
  misc_feature 1..120: note = Artificially Synthesized Probe
  source 1..120: mol_type = other DNA
gaacaggagacacatagcaaatgttcactgcattccacaaaaaaattacagtcaattgtcaattgacagaatgtcatgctatagtcacctgatggaaaactgtcatagaacttggggaaa

SEQ ID NO: 21155 - DNA, 120 bp, synthetic construct
  misc_feature 1..120: note = Artificially Synthesized Probe
  source 1..120: mol_type = other DNA
aagtgacaccaggaatgcccatatgcagagaaaaagctatatgagaatataagatggtggccataaaaacttcaagaaaaaacagacctggcaaaccctgattttggacgtctagccatc

SEQ ID NO: 21156 - DNA, 120 bp, synthetic construct
  misc_feature 1..120: note = Artificially Synthesized Probe
  source 1..120: mol_type = other DNA
tgaatggttcattctgaagatacacagtatgttttagggtgggaaagtaggaaagcctaatggattgccctagtttccctcattacacatacgcattcacataagttcaactccccaaat

SEQ ID NO: 21157 - DNA, 120 bp, synthetic construct
  misc_feature 1..120: note = Artificially Synthesized Probe
  source 1..120: mol_type = other DNA
gtaccagtttgaaaagagacagatagacgaatggagcagaaaacaaaactcattaataaagccacacaaaaccatttgatttttcacaatatggacaaaaacaagaaatagggaaaccac

SEQ ID NO: 21158 - DNA, 120 bp, synthetic construct
  misc_feature 1..120: note = Artificially Synthesized Probe
  source 1..120: mol_type = other DNA
tgattaaaaactctcaaaacaactgagtatagaaggaacatagctcaacattataaaagccataaaccgcaaacctacaggtagcatcatattgaatgagtacaaattgaaagcctttct

SEQ ID NO: 21159 - DNA, 120 bp, synthetic construct
  misc_feature 1..120: note = Artificially Synthesized Probe
  source 1..120: mol_type = other DNA
caacaaagctgccaaatacatacattgggaaaggaatggactcttaatggtgctgggaagctaggtatctatatgtagaacaatgaaagtggacctctgagtagtctgttctcacattac

SEQ ID NO: 21160 - DNA, 120 bp, synthetic construct
  misc_feature 1..120: note = Artificially Synthesized Probe
  source 1..120: mol_type = other DNA
atggaaaaagggaacccttgtgcactgttggtgggaatataaaattggtgcagccactatggagaagagtgtggatatttctcaaaaaactaaaaataaaactaccatatgatccgacaa

SEQ ID NO: 21161 - DNA, 120 bp, synthetic construct
  misc_feature 1..120: note = Artificially Synthesized Probe
  source 1..120: mol_type = other DNA
tgtaccccaccaacaaaaaggaactgaagtgtttgcaacttccagtttaccatttcctgtaaagccactggcttacccattcaattaatttgagagaaatgaagccagaaaaaattgata

SEQ ID NO: 21162 - DNA, 120 bp, synthetic construct
  misc_feature 1..120: note = Artificially Synthesized Probe
  source 1..120: mol_type = other DNA
gacgtacaaaaccaagatgaacacacacaacatatttaataggaaatattgtagccattctctaagcactagtttccttcatattcaggaagaaagactgtttcaaattagggctagtgc

SEQ ID NO: 21163 - DNA, 120 bp, synthetic construct
  misc_feature 1..120: note = Artificially Synthesized Probe
  source 1..120: mol_type = other DNA
tcttggtgaattctaacacatttctaactttgtttattgaaagggtctttgtctatttctgctgccaaaaataaatttattttaaccatgtggccgttgaatgagaatttaaacagacca

SEQ ID NO: 21164 - DNA, 120 bp, synthetic construct
  misc_feature 1..120: note = Artificially Synthesized Probe
  source 1..120: mol_type = other DNA
aataaatctaacataaaaggaatataatctttttcaggtgaattattccatttgtgtgaaacttaaacacattctaaaacctgtgataaaaaataatgaactcagaatcatcctgttacc

SEQ ID NO: 21165 - DNA, 120 bp, synthetic construct
  misc_feature 1..120: note = Artificially Synthesized Probe
  source 1..120: mol_type = other DNA
ccaaaacagtatggcactggtacaaaaacagaaacatagacaaaggaaacagaatagagagctcataaataaggctacacacctaacaaccatcagatcttctacaaaactgacaaaacc

SEQ ID NO: 21166 - DNA, 120 bp, synthetic construct
  misc_feature 1..120: note = Artificially Synthesized Probe
  source 1..120: mol_type = other DNA
ctatcaacgacagattggataaagaatgtgtggtatatatgcatcatagaaaactacacagccataaaaaggaaagagaacatgttttttgcaggaacatagatggagctggggggaggg

SEQ ID NO: 21167 - DNA, 120 bp, synthetic construct
  misc_feature 1..120: note = Artificially Synthesized Probe
  source 1..120: mol_type = other DNA
tcaaacacattcatccagcggtccacatcctatgtcttggcttcggtgtaggacatttcctgacaaaaattgctaaaaattcagcctcatttataattctgctaagccaacaattaggtc

SEQ ID NO: 21168 - DNA, 120 bp, synthetic construct
  misc_feature 1..120: note = Artificially Synthesized Probe
  source 1..120: mol_type = other DNA
gacttgagcaaaagcatttcagaaaatacaaacaagaaagataaagattttacaaaattaatgctggccagaatgcccaggacaagcaccttaaaaaagcatcttatagattgtgaaatg

SEQ ID NO: 21169 - DNA, 120 bp, synthetic construct
  misc_feature 1..120: note = Artificially Synthesized Probe
  source 1..120: mol_type = other DNA
ctacctttgttgtggttgtgtgtaaaatttgcaattagtatcatttttagcataacaactttacgacagtatacttcctgtatctcttcccagattttgtgttattgttgccatacagtt

SEQ ID NO: 21170 - DNA, 120 bp, synthetic construct
  misc_feature 1..120: note = Artificially Synthesized Probe
  source 1..120: mol_type = other DNA
ccctatttttgtttttaggtctacactatagcacttatgtaaatttaaaatttacatacagaaatacagagcaactgctaaaaagtctaaagatgtatcttttcaaaagccccaggcagg

SEQ ID NO: 21171 - DNA, 120 bp, synthetic construct
  misc_feature 1..120: note = Artificially Synthesized Probe
  source 1..120: mol_type = other DNA
ttttggaaccttcttcacagtagttcctgtattcttttgaaatggctccatcatttctgagcacttttcactttttggtattactagatggtttagactcgacttctgttttcgctgcct

SEQ ID NO: 21172 - DNA, 120 bp, synthetic construct
  misc_feature 1..120: note = Artificially Synthesized Probe
  source 1..120: mol_type = other DNA
gaaaatctcctaaggccaattcaaactgttcagaaaaggactgaagaacaaatatatttaaggttcataaacactcatgaatacaaaggcaagtgtccctgtatcaaattatgagcaaac

SEQ ID NO: 21173 - DNA, 120 bp, synthetic construct
  misc_feature 1..120: note = Artificially Synthesized Probe
  source 1..120: mol_type = other DNA
tctacactgagagagataatctttcaatttccctcagctattagtctcaaaggggattcattgttgaacccaaattgataccaaagagaaagggagccaggtgatatcaggtgatacatg

SEQ ID NO: 21174 - DNA, 120 bp, synthetic construct
  misc_feature 1..120: note = Artificially Synthesized Probe
  source 1..120: mol_type = other DNA
taaatcctgtacaactctactggaagaggacccctgcaagcttgcaactgatcttttctgggctacccttcataggtcttttctctctccttattttaatctgtaatctgtattattttg

SEQ ID NO: 21175 - DNA, 120 bp, synthetic construct
  misc_feature 1..120: note = Artificially Synthesized Probe
  source 1..120: mol_type = other DNA
tatatatgttttattatgttagcgaactggtatacagaccctaaaggtgaaaccgtgaatgcaattctaccgctggaggaattcctgatttaccaagtctccagcacacccacatacaca

SEQ ID NO: 21176 - DNA, 120 bp, synthetic construct
  misc_feature 1..120: note = Artificially Synthesized Probe
  source 1..120: mol_type = other DNA
tgaaaaagagaacaactgtagccactacatcagggtattttgggaatttgaagactacggacatattactaggctccactgatgctgggataccaactttaatgaaatcacaattgagct

SEQ ID NO: 21177 - DNA, 120 bp, synthetic construct
  misc_feature 1..120: note = Artificially Synthesized Probe
  source 1..120: mol_type = other DNA
gccagtacacccacgttatgatttctttgaaacatccaatggcttcatcatttaggccaaaagagcataatctcacggaggataatttctatttatgaccaactaaaaacaggagggtgg

SEQ ID NO: 21178 - DNA, 120 bp, synthetic construct
  misc_feature 1..120: note = Artificially Synthesized Probe
  source 1..120: mol_type = other DNA
agaagccaagaaagtgtttaccattaaataggagttgtggggactgataagcggatgaaagaggagttatggattgcattcatgttttgtttattaatttgagtgctggttgcaagggtg

SEQ ID NO: 21179 - DNA, 120 bp, synthetic construct
  misc_feature 1..120: note = Artificially Synthesized Probe
  source 1..120: mol_type = other DNA
ccagggaaagggtgggaagcagggtatgagaattagagtggggataggaaacggagagaagcaataaatacaacactgggcccagaaaagaaactatagttgaaatacaaataatacatt

SEQ ID NO: 21180 - DNA, 120 bp, synthetic construct
  misc_feature 1..120: note = Artificially Synthesized Probe
  source 1..120: mol_type = other DNA
ggcttaacctttctattgctgcagcaaaggctagtctcaaattctacagtgagaactatctatttgctgtacagcagatctcttagaagttgaggaagaaataaagttcagaggctgggt

SEQ ID NO: 21181 - DNA, 120 bp, synthetic construct
  misc_feature 1..120: note = Artificially Synthesized Probe
  source 1..120: mol_type = other DNA
gatcctcctaacgaatatagtgaaatttttaaccctattttaaagaagagaaagcactgtgactctaaagtttcagttacttgtctgagatcccagttagccagtggaacctgaagccac

SEQ ID NO: 21182 - DNA, 120 bp, synthetic construct
  misc_feature 1..120: note = Artificially Synthesized Probe
  source 1..120: mol_type = other DNA
cagggatcttatggattctgactttcacttccctcaggtctttggcctgatgtcattctttcatttgatactttctctgcctgctctatttaaatatgcaaactcactctaagaactatc

SEQ ID NO: 21183 - DNA, 120 bp, synthetic construct
  misc_feature 1..120: note = Artificially Synthesized Probe
  source 1..120: mol_type = other DNA
atgaattccattctccccagtaggactgaaatatatagtcttgcagagaataagatatggtatttttaatcctttcaccaaaggtcatctggtcagtgagctctgataaggctgccggta

SEQ ID NO: 21184 - DNA, 120 bp, synthetic construct
  misc_feature 1..120: note = Artificially Synthesized Probe
  source 1..120: mol_type = other DNA
accaatggctaccatctgtaggccaaattaacacattcccacttagaacaacttcagtcagagtcaaattaaaaaccagcatctggacaaacttcttaggcatggtaaaatcccttatgg

SEQ ID NO: 21185 - DNA, 120 bp, synthetic construct
  misc_feature 1..120: note = Artificially Synthesized Probe
  source 1..120: mol_type = other DNA
ggcccttgagtaacaaaagaactgggaggacagagaacaggaaagacaagagagagaagtgatggttttagaatttttgcatttgtgtcctctcaagaataagcctcaatttgaatatag

SEQ ID NO: 21186 - DNA, 120 bp, synthetic construct
  misc_feature 1..120: note = Artificially Synthesized Probe
  source 1..120: mol_type = other DNA
tacttagcctcctcatttaacaaatgatgagaacaatggcacctatttcctatagttctgggtatggtgtgacataatgcaggtaaatgattcagaacagcacctgggctccataagtaa

SEQ ID NO: 21187 - DNA, 120 bp, synthetic construct
  misc_feature 1..120: note = Artificially Synthesized Probe
  source 1..120: mol_type = other DNA
tttttgaaggtatacattcgaaactgtggaaccctttacttcctttcagttagaggtgacttagaaagctctcctaatgccaaaaatatatccctagacaatcctccccagacaacagaa

SEQ ID NO: 21188 - DNA, 120 bp, synthetic construct
  misc_feature 1..120: note = Artificially Synthesized Probe
  source 1..120: mol_type = other DNA
acccaatttctaccaattagcagagattaaggactcactctgaccttcttattgcattccactgcagagaagtaaacttagggagttgttctatttatttactcaggtgaggctgttcga

SEQ ID NO: 21189 - DNA, 120 bp, synthetic construct
  misc_feature 1..120: note = Artificially Synthesized Probe
  source 1..120: mol_type = other DNA
ttccgctcttatatgaacggagatgctgcacatattcagagtcccttttagtttaccatacacctgaggatatgaaggagattttgccatcttgacagtttcattgcttcacaaaacttc

SEQ ID NO: 21190 - DNA, 120 bp, synthetic construct
  misc_feature 1..120: note = Artificially Synthesized Probe
  source 1..120: mol_type = other DNA
ttagcatcttcctccatgtctccctaccttacacttgaaccttcagaaatactaaattatcagaaatatccatcgcacctgtgctgttttgtcttcaactttgagcacacttttccttcc

SEQ ID NO: 21191 - DNA, 120 bp, synthetic construct
  misc_feature 1..120: note = Artificially Synthesized Probe
  source 1..120: mol_type = other DNA
tcccatgatttccaaagagtttcaaacatgtagtcctgtaggtggtaggagatgaaatttcttattctgtcagtgaaagacatttggtcggtgagttctgataaaacagcaggaacatag

SEQ ID NO: 21192 - DNA, 120 bp, synthetic construct
  misc_feature 1..120: note = Artificially Synthesized Probe
  source 1..120: mol_type = other DNA
aatcaaaacattcccaccaagagtggttcctatgagacttatctgaagggagaacagcagaaggttgtttaacatgatgtggcttgatgcagaagatttgatgagatgtgaagcaaatgt

SEQ ID NO: 21193 - DNA, 120 bp, synthetic construct
  misc_feature 1..120: note = Artificially Synthesized Probe
  source 1..120: mol_type = other DNA
aaaataagaataaataaaagataggaactgctggtagcagtcttaaggatctctgactcccacagcctattgtattaaccactgggatagattgccacatcaaaatgtatcacgtcccct

SEQ ID NO: 21194 - DNA, 120 bp, synthetic construct
  misc_feature 1..120: note = Artificially Synthesized Probe
  source 1..120: mol_type = other DNA
acatatacatatacatatacatgctgtgggcttcagtgagcatgtttctttccttttttggacataatcagataaaataacttacacagtggggcttgcctacaacatgcctggaggtgc

SEQ ID NO: 21195 - DNA, 120 bp, synthetic construct
  misc_feature 1..120: note = Artificially Synthesized Probe
  source 1..120: mol_type = other DNA
taatcccttctctttctcttccctagagaaattaacaagggccttcagatgaaatgacataggtaaagtgttttcagagatctgtagagattacttccagctttttggggggattaacgg

SEQ ID NO: 21196 - DNA, 120 bp, synthetic construct
  misc_feature 1..120: note = Artificially Synthesized Probe
  source 1..120: mol_type = other DNA
aatattttcatcttagagaatgataataaaatatatactttgcttaattgtgttacaggtaattagataggcattaggaatgtcaggtgacagttccatgattatcacactgcctctcta

SEQ ID NO: 21197 - DNA, 120 bp, synthetic construct
  misc_feature 1..120: note = Artificially Synthesized Probe
  source 1..120: mol_type = other DNA
cactttatgtgtcatctaatgaaggaacaaacaactctccactggtaggaacaaaaggcatgagaagaatccctaaagaggactttgagttcacacttagacaaaactctcaacttactg

SEQ ID NO: 21198 - DNA, 120 bp, synthetic construct; identical to SEQ ID NO: 21133
  misc_feature 1..120: note = Artificially Synthesized Probe
  source 1..120: mol_type = other DNA

SEQ ID NO: 21199 - DNA, 120 bp, synthetic construct
  misc_feature 1..120: note = Artificially Synthesized Probe
  source 1..120: mol_type = other DNA
gacagacaaaggaaattggcagtcagcattagtgagtcattttacagttctaagatgtaggcattgtgataattactctgtggcacacatctgtatgtttgtgacgaaaaggacagtgtc

SEQ ID NO: 21200 - DNA, 120 bp, synthetic construct
  misc_feature 1..120: note = Artificially Synthesized Probe
  source 1..120: mol_type = other DNA
tcccggtgttggcaggacattgttaggactggggaatggggaacatggtcatcatttacaagagaacatggtacaactagattcagcagcaggagtagtttacatgtgttgagtgtgtgt

SEQ ID NO: 21201 - DNA, 120 bp, synthetic construct
  misc_feature 1..120: note = Artificially Synthesized Probe
  source 1..120: mol_type = other DNA
aattggaatgtggatggggagcaaaagtggacaaccagggctgagtcttggtatgaatctaaaccaactgttgagtgtctttcttttttgaaatgaatacattagccctcgtgtctaaaa

SEQ ID NO: 21202 - DNA, 120 bp, synthetic construct
  misc_feature 1..120: note = Artificially Synthesized Probe
  source 1..120: mol_type = other DNA
tccaagttgaaaagaaagcaaaaagatacaacagtcaggcaggactcagaaatcatatagcacaatttaaactggaaggccataagtaatatttccacaggtctgaaggaaagaaagcaa

SEQ ID NO: 21203 - DNA, 120 bp, synthetic construct; identical to SEQ ID NO: 21138
  misc_feature 1..120: note = Artificially Synthesized Probe
  source 1..120: mol_type = other DNA

SEQ ID NO: 21204 - DNA, 120 bp, synthetic construct
  misc_feature 1..120: note = Artificially Synthesized Probe
  source 1..120: mol_type = other DNA
agacagaaggggtcaaaaagctgtaatgtaactctctaaagaaggatacgttttctacaaaagcagatcacatagggcattggaatgtcagaaaactgtgatcccaggaaaagcagtaat

SEQ ID NO: 21205 - DNA, 120 bp, synthetic construct
  misc_feature 1..120: note = Artificially Synthesized Probe
  source 1..120: mol_type = other DNA
cctgctttgtgtttacactctcttttcctggaccatggagctaacaaacttcaaaacttttgaaagtagtcagtggagaacaaaaaatttcaaatagtaaaaggtcagtaggggcttaaa

SEQ ID NO: 21206 - DNA, 120 bp, synthetic construct
  misc_feature 1..120: note = Artificially Synthesized Probe
  source 1..120: mol_type = other DNA
agggacaactcttctcatgctaactgaaattgttacccccaaggcttaatttaaccaatcaacagggttgtttgcaaactcataaaaacagtttttggagggaagcccaacaaaggatac

SEQ ID NO: 21207 - DNA, 120 bp, synthetic construct
  misc_feature 1..120: note = Artificially Synthesized Probe
  source 1..120: mol_type = other DNA
gatgtatcctgcattccctgtgcaaatatttgttgggatcacactggaatcactgatgtatcactttatgactagccaaataactaggggagggtgatatcttaagtgaaaatagattgc

SEQ ID NO: 21208 - DNA, 120 bp, synthetic construct; identical to SEQ ID NO: 21143
  misc_feature 1..120: note = Artificially Synthesized Probe
  source 1..120: mol_type = other DNA

SEQ ID NO: 21209 - DNA, 120 bp, synthetic construct
  misc_feature 1..120: note = Artificially Synthesized Probe
  source 1..120: mol_type = other DNA
ggagaaagggaagaagagagggagtagagtggggcctgggaaaggaaggaaggagggaggattttttgttagtgaaaaagaagtaatgtgtaagtgtaatttcacaataataaatcaacc

SEQ ID NO: 21210 - DNA, 120 bp, synthetic construct
  misc_feature 1..120: note = Artificially Synthesized Probe
  source 1..120: mol_type = other DNA
cacaggcacaagagatggacatccctactttagaggagcatggcctgaaagccacagtttccatctcagtgggtgtgttaggcctttctcttattcccataaagaaatacttgaaactga

SEQ ID NO: 21211 - DNA, 120 bp, synthetic construct
  misc_feature 1..120: note = Artificially Synthesized Probe
  source 1..120: mol_type = other DNA
tcatagtagtctggccctcagagactcttactcttgggcaaaggagggctgtaccacaaccatgcaacttgagaaattaaagggtagagtaaaactaagacaacttgaataattaatata

SEQ ID NO: 21212 - DNA, 120 bp, synthetic construct
  misc_feature 1..120: note = Artificially Synthesized Probe
  source 1..120: mol_type = other DNA
gttatgtaacaaatccaaaacaatatacagataaatcttcagaatgaggaagagaagttttaattttgctgaatgcaaaactataacatagcaactgaaatttctgtgcacaagtaaacg

SEQ ID NO: 21213 - DNA, 120 bp, synthetic construct
  misc_feature 1..120: note = Artificially Synthesized Probe
  source 1..120: mol_type = other DNA
aaaaacaaaaccacttatgtaatgaaattcatgaatgacaaagatgcaggcatgcaggaaaaaatgttttcaataaatagtgatgggacagctccttacccaaaaccccatctctacatc

SEQ ID NO: 21214 - DNA, 120 bp, synthetic construct
  misc_feature 1..120: note = Artificially Synthesized Probe
  source 1..120: mol_type = other DNA
ttaaaagacacagactggcaaattggataaagagccaagacccatcagtgtgctgtattcaggaaacccatctcacgtgaagagacacacataggctcaaaataaagtgatggaggaaga

SEQ ID NO: 21215 - DNA, 120 bp, synthetic construct
  misc_feature 1..120: note = Artificially Synthesized Probe
  source 1..120: mol_type = other DNA
tagagacacaaaaaaccctttaaaaaatcaatgaatccaggagctggttttttgaaaagatcaaccaaactgatagaccactagcaagactaataaagaagaaaagagagaagaatcaaa

SEQ ID NO: 21216 - DNA, 120 bp, synthetic construct
  misc_feature 1..120: note = Artificially Synthesized Probe
  source 1..120: mol_type = other DNA
atcaggcaggagaaggaaataaagggtattcaattaggaaagaggaagtcaaattgtccctgtttgcagttgacatgattgtatatctagaaaacaccatcgtctcagcccaaaatctcc

SEQ ID NO: 21217 - DNA, 120 bp, synthetic construct
  misc_feature 1..120: note = Artificially Synthesized Probe
  source 1..120: mol_type = other DNA
gacaaatgggatctaattaaactaaagagcttctgcacaggaaaagaaactaccatcagagtgaacaggcaacctacagaatgggagaaaatttttgcaatctactcatctgacaaaggg

SEQ ID NO: 21218 - DNA, 120 bp, synthetic construct
  misc_feature 1..120: note = Artificially Synthesized Probe
  source 1..120: mol_type = other DNA
taaaacttaaagtataataaaaagaaaaagaaaaaaagaaaataggtaggctgagagggagtcagggaagaaggaaggagggaaaaaatgaaaaaaatgcaaagaaatggactcaactct

SEQ ID NO: 21219 - DNA, 120 bp, synthetic construct
  misc_feature 1..120: note = Artificially Synthesized Probe
  source 1..120: mol_type = other DNA
tggaacaggagacacatagcaaatgttcactgcattccacaaaaaaattacagtcaattgtcaattgacagaatgtcatgctatagtcacctgatggaaaactgtcatagaacttgggga

SEQ ID NO: 21220 - DNA, 120 bp, synthetic construct
  misc_feature 1..120: note = Artificially Synthesized Probe
  source 1..120: mol_type = other DNA
caccaggaatgcccatatgcagagaaaaagctatatgagaatataagatggtggccataaaaacttcaagaaaaaacagacctggcaaaccctgattttggacgtctagccatcagaact

SEQ ID NO: 21221 - DNA, 120 bp, synthetic construct
  misc_feature 1..120: note = Artificially Synthesized Probe
  source 1..120: mol_type = other DNA
cagtatgttttagggtgggaaagtaggaaagcctaatggattgccctagtttccctcattacacatacgcattcacataagttcaactccccaaatctaccctcactcttacaaataaat

SEQ ID NO: 21222 - DNA, 120 bp, synthetic construct
  misc_feature 1..120: note = Artificially Synthesized Probe
  source 1..120: mol_type = other DNA
accagtttgaaaagagacagatagacgaatggagcagaaaacaaaactcattaataaagccacacaaaaccatttgatttttcacaatatggacaaaaacaagaaatagggaaaccactc

SEQ ID NO: 21223 - DNA, 120 bp, synthetic construct
  misc_feature 1..120: note = Artificially Synthesized Probe
  source 1..120: mol_type = other DNA
gtgaagaaatccaaaacctgaacgaggcattatcaaataatgaggtaaagcagtgataaaaattctcctatccaagtaaagcccaggacctgaagactttcactgttgaattctaccaaa

SEQ ID NO: 21224 - DNA, 120 bp, synthetic construct
  misc_feature 1..120: note = Artificially Synthesized Probe
  source 1..120: mol_type = other DNA
ttcaacaaagctgccaaatacatacattgggaaaggaatggactcttaatggtgctgggaagctaggtatctatatgtagaacaatgaaagtggacctctgagtagtctgttctcacatt

SEQ ID NO: 21225 - DNA, 120 bp, synthetic construct
  misc_feature 1..120: note = Artificially Synthesized Probe
  source 1..120: mol_type = other DNA
aatctttctaatctttaagttaaatctcactgatttaaaacccgaaactttgaggaaacactaagacaatgttctgggcagatttgattaataagacctcagaagcacagccatccaaag

SEQ ID NO: 21226 - DNA, 120 bp, synthetic construct
  misc_feature 1..120: note = Artificially Synthesized Probe
  source 1..120: mol_type = other DNA
ataacatgtaccccaccaacaaaaaggaactgaagtgtttgcaacttccagtttaccatttcctgtaaagccactggcttacccattcaattaatttgagagaaatgaagccagaaaaaa

SEQ ID NO: 21227 - DNA, 120 bp, synthetic construct
  misc_feature 1..120: note = Artificially Synthesized Probe
  source 1..120: mol_type = other DNA
gcatcctttggcagttgctaaatgtagtccttaggttaaagttaaatctcacttgagactttctttttcttcaagcagtttatcaagctttaggatctgctgccctcctatggatgatgg

SEQ ID NO: 21228 - DNA, 120 bp, synthetic construct
  misc_feature 1..120: note = Artificially Synthesized Probe
  source 1..120: mol_type = other DNA
tccaaccagtaaccccaggaactcatactaatcaatctaattgggagattccactacaggttggcaaaaggctttgtcacaagagaagagatttaaaaagcacaaaaatgtcttggtgaa

SEQ ID NO: 21229 - DNA, 120 bp, synthetic construct
  misc_feature 1..120: note = Artificially Synthesized Probe
  source 1..120: mol_type = other DNA
taacataaaaggaatataatctttttcaggtgaattattccatttgtgtgaaacttaaacacattctaaaacctgtgataaaaaataatgaactcagaatcatcctgttaccaaaatctg

SEQ ID NO: 21230 - DNA, 120 bp, synthetic construct
  misc_feature 1..120: note = Artificially Synthesized Probe
  source 1..120: mol_type = other DNA
aatcccattcacaattgctaaaaaagaataaaatgcctaggaatacagctaaccagggaggtgaaagatctctacaatgaaaattacaaaacactgctcaaagaaatcagagatgacaca

SEQ ID NO: 21231 - DNA, 120 bp, synthetic construct
  misc_feature 1..120: note = Artificially Synthesized Probe
  source 1..120: mol_type = other DNA
tgcaaaagaagacatacatgcaaccatcaagtatattaaaaagctaaaagctaaataccactgattattggagaaatgaaaatcaaaaccacagtgagataccattttatgtcagtcaga

SEQ ID NO: 21232 - DNA, 120 bp, synthetic construct
  misc_feature 1..120: note = Artificially Synthesized Probe
  source 1..120: mol_type = other DNA
ctcaaaggtgaggggggcatgcattgaggatttcatgtgttatgaacttcaattctatacttgatgtctaggcaatgtgatgctgctattgtctagcaaagagaaggaaatcttcacatg

SEQ ID NO: 21233 - DNA, 120 bp, synthetic construct
  misc_feature 1..120: note = Artificially Synthesized Probe
  source 1..120: mol_type = other DNA
aagtaatttttgtgagaatcatctcgaagtaacaccacaaaggcagtggataaaatgggatagggaaaagacaaaagccaatatgaatgcattaccaagtcacttgccactgcaggaaac

SEQ ID NO: 21234 - DNA, 120 bp, synthetic construct
  misc_feature 1..120: note = Artificially Synthesized Probe
  source 1..120: mol_type = other DNA
ctctacctttgttgtggttgtgtgtaaaatttgcaattagtatcatttttagcataacaactttacgacagtatacttcctgtatctcttcccagattttgtgttattgttgccatacag

SEQ ID NO: 21235 - DNA, 120 bp, synthetic construct
  misc_feature 1..120: note = Artificially Synthesized Probe
  source 1..120: mol_type = other DNA
ttttctgctgatgctccttcctttaggatattgaaatagtatatgttaggatgttttgtttattttgtggggaagggagaagtgattatttctctttatttttcattttgtatagtttct

SEQ ID NO: 21236 - DNA, 120 bp, synthetic construct
  misc_feature 1..120: note = Artificially Synthesized Probe
  source 1..120: mol_type = other DNA
cttacattcgtgtgcagatcagtattccaaaaaacaaaacagacttgaggatatttattgggtattatgctcactactgggtgatgggattattcatccatcaagccttagtgacacgca

SEQ ID NO: 21237 - DNA, 120 bp, synthetic construct
  misc_feature 1..120: note = Artificially Synthesized Probe
  source 1..120: mol_type = other DNA
ggtttagactcgacttctgttttcgctgcctcaaacttaaaattaaacacttctccagtgaacggtattttattttattagataatggcatataaaactcaagatgtatattataggtat

SEQ ID NO: 21238 - DNA, 120 bp, synthetic construct
  misc_feature 1..120: note = Artificially Synthesized Probe
  source 1..120: mol_type = other DNA
ctttgtgcaagaagagaaaagctgcagacatcacactccctagtttcaaaatacactacaaagtgacaagaatccaaacagtattaaagcacacgtatagaccaagggaacaaaatggag

SEQ ID NO: 21239 - DNA, 120 bp, synthetic construct
  misc_feature 1..120: note = Artificially Synthesized Probe
  source 1..120: mol_type = other DNA
agcactatgaatagcgttcattcaggaggtgtactgcaaagtgtttactttgcaggtctggatttctcaacttgtacattcccaaaaaagactcatgttcttatattcaagaggggctca

SEQ ID NO: 21240 - DNA, 120 bp, synthetic construct
  misc_feature 1..120: note = Artificially Synthesized Probe
  source 1..120: mol_type = other DNA
gaggatataccaatagtaatagctccatctgcagttggctacgattcatttttttctcctgcaatttttgacgtagttggagtgaggccatatgcaacagggtctttaagccatttcctt

SEQ ID NO: 21241 - DNA, 120 bp, synthetic construct
  misc_feature 1..120: note = Artificially Synthesized Probe
  source 1..120: mol_type = other DNA
tttgacttcctattaacgtcttttctttagaaaagcagagagctagggcttgagtgaatcctagaatcacaaagatacctatactgttttagtgaaattagttaagtgggctttggaggt

SEQ ID NO: 21242 - DNA, 120 bp, synthetic construct
  misc_feature 1..120: note = Artificially Synthesized Probe
  source 1..120: mol_type = other DNA
tagtttacacacagcacctttcagaattgaagttgagttgctgatgatgccagtacacccacgttatgatttctttgaaacatccaatggcttcatcatttaggccaaaagagcataatc

SEQ ID NO: 21243 - DNA, 120 bp, synthetic construct
  misc_feature 1..120: note = Artificially Synthesized Probe
  source 1..120: mol_type = other DNA
aggtaggagttactcagcctaagtatctgaaaaggtctgggtagtggccttgttagagaggaatcccagagaatgattgatgtgttagttacacacatacacatttgatgaaagaaatca

SEQ ID NO: 21244 - DNA, 120 bp, synthetic construct
  misc_feature 1..120: note = Artificially Synthesized Probe
  source 1..120: mol_type = other DNA
ttccagggaaagggtgggaagcagggtatgagaattagagtggggataggaaacggagagaagcaataaatacaacactgggcccagaaaagaaactatagttgaaatacaaataataca

SEQ ID NO: 21245 - DNA, 120 bp, synthetic construct
  misc_feature 1..120: note = Artificially Synthesized Probe
  source 1..120: mol_type = other DNA
tgaataaataaaatatatcagcagggaaagagggcccaacatggtactgacagttaaaactaaattttaccagccaagtgtcacatagcttattactgggctttctgctctcccgatcta

SEQ ID NO: 21246 - DNA, 120 bp, synthetic construct
  misc_feature 1..120: note = Artificially Synthesized Probe
  source 1..120: mol_type = other DNA
gatggtgccatgcagaacacttggcctgaccaaaatttattaatagattcacttctggatatgagtagcagtgattttcataattcctgatatccctgttcccttagctattaaaggtat

SEQ ID NO: 21247 - DNA, 120 bp, synthetic construct
  misc_feature 1..120: note = Artificially Synthesized Probe
  source 1..120: mol_type = other DNA
cttgtctgagatcccagttagccagtggaacctgaagccacatgcatttttcaggacccttcaccttgttactttttgtatgtctcttatttaaggtgtatagattgttaactcattcag

SEQ ID NO: 21248 - DNA, 120 bp, synthetic construct
  misc_feature 1..120: note = Artificially Synthesized Probe
  source 1..120: mol_type = other DNA
aagtctttcacattacctctgtgagaaagtaccagtggtagcatcatctgttaattcctgctattgattagtgtcccgagtactaagagatctggaggcaaaatcatcaagagagaagga

SEQ ID NO: 21249 - DNA, 120 bp, synthetic construct
  misc_feature 1..120: note = Artificially Synthesized Probe
  source 1..120: mol_type = other DNA
agagaacctcaatgtgtacataaatggaattcctaatttcagagcaacaagatcaccacagattgttactgggtctgctaccaacacatcaaaaccacctttctgaagtcttgccatcaa

SEQ ID NO: 21250 - DNA, 120 bp, synthetic construct
  misc_feature 1..120: note = Artificially Synthesized Probe
  source 1..120: mol_type = other DNA
ttaaaaccctccatgctggaataaaggaggagtcccatcttttggtcattccacttcaggcttttgatataactaatcccttttcttcttctttcctgttttggcaagctttcggaaaca

SEQ ID NO: 21251 - DNA, 120 bp, synthetic construct
  misc_feature 1..120: note = Artificially Synthesized Probe
  source 1..120: mol_type = other DNA
tcaagatttccatctggtttcttgttacattaagaataaaatccaaatctgtctgtggtctagagaacgctacacagacacctacttgtcctaaccctttccccctgtacactttcttct

SEQ ID NO: 21252 - DNA, 120 bp, synthetic construct
  misc_feature 1..120: note = Artificially Synthesized Probe
  source 1..120: mol_type = other DNA
tctgtttttgtttagcagttgtttaattgcactggtgtagagtattcagttgattgacaaagaccacagatctcttcatttatgattaatggatatttgtgttgttaacattttttgatc

SEQ ID NO: 21253 - DNA, 120 bp, synthetic construct
  misc_feature 1..120: note = Artificially Synthesized Probe
  source 1..120: mol_type = other DNA
gttttatctccttaaataaaagttttcaaagatcattattttgtctactttggtctgtttaaatttaatgcgagtactggtaggttcacttttttgttgtgatctttgagatggagtctc

SEQ ID NO: 21254 - DNA, 120 bp, synthetic construct
  misc_feature 1..120: note = Artificially Synthesized Probe
  source 1..120: mol_type = other DNA
gtagattctggatattggacctttgtcagagggatagattgcaaaaatgttccctcattctgtaggttgcctgtgccctctgatgatggtttattttgctgtgcagaagctctttagttt

SEQ ID NO: 21255 - DNA, 120 bp, synthetic construct
  misc_feature 1..120: note = Artificially Synthesized Probe
  source 1..120: mol_type = other DNA
tgtgaatgacacagatgaggaatgatttctgcatttccaactgaggtactgggttcatctcccaggggactgtcagacagtgggtgcaggacagtgggtgcagcgcaccacgtgtgagcc

SEQ ID NO: 21256 - DNA, 120 bp, synthetic construct
  misc_feature 1..120: note = Artificially Synthesized Probe
  source 1..120: mol_type = other DNA
aagagcagaaaaactggaaattataaaatcagaatgcctctcctcctccaaagaaatgcagctcctcaccagcaatggaacaaagctggatggagaatgactttgacgagttcagagaag

SEQ ID NO: 21257 - DNA, 120 bp, synthetic construct
  misc_feature 1..120: note = Artificially Synthesized Probe
  source 1..120: mol_type = other DNA
gtaccagccactgcaaaaacatgccaaatgataaagaccactgaggctaggaaaaaacggcatcaactatcgagcaaaacaatcagctaacatcataatgacaggatcaaatttacacat

SEQ ID NO: 21258 - DNA, 120 bp, synthetic construct
  misc_feature 1..120: note = Artificially Synthesized Probe
  source 1..120: mol_type = other DNA
aaatgcccacaagagaaagcaggaaacatctaaaattgacaccctaacgtcacaattaaaagaactagagaagcaagagcaaacacattcaaaagctagcagaaggcaagaaataactaa

SEQ ID NO: 21259 - DNA, 120 bp, synthetic construct
  misc_feature 1..120: note = Artificially Synthesized Probe
  source 1..120: mol_type = other DNA
aataagagttatctatgacaaacccacagcaaatatcatgttgaatgggcaaaaggtggaagcattccctttgaagactggtacaagacagggatgccctctctcaccactcctattcaa

SEQ ID NO: 21260 - DNA, 120 bp, synthetic construct
  misc_feature 1..120: note = Artificially Synthesized Probe
  source 1..120: mol_type = other DNA
caaaaattaattgaagatggattaaagacttacatgttagacctaaaaccataaaaactctagaagaaaacctaggcaataccattcaggacataggcatgggcaaggacttcatgacta

SEQ ID NO: 21261 - DNA, 120 bp, synthetic construct
  misc_feature 1..120: note = Artificially Synthesized Probe
  source 1..120: mol_type = other DNA
gaaggggaatatcacacaccggggcctgcttgggggtagcgggagtggggagggatagcattaggagatacacttaatgttaaatgacgagttaatgggtgcagcacaccaacatggcac

SEQ ID NO: 21262 - DNA, 120 bp, synthetic construct
  misc_feature 1..120: note = Artificially Synthesized Probe
  source 1..120: mol_type = other DNA
attagagccctcctatccagctggtggtaatgaaaaatgatgcaaatactttgaaaaacagtttagccattcttcataaacaacaatttcccatatgcctcagcaagtccactcctagcc

SEQ ID NO: 21263 - DNA, 120 bp, synthetic construct
  misc_feature 1..120: note = Artificially Synthesized Probe
  source 1..120: mol_type = other DNA
aatttgtaagtaccacctggtcacaaaattgtaatactcacatagggtcattaatgactgacttcaatgcattgagcaaatctctacttgacatggtcctgatgtccacactgagggctg

SEQ ID NO: 21264 - DNA, 120 bp, synthetic construct
  misc_feature 1..120: note = Artificially Synthesized Probe
  source 1..120: mol_type = other DNA
aggagtagggtggaggtggtgctgaggaaggacaggttacacatcatcatgaaatgtgttatcactttatgataaagattggtgatttattcccacagaaaatagagtcactggtaatag

SEQ ID NO: 21265 - DNA, 120 bp, synthetic construct
  misc_feature 1..120: note = Artificially Synthesized Probe
  source 1..120: mol_type = other DNA
aagtctgaggtaagctgaatacccacatttaatatctttacttttataatcaatttggtatataaaaaaatgacatttctaacttaatagctagacacatgagagtgtgagaggaaaata

SEQ ID NO: 21266 - DNA, 120 bp, synthetic construct
  misc_feature 1..120: note = Artificially Synthesized Probe
  source 1..120: mol_type = other DNA
gagaggattttaccttggcgtgtgtaatggcagacgagttacaaagtagagggtggctgagtacagtttactggaagtagtattgactgttgttatttttttcctcctaggaagttgttg

SEQ ID NO: 21267 - DNA, 120 bp, synthetic construct
  misc_feature 1..120: note = Artificially Synthesized Probe
  source 1..120: mol_type = other DNA
tctaagaatgatgagaaaagaagaagaatgatcccctgatatcgcctgtttggatttatgacacctctacttggcagagtttatgtaaaatgaaggtaatacggtctttgtgcacatata

SEQ ID NO: 21268 - DNA, 120 bp, synthetic construct
  misc_feature 1..120: note = Artificially Synthesized Probe
  source 1..120: mol_type = other DNA
aagcccaaaacagaatgatcttcacttgtgtaatttttaataaataagacattaatattggtttaatgcaaatagctacaccttgaattaagtaagattatcataacttctcatcttgtg

SEQ ID NO: 21269 - DNA, 120 bp, synthetic construct
  misc_feature 1..120: note = Artificially Synthesized Probe
  source 1..120: mol_type = other DNA
tgatttactcttaaaatattatgagttttttttttttaacccaaagtttaacttttcttgcatctcactgtttttggttttctctccccttttaaagggtgtgaaatagtaacactctcc

SEQ ID NO: 21270 - DNA, 120 bp, synthetic construct
  misc_feature 1..120: note = Artificially Synthesized Probe
  source 1..120: mol_type = other DNA
tttgactgaggctgccctaaaactttttgtcatccacagacaattgttgtctgactttggtcctctttagaaggcgattttatactcagccatgaaattctaacaggtgctcttgaaaaa

SEQ ID NO: 21271 - DNA, 120 bp, synthetic construct
  misc_feature 1..120: note = Artificially Synthesized Probe
  source 1..120: mol_type = other DNA
gaaaaattatgtttcaaaaataacagtatacctgttgttagattctagtcttgcctaatgtttttcaatttttattactgtctacagtttggactgaattctaatttttcatggctacac

SEQ ID NO: 21272 - DNA, 120 bp, synthetic construct
  misc_feature 1..120: note = Artificially Synthesized Probe
  source 1..120: mol_type = other DNA
ctactttttgcttaactgatctttcacacttagatgatgcactacctagcattgacagccttgatatatggtcagctatagccagtcattaccatgtctagtaccaaactaaggtactga

SEQ ID NO: 21273 - DNA, 120 bp, synthetic construct
  misc_feature 1..120: note = Artificially Synthesized Probe
  source 1..120: mol_type = other DNA
ttctctgaatggcaccctgaacagaacgctaaatagacctattccaatgcatgggaagtaaaaacagccagattgcttggtaagacgaagctgcatgatgcatttcaaagttttttcaat

SEQ ID NO: 21274 - DNA, 120 bp, synthetic construct
  misc_feature 1..120: note = Artificially Synthesized Probe
  source 1..120: mol_type = other DNA
ccccacccccaaaaaacaccttaaaagctgaagtataagaatcattgacgttcatcagtctggtgttggggcttggaatttccgggaaatagttctgagaattccatttataatacagta

SEQ ID NO: 21275 - DNA, 120 bp, synthetic construct
  misc_feature 1..120: note = Artificially Synthesized Probe
  source 1..120: mol_type = other DNA
cggtctgatatcagttttaattggagattcagtgtatggctattagagttaattcatgaggcatccaggaactcagtgtaattgcagttgcctgtagccacatttaatgtaacttcggtt

SEQ ID NO: 21276 - DNA, 120 bp, synthetic construct
  misc_feature 1..120: note = Artificially Synthesized Probe
  source 1..120: mol_type = other DNA
ggcaacaattattttgtgtacaaaagaattagagaatcggtttcacaattatttacttagattcaagtctaccttttgcaggttaacaacaacagccagtgccgggcacggaggctcaca

SEQ ID NO: 21277 - DNA, 120 bp, synthetic construct
  misc_feature 1..120: note = Artificially Synthesized Probe
  source 1..120: mol_type = other DNA
cacctttgcaatacaactttagctttccagcgtgttcaactgactgcccaaacttaaacatttatatttaaacaagcacacagagtatctgttctctaggattttgctaggaaaatcaat

SEQ ID NO: 21278 - DNA, 120 bp, synthetic construct
  misc_feature 1..120: note = Artificially Synthesized Probe
  source 1..120: mol_type = other DNA
cctggcctctggttttctttttgggtctttctcatcccctcatcgtttcacctatctctgcacattattgagtactcactttaattgtcaatgagtttgggatctcttctgcatatttct

SEQ ID NO: 21279 - DNA, 120 bp, synthetic construct
  misc_feature 1..120: note = Artificially Synthesized Probe
  source 1..120: mol_type = other DNA
aaggcaaagtgttcagagagctgtaagaagaaatcacatctttaatgtaacatcagtatattcacaatcataaataattattaaaataagtcactaatatggtttgactgtccccaccca

SEQ ID NO: 21280 - DNA, 120 bp, synthetic construct
  misc_feature 1..120: note = Artificially Synthesized Probe
  source 1..120: mol_type = other DNA
cttaccttacccatgaaaacagctttccaggaagtactctagtgtctacagtttattaagctagtcccttgatccttggttctcaaagtaaaccatgagttttttgagctcaacactgaa

SEQ ID NO: 21281 - DNA, 120 bp, synthetic construct
  misc_feature 1..120: note = Artificially Synthesized Probe
  source 1..120: mol_type = other DNA
gcagctcaccacagggattaacggcatctgccagaaggacatcaaattttgactcttgtagttttctcataagtttcttgttcaaaactgcatcttcacagagctttatattatagtcag

SEQ ID NO: 21282 - DNA, 120 bp, synthetic construct
  misc_feature 1..120: note = Artificially Synthesized Probe
  source 1..120: mol_type = other DNA
ttattttataatactgttaagaacagtggcaggtgagaggctcctgcctgttcggtgcccttgacatagagagaagaagtaattatacaactcaaacgccattttttaatatcgtggtgc

SEQ ID NO: 21283 - DNA, 120 bp, synthetic construct
  misc_feature 1..120: note = Artificially Synthesized Probe
  source 1..120: mol_type = other DNA
tggctggagacatgaacccttgaagatcaagaggccatccagatactacatagcagtcacgttagattgggacacttactctttacagagaactataaaaccactgtcccatcctcactt

SEQ ID NO: 21284 - DNA, 120 bp, synthetic construct
  misc_feature 1..120: note = Artificially Synthesized Probe
  source 1..120: mol_type = other DNA
gccatcttgtgcctaagtggcgggtccatagtattgtatgatttttttcagggggctatttatcatcttttcctatggctatgcttcatttttttgttcccaggaagcatagactgggaa

SEQ ID NO: 21285 - DNA, 120 bp, synthetic construct
  misc_feature 1..120: note = Artificially Synthesized Probe
  source 1..120: mol_type = other DNA
aaaggttgtagctcctattcatgcaagaggggctgagttttcctttttggagtcaaacacgatcttttttattttccttttaagtagtctgaatgacacgagaccagtattgacacatct

SEQ ID NO: 21286 - DNA, 120 bp, synthetic construct
  misc_feature 1..120: note = Artificially Synthesized Probe
  source 1..120: mol_type = other DNA
cccagtctactgatgtacagttatgtttaactgggctctctgataataggagtaagatagtgagcttagggtgttgcaaacttcaatggttatgtggggattttcacaatgcaagctttg

SEQ ID NO: 21287 - DNA, 120 bp, synthetic construct
  misc_feature 1..120: note = Artificially Synthesized Probe
  source 1..120: mol_type = other DNA
ggctgactggcagggacttcaggatatagcagagagagcttggcatgacttattactccaggctgtagaatcctggaaaagagctaccatcaggcccacacctggtgaactggaggacca

SEQ ID NO: 21288 - DNA, 120 bp, synthetic construct
  misc_feature 1..120: note = Artificially Synthesized Probe
  source 1..120: mol_type = other DNA
caagttaatttatttcaggacaagaatttaccatataacactctttttacataaattttacctcctccccccccttttttttttgaagataaccattccttttttttaaaaagtgaactt

SEQ ID NO: 21289 - DNA, 120 bp, synthetic construct
  misc_feature 1..120: note = Artificially Synthesized Probe
  source 1..120: mol_type = other DNA
aacaaaggtgccaacacaggcacaccgtgggtgaccaggccatgcttctactcaggtggagtgggacaagttcaaaagactagtcttaccaagttccagatgtccagactccaagtgcca

SEQ ID NO: 21290 - DNA, 120 bp, synthetic construct
  misc_feature 1..120: note = Artificially Synthesized Probe
  source 1..120: mol_type = other DNA
tttgcagatgctttttttccttgtggtgagctgctggctgcgctacttaacataccgtttgtgtacagtctctgcttcactcctggctacacaattgaaaggcacagtggaggactgatt

SEQ ID NO: 21291 - DNA, 120 bp, synthetic construct
  misc_feature 1..120: note = Artificially Synthesized Probe
  source 1..120: mol_type = other DNA
tggtacaaggatttctgccatactctcaaaatagtccgagttcacttgaagaaccaaagataaaaggattagcttaaggagttgtgtaaactggactgttagaaaattggttttatgggt

SEQ ID NO: 21292 - DNA, 120 bp, synthetic construct
  misc_feature 1..120: note = Artificially Synthesized Probe
  source 1..120: mol_type = other DNA
ccaatatcaagaaagcatcagtggagataatagaaagtatcctggagtcatggattagtaagatgagagctgaacaatatgcagaaataggtaaaagaatggcggggagaggcagacaaa

SEQ ID NO: 21293 - DNA, 120 bp, synthetic construct
  misc_feature 1..120: note = Artificially Synthesized Probe
  source 1..120: mol_type = other DNA
aatgagccagttgaaattctaaaattctaccgtaagtaataaggatcttcactagtattcgagcataaaacacttcctcaacaatacaaatgtgtgccttaaatatgtgcagacaaaccc

SEQ ID NO: 21294 - DNA, 120 bp, synthetic construct
  misc_feature 1..120: note = Artificially Synthesized Probe
  source 1..120: mol_type = other DNA
aatgaaaaatctgcgccactctacactactcttgaaagatttccccattcacattaagggaaactgacagtgcaaattggaggaggaagagagtaggaggtgtaaaaggacaagaaaaaa

SEQ ID NO: 21295 - DNA, 120 bp, synthetic construct
  misc_feature 1..120: note = Artificially Synthesized Probe
  source 1..120: mol_type = other DNA
agtacaaggactctcacgttaacgtaagattaaaaatcatattttaaaaaacgctctgccatacgtggtgcactgttcacatttagacatttttttctttgttttgttaaaaaccatttg

SEQ ID NO: 21296 - DNA, 120 bp, synthetic construct
  misc_feature 1..120: note = Artificially Synthesized Probe
  source 1..120: mol_type = other DNA
agaaagaatattaaggctagactgaactctttacagccaaatacagtcttaaatatcttgtgtagcttccaccgacacaagtcatagttgtgcctcagacttagtggttacatgtggccc

SEQ ID NO: 21297 - DNA, 120 bp, synthetic construct
  misc_feature 1..120: note = Artificially Synthesized Probe
  source 1..120: mol_type = other DNA
atcctgtacagtataaaatatggtcccacaaggactcagcactaactaccagattaacaacccctcccagtggaggcagcagtaggaaatataggaaggagtcaaacagaaggaagccag

SEQ ID NO: 21298 - DNA, 120 bp, synthetic construct
  misc_feature 1..120: note = Artificially Synthesized Probe
  source 1..120: mol_type = other DNA
caaaggacaacaggctctaatataataacctaccgacaagtagatacatttatactacttctcatattattcaaaaacaaatgaatatattacaattaaatttggagatgaaaactgata

SEQ ID NO: 21299 - DNA, 120 bp, synthetic construct
  misc_feature 1..120: note = Artificially Synthesized Probe
  source 1..120: mol_type = other DNA
cttctttgtatttattttccagtcctaggggaaaagaatatggtagaattgctggcattttatgatattcactcatatactttatggtcagaatcagagataatctttatttcaggtgct

SEQ ID NO: 21300 - DNA, 120 bp, synthetic construct
  misc_feature 1..120: note = Artificially Synthesized Probe
  source 1..120: mol_type = other DNA
ctagaatgcacttttcattagtcccgctgaaaatcttgtattcagttttgcaccctgaagttatgcacaccacggagacttcaattacatctcctaaacaagtacgtgtttattcctctg

SEQ ID NO: 21301 - DNA, 120 bp, synthetic construct
  misc_feature 1..120: note = Artificially Synthesized Probe
  source 1..120: mol_type = other DNA
cagtacaatatggttccaattcctccacactgttgtcaaaccccttattgtctgtctttttgttacagccttcttagtgggtgtaaaatgatctctcatcctggtcttggattgcatttt

SEQ ID NO: 21302 - DNA, 120 bp, synthetic construct
  misc_feature 1..120: note = Artificially Synthesized Probe
  source 1..120: mol_type = other DNA
cacaccccaaagataacaatgtgaaaaattccttgcggagtccagctaccatcaattccacatttataactactctcaataaagtttttgtgtaaggagggtatcatctaaaggaatgct

SEQ ID NO: 21303 - DNA, 120 bp, synthetic construct
  misc_feature 1..120: note = Artificially Synthesized Probe
  source 1..120: mol_type = other DNA
ctaatccttagttggaggacaaaagtagtcactaaaaggttcagaaaaagggagttattctaggcagattgtgatagcctataccacgacctgaacagtaggtaaattggtatcttcacc

SEQ ID NO: 21304 - DNA, 120 bp, synthetic construct
  misc_feature 1..120: note = Artificially Synthesized Probe
  source 1..120: mol_type = other DNA
gaatgttatgaaattatcaataattcaacatgatcaaccagtaaagcccctgcatcgagcagtcttctggattgaatttgtgatgtgccacaaaggagccaaacaccttcgagttgcagc

SEQ ID NO: 21305 - DNA, 120 bp, synthetic construct
  misc_feature 1..120: note = Artificially Synthesized Probe
  source 1..120: mol_type = other DNA
gaaaattccattcaaataacattctcatgtaaatactcaaacatacagattgaggcttccagaaattaatccacttgaggcgtccacgcggaacaaggtctgctgaccacagttacacac

SEQ ID NO: 21306 - DNA, 120 bp, synthetic construct
  misc_feature 1..120: note = Artificially Synthesized Probe
  source 1..120: mol_type = other DNA
aaatacattctaatttggtcactgatgataaagatttttacctagacgttttgcacttaaaaaatgctattaaaagtctttggcaaagccacggtcggggagaaacacgtcggtgccgct

SEQ ID NO: 21307 - DNA, 120 bp, synthetic construct
  misc_feature 1..120: note = Artificially Synthesized Probe
  source 1..120: mol_type = other DNA
catattaaaaaaaaacagaaagcagcttagagcaatttataacctctaactaaattcctcggtttacaaagtgctttgaaagaccccagctcccagtggcctagtcacagtagtgtcagg

SEQ ID NO: 21308 - DNA, 120 bp, synthetic construct
  misc_feature 1..120: note = Artificially Synthesized Probe
  source 1..120: mol_type = other DNA
agaggacagcctcctggggccaccacagacacggcagtggccagacaggccaggcccctgagggcagctgggtgcccaggatgtgggctacgcaggaccctctgtcctatagcagcgagt

SEQ ID NO: 21309 - DNA, 120 bp, synthetic construct
  misc_feature 1..120: note = Artificially Synthesized Probe
  source 1..120: mol_type = other DNA
ctgagtcccctgcggccctccctccccctcacctgtctggcccccccacacactcacctgcttcacctgctgccaggactcctcccactgccggatcttcctcttggcctcgtccagctg

SEQ ID NO: 21310 - DNA, 120 bp, synthetic construct
  misc_feature 1..120: note = Artificially Synthesized Probe
  source 1..120: mol_type = other DNA
cagaatgagactccgtctcaaaaaaaaaaaaaaaaaaaaaaaaaaacaggcctgtcatcccagcactttgggaggtcgaggccagcagatcacttgaggtcaggagtttgagaccagtat

SEQ ID NO: 21311 - DNA, 120 bp, synthetic construct
  misc_feature 1..120: note = Artificially Synthesized Probe
  source 1..120: mol_type = other DNA
ctggtcttgaactcccaatctcaggtgatccgcctgcctcagcctcccaaagtgctgggattacaggtgtgagccactgcacccgaccaagtgttagttcttttacaacgtaacaaatag

SEQ ID NO: 21312 - DNA, 120 bp, synthetic construct
  misc_feature 1..120: note = Artificially Synthesized Probe
  source 1..120: mol_type = other DNA
caactaagccattggcacggtcctcccagcacttgtccaggccccctgaaatggtttactttcttttaaaagaaagaaaagatacacttttaggctgaatgaaaagatgttgtatacgat

SEQ ID NO: 21313 - DNA, 120 bp, synthetic construct
  misc_feature 1..120: note = Artificially Synthesized Probe
  source 1..120: mol_type = other DNA
acagaccagcagctgggtcctcgcctctgacacgctgctgctgcccctcagagtttaaatacctaagtgtgtgttagcatctgtccacgtgtgcacattcgactgtttaaaaaactttcc

SEQ ID NO: 21314 - DNA, 120 bp, synthetic construct
  misc_feature 1..120: note = Artificially Synthesized Probe
  source 1..120: mol_type = other DNA
caaaaaaaaaactttctgtgagggtgatttcaaggagcaggtgttcacgtgcaatttcatgccaagcaccaagacctcaattcccaaggctcaagactgagtgggaaggacccgcctcag

SEQ ID NO: 21315 - DNA, 120 bp, synthetic construct
  misc_feature 1..120: note = Artificially Synthesized Probe
  source 1..120: mol_type = other DNA
cgcacagggactgccggccaacaccgcacagagacctcagcagcgtggagcacaccgcacagggactgccggccaacaccgcacagagacctcagcagcgtggagcacaccgcacaggga

SEQ ID NO: 21316 - DNA, 120 bp, synthetic construct
  misc_feature 1..120: note = Artificially Synthesized Probe
  source 1..120: mol_type = other DNA
accccactctgccggggaagacagctggggcctttccagacattttcagcataatcagcaggaaaggcaggagggtgacttctgaagaagaacgctgccctagccgcacatgagatttgt

SEQ ID NO: 21317 - DNA, 120 bp, synthetic construct
  misc_feature 1..120: note = Artificially Synthesized Probe
  source 1..120: mol_type = other DNA
caatgaagcttttagggactttcgaaggtcttatccagaaactagagtaacaggttgggggtcggggcagccaggccaagaccccctggggaccaggaacccacagtagcatccgaaaat

SEQ ID NO: 21318 - DNA, 120 bp, synthetic construct
  misc_feature 1..120: note = Artificially Synthesized Probe
  source 1..120: mol_type = other DNA
ctatataccaagctttttcctatacgaacgtcctcatttgcacgtcaggcccagtaagagattaacaagattaactggtaacatagatttcagcaccgcacagtaataaaagttacctgc

SEQ ID NO: 21319 - DNA, 120 bp, synthetic construct
  misc_feature 1..120: note = Artificially Synthesized Probe
  source 1..120: mol_type = other DNA
cactgcaggatcccttcctcatgggctgctcgctcaacccacaccccctgaggcccatgcccagcctgccttcatgcattgcaatagtaaccttcctaccaagaaaagcctcattgcatc

SEQ ID NO: 21320 - DNA, 120 bp, synthetic construct
  misc_feature 1..120: note = Artificially Synthesized Probe
  source 1..120: mol_type = other DNA
gatcaggatatggcagccccttcagagctcaccgcccctcacacctggcagagatccagaaactcctcatgaaaatcaaagacgcaaagaagttgggggacaggaacggaggcgcctttt

SEQ ID NO: 21321 - DNA, 120 bp, synthetic construct
  misc_feature 1..120: note = Artificially Synthesized Probe
  source 1..120: mol_type = other DNA
tcacacccggctccgtgacgcgggggacgcacctggcggggggcgcacctaagggagggcccgctcctgaccgccgagtaacgagacccgcaccttggcggcgcacggctgccacgcgct

SEQ ID NO: 21322 - DNA, 120 bp, synthetic construct
  misc_feature 1..120: note = Artificially Synthesized Probe
  source 1..120: mol_type = other DNA
tcacaatttcagccgcagcagcagcaacaatacattgcctctaactaaggcagtgtcgatcctgaaaaaaaaaaaaaatccatctcttcacctctgagtagctggttcaggatttttttt

SEQ ID NO: 21323 - DNA, 120 bp, synthetic construct
  misc_feature 1..120: note = Artificially Synthesized Probe
  source 1..120: mol_type = other DNA
gtcgactttccacccgagtgagcacagtccaagatggtctctcttgtttgggatttaattttcctaaatatttttctgctatgctcaaattctagcattactacttttaggttggggaag

SEQ ID NO: 21324 - DNA, 120 bp, synthetic construct
  misc_feature 1..120: note = Artificially Synthesized Probe
  source 1..120: mol_type = other DNA
acccatggagtattcacagttttaaaaacctaccctttacggtgaagccctaacaggagacatcccacaccacatgcttcctcctccatagaggctccgagagaagatgacttccaaaac

SEQ ID NO: 21325 - DNA, 120 bp, synthetic construct
  misc_feature 1..120: note = Artificially Synthesized Probe
  source 1..120: mol_type = other DNA
caaaacccacacacacacaaaagaaaaatgtaaaggcctgggctcaaccccaagcagatgcagggatgggacggcccagcagcaacacaggccaagagctgtgcccagaagatgcacctg

SEQ ID NO: 21326 - DNA, 120 bp, synthetic construct
  misc_feature 1..120: note = Artificially Synthesized Probe
  source 1..120: mol_type = other DNA
tgctcacagctgtgcccccgactccaagccttcactggactccccaccccatcactgtcccccaccctcagtgccctcactggcccacaacccctactttcaattttttttttgagatgg

SEQ ID NO: 21327 - DNA, 120 bp, synthetic construct
  misc_feature 1..120: note = Artificially Synthesized Probe
  source 1..120: mol_type = other DNA
acttgggacaggcacagacacctctggggagtgtctcgtgagcttttctgcagaaaacgtttcaggagtagacatttgccagtaaaaatcaatctggcacgtgcagaaagatgtgtcagc

SEQ ID NO: 21328 - DNA, 120 bp, synthetic construct
  misc_feature 1..120: note = Artificially Synthesized Probe
  source 1..120: mol_type = other DNA
gtgtgattttactagtttgtctccttaagtaaaactgtccataatgaagaaattttaatgtgcatttcctaaagatcagaaatccccgacaagaacgcgcctggctcctggcttctgtga

SEQ ID NO: 21329 - DNA, 120 bp, synthetic construct
  misc_feature 1..120: note = Artificially Synthesized Probe
  source 1..120: mol_type = other DNA
catgcatggtgctgccaataccccctatcaatcccccatggtgagcctggtgacagggttgctggaagcctcatgttctccagcaagcagcccagaaacactatgggtgattcgagacct

SEQ ID NO: 21330 - DNA, 120 bp, synthetic construct
  misc_feature 1..120: note = Artificially Synthesized Probe
  source 1..120: mol_type = other DNA
cacactgtgacttcagcccaaacgatcacctgaaaatcatcaacatccatgtcactccttgtaccccaaggcacaatggccacagatgacgggcctggtgtgggagtccatccacatgag

SEQ ID NO: 21331 - DNA, 120 bp, synthetic construct
  misc_feature 1..120: note = Artificially Synthesized Probe
  source 1..120: mol_type = other DNA
aatgtgactccactagagacctcctgtgagtggaatcacgcaggttttgcctttcggtaactggctcatttcagtcagcacagtgtctttgttatggaccaaacgtgtcccccccaaatt

SEQ ID NO: 21332 - DNA, 120 bp, synthetic construct
  misc_feature 1..120: note = Artificially Synthesized Probe
  source 1..120: mol_type = other DNA
gccggcgagtctctccgcttggcctgcaacataaaaaacagtcatatgtggaaaaagcagggaggaaatgtaaattaaaaacatacaattcaggctgggcacagtggcagcactttggga

SEQ ID NO: 21333 - DNA, 120 bp, synthetic construct
  misc_feature 1..120: note = Artificially Synthesized Probe
  source 1..120: mol_type = other DNA
ctaaagcaatcctcctgtctcagcctcccaagaagctgtgagcacaggcatttgccagtggacccagttaatttttcaaagctttctgtagagacagggtcttgttatgttgcctaggcg

SEQ ID NO: 21334 - DNA, 120 bp, synthetic construct
  misc_feature 1..120: note = Artificially Synthesized Probe
  source 1..120: mol_type = other DNA
aactgttaagaaatatatgaagggagtcagagtgtgccaccccaaaacatgccactctttgacaaaaagattattttgagttgaaggcagctgagaaacagtagatgcaggagcagctct

SEQ ID NO: 21335 - DNA, 120 bp, synthetic construct
  misc_feature 1..120: note = Artificially Synthesized Probe
  source 1..120: mol_type = other DNA
actaaaagcaatgtttaaaacgtgaacaagaatagctgccctccccactaaaataaaaaacaaaggaaaatttgagcttgtgaccacacacacaaaacctggaacccaaatcctagggct

SEQ ID NO: 21336 - DNA, 120 bp, synthetic construct
  misc_feature 1..120: note = Artificially Synthesized Probe
  source 1..120: mol_type = other DNA
cattttgtagatttgtagatctggggaaaaaagtgaaataaagaggttggattggaaatgggattctgtggaaagaccacagctggcatcatcccaagggagaggattaagctccaaatc

SEQ ID NO: 21337 - DNA, 120 bp, synthetic construct
  misc_feature 1..120: note = Artificially Synthesized Probe
  source 1..120: mol_type = other DNA
tgcctggcctgtttgtttttaatacaaatctgagtatggtcccttggcaactacacggctgggtgtgaacacagcctccctgtaccgtccataccctgcaccttctagtggaggcacagg

SEQ ID NO: 21338 - DNA, 120 bp, synthetic construct
  misc_feature 1..120: note = Artificially Synthesized Probe
  source 1..120: mol_type = other DNA
gggttcaagcgatcctcacgtctcagcctcccaagttcaagtgctcctcgcgtctcagcctcccgagtagctaggactacaggcgcgcaccaccacacccagctaattttggtattttta

SEQ ID NO: 21339 - DNA, 120 bp, synthetic construct
  misc_feature 1..120: note = Artificially Synthesized Probe
  source 1..120: mol_type = other DNA
caagcaagacaagcaagcaggtacagccctcatgcctccacccccaggcttcccgacctgtgccagccctcggccaaagttaatcactgttccttctgtgtgataaccacgctgtgaacc

SEQ ID NO: 21340 - DNA, 120 bp, synthetic construct
  misc_feature 1..120: note = Artificially Synthesized Probe
  source 1..120: mol_type = other DNA
cacattaagtgcctgttgaaaaaataatttttattttctttccatgacgggcgatgacaaaatctcagacactaatttgtggtttgttctacagccgttcaggtcctttactcggaagct

SEQ ID NO: 21341 - DNA, 120 bp, synthetic construct
  misc_feature 1..120: note = Artificially Synthesized Probe
  source 1..120: mol_type = other DNA
agcgcagacacacgccacggcacacgctgatgtcaaaggactcgcgctccatgagggaagccgggccagaaggccacgtggtgtgattctgtttatgtgaaaatgcccagaactagggaa

SEQ ID NO: 21342 - DNA, 120 bp, synthetic construct
  misc_feature 1..120: note = Artificially Synthesized Probe
  source 1..120: mol_type = other DNA
aaaaaaaaaaaaaatcgctgccatacgcaatgtccagaatacacaaattcacagagatgggatgcaggccagtgagtgcagggaccagggaggggatggggaggaactgctcataagcag

SEQ ID NO: 21343 - DNA, 120 bp, synthetic construct
  misc_feature 1..120: note = Artificially Synthesized Probe
  source 1..120: mol_type = other DNA
ccagccttaccacgttttttttcaaatcaaaatctcccctgcatataacctcatctgtgtgccagccaggaatgcaggtcccccagccccgagggacagccccctggtccatatgtttct

SEQ ID NO: 21344 - DNA, 120 bp, synthetic construct
  misc_feature 1..120: note = Artificially Synthesized Probe
  source 1..120: mol_type = other DNA
gagttcgttctcctggaaagcagcagtgcctcacagcctcaaccccagtgagctgccctccgggcccagaagagaaacacacagtgagaagagctgaaggactgtctcattagaaataac

SEQ ID NO: 21345 - DNA, 120 bp, synthetic construct
  misc_feature 1..120: note = Artificially Synthesized Probe
  source 1..120: mol_type = other DNA
agtcaaacacagtaagaaacacagaccatcgcaaacccccagtcagccaaacacagcaggaaacacaatgctgaatttccacaaagctcatccttcctaatgttccaaataaacctttaa

SEQ ID NO: 21346 - DNA, 120 bp, synthetic construct
  misc_feature 1..120: note = Artificially Synthesized Probe
  source 1..120: mol_type = other DNA
gccaagcaaaagtcaaattacaacgctaccttggtacccagcgatcctgctcctaagtacacatccaaaaaacctggaggcagggtcttcaggagacacctgcacacccatgttcacagc

SEQ ID NO: 21347 - DNA, 120 bp, synthetic construct
  misc_feature 1..120: note = Artificially Synthesized Probe
  source 1..120: mol_type = other DNA
aaaaaaaaaaaagaaactggaaaaagttttaagaaaatgccttactcttacggacacctaggaggtgagagggaatacctaagagaaagcacagagccattgctcacggatgcccaagga

SEQ ID NO: 21348 - DNA, 120 bp, synthetic construct
  misc_feature 1..120: note = Artificially Synthesized Probe
  source 1..120: mol_type = other DNA
cccttccagcttaaggacgcaggcataggtggggggcccagagcacagcactgaaacagctgggggtgatgggaggaacaggcgtactcccatgccgggctatattgctaattttttttt

SEQ ID NO: 21349 - DNA, 120 bp, synthetic construct
  misc_feature 1..120: note = Artificially Synthesized Probe
  source 1..120: mol_type = other DNA
aagaaagaaaaaaaaaagatcagactccagacccgccagatacaagcagcaacagttaatcttagaaatggatacttggaaaagtttctcctcccaccagttactcacagaatgcacagt

SEQ ID NO: 21350 - DNA, 120 bp, synthetic construct
  misc_feature 1..120: note = Artificially Synthesized Probe
  source 1..120: mol_type = other DNA
aaaaacaaaaaaaagatggaccctggagaggcccggggtcccgcggggcgccttttctatttctttaccgcaatctgtttaaagagaaaagcaagcgcctgcccctcagctacacccccg

SEQ ID NO: 21351 - DNA, 120 bp, synthetic construct
  misc_feature 1..120: note = Artificially Synthesized Probe
  source 1..120: mol_type = other DNA
ccaatgaactaaagaaaaggaaggccctgtccttattctgaacgttcctttatttacaaattccgaggcaacccttaatgagaaccagaacgggtacttcaataggacaaactggctatt

SEQ ID NO: 21352 - DNA, 120 bp, synthetic construct
  misc_feature 1..120: note = Artificially Synthesized Probe
  source 1..120: mol_type = other DNA
gctgtaatggcaccactgcactccagcctgggtgacaaagcaagaccctgtctcagaaaaaaaaaaaaaagagagaaaaagatgctttatctttatgcattaaaagcatcacctggccag

SEQ ID NO: 21353 - DNA, 120 bp, synthetic construct
  misc_feature 1..120: note = Artificially Synthesized Probe
  source 1..120: mol_type = other DNA
aaaaacaattagccaggcgtggtgtagagagtctatagctccagaggctgaagtgggagaatcacttgagcccaggaggtagaggctgcaatgagctgagatcgtaccactgcactccag

SEQ ID NO: 21354 - DNA, 120 bp, synthetic construct
  misc_feature 1..120: note = Artificially Synthesized Probe
  source 1..120: mol_type = other DNA
gaacctgataccacctcccgccagtctgtgaatatataatctgacttgtattttccctgttttcccattttgcatacttcagaataaagacatctgttcataacactattaggaaccttg

SEQ ID NO: 21355 - DNA, 120 bp, synthetic construct
  misc_feature 1..120: note = Artificially Synthesized Probe
  source 1..120: mol_type = other DNA
gagaccagaccaggctacagcaagaaccctgtctctatagaaacacaaaacaaggcacttggccagaggttggttctcatgcaggaactgtgtcaaatcagagtgggaaacagctaggca

SEQ ID NO: 21356 - DNA, 120 bp, synthetic construct
  misc_feature 1..120: note = Artificially Synthesized Probe
  source 1..120: mol_type = other DNA
cccaggcgctgcgcccacccccatcccgactccagacgcgaccctcacccgacctcgtagcccaggcgctgaccctggtccccaagcccaagcgccaccccggaccctgggcgacccgct

SEQ ID NO: 21357 - DNA, 120 bp, synthetic construct
  misc_feature 1..120: note = Artificially Synthesized Probe
  source 1..120: mol_type = other DNA
ttttttttttctgcaatctgcctacaatcccaggccttactgtagctcctaaaactgtttcccagtttctcttcttccccagtcacacttgattttagtgaagtttgagtttaaagaccc

SEQ ID NO: 21358 - DNA, 120 bp, synthetic construct
  misc_feature 1..120: note = Artificially Synthesized Probe
  source 1..120: mol_type = other DNA
tgaatgtcattcatgatggatttgggtagtttctccttacagcatatccctggactattaagcatatctggaaggtgatatcggttgtgttatgtctttatcatgttgatatggctgctt

SEQ ID NO: 21359 - DNA, 120 bp, synthetic construct
  misc_feature 1..120: note = Artificially Synthesized Probe
  source 1..120: mol_type = other DNA
tactctgttggttagagcaaagaccagcgtacaaccctcacctttgaaaggaaaaatgtcaaagaatttgtggccgtgctttgcctactataattttgatgacaaagttgtattggactc

SEQ ID NO: 21360 - DNA, 120 bp, synthetic construct
  misc_feature 1..120: note = Artificially Synthesized Probe
  source 1..120: mol_type = other DNA
gccagcacacctgactaataccatactaattcaagtaaaacagttctcatgtatagtgaataagggttaactaagccttgtctcttttgactaacacattacaatttagttttttgtttg

SEQ ID NO: 21361 - DNA, 120 bp, synthetic construct
  misc_feature 1..120: note = Artificially Synthesized Probe
  source 1..120: mol_type = other DNA
gcatgaggtttttggttttttttcttattaggttgagaactttcacctttttgcttaaaggaagcagtttacaacttctttttgacatacgtgaatctctgcttttacactttgaagcca

SEQ ID NO: 21362 - DNA, 120 bp, synthetic construct
  misc_feature 1..120: note = Artificially Synthesized Probe
  source 1..120: mol_type = other DNA
ggagtgggatctgagcatcaatatttttttaaagttctctaggtaactgattctaacatacagctgggattgagaactatgtttttggtgcatgttaagtacgatctggctccctactta

SEQ ID NO: 21363 - DNA, 120 bp, synthetic construct
  misc_feature 1..120: note = Artificially Synthesized Probe
  source 1..120: mol_type = other DNA
atttacatcttaagatgttcctttggcatacactcaacattttccacatcgaattacctactttgctgtaaaccagtggttcttgttgggggtaattttgccttccaggacacattcggc

SEQ ID NO: 21364 - DNA, 120 bp, synthetic construct
  misc_feature 1..120: note = Artificially Synthesized Probe
  source 1..120: mol_type = other DNA
ctgtcctcaaggccaggttctctctctcatcacatcatcatgagcactgcgtgtgtatgaggattttaaagccttatagtaattgtctgttgatcccattactgtatttaaggaatgata

SEQ ID NO: 21365 - DNA, 120 bp, synthetic construct
  misc_feature 1..120: note = Artificially Synthesized Probe
  source 1..120: mol_type = other DNA
cactgccctcaagcatttagcacagtgctagagacatagtagttgctcagaaaataccatacattttagcagtgattaaatcttgagagggttgagccttcttaatacttgaggattact

SEQ ID NO: 21366 - DNA, 120 bp, synthetic construct
  misc_feature 1..120: note = Artificially Synthesized Probe
  source 1..120: mol_type = other DNA
agtggctggtgtgaatccctgcttaaaatcaggaccagtttgaatgactgcaaacctcatttttcactttttaccttttagtcttcactttgtggttccagtcatcaaatccctactctt

SEQ ID NO: 21367 - DNA, 120 bp, synthetic construct
  misc_feature 1..120: note = Artificially Synthesized Probe
  source 1..120: mol_type = other DNA
accacgcccggctgcattttctctttgttaactcattttcaacacttttggatttcacttttggagcactgctgtttgactaaggctgaagttctttatctttgtcaggtttacacgtct

SEQ ID NO: 21368 - DNA, 120 bp, synthetic construct
  misc_feature 1..120: note = Artificially Synthesized Probe
  source 1..120: mol_type = other DNA
gggacagaaaaggaagcttttaaaaagtacagtctttctcctagaaacccttcctaaaatctttggtgacatcgtaatcttatccctgtactttccctccttgtgtctaatcatttgcca

SEQ ID NO: 21369 - DNA, 120 bp, synthetic construct
  misc_feature 1..120: note = Artificially Synthesized Probe
  source 1..120: mol_type = other DNA
ccatgcccagccccaatgttccaagtcttttttttttaaatcaatatgtttttttaaatgtgtattttttgttacttgcttgtttaacccataacttcctaacttttacatctctctgga

SEQ ID NO: 21370 - DNA, 120 bp, synthetic construct
  misc_feature 1..120: note = Artificially Synthesized Probe
  source 1..120: mol_type = other DNA
ccaggggaaccctgtcatactctttcctcaatggatgcttttagcaagtttgatgaattgttgatgaattagatacctcgctagaaggacatatttgatatcagttgatccatttgggag

SEQ ID NO: 21371 - DNA, 120 bp, synthetic construct
  misc_feature 1..120: note = Artificially Synthesized Probe
  source 1..120: mol_type = other DNA
gaaaattagtataattatttgtatttgtttcaggaaagaagcacttgtaaggaaatatagcatccattgtgaaagtggaaaagtaaagataattcatcatgcctgctgtggcttcagttc

SEQ ID NO: 21372 - DNA, 120 bp, synthetic construct
  misc_feature 1..120: note = Artificially Synthesized Probe
  source 1..120: mol_type = other DNA
tcatatgcatattatctactctccagacagatcatacagatatgatctctaggtcataaagtttaagaggcaaagattatgaggcttctaaaaaaaaattcagccagaagtcattgtctt

SEQ ID NO: 21373 - DNA, 120 bp, synthetic construct
  misc_feature 1..120: note = Artificially Synthesized Probe
  source 1..120: mol_type = other DNA
atcccagaggaagtggtatatgtaagttggttgtatccaaacttgcatctaactttgtatcagttctgaagtagtggaacctaaataatgaaatttgctttatcaagatcagtggtcccc

SEQ ID NO: 21374 - DNA, 120 bp, synthetic construct
  misc_feature 1..120: note = Artificially Synthesized Probe
  source 1..120: mol_type = other DNA
gtgcacagtgccctgaagatctttaagacagcagaagaatgcagattagatcgtgatgaggaaagggcctatgtactatatatgaaatacgtgactgtttataatcttatcaaaaaaaga

SEQ ID NO: 21375 - DNA, 120 bp, synthetic construct
  misc_feature 1..120: note = Artificially Synthesized Probe
  source 1..120: mol_type = other DNA
gcttttaatcctttgaacaggtgcttgtcttccatttgattgaagccatggatagggagggcaggggcaatataaatgaatagaaaaaattgatgactaggataagtgttgatagagaaa

SEQ ID NO: 21376 - DNA, 120 bp, synthetic construct
  misc_feature 1..120: note = Artificially Synthesized Probe
  source 1..120: mol_type = other DNA
gttttaaatctgtctttgaagagggggccccttgcatttggaggttcattcatctgtccacaatggatgaattagtcctgccctgggaaaaatactgtttaatatttttggccatactta

SEQ ID NO: 21377 - DNA, 120 bp, synthetic construct
  misc_feature 1..120: note = Artificially Synthesized Probe
  source 1..120: mol_type = other DNA
tgagacgctccctgcaaaggctcaggtaacttaggccattatttcatatgattcagtagttcatttcctgtttttcagtaaaaggatcattttcatttgctctgtccagaggatctcatc

SEQ ID NO: 21378 - DNA, 120 bp, synthetic construct
  misc_feature 1..120: note = Artificially Synthesized Probe
  source 1..120: mol_type = other DNA
aacattaatttagcaagctctctcaatagtagagaaggacactacattttattacttatcaaaaagtcatcttatgaataattctttcagggttatctgaaaaagtggggaaagaaaatg

SEQ ID NO: 21379 - DNA, 120 bp, synthetic construct
  misc_feature 1..120: note = Artificially Synthesized Probe
  source 1..120: mol_type = other DNA
atctcactaatattaggggaatgtctgatagtgtgtaacagacatgcccaaccataaacaattttttgtgtttaaatagtttaagctgggcttacaggctggctttttggtgagttcatg

SEQ ID NO: 21380 - DNA, 120 bp, synthetic construct
  misc_feature 1..120: note = Artificially Synthesized Probe
  source 1..120: mol_type = other DNA
tttcttttctttttttcccctccgagacagagtttgactcttgttgcccggggtagagtacaatggcgtgatctcagctcactgcaacctctgcctcccgggttcaggtgattctcctgc

SEQ ID NO: 21381 - DNA, 120 bp, synthetic construct
  misc_feature 1..120: note = Artificially Synthesized Probe
  source 1..120: mol_type = other DNA
taatgaactgtgctagtaggctctatttgcaaagtcatattgacatgttgtggcaaattggatccagtaatcatttaactgacttaactaactactgcaatgtcataccaaccttgattt

SEQ ID NO: 21382 - DNA, 120 bp, synthetic construct
  misc_feature 1..120: note = Artificially Synthesized Probe
  source 1..120: mol_type = other DNA
aatgccgagaactaacaatatgggatggttttcctataattttaggattatttccattcaatacttggacctggaaacatcaaaaaagctgtcgaagaagctgaaagactctctgaaagc

SEQ ID NO: 21383 - DNA, 120 bp, synthetic construct
  misc_feature 1..120: note = Artificially Synthesized Probe
  source 1..120: mol_type = other DNA
agccactgtacccggccattagtcatgctttaaaatttaaattgtttcccttatcaacaacataatgctgttatgtagatcctagtagataaatttctgcctgtatctgtagcataaaaa

SEQ ID NO: 21384 - DNA, 120 bp, synthetic construct
  misc_feature 1..120: note = Artificially Synthesized Probe
  source 1..120: mol_type = other DNA
ctctgggtcctttccaattctaaggctttttaaatgtactttgaattttcctctgtataggttattttgcagctagatgtggagaaccttttcactgtttttctccctgtctgtcctctc

SEQ ID NO: 21385 - DNA, 120 bp, synthetic construct
  misc_feature 1..120: note = Artificially Synthesized Probe
  source 1..120: mol_type = other DNA
ttttttcatttctgccctcaaattggatttaggctgactgtgcttacttcttagggcagacagttcacatactgttccagcatagagcactactagagaagaaatatagagcagtaggta

SEQ ID NO: 21386 - DNA, 120 bp, synthetic construct
  misc_feature 1..120: note = Artificially Synthesized Probe
  source 1..120: mol_type = other DNA
gctcagcatatggtctcttggtgaacgtaccatgtgcacttgcaaagaaaatgtggttgttgaatatactgttctctatatgtcatttaggtcagaatggctgataatgttcagatcttc

SEQ ID NO: 21387 - DNA, 120 bp, synthetic construct
  misc_feature 1..120: note = Artificially Synthesized Probe
  source 1..120: mol_type = other DNA
taccacaccccgccctcatcttcattcttaagggattttaactagatacaggattctaggttggcaggttttaattttcccttttgtcacttcagagctgctattccactgtcttctggc

SEQ ID NO: 21388 - DNA, 120 bp, synthetic construct
  misc_feature 1..120: note = Artificially Synthesized Probe
  source 1..120: mol_type = other DNA
tgttgttgttttgtcccactaggcagttaacttggctatactcaaacgttaagttttctgtcttgcctatggtaggtggcaactgacattcttttcaattcttctaaacttagctgggct

SEQ ID NO: 21389 - DNA, 120 bp, synthetic construct
  misc_feature 1..120: note = Artificially Synthesized Probe
  source 1..120: mol_type = other DNA
tttaaagtagagtgtcgtgatcaccatgttcctgtcaatattagtgatcatttctgtcaatggaatacataattcagaaggaattgctaagcgtaaagatagaaactgcttaggccaggc

SEQ ID NO: 21390 - DNA, 120 bp, synthetic construct
  misc_feature 1..120: note = Artificially Synthesized Probe
  source 1..120: mol_type = other DNA
tgtgaagctggcacagttatttgaatagtcaccatttctattgtatagttttatctgtttatttagaaatttttcattttggaatattcactcaaaagagcatataagaccaggtgcggt

SEQ ID NO: 21391 - DNA, 120 bp, synthetic construct
  misc_feature 1..120: note = Artificially Synthesized Probe
  source 1..120: mol_type = other DNA
caccgcacccagccacctataatttagtagggaatagttctaaattcctcagatatctgctaactgtagttcagatagctgtttaactgccaacaagttggaaatttcagtgaagtcatc

SEQ ID NO: 21392 - DNA, 120 bp, synthetic construct
  misc_feature 1..120: note = Artificially Synthesized Probe
  source 1..120: mol_type = other DNA
aggatggtggcacattggctaaaggctctttggagaatgttttggattccaaagacaaaacccaaaaggtatttcaaatttaatgtgtgagttaaaagactgtttctgcttgttagatga

SEQ ID NO: 21393 - DNA, 120 bp, synthetic construct
  misc_feature 1..120: note = Artificially Synthesized Probe
  source 1..120: mol_type = other DNA
cattttttcacatctatttagtgactacttgtggtcttttcagctacatcatctctttgctaaaagccatcagtgacttagtctgtagctgccagctatcaccgtacctcccttccttta

SEQ ID NO: 21394 - DNA, 120 bp, synthetic construct
  misc_feature 1..120: note = Artificially Synthesized Probe
  source 1..120: mol_type = other DNA
aaaaggtctaagtgggtcctttgtttccccatggataaaatgagttagtaccatacaggattatcccatgttgtcttggttaaaaaatgtaaactacataggccgggcacagcggctcat

SEQ ID NO: 21395 - DNA, 120 bp, synthetic construct
  misc_feature 1..120: note = Artificially Synthesized Probe
  source 1..120: mol_type = other DNA
atgtcaaaaccaaagcttgtacttgttttcttttcaacatgcagtttagcaataatggttaagagcatggactctcagaagtcaaactgccggagtttgaatactggttcctcctctccc

SEQ ID NO: 21396 - DNA, 120 bp, synthetic construct
  misc_feature 1..120: note = Artificially Synthesized Probe
  source 1..120: mol_type = other DNA
tatggaaattatccataggtggcgttgatgctctagtgacaaatatgtgacctaaacaagactttggaattcctcttcatctgctagagacgttttcctctctcagaaaaggtttacctt

SEQ ID NO: 21397 - DNA, 120 bp, synthetic construct
  misc_feature 1..120: note = Artificially Synthesized Probe
  source 1..120: mol_type = other DNA
ggagagtcctgtggtctctgacacaactattgatctctgctgttgcagtatgaaaaaatgtgtaaacaaactagtgtggcagtgatccagtaaaaacagatggccatagtttttcaacct

SEQ ID NO: 21398 - DNA, 120 bp, synthetic construct
  misc_feature 1..120: note = Artificially Synthesized Probe
  source 1..120: mol_type = other DNA
ctgtggaccttagtaaatgttactacttagcatccaagctaaatgtgataaagtagtcttttcctggtaactttttaaatctttgcctctttttatgtgtgtgggtggtgggggagggga

SEQ ID NO: 21399 - DNA, 120 bp, synthetic construct
  misc_feature 1..120: note = Artificially Synthesized Probe
  source 1..120: mol_type = other DNA
gacttgcatgggtatattgtatattggaaatcatggcatagtggcagagctaaacctccagataaagggctattttcactatttcgagcattcttatgcagatcctattacctctcttgg

SEQ ID NO: 21400 - DNA, 120 bp, synthetic construct
  misc_feature 1..120: note = Artificially Synthesized Probe
  source 1..120: mol_type = other DNA
ggagtttcagtttggtgctagtatatcttttaaatacttgcttatctctcttaactgaagggaacaggtctcagagctttctgtaggttacagtacctacaactagctgatagtgattac

SEQ ID NO: 21401 - DNA, 120 bp, synthetic construct
  misc_feature 1..120: note = Artificially Synthesized Probe
  source 1..120: mol_type = other DNA
tctgggttcaattgatcctcatgtctcatgtctcagcctcccaagtggctgggattataggtgtgcgccaccacacccggctaatttttgtatttttagtagacacagggtttcactatg

SEQ ID NO: 21402 - DNA, 120 bp, synthetic construct
  misc_feature 1..120: note = Artificially Synthesized Probe
  source 1..120: mol_type = other DNA
aagacaagtagagcagagttggagcagattgtgaagatggtacataaaagacagaagtttgagaaatgttggctgatactgttgtttcccaaagtgttttctgtagaatactaatcctga

SEQ ID NO: 21403 - DNA, 120 bp, synthetic construct
  misc_feature 1..120: note = Artificially Synthesized Probe
  source 1..120: mol_type = other DNA
tgggctgggttactgtgttctaagtgctgggctaagccattgaacaaacaaaaaattgtctttggagcttttaacagagaggtgagataggtaagacgtacaataaaagcttgaaatgtt

SEQ ID NO: 21404 - DNA, 120 bp, synthetic construct
  misc_feature 1..120: note = Artificially Synthesized Probe
  source 1..120: mol_type = other DNA
taggacctcttgttgacttttgccccaatttaaatattaatacatttcagagtcactgctagttggattgaagcacacctgccagatgattctaaagacacatggaagaagagggggaat

SEQ ID NO: 21405 - DNA, 120 bp, synthetic construct
  misc_feature 1..120: note = Artificially Synthesized Probe
  source 1..120: mol_type = other DNA
tgagcagctgcgcccagcccatcatgctttgattgtagaattttttataaattcaggtttaaaagatttgttttggctgggtgtggtaaaattaaaacttaggtggaaaaagatcttata

SEQ ID NO: 21406 - DNA, 120 bp, synthetic construct
  misc_feature 1..120: note = Artificially Synthesized Probe
  source 1..120: mol_type = other DNA
agtatcagataaatgcatattaaaacgagtgccattttcactgatcaagttaacaaaggtttaaaaaataatacggttgtcctcagtatttgtgggggattgatgctaggaccccccaca

SEQ ID NO: 21407 - DNA, 120 bp, synthetic construct
  misc_feature 1..120: note = Artificially Synthesized Probe
  source 1..120: mol_type = other DNA
gtcaatttgttaaattattaacaatgatagcactgaatgctggtgagcatgtggtgagaagaaaactcattctgctggtaggagggtcagctgattgccgttgagaaagtcggtcttaaa

SEQ ID NO: 21408 - DNA, 120 bp, synthetic construct
  misc_feature 1..120: note = Artificially Synthesized Probe
  source 1..120: mol_type = other DNA
tgtaaaaattataaagatgtataatgggcattctcatatcctgttggttaagtgtataaattggtatagcctttctgaagggcaactgggcatcatattaaaccagcaattctactccta

SEQ ID NO: 21409 - DNA, 120 bp, synthetic construct
  misc_feature 1..120: note = Artificially Synthesized Probe
  source 1..120: mol_type = other DNA
atcttttgtgtttatttcagcattgcttataattaaatggggaaaaaacccaaatgttcaaacgattgactcagttttggggtctgtgtataaagtagaataggccatgtgcagcggctc

SEQ ID NO: 21410 - DNA, 120 bp, synthetic construct
  misc_feature 1..120: note = Artificially Synthesized Probe
  source 1..120: mol_type = other DNA
tatccctcattggaagaatcaattccttctaaacctgctgcccagacgccacctgcatctatagaagtagatgaaaatatagaattgataagtggtcaaaatgagagaatgggaccactg

SEQ ID NO: 21411 - DNA, 120 bp, synthetic construct
  misc_feature 1..120: note = Artificially Synthesized Probe
  source 1..120: mol_type = other DNA
ccgccacgcctatattagagtagataattaaggggtttccaagccagttggcgatccatttgctacaaacaatgccaatgaaagattgcattatcacagtgaattagaatagcccttttg

SEQ ID NO: 21412 - DNA, 120 bp, synthetic construct
  misc_feature 1..120: note = Artificially Synthesized Probe
  source 1..120: mol_type = other DNA
agcacagagcaaggagaatattctagctgagaagatcaaggacgtcttcatggaggagacagtattttatctgggctttaagagtaggattggaggatagaagaaacaagtagaaaattc

SEQ ID NO: 21413 - DNA, 120 bp, synthetic construct
  misc_feature 1..120: note = Artificially Synthesized Probe
  source 1..120: mol_type = other DNA
tatttgatcagaattccggtagagaagaataaagtattataagagcatgtatcaggggacttggctagttctaggaaccagggaagtcttttcagagggagagatgtgtaagccaagacc

SEQ ID NO: 21414 - DNA, 120 bp, synthetic construct
  misc_feature 1..120: note = Artificially Synthesized Probe
  source 1..120: mol_type = other DNA
gtatggggtttgagatacatgtgttgacactcaaatggaaatattgggtaggcatttggatacctggaagtggaacttaagtctaagtatgcccaggtctaggttttatgttttagaata

SEQ ID NO: 21415 - DNA, 120 bp, synthetic construct
  misc_feature 1..120: note = Artificially Synthesized Probe
  source 1..120: mol_type = other DNA
agtggcattccataaaagggcaggcatttcaaatagtcttttcaggggtgatagaatgtactgatctatccacatttgctcatctattctcctttgaggccagtgccatacatttatgaa

SEQ ID NO: 21416 - DNA, 120 bp, synthetic construct
  misc_feature 1..120: note = Artificially Synthesized Probe
  source 1..120: mol_type = other DNA
caagctgctcttatccagggaacacttatctggtaacctctgctattaaaaaagatagcttccatccaaaaaccttctaaacaccccaaattggggatatgaagcccatgtactaaaact

SEQ ID NO: 21417 - DNA, 120 bp, synthetic construct
  misc_feature 1..120: note = Artificially Synthesized Probe
  source 1..120: mol_type = other DNA
ctacagtgtaaggggatcgttgccatctttggtagctggtgttttgcttgtttttgcatgatcaatccatttatatgctaaaggaaatagtttgtcttcctgtttaaagtgtgacagcgt

SEQ ID NO: 21418 - DNA, 120 bp, synthetic construct
  misc_feature 1..120: note = Artificially Synthesized Probe
  source 1..120: mol_type = other DNA
atcacaattttttaaatacataggctttgtataagacatctttgctgggagcggtggctcacgcttgtaatcccaggcaggcagatcacgaggtcaggagatcgagatcatcctggctaa

SEQ ID NO: 21419 - DNA, 120 bp, synthetic construct
  misc_feature 1..120: note = Artificially Synthesized Probe
  source 1..120: mol_type = other DNA
accgatgaatacagaggactgactccatatccaatctaaatctatgtgaatttaacatgttaaatttttgttaggtcattctgctgtattttgccattaaaaaaatctgagaccagcctt

SEQ ID NO: 21420 - DNA, 120 bp, synthetic construct
  misc_feature 1..120: note = Artificially Synthesized Probe
  source 1..120: mol_type = other DNA
tttaaagagaaagagtagggattagatgactggaaccacaaagtgaagactaaaaaatagaaagtgaaaattgaggtttgcagttactcccactggtcctgacattctaagcagggcttc

SEQ ID NO: 21421 - DNA, 120 bp, synthetic construct
  misc_feature 1..120: note = Artificially Synthesized Probe
  source 1..120: mol_type = other DNA
cttactgtatttgctgagcaactactatgtctctagcactgtgctaaatgcttgagggcagtgtttttaaaatccctaaggtcataatcagtataagtataagcctaggtgtggtggcac

SEQ ID NO: 21422 - DNA, 120 bp, synthetic construct
  misc_feature 1..120: note = Artificially Synthesized Probe
  source 1..120: mol_type = other DNA
taggagagcaagatgactttaggtagatttagaataagccaagataatgaagttttgtagcctttcttgtgaatattcatttgctaggatactataacgtctattctctacttacacctc

SEQ ID NO: 21423 - DNA, 120 bp, synthetic construct
  misc_feature 1..120: note = Artificially Synthesized Probe
  source 1..120: mol_type = other DNA
cctgtttttttttttcttttccatctaagtttcttgacccaatcactggaacctttcgttattatcattcacccaccaacactgttcatatgtacccaccggaaatggctccttcatctg

SEQ ID NO: 21424 - DNA, 120 bp, synthetic construct
  misc_feature 1..120: note = Artificially Synthesized Probe
  source 1..120: mol_type = other DNA
aggttaggtttcccaaaatagtttcatttagctatacttctggcttcgtcccttttggaatcctcttagcttatgactgatagggctatgaggagatgatttaagtctgtgtaccacttc

SEQ ID NO: 21425 - DNA, 120 bp, synthetic construct
  misc_feature 1..120: note = Artificially Synthesized Probe
  source 1..120: mol_type = other DNA
cccagctggaactgtatttttttactgtgattgtgtatccatccgtgaatagtcaacacactctagaatttaagtaatagtacccaaataacctctgcttcccttgatatctactccacg

SEQ ID NO: 21426 - DNA, 120 bp, synthetic construct
  misc_feature 1..120: note = Artificially Synthesized Probe
  source 1..120: mol_type = other DNA
ctggaccagctcttactggacttcgtaacttaggaaatacttgttatatgaactcaatattgcagtgcctatgtaacgctccacatttggctgattatttcaaccgaaactgttatcagg

SEQ ID NO: 21427 - DNA, 120 bp, synthetic construct
  misc_feature 1..120: note = Artificially Synthesized Probe
  source 1..120: mol_type = other DNA
ttggggcataaaggtgaagtggcagaagaatttggtataatcatgaaagccctgtggacaggacagtatagatatatcagtccaaaggactttaaaatcaccattgggaagatcaatgac

SEQ ID NO: 21428 - DNA, 120 bp, synthetic construct
  misc_feature 1..120: note = Artificially Synthesized Probe
  source 1..120: mol_type = other DNA
aaccaaatgactcatgtgactagttattataaaggcatgtatgtatacataaatgaccaccctccatttacatactacaacttctttttagcactttttgtctcacatattttggggtca

SEQ ID NO: 21429 - DNA, 120 bp, synthetic construct
  misc_feature 1..120: note = Artificially Synthesized Probe
  source 1..120: mol_type = other DNA
cagggtcaattcaaatctacagtacagtgcctcacatgtcacaaaaagtctaggacatttgaggccttcatgtatttgtctctaccactagcatccacaagtaaatgtacattacaggta

SEQ ID NO: 21430 - DNA, 120 bp, synthetic construct
  misc_feature 1..120: note = Artificially Synthesized Probe
  source 1..120: mol_type = other DNA
tagattgctgttgaatcactggtgcctgcagagtgactaactaaataggtgctctctgacattattgaagaatcgaattaacgagtatctgctacttgtttttttctgccaggattgcct

SEQ ID NO: 21431 - DNA, 120 bp, synthetic construct
  misc_feature 1..120: note = Artificially Synthesized Probe
  source 1..120: mol_type = other DNA
tattttagtcagtagtctcctactctcaatttctggctctagttttctctgaagtacaagcttgactcgagagcagctgtcattctttcttttgtggtggtcagcattataaacatgtgg

SEQ ID NO: 21432 - DNA, 120 bp, synthetic construct
  misc_feature 1..120: note = Artificially Synthesized Probe
  source 1..120: mol_type = other DNA
acggtggtttaagtttgatgatcatgaagtttctgatatctccgtttcttctgtgaaatcttcagcagcttatatcctcttttatacttcattgggaccacgagtaactgatgtagccac

SEQ ID NO: 21433 - DNA, 120 bp, synthetic construct
  misc_feature 1..120: note = Artificially Synthesized Probe
  source 1..120: mol_type = other DNA
ctaaaagtgcttcagaaagagaccaccattagcaggctctcagggagaagatgaaaggatggggttcaaattgtgaagctgacaacttttcatgttttacaattagtctaagagaccact

SEQ ID NO: 21434 - DNA, 120 bp, synthetic construct
  misc_feature 1..120: note = Artificially Synthesized Probe
  source 1..120: mol_type = other DNA
gtgtagtggccaccatccaaatcaccaaaatggttctatgggagaaaggaatgtcaaacttagtattcacatatgaacactaactactggaacagaaatgatagggccaagagatgcttt

SEQ ID NO: 21435 - DNA, 120 bp, synthetic construct
  misc_feature 1..120: note = Artificially Synthesized Probe
  source 1..120: mol_type = other DNA
aaaccacggcccgtgggtcaactccaggctgtttttgtaagacccatgcattagcaacgggttttaaatttttatatggttggggaaaagatccaagtaataatagtattgttatatgtg

SEQ ID NO: 21436 - DNA, 120 bp, synthetic construct
  misc_feature 1..120: note = Artificially Synthesized Probe
  source 1..120: mol_type = other DNA
agggctagtacacaggagttatttattcaatattcccttcaaccttcgtcttccccacctctctccttacaggtaatagaaatatctgaaattcacatttaaaagatcaaggttccgcca

SEQ ID NO: 21437 - DNA, 120 bp, synthetic construct
  misc_feature 1..120: note = Artificially Synthesized Probe
  source 1..120: mol_type = other DNA
acctgtgtggtctgcgaatcctgtgaacttaatatgaaaagtatttctagggcagttgccagaaggaaacagaatttctagattgttgcatgttaactcagacctaacaggatatccaca

SEQ ID NO: 21438 - DNA, 120 bp, synthetic construct
  misc_feature 1..120: note = Artificially Synthesized Probe
  source 1..120: mol_type = other DNA
gagtagtgatggagaatacgtgttaagaggcatgaaaaattgaatgagaatattcagcgtatgtcctgtagaagttctaggaggagagaatcgagtaggggagcaaggcaatattaaaag

SEQ ID NO: 21439 - DNA, 120 bp, synthetic construct
  misc_feature 1..120: note = Artificially Synthesized Probe
  source 1..120: mol_type = other DNA
taattactaaagaatcaaaatgtgtaacttccaaagttgtagagggaaaataaagaaagctttatcagtttagtagcagcaagaacaacaggggaaaacaacacagcagaggtccccaac

SEQ ID NO: 21440 - DNA, 120 bp, synthetic construct
  misc_feature 1..120: note = Artificially Synthesized Probe
  source 1..120: mol_type = other DNA
aaagaagatgacgacaagtaaatccgaatttattactagttgaaatatatgggatgtagtaaatttaccaaatatttactggattttaaatatccagttctagccaggcgcgatggctca

SEQ ID NO: 21441 - DNA, 120 bp, synthetic construct
  misc_feature 1..120: note = Artificially Synthesized Probe
  source 1..120: mol_type = other DNA
aaaatattagtatagatacagcttttacaatatatacttagatgagtatctgactcctgaaatagaagtgcactgtctcaacaaatgtaaaagagttagtttaggccaggcacggtggct

SEQ ID NO: 21442 - DNA, 120 bp, synthetic construct
  misc_feature 1..120: note = Artificially Synthesized Probe
  source 1..120: mol_type = other DNA
ctggacactcagtttaaaacattaaaacataacagaataaaccctaaaagagtagagggaagagataacactgtaagaggaataacccataaagcagaaaacaaagatgtaatacagaag

SEQ ID NO: 21443 - DNA, 120 bp, synthetic construct
  misc_feature 1..120: note = Artificially Synthesized Probe
  source 1..120: mol_type = other DNA
acagtacggaattagcccaaatgtgaacaaattgaccaacagacacacacagcataggaaaaccagcattatatgttactgaggaaaagaagaggctgagacatttggttattcatatgc

SEQ ID NO: 21444 - DNA, 120 bp, synthetic construct
  misc_feature 1..120: note = Artificially Synthesized Probe
  source 1..120: mol_type = other DNA
ataattctgctattgtgggtatgtagaagaatgtggttaagggattattttgatctatgaagtgtcacgatacaagatttaaatcagcaaaaagttagatatacgtgtgtatagatgtgc

SEQ ID NO: 21445 - DNA, 120 bp, synthetic construct
  misc_feature 1..120: note = Artificially Synthesized Probe
  source 1..120: mol_type = other DNA
acaaaaattattggggcatggtggtgcacacctgtggtcccagctactcgagggagggaggagggaagatcacttgagccagggaggttgaggctgcagtgagctgagattgcaccattg

SEQ ID NO: 21446 - DNA, 120 bp, synthetic construct
  misc_feature 1..120: note = Artificially Synthesized Probe
  source 1..120: mol_type = other DNA
gaagtctgatgatcctggtaggggtatgtattggtataatcacttgtagaaagttaaatatgcacatactttatgatctaagtgacctcactcctaagtatatacatgagagaaactctt

SEQ ID NO: 21447 - DNA, 120 bp, synthetic construct
  misc_feature 1..120: note = Artificially Synthesized Probe
  source 1..120: mol_type = other DNA
ttaaaccacaatgccattctactatatgggcaaccagaagggccaaaacaaaacgaacaaaagactaccaagtgttaacaaggatttaaggcaactgaaacttccagtcattgctggtgg

SEQ ID NO: 21448 - DNA, 120 bp, synthetic construct
  misc_feature 1..120: note = Artificially Synthesized Probe
  source 1..120: mol_type = other DNA
attctttaaaccgccttcctccacaccacccactggagtggtcttccaaaccgttcaccctcttcccaaagattactctttaaacgtcctttctctaccaccctcgttctccaaattgtt

SEQ ID NO: 21449 - DNA, 120 bp, synthetic construct
  misc_feature 1..120: note = Artificially Synthesized Probe
  source 1..120: mol_type = other DNA
gccagattaagtcaaaccctgtcgtttcttcctcaagaggagctcggttctgcctgccccatcagcctcactgtcactacctcagtttaggtctgttgtttgcaaacttagcaatagagt

SEQ ID NO: 21450 - DNA, 120 bp, synthetic construct
  misc_feature 1..120: note = Artificially Synthesized Probe
  source 1..120: mol_type = other DNA
tctgaagttgcttagaactaccaaacttctgagatctcctaactgataagagaagctcagtttcaatctgtgtaatgttgattagaagggtcctacctagaaatgtgacatctcactgcc

SEQ ID NO: 21451 - DNA, 120 bp, synthetic construct
  misc_feature 1..120: note = Artificially Synthesized Probe
  source 1..120: mol_type = other DNA
acccctgaagaactaatcaaaaggtaaaaactacaggaccaccacaaatgggttacattctgtggtatgaagaacatgcgctggcgtgtgcttattgcatcctgtgattttctttttttt

SEQ ID NO: 21452 - DNA, 120 bp, synthetic construct
  misc_feature 1..120: note = Artificially Synthesized Probe
  source 1..120: mol_type = other DNA
agtgaaagaatatgagcatatgagctaggagtaaggagaccttcatttgcctcatgcaattgactttggcacttttggcaacctacttaacccatgtatatcttggccttttcaagttga

SEQ ID NO: 21453 - DNA, 120 bp, synthetic construct
  misc_feature 1..120: note = Artificially Synthesized Probe
  source 1..120: mol_type = other DNA
aaaccccacactagttatttatggggaagttgtttttaccatgttgcctgtgaccactcagtaccggtacctgatgaatttgtggtaatgttgagaagttatggtgtttctgcagttttt

SEQ ID NO: 21454 - DNA, 120 bp, synthetic construct
  misc_feature 1..120: note = Artificially Synthesized Probe
  source 1..120: mol_type = other DNA
ttgaaagaaattttgatcggcagaaaagtaagcgtcatttttcatggggcggtaaatagccttaacaagaaattaagtttctgtgccactggggatgggatattttcccatgaatccagg

SEQ ID NO: 21455 - DNA, 120 bp, synthetic construct
  misc_feature 1..120: note = Artificially Synthesized Probe
  source 1..120: mol_type = other DNA
gcctgtgggccacagtttggtgacccatcttctagaatagcaaatgtcctctgtgtccattagtaatacttatcctctgctaatcagattcttgcttcgtttttaatatatcttgggtgc

SEQ ID NO: 21456 - DNA, 120 bp, synthetic construct
  misc_feature 1..120: note = Artificially Synthesized Probe
  source 1..120: mol_type = other DNA
gagagctaagattgtagaacactctagagatagttgtgggaagagagctcagttactcttcgtatatttatgtgtatgtcactttctttttttgttgtccaactcccaaggtcgcatcct

SEQ ID NO: 21457 - DNA, 120 bp, synthetic construct
  misc_feature 1..120: note = Artificially Synthesized Probe
  source 1..120: mol_type = other DNA
gagtccttctatatctctctcactctcctcgaggcaaccacttgtgacccttagctgattcttttggtatctatcactgcagatcctagcatgctttttatgctacattttgatttttca

SEQ ID NO: 21458 - DNA, 120 bp, synthetic construct
  misc_feature 1..120: note = Artificially Synthesized Probe
  source 1..120: mol_type = other DNA
ccctcaccccgaaactcttctctaaggctattaataattgtcaagtgtttttcactctgcctgtttcttccctgttattcatttatttgtttctgttagtccgtttggcctctgcctttc

SEQ ID NO: 21459 - DNA, 120 bp, synthetic construct
  misc_feature 1..120: note = Artificially Synthesized Probe
  source 1..120: mol_type = other DNA
ccaaattttgtcactgatctctccctttcctgtgggattttggaaaagagcagagtgtaatgtgtgtgtgcagttgaccagctttaagtgaatgtcccaaatgtctctttccatttcacc

SEQ ID NO: 21460 - DNA, 120 bp, synthetic construct
  misc_feature 1..120: note = Artificially Synthesized Probe
  source 1..120: mol_type = other DNA
agttagcagggagattttctttagacactgctcacttccagttcgtcttgtttgattgtagatagggcacagcagcctagaagaatctggagaagcgctatgtttatacctttgtattta

SEQ ID NO: 21461 - DNA, 120 bp, synthetic construct
  misc_feature 1..120: note = Artificially Synthesized Probe
  source 1..120: mol_type = other DNA
atgtgctatcccacatgccgacatccatattctagtgtagtgttcctattccatatcacaggtttttttagaacagtttgatgtatgttaaggccctgaaaaacatagatgtcacacgta

SEQ ID NO: 21462 - DNA, 120 bp, synthetic construct
  misc_feature 1..120: note = Artificially Synthesized Probe
  source 1..120: mol_type = other DNA
agagcacaggctttggagccagatggccgtgtttgtcatggctttaaaccctttggagctctggtttccttatctgtgaaaaaggttactaaatgatgattaggcagaaaaaagttataa

SEQ ID NO: 21463 - DNA, 120 bp, synthetic construct
  misc_feature 1..120: note = Artificially Synthesized Probe
  source 1..120: mol_type = other DNA
aaatacaaaaattaagccgggcgcggtggctcacgcctgtaatcctagcactttgggaggccgaggcgggtggatcacgaggtcaggagatcaagaccatcccggctaacatggtgaaac

SEQ ID NO: 21464 - DNA, 120 bp, synthetic construct
  misc_feature 1..120: note = Artificially Synthesized Probe
  source 1..120: mol_type = other DNA
catttatgtttcatacgtccctgatacacatagcctgacggtagttttgtacaatattttattcattttgtgcatgaaacacagttttgactgtgatccagcagatgaggtcagatgtga

SEQ ID NO: 21465 - DNA, 120 bp, synthetic construct
  misc_feature 1..120: note = Artificially Synthesized Probe
  source 1..120: mol_type = other DNA
tgcctcccaggctcgagcaatcctacctcagcctcccaagtggctgggactacaggcatgcaccaccaggctaagtttttaacattttttgtagagatgcagtctcactatgttgcccag

SEQ ID NO: 21466 - DNA, 120 bp, synthetic construct
  misc_feature 1..120: note = Artificially Synthesized Probe
  source 1..120: mol_type = other DNA
accatgcctggctgatgtttcttggatatttttaatgaaataaacgttattaagaaacacctgttctagttccaaataaaggattttcagtatttttattggtttaatacatttctttag

SEQ ID NO: 21467 - DNA, 120 bp, synthetic construct
  misc_feature 1..120: note = Artificially Synthesized Probe
  source 1..120: mol_type = other DNA
aactttcctactgattctgggcataggtttacccctaagctgctgagacagaaagcctcggaatatttttccaaccagaccttgttttgcttacgtgtacctccctcatgatttaattcc

SEQ ID NO: 21468 - DNA, 120 bp, synthetic construct
  misc_feature 1..120: note = Artificially Synthesized Probe
  source 1..120: mol_type = other DNA
aaagacatttatgggggcaggagatatgcagcagcacacctagttcagtttctggggaaatttttcccttttccaaatagttgtgggttatgggaattttgttagtttgtctttcagggt

SEQ ID NO: 21469 - DNA, 120 bp, synthetic construct
  misc_feature 1..120: note = Artificially Synthesized Probe
  source 1..120: mol_type = other DNA
ggcccattgatctgttttaaagcacctttgttcatcactccatgcttcaaagcctctggttatccctgttggcttcagcataaagacagtttccttagtgtgtcttatagaacctgtctc

SEQ ID NO: 21470 - DNA, 120 bp, synthetic construct
  misc_feature 1..120: note = Artificially Synthesized Probe
  source 1..120: mol_type = other DNA
gactgggatccacagttgcaacaggtaagatgggagcacgtttttttcaataagaaaactggagagagaagccagaaatcagaattgcggttggaattctgcttatagaaaaactgaagt

SEQ ID NO: 21471 - DNA, 120 bp, synthetic construct
  misc_feature 1..120: note = Artificially Synthesized Probe
  source 1..120: mol_type = other DNA
tgtttcaggcaagaatggggatactcttccactctctaaaaatgcagatcatttactgcacctaaagacaaaggtaaggaagtttgtttaggctctgaattctagagcctgaattctagg

SEQ ID NO: 21472 - DNA, 120 bp, synthetic construct
  misc_feature 1..120: note = Artificially Synthesized Probe
  source 1..120: mol_type = other DNA
gccaaaataagaatagacctccattcttggatttggaaatcaaagccatgccttttaggtgctctgcctctgaaataatcatattaatgcagaccacacgaggatcgagattatgtgtag

SEQ ID NO: 21473 - DNA, 120 bp, synthetic construct
  misc_feature 1..120: note = Artificially Synthesized Probe
  source 1..120: mol_type = other DNA
tcacgtgcgacttagttatttccttgatagagaagtgaatatttagtaaagagatgaaagggggatgtatagattactggagagaaaccagtgttctgtgccgagtcagttggcttactt

SEQ ID NO: 21474 - DNA, 120 bp, synthetic construct
  misc_feature 1..120: note = Artificially Synthesized Probe
  source 1..120: mol_type = other DNA
gaatgtgagtattaatgaatgagtgtggctatgtagctagctatggctaactgttaaggacttggactcagtttccagattaagctggtagttgttttgatacttcctatgggcctttca

SEQ ID NO: 21475 - DNA, 120 bp, synthetic construct
  misc_feature 1..120: note = Artificially Synthesized Probe
  source 1..120: mol_type = other DNA
tttattttttccacttctctcatctcacttccccttgtagtcaaaatggtttcttcacagctctcaaacctgcatattctactcctcgtcacttagcttgcactgttccccatccttttt

SEQ ID NO: 21476 - DNA, 120 bp, synthetic construct
  misc_feature 1..120: note = Artificially Synthesized Probe
  source 1..120: mol_type = other DNA
aaacaaaaaacagaaaaaaaaccatttggtaggaaaggagtttgaaacaattaaagtatatattttagtggcagatgctgccgtcattctctattcctgtagtaagcagtgtcttaggcc

SEQ ID NO: 21477 - DNA, 120 bp, synthetic construct
  misc_feature 1..120: note = Artificially Synthesized Probe
  source 1..120: mol_type = other DNA
gtgagcatagggtttcatggcagcagtttgaatcattgtacaggagccagttcaccctgcagttacaagattcaaggcagattggcatgacctggaaatttattagacttttttcttttt

SEQ ID NO: 21478 - DNA, 120 bp, synthetic construct
  misc_feature 1..120: note = Artificially Synthesized Probe
  source 1..120: mol_type = other DNA
ttaaacctggtgtagagctgtagactccctattcaatgacacatttataagcagtttgtacagatggatttactcagagggaaaggctttactctcagttctccacaaacgctgttagtt

SEQ ID NO: 21479 - DNA, 120 bp, synthetic construct
  misc_feature 1..120: note = Artificially Synthesized Probe
  source 1..120: mol_type = other DNA
attggttggggaaatgcctgaaatttttggaacttccctagaacccttttgaattatgaggagcagtatttaaacccctgacctagaccattcaatctttgctgaggaaaagtgtcactt

SEQ ID NO: 21480 - DNA, 120 bp, synthetic construct
  misc_feature 1..120: note = Artificially Synthesized Probe
  source 1..120: mol_type = other DNA
gagagatgacatgggcttgggtattaaactggatatgggatggaataagattttgagagttgaaagtgactaaaagattgtatcattcacctttacgcttgccgatgaggaaatcaagcc

SEQ ID NO: 21481 - DNA, 120 bp, synthetic construct
  misc_feature 1..120: note = Artificially Synthesized Probe
  source 1..120: mol_type = other DNA
gatatatatgtgtattaatgtgggtcagtctccgtgatataacactgagcaacaaaagcaagatacagaacgctatgtattatgtgcataaaatagctctgaaaagatgggcagggcgcg

SEQ ID NO: 21482 - DNA, 120 bp, synthetic construct
  misc_feature 1..120: note = Artificially Synthesized Probe
  source 1..120: mol_type = other DNA
caacaagtacaataaggtaagaggacagagactcagaataaaggtagctagtaaatcagaatacaggtagctagtacatttcttggaggagaggggcttttgttttacagattccctggt

SEQ ID NO: 21483 - DNA, 120 bp, synthetic construct
  misc_feature 1..120: note = Artificially Synthesized Probe
  source 1..120: mol_type = other DNA
tacagctgttttcccgaattaacgaatgtcagggaggtactgaatatatatgatggttagaagatgatgttgggctcaaaatgcactacagatctttggtctgcagaagcccaataaaag

SEQ ID NO: 21484 - DNA, 120 bp, synthetic construct
  misc_feature 1..120: note = Artificially Synthesized Probe
  source 1..120: mol_type = other DNA
caaaatgaaatgcgtaagtagtgagaaatgttggcgctgagggtagagtctttgttgtcatgagagctggctttaaattttacttgttggagtgttccataggataaatgtcaagcaggc

SEQ ID NO: 21485 - DNA, 120 bp, synthetic construct
  misc_feature 1..120: note = Artificially Synthesized Probe
  source 1..120: mol_type = other DNA
actattttgagtcccagggcaggaaagattgtcaagaaatttaaatcatttgagccttgaactaggctaaccttttagcttagatggtgtctacctacagtcagttctttcaggactagc

SEQ ID NO: 21486 - DNA, 120 bp, synthetic construct
  misc_feature 1..120: note = Artificially Synthesized Probe
  source 1..120: mol_type = other DNA
tggggacccgagagcccaccatgtatttcacatttttcattctcttctacctgctctgacattgttattcccacgtgtgttatcaactggccagttttaatgtgatctttaaattagaaa

SEQ ID NO: 21487 - DNA, 120 bp, synthetic construct
  misc_feature 1..120: note = Artificially Synthesized Probe
  source 1..120: mol_type = other DNA
cctttctaagaaatgttttaagtggttgaaatgacaagttcaagttgctggtctacattgaatacttgtgaacagatggaggctaggatgccttaaatagtaactcacttgtggcccggt

SEQ ID NO: 21488 - DNA, 120 bp, synthetic construct
  misc_feature 1..120: note = Artificially Synthesized Probe
  source 1..120: mol_type = other DNA
gggaaggaaaaccagtattaaaaaaggggaacgctttagtgcatgggtttcagggtgtttttactttgggggtttgtgtaacctagacatttaaaacgtttccctcttggcgttatgttt

SEQ ID NO: 21489 - DNA, 120 bp, synthetic construct
  misc_feature 1..120: note = Artificially Synthesized Probe
  source 1..120: mol_type = other DNA
tcccatagtcacacattgatttgttagaggccaaggtggcattcttcagcttattcccccactatctcagttataggaccctaatcataaatatgattgtcagaagcatttgaaccaaag

SEQ ID NO: 21490 - DNA, 120 bp, synthetic construct
  misc_feature 1..120: note = Artificially Synthesized Probe
  source 1..120: mol_type = other DNA
cacttgatctagctgtaatattgagttatgtgggcagtcttttgtgttagtcatatagagtgtagtaatgtacaatctaggacattgtctcctggtgctcatgtctgggtgtttcttggg

SEQ ID NO: 21491 - DNA, 120 bp, synthetic construct
  misc_feature 1..120: note = Artificially Synthesized Probe
  source 1..120: mol_type = other DNA
ggaagttgtagtgagcagagatcatgccactgcactccaacctgggtgacagagtgagacccctgtatcaaaaataaataagtaaggctgggcacggttggtccacgcgtgtaatcccag

SEQ ID NO: 21492 - DNA, 120 bp, synthetic construct
  misc_feature 1..120: note = Artificially Synthesized Probe
  source 1..120: mol_type = other DNA
gctacatgtgctaatagccttcatattgaccagcacagatctagatattcaggcttagctttgtgtcagttcattgtctttaggaagttatagaatttagtaacagctatacatttattg

SEQ ID NO: 21493 - DNA, 120 bp, synthetic construct
  misc_feature 1..120: note = Artificially Synthesized Probe
  source 1..120: mol_type = other DNA
aattttcattcagtggaaaacacagctgtgagtcactcacacattcaatggaatgacagtaaaaatgcccatttgtgtaaggggcagaagagactggaagttagggaggcaaaaaacagg

SEQ ID NO: 21494 - DNA, 120 bp, synthetic construct
  misc_feature 1..120: note = Artificially Synthesized Probe
  source 1..120: mol_type = other DNA
gtggagcaatcttggatcactgcaacctccgccttccaggttcaagtgattctcctacctcagcctcctgagtagctgggattacaaccatgcaacaccatgcccagctaatttttgtat

SEQ ID NO: 21495 - DNA, 120 bp, synthetic construct
  misc_feature 1..120: note = Artificially Synthesized Probe
  source 1..120: mol_type = other DNA
ataaaaaaattagccgggcgtgggggcaggtgcctgtagtcccagctactcgggaggctgagacaggagaatggcatgaacccaggaggcggagcttgcagtgagctgagatcaggccgc

SEQ ID NO: 21496 - DNA, 120 bp, synthetic construct
  misc_feature 1..120: note = Artificially Synthesized Probe
  source 1..120: mol_type = other DNA
gataatttttcaaagctggatgttggatcagttattttataagcttatttctccctttggcttcttccttagtagtaattgagtggctcctgcttttgttcctctggcatcaggccacct

SEQ ID NO: 21497 - DNA, 120 bp, synthetic construct
  misc_feature 1..120: note = Artificially Synthesized Probe
  source 1..120: mol_type = other DNA
tctgtcccccaggctggagtgcagtagcacgatctcggctcactgcaacctccgcctcccaggttcaagcaattctcctgcctaagccttctgagtagctgggactacaggtgcatgcca

SEQ ID NO: 21498 - DNA, 120 bp, synthetic construct
  misc_feature 1..120: note = Artificially Synthesized Probe
  source 1..120: mol_type = other DNA
ccacagtaagtagatttccactgactccttgagatttcctagatggtaattttcactctgcaaggaaccaataaccttcagaggaattatttgaaaggactatagcgcagaaggcactga

SEQ ID NO: 21499 - DNA, 120 bp, synthetic construct
  misc_feature 1..120: note = Artificially Synthesized Probe
  source 1..120: mol_type = other DNA
aaaaaggtcttgatagtcttgcagagaattcccagcacttcccttctgctaataaaggtgtcctcaagtgcccaactcctgggtaattacaaatgcaaaagtgttaaaaatagcactcat

SEQ ID NO: 21500 - DNA, 120 bp, synthetic construct
  misc_feature 1..120: note = Artificially Synthesized Probe
  source 1..120: mol_type = other DNA
gaaaacacagggattttttgctactactgctgaagaaaagttagaggacaccttgacctcatgattttgctgagcacttgctttcttaacagtgtgctttctggacccttagtttatttt

SEQ ID NO: 21501 - DNA, 120 bp, synthetic construct
  misc_feature 1..120: note = Artificially Synthesized Probe
  source 1..120: mol_type = other DNA
aaaaagatgcttttcacactcatatcctcccatttccactgaccctatgctctgttcacattggaattctagcatcttcctaagtaaccatctatgatgttaattttgtgtcaacttgac

SEQ ID NO: 21502 - DNA, 120 bp, synthetic construct
  misc_feature 1..120: note = Artificially Synthesized Probe
  source 1..120: mol_type = other DNA
gctcactgcaacctctgcctcccggattcaagcgattctcctgcctcagcctcctgagtagctgggattgcaggcgcctgccaccacacctggctaattttttgtatttttagtagagac

SEQ ID NO: 21503 - DNA, 120 bp, synthetic construct
  misc_feature 1..120: note = Artificially Synthesized Probe
  source 1..120: mol_type = other DNA
aagacaccatcattctgcaaatatccttgaggcctgccaattgtggcttcagggtttaagaagacatggttccctcttgaattacaggcaagtaaacgagattacaaaacattgacaaag

SEQ ID NO: 21504 - DNA, 120 bp, synthetic construct
  misc_feature 1..120: note = Artificially Synthesized Probe
  source 1..120: mol_type = other DNA
tttctggagctttcagtgtggaaaaacggatgcttcttgcaggaaaagttgggcagccgccgaagtgtggcttgcagcccctagggaagactcggctgagattgagtaaaaagcagctgc

SEQ ID NO: 21505 - DNA, 120 bp, synthetic construct
  misc_feature 1..120: note = Artificially Synthesized Probe
  source 1..120: mol_type = other DNA
aaaagtcagctgctttcttcagaaatttttgagcggtcagctttctttcactggtgattatggctagctgtgttgaaaagaatataaaagaagatgctgtccctacttggtctctagttg

SEQ ID NO: 21506 - DNA, 120 bp, synthetic construct
  misc_feature 1..120: note = Artificially Synthesized Probe
  source 1..120: mol_type = other DNA
tgtataggtatagtttgaacctagtattcagaccagtaaaatgaaaaccttgcagtaaatgcttcccagtctttattgggctaaaataggccacgtgtgcttttagaaagatggccgcat

SEQ ID NO: 21507 - DNA, 120 bp, synthetic construct
  misc_feature 1..120: note = Artificially Synthesized Probe
  source 1..120: mol_type = other DNA
attaaaaagctattctagccagtagggtagagtagaagcaaggactttgtggtcagatgtgggtttgtttctggctagtggtttgtaacccctaggcaagttacttaatcttgctaagta

SEQ ID NO: 21508 - DNA, 120 bp, synthetic construct
  misc_feature 1..120: note = Artificially Synthesized Probe
  source 1..120: mol_type = other DNA
gcacctggccttgttttgttttaaatgggaaaataattgggacagatttgtatagcaagagaaaagcccaaccaacagaaagagtgagaggttgaagagatagaagaggtgggaaactga

SEQ ID NO: 21509 - DNA, 120 bp, synthetic construct
  misc_feature 1..120: note = Artificially Synthesized Probe
  source 1..120: mol_type = other DNA
gagaatcttctgcagtgagtttatcagtggaaaagtgaaataatttggagagtgttaccctcatactgttcagctttgttgtaaagcacttaagccatgtaactgtctgctgtctctggg

SEQ ID NO: 21510 - DNA, 120 bp, synthetic construct
  misc_feature 1..120: note = Artificially Synthesized Probe
  source 1..120: mol_type = other DNA
aaatgcacatgccttattcaaggctctttgggtttcaaaacacagaaacccatttaaactagttcagataaaaggatggagatgttataaagaaccagacaggtctcgggacttcaggaa

SEQ ID NO: 21511 - DNA, 120 bp, synthetic construct
  misc_feature 1..120: note = Artificially Synthesized Probe
  source 1..120: mol_type = other DNA
ttaatttggagagaactgatgtctttgtaatatctctttcccagtcattccagccaaaaatactgggccttactcatccatgttccaatcatgtggctgaggggtaccagatgttctatt

SEQ ID NO: 21512 - DNA, 120 bp, synthetic construct
  misc_feature 1..120: note = Artificially Synthesized Probe
  source 1..120: mol_type = other DNA
gtatagtcagctaagatggtgcctgcagctctaggaacatattgccttaacttaataactaacccctgtaagaaaaactggagggttcttttaccactcacattatcagtttggagatag

SEQ ID NO: 21513 - DNA, 120 bp, synthetic construct
  misc_feature 1..120: note = Artificially Synthesized Probe
  source 1..120: mol_type = other DNA
ccgcacctggccacaacttattcttttaacagccctgtgagtcaggtggcatcatccccatataaaatataaataaattgagtcctggaagattaaacagtcagtgcaaggttatagaat

SEQ ID NO: 21514 - DNA, 120 bp, synthetic construct
  misc_feature 1..120: note = Artificially Synthesized Probe
  source 1..120: mol_type = other DNA
ttagaggggaaaggcatgtctagagagcaaagactggaacaagcagtgatgttcaaacttcagcaaacagatttgatgaaatagcccattttcaaggctctgtacccctttttaaaaata

SEQ ID NO: 21515 - DNA, 120 bp, synthetic construct
  misc_feature 1..120: note = Artificially Synthesized Probe
  source 1..120: mol_type = other DNA
tgtgtggttggtaggaagatgtagtccattcttattcctctaccacttacatgtttcctcccattattctctttatttctcatatcctctcctacttcttctgtgcttgggtctgaaaag

SEQ ID NO: 21516 - DNA, 120 bp, synthetic construct
  misc_feature 1..120: note = Artificially Synthesized Probe
  source 1..120: mol_type = other DNA
tattttatgttgtagatttgcagataaatcggcttttgctcttccacctttcattttaactagcagctaatcgccttcaaatctacacaggcagcattaattaaagcgatgttggcctgg

SEQ ID NO: 21517 - DNA, 120 bp, synthetic construct
  misc_feature 1..120: note = Artificially Synthesized Probe
  source 1..120: mol_type = other DNA
tttcaggcccatgggttgaaatacaagaaaaacaacacattcgtgatacatcaaatttaggatataactgctagagcaggaggaagataaatggcgtcaaggagaggttcatgggggttt

SEQ ID NO: 21518 - DNA, 120 bp, synthetic construct
  misc_feature 1..120: note = Artificially Synthesized Probe
  source 1..120: mol_type = other DNA
ttttttgagtgcctctaaaattgttaattgtcctcttcttctgtgcttcatacctggatggaaaattgcttcaggatatcagtctgcatgtctggagaaacgaatgctgcttagtttagg

SEQ ID NO: 21519 - DNA, 120 bp, synthetic construct
  misc_feature 1..120: note = Artificially Synthesized Probe
  source 1..120: mol_type = other DNA
gagtaactcctcacatgtccctagttagtaggcattactttgaacaaacatacattcttagtttataatggaaaatagtatggtagttactattcatactaaatgtaggctgtgaacttt

SEQ ID NO: 21520 - DNA, 120 bp, synthetic construct
  misc_feature 1..120: note = Artificially Synthesized Probe
  source 1..120: mol_type = other DNA
tgggattacagactgagccactgtgtgtggttctggaatttttacagatagtattaacctttggatttttgcctttcttttccatttaaaacagtttccataaaccctccctttcccttt

SEQ ID NO: 21521 - DNA, 120 bp, synthetic construct
  misc_feature 1..120: note = Artificially Synthesized Probe
  source 1..120: mol_type = other DNA
aagaacattgagttttaaatggaagcaagatattttcagttgatctgccagtgtatggaaatctgcagcatttgccccttcagtaccatctatcccaattgcatagtctgtggcctacat

SEQ ID NO: 21522 - DNA, 120 bp, synthetic construct
  misc_feature 1..120: note = Artificially Synthesized Probe
  source 1..120: mol_type = other DNA
ctctcttgtccattgatccctggatttgtgttctggcatcctgtttagtgggcatgacataatggctttttcttctattttctttcccattttctctttccttcattaggcatttccaac

SEQ ID NO: 21523 - DNA, 120 bp, synthetic construct
  misc_feature 1..120: note = Artificially Synthesized Probe
  source 1..120: mol_type = other DNA
tgagtcactgttccctgcctccttctaccttttagctttttgtttagcgatcattattactcttctctccagtagatatactatttgatcaagatgtgggtaattagtctctaatttccc

SEQ ID NO: 21524 - DNA, 120 bp, synthetic construct
  misc_feature 1..120: note = Artificially Synthesized Probe
  source 1..120: mol_type = other DNA
taaaaacgtgcagctggatgaattttcacaggctgacaatacttttgttagcagtgcccagatcaggaaacattatcaaaacctaaaatcctactcatgcacattttcaggcacttcacc

SEQ ID NO: 21525 - DNA, 120 bp, synthetic construct
  misc_feature 1..120: note = Artificially Synthesized Probe
  source 1..120: mol_type = other DNA
gagtacgagaaccagaaatatacatatttccttctgtacctagcatagtaccttactcaaatatttgtttgttgtatgaacaaagaggtgattgagaaactagatgaatttttgagtgtg

SEQ ID NO: 21526 - DNA, 120 bp, synthetic construct
  misc_feature 1..120: note = Artificially Synthesized Probe
  source 1..120: mol_type = other DNA
gaatgaacatcccctacgtattagtcagtgttgcagaggtgcttgtttgaaatctggccattggtggaaatactttaaacagtttttgtagctatcacagtagctcatattttagtagct

SEQ ID NO: 21527 - DNA, 120 bp, synthetic construct
  misc_feature 1..120: note = Artificially Synthesized Probe
  source 1..120: mol_type = other DNA
gcccaggctggagtgcagtagtgtgatcagcttggaactcctgggctctagggatcctcccacctcagcctcccaggtagctgaaactacaggcatgtgccaccctgcctggctaatttt

SEQ ID NO: 21528 - DNA, 120 bp, synthetic construct
  misc_feature 1..120: note = Artificially Synthesized Probe
  source 1..120: mol_type = other DNA
aaaatgcctttactagagtatgtgttattacctgagggtgggactcccttagcaaacaccttatactaatgtcctggtcacagggttgtgatgtgtttgatacatgagtgagatatacgt

SEQ ID NO: 21529 - DNA, 120 bp, synthetic construct
  misc_feature 1..120: note = Artificially Synthesized Probe
  source 1..120: mol_type = other DNA
cttcatgatccacccacctcggcctcccaaagtgctgggattacaggcgtgagccaccgcgcccagcctttatttttctttttgagacggagtttcactcttgttgccctggctggagtg

SEQ ID NO: 21530 - DNA, 120 bp, synthetic construct
  misc_feature 1..120: note = Artificially Synthesized Probe
  source 1..120: mol_type = other DNA
ggggtgatttcatgtgtgtcctctgttatatattggcttcttgaataaaacacatggaatgtgttttattctcagtattttgcctgtgataggtttcttcagaaaatgcttactcagtgg

SEQ ID NO: 21531 - DNA, 120 bp, synthetic construct
  misc_feature 1..120: note = Artificially Synthesized Probe
  source 1..120: mol_type = other DNA
cgcccaggctggattgcagtggcacgatcttggctcactgcaacctccacctcccgggttcaagtgattctcctgcctcagcctcctgagtagctgggattacaggcgcctgccaccacg

SEQ ID NO: 21532 - DNA, 120 bp, synthetic construct
  misc_feature 1..120: note = Artificially Synthesized Probe
  source 1..120: mol_type = other DNA
tttctggcctttatgatgttagtgtgacaggttcatatatttaagaaggtgctgagaggaacatgtttctttagagtcctggcttgctttatgcgctttatctcattaaccctcacagca

SEQ ID NO: 21533 - DNA, 120 bp, synthetic construct
  misc_feature 1..120: note = Artificially Synthesized Probe
  source 1..120: mol_type = other DNA
aaaagtaataaccttcttttgaaaaatagtattcttctctggtgccatttatctacttttagtttggctggggttgctgtgccacttttctaaccatgctcttcccctgtcattgctgca

SEQ ID NO: 21534 - DNA, 120 bp, synthetic construct
  misc_feature 1..120: note = Artificially Synthesized Probe
  source 1..120: mol_type = other DNA
tcaggagcagatgacaagggtttttagccatggctttgccgtaggctggctgtgacttagaagaagttttctgatttctttaggcctcagatttcttaggtttcagtttaaatatcttta

SEQ ID NO: 21535 - DNA, 120 bp, synthetic construct
  misc_feature 1..120: note = Artificially Synthesized Probe
  source 1..120: mol_type = other DNA
tgttattcataataaggttgtttatctcatgattgcaactccagacatcttatccaaagctgccttgaggcataaattcaaagcaggaagaaggggaaagggaaagatactggttgggtc

SEQ ID NO: 21536 - DNA, 120 bp, synthetic construct
  misc_feature 1..120: note = Artificially Synthesized Probe
  source 1..120: mol_type = other DNA
gggaatagggagatgttaatttaatggctggatcactggagatgtcaactcaaagaacattctaatatatctctggaatatgaggcagtccctccaaaggcagaacaaatagtattgcag

SEQ ID NO: 21537 - DNA, 120 bp, synthetic construct
  misc_feature 1..120: note = Artificially Synthesized Probe
  source 1..120: mol_type = other DNA
tgcctggcccagttctatgtgttttgatgggtatatacggtctataactgtcaccacaattaagatacataatatttctatcacccccaaaagttcccctgttcctcacttgtagttagt

SEQ ID NO: 21538 - DNA, 120 bp, synthetic construct
  misc_feature 1..120: note = Artificially Synthesized Probe
  source 1..120: mol_type = other DNA
aatacctgtctctattagaagactcatggaactcaggtatgagctgatagatacaaagcaaagcaaaacaaaacctactgaagcctctggttgcaaaatagcacaaagcttgagtctttg

SEQ ID NO: 21539 - DNA, 120 bp, synthetic construct
  misc_feature 1..120: note = Artificially Synthesized Probe
  source 1..120: mol_type = other DNA
tacaacataaaaaatatcaactgtaaattttttaatatttgtcttttaaatgataagtatagcttttacaaagcacaatcaagtaatatttaaaaggctaccagcctggtgcggtgactc

SEQ ID NO: 21540 - DNA, 120 bp, synthetic construct
  misc_feature 1..120: note = Artificially Synthesized Probe
  source 1..120: mol_type = other DNA
tttccagtaatgtcctttttctgttccaggatcccacattacacttcgttgtcatgtttcctttgtttcctccaatctgtgacagttttgttttttttttgagacggagtctcgctctgt

SEQ ID NO: 21541 - DNA, 120 bp, synthetic construct
  misc_feature 1..120: note = Artificially Synthesized Probe
  source 1..120: mol_type = other DNA
atcttgcctgcaacaatgattactatagtgttttaatgatgattttctatttatctcatgcctactacacttactaatgagaattcttctgtaagaaagagctggcccttctcctccatt

SEQ ID NO: 21542 - DNA, 120 bp, synthetic construct
  misc_feature 1..120: note = Artificially Synthesized Probe
  source 1..120: mol_type = other DNA
ggggacacatgtcttccttttattcctcaagtaaataacttgaggacaagatttgtgtgtcaaacattttaaagatccacgtgctttgcacataggagagagttgttgaaaaggggggaa

SEQ ID NO: 21543 - DNA, 120 bp, synthetic construct
  misc_feature 1..120: note = Artificially Synthesized Probe
  source 1..120: mol_type = other DNA
taagaatattttaatccattattggctccttatgatagataagacttcatttatctttcttgcttttctctgagacaaggtctcccactgtcacactggagtgcggtggtgggattgtgg

SEQ ID NO: 21544 - DNA, 120 bp, synthetic construct
  misc_feature 1..120: note = Artificially Synthesized Probe
  source 1..120: mol_type = other DNA
ttgacttttatagtgtcttgagttttaatcccttcagtgtcccattggtcaagtggacaagacagacaaaacaaaaactgtgacatatggcggatgccatgtcagtgatatgtagagtgt

SEQ ID NO: 21545 - DNA, 120 bp, synthetic construct
  misc_feature 1..120: note = Artificially Synthesized Probe
  source 1..120: mol_type = other DNA
atacatacacactaagtaagtatacacatactaagtgcctacaaccctcaagcacaggcctgtgtacctttcacacattatgtcatttaatcccccacaacagcacttaaggatggtata

SEQ ID NO: 21546 - DNA, 120 bp, synthetic construct
  misc_feature 1..120: note = Artificially Synthesized Probe
  source 1..120: mol_type = other DNA
tggtacagtaatagctcacttcaggcctggtgcggtggctcacacctatgatcccagcactttgggaggccgaggtgggcggatcacgaggtcaagagattgagaccatcctggccaacc

SEQ ID NO: 21547 - DNA, 120 bp, synthetic construct
  misc_feature 1..120: note = Artificially Synthesized Probe
  source 1..120: mol_type = other DNA
cctgtaattgcactcacaaatgtgaccactattagcaaattggcatattttcttgagcactttattaacatactgatctatatatactttttttaatatataaaacttagagcttgcttt

SEQ ID NO: 21548 - DNA, 120 bp, synthetic construct
  misc_feature 1..120: note = Artificially Synthesized Probe
  source 1..120: mol_type = other DNA
aagttggataaagagagggttttgttagtatgggagaaacggcacccttttatactaatgagaactagtaacaacaaaaaaaaccacgctgtagaagacagagggaaactgctggatggg

SEQ ID NO: 21549 - DNA, 120 bp, synthetic construct
  misc_feature 1..120: note = Artificially Synthesized Probe
  source 1..120: mol_type = other DNA
gaccccaggtcctgatgcgtccggcccagggccagccaatggcggtagaggtcttgggcacctgacaagaggggcggtccccccgccggaaggggcggggcgaggcgagcggccgcgtca

SEQ ID NO: 21550 - DNA, 120 bp, synthetic construct
  misc_feature 1..120: note = Artificially Synthesized Probe
  source 1..120: mol_type = other DNA
tggatcagaaactttcgaagttggtagaagagctcacaacttcaggagaaccccgactaaatcctgagaaaatgaaggaactgaagaaaatttgcaagtatgtcttagggttcagtaaca

SEQ ID NO: 21551 - DNA, 120 bp, synthetic construct
  misc_feature 1..120: note = Artificially Synthesized Probe
  source 1..120: mol_type = other DNA
caatgacactttgtgaatgaacaccgacatttgaagtgtatatgattttcacatttcaccaagtattttttgtttgtattgacattcttggcttgtgggccacacagaaacaggcagggg

SEQ ID NO: 21552 - DNA, 120 bp, synthetic construct
  misc_feature 1..120: note = Artificially Synthesized Probe
  source 1..120: mol_type = other DNA
tctgagaggaagagcataagctttatgtgtgggtggagctgaggctgcatgtgtcattttttatgtgcgtgtaggagacaaaggaaaagccaaatccaacttttcagatgcaacgttttc

SEQ ID NO: 21553 - DNA, 120 bp, synthetic construct
  misc_feature 1..120: note = Artificially Synthesized Probe
  source 1..120: mol_type = other DNA
aaaaaaaaaaaaactactgtgaacttacagacgcatagggctcttggccacgcatgggtgctgtcttttgttaggcctacttgagctttatcttcctcacattctgtatagatagctcta

SEQ ID NO: 21554 - DNA, 120 bp, synthetic construct
  misc_feature 1..120: note = Artificially Synthesized Probe
  source 1..120: mol_type = other DNA
ggattttcaagacacgaatgctcggagtctggcagaaaggaagagagaagaggagaagcagaagcacttggataaaatttatcaagaaagagccagccaggcggagagggagatgcaagg

SEQ ID NO: 21555 - DNA, 120 bp, synthetic construct
  misc_feature 1..120: note = Artificially Synthesized Probe
  source 1..120: mol_type = other DNA
ttttgctccacatagcgcagcaaacaggtgtcttgatcttccggcagaaatgtctggagaaattgaatcctgcttgacggaggtagagagctgctttaggctgctggtgccttttgactt

SEQ ID NO: 21556 - DNA, 120 bp, synthetic construct
  misc_feature 1..120: note = Artificially Synthesized Probe
  source 1..120: mol_type = other DNA
cgtatgtgtgtggcttcaaatcgctctctttgaggaaccttcttctttggaagcaggcacagcaggtgtcccttcaccagggccaggaggcagccgggctgggaagctgctgggagaact

SEQ ID NO: 21557 - DNA, 120 bp, synthetic construct
  misc_feature 1..120: note = Artificially Synthesized Probe
  source 1..120: mol_type = other DNA
acccacggtggatgtttaaagcgtgccattgacctgaaggctgaattggagctcgtactgagaaaatacaaggagctggacatcgagcctgagggaggggaaaggcgcagggtgagtggg

SEQ ID NO: 21558 - DNA, 120 bp, synthetic construct
  misc_feature 1..120: note = Artificially Synthesized Probe
  source 1..120: mol_type = other DNA
caaatccagccctggcctaggagatggtggccttttggctctccccactttaaggaaagctttggggtggaagtgacactgtgctccttgctgaggaagaggttgggttccacagcagca

SEQ ID NO: 21559 - DNA, 120 bp, synthetic construct
  misc_feature 1..120: note = Artificially Synthesized Probe
  source 1..120: mol_type = other DNA
gtcagctggcttattggtgagggtccacagagcagagcggggctgatgggtggcatggtctggtctcatcaggcctgggcccctccagctggttattggtgagggtccatagagcagagc

SEQ ID NO: 21560 - DNA, 120 bp, synthetic construct
  misc_feature 1..120: note = Artificially Synthesized Probe
  source 1..120: mol_type = other DNA
cccaccaggtcccggggaccccgccgacactgttagctgtctctgagcttctgagtgactctcacatgagcatctcacgccccacgtggtggagccgccagcactgtccctccgtggcgc

SEQ ID NO: 21561 - DNA, 120 bp, synthetic construct
  misc_feature 1..120: note = Artificially Synthesized Probe
  source 1..120: mol_type = other DNA
tcctttttaacatttcccacttggtttctacgtaatactgttttccttttgacgcagatgttctgtcttcagaaaatacttaggcgggtttgaatatgtgtgctgtgcatttggagtgcc

SEQ ID NO: 21562 - DNA, 120 bp, synthetic construct
  misc_feature 1..120: note = Artificially Synthesized Probe
  source 1..120: mol_type = other DNA
ttttcctgctgtgcgtgagggaaagttttctgtgatgctctggagccatgggagtgtctgacttccaggaggtgaaagggacagaaactgaaaacccaggaatgaaacgtggacccacca

SEQ ID NO: 21563 - DNA, 120 bp, synthetic construct
  misc_feature 1..120: note = Artificially Synthesized Probe
  source 1..120: mol_type = other DNA
tttcattttcccgagcccagagttagctttctccgcagagctcgggggcaggagctactaggtttggaggccccagatgttctaagaagtcattccgctctccactgaagggggcgttta

SEQ ID NO: 21564 - DNA, 120 bp, synthetic construct
  misc_feature 1..120: note = Artificially Synthesized Probe
  source 1..120: mol_type = other DNA
cacacataaaactgaacaaaagtgatttcttgggtgaaaagtaattgagaccgcgtaccaagttaattagatcgtacaaaatttatttaatggccccagctgtatctcccagcctgtgtg

SEQ ID NO: 21565 - DNA, 120 bp, synthetic construct
  misc_feature 1..120: note = Artificially Synthesized Probe
  source 1..120: mol_type = other DNA
tctgtgggtttcagacatgagagtttatcccgtgtgacttgaaccctgaaaacagcagctttcagccttgcatttagtatccgcagtgaagcccctcaatgctgagttgctgtggtttga

SEQ ID NO: 21566 - DNA, 120 bp, synthetic construct
  misc_feature 1..120: note = Artificially Synthesized Probe
  source 1..120: mol_type = other DNA
tttccaaagagtataattgggacgtttcacaggtcagcggtggagacaggcttcccttttgatcagtgttagactgataacaaaaattacagtttccagtgattaatgtctcctgtgctt

SEQ ID NO: 21567 - DNA, 120 bp, synthetic construct
  misc_feature 1..120: note = Artificially Synthesized Probe
  source 1..120: mol_type = other DNA
tgctgggaatgctttttagagatgcaggtgtgtgtcagagtgattctgtttttcggtttttctcttataaacccattaagggtccccttgcttggtattcctccaacagggatctctctc

SEQ ID NO: 21568 - DNA, 120 bp, synthetic construct
  misc_feature 1..120: note = Artificially Synthesized Probe
  source 1..120: mol_type = other DNA
aagtggccttgtcaaaaggaaatggaggtggttttcatacaagtcctcaaggacagaatgttccagaagtacttgtccctttctgtcacctgacatgctgtggtcacaccagcaccacgg

SEQ ID NO: 21569 - DNA, 120 bp, synthetic construct
  misc_feature 1..120: note = Artificially Synthesized Probe
  source 1..120: mol_type = other DNA
agcccatcttgtggtaactgctgctttggtttaaaatgctgcttttcctgctcacggtcgtagccacgaggccgagaagtcgtgtgtgtgcttttcctctacgttctggctccgtctcgg

SEQ ID NO: 21570 - DNA, 120 bp, synthetic construct
  misc_feature 1..120: note = Artificially Synthesized Probe
  source 1..120: mol_type = other DNA
tgtgccctcatcgggcttcccctgtccccaccccacacacactgttcttccaacaccagcatccacctgaaatggtgtttctgctgattccccacctcgggcaggcgtccccacgcctga

SEQ ID NO: 21571 - DNA, 120 bp, synthetic construct
  misc_feature 1..120: note = Artificially Synthesized Probe
  source 1..120: mol_type = other DNA
gggtgccttagaagctgggagctccatcacagccttgcctggggcaggcagaggccctggtggttttattgccactgattgacttcttgaggtgagagggctaaccacgttctgccgttc

SEQ ID NO: 21572 - DNA, 120 bp, synthetic construct
  misc_feature 1..120: note = Artificially Synthesized Probe
  source 1..120: mol_type = other DNA
tgtctgctttggtgcttcaggcaaataggtgccacttggccaatgtaaacagaaaaggggatttggacatttttatgattctttctcaaaacaactgtgggagtgaatttgagccaagat

SEQ ID NO: 21573 - DNA, 120 bp, synthetic construct
  misc_feature 1..120: note = Artificially Synthesized Probe
  source 1..120: mol_type = other DNA
ctctccaaacagagcattcccggctctgcacattggtaagtggaggcactgtgggtgtcctcagaaagcctgtggtgagcacatgtgtgttcagtgacagcatgcctgtaagtacttgtg

SEQ ID NO: 21574 - DNA, 120 bp, synthetic construct
  misc_feature 1..120: note = Artificially Synthesized Probe
  source 1..120: mol_type = other DNA
gtcagggatacctctgcacccgtagccctcagcatggcttcttatgttttgagactgcatttgtaagttacatatctcttcttgtttattacaccttcaagcattcctttttttaccctc

SEQ ID NO: 21575 - DNA, 120 bp, synthetic construct
  misc_feature 1..120: note = Artificially Synthesized Probe
  source 1..120: mol_type = other DNA
attcttcagatggtcactcttcattgtagaaaggatttacacacatatgtgtttctcaatttctgtactatttcctgcataaaacaaataacctagcaccctctccccacgtgtggcctc

SEQ ID NO: 21576 - DNA, 120 bp, synthetic construct
  misc_feature 1..120: note = Artificially Synthesized Probe
  source 1..120: mol_type = other DNA
ccatggtttttcctctgtctcctctgactctcagtgagccttccaattccaggaaaatgtggctcattgtttcttcaactgttttctgcactccaattatgtctctcctcctgggatttt

SEQ ID NO: 21577 - DNA, 120 bp, synthetic construct
  misc_feature 1..120: note = Artificially Synthesized Probe
  source 1..120: mol_type = other DNA
gcgtttctgtggggacacaggggctggaatccccgctaacatcgcggtttgacgtcagcgtgagatgtgggttgaacccctgtgtggagctgtgcgtctcttctccttgaggaccatgtg

SEQ ID NO: 21578 - DNA, 120 bp, synthetic construct
  misc_feature 1..120: note = Artificially Synthesized Probe
  source 1..120: mol_type = other DNA
gcctcgagaggctgcttagtgccttttctggatatcttggtggaagccttgggtgtgtacccccggccgggtgagcagtgttggtgccatgtttgggcttgtcagtgccagcatcagctg

SEQ ID NO: 21579 - DNA, 120 bp, synthetic construct
  misc_feature 1..120: note = Artificially Synthesized Probe
  source 1..120: mol_type = other DNA
ccagaaaggcttttttgagcctttctgctgctgtgtcgggggccatccatggagcttgggtgttatgaatcttgtgggaacagctggacgagaaaccactcccctaaaggcggccctggg

SEQ ID NO: 21580 - DNA, 120 bp, synthetic construct
  misc_feature 1..120: note = Artificially Synthesized Probe
  source 1..120: mol_type = other DNA
gggctgagagagaggcctgagcagctgctggtgaggacccggttagtcctggatggcaccggggccctgctgggcaggcctggcttcacgttccacctgcctggcccgtcagcaccacgc

SEQ ID NO: 21581 - DNA, 120 bp, synthetic construct
  misc_feature 1..120: note = Artificially Synthesized Probe
  source 1..120: mol_type = other DNA
tcctgagtgttctcactgcgatccacggggcgtctctggtccgagttccgggtggcagaatgcatcgctgcttctcccacggggccttgggtgcagcaggaagcatttggccgggcggtc

SEQ ID NO: 21582 - DNA, 120 bp, synthetic construct
  misc_feature 1..120: note = Artificially Synthesized Probe
  source 1..120: mol_type = other DNA
cttacgtccctgcagtggaaggacgaccttcatgtggatgccccgttggccttcaaggtcacgcctcaaggacgcagcagctgtcgcccttgtcctatagggagagcccatcttgcaggt

SEQ ID NO: 21583 - DNA, 120 bp, synthetic construct
  misc_feature 1..120: note = Artificially Synthesized Probe
  source 1..120: mol_type = other DNA
actttccacagctgcccaagaccttccggctccagaggagggacggagccatccccacgtccctgtggctctcaggacgccctcctctgaggggcgcgtgattccaggttgtgtacactt

SEQ ID NO: 21584 - DNA, 120 bp, synthetic construct
  misc_feature 1..120: note = Artificially Synthesized Probe
  source 1..120: mol_type = other DNA
tcccctcgggcccatctgcccaccctgcatatctgttttccaaggaagatttgtttttagaggccctggccagcctcaggcgctctctcttctttttactttgatttggctttttttttt

SEQ ID NO: 21585 - DNA, 120 bp, synthetic construct
  misc_feature 1..120: note = Artificially Synthesized Probe
  source 1..120: mol_type = other DNA
tgtttaaacaattgctccattcaccgggttcctaaactgtggcgccttcttattactgggagataaactgtttggacagttttccttaatcttggattaatcgttcctgtatctgaattg

SEQ ID NO: 21586 - DNA, 120 bp, synthetic construct
  misc_feature 1..120: note = Artificially Synthesized Probe
  source 1..120: mol_type = other DNA
gtaagaggctctggtcagtgccagacgtctcctgaagtgcttgagttttgtttgcagaatggcaggaccctgagttgatgagagacgtggaagcagccacagggcaggatctcggctcat

SEQ ID NO: 21587 - DNA, 120 bp, synthetic construct
  misc_feature 1..120: note = Artificially Synthesized Probe
  source 1..120: mol_type = other DNA
gtgtttctgtcttcatattgccttgttctcgcctaagaaaatccagaatgcttgtttagaagccacctgaggctgttgactccctcccaaatctgtgtcaagtccctgctggtgcaggtt

SEQ ID NO: 21588 - DNA, 120 bp, synthetic construct
  misc_feature 1..120: note = Artificially Synthesized Probe
  source 1..120: mol_type = other DNA
gtcacatcttgccttgtttccccacagggcagctgtgcggagggtagtggcagccatgaaccggatggaccagaagaagcacgagaagttttcaaaccagtttaactacgcactgaacta

SEQ ID NO: 21589 - DNA, 120 bp, synthetic construct
  misc_feature 1..120: note = Artificially Synthesized Probe
  source 1..120: mol_type = other DNA
catctgctttctgtttctggatgtgccttttcatacatgtgtcctcttgtccctggcttcttacacttggcgttgtttttaaggtttatccatgcagttcccctccaatgtataaaacaa

SEQ ID NO: 21590 - DNA, 120 bp, synthetic construct
  misc_feature 1..120: note = Artificially Synthesized Probe
  source 1..120: mol_type = other DNA
ttccccattgaattatcttcgcaccattattgataatcagttgaccaaaaatgtacaggcttatttctgggcacttgactctattccattgacctgtttaaccttatgccagtgccacag

SEQ ID NO: 21591 - DNA, 120 bp, synthetic construct
  misc_feature 1..120: note = Artificially Synthesized Probe
  source 1..120: mol_type = other DNA
gtcttactcttgatcttagcgggaagctttcggtctctcaccattgaatgtgatgctaacaatgcagttttgtgtagatgcttctatcaggttgaaaaagttaccttctcctcctagttt

SEQ ID NO: 21592 - DNA, 120 bp, synthetic construct
  misc_feature 1..120: note = Artificially Synthesized Probe
  source 1..120: mol_type = other DNA
aagactacaggggcatggcagtatgactggctaattttttaaaagcttatttttggtagagatggggtctcactatgttggctaggctggtctcaaactcctggcctcaagaaattttcc

SEQ ID NO: 21593 - DNA, 120 bp, synthetic construct
  misc_feature 1..120: note = Artificially Synthesized Probe
  source 1..120: mol_type = other DNA
aaacatagattgtatgatttctcgtcttttatatgtattgagagttattttattggcataccgtattttctgtcccagagtgttgaagaatatctatcctgctcttgttgggtggagtgt

SEQ ID NO: 21594 - DNA, 120 bp, synthetic construct
  misc_feature 1..120: note = Artificially Synthesized Probe
  source 1..120: mol_type = other DNA
atagaagcctgttgggtctgattggtttgtagtgttgtatagaagcctgttaggtctgattggtttgtagtctgattgtttatgtcttctcttcccttattgatcttctgcccagttata

SEQ ID NO: 21595 - DNA, 120 bp, synthetic construct
  misc_feature 1..120: note = Artificially Synthesized Probe
  source 1..120: mol_type = other DNA
ttatctgagaatgttgtaatttttccttctcttctgaagaataattgtgctggatatggctgacttggttggccctctttttctttcagtcctctatagatgtcattccactgcctctgg

SEQ ID NO: 21596 - DNA, 120 bp, synthetic construct
  misc_feature 1..120: note = Artificially Synthesized Probe
  source 1..120: mol_type = other DNA
atagataggtgacttgtctactaagttcaacatcagggcttattcaggggaagttcctattgatgaccttttttcccatgtcagagccaaggaaataacatactctttctttgtggtctc

SEQ ID NO: 21597 - DNA, 120 bp, synthetic construct
  misc_feature 1..120: note = Artificially Synthesized Probe
  source 1..120: mol_type = other DNA
aaatcattgatctacttctagtttttgatacaaaatgtgagccaggaaacccagtttttaaatttcaaatagctgtccaggtgtccctgcacctcttatgcatgagccctcgctttgtgc

SEQ ID NO: 21598 - DNA, 120 bp, synthetic construct
  misc_feature 1..120: note = Artificially Synthesized Probe
  source 1..120: mol_type = other DNA
gagtcagacgctgttaccgtacattctactcatggtggctttttaatacgtttttatgtcaaggatcccttttatatttctctgcacctcgagataacgtaggaatattagggatgagat

SEQ ID NO: 21599 - DNA, 120 bp, synthetic construct
  misc_feature 1..120: note = Artificially Synthesized Probe
  source 1..120: mol_type = other DNA
gtccctttctccccgggctggcctttggagtgcgccccttcggtgcgcgtgccggggcggcgggcaggccggcagggagtggccgagcgttggaggcaccgggcggctgcagcagccgtg

SEQ ID NO: 21600 - DNA, 120 bp, synthetic construct
  misc_feature 1..120: note = Artificially Synthesized Probe
  source 1..120: mol_type = other DNA
tgtgatatagttggggctttgatttgtgggaggaaactgtttctttttccagttcaaagaaataacacgcttcacctatccatgagcattaaacattcccaaacgttgatgtctctcagt

SEQ ID NO: 21601 - DNA, 120 bp, synthetic construct
  misc_feature 1..120: note = Artificially Synthesized Probe
  source 1..120: mol_type = other DNA
ctgttagactattaccatcatctctgtaaaatcagctagctggttagggtctcgctgtatagggcatgtgatttgggcatcatgctattctattttccttaagatggaaaagattaggtg

SEQ ID NO: 21602 - DNA, 120 bp, synthetic construct
  misc_feature 1..120: note = Artificially Synthesized Probe
  source 1..120: mol_type = other DNA
aaaatgatacagaagttatatgccatacaaccccttcagttcttcctaactgaaggaattttactctagtgaatactagtagtagttgacagctgtgagtgcctaccacgtgctaggcac

SEQ ID NO: 21603 - DNA, 120 bp, synthetic construct
  misc_feature 1..120: note = Artificially Synthesized Probe
  source 1..120: mol_type = other DNA
attctgtttgaggctgattatcttcattttgcttttgataaagggtggtgaaggaggttctttctgacatttttgcctaggaagtccagaatttaggacactgccacttagaagcactct

SEQ ID NO: 21604 - DNA, 120 bp, synthetic construct
  misc_feature 1..120: note = Artificially Synthesized Probe
  source 1..120: mol_type = other DNA
tgctgctgtgacagcctatcagtgtattaccctgggaacctgattccttttcattgctttattgtcttttctgataagggattccttctgaccttatcatgagtttggttaatttcttgt

SEQ ID NO: 21605 - DNA, 120 bp, synthetic construct
  misc_feature 1..120: note = Artificially Synthesized Probe
  source 1..120: mol_type = other DNA
cttgtaggtgccacttaatatggaggtggatggactaataaatgaaataaaaagcactgggggaggaggacaaggatgttacttggctcatagcaatccttggccaactttgagttgttt

SEQ ID NO: 21606 - DNA, 120 bp, synthetic construct
  misc_feature 1..120: note = Artificially Synthesized Probe
  source 1..120: mol_type = other DNA
cagaaaaaaagatgactcagcccttgaagtcttctaggaaagtagggtaagtccaggagcaaaacttagcatttaaaaaaggcctgctgtgttttcacatttaatctttacagctacctc

SEQ ID NO: 21607 - DNA, 120 bp, synthetic construct
  misc_feature 1..120: note = Artificially Synthesized Probe
  source 1..120: mol_type = other DNA
tagctctggggtgaggggtgcagaaagagacagaacttgtggatctcggttttctagaagtaaaaattttagcatgtgggagctcaggaatgtacttggaaatgtttccaatttattttt

SEQ ID NO: 21608 - DNA, 120 bp, synthetic construct
  misc_feature 1..120: note = Artificially Synthesized Probe
  source 1..120: mol_type = other DNA
attaatgtctttttttttccccctctttcccagaatttgttcctgttgaagagtggctcctcttctaatttccagactccttgaggttttaggagtctggtaggtgaaattttctacctc

SEQ ID NO: 21609 - DNA, 120 bp, synthetic construct
  misc_feature 1..120: note = Artificially Synthesized Probe
  source 1..120: mol_type = other DNA
tcaaacttccccttctctgcaaaattagcaggtgtgcactggtattcttagggcctgctgtgttactgacctgtagaatgtttgttaagtagaagagcaaatgaatgaataaagaaatca

SEQ ID NO: 21610 - DNA, 120 bp, synthetic construct
  misc_feature 1..120: note = Artificially Synthesized Probe
  source 1..120: mol_type = other DNA
gcccagctcctgagacagtcacaaaccctctggccataagaattgaatcacacatttcagctggtgggtaaacttaccagatttagttatgaaataccagaaacagctgttttaaaatac

SEQ ID NO: 21611 - DNA, 120 bp, synthetic construct
  misc_feature 1..120: note = Artificially Synthesized Probe
  source 1..120: mol_type = other DNA
taatgaaatgcaccaaacttgatatgcctgatgacaccatgatcatcttagaagactggccaggttccaagcagatgacaagtgactgttttctaacaaagaggtcagtggcctggtttt

SEQ ID NO: 21612 - DNA, 120 bp, synthetic construct
  misc_feature 1..120: note = Artificially Synthesized Probe
  source 1..120: mol_type = other DNA
ttacaaagttagtaggtgccctcagcagattttgggccaaccttgtttctttagaagagaaatgctactttaggaaagggaaacgaagggtgactcatgtgattgatgtgctaaaatgca

SEQ ID NO: 21613 - DNA, 120 bp, synthetic construct
  misc_feature 1..120: note = Artificially Synthesized Probe
  source 1..120: mol_type = other DNA
acttcatccacttcatactattttaataaagcggtgctgtgtattataacattgtgcagctgagcattacactcatggctcccattatcaagcccctgctatatacagggcatttcacaa

SEQ ID NO: 21614 - DNA, 120 bp, synthetic construct
  misc_feature 1..120: note = Artificially Synthesized Probe
  source 1..120: mol_type = other DNA
gcacacagctttgtgctatctaaggtcacggtccaattgtgattcctagcaatagcttcaaggcatatttcatagctctaatagttttcaagtataagggtgtgagaatgagctttaaga

SEQ ID NO: 21615 - DNA, 120 bp, synthetic construct
  misc_feature 1..120: note = Artificially Synthesized Probe
  source 1..120: mol_type = other DNA
agcctcctggctctatgaaggaatcagccaatgcttatcccagggaggtaatgataaggtcgaagtttgacaagaaatctacgttttcttaagctaagtagtaggttaacagaagatatg

SEQ ID NO: 21616 - DNA, 120 bp, synthetic construct
  misc_feature 1..120: note = Artificially Synthesized Probe
  source 1..120: mol_type = other DNA
gctttgagaaaatatcactgatgatagaggaagagtgacagtctttgttttgggtcttgggatggcagaaagaaaatatttagtagggagtaaagatcagtgtaccccttgaagtgtggt

SEQ ID NO: 21617 - DNA, 120 bp, synthetic construct
  misc_feature 1..120: note = Artificially Synthesized Probe
  source 1..120: mol_type = other DNA
ctccgcagctccagacacctactgttgctcaggaatgcagggattcattgtttgagaaaagctgcaaatcaggattttatgtggaatcctaactttacagtatttttgaaatactgatac

SEQ ID NO: 21618 - DNA, 120 bp, synthetic construct
  misc_feature 1..120: note = Artificially Synthesized Probe
  source 1..120: mol_type = other DNA
gggtgtttggaggctgtattttttagtagctctgttaccttgagcagtcacagcctttgtaggcctcaatttctttattgaaaatctaggggttttgatgaaagcatcttaggtgctttt

SEQ ID NO: 21619 - DNA, 120 bp, synthetic construct
  misc_feature 1..120: note = Artificially Synthesized Probe
  source 1..120: mol_type = other DNA
gaccttcaccaccaccgcttcttaccatagcccatacatttcataaatcatggtttttttggtcattactagattcggagttatttgatgatgagcgatgtctgtcttgctgatttagct

SEQ ID NO: 21620 - DNA, 120 bp, synthetic construct
  misc_feature 1..120: note = Artificially Synthesized Probe
  source 1..120: mol_type = other DNA
gtaatactcccacctccaaaagttggacttcgtaagcctttataacccagcgtgaattggaaagaagatgcaggaggtttatctctatagatgagctctcacaagattagtctaatacct

SEQ ID NO: 21621 - DNA, 120 bp, synthetic construct
  misc_feature 1..120: note = Artificially Synthesized Probe
  source 1..120: mol_type = other DNA
gtttgtgtttcgtgcccttttgttggtcctcatctttctctttgtggtttcctattggcttttttacggggtccgcattttggactctcgggaccggaattaccagggcattgtgcaata

SEQ ID NO: 21622 - DNA, 120 bp, synthetic construct
  misc_feature 1..120: note = Artificially Synthesized Probe
  source 1..120: mol_type = other DNA
acctaggtattattaatccctgtgtcacagatgaagaaactagggcttaggggatttaagtaatttgcacaaaaacatatggctagcctcatttaggattcactcagatgtcatgaggcc

SEQ ID NO: 21623 - DNA, 120 bp, synthetic construct
  misc_feature 1..120: note = Artificially Synthesized Probe
  source 1..120: mol_type = other DNA
agttaaagtggtagagaaaaatccggctgtggtctcagtggagatgagtgatatttggaactctgtatatgtaagtagccaagacactggccaggagtgaggtctatggtggttttgttt

SEQ ID NO: 21624 - DNA, 120 bp, synthetic construct
  misc_feature 1..120: note = Artificially Synthesized Probe
  source 1..120: mol_type = other DNA
aaagccttcaccgtggcagcaccctattgggcttaggtgccaagcgatggtgagttcttttttatgttttcaaagatgattttatcgaattgactgagctatttttgagagttgtctaaa

SEQ ID NO: 21625 - DNA, 120 bp, synthetic construct
  misc_feature 1..120: note = Artificially Synthesized Probe
  source 1..120: mol_type = other DNA
caataaacaattacatagtcttactgggagccaggtaccttctgatcttttaatgtgcaactcagttttcacaacaatcatgtgaggtaggttctggtagcctccttttcagatgagcaa

SEQ ID NO: 21626 - DNA, 120 bp, synthetic construct
  misc_feature 1..120: note = Artificially Synthesized Probe
  source 1..120: mol_type = other DNA
caagacagaggctactaggatgttaagttcaatgtcacagacccccacaaccacctcgggctgtctttctcagagtctgtttattctcattttgcatatagttctaacaaatttaattat

SEQ ID NO: 21627 - DNA, 120 bp, synthetic construct
  misc_feature 1..120: note = Artificially Synthesized Probe
  source 1..120: mol_type = other DNA
ctgttgtttaagctacctaggctgtagcattttgatacagcagcctgagctgagacaggaatattacatacactggagacttgtgaccccaaagacttttgacctgttgaatagagctca

SEQ ID NO: 21628 - DNA, 120 bp, synthetic construct
  misc_feature 1..120: note = Artificially Synthesized Probe
  source 1..120: mol_type = other DNA
tttgtactcctgtaattactttttaataaagatattttgccagtccttagctccactccatagcaaagcaaaggacaagaacaagtaagggctgaaacatagagcgtggagggttttgct

SEQ ID NO: 21629 - DNA, 120 bp, synthetic construct
  misc_feature 1..120: note = Artificially Synthesized Probe
  source 1..120: mol_type = other DNA
tatgttgacaaccttgtattgcttagttgctgagaccagaagatccaggtaattgcatgagctattagctacttctggttctcacaaactcctcccagtgttgatagagaatggtgtcct

SEQ ID NO: 21630 - DNA, 120 bp, synthetic construct
  misc_feature 1..120: note = Artificially Synthesized Probe
  source 1..120: mol_type = other DNA
agttccaaggtgatcattgcctgttatctatgggacttgtgtaagctaacttcccaaatgcagctgtgagacaaacattttaattaaaaggcagaagggccaggagatataaacactcat

SEQ ID NO: 21631 - DNA, 120 bp, synthetic construct
  misc_feature 1..120: note = Artificially Synthesized Probe
  source 1..120: mol_type = other DNA
tacatgttctgtcacggtctctggatcacttgactgtacttattgtttgagtggtactcaccactaattggagcataagccccttgaaggtttcatttacatccgggtctcagtactagg

SEQ ID NO: 21632 - DNA, 120 bp, synthetic construct
  misc_feature 1..120: note = Artificially Synthesized Probe
  source 1..120: mol_type = other DNA
gcacacatttttttaggctttggttcctttagctataaaataagggagttaaaatgggggtggtttatggtcacgattgtttccttcaagtatctaaaaggctttcaccagcaaggggga

SEQ ID NO: 21633 - DNA, 120 bp, synthetic construct
  misc_feature 1..120: note = Artificially Synthesized Probe
  source 1..120: mol_type = other DNA
aaatagaaatggggtcatgcttttgtggctaggagctgtgtgtatattctagccaccaaccaaccccatcaccgctgcaaaatgttcatgcttattattagtaatgcgataattttttgt

SEQ ID NO: 21634 - DNA, 120 bp, synthetic construct
  misc_feature 1..120: note = Artificially Synthesized Probe
  source 1..120: mol_type = other DNA
cacagcctctgtgcagactcagacatgcacagagcatggggaggcagtggatggtctagatatgcagggcattaatttggtttgtatttttttcttcagaatttatctttaaaaaatatg

SEQ ID NO: 21635 - DNA, 120 bp, synthetic construct
  misc_feature 1..120: note = Artificially Synthesized Probe
  source 1..120: mol_type = other DNA
tggtctagagattggggtttgtagaaggatttgcttttgttcatctctggggccctttttgcctctgaaattccatgattttatgaaatacatattcaagactgatcttaggcctgtggg

SEQ ID NO: 21636 - DNA, 120 bp, synthetic construct
  misc_feature 1..120: note = Artificially Synthesized Probe
  source 1..120: mol_type = other DNA
tatttaagttgtgcacttgagttttgtgtttatttagttacttggaaattctcattccctaatactgccaggtatgctgggcatcaaacagaccatcctctgtaggtgagagcatgcaca

SEQ ID NO: 21637 - DNA, 120 bp, synthetic construct
  misc_feature 1..120: note = Artificially Synthesized Probe
  source 1..120: mol_type = other DNA
tgatgattgctttttaatttttaaatttagatcagggtaatgcttttctgttggaatccaggggcctagagatgtttctttatcagtggaggaggggggatgaagtgagtttgaacccca

SEQ ID NO: 21638 - DNA, 120 bp, synthetic construct
  misc_feature 1..120: note = Artificially Synthesized Probe
  source 1..120: mol_type = other DNA
aaataatccttgtaagccgatctgcttagcagagtactagaaaggaaaatccaaagggcaagataaaaatatatctgtggtatttaacatggtggtggttggagatgtcagcacgtacgc

SEQ ID NO: 21639 - DNA, 120 bp, synthetic construct
  misc_feature 1..120: note = Artificially Synthesized Probe
  source 1..120: mol_type = other DNA
gacctgagaaacctgaatctatactttgttctttcactcattagctctgcaaccattagtaagtctcttgcccttttgggggcatcctcagtttcttcttttgtaaaccgaggaaaaata

SEQ ID NO: 21640 - DNA, 120 bp, synthetic construct
  misc_feature 1..120: note = Artificially Synthesized Probe
  source 1..120: mol_type = other DNA
cctgccttctgccaggatcatcttatattggaagctgttaggaaagggttgcttttcaaaattggtgcacattacccacaaactcagaaagctacctaaatcattaagactagaaatctc

SEQ ID NO: 21641 - DNA, 120 bp, synthetic construct
  misc_feature 1..120: note = Artificially Synthesized Probe
  source 1..120: mol_type = other DNA
tgtctcattgtcttgctgaaatttgatgtcccagccgcccttatggccaaactgaaactttatgtaacagatggtaacatcttcagcacactctatgtgttgtttttggccaacatttta

SEQ ID NO: 21642 - DNA, 120 bp, synthetic construct
  misc_feature 1..120: note = Artificially Synthesized Probe
  source 1..120: mol_type = other DNA
ccttttatagccagtcggaggggcctcagaactcttttcatctaaccattgcagagatgaaaaaaggactagtgcatttcccaagctcattggtggcagaattcagaacagagttcatct

SEQ ID NO: 21643 - DNA, 120 bp, synthetic construct
  misc_feature 1..120: note = Artificially Synthesized Probe
  source 1..120: mol_type = other DNA
tacacatatagtgcaacatataaacagaggtccttataaaaaacagctaccaaatgttacacgtgtaccacatgccaagctcatctactctctaccatgcgatttacatgccttgttgcc

SEQ ID NO: 21644 - DNA, 120 bp, synthetic construct
  misc_feature 1..120: note = Artificially Synthesized Probe
  source 1..120: mol_type = other DNA
ctctctgacagggttgttgtgtaagaattacattgaatatggcaacaaggcatgtaaatcgcatggtagagagtagatgagcttggcatgtggtacatgtgtaacatttggtagctgttt

SEQ ID NO: 21645 - DNA, 120 bp, synthetic construct
  misc_feature 1..120: note = Artificially Synthesized Probe
  source 1..120: mol_type = other DNA
tttcagcccctgccccaaaacagtttttaccgataaggagttggtatatattctttcaaatatatgtagatgttttttaagctgaaatgggaaaacaaaacagaaattgggtcattgctc

SEQ ID NO: 21646 - DNA, 120 bp, synthetic construct
  misc_feature 1..120: note = Artificially Synthesized Probe
  source 1..120: mol_type = other DNA
atcctaccaaattgccctcctagggggtgtacttttgcatgctttgcctctaacatctgagattttttatttcccacatactcgggagcattggatgttattttttaaaatcattgccta

SEQ ID NO: 21647 - DNA, 120 bp, synthetic construct
  misc_feature 1..120: note = Artificially Synthesized Probe
  source 1..120: mol_type = other DNA
tctatctcaacaaaacaaaatctgttcttgactctgtctgggacctgattgatatatcccagtatgtttctatctgtattactggctcatttcattcttccttcccctcatggctaaatc

SEQ ID NO: 21648 - DNA, 120 bp, synthetic construct
  misc_feature 1..120: note = Artificially Synthesized Probe
  source 1..120: mol_type = other DNA
tgacttaggtagtgtcattgcgtccactaatagagagtgtaaatgacttgtgcagaatcactgccagtaaatggtagcgcatgcgttcttattcatgcaagtatatgcagcttgtatttc

SEQ ID NO: 21649 - DNA, 120 bp, synthetic construct
  misc_feature 1..120: note = Artificially Synthesized Probe
  source 1..120: mol_type = other DNA
atgttaatgtccagtatcacatcacccatgaaagtcgtgggcagttcaggagatacctgccttcatctttgttctttgttgccttaggttcttcagagaaagatcacaacaaaaaatgta

SEQ ID NO: 21650 - DNA, 120 bp, synthetic construct
  misc_feature 1..120: note = Artificially Synthesized Probe
  source 1..120: mol_type = other DNA
ctgtatctgcaacaaaccttttaaaagtgttcactcttgctttttccagtatttcggtaatcagccatcttgctgtagtacaggatgacattgtcgaatgctctttgtatgtgtgcacac

SEQ ID NO: 21651 - DNA, 120 bp, synthetic construct
  misc_feature 1..120: note = Artificially Synthesized Probe
  source 1..120: mol_type = other DNA
atatagttaataatgacactgttcatcaccattctaaaatactgttcttccaaccctatcttcaatgaccagtccagaaggggttaagctggattcatttgctctggcatgtgcattccc

SEQ ID NO: 21652 - DNA, 120 bp, synthetic construct
  misc_feature 1..120: note = Artificially Synthesized Probe
  source 1..120: mol_type = other DNA
tgaaaccaacaaaagtgagtccttggtttaccttccaatctgggtcctgctgtgtaagtatccctaagtggggatgcatatttgtttgtgcgtttttatttccatatatgtgagcatttc

SEQ ID NO: 21653 - DNA, 120 bp, synthetic construct
  misc_feature 1..120: note = Artificially Synthesized Probe
  source 1..120: mol_type = other DNA
ttcagttttggatcacattttgacaaaacatgttttggtcaaagaaaggaaaggctactaacacatttatcaggtaatgtatgtcacagtccgtgttccacccagccttgttatccccac

SEQ ID NO: 21654 - DNA, 120 bp, synthetic construct
  misc_feature 1..120: note = Artificially Synthesized Probe
  source 1..120: mol_type = other DNA
agtcccgttttcccaggtcctgttccgtttctacgtagataacccaatttgttttgtctatgaaataagcctctttagtgggttgttttagtctctccaacaaaagagcagattcctaaa

SEQ ID NO: 21655 - DNA, 120 bp, synthetic construct
  misc_feature 1..120: note = Artificially Synthesized Probe
  source 1..120: mol_type = other DNA
gggccaggcaggtcttatttgagaggagattatttgataattgctttggttagaaggactttacatttcctgatttcaagtccagcaccaatttagaaagttcagagatgaaaccacctg

SEQ ID NO: 21656 - DNA, 120 bp, synthetic construct
  misc_feature 1..120: note = Artificially Synthesized Probe
  source 1..120: mol_type = other DNA
tcttggaccttccggaaactgagccacatcaggctcacgttgatagcataggtggtgatacaaacaatgcagaaatcatagagcacgaagaacaggatccaggccaggtagacagaacca

SEQ ID NO: 21657 - DNA, 120 bp, synthetic construct
  misc_feature 1..120: note = Artificially Synthesized Probe
  source 1..120: mol_type = other DNA
ctcaggaggctgaggcaggaaaattgcttgaacccgggaggcagaggttgcagtgagccaagatcgtgccactgcactccagcctggtgacagagcgagactatgtcgcaaaaaaaaaaa

SEQ ID NO: 21658 - DNA, 120 bp, synthetic construct
  misc_feature 1..120: note = Artificially Synthesized Probe
  source 1..120: mol_type = other DNA
gactagatacaaattttcctgctgagcactaaatgagacaaaagatagctcatgctcagcttctccttaaaaaggaatttcggcatcttttccacaaaactggggtgttggtggggcatg

SEQ ID NO: 21659 - DNA, 120 bp, synthetic construct
  misc_feature 1..120: note = Artificially Synthesized Probe
  source 1..120: mol_type = other DNA
ggcccttaagtaattcttaaaatggcaaggctggtataacggttcactcggttttgcatcagagactgggagtcgggggcagattatctttgccctggaccccagaatctccagctccct

SEQ ID NO: 21660 - DNA, 120 bp, synthetic construct
  misc_feature 1..120: note = Artificially Synthesized Probe
  source 1..120: mol_type = other DNA
ccgccttcacgtgcagcgcgtagagcgagagcactaagcccgtcaggcaaagagcgagccgcacccagccagggctcccccaggtgctgcccattatctccaggttccgcccgaggcgcc

SEQ ID NO: 21661 - DNA, 120 bp, synthetic construct
  misc_feature 1..120: note = Artificially Synthesized Probe
  source 1..120: mol_type = other DNA
aagaaaaaaaaaagtgtgttagtgtggttaacagcatttgcgcttaccctatgccaagtcctgttgtaagaattgcagcatccgggacctagagaccagcggatcaggggatccagcgaa

SEQ ID NO: 21662 - DNA, 120 bp, synthetic construct
  misc_feature 1..120: note = Artificially Synthesized Probe
  source 1..120: mol_type = other DNA
ctgttcacggccatgaagacttcaggagacaaggagcctgttaccatctctgtttaattgaagagcctctaccattgcaagaagagctgtttaaaacaaaacaaaatggatactatttga

SEQ ID NO: 21663 - DNA, 120 bp, synthetic construct
  misc_feature 1..120: note = Artificially Synthesized Probe
  source 1..120: mol_type = other DNA
cttgtcacgtattgaatcctggctcacccccttactagtcacatatcaaatcctggctcgcccctcactagccacatatcaaatcctgactggctaacccctcactaaccacatatcaaa

SEQ ID NO: 21664 - DNA, 120 bp, synthetic construct
  misc_feature 1..120: note = Artificially Synthesized Probe
  source 1..120: mol_type = other DNA
taaactgatgtttctttgtatagcatttgatattcggtgtgggtatgaggttgtggggggctctgtgtgtaaactgatgtttctttatacagcatttgatattgggtgtaggtatgaggc

SEQ ID NO: 21665 - DNA, 120 bp, synthetic construct
  misc_feature 1..120: note = Artificially Synthesized Probe
  source 1..120: mol_type = other DNA
aaaagtctaaacatctttgaaacacaattggaaagtaatccaaacagcctgtgagctcaggcttcccagttagaactgcctgtcccaagttaatcttgcttagttttttggggggcatca

SEQ ID NO: 21666 - DNA, 120 bp, synthetic construct
  misc_feature 1..120: note = Artificially Synthesized Probe
  source 1..120: mol_type = other DNA
ggtcacggacttgctacttctttcctagagtctgttctgttttctgtcagcagtaaggaaatacattctagcaaatgacatccagtaatgctttaattaactgcagtattttgtgctcca

SEQ ID NO: 21667 - DNA, 120 bp, synthetic construct
  misc_feature 1..120: note = Artificially Synthesized Probe
  source 1..120: mol_type = other DNA
atctcatttccagcaggttattccgagtgctcttcctagcgaaggaatcccatttccagcaggttattccgagtgctcttcctagcgaaggaatctcatttccagcaggttattccgagt

SEQ ID NO: 21668 - DNA, 120 bp, synthetic construct
  misc_feature 1..120: note = Artificially Synthesized Probe
  source 1..120: mol_type = other DNA
ggcctggacaccgctaagccagctttcagacaagtcccctcagtaagagcagagtgaactctttattgattatacaaattaccactatttattttaaacccaaagtgacttcaaagttgt

SEQ ID NO: 21669 - DNA, 120 bp, synthetic construct
  misc_feature 1..120: note = Artificially Synthesized Probe
  source 1..120: mol_type = other DNA
agcccttccataaagcaaatctctctgttgcagtggttcttaacaaggtgtaaacgttataactacctatggaacttttaaacctgtatgccaggccccatccaaacttactgactcaaa

SEQ ID NO: 21670 - DNA, 120 bp, synthetic construct
  misc_feature 1..120: note = Artificially Synthesized Probe
  source 1..120: mol_type = other DNA
gaagagaaacacagcgtctctacacagtactgagtccccatcaaggagacatttaacagaaactcctactgacatccattggttccttggggattactgacaatgtaacaaatcaagaca

SEQ ID NO: 21671 - DNA, 120 bp, synthetic construct
  misc_feature 1..120: note = Artificially Synthesized Probe
  source 1..120: mol_type = other DNA
ggcaagatatcattcttcagcaaaagcaggcagcaacagcagcggtttgcctgtagctgtggtcatggttaactgaggcctggtttcaagggaaccgagtgaatcagggttaacggcttg

SEQ ID NO: 21672 - DNA, 120 bp, synthetic construct
  misc_feature 1..120: note = Artificially Synthesized Probe
  source 1..120: mol_type = other DNA
agagatcacctaaatcgccctcttagagcccagcccttactcagcgtctccgattagggcaggaagtaagacagggcatgggagagactcagtaacaacccacatgtcccaggaagtttg

SEQ ID NO: 21673 - DNA, 120 bp, synthetic construct
  misc_feature 1..120: note = Artificially Synthesized Probe
  source 1..120: mol_type = other DNA
atctcatcttcacatgccactacagcaatgtcctaaatttgctgaatcctaaatacacctgcgctgctgtttgaagtatgggtttccggggccctcctctaaagactctaattcagtagg

SEQ ID NO: 21674 - DNA, 120 bp, synthetic construct
  misc_feature 1..120: note = Artificially Synthesized Probe
  source 1..120: mol_type = other DNA
gcagggcttcagacgttcctcactcgaagtacagtcttgttaaatggggctttaaaatatccatttgctgattagattcagttactacaacatctgttcagagttcatttaaagtggcag

SEQ ID NO: 21675 - DNA, 120 bp, synthetic construct
  misc_feature 1..120: note = Artificially Synthesized Probe
  source 1..120: mol_type = other DNA
agaaatataaaagaaaaaaattatgtataattcccatcacctaggagaaacaacatcaaggagccagcctatgtgtacgtatataaaaaactaaatcagggggccaggagccgtggctca

SEQ ID NO: 21676 - DNA, 120 bp, synthetic construct
  misc_feature 1..120: note = Artificially Synthesized Probe
  source 1..120: mol_type = other DNA
tggatgttactgaggatgtaggagatttacccaaatgtaaacattgtatcctggcaacaatctaccttttcctctttgtttgttctggttctctgggatgccaattatctagaaggacac

SEQ ID NO: 21677 - DNA, 120 bp, synthetic construct
  misc_feature 1..120: note = Artificially Synthesized Probe
  source 1..120: mol_type = other DNA
ggcgttagcgcactttccagaattccagtggaaatgactgctgcttttcctcggaggaacccagaacaagcctctaaagcattctaggtggattaaattcttagatataaaaaagaaaaa

SEQ ID NO: 21678 - DNA, 120 bp, synthetic construct
  misc_feature 1..120: note = Artificially Synthesized Probe
  source 1..120: mol_type = other DNA
aagcacgttgggggaaatttagcaacatttccttagctggagatgtgtatcacccataacacagcattaatacttatatccattagaggaattcttgcccatgtaaaaacgttccctgca

SEQ ID NO: 21679 - DNA, 120 bp, synthetic construct
  misc_feature 1..120: note = Artificially Synthesized Probe
  source 1..120: mol_type = other DNA
taattaactggaatttttgtttaaagactaccattcaggactcaactctgtcttccatgtagcaaattttgagagccttgtcaaaatcaaagccatgtcttagcattcatttgttggtag

SEQ ID NO: 21680 - DNA, 120 bp, synthetic construct
  misc_feature 1..120: note = Artificially Synthesized Probe
  source 1..120: mol_type = other DNA
attttgcgtaaataagatacaggcccacactcctagaagacaaagaaccatgtgaacaaaaccacataggtgaaccatattggtcccaccatagaaaattcttcaatgaggtggcacagg

SEQ ID NO: 21681 - DNA, 120 bp, synthetic construct
  misc_feature 1..120: note = Artificially Synthesized Probe
  source 1..120: mol_type = other DNA
tgtacaattcagtggtttttaaggtctattcacaaggttgtacagctgtcagcattatctggtttcagaacacattatcaccccagaaagaaacccttacccattagcagccattcccat

SEQ ID NO: 21682 - DNA, 120 bp, synthetic construct
  misc_feature 1..120: note = Artificially Synthesized Probe
  source 1..120: mol_type = other DNA
attacccagcactatttactgaaaagactctctttgaatgatgccactttggtcataaatcaagtatctacacatgtgtgggtctatccctcagctcagatctgttctgttggcctcttt

SEQ ID NO: 21683 - DNA, 120 bp, synthetic construct
  misc_feature 1..120: note = Artificially Synthesized Probe
  source 1..120: mol_type = other DNA
tattgggcagcctcctcagccagagcaggctcagaaagactccatatgtatttctttttgagtctttcttatcaatgaacatgagctatcctgtcattttaaaggtctttatggattctg

SEQ ID NO: 21684 - DNA, 120 bp, synthetic construct
  misc_feature 1..120: note = Artificially Synthesized Probe
  source 1..120: mol_type = other DNA
cactttatatagtactcagagaacaaagagcagaaaaatgtctcccatcccattttcagcataagtattaaagcaaaacctaatttaggatctggcacccttgtggcaaggcagacacag

SEQ ID NO: 21685 - DNA, 120 bp, synthetic construct
  misc_feature 1..120: note = Artificially Synthesized Probe
  source 1..120: mol_type = other DNA
actgcaacctccacctccacctgcaagtgattctcctgtctcagcctcccaagtagctgggattacaggcatgcaccaccacgcctggctaattgttttttttttttttttttttttgag

SEQ ID NO: 21686 - DNA, 120 bp, synthetic construct
  misc_feature 1..120: note = Artificially Synthesized Probe
  source 1..120: mol_type = other DNA
ggcttgcacttgaagaggtgggtgatgaatttgggaatgaaggagctgtggataaaaaagaagtgacaaattaggcttattctctcttgaggaaagaaatgcaaaaactttaaggttcca

SEQ ID NO: 21687 - DNA, 120 bp, synthetic construct
  misc_feature 1..120: note = Artificially Synthesized Probe
  source 1..120: mol_type = other DNA
aacctagttcattatgctcatttgcttacatgtctattttgcttcacctgactattaaggcaaacgaagatgggggccatgtttatcaggccaaaacatttaactctgggtctgagacat

SEQ ID NO: 21688 - DNA, 120 bp, synthetic construct
  misc_feature 1..120: note = Artificially Synthesized Probe
  source 1..120: mol_type = other DNA
ttggaaggaattcctcagtgctggaaaccagagccagacaagcaacatgaaactgaactcatgaccaatggcagctgtgcacacagcgctttgtaacctaagttgcttcacattagaaca

SEQ ID NO: 21689 - DNA, 120 bp, synthetic construct
  misc_feature 1..120: note = Artificially Synthesized Probe
  source 1..120: mol_type = other DNA
acagtaaatttttacagagacactgcttctaccagcagttatggggagcgtcacgatgtgatttatcagcaacatttctaacacactaatgagcacccagagagtgagggaatttcacct

SEQ ID NO: 21690 - DNA, 120 bp, synthetic construct
  misc_feature 1..120: note = Artificially Synthesized Probe
  source 1..120: mol_type = other DNA
gttactgttgcctatgactttaagtagcagatttagttttatgattatgcttcttttgtgtacaaattaaaatcagtactgcaggcaccagaacaaaccgcagctggatggtggggacac

SEQ ID NO: 21691 - DNA, 120 bp, synthetic construct
  misc_feature 1..120: note = Artificially Synthesized Probe
  source 1..120: mol_type = other DNA
aataaaacacttgaagaggtatgcgtgtagaatcttacactcctaaaacctttgggattatgtcaggatttcaataaggggaagggaaagagaatctctggcaaacactagggtggacca

SEQ ID NO: 21692 - DNA, 120 bp, synthetic construct
  misc_feature 1..120: note = Artificially Synthesized Probe
  source 1..120: mol_type = other DNA
tgggagggcttgatgcccccaaagccaatcatgtccatagcaatgactgttactttccaagctggcagctttgtatatttcaaaatctcaaaacggtttatcaacaataatctaaacatg

SEQ ID NO: 21693 - DNA, 120 bp, synthetic construct
  misc_feature 1..120: note = Artificially Synthesized Probe
  source 1..120: mol_type = other DNA
cactaagttctcacaacaaccttatagatgaggaaattcaaaaagctcaaagagatttggtatcttgcacaaaatttcacagctgggacaaccacgtctatctaaagcccaaaccaggtc

SEQ ID NO: 21694 - DNA, 120 bp, synthetic construct
  misc_feature 1..120: note = Artificially Synthesized Probe
  source 1..120: mol_type = other DNA
agtctactgtagcaggaactttgaccagagaacagcgctccacaactagcttcagtggatcttgttttttcctattgctataggaagcttggaaagaggtttcttgaaaatgtgaatact

SEQ ID NO: 21695 - DNA, 120 bp, synthetic construct
  misc_feature 1..120: note = Artificially Synthesized Probe
  source 1..120: mol_type = other DNA
gcacctaccacgtaacaggtgctgtgcctgacattttcacatgaccttgctgcctgatgaatgaatcatgtagtgaaagaggtattattactcctctttgtgagtaataataaatgagga

SEQ ID NO: 21696 - DNA, 120 bp, synthetic construct
  misc_feature 1..120: note = Artificially Synthesized Probe
  source 1..120: mol_type = other DNA
atggctttctgtgggccttctgaaacagatgtgcattttaatgactgaggaaaatgaaaatgagaacagacttgtcttgattcaacgtagaagtgaacttgaggatttcttagctgtggc

SEQ ID NO: 21697 - DNA, 120 bp, synthetic construct
  misc_feature 1..120: note = Artificially Synthesized Probe
  source 1..120: mol_type = other DNA
ggaaggaaagaagataccagaaggaaagttcattagttttcagggaaaaatattcaacgcagattggaatatgtgggttggctgttcaacacatcttctccactgtagaaaagtcctggt

SEQ ID NO: 21698 - DNA, 120 bp, synthetic construct
  misc_feature 1..120: note = Artificially Synthesized Probe
  source 1..120: mol_type = other DNA
aaagaaaataacactatgggaaggaaacgtggtctagaagttaattttgctgtaactcatcagcaacactactggaatctcaaagtcagagtttcagagggaccacctgactttcatcac

SEQ ID NO: 21699 - DNA, 120 bp, synthetic construct
  misc_feature 1..120: note = Artificially Synthesized Probe
  source 1..120: mol_type = other DNA
gattacataacaaagcagaaaggtagtctaggtactatggtgtcttgaaagagaaataaatatgctctggctgaggcaagaaatgctgacattgtaagggacctagaagagccaaaacag

SEQ ID NO: 21700 - DNA, 120 bp, synthetic construct
  misc_feature 1..120: note = Artificially Synthesized Probe
  source 1..120: mol_type = other DNA
taaaatgggcaaaacatttaattctcatttcttcaaagagaatatacaaatcgccagtagcatctgagaaggtgatcaacatattagtcatgcaaggaatgcaaactgtaatcacaatga

SEQ ID NO: 21701 - DNA, 120 bp, synthetic construct
  misc_feature 1..120: note = Artificially Synthesized Probe
  source 1..120: mol_type = other DNA
tatacctcaggtttttaaatggggacagacatttgaacttgatcttaaaggacgtgctccttgggcagacgatagcaggaagaaaattctgggcagaaagaataaaatgagaaaaggcat

SEQ ID NO: 21702 - DNA, 120 bp, synthetic construct
  misc_feature 1..120: note = Artificially Synthesized Probe
  source 1..120: mol_type = other DNA
ctgggatgttgaatgagattggcagtttgaaccaagctctttagcttccctaacctctctttactcatgttttcaccctgtttgaactgccctactaatcacaaactcattcagaatttc

SEQ ID NO: 21703 - DNA, 120 bp, synthetic construct
  misc_feature 1..120: note = Artificially Synthesized Probe
  source 1..120: mol_type = other DNA
aatgctgagaatactggaagtacccatcagcaccggactgctgaaaagatcagctttttgaataaaactgtgacatcagctattttaggacttgccacttcagttcataaaaccctaaag

SEQ ID NO: 21704 - DNA, 120 bp, synthetic construct
  misc_feature 1..120: note = Artificially Synthesized Probe
  source 1..120: mol_type = other DNA
agagataaaagagggggtgaaagacatggtctgtgcacttacggaattgacattcatttgggaaaaaaaggcataggcacataaaagtcaaaaataggaagatgaggtagcgctcagtaa

SEQ ID NO: 21705 - DNA, 120 bp, synthetic construct
  misc_feature 1..120: note = Artificially Synthesized Probe
  source 1..120: mol_type = other DNA
acaacatctcctttagactcatcaaacacatttacttcgtctcttttttttttgccatcctccaatactgtgatgctctgtctcattctaaaaggacaagcaactgaactgacgcaggtg

SEQ ID NO: 21706 - DNA, 120 bp, synthetic construct
  misc_feature 1..120: note = Artificially Synthesized Probe
  source 1..120: mol_type = other DNA
aagaagactttactgttagaacttcctggacggacctcccctgccactcccacactcttattccctcggtggctaaatttaagccatttatactttatactttaaaacactgaaggtagg

SEQ ID NO: 21707 - DNA, 120 bp, synthetic construct
  misc_feature 1..120: note = Artificially Synthesized Probe
  source 1..120: mol_type = other DNA
cagtacttgtttcttaccacacatcaataattcacatcaactcattctgaaaagacgctgattttaagatactccctgccccatgaactacagacttgcccacccacaatggaaaccttt

SEQ ID NO: 21708 - DNA, 120 bp, synthetic construct
  misc_feature 1..120: note = Artificially Synthesized Probe
  source 1..120: mol_type = other DNA
aggataaaacaaattatggcacaggcttatcatgcttaaactcttcagcagcctcttcctatgacaccgaaaataaaatccaaattcctaaccatgaattgggtcctgcccagctttctg

SEQ ID NO: 21709 - DNA, 120 bp, synthetic construct
  misc_feature 1..120: note = Artificially Synthesized Probe
  source 1..120: mol_type = other DNA
agtaaaatgtccattaatactcgtgggtgcaatcaggaaaatccaaaacttgggaaaatctacagggcaaacaacacagtttctttaagaaaagattgcagagggggcaaagggaaatgg

SEQ ID NO: 21710 - DNA, 120 bp, synthetic construct
  misc_feature 1..120: note = Artificially Synthesized Probe
  source 1..120: mol_type = other DNA
aacagaggtgaacaaagtagactttctggcatgtaacttaaaactaatgggggcgccagataataaggaagtaagccagccgagacgtaacttcggttttgtggtgttaggaaataaatt

SEQ ID NO: 21711 - DNA, 120 bp, synthetic construct
  misc_feature 1..120: note = Artificially Synthesized Probe
  source 1..120: mol_type = other DNA
gggttggggggacacttcaacccactatatctccctgggtcctcttgagatgacactaatagtctttgatatttttcttgctttttgtgtaacatgatgttctgattcatcttgtagatt

SEQ ID NO: 21712 - DNA, 120 bp, synthetic construct
  misc_feature 1..120: note = Artificially Synthesized Probe
  source 1..120: mol_type = other DNA
tggtatagtcccttaaagagaaatattatgtggccataaacaatgatagtaataatgaccctgtaatgatagttatgattattactatcattataatgacaggagaaatgctaatgctat

SEQ ID NO: 21713 - DNA, 120 bp, synthetic construct
  misc_feature 1..120: note = Artificially Synthesized Probe
  source 1..120: mol_type = other DNA
attataaatacaaagtgggtagaagagcagaacctttccaaattactttctttctcttggcctcaggggaatcccagaccaagtgtgaaaaggacttctaattccatgtttaaggctgaa

SEQ ID NO: 21714 - DNA, 120 bp, synthetic construct
  misc_feature 1..120: note = Artificially Synthesized Probe
  source 1..120: mol_type = other DNA
ccttaccttgacaccgtcagaaataggaagagatgattcctattttagttaatctgaatcatcagcaggccattagtcacattaactaggatggtctaatatccaaagggaaggctgctg

SEQ ID NO: 21715 - DNA, 120 bp, synthetic construct
  misc_feature 1..120: note = Artificially Synthesized Probe
  source 1..120: mol_type = other DNA
aaaatgctcccacgatgaagttaaacggtagctgcagggaataaagctataagcagtatagccccaattccgtgacacaaacaaacaaaagcacacagatcacacacattaggtatctat

SEQ ID NO: 21716 - DNA, 120 bp, synthetic construct
  misc_feature 1..120: note = Artificially Synthesized Probe
  source 1..120: mol_type = other DNA
taggtggcccctgggctttgaaatcagccacaaaccgatctatcagctctccgaggttcctaggaggaaaaaaaaaaaccaaaaatgttattttacttcaagaaaagtaaagcaaatgtg

SEQ ID NO: 21717 - DNA, 120 bp, synthetic construct
  misc_feature 1..120: note = Artificially Synthesized Probe
  source 1..120: mol_type = other DNA
ttgtccagagtaatacagcaagaaaacaggagagccacgattaaaaactaagcagcctggctctaagcttcaagcctttaagcactctacttcctaaaaacaaaaaggttatgatgtcag

SEQ ID NO: 21718 - DNA, 120 bp, synthetic construct
  misc_feature 1..120: note = Artificially Synthesized Probe
  source 1..120: mol_type = other DNA
agctgtgctgtgtgaagaatgggaagggttcccaccactcctgacatgttgcatctttttaggttgccgtttaaggctataggaatccagctgtgttttaaaaatgtatttatataatgg

SEQ ID NO: 21719 - DNA, 120 bp, synthetic construct
  misc_feature 1..120: note = Artificially Synthesized Probe
  source 1..120: mol_type = other DNA
aagaaagaaaagaaaaagaaagtctattatatccagatacaaccactctgccctcaaagagcttctggcctaggctaagtctctgtctgtggtgatagtgagaaagcagggaaggatctc

SEQ ID NO: 21720 - DNA, 120 bp, synthetic construct
  misc_feature 1..120: note = Artificially Synthesized Probe
  source 1..120: mol_type = other DNA
ggagaacatggaacagaaggcaaaagattcccctggggtcttcttatgagattctaatctctaaattgatagtgccaaccaaatcagggaccagagctctgacatgggtgttttttttgt

SEQ ID NO: 21721 - DNA, 120 bp, synthetic construct
  misc_feature 1..120: note = Artificially Synthesized Probe
  source 1..120: mol_type = other DNA
gagttccactgataaattacatgccctaggaatgaagacagttgcagagtggtatcagtagagggaaaaactaaagtgaggagaaaaaatatgccattgcagactgggtttatccatgga

SEQ ID NO: 21722 - DNA, 120 bp, synthetic construct
  misc_feature 1..120: note = Artificially Synthesized Probe
  source 1..120: mol_type = other DNA
tgagcaaataggtaaatatactgagcatgctaggacccaaatttctcactgttgtagaaggcagttgccaacgttgaatgggagaggctaaaataaaccctgtggtgtgagattagaatt

SEQ ID NO: 21723 - DNA, 120 bp, synthetic construct
  misc_feature 1..120: note = Artificially Synthesized Probe
  source 1..120: mol_type = other DNA
gtgatgcctacaacctactgaataaaatataaaaatccatgagtccatgctgacatagacataagggggagaagtgacagcttttcttaaagtagaatgccaactgataaacgcagaaga

SEQ ID NO: 21724 - DNA, 120 bp, synthetic construct
  misc_feature 1..120: note = Artificially Synthesized Probe
  source 1..120: mol_type = other DNA
ttaaacaaacaaacaacctgcgatctgagagctattcaaacaaataaactaacaacctgtgatcctagggctattcaaacaggccaacaaacaagcagattgggacaactgctgaaatgt

SEQ ID NO: 21725 - DNA, 120 bp, synthetic construct
  misc_feature 1..120: note = Artificially Synthesized Probe
  source 1..120: mol_type = other DNA
taatgaggaatctggatgaaggctatacaagggctctttgtataattcttataattcttctgtaagcttgaaattaattcaaaataaacaacaatgggctctccctctccctctccttct

SEQ ID NO: 21726 - DNA, 120 bp, synthetic construct
  misc_feature 1..120: note = Artificially Synthesized Probe
  source 1..120: mol_type = other DNA
aaaattcttctgccttgggatcctgttgatctgtgaccttacccccaaccctgtgctctctgaagcatgtgctgtgaccactcagggttaaatggattaagggcagtgcaagatgtgctt

SEQ ID NO: 21727 - DNA, 120 bp, synthetic construct
  misc_feature 1..120: note = Artificially Synthesized Probe
  source 1..120: mol_type = other DNA
ttccttctccagcctcaggattctttgaagggaagaagcagttcctagaactccttgaaattacactcaaaatagtgtgtgcatgatatggatttttttgacaagagcgtcgatgctttc

SEQ ID NO: 21728 - DNA, 120 bp, synthetic construct
  misc_feature 1..120: note = Artificially Synthesized Probe
  source 1..120: mol_type = other DNA
aacttttaagccttttaaaacgaaaaatttgggttaagagaagatggggctttggctgaaaagagtcatccaggggggttcctcaaagacctgtgactctaataggcaaataaccaatcc

SEQ ID NO: 21729 - DNA, 120 bp, synthetic construct
  misc_feature 1..120: note = Artificially Synthesized Probe
  source 1..120: mol_type = other DNA
catgatagaagcattaaaaacaaggggaggggtgaagtgcaatcagacctaaatgcgtaaatgcaaccccagagagcctccctaaaaacctaatacgttcccagagaacttccctcagaa

SEQ ID NO: 21730 - DNA, 120 bp, synthetic construct
  misc_feature 1..120: note = Artificially Synthesized Probe
  source 1..120: mol_type = other DNA
ctccctcagaacctcaatgacttagcagagaacctccctcaggacctcaatgcattcccagaaacctcgctcaggatctagtgcgttcccagagaacctctcagagaacctaaagcattc

SEQ ID NO: 21731 - DNA, 120 bp, synthetic construct
  misc_feature 1..120: note = Artificially Synthesized Probe
  source 1..120: mol_type = other DNA
tcccagagaatctccctcacaaagtaatgcatttcgaggcaacctccctcagaacctcagtgcattaccagagaaccttcctaagcacgtaattcattcccagagaacttcccccagaac

SEQ ID NO: 21732 - DNA, 120 bp, synthetic construct
  misc_feature 1..120: note = Artificially Synthesized Probe
  source 1..120: mol_type = other DNA
gacaacttccctgagaacctaattccttcccagagaacctccctcagaacctcagtcaattaccagagaacctccctcagaacctaatgcgatcccagagaacatccctcagaacctaat

SEQ ID NO: 21733 - DNA, 120 bp, synthetic construct
  misc_feature 1..120: note = Artificially Synthesized Probe
  source 1..120: mol_type = other DNA
cccagagaacctccctcagaacctcagtgcattaccagagaaccaccctcaggacctaatgcgttctcagagaacctccctcagaacctaattccttcccagagaacctccgtcagaacc

SEQ ID NO: 21734 - DNA, 120 bp, synthetic construct
  misc_feature 1..120: note = Artificially Synthesized Probe
  source 1..120: mol_type = other DNA
gcgttcctagagaacttccctcagaacctaatgcgttcccagagatcctccctcagaatctaatgcgttcgcagagaaattccctcagaacctgatgcattaccagagaacttcccttag

SEQ ID NO: 21735 - DNA, 120 bp, synthetic construct
  misc_feature 1..120: note = Artificially Synthesized Probe
  source 1..120: mol_type = other DNA
cagaggacttccctcagaacctaatgcatccccggaaaaccttcctcagaacctaatgcgttcctagagaactttcctcagaacttaaatgcgttcccagagatcctccctcagaatcta

SEQ ID NO: 21736 - DNA, 120 bp, synthetic construct
  misc_feature 1..120: note = Artificially Synthesized Probe
  source 1..120: mol_type = other DNA
tcccagagaacctcccttagaacccaatgcgttcccagagaacctccctcagaacctaatgcgttccgagataacctccctcagaatctcaatgcgttcccagagaacttctcttagaac

SEQ ID NO: 21737 - DNA, 120 bp, synthetic construct
  misc_feature 1..120: note = Artificially Synthesized Probe
  source 1..120: mol_type = other DNA
atgtgttcccggagaacctcactcaggacctcaatgcgttcccagagaactcccttctgaaccaaatgcgttcccagagaatctccctcagaacctaatgggttcccatagaacctccct

SEQ ID NO: 21738 - DNA, 120 bp, synthetic construct
  misc_feature 1..120: note = Artificially Synthesized Probe
  source 1..120: mol_type = other DNA
cttcggctgttagtttggaagtctttgggatttttttaaaaacagggtgggagggaagaaacctggccgcagtgagatgctttataaaaatatttggaggctacaagtttgtgaaaagca

SEQ ID NO: 21739 - DNA, 120 bp, synthetic construct
  misc_feature 1..120: note = Artificially Synthesized Probe
  source 1..120: mol_type = other DNA
tcaagattaaaggagaccaagatcaaagagatctgacaacgaaatgcatgattattgggtcctggaccagaaaaaggggcattaatgggacagtattaccttctcgattttggtaactct

SEQ ID NO: 21740 - DNA, 120 bp, synthetic construct
  misc_feature 1..120: note = Artificially Synthesized Probe
  source 1..120: mol_type = other DNA
ctcacttgctctggacgatgaaagacatactgctacctggataacatatgtgttttgaatctggaagcaagtcatcatctatctgactggtgttttccagaatttaaatcccagctaata

SEQ ID NO: 21741 - DNA, 120 bp, synthetic construct
  misc_feature 1..120: note = Artificially Synthesized Probe
  source 1..120: mol_type = other DNA
actgcaacactagatgagcgctggttcccaggctgttacttggaagccactgataaagaagtcatatgacaggcaagtattttaaaacaatatttgccacttaattcctttccaaacatc

SEQ ID NO: 21742 - DNA, 120 bp, synthetic construct
  misc_feature 1..120: note = Artificially Synthesized Probe
  source 1..120: mol_type = other DNA
ctttcattttttggcaaggtttctagaaactttggtccttcctaagaataaatacaatctgcactgtttttactcttatcatctggaagtcactgccaaagccaggccttggactgagcc

SEQ ID NO: 21743 - DNA, 120 bp, synthetic construct
  misc_feature 1..120: note = Artificially Synthesized Probe
  source 1..120: mol_type = other DNA
aaaaaagtaaaggataacgtcagaaaacttggaaaatgggtacagtggcctggtggaaaattccagagacctcaatggagccatcttaagaatggcatattgtcccattgatctatatct

SEQ ID NO: 21744 - DNA, 120 bp, synthetic construct
  misc_feature 1..120: note = Artificially Synthesized Probe
  source 1..120: mol_type = other DNA
ttctgcatctattgagataatcatgtggtttttgtctttggttctgtttatgtgctggattacatttattgatttgcgtatattgaaccagccttgcatcccagggatgaagcccacttg

SEQ ID NO: 21745 - DNA, 120 bp, synthetic construct
  misc_feature 1..120: note = Artificially Synthesized Probe
  source 1..120: mol_type = other DNA
tatttctgccttcatttcgttatgtacccagtagtcattcaggagcaggttgttcagtttccatgtagttgagcggttttgagtgagattcttaatccagagttctagtttgattgcact

SEQ ID NO: 21746 - DNA, 120 bp, synthetic construct
  misc_feature 1..120: note = Artificially Synthesized Probe
  source 1..120: mol_type = other DNA
agttgcctgtctgtgaagtattttatttctccttcacttatgaagcttagtttggctggatatcaaattctgggttgaaaattcttttaagaatgttgaatattggccaccactctcttc

SEQ ID NO: 21747 - DNA, 120 bp, synthetic construct
  misc_feature 1..120: note = Artificially Synthesized Probe
  source 1..120: mol_type = other DNA
gatgagataccatttcacaccagttagaatggcgatcattaaaaagtcaggaaacaaccggtgctggagaggatgtggagaaacaggaacacttttacactgttggtgggactgtaaact

SEQ ID NO: 21748 - DNA, 120 bp, synthetic construct
  misc_feature 1..120: note = Artificially Synthesized Probe
  source 1..120: mol_type = other DNA
ataaataaataaataaagaatggcacattgtcaacaccgcatgggctggagggcaacactgtgtgggaggcaaaggcactcctgcctcagcgaaataggggtgtggatcaatttcctggt

SEQ ID NO: 21749 - DNA, 120 bp, synthetic construct
  misc_feature 1..120: note = Artificially Synthesized Probe
  source 1..120: mol_type = other DNA
atcaatttcctggtttgatgatgcactctagtgtcccccctggaggaagctgggagatgggaaggggtctggatcaatttcctggtttgatgatgcactctagtgccccccctggaggaa

SEQ ID NO: 21750 - DNA, 120 bp, synthetic construct
  misc_feature 1..120: note = Artificially Synthesized Probe
  source 1..120: mol_type = other DNA
acactaagtcatttagcagtaatgtttgggccgggttctgagtgtgtgaattctgtccaaaagctgaagatgtttaagctatttcctcctggagtttggtggaataataaaaggttactg

SEQ ID NO: 21751 - DNA, 120 bp, synthetic construct
  misc_feature 1..120: note = Artificially Synthesized Probe
  source 1..120: mol_type = other DNA
ggatggcgtgggtggaggcattagtcactggcatgtaagtgttattactaatcagtaatagcccatgaaatggtgggtggatcagctagattagggggtttagttgtttcttttgagatg

SEQ ID NO: 21752 - DNA, 120 bp, synthetic construct
  misc_feature 1..120: note = Artificially Synthesized Probe
  source 1..120: mol_type = other DNA
ctgagatgtggggagcgcctctgccctgccgccccgtctgggatgtgaggagcacctctgcccggccgcgacccggtctgggaggtgaggagcatttctgcccggccgccccgtctgaga

SEQ ID NO: 21753 - DNA, 120 bp, synthetic construct
  misc_feature 1..120: note = Artificially Synthesized Probe
  source 1..120: mol_type = other DNA
aaaaaaacaaaaacaaaatgacttgcgataaaactgctctgatcgcagggatctaggtctctggcctcctcctaacttccacagtgacatctgatggggcaccaaggaatacagtttgaa

SEQ ID NO: 21754 - DNA, 120 bp, synthetic construct
  misc_feature 1..120: note = Artificially Synthesized Probe
  source 1..120: mol_type = other DNA
tataaatacatctccgggatggagcctcctcaagatgtcccatcagttttgttcatttacttctattcctgagattcagttctatgtcctctactcttcaatgagacatgagtccatcaa

SEQ ID NO: 21755 - DNA, 120 bp, synthetic construct
  misc_feature 1..120: note = Artificially Synthesized Probe
  source 1..120: mol_type = other DNA
gagactcaagctttttctgttaggtagatatgagaaagagaagtgttttctgagcatattcaatagctttccccattgatctgctttttctaggtgtctccaacaaggaagtcatgcacg

SEQ ID NO: 21756 - DNA, 120 bp, synthetic construct
  misc_feature 1..120: note = Artificially Synthesized Probe
  source 1..120: mol_type = other DNA
tgtctcttcccaagtaagccccattacaacaaccacaacagaaatctccttgagaaaatcgacttctcagcttccaaatatgaccactatttcaaaatacatcacggagtggaaacatgg

SEQ ID NO: 21757 - DNA, 120 bp, synthetic construct
  misc_feature 1..120: note = Artificially Synthesized Probe
  source 1..120: mol_type = other DNA
tgtggtgatggcattagctcgaggtaatcagtagtaagatgatggtttttgtggtatcctggtgataaacaatatggtctaacacccaagcaagtatttcacatttgcacactccaaact

SEQ ID NO: 21758 - DNA, 120 bp, synthetic construct
  misc_feature 1..120: note = Artificially Synthesized Probe
  source 1..120: mol_type = other DNA
acatcaaggagctcctagctcactcatttgtggcacatgcattccacatgtggaccaagttagtacaggaaaagtgattcattccttccctcatccactcaacaaagggatatgcttggc

SEQ ID NO: 21759 - DNA, 120 bp, synthetic construct
  misc_feature 1..120: note = Artificially Synthesized Probe
  source 1..120: mol_type = other DNA
gtaagggtcggttttcttctcactgcaattgggcagtcgctggtagttttcaacagcgaagtgatgtgatctaatttggattttaaaaatattccactgctgtaggggaatggattataa

SEQ ID NO: 21760 - DNA, 120 bp, synthetic construct
  misc_feature 1..120: note = Artificially Synthesized Probe
  source 1..120: mol_type = other DNA
gatgatgcgtgcgtgtcaggcgtgagctacacagtcatgcaccacatcaccatgtttccatccatgacgggccacggtacaaggcggttccactagattataatggagccatacaataga

SEQ ID NO: 21761 - DNA, 120 bp, synthetic construct
  misc_feature 1..120: note = Artificially Synthesized Probe
  source 1..120: mol_type = other DNA
tgctttgcagctgtcacaggccacagagaattacaactttggggttagattgtcagtaactcaaaggacatatttcatgaactctgaggctgctaaataaagccaaaaatttccaagaag

SEQ ID NO: 21762 - DNA, 120 bp, synthetic construct
  misc_feature 1..120: note = Artificially Synthesized Probe
  source 1..120: mol_type = other DNA
gcgtatatgtgtgcaagcgtgcttgcagaagcgtcaaaaatataccccaaagaattaaacagtgtggatacctccagggggagggatatacagtagttaagaagagatgtttatttaaaa

SEQ ID NO: 21763 - DNA, 120 bp, synthetic construct
  misc_feature 1..120: note = Artificially Synthesized Probe
  source 1..120: mol_type = other DNA
cagattgctttgctttttctatttggcagagttaccccttcacattaggcatggcacattaacactgtgagatgcactgaaacaagcagggactacttttaaatcttaactgcatttgga

SEQ ID NO: 21764 - DNA, 120 bp, synthetic construct
  misc_feature 1..120: note = Artificially Synthesized Probe
  source 1..120: mol_type = other DNA
gccttggattacgtaacagtttcttggatatgacactaaacacaagcaagaacaaaaaaccttcattaaaacggaaatcctgtgaaatgactatcaagagagtgaaaacccacagatggg

SEQ ID NO: 21765 - DNA, 120 bp, synthetic construct
  misc_feature 1..120: note = Artificially Synthesized Probe
  source 1..120: mol_type = other DNA
caaggagatactactctacacccatgagaatggctataattaggggaacaaaggagacacgcgtcagcaaggatatggggaaactggaccctcctacattgtgggtagaaatgtaaaacc

SEQ ID NO: 21766 - DNA, 120 bp, synthetic construct
  misc_feature 1..120: note = Artificially Synthesized Probe
  source 1..120: mol_type = other DNA
tattcacatagtgagttcacacagtgaaaacctgtacagatactcacagcagtaatcaaatagtgaattcacacagtgaaaacctgtacaaatattcatatagtgagttcacacagcgaa

SEQ ID NO: 21767 - DNA, 120 bp, synthetic construct
  misc_feature 1..120: note = Artificially Synthesized Probe
  source 1..120: mol_type = other DNA
catagtgagttcacacagtgaaaacctgtacagatattcacagcagtattcaaatagtgaattcacacagtgaaaacctgtacaaatattcacatagtgagttcacacagtgaaaacctg

SEQ ID NO: 21768 - DNA, 120 bp, synthetic construct
  misc_feature 1..120: note = Artificially Synthesized Probe
  source 1..120: mol_type = other DNA
taatcgtcccttgcaatattattcaaatggaagaatacatttctttagcaccagtaaagcatccataaaatattttccaacgctgaagggagtgcatgaggcgggggaatctgtcactgt

SEQ ID NO: 21769 - DNA, 120 bp, synthetic construct
  misc_feature 1..120: note = Artificially Synthesized Probe
  source 1..120: mol_type = other DNA
agtctctggccgttttggctccttggctgacatcttacctgttttgtggcacctttctgaggaattcagtaactttctataaaatctggcatatatcaaagggtatcaagatataccttg

SEQ ID NO: 21770 - DNA, 120 bp, synthetic construct
  misc_feature 1..120: note = Artificially Synthesized Probe
  source 1..120: mol_type = other DNA
ggctaaggatttagaacctgaaactctgcaaacttgagaggagaggagagcaacaactgaacaatgaagaggggatgatttaaagaccagttctgccaaaacatttcaaatatgaaaacc

SEQ ID NO: 21771 - DNA, 120 bp, synthetic construct
  misc_feature 1..120: note = Artificially Synthesized Probe
  source 1..120: mol_type = other DNA
gagccagcaagaggaatcagggggctgctaaagccaacctcatacttctcaggagaaactcaggattccttcagtgggatctctgttcctatttcctttccttttctgtttttttgagac

SEQ ID NO: 21772 - DNA, 120 bp, synthetic construct
  misc_feature 1..120: note = Artificially Synthesized Probe
  source 1..120: mol_type = other DNA
accacaccccactaatatttcctgggtagctgggactacaggcatgcgccatcaggccccgctattatttcccaggtagctgggactacaggcatgcaccaccatgcccagctaatattt

SEQ ID NO: 21773 - DNA, 120 bp, synthetic construct
  misc_feature 1..120: note = Artificially Synthesized Probe
  source 1..120: mol_type = other DNA
tagctgggactacaggcgtgcaccaccacaccccgctaatatttcccgggtagctgggactacaggcatgcaccaccacaccccgctaatatttcccgggtagctgggactacaggcgtg

SEQ ID NO: 21774 - DNA, 120 bp, synthetic construct
  misc_feature 1..120: note = Artificially Synthesized Probe
  source 1..120: mol_type = other DNA
tatggctgatgaagcacagtgactgactgcaggtaaacgcacctaatatagcgtgggtcaccaagtggatgttcaaagcatgacagctatgggtgtttcagattctacattctatttttt

SEQ ID NO: 21775 - DNA, 120 bp, synthetic construct
  misc_feature 1..120: note = Artificially Synthesized Probe
  source 1..120: mol_type = other DNA
cacagccaagccttttgcttttaaggctgcagttcacctctttctttgtgcatcttcctctacatgtatggatttttttttagacttctggtttagatgtaaaattgttgcttgacagga

SEQ ID NO: 21776 - DNA, 120 bp, synthetic construct
  misc_feature 1..120: note = Artificially Synthesized Probe
  source 1..120: mol_type = other DNA
gatgagtcagctacaattcctgtattcaaggagctcaatgtctacgcatatgtaatgatgcaaacagaaattaccatagaacagagtcacttggtttcccagtggacaggaaatctgaag

SEQ ID NO: 21777 - DNA, 120 bp, synthetic construct
  misc_feature 1..120: note = Artificially Synthesized Probe
  source 1..120: mol_type = other DNA
gaagcgttttgcaagaaacccctcaaagttagttgttctttgaatagcaaaaagaagcaatttcacttcaatttccttcgctctggtacgcataatcttggcaagttctgcccttcaaaa

SEQ ID NO: 21778 - DNA, 120 bp, synthetic construct
  misc_feature 1..120: note = Artificially Synthesized Probe
  source 1..120: mol_type = other DNA
ccatctcagaagctcagttgctggtgaacagggacatgtgagttcttagtaaggactaagctaccatcttctcacacaaataaatgacaaaatgaaacaaagagtctctgagtttatttg

SEQ ID NO: 21779 - DNA, 120 bp, synthetic construct
  misc_feature 1..120: note = Artificially Synthesized Probe
  source 1..120: mol_type = other DNA
aaaaaaagccacacagaatgtatgtgaacaccaagcgtgaacactaccatgaactatggaccatcactctgggtaatgatgatgtgtccgtgtagtttcatgagctgtgataaatgcatc

SEQ ID NO: 21780 - DNA, 120 bp, synthetic construct
  misc_feature 1..120: note = Artificially Synthesized Probe
  source 1..120: mol_type = other DNA
aaagctctgaactatccagaggctatacacactgtattgggagtgggaaattcattcaacaaatgtttcctctgtgtctgctatatcattaaggtagatactaccctgtctctatggaac

SEQ ID NO: 21781 - DNA, 120 bp, synthetic construct
  misc_feature 1..120: note = Artificially Synthesized Probe
  source 1..120: mol_type = other DNA
agtggttagaagtagaaatggcagttcaaggaaacaagcaaaaacacagagccaagcaaaagggaaccaacctctgtatttctcatggttttaaagaatctaggctacctttttaacttg

SEQ ID NO: 21782 - DNA, 120 bp, synthetic construct
  misc_feature 1..120: note = Artificially Synthesized Probe
  source 1..120: mol_type = other DNA
aatctgcaatgagatattttgggaaatgggcagtaatgatcacgggaaatttgactttctgcaaaccaaaactgaaagagatctaaaagtcagaatgccactggtctctgatgtcgcaag

SEQ ID NO: 21783 - DNA, 120 bp, synthetic construct
  misc_feature 1..120: note = Artificially Synthesized Probe
  source 1..120: mol_type = other DNA
ctaacttctcaattctcacttcaggatgaaagtgacctgatagagaagtcatagatgccaaaacctatgggttcacgggttcagattttttcatttacaaagagtttactaggttgtgcc

SEQ ID NO: 21784 - DNA, 120 bp, synthetic construct
  misc_feature 1..120: note = Artificially Synthesized Probe
  source 1..120: mol_type = other DNA
actaatggctttccaatatctactccctccctgcagttatatcagatgactaaggaatatgaggttctccaaggaaagtgctttacaaataagcatctgattactagcagacagccacaa

SEQ ID NO: 21785 - DNA, 120 bp, synthetic construct
  misc_feature 1..120: note = Artificially Synthesized Probe
  source 1..120: mol_type = other DNA
ggcatgaagatttcttttaaatacagccatgagaaaaaaggaattgacagggcatacaagatagacggtttgagacctacatcaaattaagcccaaacaaatcctctctttctgaggctg

SEQ ID NO: 21786 - DNA, 120 bp, synthetic construct
  misc_feature 1..120: note = Artificially Synthesized Probe
  source 1..120: mol_type = other DNA
acaacaacaaataaatccactttggattactggtgtaactgctgtcctactccttggagtacagaatggcaagagggctccataatgttttagggtgttttgtaaaaaattattatgggt

SEQ ID NO: 21787 - DNA, 120 bp, synthetic construct
  misc_feature 1..120: note = Artificially Synthesized Probe
  source 1..120: mol_type = other DNA
gtttctagaaatagcaacagctcaaaaccacaatttctttggctgctaaggagtgtctggcaacctgctgagattttttttcagatgaggggataggcatgacccaaaacaatctgtttt

SEQ ID NO: 21788 - DNA, 120 bp, synthetic construct
  misc_feature 1..120: note = Artificially Synthesized Probe
  source 1..120: mol_type = other DNA
aggagaaccagagcctgtgacagcacctggtatcaccagagacaaaaaagaggaaaaattaccagtctctgatttgtagacttccttgccatgctcttcattttcatttttttacattaa

SEQ ID NO: 21789 - DNA, 120 bp, synthetic construct
  misc_feature 1..120: note = Artificially Synthesized Probe
  source 1..120: mol_type = other DNA
cattgctttaagtgttttagacatgaagtccttgcccatgcctatgtcctgaatggtattgcctaggttttcttctagggtttttatggttttaggtctaacatttaagtctttaatcca

SEQ ID NO: 21790 - DNA, 120 bp, synthetic construct
  misc_feature 1..120: note = Artificially Synthesized Probe
  source 1..120: mol_type = other DNA
tggccagatcttccaacactatgttgaataggaatggtgaaagagggcatccctgtcttgtgccagttttcaaagggaatgcttccagtttttgcccattcagtatgatattggctgtgg

SEQ ID NO: 21791 - DNA, 120 bp, synthetic construct
  misc_feature 1..120: note = Artificially Synthesized Probe
  source 1..120: mol_type = other DNA
gctctgatcttagttatttcttgacttctgcgagcttttgaatgtgtttgctcttgcttctacagttattttaattgtgatgttagggtgtcaattttagatcttttctgctttctcttg

SEQ ID NO: 21792 - DNA, 120 bp, synthetic construct
  misc_feature 1..120: note = Artificially Synthesized Probe
  source 1..120: mol_type = other DNA
ttaatattgttatgtgtgaatttgatcctgtcattataatgttagctggttattttgctcgttaattgatgcagtttcttcctagcatggatggtctttacaatttggcatgtttttgca

SEQ ID NO: 21793 - DNA, 120 bp, synthetic construct
  misc_feature 1..120: note = Artificially Synthesized Probe
  source 1..120: mol_type = other DNA
tcaaagtcattctccgtccagctttgttccattgctggcgaggtgctttgttcctttggagggggagaggtgctctgatttttagaattttcagcttttctgctgttttttccccatctt

SEQ ID NO: 21794 - DNA, 120 bp, synthetic construct
  misc_feature 1..120: note = Artificially Synthesized Probe
  source 1..120: mol_type = other DNA
atgttcttcattttcaaagtcacctcttgagataggctggacctggttatgttactagtgagccgcataatcacaagtcacttcctctctgtgggtcacaactttgaatagctgtgaaat

SEQ ID NO: 21795 - DNA, 120 bp, synthetic construct
  misc_feature 1..120: note = Artificially Synthesized Probe
  source 1..120: mol_type = other DNA
cctcttctaaccatgaaaaggttcccactacaaagaggtagctcaactgataactgtcagcaaagcacatatatgtgccaaactaccaagatttcctagtcattcctttcttttcagact

SEQ ID NO: 21796 - DNA, 120 bp, synthetic construct
  misc_feature 1..120: note = Artificially Synthesized Probe
  source 1..120: mol_type = other DNA
agttcccaaataaatataccgccctcccaaaccacagtcttctaaacagcagggttaattagtcaaatgctacagttccaaacagacaccataaagaatctcagcctagaatcttgagtg

SEQ ID NO: 21797 - DNA, 120 bp, synthetic construct
  misc_feature 1..120: note = Artificially Synthesized Probe
  source 1..120: mol_type = other DNA
tcatacttggaaagcgaggacaacactcatacttggaaagcgaggacaacactcatacttggaaatcaaggacaacactcatacttggaaatcaaggacaacactcatacttggcaactg

SEQ ID NO: 21798 - DNA, 120 bp, synthetic construct
  misc_feature 1..120: note = Artificially Synthesized Probe
  source 1..120: mol_type = other DNA
catctcccgccccttacaacaaatagctatttctctcatttccagatggttctaccatcagcacgtaaacataagggaagcaaattcaccagaaaggatgctaaaaataagaagtctgga

SEQ ID NO: 21799 - DNA, 120 bp, synthetic construct
  misc_feature 1..120: note = Artificially Synthesized Probe
  source 1..120: mol_type = other DNA
aggttttacatctaggttacagatccattttgagttattaacgaatccctatgctggtttctgccaaataaaagttagttctgtcatgttcctgccatgcacaaccccttcctttatacc

SEQ ID NO: 21800 - DNA, 120 bp, synthetic construct
  misc_feature 1..120: note = Artificially Synthesized Probe
  source 1..120: mol_type = other DNA
ttatcttttctaatccataccacggactggagatcggctcccacacacatctccatgaccgcgtggcctctgcctgataagggtcttattttttctaatccatactacggactggagatc

SEQ ID NO: 21801 - DNA, 120 bp, synthetic construct
  misc_feature 1..120: note = Artificially Synthesized Probe
  source 1..120: mol_type = other DNA
gccttcagtccccagcacggggcctaggatgtagaaaatgcagagtaaatatctatcatgcaaatgaagaaaagaacaaatgaatatgaaagagatcaactctgaatcatcctgagagca

SEQ ID NO: 21802 - DNA, 120 bp, synthetic construct
  misc_feature 1..120: note = Artificially Synthesized Probe
  source 1..120: mol_type = other DNA
ctttggaaaagctgtctgtgatacacttagccaagtagcaattcccatttctcgcccacgagcaggtagcagtaaaagagcattcttgatcagactaatagagaatgtcaaaaataaaaa

SEQ ID NO: 21803 - DNA, 120 bp, synthetic construct
  misc_feature 1..120: note = Artificially Synthesized Probe
  source 1..120: mol_type = other DNA
aatggaacaggcaccgaagatcttacactggaggacagaggaatggaacaggcaatgaagatcttacactggaggacagaggaatggaacaggcactgaagatcttacactggaggacag

SEQ ID NO: 21804 - DNA, 120 bp, synthetic construct
  misc_feature 1..120: note = Artificially Synthesized Probe
  source 1..120: mol_type = other DNA
gctgagggtaagggtgctctcatacagtacagatcgtactacaagtatataaagctttgctggagggcaaatgggcagtagctactaaaattttaaatgtatacaaacctataacccaga

SEQ ID NO: 21805 - DNA, 120 bp, synthetic construct
  misc_feature 1..120: note = Artificially Synthesized Probe
  source 1..120: mol_type = other DNA
tttacgtaaatacacacacacaaatccgcagtgatagccattaaactgataacaattaccacctctgaggacaacaatgggattctgaagtctaggtaaagggaacttaggtttcacctg

SEQ ID NO: 21806 - DNA, 120 bp, synthetic construct
  misc_feature 1..120: note = Artificially Synthesized Probe
  source 1..120: mol_type = other DNA
tgctttttgtaacaatgtgactttgacattcctcccgttagtgggtgggagaagactatgttccttcctcttgaatcttagcagccttgtgactatggcagaagtgatgctatgaaattt

SEQ ID NO: 21807 - DNA, 120 bp, synthetic construct
  misc_feature 1..120: note = Artificially Synthesized Probe
  source 1..120: mol_type = other DNA
tgaaggagattagcaacttctccgtattgtcttcgcctggtcatggctctgcaaggaaagaataagtttaaaagtctagaaaaacactaaagacgcaagatacagacacagaacaaccca

SEQ ID NO: 21808 - DNA, 120 bp, synthetic construct
  misc_feature 1..120: note = Artificially Synthesized Probe
  source 1..120: mol_type = other DNA
aactgaaatctgtaggttctaaggcgtctgtatcacagacctctactttccctactgctaaggttaatgacgcttaaataaaaggatgctgataaaatcaagttacacacagggaggaaa

SEQ ID NO: 21809 - DNA, 120 bp, synthetic construct
  misc_feature 1..120: note = Artificially Synthesized Probe
  source 1..120: mol_type = other DNA
tgtatcattccctctacaagccaaacggaaatctactttataaaaaaaagtggtttgaatgattgagttctgtctcatagggtctcttccatgacagtgcaactcagcccaacgcaagca

SEQ ID NO: 21810 - DNA, 120 bp, synthetic construct
  misc_feature 1..120: note = Artificially Synthesized Probe
  source 1..120: mol_type = other DNA
cagacggtctttactaatggaatgagggcctgagcttccagcaaagaagactttcaaatctcaagaagattgaaatataagctctgtaacatacgcttaacatgtaagttactaggaggg

SEQ ID NO: 21811 - DNA, 120 bp, synthetic construct
  misc_feature 1..120: note = Artificially Synthesized Probe
  source 1..120: mol_type = other DNA
accaaacacaaatactgtagtcactggatagatacatcccattaaagtgagtaacttggccatgagttcatggatagatacgtcctcattaaagtgagaaacttggccgtgagtttgtgg

SEQ ID NO: 21812 - DNA, 120 bp, synthetic construct
  misc_feature 1..120: note = Artificially Synthesized Probe
  source 1..120: mol_type = other DNA
cagggagttcgtggatagatacatcccaccaaagtgagaaacttggccgtgagttcttggatagatacatcgcactaaagtgagaaactcggcagggagttcgtgggtagatacatccca

SEQ ID NO: 21813 - DNA, 120 bp, synthetic construct
  misc_feature 1..120: note = Artificially Synthesized Probe
  source 1..120: mol_type = other DNA
tggccctgtaacctgatcacccacttgcaactctgaaatcagcatcctttttcctacaaaaaaatctctgtatctcttccagcgtttttagcttcagtctaacatagggagtctttattt

SEQ ID NO: 21814 - DNA, 120 bp, synthetic construct
  misc_feature 1..120: note = Artificially Synthesized Probe
  source 1..120: mol_type = other DNA
caagctgctttaaaataagacatctcataacttgggagtaaactgtcactgcaaaccccctcggttggaagaggaagcatactccagaacacagattagcatcataaggatatcaataaa

SEQ ID NO: 21815 - DNA, 120 bp, synthetic construct
  misc_feature 1..120: note = Artificially Synthesized Probe
  source 1..120: mol_type = other DNA
ccattctcagcgtgcatcgagctacataccgtacatctcgatggagaaatgcatgataccaataccaagaaatgttagagaaaggaaaatccaaaatgactaggaaactattttcagaaa

SEQ ID NO: 21816 - DNA, 120 bp, synthetic construct
  misc_feature 1..120: note = Artificially Synthesized Probe
  source 1..120: mol_type = other DNA
attcaaaaaaacctgaaccgtgaatggggactccagaactgcaacaaatcttaaagactttcatagtaagccatttgaaaaccaatgaaatgcacttagaaaggaacactgggccggaca

SEQ ID NO: 21817 - DNA, 120 bp, synthetic construct
  misc_feature 1..120: note = Artificially Synthesized Probe
  source 1..120: mol_type = other DNA
aaaaaacaagcaaaaagctaatggtgagcccagcatttccactgaaataaaaacctacaaggacagatgctacacaatgaaagtattacaacacagctgcagcttctgctaggaggggaa

SEQ ID NO: 21818 - DNA, 120 bp, synthetic construct
  misc_feature 1..120: note = Artificially Synthesized Probe
  source 1..120: mol_type = other DNA
gaataagggagatggtggtcacagaaggtctcctgagaaagggcacacaaatcgggacctgcaggatgaggaggtgtgagaatttgtagatttggagtaagatgattttttttttcttga

SEQ ID NO: 21819 - DNA, 120 bp, synthetic construct
  misc_feature 1..120: note = Artificially Synthesized Probe
  source 1..120: mol_type = other DNA
aacataaaacagactaagaaaactggtatcaagaagtgggctactgctatagtaaatacctgaaaacatggctttggagctgggtgatggacagatgtggaacagtcttgaagtgaaggc

SEQ ID NO: 21820 - DNA, 120 bp, synthetic construct
  misc_feature 1..120: note = Artificially Synthesized Probe
  source 1..120: mol_type = other DNA
aaaaaccaccagtgacatgagaaaaaatcagggacgatgggtgttacagaagccaaacagaagtgtttgaaggagaaggaaagagtgattgtgccttctgttgttaaacactcatgtaag

SEQ ID NO: 21821 - DNA, 120 bp, synthetic construct
  misc_feature 1..120: note = Artificially Synthesized Probe
  source 1..120: mol_type = other DNA
tagggcaaaagatggcgtaaagggagtaatttttaaagatgagaaatgcttgcatacgtctgcttgggagtgatttagcaggagagaaatttatttgggggggcaatgggttaattacag

SEQ ID NO: 21822 - DNA, 120 bp, synthetic construct
  misc_feature 1..120: note = Artificially Synthesized Probe
  source 1..120: mol_type = other DNA
ctgaataagtgcgctcataaccattcctctaacttcaggcccaaccatgagcagtggttcaaaatcacagcttcatgctttctgtaagtattctctatttggcttaaacagagtctaata

SEQ ID NO: 21823 - DNA, 120 bp, synthetic construct
  misc_feature 1..120: note = Artificially Synthesized Probe
  source 1..120: mol_type = other DNA
ggtttttttaagaaacacaaaaataccttcactacctggctaatcagaaatgtgctgaaagaatcactctggcactgtccctagacactttttaaaataaaaacgtggttggccgggggg

SEQ ID NO: 21824 - DNA, 120 bp, synthetic construct
  misc_feature 1..120: note = Artificially Synthesized Probe
  source 1..120: mol_type = other DNA
actcaaattctgtaaacaggagatgaaaagcaacccactgaattagcctagaaggctcagcaaaaccaattccagcatctttgtatttctgtgcatcctaatggtaaccactactctgaa

SEQ ID NO: 21825 - DNA, 120 bp, synthetic construct
  misc_feature 1..120: note = Artificially Synthesized Probe
  source 1..120: mol_type = other DNA
aagggattttcaactagcagactgggattcaaaccttggctctgccagttactgtgtgatttctgtcaagcctcttatcctctaggaagtagtttcataatttccagaatgcaaattcta

SEQ ID NO: 21826 - DNA, 120 bp, synthetic construct
  misc_feature 1..120: note = Artificially Synthesized Probe
  source 1..120: mol_type = other DNA
tgttgaacttcttcaaacgagacacaacaggatccttccaaataatcccccttttgcctaagcccgtttgaattgggatttttgtcttctgcaaccaagagagtcttgaatgagtttata

SEQ ID NO: 21827 - DNA, 120 bp, synthetic construct
  misc_feature 1..120: note = Artificially Synthesized Probe
  source 1..120: mol_type = other DNA
caaccaggactgccctggtcaaatgccagatggcgcccatcagatgagaatcactgatgtttacacaaattcctccacaccacttaggaacctggagtataagaaggctttatttaaagc

SEQ ID NO: 21828 - DNA, 120 bp, synthetic construct
  misc_feature 1..120: note = Artificially Synthesized Probe
  source 1..120: mol_type = other DNA
ttctcattttagtcacttcataactctcatctatatcgtaagtcttcattcaggagaaaacatccttttgcgtgacatctggatgttccctcagctgactttttgagacaccttctgtgc

SEQ ID NO: 21829 - DNA, 120 bp, synthetic construct
  misc_feature 1..120: note = Artificially Synthesized Probe
  source 1..120: mol_type = other DNA
aagtcttcaatgaaaaaaaagtttaaatttctgacttattagaagtagcactttgcctagctgataattctacggttatcacggaagtaggagagggctgtctgtcgcgaccgttccctt

SEQ ID NO: 21830 - DNA, 120 bp, synthetic construct
  misc_feature 1..120: note = Artificially Synthesized Probe
  source 1..120: mol_type = other DNA
ttccatgaagacagaaagccaaattcccatccattgtacaaacatatctcagtgacttcttgtatcaaggacctgaaatccagaaggctttgctctgttggcagtaattccgcaattttt

SEQ ID NO: 21831 - DNA, 120 bp, synthetic construct
  misc_feature 1..120: note = Artificially Synthesized Probe
  source 1..120: mol_type = other DNA
gtgttaatgcacctgagtctatggaaagaatgaatctatgaaagttcagaacaatatggaaaaatgtttctaaagagattaaatattgcaatgattaaaaattaccatgtgacccagcaa

SEQ ID NO: 21832 - DNA, 120 bp, synthetic construct
  misc_feature 1..120: note = Artificially Synthesized Probe
  source 1..120: mol_type = other DNA
tacaaaaaaattagctggacatggtggcgggcacctgtagtcccagcttcttgggaggctgaggcaggagaatcgcttgaacccgggaggtggagactgcagtgagccaagatcaagcca

SEQ ID NO: 21833 - DNA, 120 bp, synthetic construct
  misc_feature 1..120: note = Artificially Synthesized Probe
  source 1..120: mol_type = other DNA
taatgaactgaaacaggaaaagaggagaactgacaaatatatccaagtgcaagtcctctgagaaggcctaaagaaattctggctgttttaatctaggattgggggtgtgggaaagagaaa

SEQ ID NO: 21834 - DNA, 120 bp, synthetic construct
  misc_feature 1..120: note = Artificially Synthesized Probe
  source 1..120: mol_type = other DNA
taaaatccaacgtctattttctggcaaaagtgcttagtgaccaagattgtgaagatctctccttaacagtcaaaagaatcgggaaacaagacaacattacacttggtgtcagctccggga

SEQ ID NO: 21835 - DNA, 120 bp, synthetic construct
  misc_feature 1..120: note = Artificially Synthesized Probe
  source 1..120: mol_type = other DNA
gggtgtctctgcaaaaatctttagtgtctgctctgataaacaccagctggactcccatacacgcttccatattgaatctgttgtgatctgttgttctggttgaaaatatgaagaaaatct

SEQ ID NO: 21836 - DNA, 120 bp, synthetic construct
  misc_feature 1..120: note = Artificially Synthesized Probe
  source 1..120: mol_type = other DNA
aactacactaaaactcaaaaagtggtagattcttgaggattagctgcagtgtgggatttgaaattgaattaatgaacttgccatactatatgctgcatgaaacccgctgatcagctgtgc

SEQ ID NO: 21837 - DNA, 120 bp, synthetic construct
  misc_feature 1..120: note = Artificially Synthesized Probe
  source 1..120: mol_type = other DNA
atggaaatgctagaaaaaaggacatggtgtcagagctgaagaattccttcaacagcctcatcacactcgacacagcaaaaaaaggattggtgaactttaaggtgggtcaatagaaagtac

SEQ ID NO: 21838 - DNA, 120 bp, synthetic construct
  misc_feature 1..120: note = Artificially Synthesized Probe
  source 1..120: mol_type = other DNA
agcctgctatgaaaagactctcacattacatgtgaagtgatacaatgtcatcactgtgacatcagtgacaatatgactgtgataaagatgcatattgtggacccaggacaaggaagtaca

SEQ ID NO: 21839 - DNA, 120 bp, synthetic construct
  misc_feature 1..120: note = Artificially Synthesized Probe
  source 1..120: mol_type = other DNA
ctgcagtgacccaggtgtcagttccttctgttcattacaatacggcatccaaaaatacttttcttctaaaataatataccaacggccctcaacttgggatggttcaacacagaattttct

SEQ ID NO: 21840 - DNA, 120 bp, synthetic construct
  misc_feature 1..120: note = Artificially Synthesized Probe
  source 1..120: mol_type = other DNA
tgttgtcaagtggaatgtttattttaactatagggtgatattgcatgtcacgccaggcaaacatctaatggaggtcttgaagacaggacaagagaaatgaacctttgaccaccactgttg

SEQ ID NO: 21841 - DNA, 120 bp, synthetic construct
  misc_feature 1..120: note = Artificially Synthesized Probe
  source 1..120: mol_type = other DNA
agtgagcagagatcgtaacacggcactccagcctgggtgacacagcaagactccagctcaaaaaaaaaaagccaggtgcggtggctcatacctgtaatcccagcactttgggaggctgag

SEQ ID NO: 21842 - DNA, 120 bp, synthetic construct
  misc_feature 1..120: note = Artificially Synthesized Probe
  source 1..120: mol_type = other DNA
aagatagctatttggattccttatagcttttctaaaaatgagggattttagaggatacgtggcaaagtgttccaaatatgccgcagacatgtctccctgccaaaaaagcgctatcaaggt

SEQ ID NO: 21843 - DNA, 120 bp, synthetic construct
  misc_feature 1..120: note = Artificially Synthesized Probe
  source 1..120: mol_type = other DNA
ttaaagtgagggaggataagaatataaagtctccttctagtgagctgacaatgacaaattcaaaatcccacataatgaagatcaatgccatgctgggaagtcagtcttggagagcagtta

SEQ ID NO: 21844 - DNA, 120 bp, synthetic construct
  misc_feature 1..120: note = Artificially Synthesized Probe
  source 1..120: mol_type = other DNA
aaacaatcgagcagaactagtgggatgaaacgaaagctgagacacacacggtctgacaatttcaaagactctcttgcacaaacagaggtggagaaagtttaaatgaaagtcatatgaaga

SEQ ID NO: 21845 - DNA, 120 bp, synthetic construct
  misc_feature 1..120: note = Artificially Synthesized Probe
  source 1..120: mol_type = other DNA
ctgtagtaaggaaaagggattaggcttacacccatccagctggcagaactaagatcaacaagaagttacaatgaagtctatttcactgtttcagttcagtctaagaaaggagtttctcac

SEQ ID NO: 21846 - DNA, 120 bp, synthetic construct
  misc_feature 1..120: note = Artificially Synthesized Probe
  source 1..120: mol_type = other DNA
cccctctattcacctctctttcacctacgttcaagccatccattttaattcttgggaagctgcaaaaatttcatagcataccacatcatgtacttgttgaattgactcatccacaaagtt

SEQ ID NO: 21847 - DNA, 120 bp, synthetic construct
  misc_feature 1..120: note = Artificially Synthesized Probe
  source 1..120: mol_type = other DNA
attacatacagctccaaatcacaagaggagtgatgctggcatactgtcataattgtgctattttattttcagttattgtggtgaatctcttactgtgcctaatttgcatgctaaaattta

SEQ ID NO: 21848 - DNA, 120 bp, synthetic construct
  misc_feature 1..120: note = Artificially Synthesized Probe
  source 1..120: mol_type = other DNA
aggagacgaatacaaagttccatcacagattgaaatgctatctaaacattcttgaaaatgtggtcttgctctgtgaaatacgacctgctctgctgcggcaacctgtaacctattaatacg

SEQ ID NO: 21849 - DNA, 120 bp, synthetic construct
  misc_feature 1..120: note = Artificially Synthesized Probe
  source 1..120: mol_type = other DNA
tctgtaaaatgaggggaggggcccagatgagtttcaaatcctttccagttcaaaattctgattccttggtgtattcagataaggtccatggaaaacatcgtcaagaaactagtatctgag

SEQ ID NO: 21850 - DNA, 120 bp, synthetic construct
  misc_feature 1..120: note = Artificially Synthesized Probe
  source 1..120: mol_type = other DNA
aaccagaacagttttaggaacctaatgtgtctacacacaaattctgatgatgacaagaaggccagctactcacaaacaggccaaaggaaactggctatcaaatggaaagtgactataaag

SEQ ID NO: 21851 - DNA, 120 bp, synthetic construct
  misc_feature 1..120: note = Artificially Synthesized Probe
  source 1..120: mol_type = other DNA
atcctgccccacgttcgtctgacctcttacaacagttcgaatattgtcatccagtctcctagcaaaacagttcaaggatacagtcattcaaataatctttattctaggttgaccaaaaga

SEQ ID NO: 21852 - DNA, 120 bp, synthetic construct
  misc_feature 1..120: note = Artificially Synthesized Probe
  source 1..120: mol_type = other DNA
tacacatataagcccatcttcatgtctaagccttgggaacacaaaaacaggtaaatccacaaaaacagggaaataaagccattaaaaagctagtcgaaggacagacagaatggctcacac

SEQ ID NO: 21853 - DNA, 120 bp, synthetic construct
  misc_feature 1..120: note = Artificially Synthesized Probe
  source 1..120: mol_type = other DNA
ttaattatgaacaatcacacagctttactcaccttattttcagcctaattttgttcacgacttcgtctatgttcgccagagactacaataaagaaggaagagtgcccagctgttagtcca

SEQ ID NO: 21854 - DNA, 120 bp, synthetic construct
  misc_feature 1..120: note = Artificially Synthesized Probe
  source 1..120: mol_type = other DNA
ctaacataattctcctgttagaagctaggacagtggttatctctgggggaaggtagtgacagtgaacaggcaaggaaaggccttctgaagatttttttaaatgttttatttcttgatctg

SEQ ID NO: 21855 - DNA, 120 bp, synthetic construct
  misc_feature 1..120: note = Artificially Synthesized Probe
  source 1..120: mol_type = other DNA
gccatgagtgtttgagatgtcagactgggttgtcacagctcatcctactgttctgaccaagccaacagttactcagaattttcagaaatccaagaacagcttgaggtaaaaatgaatctc

SEQ ID NO: 21856 - DNA, 120 bp, synthetic construct
  misc_feature 1..120: note = Artificially Synthesized Probe
  source 1..120: mol_type = other DNA
acgtggtgaaactccgtctctacaaaaaaatagaaaaattagccgggtatggtagcacacgcctgtagtacaatctgcttattaggctgaggaaagaagactgattgagtctgtaaattc

SEQ ID NO: 21857 - DNA, 120 bp, synthetic construct
  misc_feature 1..120: note = Artificially Synthesized Probe
  source 1..120: mol_type = other DNA
taaaaaacagatgggaaacgtgctctgcaggacaggtgctttgcctgaagctgcagagatcctctttcttactctagcatctacctctaacgcaatgattcttgacctaattttcctgca

SEQ ID NO: 21858 - DNA, 120 bp, synthetic construct
  misc_feature 1..120: note = Artificially Synthesized Probe
  source 1..120: mol_type = other DNA
aactttcaaatgattatcttcagtttactattaggaggctaaaacgattttctagaccactgcgaccaaacctggctactatttaaaccccacaggcactctgctgcatggaaaatccca

SEQ ID NO: 21859 - DNA, 120 bp, synthetic construct
  misc_feature 1..120: note = Artificially Synthesized Probe
  source 1..120: mol_type = other DNA
ccattaaaaaaagtttggaaggatctgccaaaatattcacaatgatggggatcaagagctctgcactcaaatacccaacaacttatttccacctggatgacctgagtatgttcaaacttg

SEQ ID NO: 21860 - DNA, 120 bp, synthetic construct
  misc_feature 1..120: note = Artificially Synthesized Probe
  source 1..120: mol_type = other DNA
cgagtgttatctttccgtgcctcgtgattcttactctaaaataagaaggataacaaagtggagtttatcactgtttagtgcctagagtgctgtcgggtacacaggaagtatctaataaag

SEQ ID NO: 21861 - DNA, 120 bp, synthetic construct
  misc_feature 1..120: note = Artificially Synthesized Probe
  source 1..120: mol_type = other DNA
caaatactactgaagcctaacatttaaaattggtactcacatatgtatataatattctggggatacaggcttaaaaattatccaagtgaaaatcagctctgtgggtcgggcgcggtggct

SEQ ID NO: 21862 - DNA, 120 bp, synthetic construct
  misc_feature 1..120: note = Artificially Synthesized Probe
  source 1..120: mol_type = other DNA
aagaaagaaaaaaagcatttcactgaaaggcatgtggtctccaaaaaaactggcaacgataagcctagaggacagagatcctccaggatccttgctctccctcctcagcctcatctcctg

SEQ ID NO: 21863 - DNA, 120 bp, synthetic construct
  misc_feature 1..120: note = Artificially Synthesized Probe
  source 1..120: mol_type = other DNA
aacctgcctggtatcacggccaccatgtttgatcatctctagtgtatttgttggtttatttcttgtctttctccctacactagactccataagaccaagaccagatttgtcatgtttaca

SEQ ID NO: 21864 - DNA, 120 bp, synthetic construct
  misc_feature 1..120: note = Artificially Synthesized Probe
  source 1..120: mol_type = other DNA
tacatcttgaaatagaggtgaaagtggctttatgattctgggcttatcctgcctgcctcacccccacttgtccctactacattataaaaatcctttccactttcaatttacagcagaaaa

SEQ ID NO: 21865 - DNA, 120 bp, synthetic construct
  misc_feature 1..120: note = Artificially Synthesized Probe
  source 1..120: mol_type = other DNA
actggacactgggtctcacccagcttgatagagttacaactgtgggaagcaacttcatctctgaagaagccttccaaagaaatatagagtcaaaaaatcaaaatatcttcaagacaactg

SEQ ID NO: 21866 - DNA, 120 bp, synthetic construct
  misc_feature 1..120: note = Artificially Synthesized Probe
  source 1..120: mol_type = other DNA
tttaaagaacttcagggcagagtgattttcatgtctagagtgactttcgccttttttttttttttttttttcgagatggagtctcactctgtcgctcaggctggaaggcagtggcaccat

SEQ ID NO: 21867 - DNA, 120 bp, synthetic construct
  misc_feature 1..120: note = Artificially Synthesized Probe
  source 1..120: mol_type = other DNA
ttttctgatacctgtcaaccaaacagtaactgactgcattattcttttcttccatgagagcccactagtccaaagagcaacagaaatgttatgtctttttctggcaaaaggaggtaagtg

SEQ ID NO: 21868 - DNA, 120 bp, synthetic construct
  misc_feature 1..120: note = Artificially Synthesized Probe
  source 1..120: mol_type = other DNA
tctccaacctcacccaaactattcaacggtaggaattctcaaccttttaagaatggtaacgatgtcatttttcaacactttctctcttctctgccgtccgcttcagaaattaaagtcatt

SEQ ID NO: 21869 - DNA, 120 bp, synthetic construct
  misc_feature 1..120: note = Artificially Synthesized Probe
  source 1..120: mol_type = other DNA
ggacattcgtaggacgggacagtgcccactcgatagaaattccccgtgcgccgggctctgcgcagaagcttttcgaggtgactgcagcctccttatggggagaaacgtcttttttttttt

SEQ ID NO: 21870 - DNA, 120 bp, synthetic construct
  misc_feature 1..120: note = Artificially Synthesized Probe
  source 1..120: mol_type = other DNA
gtgaaccgggaaactccaggagggaaacgcgttggccccactgaacttttttttgttgttgttatcagagttgctcaaagtaaaaaataggagcagtatgattttttcttttatttttaa

SEQ ID NO: 21871 - DNA, 120 bp, synthetic construct
  misc_feature 1..120: note = Artificially Synthesized Probe
  source 1..120: mol_type = other DNA
aaataaatgtatataaccatgtaactactaccacaatctagttataggacaatttcattcccccaaattccctcttgcctcaccccatccactggcaaccactgacttgatttctgtccc

SEQ ID NO: 21872 - DNA, 120 bp, synthetic construct
  misc_feature 1..120: note = Artificially Synthesized Probe
  source 1..120: mol_type = other DNA
taaaacaagcaacaaaataaaaatttgcctaaggccgtatacctaagtcttcctgccgttcattaagctagtcaatacatttattgaacacctgttcctgttagcgacaggtactcaagc

SEQ ID NO: 21873 - DNA, 120 bp, synthetic construct
  misc_feature 1..120: note = Artificially Synthesized Probe
  source 1..120: mol_type = other DNA
tgttttttgtttttttctttgcctctgagcttcccatattgttgtggagaatcatgaaaccagggtgaccatgttcagcacaaattcctgttgccttatttccactgattctcattgtcc

SEQ ID NO: 21874 - DNA, 120 bp, synthetic construct
  misc_feature 1..120: note = Artificially Synthesized Probe
  source 1..120: mol_type = other DNA
atttttctaccttgaaatttcaccgtctgaggcagaaattcagtctctaatactttaaaagtaaaacaaaacgaaaccttggagactgtggcctttagtaggcgatgggggaggatggat

SEQ ID NO: 21875 - DNA, 120 bp, synthetic construct
  misc_feature 1..120: note = Artificially Synthesized Probe
  source 1..120: mol_type = other DNA
gaaattcagtgagatctctaaatgtcatgtgtctgtgtcaatgtagcgttaataactctgtggaaaggaatctccaatatccggttatatttgcaaccttgttgtcagagcgcagaggta

SEQ ID NO: 21876 - DNA, 120 bp, synthetic construct
  misc_feature 1..120: note = Artificially Synthesized Probe
  source 1..120: mol_type = other DNA
tttcaatctacgatgcttctactggatggtaactttcaactctcataattttaatttcccagagcttttctgtgtttctctgttcattcttcatggcatccttggaaggatgccaagcta

SEQ ID NO: 21877 - DNA, 120 bp, synthetic construct
  misc_feature 1..120: note = Artificially Synthesized Probe
  source 1..120: mol_type = other DNA
agatctaagcctaggagagaaggattgaggggtcaggccctcaggaaacggacaagacccagggtggacccagctgatgagagagacttaagtacgaggcagcaaagaaatgacggatga

SEQ ID NO: 21878 - DNA, 120 bp, synthetic construct
  misc_feature 1..120: note = Artificially Synthesized Probe
  source 1..120: mol_type = other DNA
tcttgataatgacacgagttgcatttttgctttcttcaaacgacccccaaggaaagagaagcctccggaccagaagctggttgttcgcagctctagggacaactgtgagttggaaaccag

SEQ ID NO: 21879 - DNA, 120 bp, synthetic construct
  misc_feature 1..120: note = Artificially Synthesized Probe
  source 1..120: mol_type = other DNA
aaaagggattgtgggggccaagccatctgaattcaggaagaaaactaggagccaggaggcctggctgaggggctcatggggttggggtccccttatcctcttgcagctgatgtttgaggg

SEQ ID NO: 21880 - DNA, 120 bp, synthetic construct
  misc_feature 1..120: note = Artificially Synthesized Probe
  source 1..120: mol_type = other DNA
aaaaaagaagaatgagaaaggagatgaggagctggctgtattgggtctgccaggtagagctattagggctttgactctggaagcagccgtgcctaaagagaggtctcggcccagcacagt

SEQ ID NO: 21881 - DNA, 120 bp, synthetic construct
  misc_feature 1..120: note = Artificially Synthesized Probe
  source 1..120: mol_type = other DNA
ttgactttctgggcaccaagcaccctacgataattgccctgggacggtctgtcatgaacacctacagcttcaagcctcttaccagctcaagtttcacgcaagaagctgatttcaagcacc

SEQ ID NO: 21882 - DNA, 120 bp, synthetic construct
  misc_feature 1..120: note = Artificially Synthesized Probe
  source 1..120: mol_type = other DNA
gatcacatagagccttgaaggccattgtcaggactgtggctttcctattctgtgtgaatggggagcctttgcaggattttgagcagtgacttgatctgacttatttattttttttttttt

SEQ ID NO: 21883 - DNA, 120 bp, synthetic construct
  misc_feature 1..120: note = Artificially Synthesized Probe
  source 1..120: mol_type = other DNA
ccccccccacctccctcccggatggggcggctggccggtcggggggctgaccccccacctccctcccggacggggcggctggccaggcagaggggctcctcacttcccagtaggggcggc

SEQ ID NO: 21884 - DNA, 120 bp, synthetic construct
  misc_feature 1..120: note = Artificially Synthesized Probe
  source 1..120: mol_type = other DNA
ccccacctccctcccggatggggcggctggccgggcggggggctgaccccccctcacctccctcccggacggggtggctgccgggcggagatgctcctcacttcccagatggggtggctg

SEQ ID NO: 21885 - DNA, 120 bp, synthetic construct
  misc_feature 1..120: note = Artificially Synthesized Probe
  source 1..120: mol_type = other DNA
acttattttttaaggattttttttgtgttgagaatccactgaggagaacaggcaagggtcgatgcagagaggctgtttaggaggcttttgcaaaaatccaggcgacactctttctttttc

SEQ ID NO: 21886 - DNA, 120 bp, synthetic construct
  misc_feature 1..120: note = Artificially Synthesized Probe
  source 1..120: mol_type = other DNA
gtgtgagctgccacgcccagcctatatctctttgttcttcttttcccttaatacttatcctttctcaatccatttcctcccttccactttaccatttccacactttattttattttcttt

SEQ ID NO: 21887 - DNA, 120 bp, synthetic construct
  misc_feature 1..120: note = Artificially Synthesized Probe
  source 1..120: mol_type = other DNA
cccagcagcttcagtaaatgctggttggctttttatttttcctttctttccctttccttttccatcttgctcgcttccttatattttcttcacctttcacttctttttctcccatttctc

SEQ ID NO: 21888 - DNA, 120 bp, synthetic construct
  misc_feature 1..120: note = Artificially Synthesized Probe
  source 1..120: mol_type = other DNA
gtctcaaaaaagaaaaaggaaaaaagaaaaggaacaggctatgactctagtggaccttaagagttagcacccaggccagatgtgatggctcatgtctgtaatcccagcactttgggaagc

SEQ ID NO: 21889 - DNA, 120 bp, synthetic construct
  misc_feature 1..120: note = Artificially Synthesized Probe
  source 1..120: mol_type = other DNA
attaatgggatttacactgatctgggcgcatctcccagggttggcttgatggggaaacatggggcatccctcagggtctagggaggtctggaatatgtgcgagactattccatgaagtgg

SEQ ID NO: 21890 - DNA, 120 bp, synthetic construct
  misc_feature 1..120: note = Artificially Synthesized Probe
  source 1..120: mol_type = other DNA
ttaagctcacttctccttccaattcctttcactgcagggagtatccggaaacacactctcttctcaggacaacctgggcccaactggcaggctgtttctgtcaattacacagccgtggga

SEQ ID NO: 21891 - DNA, 120 bp, synthetic construct
  misc_feature 1..120: note = Artificially Synthesized Probe
  source 1..120: mol_type = other DNA
tgttttttcggaagtttccatggtactggaattgtggagatagcagagtaacttaaagattctcagggctggggggtcactgaaatcctgagaaaacccaggcatctcacttcatggagc

SEQ ID NO: 21892 - DNA, 120 bp, synthetic construct
  misc_feature 1..120: note = Artificially Synthesized Probe
  source 1..120: mol_type = other DNA
gagacgggtggatcacttgaggccgaaagttcaagactagcctggccaacatggtgaaaccccacctctactaaaaacacaaaaattagccagacatggtggtacacacctgtaatccca

SEQ ID NO: 21893 - DNA, 120 bp, synthetic construct
  misc_feature 1..120: note = Artificially Synthesized Probe
  source 1..120: mol_type = other DNA
atgtctaaaatgagcagaaaaaataatgctacgacctgggaaatttgagtgtttgctcagattcccgttcagaaagcaaagctttgctaaagcagcagttggcatgtcctgtgcaggctt

SEQ ID NO: 21894 - DNA, 120 bp, synthetic construct
  misc_feature 1..120: note = Artificially Synthesized Probe
  source 1..120: mol_type = other DNA
cagtcttgaaggctggacccatatcctattcatttctggcataatatctgacatatattagtgttcgttgagtggatgaaggttggggtttgggagtagaaagagaggtgtgaataagcc

SEQ ID NO: 21895 - DNA, 120 bp, synthetic construct
  misc_feature 1..120: note = Artificially Synthesized Probe
  source 1..120: mol_type = other DNA
ccatggaaaaacccactctccccactgaagaaaccaccacctctgttgaagagactaccatctctacagaaaaactcaccatccccatggaaaaacccaccatctccacagaaaaaccca

SEQ ID NO: 21896 - DNA, 120 bp, synthetic construct
  misc_feature 1..120: note = Artificially Synthesized Probe
  source 1..120: mol_type = other DNA
tgaggctgtagtgagccatgattgtgtcactgcacttcagcttgggcaacagagcaagacatcgtcctaaaaaaaaaaaaaaaaaaaaaaagcaaaagcaattctgtgggttttagtata

SEQ ID NO: 21897 - DNA, 120 bp, synthetic construct
  misc_feature 1..120: note = Artificially Synthesized Probe
  source 1..120: mol_type = other DNA
gagccaccgcacccagccttcaggcctttttatggctaaataatatggtcctgtttcctagagaagaacttgagtttgggggtagaggagagacagggagactccctgagaaagccatgg

SEQ ID NO: 21898 - DNA, 120 bp, synthetic construct
  misc_feature 1..120: note = Artificially Synthesized Probe
  source 1..120: mol_type = other DNA
tccagctccatctgctccccatgtgaaggcaacagggatcaccggatagtcccaaggggtcagctcagaagcaatggttacatgatggcgaagttattcattcaatcttttctttttttt

SEQ ID NO: 21899 - DNA, 120 bp, synthetic construct
  misc_feature 1..120: note = Artificially Synthesized Probe
  source 1..120: mol_type = other DNA
aaaaaagaaaagtgcattaagctattcattaatgtgcagagcctcttcccagctgcaggtgttcttcccattgacatcagagcttctgcttgtcccttttgggactattatttctttccc

SEQ ID NO: 21900 - DNA, 120 bp, synthetic construct
  misc_feature 1..120: note = Artificially Synthesized Probe
  source 1..120: mol_type = other DNA
ccacttcactccagcctgggtgacagagtgagactccgtctcaaaaaaaaaaaaaaaaacaaaaaaacagacagacataaggctgggtgcagtggctcacgcctgtaataccagcatttt

SEQ ID NO: 21901 - DNA, 120 bp, synthetic construct
  misc_feature 1..120: note = Artificially Synthesized Probe
  source 1..120: mol_type = other DNA
ggtctacggagaccctcattatgtcacctttgacgggaggcactttggcttcatgggcaagtgcacttacatcttggcccagccctgtggcaactcaacaggtaggccctggagatgcca

SEQ ID NO: 21902 - DNA, 120 bp, synthetic construct
  misc_feature 1..120: note = Artificially Synthesized Probe
  source 1..120: mol_type = other DNA
aaatacacacataaatgaagttaaaaacaaaaaagcaaagaaggcagtggtagtggttagggagcacagacgccctggaggatgttccagccactgagtggagacagacacgctgcggct

SEQ ID NO: 21903 - DNA, 120 bp, synthetic construct
  misc_feature 1..120: note = Artificially Synthesized Probe
  source 1..120: mol_type = other DNA
gcactagtgagttctggaggctttctgaagggcagtcacctggtcccattctcgaaggaagagtggctccccagatggacaaaacaagggaaagcaagattcttcttcttcttttttttg

SEQ ID NO: 21904 - DNA, 120 bp, synthetic construct
  misc_feature 1..120: note = Artificially Synthesized Probe
  source 1..120: mol_type = other DNA
aataaataaataaataaagtgggagtgttttagggccagcaaggggtttgctgtggctggacaatgaacagaggggaaggaggcttgggggagggccatggggtcctcttgtccagtccg

SEQ ID NO: 21905 - DNA, 120 bp, synthetic construct
  misc_feature 1..120: note = Artificially Synthesized Probe
  source 1..120: mol_type = other DNA
tagcttggactacaccatgcccagctaactttaacaaaattttttggtagacatggggttctcaccagatggggggttgaccaggctgctggccctccccaacggttttttttttttttt

SEQ ID NO: 21906 - DNA, 120 bp, synthetic construct
  misc_feature 1..120: note = Artificially Synthesized Probe
  source 1..120: mol_type = other DNA
ggttagggatgagctggaagcgagctttgtctttagggagtttggggtgggtctcttgcaggtgtcagaagtaccaggtggtgaattccccgtcttgtgattcatctctgcagagcagca

SEQ ID NO: 21907 - DNA, 120 bp, synthetic construct
  misc_feature 1..120: note = Artificially Synthesized Probe
  source 1..120: mol_type = other DNA
ctgtctttaaaaaaaaaaaagtgtttctgtgcagcccaagtcatcacacgcaggcacacggtacaggccctaggcaggggaggcaacgaggctgcctcccagctcctggtgtggcccagc

SEQ ID NO: 21908 - DNA, 120 bp, synthetic construct
  misc_feature 1..120: note = Artificially Synthesized Probe
  source 1..120: mol_type = other DNA
tccaccctgcaggcagctacttcaaggtgagcggctgcgtggacctctcagccctgcagctagaaagggcctgctccctgctctcacaccccctgcaagctctttcttttcttttcgttt

SEQ ID NO: 21909 - DNA, 120 bp, synthetic construct
  misc_feature 1..120: note = Artificially Synthesized Probe
  source 1..120: mol_type = other DNA
ctcggatagatcaattttggttgaaatgatgaacagacccagaaatgatgtagtgactgaaaaaacgaatggatgccaagcttttgcagcgaatctcggagcttcaggaagagaggatgt

SEQ ID NO: 21910 - DNA, 120 bp, synthetic construct
  misc_feature 1..120: note = Artificially Synthesized Probe
  source 1..120: mol_type = other DNA
cctgggaagcacctgcagctgacccagaccctcttctctggactccctcctccctctgtgaaatacccaccagcaccagcccctcctgctcccagttttttgccgttttttttttttttt

SEQ ID NO: 21911 - DNA, 120 bp, synthetic construct
  misc_feature 1..120: note = Artificially Synthesized Probe
  source 1..120: mol_type = other DNA
gcaggaaactggcaatctctcctgtttagactctccaagattggagttggtaagaagctgttctgacttcccacgcccacgcctgctgatttctcccatgcttagtgatctctttggagg

SEQ ID NO: 21912 - DNA, 120 bp, synthetic construct
  misc_feature 1..120: note = Artificially Synthesized Probe
  source 1..120: mol_type = other DNA
tgtagccctcagtttctattctctctcatttagctgtttccttgtgggtggcaagccctccagctgccaggagaacagcatggcagacgcctggaacaagaactgtgcgatcttaataaa

SEQ ID NO: 21913 - DNA, 120 bp, synthetic construct
  misc_feature 1..120: note = Artificially Synthesized Probe
  source 1..120: mol_type = other DNA
tcactatgtagcccaggctgttctcgaactatggaccccaagggatcctcccccttggcctcccaagtagttgggatgacaggcataagccaccacgcctggccgttttttcttttttct

SEQ ID NO: 21914 - DNA, 120 bp, synthetic construct
  misc_feature 1..120: note = Artificially Synthesized Probe
  source 1..120: mol_type = other DNA
aggttttgactgaagtggatgtcgaatcagccccagggaagccacatggccctgttccttcccggcccctcccctggctcatctgccttctctcttcctgcaggacccttctctcaatgt

SEQ ID NO: 21915 - DNA, 120 bp, synthetic construct
  misc_feature 1..120: note = Artificially Synthesized Probe
  source 1..120: mol_type = other DNA
aagtgtacatttaaaaaattgttgccgggcgcggtggctcatgcctgtaatcccagcactttgggaggccgaggcaggtggatcacgaggtcaggagatcgagaccatcctggctaacac

SEQ ID NO: 21916 - DNA, 120 bp, synthetic construct
  misc_feature 1..120: note = Artificially Synthesized Probe
  source 1..120: mol_type = other DNA
attacatgtgcgagctaccgctcctggccactactaggagcttttgatgccccaaggtttgggggctggacatgccaccccactcttcctaatgctctcattttctttagctatgaggtg

SEQ ID NO: 21917 - DNA, 120 bp, synthetic construct
  misc_feature 1..120: note = Artificially Synthesized Probe
  source 1..120: mol_type = other DNA
gagaccccatctctacaaaaaaataaaagctaaaaagttaaaaagtaaaattaaagacattgcacctgtagtccctgctacttgggaggctgaggtaggaggatctcttgagcccaggaa

SEQ ID NO: 21918 - DNA, 120 bp, synthetic construct
  misc_feature 1..120: note = Artificially Synthesized Probe
  source 1..120: mol_type = other DNA
tccagcagcatctacagcattgttaacatcaagatcggggtgcaagtcaagtttgacgggaatcatctcttagagattgaaatccccacaacctactatggaaaggtgaggaaaacatct

SEQ ID NO: 21919 - DNA, 120 bp, synthetic construct
  misc_feature 1..120: note = Artificially Synthesized Probe
  source 1..120: mol_type = other DNA
taatgatgcccagcgatgaagtagcaaatagtgacagtgaatttgtgaacagttggaaagataaggacattgacccaaggtagtggtcccctaagaccctctaggttttctttctttttc

SEQ ID NO: 21920 - DNA, 120 bp, synthetic construct
  misc_feature 1..120: note = Artificially Synthesized Probe
  source 1..120: mol_type = other DNA
tgcctggccacccctccagcttttcatagcaacatgagctagggagccagactgtagggcacacctggggcaggaagaccagaatgttccttttttcttcttcaatttttaaattttttg

SEQ ID NO: 21921 - DNA, 120 bp, synthetic construct
  misc_feature 1..120: note = Artificially Synthesized Probe
  source 1..120: mol_type = other DNA
tgtactccagactgggcgacagattgggaagcaaaaaaggaaatctgagagaagacgaggccgatggaagattggccagagctcagaccagcttccctgtgaacaccagaagggttagga

SEQ ID NO: 21922 - DNA, 120 bp, synthetic construct
  misc_feature 1..120: note = Artificially Synthesized Probe
  source 1..120: mol_type = other DNA
aaagaaaaaaaaattttgtgtcatagtagggggacggctgtccctaggctgattcttttcccttcccagttgtcagagtctcctggtagatgagcagcagattccagcggaacagcagga

SEQ ID NO: 21923 - DNA, 120 bp, synthetic construct
  misc_feature 1..120: note = Artificially Synthesized Probe
  source 1..120: mol_type = other DNA
caaaaaaagataccagtgtaccgtctccctcccaccctcaccccatgggcctggttcatgtctcagtatttttcccaagaccacttatttatgcatatataaacaaattcaaatttatat

SEQ ID NO: 21924 - DNA, 120 bp, synthetic construct
  misc_feature 1..120: note = Artificially Synthesized Probe
  source 1..120: mol_type = other DNA
tcagctgccccacagctgctgggcatcactgtgggtccagtgtgaccagatcctctgatttttttttttgaaagaagctataagcctgagtttttatttgacattgctatactttttttt

SEQ ID NO: 21925 - DNA, 120 bp, synthetic construct
  misc_feature 1..120: note = Artificially Synthesized Probe
  source 1..120: mol_type = other DNA
accatttttccattgagtcgttggtctttactgaactatttcatggaagtcctttatctgttatggaaagtagacctttattagtgctctgagttacacaaagttttccagtcctttttg

SEQ ID NO: 21926 - DNA, 120 bp, synthetic construct
  misc_feature 1..120: note = Artificially Synthesized Probe
  source 1..120: mol_type = other DNA
ttatggagggccattcactactgatggctcttttttttagggagttcctggcttttctggtttgcttatgtcttcagctcaactttgaaatcatcttgtcctattaaaagcacacacata

SEQ ID NO: 21927 - DNA, 120 bp, synthetic construct
  misc_feature 1..120: note = Artificially Synthesized Probe
  source 1..120: mol_type = other DNA
tcagtaaatgtttgctgaatgaataacaaaagaacaaaaaaagctccccaagccttgttggtcatccacccatagcttggtttgtacagcccctgcccaccttggccccctgtgaccctc

SEQ ID NO: 21928 - DNA, 120 bp, synthetic construct
  misc_feature 1..120: note = Artificially Synthesized Probe
  source 1..120: mol_type = other DNA
aatccaaacaagcagcacatggcatggtatagtggaaagaccatgggctcatttcagcctaacctaggattgaatcctgatggtgccactgatgagtcagatgacctctgttatatccgt

SEQ ID NO: 21929 - DNA, 120 bp, synthetic construct
  misc_feature 1..120: note = Artificially Synthesized Probe
  source 1..120: mol_type = other DNA
gctcttgctaactctgtggccatgtgccaggtcctgatcccctctgggaccctccacctgcagggcaaaaagaggggactggtcaaggagatcctccaaagtttttcttttcttgtttgt

SEQ ID NO: 21930 - DNA, 120 bp, synthetic construct
  misc_feature 1..120: note = Artificially Synthesized Probe
  source 1..120: mol_type = other DNA
aattaaaaaaagaaaagaaaggatccagggagcctgagcctaagagggtggccacaggggatgccaccgtgggggagggactctggggactgtcacacctgggcagggtcccttctcagt

SEQ ID NO: 21931 - DNA, 120 bp, synthetic construct
  misc_feature 1..120: note = Artificially Synthesized Probe
  source 1..120: mol_type = other DNA
agaggctggcaagaaacaagaggaagagaggaggaggacagagcgtgaggtgtgtgaaggtcaatcctgggctgaagaaccaatggcatccactacaccaatgtatttttattttttgag

SEQ ID NO: 21932 - DNA, 120 bp, synthetic construct
  misc_feature 1..120: note = Artificially Synthesized Probe
  source 1..120: mol_type = other DNA
ctttgagctggtcgtcagctttggtggaaggaaaaatgcaggtaatggagagaggggaaagaagagcaaaagggccatttctgggaagtgggagggaaaatcctatttaagacaggcaaa

SEQ ID NO: 21933 - DNA, 120 bp, synthetic construct
  misc_feature 1..120: note = Artificially Synthesized Probe
  source 1..120: mol_type = other DNA
tgggcacggtggctcacacctgtaatcccagcactttgggaggccgaggcaggcagatcacgaggtcaggagatcgagaccatcctggctaacacggtgagaccctgtctctactgaaaa

SEQ ID NO: 21934 - DNA, 120 bp, synthetic construct
  misc_feature 1..120: note = Artificially Synthesized Probe
  source 1..120: mol_type = other DNA
cccaattccgtcattccctctcatctgactctgggggctcccgctcaatggaaatctctctctgtgcccctgccctgccctcagcctgccttcccagttatttttccttcttccttcttc

SEQ ID NO: 21935 - DNA, 120 bp, synthetic construct
  misc_feature 1..120: note = Artificially Synthesized Probe
  source 1..120: mol_type = other DNA
tctgtgtggttcactcctccgttctccctgtggcctaatttccttgtgaccctcactggacaccgactgatgtctttctgtttggggttccaggctctcttctgcaggggtgggtctcct

SEQ ID NO: 21936 - DNA, 120 bp, synthetic construct
  misc_feature 1..120: note = Artificially Synthesized Probe
  source 1..120: mol_type = other DNA
gggaggatcattggaacccaggagttggaggctgcagtgagccgtgatcacgccagcctgggcactccagcctgggcaacagagtgactccatctctaaaaaaaatttaaaaaaataaaa

SEQ ID NO: 21937 - DNA, 120 bp, synthetic construct
  misc_feature 1..120: note = Artificially Synthesized Probe
  source 1..120: mol_type = other DNA
aagcatccatgacctaccgaatccttccctagcgttccttcccatgatctccttcagccctgatggttagcacagcactcctaatttatacataacaaacatggagttcagagaggttaa

SEQ ID NO: 21938 - DNA, 120 bp, synthetic construct
  misc_feature 1..120: note = Artificially Synthesized Probe
  source 1..120: mol_type = other DNA
aaagccaggtgagggcatcgtccaaggccctgtaccctcacaacctcttcctggccgacaaccacagaatgattctatatgtattatattcacatatagaatgatatgtattataatatt

SEQ ID NO: 21939 - DNA, 120 bp, synthetic construct
  misc_feature 1..120: note = Artificially Synthesized Probe
  source 1..120: mol_type = other DNA
ttatcttgcctaagattgaagacggggtaacttgtgtacatgtatattccaggacacactctgaaagatcagatttggtaggtctggagtgggcccaggaatctgctttttttttttttt

SEQ ID NO: 21940 - DNA, 120 bp, synthetic construct
  misc_feature 1..120: note = Artificially Synthesized Probe
  source 1..120: mol_type = other DNA
aggcttatggcaaacagaaaacattgcgggggttggggagggggcactaagaccttggagtccctggaggtgagaacctcctggaggaagaagcagacacacctagagatttagagagat

SEQ ID NO: 21941 - DNA, 120 bp, synthetic construct
  misc_feature 1..120: note = Artificially Synthesized Probe
  source 1..120: mol_type = other DNA
aggagctgtgggagaagctgtggtctggggatcccgtccctgctttaccctgttcggaatgagatcgaggccccatcaaaacagagttcatgtgagcaaatggggactcattaatgggac

SEQ ID NO: 21942 - DNA, 120 bp, synthetic construct
  misc_feature 1..120: note = Artificially Synthesized Probe
  source 1..120: mol_type = other DNA
tgtgctacaagaattcaacgttagtgagttcaagaccatgcctttagacctgcctgttgtaggaccaaatacaaatcagaagaggcttaatgctttctctttagaatgaggaaagaattt

SEQ ID NO: 21943 - DNA, 120 bp, synthetic construct
  misc_feature 1..120: note = Artificially Synthesized Probe
  source 1..120: mol_type = other DNA
atgattttgctgttatattttccacacgctgtcaagaattactagatgttatacacaaagtgcccaccaggcttcgttttagagaagaaccttctttctcaggattccagtcacaaccca

SEQ ID NO: 21944 - DNA, 120 bp, synthetic construct
  misc_feature 1..120: note = Artificially Synthesized Probe
  source 1..120: mol_type = other DNA
gagaaacataagggttttggttaaattccttgttactgtatgttatacaaaagacagagaagtggctaaaatagattaaaatttcacaaattctgggaatcaaatttctcttgggcaggc

SEQ ID NO: 21945 - DNA, 120 bp, synthetic construct
  misc_feature 1..120: note = Artificially Synthesized Probe
  source 1..120: mol_type = other DNA
caggatgttatgagaattaacacacataatatgagcttcccatcacagtgctctgtgacatacatctgagcacatattacatgccccataaagatggcattaatgcagatgcacatgttg

SEQ ID NO: 21946 - DNA, 120 bp, synthetic construct
  misc_feature 1..120: note = Artificially Synthesized Probe
  source 1..120: mol_type = other DNA
aagttccttgcatgattaaaaaagtccttatgttttaaaatcagttccttgcatgattctacagcaaggccagggtgaagcatgagggcttccagatactttagtgaaaggtgagttcac

SEQ ID NO: 21947 - DNA, 120 bp, synthetic construct
  misc_feature 1..120: note = Artificially Synthesized Probe
  source 1..120: mol_type = other DNA
ttctgcttagcgtagtactaggttggtaattggagaatccccatcaatagtcatgttattattttttttaaaataaaacaggtgttgctatctctaacccagacctggtcacctgtctgg

SEQ ID NO: 21948 - DNA, 120 bp, synthetic construct
  misc_feature 1..120: note = Artificially Synthesized Probe
  source 1..120: mol_type = other DNA
gagctaatgtccactttatcgcttataaggggctgcatgatgtgactgctgttccattgcttttggagacactggaatatttgtgttactgaggagctgtatgtcaaagtatttttttca

SEQ ID NO: 21949 - DNA, 120 bp, synthetic construct
  misc_feature 1..120: note = Artificially Synthesized Probe
  source 1..120: mol_type = other DNA
tccttgcattcaaagggttggaaaccactggattaaagtatctactcaccttctatatttcttaaatgcactgtatcattaacaagcataaatgtgctatgtcattaaccagcatagaac

SEQ ID NO: 21950 - DNA, 120 bp, synthetic construct
  misc_feature 1..120: note = Artificially Synthesized Probe
  source 1..120: mol_type = other DNA
tttcactcttgttgcccaggctggagtgcagtggcacgctgttggctcaccacagcctctgggtcctgggttcaagcaattctcctgcctcagcctccgaagtagctggaattacaggca

SEQ ID NO: 21951 - DNA, 120 bp, synthetic construct
  misc_feature 1..120: note = Artificially Synthesized Probe
  source 1..120: mol_type = other DNA
aacaaggtttttccatatgttttcttcatgagttttaagatttcatgtcttaatttcagtctttgttttgaagtctgaaattagaaagcatgatgcctgccagacaaggtggctcacacc

SEQ ID NO: 21952 - DNA, 120 bp, synthetic construct
  misc_feature 1..120: note = Artificially Synthesized Probe
  source 1..120: mol_type = other DNA
taactttcttatttttatactattgcaaatggaaatggtttctatttttggaaagtttgtttttactctatggaaatgcaagaaatatttgtatgtggtgccaggtgcagtggctcattt

SEQ ID NO: 21953 - DNA, 120 bp, synthetic construct
  misc_feature 1..120: note = Artificially Synthesized Probe
  source 1..120: mol_type = other DNA
attaccagagatttggacagtcatggattatttctgggccctggagagattagatttccttgaggatattaatctatatggcaggcagtagactagggttttgaagtttgtctgcatatg

SEQ ID NO: 21954 - DNA, 120 bp, synthetic construct
  misc_feature 1..120: note = Artificially Synthesized Probe
  source 1..120: mol_type = other DNA
catgatccgtccacctcagcctcccaaagtgctgggattacaggcgtgagccaccgcgcccggcctgagatcttattttttaaaagcatgtggcacctcccctctcactcttgtcttgct

SEQ ID NO: 21955 - DNA, 120 bp, synthetic construct
  misc_feature 1..120: note = Artificially Synthesized Probe
  source 1..120: mol_type = other DNA
gtaggtaagaagtgagtttattctaaggagtattgcagtggggaaagcatcaagcataagacctgaagtcatctccaaaatgaggcagaaaaaggctatttttcatacagaggagcaaac

SEQ ID NO: 21956 - DNA, 120 bp, synthetic construct
  misc_feature 1..120: note = Artificially Synthesized Probe
  source 1..120: mol_type = other DNA
caaaggattggagagaccttagtcatagctatttaccaagattcactacccacctcatcttttcccccactttcctttgtcctatacattttttccctttggcttttactgagctgtatt

SEQ ID NO: 21957 - DNA, 120 bp, synthetic construct
  misc_feature 1..120: note = Artificially Synthesized Probe
  source 1..120: mol_type = other DNA
atgcacacatttataagtcagaggtgccctgcctgggtgaatatctagagcactaaccagtccttttaccaactgtgcactgatcctcacccatggttcttgatagcaccttttcttatt

SEQ ID NO: 21958 - DNA, 120 bp, synthetic construct
  misc_feature 1..120: note = Artificially Synthesized Probe
  source 1..120: mol_type = other DNA
ataaaattgtgatttaaaaacttgatatgatttcagtctgtttaaaaatgaaaagacttgtttatttttgttgtgggccagatttatgacaggtcttggagagtgttccatgtgtgtttg

SEQ ID NO: 21959 - DNA, 120 bp, synthetic construct
  misc_feature 1..120: note = Artificially Synthesized Probe
  source 1..120: mol_type = other DNA
tttccacatcacaacatgaccaaagtcttgaggatgatggaaggtgtacaccagagctcacttttgtaatagacccactctcatgatgactaacgcactcttagaattataatactaggc

SEQ ID NO: 21960 - DNA, 120 bp, synthetic construct
  misc_feature 1..120: note = Artificially Synthesized Probe
  source 1..120: mol_type = other DNA
gaggggacactaaaaccatagcagtgtgtttttattgcatagctaaatctttctatatttaaatgaattaccgattgataagaacttattactgccattttattcattgtttactgacca

SEQ ID NO: 21961 - DNA, 120 bp, synthetic construct
  misc_feature 1..120: note = Artificially Synthesized Probe
  source 1..120: mol_type = other DNA
cattatacctttacacaattaaaaaaatttttttttctctgtctcctgaacctcttaagagatgtacattcctacagataattatgcagtgtgggacccaaatgcttcagtcactctttc

SEQ ID NO: 21962 - DNA, 120 bp, synthetic construct
  misc_feature 1..120: note = Artificially Synthesized Probe
  source 1..120: mol_type = other DNA
acttctttcagtcattacagactagtttagggaggtaaatatcttctattggttttctgggctgatgagattttcactaggatcacagtcaactgcattggatcctggtcacgtaactac

SEQ ID NO: 21963 - DNA, 120 bp, synthetic construct
  misc_feature 1..120: note = Artificially Synthesized Probe
  source 1..120: mol_type = other DNA
ataaacaaaaccaaatgatagctatgtttacaatgagaattaattacatttcattctgtattgtgggcaagcatgccactcaagcaagggcacaccctctcaatacagccctcctcagtc

SEQ ID NO: 21964 - DNA, 120 bp, synthetic construct
  misc_feature 1..120: note = Artificially Synthesized Probe
  source 1..120: mol_type = other DNA
atatggtatttgcctgtataaatattgacctactttgtttataaattactcattttcttgggtagtcatcagtatttccttgtgtagatgagcagtcaaagaaactgtaaatttaccatc

SEQ ID NO: 21965 - DNA, 120 bp, synthetic construct
  misc_feature 1..120: note = Artificially Synthesized Probe
  source 1..120: mol_type = other DNA
atccagtctatcattgatggacatttgcgttggttccaagtctttgctattgtgaatagtgccgcagtaaacatacatgtgcatgtgtctttatagcagcatgatttatagtcctttggg

SEQ ID NO: 21966 - DNA, 120 bp, synthetic construct
  misc_feature 1..120: note = Artificially Synthesized Probe
  source 1..120: mol_type = other DNA
ttttggtaccagtaccatgctgttttggttactgtagccttgtagcatgatttgaagtcaggtagcgtgatgcctccagctttgttcttttggcttaggattgtcttggcaatgcaggct

SEQ ID NO: 21967 - DNA, 120 bp, synthetic construct
  misc_feature 1..120: note = Artificially Synthesized Probe
  source 1..120: mol_type = other DNA
ctccagcctgcacgacacagtgagactctgtctccaaaaaaaaaaaaaggcgggggggaatgcttctagtttttgcccatttagtatgatattggctgtgggtttgtcataaatagctct

SEQ ID NO: 21968 - DNA, 120 bp, synthetic construct
  misc_feature 1..120: note = Artificially Synthesized Probe
  source 1..120: mol_type = other DNA
ttgtcccagagggtcacctgcctgtatgaggtgtcagtcgactcctactgggagatgtctcccagttaggctacataggggtcagggacccacttgaggaggcagtctgcccattctcag

SEQ ID NO: 21969 - DNA, 120 bp, synthetic construct
  misc_feature 1..120: note = Artificially Synthesized Probe
  source 1..120: mol_type = other DNA
attcagccatcttggaacgggaggtctctgctctatttttaaattgtgtgttatttttgttgttaagtttgttaaatattctataagtttatcttttgttgtgtatatttcacaaatatt

SEQ ID NO: 21970 - DNA, 120 bp, synthetic construct
  misc_feature 1..120: note = Artificially Synthesized Probe
  source 1..120: mol_type = other DNA
cactgaacctggccaactggtggatgtagaagcaacactggcaaaattgaacatggctttgtgatttaagaaactcaacgaattaggtatagatcatatgtacctcaatacagtaaagac

SEQ ID NO: 21971 - DNA, 120 bp, synthetic construct
  misc_feature 1..120: note = Artificially Synthesized Probe
  source 1..120: mol_type = other DNA
taccttagtcatattatatcgatattcttatgcactctgtctggaatatgtttatcttgcaaggctaacactcatacacattaaacaactacctactttttctgttttctggccctttac

SEQ ID NO: 21972 - DNA, 120 bp, synthetic construct
  misc_feature 1..120: note = Artificially Synthesized Probe
  source 1..120: mol_type = other DNA
tcagtaacaatgctacaataattgtgagtgtccaaattactctttatatgaccatatgtgtgagagttcatatttttgccggattttattgatttaggtgttcaccttcatactcatacc

SEQ ID NO: 21973 - DNA, 120 bp, synthetic construct
  misc_feature 1..120: note = Artificially Synthesized Probe
  source 1..120: mol_type = other DNA
ttggacctgttctcctcttatttggttatttccatgaaatgtcttctttcatcttgcctttttcagtctcctttaatcattagacctcaagtgactcttgtagaaaaacaagttggatct

SEQ ID NO: 21974 - DNA, 120 bp, synthetic construct
  misc_feature 1..120: note = Artificially Synthesized Probe
  source 1..120: mol_type = other DNA
cagcacgttaactatatcgcaactttctcttgtctgaaaaaatgttgacagattcacttgttatcttataagagcatacttacaaatcacacatcacttttatcttgccgcttctaagat

SEQ ID NO: 21975 - DNA, 120 bp, synthetic construct
  misc_feature 1..120: note = Artificially Synthesized Probe
  source 1..120: mol_type = other DNA
gccaccatgcccgttcccttttctgaaaatttttaaattgttggactgtgttgttctaatattttgtatacattgtcatgtttggttgttatttgtacattaacaaaaagctatttgtca

SEQ ID NO: 21976 - DNA, 120 bp, synthetic construct
  misc_feature 1..120: note = Artificially Synthesized Probe
  source 1..120: mol_type = other DNA
atatgtgtatcagtatttttcttctctttaaaggaagaagccaggagttgatacttcactcctaatggcacagtgctatattggggaggaggaagagctgttggtgggtaaatgtaacaa

SEQ ID NO: 21977 - DNA, 120 bp, synthetic construct
  misc_feature 1..120: note = Artificially Synthesized Probe
  source 1..120: mol_type = other DNA
ggagagcggccctacaaatgtgatgaatgtggcaaagcctttggacggtccagggtcctgaatgaacataaaaaaattcatactggagagaaaccctacaaatgtgaagaatgtggcaaa

SEQ ID NO: 21978 - DNA, 120 bp, synthetic construct
  misc_feature 1..120: note = Artificially Synthesized Probe
  source 1..120: mol_type = other DNA
caaagccttcaataggttctcaacccttactgtgcacaagataattcattctggggaaaaaaatgctacaaatgtgaaaaacgtggcagagccttcagaccatccacaaacctttatgaa

SEQ ID NO: 21979 - DNA, 120 bp, synthetic construct
  misc_feature 1..120: note = Artificially Synthesized Probe
  source 1..120: mol_type = other DNA
gaattgttgctgcatcagagataagagagattctttttcattaggtgggcattatttgtgaatttttacaagaaagagtgaggacagaaatgaaagatccatgatgaaaatctagcagag

SEQ ID NO: 21980 - DNA, 120 bp, synthetic construct
  misc_feature 1..120: note = Artificially Synthesized Probe
  source 1..120: mol_type = other DNA
aagtgtcattatgccaccaacttaaacctatcccaccttactcaatggtgtaggtaaaagatggtaacaatggtaacatagttgaatgacatttttagtattctctttttccagtggctt

SEQ ID NO: 21981 - DNA, 120 bp, synthetic construct
  misc_feature 1..120: note = Artificially Synthesized Probe
  source 1..120: mol_type = other DNA
cttcagttttgtgatatctttatgatttatccccagctatgtatgcctcagagcctttcttcatttttgcgttatggctagtttgtcactgttctcttcattccacgtaatttcacgtgg

SEQ ID NO: 21982 - DNA, 120 bp, synthetic construct
  misc_feature 1..120: note = Artificially Synthesized Probe
  source 1..120: mol_type = other DNA
gcatttcatgggctacagttttcatttttactcacctaactttatccaagtccttggtcaccttctctggaaaaaaatttgaagattatggcagctgttgaatccaaacagtttctcagt

SEQ ID NO: 21983 - DNA, 120 bp, synthetic construct
  misc_feature 1..120: note = Artificially Synthesized Probe
  source 1..120: mol_type = other DNA
tgcccagcctctcagtgatttttgatgcaaattcatttactgtgttcacgaagtggccaattttgggacctttagcatcacttgcccttttagtgtcttacatatgtatgattaccatca

SEQ ID NO: 21984 - DNA, 120 bp, synthetic construct
  misc_feature 1..120: note = Artificially Synthesized Probe
  source 1..120: mol_type = other DNA
agcatagtgtcttccacatttatccacattgtttcaaatgaaaagatttcctcccttttaacgttgaattgtatttccttgtgtataccacgtttttggaaaaatacattcatttcttgg

SEQ ID NO: 21985 - DNA, 120 bp, synthetic construct
  misc_feature 1..120: note = Artificially Synthesized Probe
  source 1..120: mol_type = other DNA
accaattatcttacactggctccccaaataggtttttatttgtttataaaactttaaatttatctctaggaacctcagccgagcagtcagaactcacagctctgaccaaacccctagaac

SEQ ID NO: 21986 - DNA, 120 bp, synthetic construct
  misc_feature 1..120: note = Artificially Synthesized Probe
  source 1..120: mol_type = other DNA
cgaagcatactctgctggttggctaaattgcactgggaaaaaatagcagcagccctattgctatgtcacttgcctgcagagcaaaagttgattcaggaacagtaatttgactttgtctat

SEQ ID NO: 21987 - DNA, 120 bp, synthetic construct
  misc_feature 1..120: note = Artificially Synthesized Probe
  source 1..120: mol_type = other DNA
atcctgagctagtatgtttcgggattgttatgcagttataagttagtaatatatacacccattaaagacaggatctcaggacagattgatcacaaataacctgcaaatgcttgccaccct

SEQ ID NO: 21988 - DNA, 120 bp, synthetic construct
  misc_feature 1..120: note = Artificially Synthesized Probe
  source 1..120: mol_type = other DNA
atgcatgtgattggtacttaaactcacacagtgccccataccacaggagaaaaacacacagttccagcctggcaattaggtccaaagataaatagcaaaacaagaagtttgcctttaatc

SEQ ID NO: 21989 - DNA, 120 bp, synthetic construct
  misc_feature 1..120: note = Artificially Synthesized Probe
  source 1..120: mol_type = other DNA
gctgcggacctagcgtggcctcggtttcccctgccgggttcgcctgtccgcgcagaaacagtcccccgttccttcgggacgcacccctgcaccgaaatcgggccgttctcgcgtgcccgg

SEQ ID NO: 21990 - DNA, 120 bp, synthetic construct
  misc_feature 1..120: note = Artificially Synthesized Probe
  source 1..120: mol_type = other DNA
gcaaacaataggacagttccattggtaccttttaagcagagcaaagtggctccacttcaaaaacactggttcttgctttatgccaaacacccttctaggtgttggaaatagtaatatact

SEQ ID NO: 21991 - DNA, 120 bp, synthetic construct
  misc_feature 1..120: note = Artificially Synthesized Probe
  source 1..120: mol_type = other DNA
agtggaattaagtaatgcattcaggaaacatttaccgcatgcttgctttgtgccagccattgcactagagtaaaatgatgaacaagatagtggggaatatagacaagcaaatgcgcattg

SEQ ID NO: 21992 - DNA, 120 bp, synthetic construct
  misc_feature 1..120: note = Artificially Synthesized Probe
  source 1..120: mol_type = other DNA
ttcacaagattatggcaagaccggccttcatgtgtatgcatcccaagtctcttggcatgatgtcttactcatagaagggggtgttaggccattcttgcattgcctaaaatggagagatag

SEQ ID NO: 21993 - DNA, 120 bp, synthetic construct
  misc_feature 1..120: note = Artificially Synthesized Probe
  source 1..120: mol_type = other DNA
tgagcactgaagggagaaccttttgcgggagaaggtagagagagatgatggtctccaacattgtcttctttaagtgtcatttttcctttagaggattattgcttttattcatacagtagt

SEQ ID NO: 21994 - DNA, 120 bp, synthetic construct
  misc_feature 1..120: note = Artificially Synthesized Probe
  source 1..120: mol_type = other DNA
ggagacttctcagaggaaaggaagtcccccctgcccttcagttatttatttagttgtttacaattgaaaaaccaatgcatgcacacaacgaaaaattgcaaatagtacagtgatgcctca

SEQ ID NO: 21995 - DNA, 120 bp, synthetic construct
  misc_feature 1..120: note = Artificially Synthesized Probe
  source 1..120: mol_type = other DNA
gataaaaatttaggcatcatcattagtggatgggaatgaaaaccatggaagttcacttggtcactaaggaagaggtggatgaagagataagagaggtcacctcctcacaaagtacaaggt

SEQ ID NO: 21996 - DNA, 120 bp, synthetic construct
  misc_feature 1..120: note = Artificially Synthesized Probe
  source 1..120: mol_type = other DNA
taacttcactatgaaatgcgtattatcttgtagcttttgtgtgagtgctaattggtggaatgtggataagtcttcatccaggagctgacaaagccagccctcactctgttatagctgtta

SEQ ID NO: 21997 - DNA, 120 bp, synthetic construct
  misc_feature 1..120: note = Artificially Synthesized Probe
  source 1..120: mol_type = other DNA
tttcatacttgttttatttcttgtgatgtcatcacacatattctttatgtgacgacacagagcacagtcctgaactgtggtggagtttattatgtcggcacacctgaggagacatttgag

SEQ ID NO: 21998 - DNA, 120 bp, synthetic construct
  misc_feature 1..120: note = Artificially Synthesized Probe
  source 1..120: mol_type = other DNA
atcacctgatgtggcgttgatctctcaggccgcttgtaagaggagattaagtaaaccttcccaggtttataccagactaaccttttccctagtactcggataatctagttctttaatttt

SEQ ID NO: 21999 - DNA, 120 bp, synthetic construct
  misc_feature 1..120: note = Artificially Synthesized Probe
  source 1..120: mol_type = other DNA
caatggttccattgatatcctttttttctggtccaggatccaacccagtatcccacattgtattttgttatgtctccttggtctctccagtctgtgatagtgttcttttagatttctttt

SEQ ID NO: 22000 - DNA, 120 bp, synthetic construct
  misc_feature 1..120: note = Artificially Synthesized Probe
  source 1..120: mol_type = other DNA
gaaggtttgttattatttattagaaccaaacatagcaggggagaggtaaaggcttaagctgttggaagtacatgcatttgctgatctccgtcaatcaatcagtattgaattggcagccga

SEQ ID NO: 22001 - DNA, 120 bp, synthetic construct
  misc_feature 1..120: note = Artificially Synthesized Probe
  source 1..120: mol_type = other DNA
taacagtattcaagtagatggattgccacattagctttacttttaaccatcccccattgttggatagtaggttgtttccagtttttctctacagttcatggtgaacatcctgaaacccac

SEQ ID NO: 22002 - DNA, 120 bp, synthetic construct
  misc_feature 1..120: note = Artificially Synthesized Probe
  source 1..120: mol_type = other DNA
atagaaggcaaaactatgaaactttcagaaggcaatgcaggacagtagttgtatgactctggtataggaaaggggtcttaaaaagatcacagagggtgcagaccataaaggaaaagatca

SEQ ID NO: 22003 - DNA, 120 bp, synthetic construct
  misc_feature 1..120: note = Artificially Synthesized Probe
  source 1..120: mol_type = other DNA
catactctacgtagggacttttctgtttgtgtgaaaaagatttgatggagatggagagacaggttcttggaggaatgtgatagaacttaactcttcagttgacctcctgtaaagactcag

SEQ ID NO: 22004 - DNA, 120 bp, synthetic construct
  misc_feature 1..120: note = Artificially Synthesized Probe
  source 1..120: mol_type = other DNA
ttgatactgagtgctgaaattgtcaaaaccatgagaactgtcaagcatttgtagttatgtaatgtcatgctttctagtagaatcggcacctcacttagaagttgacagcccatgagactc

SEQ ID NO: 22005 - DNA, 120 bp, synthetic construct
  misc_feature 1..120: note = Artificially Synthesized Probe
  source 1..120: mol_type = other DNA
aacaacctaggatttcaagatggtaggtcagagctatgtttgctaaaagtggcattcagaataattttatgtggcaaattatgatggaggtcaatgtgtttggagtccctgtgtgacagc

SEQ ID NO: 22006 - DNA, 120 bp, synthetic construct
  misc_feature 1..120: note = Artificially Synthesized Probe
  source 1..120: mol_type = other DNA
aagctcaaagacagagcttcaaggtggaaggagccaggatctctagatcacagcctggagcagaatgtttgctgaccaggaatacctgccttttcaagagtgagataaaaacttttatca

SEQ ID NO: 22007 - DNA, 120 bp, synthetic construct
  misc_feature 1..120: note = Artificially Synthesized Probe
  source 1..120: mol_type = other DNA
tatgggcaccacagtggacaggaattgacagaaagattcaagtggcaaaggagtttgaaacttcttagtacagagacatagctgtactaggaaaggtataattttcagtaaaccttcagt

SEQ ID NO: 22008 - DNA, 120 bp, synthetic construct
  misc_feature 1..120: note = Artificially Synthesized Probe
  source 1..120: mol_type = other DNA
ttctcttacgtgactgtggtgctattttcagttttataaatttacgttggtgctttttatcagttggcctaaaatgtcctcaatagcattttcctcctgccagcacagggtccagtctga

SEQ ID NO: 22009 - DNA, 120 bp, synthetic construct
  misc_feature 1..120: note = Artificially Synthesized Probe
  source 1..120: mol_type = other DNA
gagtatttaatgtgaggtccagcgaaccataggtaactttcttggtgcagatgagtgtttgaccaaatttgaatcccaagtgtctctgactgttaaaacaagtcaccttctgatgttcat

SEQ ID NO: 22010 - DNA, 120 bp, synthetic construct
  misc_feature 1..120: note = Artificially Synthesized Probe
  source 1..120: mol_type = other DNA
gctcagccaagttttgtgagttgccctgtgtcctacagcttattggtccagttggaatgaaaaccatggcttgcttactgaagcttaatgttctttttcaaaagtgttaaacattttcac

SEQ ID NO: 22011 - DNA, 120 bp, synthetic construct
  misc_feature 1..120: note = Artificially Synthesized Probe
  source 1..120: mol_type = other DNA
tgattttgcaggccaaatttgatttgttgttttataaagctgttagtacatctgcatgaagagtgctggctgggtggaagtctttgataatgaaaggaatgctggtctcccgttctgttt

SEQ ID NO: 22012 - DNA, 120 bp, synthetic construct
  misc_feature 1..120: note = Artificially Synthesized Probe
  source 1..120: mol_type = other DNA
ttcctttaggagttacctattgctacataacaaatttggccaaaacatagttgcttaaagcaataagcatttatcatctctcagtgtctgtggatgaggaattggagggtgggcttgcct

SEQ ID NO: 22013 - DNA, 120 bp, synthetic construct
  misc_feature 1..120: note = Artificially Synthesized Probe
  source 1..120: mol_type = other DNA
actacaactaatactaagctgcctttatgcatggacttgatggctctattaaatgaggtaataccataagggcaagacacattttcaacaggaagtcagctgacgtgacagatgaagaaa

SEQ ID NO: 22014 - DNA, 120 bp, synthetic construct
  misc_feature 1..120: note = Artificially Synthesized Probe
  source 1..120: mol_type = other DNA
aagggaaaaatgtcatgcatgccgccctagcgtgtgaaatggtttcatttgactgaaataattgtttctcaaattcttcccgaaatgccttctttgatatgcagaaagaaacgtcctgtg

SEQ ID NO: 22015 - DNA, 120 bp, synthetic construct
  misc_feature 1..120: note = Artificially Synthesized Probe
  source 1..120: mol_type = other DNA
ctttaaaaaagacccgttccggctctgttggtaatatgctacttgttctagtaacctttcccagtgaactaaaaacaacttttacatcagcataaactttctcacctgctgaatcccttc

SEQ ID NO: 22016 - DNA, 120 bp, synthetic construct
  misc_feature 1..120: note = Artificially Synthesized Probe
  source 1..120: mol_type = other DNA
actgcagcagtgtttgcagatgaagacgtggtagactgggcatggaaagggagttcctgctgttttagactaagcattaaaatgtttttaagcagaacttctgttacagattttttaaac

SEQ ID NO: 22017 - DNA, 120 bp, synthetic construct
  misc_feature 1..120: note = Artificially Synthesized Probe
  source 1..120: mol_type = other DNA
ttaaaaacacatggatattcttgctcaagtatactgctgtagatcttagtttgtattgtacacatgatcacgtatggccttgtattgaggtcactggtgtgtatgtcatgtgactcccgc

SEQ ID NO: 22018 - DNA, 120 bp, synthetic construct
  misc_feature 1..120: note = Artificially Synthesized Probe
  source 1..120: mol_type = other DNA
atctcttacagtgtaagctctcacaggactaagattttgggtggtgtttgctgtatatccagcatctacaggcaagaatacttgatatactgtaggcactaagtgaaggttttgaaatgg

SEQ ID NO: 22019 - DNA, 120 bp, synthetic construct
  misc_feature 1..120: note = Artificially Synthesized Probe
  source 1..120: mol_type = other DNA
ttttaaaacactgttatcacctcagaaagaaacctcttaccctttagctatcattctccattctgcctgcctacccgcagccctgagaaaccaagggctgcctatttttctgtctgtata

SEQ ID NO: 22020 - DNA, 120 bp, synthetic construct
  misc_feature 1..120: note = Artificially Synthesized Probe
  source 1..120: mol_type = other DNA
acttgtttttttctcgtattgttcgcgcttccagtgtcctgcattataagcatatttttgttgcctgattttagctgagtcaaagcaataggctccatttgatttgtcaacgttatggaa

SEQ ID NO: 22021 - DNA, 120 bp, synthetic construct
  misc_feature 1..120: note = Artificially Synthesized Probe
  source 1..120: mol_type = other DNA
gacttgggcttctgttagaggttaaggaggggaaggcctcacttctagacttgcatcacagcagttttgttttaatatattttacagagtaggagctcattgaaatgttttttgaaagga

SEQ ID NO: 22022 - DNA, 120 bp, synthetic construct
  misc_feature 1..120: note = Artificially Synthesized Probe
  source 1..120: mol_type = other DNA
ttataggagaagacagaaataaacatgcttccaaacgcaggaaattagatgaggcagagccccttaaatctggaaagcaaggtatttgtagattagaaacttctgagagctcagtcacag

SEQ ID NO: 22023 - DNA, 120 bp, synthetic construct
  misc_feature 1..120: note = Artificially Synthesized Probe
  source 1..120: mol_type = other DNA
gctttcgtcgacgaagcagcactttcaccttgaagggccaggcaaagaaaaggtttaatcttttaggaattaaaagaggtacaagtgaaactcagaggatgtatatgaaacacttgagaa

SEQ ID NO: 22024 - DNA, 120 bp, synthetic construct
  misc_feature 1..120: note = Artificially Synthesized Probe
  source 1..120: mol_type = other DNA
gaaagggtatgtataggtgcaaatgataaaaaagaagagtttgatgtttccggaaatggaaggattgaaggccatataggtgtgcaattacaagagcattcctatcttgagaagggcatg

SEQ ID NO: 22025 - DNA, 120 bp, synthetic construct
  misc_feature 1..120: note = Artificially Synthesized Probe
  source 1..120: mol_type = other DNA
agcaacagagaagcacaaaatgaaaaggcagtcttatctcaactctgctaatgtagaagctggttctgcagacatgtccaaaaacatcattatgcctgaagaagagcatcaacaaaattc

SEQ ID NO: 22026 - DNA, 120 bp, synthetic construct
  misc_feature 1..120: note = Artificially Synthesized Probe
  source 1..120: mol_type = other DNA
ttgattctgaacagaatttatttttacatattaaaggacagcatgaggaattgctgcgggaggtgaataagtatatagtggaagacactgagcaaatcaaccgcgagagggaggaaaacc

SEQ ID NO: 22027 - DNA, 120 bp, synthetic construct
  misc_feature 1..120: note = Artificially Synthesized Probe
  source 1..120: mol_type = other DNA
aaaattagtcaccactttccaaagttaacatgtgctggggatctggtgttcctggaggtagcacctgatttagtctctgtgctctgtcacagttagtgttccattttaatgtttaatttt

SEQ ID NO: 22028 - DNA, 120 bp, synthetic construct
  misc_feature 1..120: note = Artificially Synthesized Probe
  source 1..120: mol_type = other DNA
tgtgctttgaaacactaccaagagccctgttcctgaggacacaatacgagtctaccatttcaattttgcaagtcattttttggggaagttggtctccaggttttaattcagggttttttt

SEQ ID NO: 22029 - DNA, 120 bp, synthetic construct
  misc_feature 1..120: note = Artificially Synthesized Probe
  source 1..120: mol_type = other DNA
taatctgtagactttaagcacagtgaccacaaaggcttaacattgttcactgcttcatctgtgtcccacattagttggctcttggtatatcttgatgagtgaataaatgaacgagcagat

SEQ ID NO: 22030 - DNA, 120 bp, synthetic construct
  misc_feature 1..120: note = Artificially Synthesized Probe
  source 1..120: mol_type = other DNA
gaggaggagctagtcacatggcaggtgctgtgtgagcaaaatgaaaactcaaacccatgagaccttttacatccattcaccaaaattgtaatacaaatattgggagaggttgatcttctt

SEQ ID NO: 22031 - DNA, 120 bp, synthetic construct
  misc_feature 1..120: note = Artificially Synthesized Probe
  source 1..120: mol_type = other DNA
accattgttttaatgtgagtaaattcaaagccggagaaatatgaggaaacaaggaggtggccacagagaaatgtatttgatgataaatatgcttttaaaaatatcagctgccctgagtgc

SEQ ID NO: 22032 - DNA, 120 bp, synthetic construct
  misc_feature 1..120: note = Artificially Synthesized Probe
  source 1..120: mol_type = other DNA
caggaagcatgtgcaggatagccattgtttcggaattcaaaaccgataggagtaagagtggctaaaattatgcatgcgtaccctcctttccattgttatggtaaattccttaaatacagt

SEQ ID NO: 22033 - DNA, 120 bp, synthetic construct
  misc_feature 1..120: note = Artificially Synthesized Probe
  source 1..120: mol_type = other DNA
ctaaagtcccctgaagatgagtgggagaatgagttttgttgctactgattttagctgcaagggtcaggtgtcaaatggttcattttaattgctgcaggtcttggaagtttaaaagatatc

SEQ ID NO: 22034 - DNA, 120 bp, synthetic construct
  misc_feature 1..120: note = Artificially Synthesized Probe
  source 1..120: mol_type = other DNA
actgatctttgtagttggaacagaatggtagtgaattaggtacccttcagtgttgcagaaaaagtatcataggttgttccctatttcatgtgtttcaaagggatagggcagtgtgtaggt

SEQ ID NO: 22035 - DNA, 120 bp, synthetic construct
  misc_feature 1..120: note = Artificially Synthesized Probe
  source 1..120: mol_type = other DNA
taagttagtttgacagaagaagctgaatgtattagatgcctaattcctattaggtcgttaggattaagagttcagaatttaagttttgtgtactcaaggtttacctgctcatgtcatggt

SEQ ID NO: 22036 - DNA, 120 bp, synthetic construct
  misc_feature 1..120: note = Artificially Synthesized Probe
  source 1..120: mol_type = other DNA
atgataaccaagtttgatatgccattattgagaagcgcagaccctggtgtgcatgatttaggagttgcattgtttactgattgatttacctaagtctcgtcttgattcttgtgtatggag

SEQ ID NO: 22037 - DNA, 120 bp, synthetic construct
  misc_feature 1..120: note = Artificially Synthesized Probe
  source 1..120: mol_type = other DNA
gtgggtaattgtaggcagcaggaataaattaaaatcactatttttagtctgctgtgagaactaaagctgtgtatacctaaatcattaaaagcaccatggaattgcatttttagctgaaca

SEQ ID NO: 22038 - DNA, 120 bp, synthetic construct
  misc_feature 1..120: note = Artificially Synthesized Probe
  source 1..120: mol_type = other DNA
aaaatcttcttgtagagtctcaggattctgtaaccttcctgatccccacagtagaatattaggtgggtagccattctcctgatttcctttgcctgttccgtatttttttttcttgttaac

SEQ ID NO: 22039 - DNA, 120 bp, synthetic construct
  misc_feature 1..120: note = Artificially Synthesized Probe
  source 1..120: mol_type = other DNA
aagtgaggattaaacaaacacctgttggatgtcagtatatgccagcactgtgttagtctttagggttaaaaaggtcaaaacgacacctgcctcagatggagaaagcttaggtcaagaaat

SEQ ID NO: 22040 - DNA, 120 bp, synthetic construct
  misc_feature 1..120: note = Artificially Synthesized Probe
  source 1..120: mol_type = other DNA
ttttcttctgagaccctgtctcctctttcccctgccttagcattagtataccaaagtctgttgtctaagtagcaaagtactgagaaatagcagtttcaagcactgtagaatatgctacta

SEQ ID NO: 22041 - DNA, 120 bp, synthetic construct
  misc_feature 1..120: note = Artificially Synthesized Probe
  source 1..120: mol_type = other DNA
tgctgtctcttagttcttagctgaaaagttccttttcagctagtatctgatggactatatggtctctgtgcatggtatcgtttacaattgttggtgcttacttagtctgcatcatgtagc

SEQ ID NO: 22042 - DNA, 120 bp, synthetic construct
  misc_feature 1..120: note = Artificially Synthesized Probe
  source 1..120: mol_type = other DNA
tcaagtacgagtgtcatctattgtgtacttgttaaaagctgaagaaaaagaaaccagcatttaatttcagcccggttttgaagaagaggccgataatttgcctgtagatgcctgcgtgaa

SEQ ID NO: 22043 - DNA, 120 bp, synthetic construct
  misc_feature 1..120: note = Artificially Synthesized Probe
  source 1..120: mol_type = other DNA
ctaaggcagttagatgtaaaaatcatgaaggaccagcagagggcaatattatgttactctaacacttctactggggtaagttttgtgattgaaacaatacaaaaggttttcaggggtggg

SEQ ID NO: 22044 - DNA, 120 bp, synthetic construct
  misc_feature 1..120: note = Artificially Synthesized Probe
  source 1..120: mol_type = other DNA
catggtttgtgtgatgtgacattttgttgaaccaaattaagcctatcaagatagccatagatgtctgtggtaaggaaattgatgtcattgcagttctcttggatatatggttttccaatc

SEQ ID NO: 22045 - DNA, 120 bp, synthetic construct
  misc_feature 1..120: note = Artificially Synthesized Probe
  source 1..120: mol_type = other DNA
aatttcttgacatcaagaatgaccttattatttaccagtaggtatagttagtcctattagtctccctctaatctgattaaggcagtaaacatggcagcacctctggcatttaagtagaat

SEQ ID NO: 22046 - DNA, 120 bp, synthetic construct
  misc_feature 1..120: note = Artificially Synthesized Probe
  source 1..120: mol_type = other DNA
tacattaccttatggagtacttaaaatctgccttgcaactggactggtatctatccactagattatagaaatcacttgcacgcatagcatggatgataagtaccagtattgactcttatc

SEQ ID NO: 22047 - DNA, 120 bp, synthetic construct
  misc_feature 1..120: note = Artificially Synthesized Probe
  source 1..120: mol_type = other DNA
accttaaaggacaaaggatttttgaccccaccctgagactgtgcaatgtaagtttacaaaaggatcaaggagcacagattttaataatgcaaacaatattagtcctgtcccctctggcgt

SEQ ID NO: 22048 - DNA, 120 bp, synthetic construct
  misc_feature 1..120: note = Artificially Synthesized Probe
  source 1..120: mol_type = other DNA
agaaaatgcattattgtgtagggaaaaaaagagagagtgaaaagggaaactgctttgagcgtgagatttgatgtgataaacctggttacttaaccattcgtctcctgtagccctgctgtt

SEQ ID NO: 22049 - DNA, 120 bp, synthetic construct
  misc_feature 1..120: note = Artificially Synthesized Probe
  source 1..120: mol_type = other DNA
gccaccgcgcctggccttcgtctttattttttaaagttgttcagtagatgtcatatattttcctaactactatttacatagatataggatggcaaattttacaggtttaatgggtaaaga

SEQ ID NO: 22050 - DNA, 120 bp, synthetic construct
  misc_feature 1..120: note = Artificially Synthesized Probe
  source 1..120: mol_type = other DNA
gtgagtggacattggtattctcccccagatttacattctctgggtatttaaagctcatggattttttgaaatagatgaactacatagataacttaatactggtgtgttttgggcttgctt

SEQ ID NO: 22051 - DNA, 120 bp, synthetic construct
  misc_feature 1..120: note = Artificially Synthesized Probe
  source 1..120: mol_type = other DNA
cctctaaggtagcagttagggctgtgggtaaacatagattttttttattcatcattggtcaagttgcaagatttgataaatgatgggagactgcttttcttggttaaaatgactgcaatc

SEQ ID NO: 22052 - DNA, 120 bp, synthetic construct
  misc_feature 1..120: note = Artificially Synthesized Probe
  source 1..120: mol_type = other DNA
caacagggttacactgttaggttaaatacaggcagcattccttttcaaaaaatcaatgtgctgtgtagcctgcaatagtcagtctctttgcacagagtcattttatgttgtacacacagt

SEQ ID NO: 22053 - DNA, 120 bp, synthetic construct
  misc_feature 1..120: note = Artificially Synthesized Probe
  source 1..120: mol_type = other DNA
gagtgcctgccatgcggtgtctgtgcttaaatcataaagatgggatttttttttttttttggtatgatcaactggaatgcagcaaagcattatgccatcgagtctttgcatttttgtgag

SEQ ID NO: 22054 - DNA, 120 bp, synthetic construct
  misc_feature 1..120: note = Artificially Synthesized Probe
  source 1..120: mol_type = other DNA
ataaaggcataagggcatcgtgcttgggaacgtccattttagatgcttgtccccgggtagctcttatttatgtgtaccacatctaaaaccaaataacacttctgtattgaaagttaccta

SEQ ID NO: 22055 - DNA, 120 bp, synthetic construct
  misc_feature 1..120: note = Artificially Synthesized Probe
  source 1..120: mol_type = other DNA
agttccacatagcaggaacttttgaaccataagatgctgtgccacaaactataactggaaatgtttgtgcagaggccagattagaagctgttagcaagaagtgcaggaggacaagttggc

SEQ ID NO: 22056 - DNA, 120 bp, synthetic construct
  misc_feature 1..120: note = Artificially Synthesized Probe
  source 1..120: mol_type = other DNA
tttagtgtacatttatttctagctcccataaaataattgtggagttactcagagttggtctggtgcttcttagtgttattagagatcattagccatctttctgccccactgccctcagag

SEQ ID NO: 22057 - DNA, 120 bp, synthetic construct
  misc_feature 1..120: note = Artificially Synthesized Probe
  source 1..120: mol_type = other DNA
tctgctttgttttgatccttggtttacctcctttggatggaactatccttcagtgagttcagaataggcacacaggaagtaagcaccttgagactgagtatgtctggaaatgccttcatt

SEQ ID NO: 22058 - DNA, 120 bp, synthetic construct
  misc_feature 1..120: note = Artificially Synthesized Probe
  source 1..120: mol_type = other DNA
ttggtggtcactcaaactgtgcttttgccattgccgatctttgactgcagaaactaaagtgcttttcatttgtgtgttacagtaggtctaaaatattctgccaattttaattggcctcca

SEQ ID NO: 22059 - DNA, 120 bp, synthetic construct
  misc_feature 1..120: note = Artificially Synthesized Probe
  source 1..120: mol_type = other DNA
actggttgcagtccagacactgtccaaactttgtttcgtgcccaaatttactttgcataatgtgtgaagttggcttcaggctatgtgtataggtatttgtgaaacataagtgaatttcct

SEQ ID NO: 22060 - DNA, 120 bp, synthetic construct
  misc_feature 1..120: note = Artificially Synthesized Probe
  source 1..120: mol_type = other DNA
tgtttgcctttctctcaggctctccttttgggggcatccagtgtagagaccatttgttgttttgtttgctgtttcatcatatgcctggtacttagtaactacttggaagttagttattga

SEQ ID NO: 22061 - DNA, 120 bp, synthetic construct
  misc_feature 1..120: note = Artificially Synthesized Probe
  source 1..120: mol_type = other DNA
agcacaaaattggatgtctgaaagatcttaggttagatcccatctccagcactcattaggataggcttgggatgaatctgcatggatgatatgattcgaataagcaactgcttgaaaaga

SEQ ID NO: 22062 - DNA, 120 bp, synthetic construct
  misc_feature 1..120: note = Artificially Synthesized Probe
  source 1..120: mol_type = other DNA
gcccgtccccacctccccacagacactggcagtcactgttctctattttctttttccatacatttgtcaattctaggtgcctcatggaagtggagccatacagtatttgtacttttgtga

SEQ ID NO: 22063 - DNA, 120 bp, synthetic construct
  misc_feature 1..120: note = Artificially Synthesized Probe
  source 1..120: mol_type = other DNA
cgtttgttcattggagcactgtttgttcattggagcactgtttgttcattggagcactgtttgtctgtttgttggagcactgtttttctgttcattggagcactgtttattcattggagc

SEQ ID NO: 22064 - DNA, 120 bp, synthetic construct
  misc_feature 1..120: note = Artificially Synthesized Probe
  source 1..120: mol_type = other DNA
ccatttaaattatttcaggtatttgctttctgcattcaattgacagtaagtgaagactctatgccttattggtactgacaggatggcataaggcagtgtatcagtttcctgctgctgctg

SEQ ID NO: 22065 - DNA, 120 bp, synthetic construct
  misc_feature 1..120: note = Artificially Synthesized Probe
  source 1..120: mol_type = other DNA
attgggagtgctgacatcatgaaagttgtcaaagtttgcagatcaggtccctacctctgtcatcctgtagctggtttacagcccactgttctctgaaaatatattaacacattaccaaat

SEQ ID NO: 22066 - DNA, 120 bp, synthetic construct
  misc_feature 1..120: note = Artificially Synthesized Probe
  source 1..120: mol_type = other DNA
tctctgtctctgctggctctttgttaacatttgggtgtaggttcagttgccttttcttgaccagccactcatcacttaacctcttatgtttcttcatagatcacttaccgaaaaagtact

SEQ ID NO: 22067 - DNA, 120 bp, synthetic construct
  misc_feature 1..120: note = Artificially Synthesized Probe
  source 1..120: mol_type = other DNA
tctgcatgtataaaaagaaaataaaacaagtctacattcaagttctactacttctgaatcacttttcaacttacatttttttgatgcctgtgcttcctcttagaattttttttttttgga

SEQ ID NO: 22068 - DNA, 120 bp, synthetic construct
  misc_feature 1..120: note = Artificially Synthesized Probe
  source 1..120: mol_type = other DNA
ctctcctcttcatcctttccccacctttttatcttggagattttggacccctgcagctgggactgttgttttttctggtaatattcatttacatttacccatgtgtttgtcctttacttt

SEQ ID NO: 22069 - DNA, 120 bp, synthetic construct
  misc_feature 1..120: note = Artificially Synthesized Probe
  source 1..120: mol_type = other DNA
gggggtattagcagtttaggatcatctcaactgtattgcatatattagtacagtttgaagctgggcaggactttgaaggcccatttacttctgcattacccttttactcttagagtacat

SEQ ID NO: 22070 - DNA, 120 bp, synthetic construct
  misc_feature 1..120: note = Artificially Synthesized Probe
  source 1..120: mol_type = other DNA
atgactaacgcttaaaagtttcagtggcatagtcctactgtccttgtctgagctttaggcccatttgttttacctactcagtgtttatattgtgatgtcttactgcatttcaaactggac

SEQ ID NO: 22071 - DNA, 120 bp, synthetic construct
  misc_feature 1..120: note = Artificially Synthesized Probe
  source 1..120: mol_type = other DNA
cttattgtatgcggtttattttctttgaccatcaaatacaactcccgcccctctgtttttttgtatgtgtggttaggagtgatggttgaagctggtttataggaatgaaggcttaacgtc

SEQ ID NO: 22072 - DNA, 120 bp, synthetic construct
  misc_feature 1..120: note = Artificially Synthesized Probe
  source 1..120: mol_type = other DNA
gggtgaggggtaggacaaagccagaggaacccctaaggtaaagatgacagcacctctgccctctttattcattgttacatctgtttttcttgactgatttttttttttattttaaatgag

SEQ ID NO: 22073 - DNA, 120 bp, synthetic construct
  misc_feature 1..120: note = Artificially Synthesized Probe
  source 1..120: mol_type = other DNA
tcgagtcagttgctttaaagatccttggatgtgttagttagctctataccaagcatgtaactacctgaaggaacagttgaccctgttcttggcattgaaaattgtggtcagaaaatcaag

SEQ ID NO: 22074 - DNA, 120 bp, synthetic construct
  misc_feature 1..120: note = Artificially Synthesized Probe
  source 1..120: mol_type = other DNA
tcattggttagctgttgttagtatgtccttgctaaactactggtttagctttctgaagatgtaattgtaaccaggtgtgtgagggcagggtagaaagcagttttatggagcttttgttct

SEQ ID NO: 22075 - DNA, 120 bp, synthetic construct
  misc_feature 1..120: note = Artificially Synthesized Probe
  source 1..120: mol_type = other DNA
gaaatagtaaagtgctctggataaattttgtttcatagctactgtccggtattcccaaacgcaccgagtcacgttcagttataagcacaattcagtgggaaactttgttctctaaagagc

SEQ ID NO: 22076 - DNA, 120 bp, synthetic construct
  misc_feature 1..120: note = Artificially Synthesized Probe
  source 1..120: mol_type = other DNA
tggctttaggaggaattcagaattgatataaataagtagacattgaaacacccacgtgaagagatgtggttatgtgttcatctgtactttcaaagtatattcagagcccagctgctcacc

SEQ ID NO: 22077 - DNA, 120 bp, synthetic construct
  misc_feature 1..120: note = Artificially Synthesized Probe
  source 1..120: mol_type = other DNA
atatacaaaccaaaactattgtcatattctctcaaatcttttccatgtttcccagttcacacaaatgcatcatctacttcataacccccataactcctggtgctcctggtcacccccaga

SEQ ID NO: 22078 - DNA, 120 bp, synthetic construct
  misc_feature 1..120: note = Artificially Synthesized Probe
  source 1..120: mol_type = other DNA
tggctgcaggcagagtggcgggaaaaggactccttgaaaaagcctctgagagaagagatttactatattatcctttaatagttttggaaatcaggtagaagtagtgagttctgtgtgttt

SEQ ID NO: 22079 - DNA, 120 bp, synthetic construct
  misc_feature 1..120: note = Artificially Synthesized Probe
  source 1..120: mol_type = other DNA
gcagtcattgttttccttaaagggtgattgcctttgagaacagattccctagcagcttacatctcagttacacgttgcaaggttgaatgttatgctagctactgaaaagaatacacaaca

SEQ ID NO: 22080 - DNA, 120 bp, synthetic construct
  misc_feature 1..120: note = Artificially Synthesized Probe
  source 1..120: mol_type = other DNA
aacgtttgagagtacattcttgttattgttagcttgcgaagagtcattgcattgtcatccccttgcattgtggttgcagtcaatgaaagttagaaataattgattgcagctgcatggcta

SEQ ID NO: 22081 - DNA, 120 bp, synthetic construct
  misc_feature 1..120: note = Artificially Synthesized Probe
  source 1..120: mol_type = other DNA
gcaggcagtataggaaaatgtggaaacagacaccaaaaggaggtacctccgaaaacctaacctgggtatgtgaattttttgcttagtttacctctaaaaaaaagctaaattgccaaacgc

SEQ ID NO: 22082 - DNA, 120 bp, synthetic construct
  misc_feature 1..120: note = Artificially Synthesized Probe
  source 1..120: mol_type = other DNA
tagttgttcagcttttcaatacttgtggaaccaatttttaaaaaccaatattcttcgtatgcttcaaaagaagctgaactttttaattgaaattaggaaaggccgagcgcagtggctcac

SEQ ID NO: 22083 - DNA, 120 bp, synthetic construct
  misc_feature 1..120: note = Artificially Synthesized Probe
  source 1..120: mol_type = other DNA
gttttgctggtggtaccttcagcgtcctgactgtaggtttcagcttccttttagctgtttttatcctttcatcagtgcaggagctggtgttccagctgtttttctccgtgttattggttg

SEQ ID NO: 22084 - DNA, 120 bp, synthetic construct
  misc_feature 1..120: note = Artificially Synthesized Probe
  source 1..120: mol_type = other DNA
gtggttgctttatgatctcagctttctgatgggctcgagaaaagttagacttttgcagattatccgactctttctcattgttagcatgggagtgatataggtttctacatctgaacatgc

SEQ ID NO: 22085 - DNA, 120 bp, synthetic construct
  misc_feature 1..120: note = Artificially Synthesized Probe
  source 1..120: mol_type = other DNA
tttgtttttaagtcttttagagcaagtctggtgtagacttcactctagggatagttaagctcaatgttaaggtgtgaccgtttcgtgtctcttccgaagtacttcaggtgtgtgaagaag

SEQ ID NO: 22086 - DNA, 120 bp, synthetic construct
  misc_feature 1..120: note = Artificially Synthesized Probe
  source 1..120: mol_type = other DNA
agtatcaatatatgttgctgaaattagctgttttttgtgcctcctgcataacatctatgcctttggactttgagggaaggtctcattgtttcttgatggggtgcaataccctgcttcgtt

SEQ ID NO: 22087 - DNA, 120 bp, synthetic construct
  misc_feature 1..120: note = Artificially Synthesized Probe
  source 1..120: mol_type = other DNA
gtgtgctggctgttggagtggtgatgagaatagagcccttgacagggagagtggagcagaggtctgttagcttgttacttttggtagtttcaaaaattaaactccaaaaataatttattt

SEQ ID NO: 22088 - DNA, 120 bp, synthetic construct
  misc_feature 1..120: note = Artificially Synthesized Probe
  source 1..120: mol_type = other DNA
cattcacattagctttttcattttctattaggtgggcaatgttgtatttcctcctgtgctcctatgaggagaatatatatcctttggcacatatgctagtatgggtccccctagtttcca

SEQ ID NO: 22089 - DNA, 120 bp, synthetic construct
  misc_feature 1..120: note = Artificially Synthesized Probe
  source 1..120: mol_type = other DNA
agctgagttagtcatttgtctctcacctgatggttcataccgttgtccttctgagctggttgtatgtataatgagctgttgtccttctgagctggttatatgtattatgtgtgtatgttt

SEQ ID NO: 22090 - DNA, 120 bp, synthetic construct
  misc_feature 1..120: note = Artificially Synthesized Probe
  source 1..120: mol_type = other DNA
ataagatctgctatggacacacttcagtgcaaagtgagcagatatgcagggatgcctccaggaaacatgatgatatatgcttttcctggtacaggttttgtttttatcctcatttttatg

SEQ ID NO: 22091 - DNA, 120 bp, synthetic construct
  misc_feature 1..120: note = Artificially Synthesized Probe
  source 1..120: mol_type = other DNA
aagccacctaactagtttacggtgagcagtttctacactgccacttatttggcattttctttaggtcaagactgtctttactgctttctaataagatggtagaaagctgctgaacatgtg

SEQ ID NO: 22092 - DNA, 120 bp, synthetic construct
  misc_feature 1..120: note = Artificially Synthesized Probe
  source 1..120: mol_type = other DNA
taggcaattatcacctgtgctgtttggcaccaaaactagcttgccccttggatcagtgtgttgagcatctcatcgcaaagaaataactattattgcaaactgtgagttagcaacttcttt

SEQ ID NO: 22093 - DNA, 120 bp, synthetic construct
  misc_feature 1..120: note = Artificially Synthesized Probe
  source 1..120: mol_type = other DNA
cccactgataatgacagtagctcacggtcaagaaggaatcttagttctgagttaagatatgggatgagaaggatgtatgtgttttattcatgcacgggtcagtttttccaatcaagtaca

SEQ ID NO: 22094 - DNA, 120 bp, synthetic construct
  misc_feature 1..120: note = Artificially Synthesized Probe
  source 1..120: mol_type = other DNA
ttcttcatttctcacaagaacctgcctcatgtcccacccaactagatgtgtaaggaaagagaattctgagaaatgtagttcacagcctagatgagacgacccattacagagctaccacag

SEQ ID NO: 22095 - DNA, 120 bp, synthetic construct
  misc_feature 1..120: note = Artificially Synthesized Probe
  source 1..120: mol_type = other DNA
ggatctcttttatagagcacttcactcaatcaggacgtgctgttaaacaggatataatgaaatacaggtacaacggggaaaatgaagggaaaaaggccggttcagtagagtttaactgta

SEQ ID NO: 22096 - DNA, 120 bp, synthetic construct
  misc_feature 1..120: note = Artificially Synthesized Probe
  source 1..120: mol_type = other DNA
tttttttttaaaccagaaagtccaacaggctgataaggtacccttgaattaagctcagggaaggtaggtagatttcactttttgtctgcttctacttgttgaggtgactgagtagagact

SEQ ID NO: 22097 - DNA, 120 bp, synthetic construct
  misc_feature 1..120: note = Artificially Synthesized Probe
  source 1..120: mol_type = other DNA
cctatctgtaataaactcttagaattaactgcaattgacaatgattgccttaaatcctggtgggtgggatgatccatgttacctggatttggtcagatgggaataatgtgtattacccca

SEQ ID NO: 22098 - DNA, 120 bp, synthetic construct
  misc_feature 1..120: note = Artificially Synthesized Probe
  source 1..120: mol_type = other DNA
gtgagtcaccgtacccagctagcagttgtttcatttacccaatacactctgtgtacatgtcaaagtgggttatcaataagtagttcctaataagtgaattaattctttagttaccttcag

SEQ ID NO: 22099 - DNA, 120 bp, synthetic construct
  misc_feature 1..120: note = Artificially Synthesized Probe
  source 1..120: mol_type = other DNA
gtatcctctgctatgtagcctatttataacttcattctgacttctgctcaggataactattgtgcttttaagcagaagagaagcatgttgcttcaggtgtattcctgggactagtgaaga

SEQ ID NO: 22100 - DNA, 120 bp, synthetic construct
  misc_feature 1..120: note = Artificially Synthesized Probe
  source 1..120: mol_type = other DNA
gggcctgtcgcagagaatttgctgataatcgtcccctatgatttagtgtcttacttggtgaaagtgaaagacctcaaaataatgccttggcaacagaatttttgatcctttaggaaaata

SEQ ID NO: 22101 - DNA, 120 bp, synthetic construct
  misc_feature 1..120: note = Artificially Synthesized Probe
  source 1..120: mol_type = other DNA
catgttcttcctgtgctgctttttaatgagcatatctaaaatacgcgagcagtgtagtttgggaaaatgttataaggtttgactgaatgtaagttcttccccctagcctttctaggtacc

SEQ ID NO: 22102 - DNA, 120 bp, synthetic construct
  misc_feature 1..120: note = Artificially Synthesized Probe
  source 1..120: mol_type = other DNA
ttaagcttcaaaataagtcgcctaaaatttagattttaattggtgtccagttttaatcttggttatttgggttggcagaataaagcaccctcccctcacactccccaaagagtgtccatg

SEQ ID NO: 22103 - DNA, 120 bp, synthetic construct
  misc_feature 1..120: note = Artificially Synthesized Probe
  source 1..120: mol_type = other DNA
ggtgttctgggaccttgtctttgacaaggtccaaatttaaaatgtggctattagcaaggcaattgtatttagaattagaagtcttgggttcatgtcctagcgcctatgtcttagttactg

SEQ ID NO: 22104 - DNA, 120 bp, synthetic construct
  misc_feature 1..120: note = Artificially Synthesized Probe
  source 1..120: mol_type = other DNA
attccctgtctcatgcctttgctccacattaggaaaggaacacaccaggggtttggaataaaggaactccaagactcctccaatctttaaaataaatgacatgggcaatttatacattaa

SEQ ID NO: 22105 - DNA, 120 bp, synthetic construct
  misc_feature 1..120: note = Artificially Synthesized Probe
  source 1..120: mol_type = other DNA
tgcaaaaattaacttgtcatacaccatagctcagcaaagtcacttcttataagtctgtggtcacagtatgttttttgcagttcagcatctggctctgtgggatactgatggcttctagga

SEQ ID NO: 22106 - DNA, 120 bp, synthetic construct
  misc_feature 1..120: note = Artificially Synthesized Probe
  source 1..120: mol_type = other DNA
ttcacactgcctgttctctgaagactttctgatctctcagcagtccacggtaacttgtgcttccatgtcgtattttgtggatctattattgttactatccaaatgtgcgtatttaaagaa

SEQ ID NO: 22107 - DNA, 120 bp, synthetic construct
  misc_feature 1..120: note = Artificially Synthesized Probe
  source 1..120: mol_type = other DNA
gaggtgatgctgctacattcgtgaggttttgatagctgagaagttaatgtttctctcagttcatattgtttcagttgctctcatgacatgatgtgacctgttttgccttattgtgggaat

SEQ ID NO: 22108 - DNA, 120 bp, synthetic construct
  misc_feature 1..120: note = Artificially Synthesized Probe
  source 1..120: mol_type = other DNA
gcaattaattatttgtgacaagtcctgttaaggaggaggctgttttgctcagcattggtttggacagaaagatcataagtcaagattgtactcctgagtccgatagtggcaccttttttt

SEQ ID NO: 22109 - DNA, 120 bp, synthetic construct
  misc_feature 1..120: note = Artificially Synthesized Probe
  source 1..120: mol_type = other DNA
tacattttgatgggttctgacaattctatacacctctgaaaccattgacgaatacagataaaagaacgttcctgtttcctcaaaagattcctgtgcttttttgcagccccccccctcccc

SEQ ID NO: 22110 - DNA, 120 bp, synthetic construct
  misc_feature 1..120: note = Artificially Synthesized Probe
  source 1..120: mol_type = other DNA
ttgtctgtcattaatatatcttctctagtcttcttgtggttactgattgcatagaatgtctttttgagtattttttaattaaaaactttttataggatatgacttgttgcctttattgta

SEQ ID NO: 22111 - DNA, 120 bp, synthetic construct
  misc_feature 1..120: note = Artificially Synthesized Probe
  source 1..120: mol_type = other DNA
gtctttttgagaattgtcattcaactgaggtgagatgagacctcggtgtggttttgatttgcatttccctgatgattagtgatgttgaacagtttttcttatatttggtggccattcatt

SEQ ID NO: 22112 - DNA, 120 bp, synthetic construct
  misc_feature 1..120: note = Artificially Synthesized Probe
  source 1..120: mol_type = other DNA
tccttgtagaggtctttcacctccttggttaaatttattcctaggcattttattttattttattttgtagctgttgtaaacgggaccactttcttgatttctttttcagctacttcactg

SEQ ID NO: 22113 - DNA, 120 bp, synthetic construct
  misc_feature 1..120: note = Artificially Synthesized Probe
  source 1..120: mol_type = other DNA
aagtttttaaaataatttttgcgtggagatcctctctagttgtcttactggtttttcatttatagaatctccttgccacatttcttgctagcctgtcagttgctcaagcatggctcacac

SEQ ID NO: 22114 - DNA, 120 bp, synthetic construct
  misc_feature 1..120: note = Artificially Synthesized Probe
  source 1..120: mol_type = other DNA
gcatcaaatagcaactgtcatgtctgtagaagtcagctgcttgtatctcatttctgatagttaagctttaattgccatctgccttctctcttccttgttcctacatgctttaggtgttct

SEQ ID NO: 22115 - DNA, 120 bp, synthetic construct
  misc_feature 1..120: note = Artificially Synthesized Probe
  source 1..120: mol_type = other DNA
gtggggcggggtggggggggtttgtttggcagaatctcattacttcgtaccagaaatggaaagtctctagtatatttattaaaaatagttctcactattattcccaaggcattatatgtt

SEQ ID NO: 22116 - DNA, 120 bp, synthetic construct
  misc_feature 1..120: note = Artificially Synthesized Probe
  source 1..120: mol_type = other DNA
cacaccgccacacctagacaattaaacataaaaacagtttctagagagatgggtctgctgtgttgcccaggcttgcctgattgtttttaaaaatcagcttttaaaactattttatataga

SEQ ID NO: 22117 - DNA, 120 bp, synthetic construct
  misc_feature 1..120: note = Artificially Synthesized Probe
  source 1..120: mol_type = other DNA
atatagtgtatttttagagccactttctagttcagtgacatgagttgcaatctcttttttttccctcttttattcagctgtccccttccactcagctcccactgaagattcgttgcatct

SEQ ID NO: 22118 - DNA, 120 bp, synthetic construct
  misc_feature 1..120: note = Artificially Synthesized Probe
  source 1..120: mol_type = other DNA
gatagaacatagaaaaacaacatttagatcatcatgaaaacggtgaaggattcagtgagagtttttagacaggatgtgtgaaccgaggtcaagttctcctgtagaacggtggtgaagagg

SEQ ID NO: 22119 - DNA, 120 bp, synthetic construct
  misc_feature 1..120: note = Artificially Synthesized Probe
  source 1..120: mol_type = other DNA
ctgcaggatttggccataagagggcttggataagagtatagcaatggggatggaaagagaatatgaccttgagaaacatcagaagaaactgccgaatttgacaatgaatttgatatacga

SEQ ID NO: 22120 - DNA, 120 bp, synthetic construct
  misc_feature 1..120: note = Artificially Synthesized Probe
  source 1..120: mol_type = other DNA
actaaaatgaggggcaggtagtactattatggagtgatggtccgtggaagagaacaatatacttattactggttactgtttattgaacatctactttgtccttgggggaagtgctagctt

SEQ ID NO: 22121 - DNA, 120 bp, synthetic construct
  misc_feature 1..120: note = Artificially Synthesized Probe
  source 1..120: mol_type = other DNA
aatgagatcatgttcatgatcatggtacctgctcttcaatgctgtggaaggaaattgtgcatggaaattggtttggaattttcagtgtctgggaagctctacaggttacttgtagttttt

SEQ ID NO: 22122 - DNA, 120 bp, synthetic construct
  misc_feature 1..120: note = Artificially Synthesized Probe
  source 1..120: mol_type = other DNA
cagtgtaagtggaactgtataataatttgtccaaaagggaatgggctaatctacaatcataagcttcctttaatttagaaagacggtaccgttggtaagatgcatttcgggcgagtcact

SEQ ID NO: 22123 - DNA, 120 bp, synthetic construct
  misc_feature 1..120: note = Artificially Synthesized Probe
  source 1..120: mol_type = other DNA
tggggaacgtcagacttttaaaaattcttattgtcgtgaaacttactggtgtagactgtcttgtgtttcccaagcttagtttgttttgttgtgtttttcctgctttctgtaagaccaggg

SEQ ID NO: 22124 - DNA, 120 bp, synthetic construct
  misc_feature 1..120: note = Artificially Synthesized Probe
  source 1..120: mol_type = other DNA
ttactgcattaaaaggtgctttatgcacttcattagcttatagaaaaattgaaatgctgcaataattgtaaattacagtatgtaatctgtgcctgaacctctttctatactaagcactct

SEQ ID NO: 22125 - DNA, 120 bp, synthetic construct
  misc_feature 1..120: note = Artificially Synthesized Probe
  source 1..120: mol_type = other DNA
tcattgagacttggttgctctttttactctaaatatcaccatggatacaaacactttgaaaccagggtcctgtccatcacctcacagcccagtattgcacaattgtgtaagcacttgaaa

SEQ ID NO: 22126 - DNA, 120 bp, synthetic construct
  misc_feature 1..120: note = Artificially Synthesized Probe
  source 1..120: mol_type = other DNA
tccttaataaaattccccatctctgagacagtactagttcttactttaattactggctgccgtaatgtttcctatccataactgtctacacaatggactgtttctgagcagagggtatgg

SEQ ID NO: 22127 - DNA, 120 bp, synthetic construct
  misc_feature 1..120: note = Artificially Synthesized Probe
  source 1..120: mol_type = other DNA
tgcagaatgcaaggaaaaggtcactctcatttgcatgataggcttcattagaatatgctaaggacgagacctagtgttttatgacttcgggtgatgaatagctaccatattactctgcta

SEQ ID NO: 22128 - DNA, 120 bp, synthetic construct
  misc_feature 1..120: note = Artificially Synthesized Probe
  source 1..120: mol_type = other DNA
gatgataaattaacatgtggttggtcagtgccttaggtgtctgctatacttcttcttatataacttgtggtctgtattttcaacaaaggaccatgagtgtgtgtgcagtgcatgtgtgtg

SEQ ID NO: 22129 - DNA, 120 bp, synthetic construct
  misc_feature 1..120: note = Artificially Synthesized Probe
  source 1..120: mol_type = other DNA
aaaagaaaaatgtaaggaaggatttaaaaaccaaatactgtactgtggtaatcatgtcatatgtgcactgtcttttctatattcactgttcaattaaaaaggggacgttgggccaggtgc

SEQ ID NO: 22130 - DNA, 120 bp, synthetic construct
  misc_feature 1..120: note = Artificially Synthesized Probe
  source 1..120: mol_type = other DNA
agagctagaaagagtacagtgaggcacatgcttctcttgtcagtaactaaaaagtaggtggtcattgaaacaggtattttcctttcagagaatgttcttacatttgggctcagctttcct

SEQ ID NO: 22131 - DNA, 120 bp, synthetic construct
  misc_feature 1..120: note = Artificially Synthesized Probe
  source 1..120: mol_type = other DNA
caattcccgcttctttgccatctcctctgacgtctctatcaaatttcagtctgcctctctgataaggactcttatgactgcatttattttagagctcaccaaggtaattcaggtaaatct

SEQ ID NO: 22132 - DNA, 120 bp, synthetic construct
  misc_feature 1..120: note = Artificially Synthesized Probe
  source 1..120: mol_type = other DNA
ggcttatggaagtccttcagtggataatatgtaaaaccaaggcagtaaaccagttgagaaaaatacatgtatggatggtgaaatcaggaatacgtttctatagtcaggtcgggagcattt

SEQ ID NO: 22133 - DNA, 120 bp, synthetic construct
  misc_feature 1..120: note = Artificially Synthesized Probe
  source 1..120: mol_type = other DNA
tggcagagaaggaagatggaagacttgaaataggtaaagagaagtgaaaatattctcacagaacatgcttttaatgaaggaactattacataagggagtcttgtctttccctcttcctgt

SEQ ID NO: 22134 - DNA, 120 bp, synthetic construct
  misc_feature 1..120: note = Artificially Synthesized Probe
  source 1..120: mol_type = other DNA
taaccaaaatagagaacgctggagaagaagcaagttacaggggttagggattacaatgtgggagggaaggtgacacatttggtttagttgtgttgaattttaaatgaccacaagatactc

SEQ ID NO: 22135 - DNA, 120 bp, synthetic construct
  misc_feature 1..120: note = Artificially Synthesized Probe
  source 1..120: mol_type = other DNA
tattattcctccagaaattttctctttatgtgtcatctacttcgctgttatgttctgaattctttgacaagtggggcacctccccaagatttggataccttcttcatgtccctgtttcca

SEQ ID NO: 22136 - DNA, 120 bp, synthetic construct
  misc_feature 1..120: note = Artificially Synthesized Probe
  source 1..120: mol_type = other DNA
gaagggacacaacacgtatcgtagtgcattcagactcacctgaaagtcacatctgttctcagttgggtgggaaataccatgtaatgaaaacattcttaagatcagttttaaaaaggcaac

SEQ ID NO: 22137 - DNA, 120 bp, synthetic construct
  misc_feature 1..120: note = Artificially Synthesized Probe
  source 1..120: mol_type = other DNA
cctcatacgaggagtctgtattcatttgctcactctgtctgtgtatagcagcctgggatttcttgcatatctcttctttattagttggtttatcactccaacttaaatacagtcatgtgc

SEQ ID NO: 22138 - DNA, 120 bp, synthetic construct
  misc_feature 1..120: note = Artificially Synthesized Probe
  source 1..120: mol_type = other DNA
cagaaccgtgatttcaataaaaataccttgcatccagtcatttccggaagggaattacatggtattcataatgcgtaatacatttattatgatttgtagaatatatgctgagaaaaggag

SEQ ID NO: 22139 - DNA, 120 bp, synthetic construct
  misc_feature 1..120: note = Artificially Synthesized Probe
  source 1..120: mol_type = other DNA
tcccaggttaagctcttgtgattaggcatgactcagggcttgcaaataataaaaattatgatcaataattttcacacagcaagttttcagagatgataaagtttttcagtgttgctgaca

SEQ ID NO: 22140 - DNA, 120 bp, synthetic construct
  misc_feature 1..120: note = Artificially Synthesized Probe
  source 1..120: mol_type = other DNA
aaaactctcatttgttagccattgccactgtaccatgcaaaatagcttccatctcagtcaattttcctttgcagaatattatacacagccataggaatatgagagcatcgcgtgtacagg

SEQ ID NO: 22141 - DNA, 120 bp, synthetic construct
  misc_feature 1..120: note = Artificially Synthesized Probe
  source 1..120: mol_type = other DNA
attttcacccaaatccgtgctatagccttggcacatatgtaagcttctcagactggtttacattttctcacacttttcttctcttccaggaatatcatccttctcatggaaatcctagtt

SEQ ID NO: 22142 - DNA, 120 bp, synthetic construct
  misc_feature 1..120: note = Artificially Synthesized Probe
  source 1..120: mol_type = other DNA
ctgtatcctcaacaagacttgttgtttgtctttttgattatagctcacctgatgtgtttgaagtgatatatcattgacgttttgatttcaattttcctgaagagtaatgctcttgagcaa

SEQ ID NO: 22143 - DNA, 120 bp, synthetic construct
  misc_feature 1..120: note = Artificially Synthesized Probe
  source 1..120: mol_type = other DNA
ctgcataaatgtctttttttgagacgtttctcttcatatcctttgcccactttttgatggggttgtttgatttgtttcttgtaaatttgtttaagttctttgtagatcctggatattagc

SEQ ID NO: 22144 - DNA, 120 bp, synthetic construct
  misc_feature 1..120: note = Artificially Synthesized Probe
  source 1..120: mol_type = other DNA
ggagttcactcatgatttggctctctgtttgtctgttattggtgcgtaggaatgcttgtgatttttgcatattgattttgtatcctgagacttagccgaagttgcttatcagcttaagtt

SEQ ID NO: 22145 - DNA, 120 bp, synthetic construct
  misc_feature 1..120: note = Artificially Synthesized Probe
  source 1..120: mol_type = other DNA
ctgatggtagtttgtatttctgtgggattggtggtgctatcccctttatcatttttttattacatctatttgattcttctctcttttcttcttcattagtcttgctagcggtctatcaat

SEQ ID NO: 22146 - DNA, 120 bp, synthetic construct
  misc_feature 1..120: note = Artificially Synthesized Probe
  source 1..120: mol_type = other DNA
cagagactaggattgcaaccccctgctttttttttgttttccgtttgcttggtagatcttcctccatccctttttttgagcctatttgtgtctctgcacatgagatgggtctcctgaatt

SEQ ID NO: 22147 - DNA, 120 bp, synthetic construct
  misc_feature 1..120: note = Artificially Synthesized Probe
  source 1..120: mol_type = other DNA
gggatttctttctatttactgaagtcttctgcttcttgtagtgaagttttaaagttttcaatgtatgtcttccacttctattggtaaatttacttctaagtattttaaatgtttttatac

SEQ ID NO: 22148 - DNA, 120 bp, synthetic construct
  misc_feature 1..120: note = Artificially Synthesized Probe
  source 1..120: mol_type = other DNA
tccaggaatttgtctgtttcatctagatagtttagttggcacatggatgtttatagtattcatctttaattctttttacctttgtaaggttagtagtaatattcacccttttcattccta

SEQ ID NO: 22149 - DNA, 120 bp, synthetic construct
  misc_feature 1..120: note = Artificially Synthesized Probe
  source 1..120: mol_type = other DNA
ctgatatgaatatagccgctgcggctttcttttggttactgattgcatggtgtatctttcatcctgatacgttcaacttacttgagtctttgaatcttatgtttatgtcttgtagacagc

SEQ ID NO: 22150 - DNA, 120 bp, synthetic construct
  misc_feature 1..120: note = Artificially Synthesized Probe
  source 1..120: mol_type = other DNA
catccccctgccttctgacttgcatagtttgtgtggagatgttagtttttaatcttattgtgcatactttgtaatggatgactgacttgactctgttgctgctctcaggattctcttttt

SEQ ID NO: 22151 - DNA, 120 bp, synthetic construct
  misc_feature 1..120: note = Artificially Synthesized Probe
  source 1..120: mol_type = other DNA
gacacatatttcttcaaatgccttgaaccagtgtccatagcatttgtcaaggggctctgttgcattgtggaatgtgcttcatcaggcagttatcaactctacctttaccttctttttcta

SEQ ID NO: 22152 - DNA, 120 bp, synthetic construct
  misc_feature 1..120: note = Artificially Synthesized Probe
  source 1..120: mol_type = other DNA
cagatttttggaggacctcactttcccattctggctgtccctcctctcatggtgattatctatttaggcaaaaatatctgaaaatgcattagacttccaatatagtactgccaacctttt

SEQ ID NO: 22153 - DNA, 120 bp, synthetic construct
  misc_feature 1..120: note = Artificially Synthesized Probe
  source 1..120: mol_type = other DNA
ccctctgcttgcaagatatttactgtttatcctttcgtagtaccatagagatctcaaatataatttaggaaacaatgtctggtctgtacatgccaagtcaggggttgacttctcagttac

SEQ ID NO: 22154 - DNA, 120 bp, synthetic construct
  misc_feature 1..120: note = Artificially Synthesized Probe
  source 1..120: mol_type = other DNA
ggatagctgtatgtttaaggttttaccagagaatagtaccagtttacatatccaccagaagagttttaactttcctatttttctacgtaaacttcccaaagcttgcaattgttagtctgt

SEQ ID NO: 22155 - DNA, 120 bp, synthetic construct
  misc_feature 1..120: note = Artificially Synthesized Probe
  source 1..120: mol_type = other DNA
tatctcatgtgttttatttctagacatgtggtttggatttttaaaaaatatcttccatctctctacagtcgatcctctgtatccttgggttctacttttgtggattctaccaactgctgg

SEQ ID NO: 22156 - DNA, 120 bp, synthetic construct
  misc_feature 1..120: note = Artificially Synthesized Probe
  source 1..120: mol_type = other DNA
ggatggagtttggtatctgcagagggttcctagaaccaattccccaggaataccaagggacgggtgtacttatcttttgattatgttttgtgtatttatagtaattgttttattgttccc

SEQ ID NO: 22157 - DNA, 120 bp, synthetic construct
  misc_feature 1..120: note = Artificially Synthesized Probe
  source 1..120: mol_type = other DNA
aataaagttaatatacttgttacagaaatttggtctcatgcaacaatgggagctttttaactagtctctgtaaggcgttgtcatcacatctgatgttggaccttgaaacccacagggcag

SEQ ID NO: 22158 - DNA, 120 bp, synthetic construct
  misc_feature 1..120: note = Artificially Synthesized Probe
  source 1..120: mol_type = other DNA
ggaaagtaattcaaccgtaattcttcttaattgataacttctgcatctcgccaatgttgcggtaattgatgatgatgatcttccggaagcactgcatgtttttcatatacctgctgaata

SEQ ID NO: 22159 - DNA, 120 bp, synthetic construct
  misc_feature 1..120: note = Artificially Synthesized Probe
  source 1..120: mol_type = other DNA
tttttaaagcattaaatgaagaagtcttattttttaaaagtacccttaagccagagtccttgcactagtcttggaagtagagctgttggacaggttggcacatctcgcctgcaagctcct

SEQ ID NO: 22160 - DNA, 120 bp, synthetic construct
  misc_feature 1..120: note = Artificially Synthesized Probe
  source 1..120: mol_type = other DNA
aggcccagattcagcccaagtttctttgacatcaggctttgccctgaccctcagtgatattcttttatggcctactgtcaaatgatttaatataccaagcacatctgtgtgtgtatttta

SEQ ID NO: 22161 - DNA, 120 bp, synthetic construct
  misc_feature 1..120: note = Artificially Synthesized Probe
  source 1..120: mol_type = other DNA
ttagttgttggaaaataactttgtaattgaaaaataatgcagcagacacctgaaactaggcctatacctgactgaagtttataagagggagagagacacaggacagttgaggggtgagtg

SEQ ID NO: 22162 - DNA, 120 bp, synthetic construct
  misc_feature 1..120: note = Artificially Synthesized Probe
  source 1..120: mol_type = other DNA
atcatagttttccccctttgtttgtaaggtaaatttctgacagatttgaatacctttgaactgcaggtttttccgtattgtttatttaacatgctcattaataggtaagagaagtaggtg

SEQ ID NO: 22163 - DNA, 120 bp, synthetic construct
  misc_feature 1..120: note = Artificially Synthesized Probe
  source 1..120: mol_type = other DNA
cactttcgtcctctttcagggtgatctgattatgcccaaactgcatgctcatacactcttgggtagccattgaggagacatataaaactgttgtataaactatacatctgtaactataag

SEQ ID NO: 22164 - DNA, 120 bp, synthetic construct
  misc_feature 1..120: note = Artificially Synthesized Probe
  source 1..120: mol_type = other DNA
gttggacgtgctttacaatattgtcaatgcagacaagaaaaaatatcctggaaaggccatgggtggaaataaatattttagtgtcatccacaaggaggttatgcttgaagcccaggaaat

SEQ ID NO: 22165 - DNA, 120 bp, synthetic construct
  misc_feature 1..120: note = Artificially Synthesized Probe
  source 1..120: mol_type = other DNA
gaaggaatgatagaacattggtattttgtagccttcagaataatcgagttaggcaagattcattaatgggtgcctatgccattgggagaaggttgttagtgaacaggatactcacacaat

SEQ ID NO: 22166 - DNA, 120 bp, synthetic construct
  misc_feature 1..120: note = Artificially Synthesized Probe
  source 1..120: mol_type = other DNA
ggattgttgctggaaggtttctacttggattattattagtttttctttacctattttgtcccatgtcagtattatctattccactccacccttcacacccatcttttgctgctcaggtcg

SEQ ID NO: 22167 - DNA, 120 bp, synthetic construct
  misc_feature 1..120: note = Artificially Synthesized Probe
  source 1..120: mol_type = other DNA
gtggtccggtaagattagaaaatactatgcagatctcctatttctttccatttcaccgtgctaatcagcacacacatgactgagaagtctacagaacttcactttttaaacctagtgtta

SEQ ID NO: 22168 - DNA, 120 bp, synthetic construct
  misc_feature 1..120: note = Artificially Synthesized Probe
  source 1..120: mol_type = other DNA
aaaaacagtattattttttatttaaaggtgttccttcagatgattagatgcttgcaaatggatgacttgagcaagagcagttctagcatggatcttggcctcaagcagtagagttggcct

SEQ ID NO: 22169 - DNA, 120 bp, synthetic construct
  misc_feature 1..120: note = Artificially Synthesized Probe
  source 1..120: mol_type = other DNA
aaataaaaacaaaagcaaaagtaagttggacaagtcactcctctgttcagatgcctgagatggcttttcttcccactcagaataaaagctgaggctgtcatggccttcagtgttgctatt

SEQ ID NO: 22170 - DNA, 120 bp, synthetic construct
  misc_feature 1..120: note = Artificially Synthesized Probe
  source 1..120: mol_type = other DNA
gtgatcagtaaacgtgatgagacagggactgaaggtatgaaagaatgaggatttattgggagcaaggcatgccaattggctagctttcagatttgccatcatttttgttttatttctggt

SEQ ID NO: 22171 - DNA, 120 bp, synthetic construct
  misc_feature 1..120: note = Artificially Synthesized Probe
  source 1..120: mol_type = other DNA
agaagcatgtttttagaagttgttttgcttttggcttttgtcacaagtcttttctgcaaggatacagtactttacagtcttatgtggctcatttgtgcaaacatgtccagatgaattcag

SEQ ID NO: 22172 - DNA, 120 bp, synthetic construct
  misc_feature 1..120: note = Artificially Synthesized Probe
  source 1..120: mol_type = other DNA
ctgaggtattgcttcatctttcttaccaactggaagtgaagacagggattgaagaactacaatcattgtgctcttttgctcactgttagtgtatccaagtcaaaactgaaccagtcaatt

SEQ ID NO: 22173 - DNA, 120 bp, synthetic construct
  misc_feature 1..120: note = Artificially Synthesized Probe
  source 1..120: mol_type = other DNA
aaaatgtgcagctcactcaaaactggtataagcattagtactttccttaaagtcaggatagattttcagcttccctcagattctccaaggtaggatccaaaattctacagatactctcag

SEQ ID NO: 22174 - DNA, 120 bp, synthetic construct
  misc_feature 1..120: note = Artificially Synthesized Probe
  source 1..120: mol_type = other DNA
gagcgaccgtgcccggcctatttcccttatctttctttgtaacattgtatttaataattgcagcaaaaatacatgcattgaatgtgtcagggatgcattattcttgaaatttaaaagcat

SEQ ID NO: 22175 - DNA, 120 bp, synthetic construct
  misc_feature 1..120: note = Artificially Synthesized Probe
  source 1..120: mol_type = other DNA
tgtttccatttcaccttcctcccttccttctagtggttttaggaagcaaacccttcgtcagtatgctggaccatcagtctgggcacaactgttctctaaattaagttaaatatttttctt

SEQ ID NO: 22176 - DNA, 120 bp, synthetic construct
  misc_feature 1..120: note = Artificially Synthesized Probe
  source 1..120: mol_type = other DNA
tgtttttactggtgaatattcagatcaaaaccttacgtatttcttccagtgcagccatttttgtcggagtctgtgaagtttcttaccctcagtgcatttttgttagcatagctgttgggt

SEQ ID NO: 22177 - DNA, 120 bp, synthetic construct
  misc_feature 1..120: note = Artificially Synthesized Probe
  source 1..120: mol_type = other DNA
tattctaatggatgtgttgtgatagtttcttctctctgatatattcttcatgggctccttctggaatattttttatgaaacttttcagtcacctctgtgtccaggcttcaggctctcccc

SEQ ID NO: 22178 - DNA, 120 bp, synthetic construct
  misc_feature 1..120: note = Artificially Synthesized Probe
  source 1..120: mol_type = other DNA
gccaccatgcccagctgtaaaagtaagatttaatagtgcgatagtcctgctagatcaatttgttctgcatggaaagacagctagaagtcatatcaattcatctaaagccgaagtgtttat

SEQ ID NO: 22179 - DNA, 120 bp, synthetic construct
  misc_feature 1..120: note = Artificially Synthesized Probe
  source 1..120: mol_type = other DNA
cgttagcctttgatactagcaaatcatgtatatgattgagttttcctctttatgtttactgttgggaagctcatggccaaaattgtgatccatctctagtcagcaggatagccttaaagg

SEQ ID NO: 22180 - DNA, 120 bp, synthetic construct
  misc_feature 1..120: note = Artificially Synthesized Probe
  source 1..120: mol_type = other DNA
cttaggtgatctatagtgtttgaagatgacacagcctctgttctcatggacttgaatcttcgggttgatgtcacaggtgaggatagagaggcaagacatacataaatgataattttcgta

SEQ ID NO: 22181 - DNA, 120 bp, synthetic construct
  misc_feature 1..120: note = Artificially Synthesized Probe
  source 1..120: mol_type = other DNA
tcaagtcccagtctgatgccctggccactgtcttctgtgagtccttttcttgtttactgtatctctaattggtcttctttttcatcacattcctatggaacattagagaataaaaggtaa

SEQ ID NO: 22182 - DNA, 120 bp, synthetic construct
  misc_feature 1..120: note = Artificially Synthesized Probe
  source 1..120: mol_type = other DNA
gagacatcttgatcttgtggtcatcctcaggttgtacaagatgtctgactgtcatttccgttagtcctttcaagaacattaaggcactctttgatacttttaagatattgctacctcctc

SEQ ID NO: 22183 - DNA, 120 bp, synthetic construct
  misc_feature 1..120: note = Artificially Synthesized Probe
  source 1..120: mol_type = other DNA
gaatgtcgcctgtgacgctgtggacaacatttcccctccttggttggcagattttggtgaaactgatgtggatttacagttctaaaatacaaaaacaatcatactgtttatgtatggaat

SEQ ID NO: 22184 - DNA, 120 bp, synthetic construct
  misc_feature 1..120: note = Artificially Synthesized Probe
  source 1..120: mol_type = other DNA
ataacattgtcgattcctaagacatgcaacttaaatttctgtaaagtattttgagttgggcgtgttcagagaccactgtgacagagctcttaactagtgagagaacccagaatgtggatc

SEQ ID NO: 22185 - DNA, 120 bp, synthetic construct
  misc_feature 1..120: note = Artificially Synthesized Probe
  source 1..120: mol_type = other DNA
ctccatcatctgccattgtcttcgttttggtgccttaggttgatgttagccagtaaggatgtactcaagacaggctgtggaattcctttttctctttagtggcgtaattcatagttttat

SEQ ID NO: 22186 - DNA, 120 bp, synthetic construct
  misc_feature 1..120: note = Artificially Synthesized Probe
  source 1..120: mol_type = other DNA
tgtaggagctgattttatactctggggccgttggcaaaataaacttgcatatatagcatagtttatctgaagccaaattaatttagccatttgtggcatatatcaaatcatagcatctgg

SEQ ID NO: 22187 - DNA, 120 bp, synthetic construct
  misc_feature 1..120: note = Artificially Synthesized Probe
  source 1..120: mol_type = other DNA
tctctggaaagtaattttggaacatgagcattgagagcatgcaaatcggctgctcttttctccctcaggtggcagacttagtctgtgtgcagatggtatttagtatattttttaatgtgt

SEQ ID NO: 22188 - DNA, 120 bp, synthetic construct
  misc_feature 1..120: note = Artificially Synthesized Probe
  source 1..120: mol_type = other DNA
cttttttatcatgaattccacctctcttactcacctgttatttttagaacgttggatctgtttgtcaaaaagaaatgaaggctgaatagattcagtctgcgtggccttcaaggggctcca

SEQ ID NO: 22189 - DNA, 120 bp, synthetic construct
  misc_feature 1..120: note = Artificially Synthesized Probe
  source 1..120: mol_type = other DNA
tgagagttctggaatagtgtacatggggaagggaaagcatgactcactaatgctggggaaaggcgcaaacgcatttaaatttttttaacctttaagtttcattacagcaatctgtgttct

SEQ ID NO: 22190 - DNA, 120 bp, synthetic construct
  misc_feature 1..120: note = Artificially Synthesized Probe
  source 1..120: mol_type = other DNA
tcagtattttccatgaactgtttcccataggacagaaacagtctcagcactgtgggcataggaaaaccttccattaatgtgaattaatcttgcagtacaggatcccttgagagaattcct

SEQ ID NO: 22191 - DNA, 120 bp, synthetic construct
  misc_feature 1..120: note = Artificially Synthesized Probe
  source 1..120: mol_type = other DNA
gtttagtcacattgttccctcttccacattttttccagttgttgagatcttcagtcttttttgcttgctttcttgtagatttgcttaacggaaatgaacgtttaacctcttgcctcttaa

SEQ ID NO: 22192 - DNA, 120 bp, synthetic construct
  misc_feature 1..120: note = Artificially Synthesized Probe
  source 1..120: mol_type = other DNA
ttctttcattatcagtgtgttttcatggaaatctagacttactgtttatattttatatatacttcgagtatcacaaacgtgggccatgaaaatggcaatgtaatggtatcagtgaaactg

SEQ ID NO: 22193 - DNA, 120 bp, synthetic construct
  misc_feature 1..120: note = Artificially Synthesized Probe
  source 1..120: mol_type = other DNA
acactttgaactgttgtggaaaaggcatttttattttgttgcagatgaatagtcttccactgaatgctcacaaccgacaatgtgtggtagttgttttgttgtatgtattggaaggagagg

SEQ ID NO: 22194 - DNA, 120 bp, synthetic construct
  misc_feature 1..120: note = Artificially Synthesized Probe
  source 1..120: mol_type = other DNA
ttttttaaataattatattgagactcattctgactgttccagggtggtagctaatgagagctaagtccagcgttaccacccccttagccagttttgttacctgtcagagtcaaaagaaag

SEQ ID NO: 22195 - DNA, 120 bp, synthetic construct
  misc_feature 1..120: note = Artificially Synthesized Probe
  source 1..120: mol_type = other DNA
tctgaagcccaaagtctttgtgagcacttttcataactgatgggacctgcagtgggaggattggctgaggacttattttggttgaagttagacatatttcattgtctttttttttttcct

SEQ ID NO: 22196 - DNA, 120 bp, synthetic construct
  misc_feature 1..120: note = Artificially Synthesized Probe
  source 1..120: mol_type = other DNA
ttccccccatgttgaagttctgctgtgttataggaggtgcatttttgtatgatgaaagactattttagaacatagtcacacaccttgatgaaggtgtttcctttttctttttacttgggc

SEQ ID NO: 22197 - DNA, 120 bp, synthetic construct
  misc_feature 1..120: note = Artificially Synthesized Probe
  source 1..120: mol_type = other DNA
actagaacttgggaaaatatcttaaaataatactaaacgagtaagattatactttgtagaactccaagccatcacgtgtgcacttaggtttcctgccaaatctggagcagtggctggatg

SEQ ID NO: 22198 - DNA, 120 bp, synthetic construct
  misc_feature 1..120: note = Artificially Synthesized Probe
  source 1..120: mol_type = other DNA
tttttaaggcttttcgggcaaattagcctgcattatttgcaagaagtaatgcaaagagagtccctgtattctgaggctgagtaggaacgtgaatgatgagaaaggcagcattaaagagta

SEQ ID NO: 22199 - DNA, 120 bp, synthetic construct
  misc_feature 1..120: note = Artificially Synthesized Probe
  source 1..120: mol_type = other DNA
caccacgcccggccagcacttagcattttttatattttagtatctttgctcataaagctctaagtgttaaaaatgtgtagaaaggattattgtaattactattaaaacgattgaaacaac

SEQ ID NO: 22200 - DNA, 120 bp, synthetic construct
  misc_feature 1..120: note = Artificially Synthesized Probe
  source 1..120: mol_type = other DNA
tggggaataaatgtagaatttttcacctcctcctcctccaaatcataaacaatgtggagctaacacagaccgaaccgtgggtaaataagagtgctctttttcttacctcgcatagtaaaa

SEQ ID NO: 22201 - DNA, 120 bp, synthetic construct
  misc_feature 1..120: note = Artificially Synthesized Probe
  source 1..120: mol_type = other DNA
gaactcattttgagcagtctttgctaatcaatagataggtttgaagtagtttcagacattcaagtggcgatgctgaactggaagttgtatgtgtaattgtagaagtgaaggtagaggcca

SEQ ID NO: 22202 - DNA, 120 bp, synthetic construct
  misc_feature 1..120: note = Artificially Synthesized Probe
  source 1..120: mol_type = other DNA
atgggagaaaattttcgcaacctactcatctgacaaagggctaatatccagaatctacaatgaactctaacaaatttacaagaaaaaaacaaacaaccccatcaaaaagtgggcgaagga

SEQ ID NO: 22203 - DNA, 120 bp, synthetic construct
  misc_feature 1..120: note = Artificially Synthesized Probe
  source 1..120: mol_type = other DNA
ttactctgttaactttgttttaggaagcctttatccttttgccattgtctttgcatgaagtagcatggcagactctctgagagctgtttcagaaagctctggatttgtgtcttcgctttt

SEQ ID NO: 22204 - DNA, 120 bp, synthetic construct
  misc_feature 1..120: note = Artificially Synthesized Probe
  source 1..120: mol_type = other DNA
aatttcttgtccctcatttcatctctttgatgtggtcatcatagttctttcaaggtttttacttatttttaccctgaattgttggttacaccttgcctgtctacaggccccgatggtgtg

SEQ ID NO: 22205 - DNA, 120 bp, synthetic construct
  misc_feature 1..120: note = Artificially Synthesized Probe
  source 1..120: mol_type = other DNA
tgtatggaaaaaattcttagtaagtggaatagtagaaggaaagtgatgtaagtggatgtcccattatctgctttctgtgttggatgtgtggttcctacccttcatggcataagggcatat

SEQ ID NO: 22206 - DNA, 120 bp, synthetic construct
  misc_feature 1..120: note = Artificially Synthesized Probe
  source 1..120: mol_type = other DNA
gaaaagttggatattattatctacatttcctttgttttaagaatttcccaacagtgtcttatgaaaatgtcactgacgcatctctgctacccaagtagcacagtgtcggccctggtcctg

SEQ ID NO: 22207 - DNA, 120 bp, synthetic construct
  misc_feature 1..120: note = Artificially Synthesized Probe
  source 1..120: mol_type = other DNA
gactgcgtttacttctccagcacgattcgtttggacttgggatatgaatattattatgctcatgagtgtccaaattcatgactgaatgtacaggatactctcgtatgaagggacaatcat

SEQ ID NO: 22208 - DNA, 120 bp, synthetic construct
  misc_feature 1..120: note = Artificially Synthesized Probe
  source 1..120: mol_type = other DNA
caaatatcttgaatgcagactctaagagtttccatcttagctgatacaatgccagtttagttggtagtgaggctcacagctcaagtagggatatcatgctggttttataggagaaacatg

SEQ ID NO: 22209 - DNA, 120 bp, synthetic construct
  misc_feature 1..120: note = Artificially Synthesized Probe
  source 1..120: mol_type = other DNA
aatcttcaaggtgatagtttatccaagtgtaaatgtgttgcactaggtcagcttggaattttgagatgacttttggcatcattgcatacatctggtttgtgtactgtgctgtgcacgttt

SEQ ID NO: 22210 - DNA, 120 bp, synthetic construct
  misc_feature 1..120: note = Artificially Synthesized Probe
  source 1..120: mol_type = other DNA
agtcccccagccgccttggtcaagtattcagaattctgagcctctgtaaaagttcattattgaaactgtagggagtttactatggaaaaggccggaaaaaaaatagctgtagatatattt

SEQ ID NO: 22211 - DNA, 120 bp, synthetic construct
  misc_feature 1..120: note = Artificially Synthesized Probe
  source 1..120: mol_type = other DNA
actttgggaagagttttgtgcaagtgtgaatagaatcgattttccagtgtaagggaagcagttggaagacaggactggaaagattgtatttcaggatttgcaacactgaatagatgggag

SEQ ID NO: 22212 - DNA, 120 bp, synthetic construct
  misc_feature 1..120: note = Artificially Synthesized Probe
  source 1..120: mol_type = other DNA
cctgatttcttcagagattgggcagggacatcatcagtcttcagttctgtgatcgatgccttgtctacagaggagctgcagaatggaaagaaagtttaggtactagtgttattaggttgg

SEQ ID NO: 22213 - DNA, 120 bp, synthetic construct
  misc_feature 1..120: note = Artificially Synthesized Probe
  source 1..120: mol_type = other DNA
tgttcatatcctttggccactttttgatggggttgtttttttcttgtaaatttaagttctttgtagattctggatattagccctctgtcagatggatagattgcaaaatttttctcccat

SEQ ID NO: 22214 - DNA, 120 bp, synthetic construct
  misc_feature 1..120: note = Artificially Synthesized Probe
  source 1..120: mol_type = other DNA
taggaatttcatatccagccaaactaagctacataagcgaaggagaaataaaatcctctacagacatgcaaatgctgagagatttttgtcaccaccagggctgccttacaagaggtcctg

SEQ ID NO: 22215 - DNA, 120 bp, synthetic construct
  misc_feature 1..120: note = Artificially Synthesized Probe
  source 1..120: mol_type = other DNA
aaactgaacaaccttctcctgagtgactactggataaataacgaaatgaaggcagaaataaagatgttctttgaaaccaatgagaacaaagacacaacgtaccagaatctctgggacaca

SEQ ID NO: 22216 - DNA, 120 bp, synthetic construct
  misc_feature 1..120: note = Artificially Synthesized Probe
  source 1..120: mol_type = other DNA
tcacataaacagaaccagtgacaaaaaccacatgattatctcaatagatgcagaaaaggcctgtgacacaatgcagcaccctttcatgctaaaaactctcaataaactaggtatcaatag

SEQ ID NO: 22217 - DNA, 120 bp, synthetic construct
  misc_feature 1..120: note = Artificially Synthesized Probe
  source 1..120: mol_type = other DNA
agttgccctcaatgaaggtatttcttcaagtctgtatgcaggtaagtctagacatgtggttgtacttctggttatatggcaatgtggtgaattttagaaaactgataggagagagagaga

SEQ ID NO: 22218 - DNA, 120 bp, synthetic construct
  misc_feature 1..120: note = Artificially Synthesized Probe
  source 1..120: mol_type = other DNA
ctacttcaacctggagcagttctttagtttctccttaactttctgacctggacatttcgaatactagaggctagttgtttggaaaatgtccctcggtttggattgatctgatgttttctt

SEQ ID NO: 22219 - DNA, 120 bp, synthetic construct
  misc_feature 1..120: note = Artificially Synthesized Probe
  source 1..120: mol_type = other DNA
tgttgattttggggtaactgggacgaccagagtgagattcttaatacattaatctgttgacttctggttggctttggtgaggggcacagaaagttgtaggcattcctaattttcatgtat

SEQ ID NO: 22220 - DNA, 120 bp, synthetic construct
  misc_feature 1..120: note = Artificially Synthesized Probe
  source 1..120: mol_type = other DNA
tgcctccttgtctataactgacaaatcagacacaatagaaagggccccacatgttatgttggttaaacagggggccagtgggcagcaacttaaaaatcacattttcaaagtatacttaat

SEQ ID NO: 22221 - DNA, 120 bp, synthetic construct
  misc_feature 1..120: note = Artificially Synthesized Probe
  source 1..120: mol_type = other DNA
agatagggcctttacagtggtaaatatagtaggttctatgagtttataagggagggaccctattttgatgggattggtttccttttacaaagaggaagagaccatagggaatgagaacag

SEQ ID NO: 22222 - DNA, 120 bp, synthetic construct
  misc_feature 1..120: note = Artificially Synthesized Probe
  source 1..120: mol_type = other DNA
ctatccatctcttgaactgttttcttcttgcaaaatggaaactgtgtatcctttaaacagtaactctctgtttttttccttcagcccaccctttgcatctaccattctgctttctgtgtc

SEQ ID NO: 22223 - DNA, 120 bp, synthetic construct
  misc_feature 1..120: note = Artificially Synthesized Probe
  source 1..120: mol_type = other DNA
ctgtctcacagacgaagatgttgaggctccaagaggttacgtgcctttcaggaacccatattaagtggtaacaatgagatttttgaactcatgtttttctgattatagtactcatgtgct

SEQ ID NO: 22224 - DNA, 120 bp, synthetic construct
  misc_feature 1..120: note = Artificially Synthesized Probe
  source 1..120: mol_type = other DNA
tatatatttgctgttccctcaggatagtttgggcattttagagccacaagtagcatgaggagacaaactgagtttcattctggaagccagatagaacacctctgaatagattacacaaca

SEQ ID NO: 22225 - DNA, 120 bp, synthetic construct
  misc_feature 1..120: note = Artificially Synthesized Probe
  source 1..120: mol_type = other DNA
gtagcagtaaaacaaaatcaccgattaacccttatgtggcgcagatgaatgtctttaagccagcttgcaaatttagatcactgcatcctgctcacaatatggataaaattttcacagctg

SEQ ID NO: 22226 - DNA, 120 bp, synthetic construct
  misc_feature 1..120: note = Artificially Synthesized Probe
  source 1..120: mol_type = other DNA
ttttgttttcctttttgcttcttagatttctgacagtacccttgtacagagttgaggatgataacctttgaagatgcagatagataggaggcaaattcccccttctgttgaccacatcag

SEQ ID NO: 22227 - DNA, 120 bp, synthetic construct
  misc_feature 1..120: note = Artificially Synthesized Probe
  source 1..120: mol_type = other DNA
aaaaacttaaagaaaatatttagtcatgcacgttttttcagagaatttgagcataaaacttcaggagcctgtaactcaaagccccttggccactcctcagcatctcacactctcagtgat

SEQ ID NO: 22228 - DNA, 120 bp, synthetic construct
  misc_feature 1..120: note = Artificially Synthesized Probe
  source 1..120: mol_type = other DNA
aacctgactcaagtggaaatgtgctactgcagaaggctgtcccacattagattctgaatttccttccagaagaggtcattttcctgaggataaatagtgggacaaaagacaattaaagat

SEQ ID NO: 22229 - DNA, 120 bp, synthetic construct
  misc_feature 1..120: note = Artificially Synthesized Probe
  source 1..120: mol_type = other DNA
ccgtcccaagaatatatttttagataggtgcttagggagactctattaaagaatgcatcttccaatatgaagctgtgattcttacagttatatactgggacctgaggacctcatgccact

SEQ ID NO: 22230 - DNA, 120 bp, synthetic construct
  misc_feature 1..120: note = Artificially Synthesized Probe
  source 1..120: mol_type = other DNA
aaccagtagaaggtacatacacacacactggagattaattacaaggaattgtgttatgcgatttttgggtagctaggcaagtctgaaatctgatgagcaggttggaaattcttggacaga

SEQ ID NO: 22231 - DNA, 120 bp, synthetic construct
  misc_feature 1..120: note = Artificially Synthesized Probe
  source 1..120: mol_type = other DNA
agaactgtacagttggaagttggaaacatgaagactttggaaagattctgtcctcttcaatatacacatggctttcgggaaaccacactttcttggtctttcccgtaccttactagtaac

SEQ ID NO: 22232 - DNA, 120 bp, synthetic construct
  misc_feature 1..120: note = Artificially Synthesized Probe
  source 1..120: mol_type = other DNA
gcgtgccccctcttcagtgccctttactatctggattattgctttgccagattttctcatgtagtaatgagctgaaaccagctcttataaggtgggccaattgttaaactttaaggaatt

SEQ ID NO: 22233 - DNA, 120 bp, synthetic construct
  misc_feature 1..120: note = Artificially Synthesized Probe
  source 1..120: mol_type = other DNA
ttttttggaaaggttgcctaagatttttttattctgttggatactaggctgtaggctctttcagatcctagcttaccttattcatggctaaattgcccgcaccacttagcaaatgtggta

SEQ ID NO: 22234 - DNA, 120 bp, synthetic construct
  misc_feature 1..120: note = Artificially Synthesized Probe
  source 1..120: mol_type = other DNA
cgtgcctggcccttctgtgttatttaatactaacttttcatgggctctatagatataagtatgtttctcacatctatccacttaaggagttgagcttcctgcatgagacatagtaatgct

SEQ ID NO: 22235 - DNA, 120 bp, synthetic construct
  misc_feature 1..120: note = Artificially Synthesized Probe
  source 1..120: mol_type = other DNA
aaatatagatgaaagtgttgaatttcaggaaaaattgatgtaaaacaattaggctgtaaatactctcaagtctcaagcactgccacgaaacattgtcagccggcctatgtccacccctcc

SEQ ID NO: 22236 - DNA, 120 bp, synthetic construct
  misc_feature 1..120: note = Artificially Synthesized Probe
  source 1..120: mol_type = other DNA
taaaggactcttcaatgttaaactcatccttgatgcgtctgccctaaataagctgaagagaaatcagcctaagaagagactaagggcacataggcatccaactaatgattgaaaagcaag

SEQ ID NO: 22237 - DNA, 120 bp, synthetic construct
  misc_feature 1..120: note = Artificially Synthesized Probe
  source 1..120: mol_type = other DNA
aaatggttgggctaccaactgattatgtaagttagttgttaatataggaaaaaaaaatccctcacactttgaaatgaggccctagacaggcagaggaactggtaaatatagctacttaaa

SEQ ID NO: 22238 - DNA, 120 bp, synthetic construct
  misc_feature 1..120: note = Artificially Synthesized Probe
  source 1..120: mol_type = other DNA
ctctaaatgcatctcacttctctcatatcaaccactccatgtttttctccctaggccttagctgaaaaatacttggctttctatctttcctctaagacctcttcccacttcaaaactgtt

SEQ ID NO: 22239 - DNA, 120 bp, synthetic construct
  misc_feature 1..120: note = Artificially Synthesized Probe
  source 1..120: mol_type = other DNA
cagtgttttcatccttctctcacgttgggaacctttcatccaagatacacctttttttcctctcatgtaaggctattgtcgtgtgtgtatactgactagttttttcagctggacttttta

SEQ ID NO: 22240 - DNA, 120 bp, synthetic construct
  misc_feature 1..120: note = Artificially Synthesized Probe
  source 1..120: mol_type = other DNA
aagtctgtttcacagtcaattctagcttgaaaattctgcgttgtactgaagtggcaaaccatggatttgaagtcacatgaatttggattccttcaatgccacttcttgtggtgactttgg

SEQ ID NO: 22241 - DNA, 120 bp, synthetic construct
  misc_feature 1..120: note = Artificially Synthesized Probe
  source 1..120: mol_type = other DNA
tgagatgggtcacttcttcagctttagtatatagctcttaattgatgtccagggtgtcatcttaattcatacttctctgtctgttctatccacgcattctactcctttccctcttttcct

SEQ ID NO: 22242 - DNA, 120 bp, synthetic construct
  misc_feature 1..120: note = Artificially Synthesized Probe
  source 1..120: mol_type = other DNA
taagtataaattgtacagttgttcttgggaagtgtttatgctccatgcaagtatgatctatgagacacttcattattgccgcgagttctcgctattcctgtgcatacttatgtgagccac

SEQ ID NO: 22243 - DNA, 120 bp, synthetic construct
  misc_feature 1..120: note = Artificially Synthesized Probe
  source 1..120: mol_type = other DNA
aagtgcccttagcattcatttggaattcttgctggaatgttcggcttgtacaggttgtcaaaaacattagggcatcttgaacaaaagttagagcagtctatcaagaaaggaatgtgcaac

SEQ ID NO: 22244 - DNA, 120 bp, synthetic construct
  misc_feature 1..120: note = Artificially Synthesized Probe
  source 1..120: mol_type = other DNA
tggatcatgttggctagtattcgttctggctgagaaggtccacctttttccctaggaaaggaaaaaacgtatcaaatgtgtgtacatctttgctacactagattagaatggcttttatca

SEQ ID NO: 22245 - DNA, 120 bp, synthetic construct
  misc_feature 1..120: note = Artificially Synthesized Probe
  source 1..120: mol_type = other DNA
gggacaggtgatacgggaggcagtgttttatgactaaaagagtcctagacaaaagtcaaaagatctgtgttttaccactctccagcagtttatggaagtcctaaattttgtttccttagt

SEQ ID NO: 22246 - DNA, 120 bp, synthetic construct
  misc_feature 1..120: note = Artificially Synthesized Probe
  source 1..120: mol_type = other DNA
gtttcactgatgctttagaatttgggctctggcctcagtacaagacatttgcaaaccatcagatctattggttttgctaagattgtttgttctattttgtaggctagggtgcatacctac

SEQ ID NO: 22247 - DNA, 120 bp, synthetic construct
  misc_feature 1..120: note = Artificially Synthesized Probe
  source 1..120: mol_type = other DNA
cttagatcattagcatatcatgctgcgacccacaccagaatgtaccattaacaaagcagccttcatgtaattaatgtaaataatatggaatacagcttgagttacccagtcagccttggc

SEQ ID NO: 22248 - DNA, 120 bp, synthetic construct
  misc_feature 1..120: note = Artificially Synthesized Probe
  source 1..120: mol_type = other DNA
gggtaaagatcttacagcgtatactgcagctctaatagttctctgcttactgccttgtaataagagtattaaagacagatgggcaaggccgatttaaaccaattacagcgtttcatgtac

SEQ ID NO: 22249 - DNA, 120 bp, synthetic construct
  misc_feature 1..120: note = Artificially Synthesized Probe
  source 1..120: mol_type = other DNA
attttgctgttgcagtggtcatcttcagattcagctgattgtatttatagaaagcatctactttgtacagccaaatggtagccatactacctatcctgaaaaatagtcactggctggctt

SEQ ID NO: 22250 - DNA, 120 bp, synthetic construct
  misc_feature 1..120: note = Artificially Synthesized Probe
  source 1..120: mol_type = other DNA
cgcagtgtacggttatgaagtgtggtacataataaaataaaagcaataatgctgatatttctgagggatccatcagagctgacctgaagcaacatatttcatctggtttgtctgggtacg

SEQ ID NO: 22251 - DNA, 120 bp, synthetic construct
  misc_feature 1..120: note = Artificially Synthesized Probe
  source 1..120: mol_type = other DNA
catacctaagaaaacgagaaacaaatggtgtcctctcaacacagttaagatattcaatactcccttcatggctactgcctagctttgtcttattaaaagagaatatggccaggtacagtg

SEQ ID NO: 22252 - DNA, 120 bp, synthetic construct
  misc_feature 1..120: note = Artificially Synthesized Probe
  source 1..120: mol_type = other DNA
aatcagcctagtgtgcaagacagaaaagctgatagtccaaaattgcactttaagctaagacagactgtcagtcttcaggaatggtggggaatggcctatttatgtaatcagatactaaac

SEQ ID NO: 22253 - DNA, 120 bp, synthetic construct
  misc_feature 1..120: note = Artificially Synthesized Probe
  source 1..120: mol_type = other DNA
gttaactacaaataatggatggaaacattgttggttattttaagcagtgaggaaacctaggtcctagagcagagtattttatgaccggtaactttacagaacacacgccagagctctcac

SEQ ID NO: 22254 - DNA, 120 bp, synthetic construct
  misc_feature 1..120: note = Artificially Synthesized Probe
  source 1..120: mol_type = other DNA
gccaccgcacccggctcacttgggttttttttctaggtatttcatacttccacctcttctgcttgtaagtgacattgtatgtattccttagtgcttgattgcgtattattttgaagaata

SEQ ID NO: 22255 - DNA, 120 bp, synthetic construct
  misc_feature 1..120: note = Artificially Synthesized Probe
  source 1..120: mol_type = other DNA
gtcaggtctctttattcctgaggataattaaatagcatttggagtgcatgtagactctatgggcaggaaatatgactgagatagaattgttcactaattatgatggttggttgggctgca

SEQ ID NO: 22256 - DNA, 120 bp, synthetic construct
  misc_feature 1..120: note = Artificially Synthesized Probe
  source 1..120: mol_type = other DNA
aatgaacaatatctataattagctgtcagctccatagggggatgtattaatatgagttccctgcatctgtgaatacttgaaccatctcttgaagcctctgctcctatctttgcgcagatg

SEQ ID NO: 22257 - DNA, 120 bp, synthetic construct
  misc_feature 1..120: note = Artificially Synthesized Probe
  source 1..120: mol_type = other DNA
tctttcaatatgtctgcatgtcagaatattatgatttagagcaggctgtgatctatgtcgggttctactgtgtctatgttgaattggtctactgcactaaaatcgcatcttggtgatgct

SEQ ID NO: 22258 - DNA, 120 bp, synthetic construct
  misc_feature 1..120: note = Artificially Synthesized Probe
  source 1..120: mol_type = other DNA
cagacactacttatgatcagccgtgttgtctttggcatattaactttgtttagaaaactgctactgtttgtaaactatacgatatacgatagaccttttctggagagtttgacctggcac

SEQ ID NO: 22259 - DNA, 120 bp, synthetic construct
  misc_feature 1..120: note = Artificially Synthesized Probe
  source 1..120: mol_type = other DNA
ttccattgacatgcaaaggaaacagaggttctcagctctctgaaatgacattttgtatcatgtgtaggtatatagcttgaagcacagcagcattgctatagctaacatgctgtttagtac

SEQ ID NO: 22260 - DNA, 120 bp, synthetic construct
  misc_feature 1..120: note = Artificially Synthesized Probe
  source 1..120: mol_type = other DNA
tagctcagactagagaactgtggcagtttaatatatgtcttattctccaggacttgacttctatggttagttaaaattgtttcaactttccaagccctgcagccctgccatacagttgaa

SEQ ID NO: 22261 - DNA, 120 bp, synthetic construct
  misc_feature 1..120: note = Artificially Synthesized Probe
  source 1..120: mol_type = other DNA
atcaagtctttgagggcacagcaattgtaatccttgaatgttttcttttagaatgagtcattctcttggttcttagtagactgaggcagcctggggttaatattctgcttaatgctcctc

SEQ ID NO: 22262 - DNA, 120 bp, synthetic construct
  misc_feature 1..120: note = Artificially Synthesized Probe
  source 1..120: mol_type = other DNA
ctttaagtatctcacaattatgatgcttatagatactgaatttgttgctgtggcaggattttgtgagtgtcttcattttgctttctggtcttttgggacactttctaagcacacggcgct

SEQ ID NO: 22263 - DNA, 120 bp, synthetic construct
  misc_feature 1..120: note = Artificially Synthesized Probe
  source 1..120: mol_type = other DNA
cccccctccacaggctgatcagtggtgagatcttcctgcttttgcacatggacgacctaggtttacatatttaatactgtttattttgttgcaacattttatataaatgatacagtttca

SEQ ID NO: 22264 - DNA, 120 bp, synthetic construct
  misc_feature 1..120: note = Artificially Synthesized Probe
  source 1..120: mol_type = other DNA
cagtctaaagatgtggattttcattttgactctgttatcaatcatataatgagagaatttcagagaaggaataccttggcatgtgctgaacaccctggcttgcacctctgctcactgatt

SEQ ID NO: 22265 - DNA, 120 bp, synthetic construct
  misc_feature 1..120: note = Artificially Synthesized Probe
  source 1..120: mol_type = other DNA
attgccctttttcatttcaattctgttagcactgtttggcgttttgaacttgtagtaagcattgtagagtcactctgttacctaagaactgcagatggtattgaagcccagctctctctt

SEQ ID NO: 22266 - DNA, 120 bp, synthetic construct
  misc_feature 1..120: note = Artificially Synthesized Probe
  source 1..120: mol_type = other DNA
caggatcccttgggtgatggtagaggtcttactgagttgctgtgtgaaggcaaatattttagaatatttgagactcagaatttgtgtagttccagagaacaccccattgttaagtacgtc

SEQ ID NO: 22267 - DNA, 120 bp, synthetic construct
  misc_feature 1..120: note = Artificially Synthesized Probe
  source 1..120: mol_type = other DNA
gggaatttgtgatattccgagtgatgaatttgttaaggtaattcacatttgcctcaaaatagggaagttaattatttggaccctgggattctttatcagcccttatggggctaaggaaat

SEQ ID NO: 22268 - DNA, 120 bp, synthetic construct
  misc_feature 1..120: note = Artificially Synthesized Probe
  source 1..120: mol_type = other DNA
gccatatttatattgttttctctctccttcatgcaggaaatttacatgccacttatgtgatagaagtttcacagagaagtgggccctgaacaaccacatgaaactccacacgggagaaaa

SEQ ID NO: 22269 - DNA, 120 bp, synthetic construct
  misc_feature 1..120: note = Artificially Synthesized Probe
  source 1..120: mol_type = other DNA
accctattgtgatgtttgtgatttcttttttatagtctaagtctagtgggcccaaaacttccttacaagcttatatttgagtctctccctagagcattgtggccatattcctgtgagctg

SEQ ID NO: 22270 - DNA, 120 bp, synthetic construct
  misc_feature 1..120: note = Artificially Synthesized Probe
  source 1..120: mol_type = other DNA
gacagaaaggaagaatacttgaatccagaagtcctaagattgctctttcctcattagaaattttgcttattgaatgatatggcacaaacactcccactagcacacaccaccagatgtgtg

SEQ ID NO: 22271 - DNA, 120 bp, synthetic construct
  misc_feature 1..120: note = Artificially Synthesized Probe
  source 1..120: mol_type = other DNA
ctagctggccagcacttactgcctgaatatgctgcagtgggaagatagattgcatttataaacttagggcacatgttagcttgtgtgaaaatgcttaaaaaaatgagcatttgcacacat

SEQ ID NO: 22272 - DNA, 120 bp, synthetic construct
  misc_feature 1..120: note = Artificially Synthesized Probe
  source 1..120: mol_type = other DNA
ttacatggaaacatttgattggaggaattagtaaccctgaaagccttgatagatatgttttaatgatctgtgacctccgcagtccctcatctgtttgttgttgcaacaggcgagaagtcg

SEQ ID NO: 22273 - DNA, 120 bp, synthetic construct
  misc_feature 1..120: note = Artificially Synthesized Probe
  source 1..120: mol_type = other DNA
gaaccacttttttactctaaatgtgtcctagttcagatgataagtcacttgatgacaaaattggtaataaatgtcctacttctcttaggtctcatgagaatggttgagtttgtcagtcat

SEQ ID NO: 22274 - DNA, 120 bp, synthetic construct
  misc_feature 1..120: note = Artificially Synthesized Probe
  source 1..120: mol_type = other DNA
gtgatagatcgatcaggaagcctgcactgagctggcacaactttatattttatgtcaggtccagaggctccttattactttgctattaactttataccatataggacagtgtctcataga

SEQ ID NO: 22275 - DNA, 120 bp, synthetic construct
  misc_feature 1..120: note = Artificially Synthesized Probe
  source 1..120: mol_type = other DNA
atgtaggagggaaacaggaggaaaggaaatttcatccttgttctgcttgtttgaaaagcacatgtacaggtagccctgttgacttacagataacattgtttgagagtagccaatatctta

SEQ ID NO: 22276 - DNA, 120 bp, synthetic construct
  misc_feature 1..120: note = Artificially Synthesized Probe
  source 1..120: mol_type = other DNA
aactacgaaaccaagaaaatgcagctcagagatcttagatgacctttaatttataccattgacttaggcagtggagttcatgatgtcatccttttaccccacttcaaatatcagcagaat

SEQ ID NO: 22277 - DNA, 120 bp, synthetic construct
  misc_feature 1..120: note = Artificially Synthesized Probe
  source 1..120: mol_type = other DNA
ctgagaaaacaaccttttaaaaatgagtcaaaaagttgaagtagatacttccccaaagaatataaaggtatggcagataagcacatggaaagatcctcggcaccctcggaggaatgcagg

SEQ ID NO: 22278 - DNA, 120 bp, synthetic construct
  misc_feature 1..120: note = Artificially Synthesized Probe
  source 1..120: mol_type = other DNA
attgctaggaaatgctaactaatataatagtgacagaaagcatggtggcttgacaaagggatgaacagggaaccttgaagttaaaaggagtctttttgggggtgatggttgtgttcattg

SEQ ID NO: 22279 - DNA, 120 bp, synthetic construct
  misc_feature 1..120: note = Artificially Synthesized Probe
  source 1..120: mol_type = other DNA
ttctcttgatcttgttcaaagggtctaacaggtagcaagtgaaatatggcaaaactgggatcagaattgaagtccatctggcttcatctaactactgtgctgcagtaagagagaaaatac

SEQ ID NO: 22280 - DNA, 120 bp, synthetic construct
  misc_feature 1..120: note = Artificially Synthesized Probe
  source 1..120: mol_type = other DNA
ggaggtgtcaaatgaaagaaatactttgttcaagataccagtatgctatttcactatcttcgtgtcctctgcaagccatgaacttctcatgggtagaatggttacacttgataagcacgt

SEQ ID NO: 22281 - DNA, 120 bp, synthetic construct
  misc_feature 1..120: note = Artificially Synthesized Probe
  source 1..120: mol_type = other DNA
tgtgactacaggtaatgactcatcactgagcagtcaaatcaggtgggccgccatgatggattaaaagcccgttaaatcccaattagaagtgtagtttttctaatcaccatgagttcatat

SEQ ID NO: 22282 - DNA, 120 bp, synthetic construct
  misc_feature 1..120: note = Artificially Synthesized Probe
  source 1..120: mol_type = other DNA
cactgcgctcgacccacatgatggcgtgaaattgagggtgtgtcttcaaatgcagcccacttttgttgaatattatgtatgttaagcctgaaacctttaaaaagttaggtttttgtattc

SEQ ID NO: 22283 - DNA, 120 bp, synthetic construct
  misc_feature 1..120: note = Artificially Synthesized Probe
  source 1..120: mol_type = other DNA
aacattaaaaatagcacaagactgttttgacaagccacaagtttttaaataggaggagttgttgataacaattgccaattagccgcagcatccagtttctgtctgcgtttggtatgagca

SEQ ID NO: 22284 - DNA, 120 bp, synthetic construct
  misc_feature 1..120: note = Artificially Synthesized Probe
  source 1..120: mol_type = other DNA
gtttgaaaatgtattatacgttttactaaggttgagatcatattactcgtccgttattcaagttatctccctgaaatagcctcacttctgtttaggaccgcatttgagccagctggatcc

SEQ ID NO: 22285 - DNA, 120 bp, synthetic construct
  misc_feature 1..120: note = Artificially Synthesized Probe
  source 1..120: mol_type = other DNA
taattggtcttttgaacctgaggctatttttcaagtttgcattattaatttaggcaatgacatctcattctatttaaatgtaaacgtgtacctccttcattagcttttactgtctaaaat

SEQ ID NO: 22286 - DNA, 120 bp, synthetic construct
  misc_feature 1..120: note = Artificially Synthesized Probe
  source 1..120: mol_type = other DNA
gtagaaagtctgtatctcgtggagcagaagaatagaatctgcagtccctgcctcatattgaagatttacctcgtcattttgctaaatttgttggaaatacactttgggtatttttccccc

SEQ ID NO: 22287 - DNA, 120 bp, synthetic construct
  misc_feature 1..120: note = Artificially Synthesized Probe
  source 1..120: mol_type = other DNA
tgtgcaggctcataggctgtaccacaagaagcagtggatagaacaaatgtggttttgcccctgaatacagacaatgagaaaaaatagatcttgatctctgtagcagtatattgtatttgc

SEQ ID NO: 22288 - DNA, 120 bp, synthetic construct
  misc_feature 1..120: note = Artificially Synthesized Probe
  source 1..120: mol_type = other DNA
tgtactccctttcacgtggagtagaagttcctggcaagtttaggtgggatttttttgaggggttccctaacaaaataaaatgaatgtcctcttaattgtatcatctgttcaggtgttcta

SEQ ID NO: 22289 - DNA, 120 bp, synthetic construct
  misc_feature 1..120: note = Artificially Synthesized Probe
  source 1..120: mol_type = other DNA
atattgcctgtctggagcctgtagaaaaaatgtgaaagacagaaagacaaactttgaacatttggaaaatggtgatgccgtcgtttttatgaagcagaggaagacagagcagcttatgta

SEQ ID NO: 22290 - DNA, 120 bp, synthetic construct
  misc_feature 1..120: note = Artificially Synthesized Probe
  source 1..120: mol_type = other DNA
actcccaaattatacttttcctttgatttcaagttctctttttcactcggacaagcctggattgtaggtcacatgagattctgtggtaaaagacagcaggaagtctgtgtgggtttctct

SEQ ID NO: 22291 - DNA, 120 bp, synthetic construct
  misc_feature 1..120: note = Artificially Synthesized Probe
  source 1..120: mol_type = other DNA
agagggtggcagctgaaggcaggtagacggatgcgtgctgtctttgtgttggcattcatttgtttgcgtaaaatcactttctgaaatgtactttaatgtttatgtgccaaatgtttaaat

SEQ ID NO: 22292 - DNA, 120 bp, synthetic construct
  misc_feature 1..120: note = Artificially Synthesized Probe
  source 1..120: mol_type = other DNA
gagatagggaacgtgatttgtttccatgacttagggtgcattataactgctgagtgttggtgtcagttgtattaaaccactaaaaagtggaaataagtcatatatatggccccaccggtt

SEQ ID NO: 22293 - DNA, 120 bp, synthetic construct
  misc_feature 1..120: note = Artificially Synthesized Probe
  source 1..120: mol_type = other DNA
aaaagtaaaactaattttgccttcactcacatgagccatagaaggaggaagctttattgtccctgggaaggtgataaggcagagtaattgtatattatactgtcctggaacatctgcctg

SEQ ID NO: 22294 - DNA, 120 bp, synthetic construct
  misc_feature 1..120: note = Artificially Synthesized Probe
  source 1..120: mol_type = other DNA
tgacttatgtgaccaggcctgccagactgcccactaaactgtgctcctatacatgaatgccaaaagttgttgttttaaatctagtctttttcccttagacattattagattgtcccaagt

SEQ ID NO: 22295 - DNA, 120 bp, synthetic construct
  misc_feature 1..120: note = Artificially Synthesized Probe
  source 1..120: mol_type = other DNA
cctgctggattatttctatttcattgaaggggaggcaaccactaaagtctgctgcatgtttttagctcagagactttagcatgttcgttcttcatctgctcccattgtaaggcatataat

SEQ ID NO: 22296 - DNA, 120 bp, synthetic construct
  misc_feature 1..120: note = Artificially Synthesized Probe
  source 1..120: mol_type = other DNA
cgcagcagtcctctaagtggacacggtgggttttcaaccttttctaaatgttcacgttttcttttatgcagtacagcacagctttttgttactgctcttaacatacacaactcttttgtc

SEQ ID NO: 22297 - DNA, 120 bp, synthetic construct
  misc_feature 1..120: note = Artificially Synthesized Probe
  source 1..120: mol_type = other DNA
tatctagtttacttaaattctcctgacatttaccagttttgtacgttattattactatttggagtcagagtcttgccaccatacctgcattcccagcacttctctcttcccgttttcctg

SEQ ID NO: 22298 - DNA, 120 bp, synthetic construct
  misc_feature 1..120: note = Artificially Synthesized Probe
  source 1..120: mol_type = other DNA
cataagagctaccttattctatttaatggcttttatacaacaagtaaggttgaatgcccagatagtacacacaccaagctttcttccacagggtttactgagagaaactcacagagggag

SEQ ID NO: 22299 - DNA, 120 bp, synthetic construct
  misc_feature 1..120: note = Artificially Synthesized Probe
  source 1..120: mol_type = other DNA
ttgagcttctgaactttcaagggtgtgtgtatattttaaacttgaaggatactatcaaatgtttttcaaaagcttttgctaacttacaccattaccagaggtatatcattttcccttacc

SEQ ID NO: 22300 - DNA, 120 bp, synthetic construct
  misc_feature 1..120: note = Artificially Synthesized Probe
  source 1..120: mol_type = other DNA
cttaagctgtcttacataaattgtgaaacaagctccgagtttatatattggagcacattcttccaacctacagtgagctttaaagcaacatatatggaggcttatattcccctctacttt

SEQ ID NO: 22301 - DNA, 120 bp, synthetic construct
  misc_feature 1..120: note = Artificially Synthesized Probe
  source 1..120: mol_type = other DNA
ttataatgtggagttcatgacttactcttggagaacaaatggaaacaactgccgtagtgttacatgattgggcacatgtagctggagacagaatctctagtgacaacatcatttttggag

SEQ ID NO: 22302 - DNA, 120 bp, synthetic construct
  misc_feature 1..120: note = Artificially Synthesized Probe
  source 1..120: mol_type = other DNA
tgggcagaatccctgttacctagtgtgatcctcatagacctggtgctgtccatactcctgtgtagaattgtaatatgtgtgtgttacatgtatgtataattactttacacacacatctat

SEQ ID NO: 22303 - DNA, 120 bp, synthetic construct
  misc_feature 1..120: note = Artificially Synthesized Probe
  source 1..120: mol_type = other DNA
tgattgttgccagtatttcaagacagccactaattttacaaaaaagcaaattggggtagtgaggccgatgcatggatcttcctggggaaaatgggaatcagtgtttgtttagaatctctg

SEQ ID NO: 22304 - DNA, 120 bp, synthetic construct
  misc_feature 1..120: note = Artificially Synthesized Probe
  source 1..120: mol_type = other DNA
caggctcaggctctgaaacattgttagtggaattgtaaattgctacaattcctctgaagggcagtatggcagaatttatcagaattcatgcccattgacatttgaagcaattccagttgt

SEQ ID NO: 22305 - DNA, 120 bp, synthetic construct
  misc_feature 1..120: note = Artificially Synthesized Probe
  source 1..120: mol_type = other DNA
cccatcttgggcccttttgctaatcagtcaccccgtgctttaaattctgtacgtcaaagctgctcaagactttcaacatgttatattccaaaatttgatttgaagtgcactcttagaatg

SEQ ID NO: 22306 - DNA, 120 bp, synthetic construct
  misc_feature 1..120: note = Artificially Synthesized Probe
  source 1..120: mol_type = other DNA
tcatagggaaacaccaagatacatatagatggtgacagatataagcttcttggcttgtaataggaggtcccaggtggcagaagagggaaattcagagataaaataaggtctagggatatt

SEQ ID NO: 22307 - DNA, 120 bp, synthetic construct
  misc_feature 1..120: note = Artificially Synthesized Probe
  source 1..120: mol_type = other DNA
tgtgtgcatgtgtgtgctggtatggagaggttgtgtgcagcattggttcgaattgggagtgtgtgtgtgtgtgcgtgcatgtgtgtgctggtatggtgaggttgtgtgcagcattggttc

SEQ ID NO: 22308 - DNA, 120 bp, synthetic construct
  misc_feature 1..120: note = Artificially Synthesized Probe
  source 1..120: mol_type = other DNA
agcagcatgtgataattagcagtagctgcacatcaggcaaaactctgaaatttgaatgacttaaaaatttattgcttactgaggtaaaggcccatggaggctgagaacctcttcttcttc

SEQ ID NO: 22309 - DNA, 120 bp, synthetic construct
  misc_feature 1..120: note = Artificially Synthesized Probe
  source 1..120: mol_type = other DNA
gctttttgttttctctccccagtgtcagtaaacaatggtgaatttaggaggtgtctgtaatgctgtagaaaacatgttggagatctgcagaattaagggggtaatttggaacggtttacc

SEQ ID NO: 22310 - DNA, 120 bp, synthetic construct
  misc_feature 1..120: note = Artificially Synthesized Probe
  source 1..120: mol_type = other DNA
ttctttctagtctttttcctaggcatagagggatttgatttgttcagtttaattatactgagcagatttagttgtacatgtgcatttgatgacaagccctgcctggagatgggagggaag

SEQ ID NO: 22311 - DNA, 120 bp, synthetic construct
  misc_feature 1..120: note = Artificially Synthesized Probe
  source 1..120: mol_type = other DNA
ttcatttttgtaccactcctcagtggtaataggtgtgttctcagggatcagctaacaccttcactgccctcgagtggtaccagaataatttgatattaaaataatagtgcttgggatttg

SEQ ID NO: 22312 - DNA, 120 bp, synthetic construct
  misc_feature 1..120: note = Artificially Synthesized Probe
  source 1..120: mol_type = other DNA
tttttttcttaaaaaatgcttgtgatttgaaatgttatgccctgtttattgacaccatcatcttctagtgaatgcctagaaagaatgtgacctgcgaccacgaccacggagtcaagcgta

SEQ ID NO: 22313 - DNA, 120 bp, synthetic construct
  misc_feature 1..120: note = Artificially Synthesized Probe
  source 1..120: mol_type = other DNA
tgtcgagtgtgtgatttagtaatttttctgctatccagggctgtatttggcaaacaaacaaaaacagaggtctctgctcattcccttttggtgaggttgtcactgaaaaggttttgaaac

SEQ ID NO: 22314 - DNA, 120 bp, synthetic construct
  misc_feature 1..120: note = Artificially Synthesized Probe
  source 1..120: mol_type = other DNA
tttactctgtgggtctcagttttcctctgaagatggggatagtgatgcctaccacacagaatgtgtgtgccatctaaatgggatcatttatactgtatgtaaactgtttgacatgatcat

SEQ ID NO: 22315 - DNA, 120 bp, synthetic construct
  misc_feature 1..120: note = Artificially Synthesized Probe
  source 1..120: mol_type = other DNA
ttgtatattcacataatggaataagtcagtgagaatgaatgaactacaagtacaagcagcagtgtgaagtaagtctcacagtcttatcactggatgaaccaagccagtcaccaaggagta

SEQ ID NO: 22316 - DNA, 120 bp, synthetic construct
  misc_feature 1..120: note = Artificially Synthesized Probe
  source 1..120: mol_type = other DNA
tggaagacccacgggtagtgtggtcactttctgagcctatgagcagtgcatcaaagctatgaagttgatttagttatttcttatttctctctgagaccttaaatgtggtaagtgttgttg

SEQ ID NO: 22317 - DNA, 120 bp, synthetic construct
  misc_feature 1..120: note = Artificially Synthesized Probe
  source 1..120: mol_type = other DNA
atttactatttttcttaagtgctgctaaatgtctttgtttctttcatactcctgtccaaatactccggagctgtctgccatagcagtaccctcaatgtccatcatggctcaacacatttg

SEQ ID NO: 22318 - DNA, 120 bp, synthetic construct
  misc_feature 1..120: note = Artificially Synthesized Probe
  source 1..120: mol_type = other DNA
cttcctgccatcctcctgcaagagggtgatcctaattgttctagagtgacccaaatggttgttatgtatggtttccttatgttttcattagctagtaagtagtaatgaagaactctgttt

SEQ ID NO: 22319 - DNA, 120 bp, synthetic construct
  misc_feature 1..120: note = Artificially Synthesized Probe
  source 1..120: mol_type = other DNA
catatatatgtgtacacattagtattcatacatacatattagtgtaacagtctgagcatatactaaaattagggctacagaaggcctacttaaaacttttcagagtagaaacgtatcatt

SEQ ID NO: 22320 - DNA, 120 bp, synthetic construct
  misc_feature 1..120: note = Artificially Synthesized Probe
  source 1..120: mol_type = other DNA
gttctgtaaagtcctgaatggcattcataaatttaaaataaagttagagtacacaattaaaacacagcttttgatggtaacacctaacaagattggccgaactggctctcaggctcccgg

SEQ ID NO: 22321 - DNA, 120 bp, synthetic construct
  misc_feature 1..120: note = Artificially Synthesized Probe
  source 1..120: mol_type = other DNA
cgaaagcctgagaatttagcattaatacgttgccattttctatgctgtattctcgtattcagagtttatcatttttccactcacatcctccttcattcccagaattcagcccaggaacca

SEQ ID NO: 22322 - DNA, 120 bp, synthetic construct
  misc_feature 1..120: note = Artificially Synthesized Probe
  source 1..120: mol_type = other DNA
atatacactgtgtggactcattgcttctgtgtacctctgcttctaggccttcgcagcagataaacaaggaagtgtaggtatgtatactaaatcctgcattcctgtgaatatagatgtttt

SEQ ID NO: 22323 - DNA, 120 bp, synthetic construct
  misc_feature 1..120: note = Artificially Synthesized Probe
  source 1..120: mol_type = other DNA
taaaaaaaaaactgttgaactatttttcaaactgtctgtgcatagtatgttcccgccagcaatgtgtgagttcccgtcactccacgtactcaccaggaactcatcgtgtggttttaattt

SEQ ID NO: 22324 - DNA, 120 bp, synthetic construct
  misc_feature 1..120: note = Artificially Synthesized Probe
  source 1..120: mol_type = other DNA
tcacacaagatggcttacattgataagtataattgcattataattccacttacagatgatgtgcctagagtagtcgaagtcaaagagatagaaggtagaatgttgggtgccgggagctgc

SEQ ID NO: 22325 - DNA, 120 bp, synthetic construct
  misc_feature 1..120: note = Artificially Synthesized Probe
  source 1..120: mol_type = other DNA
aaatcccctaatagcttttactgcagcagaatatactgtaggccccaactagataaaatagcatttttgatggctggtctagatgcttctaaaaagctgcacagacttgttcactcttgt

SEQ ID NO: 22326 - DNA, 120 bp, synthetic construct
  misc_feature 1..120: note = Artificially Synthesized Probe
  source 1..120: mol_type = other DNA
ccagtagatgctgctcttgagtgacaagagtatcccaagttacattttatattaacatatgtgacctcgattcttggcacaacttgcatattcatgtttatgtacccaattctcttgatt

SEQ ID NO: 22327 - DNA, 120 bp, synthetic construct
  misc_feature 1..120: note = Artificially Synthesized Probe
  source 1..120: mol_type = other DNA
tgtaccagggaggagctcagaagttgaattgtgcggcacatacagtaaaagctgaaaaaggaagataatccaacagctggctctttagaagaggctgaataatactttaggtttctgttt

SEQ ID NO: 22328 - DNA, 120 bp, synthetic construct
  misc_feature 1..120: note = Artificially Synthesized Probe
  source 1..120: mol_type = other DNA
gctggattatcaccaaacaaattttggacattttgctcccatgatataaggttgataaagaaaagtgaaaggtgctttaggaaagcacccctgagcaaatgacctgtatagagcatctgg

SEQ ID NO: 22329 - DNA, 120 bp, synthetic construct
  misc_feature 1..120: note = Artificially Synthesized Probe
  source 1..120: mol_type = other DNA
ttatctgcataatgctcatattcaggacttctgcagttgtgtttcatgaatagattgtcattttaattcatgacctcttttttaccaatcccagcgcattatgcttatgagcgggcccca

SEQ ID NO: 22330 - DNA, 120 bp, synthetic construct
  misc_feature 1..120: note = Artificially Synthesized Probe
  source 1..120: mol_type = other DNA
gctcactctcttgtccttggttaggttataaaagctcaagaagagaaaacagtcattaagagcatagagatagagttgacattgcagggtaagacataatctaaggtgtgaggcgacctt

SEQ ID NO: 22331 - DNA, 120 bp, synthetic construct
  misc_feature 1..120: note = Artificially Synthesized Probe
  source 1..120: mol_type = other DNA
cttttatgaaagattccgaggattagaagaaacaagtaggttgacttgctccatgtagggatcaacttatggacagaacatatgtgattgcagtcattgtggagcttgttgtagccagag

SEQ ID NO: 22332 - DNA, 120 bp, synthetic construct
  misc_feature 1..120: note = Artificially Synthesized Probe
  source 1..120: mol_type = other DNA
tcttgggtgtactgctcagttttctttggttgtttgttctataattggggtggtagaacaatgcacataaaatgaactttctttctagacgcttacacagacatcccctttgttagctcg

SEQ ID NO: 22333 - DNA, 120 bp, synthetic construct
  misc_feature 1..120: note = Artificially Synthesized Probe
  source 1..120: mol_type = other DNA
agactaaaaatagatgatcttcatttccagatttggatgctccatgtgttgggttgaagatcgctgtggtgtggatctgatggctggattaactgccatgccctcattaaattagatcat

SEQ ID NO: 22334 - DNA, 120 bp, synthetic construct
  misc_feature 1..120: note = Artificially Synthesized Probe
  source 1..120: mol_type = other DNA
ctcagtggggaccagatactcagtaacgtacttggctgatatgcatgtgtttctcatctccagcatcttatgagaatccacttcttttcgaggaatgaaaaagtgttagatcatattgca

SEQ ID NO: 22335 - DNA, 120 bp, synthetic construct
  misc_feature 1..120: note = Artificially Synthesized Probe
  source 1..120: mol_type = other DNA
tagcgtgggattagtgttgaagagtcactattacagtgactatatggaaagtttcccagcataaagtgacactctcgttctactgaacagttttccccttcgaatttctacaaattatgc

SEQ ID NO: 22336 - DNA, 120 bp, synthetic construct
  misc_feature 1..120: note = Artificially Synthesized Probe
  source 1..120: mol_type = other DNA
tttacccataacagccagcgacgactcgtatgcatttgcttgcctgaatatacccacagtttgtattagttgcctatttccagtagttaacaggtgagataagacagtttatgaattact

SEQ ID NO: 22337 - DNA, 120 bp, synthetic construct
  misc_feature 1..120: note = Artificially Synthesized Probe
  source 1..120: mol_type = other DNA
acagccattcattgctgcccatagcaccgtcacccccaaagtagtcattacctcagttatgactgatgtctcaaggtggtttgatgagattatgaattaatttatcatatgtgtaagctg

SEQ ID NO: 22338 - DNA, 120 bp, synthetic construct
  misc_feature 1..120: note = Artificially Synthesized Probe
  source 1..120: mol_type = other DNA
catttttcttttggtcattgaagtgagggtttctagtctgtgtggtttatcttgtcaatttgactagtagaagaaacaggtcattgtggagaaacctaacagatgaccgcctcctgttcc

SEQ ID NO: 22339 - DNA, 120 bp, synthetic construct
  misc_feature 1..120: note = Artificially Synthesized Probe
  source 1..120: mol_type = other DNA
aagtgctgtaaattcacaccttcaaaaccaagggtcaaagagaaaatgacttcagaggtaaaataattaagcatcaaacacaacagcagaacccaggatacttgtctccgggccttcatt

SEQ ID NO: 22340 - DNA, 120 bp, synthetic construct
  misc_feature 1..120: note = Artificially Synthesized Probe
  source 1..120: mol_type = other DNA
tgtaaaaagaaaggacaatctaaagcttgggaagcaaactgtggaaaaatcaaggaagtctacagccagccatggtgtccacttacaaaaacaaacagagaagaacgcgaagaaaactag

SEQ ID NO: 22341 - DNA, 120 bp, synthetic construct
  misc_feature 1..120: note = Artificially Synthesized Probe
  source 1..120: mol_type = other DNA
attaaaatgttcaagaaaaaacaatactgatagattctttttaaccccccactggctatggttaagctgatggctccagatgaccatcctggctaatattgccttcccagcagcagtaga

SEQ ID NO: 22342 - DNA, 120 bp, synthetic construct
  misc_feature 1..120: note = Artificially Synthesized Probe
  source 1..120: mol_type = other DNA
catgtggtagcagggcagcacacaagagtctaaataacttctctattatgaccactactactgtgatacccccagtgcctccaaatgttcaaatgtactgaacttttcttttttctctat

SEQ ID NO: 22343 - DNA, 120 bp, synthetic construct
  misc_feature 1..120: note = Artificially Synthesized Probe
  source 1..120: mol_type = other DNA
tctatgaagtattgctagaataactgcaaaggtgttgcaagcagttttctcagcttctgtcattcaaaagtaagacccctgccccttattactaatgaggcatcaacagttattgatcag

SEQ ID NO: 22344 - DNA, 120 bp, synthetic construct
  misc_feature 1..120: note = Artificially Synthesized Probe
  source 1..120: mol_type = other DNA
tgttttgacagaagtataaacccttgaaaccatggccataattaaaataatgaacacatcccatttctcccagaagttgtgaggaaatggcagatatctgaatgaagggaaggccagggc

SEQ ID NO: 22345 - DNA, 120 bp, synthetic construct
  misc_feature 1..120: note = Artificially Synthesized Probe
  source 1..120: mol_type = other DNA
aaaatatgtaaatatagttgcatatagaaatatagaggatttgtttcacttctcctgacaatatgaccacagcgtataccactaccttttaccagctggctgcagacagccccttactcc

SEQ ID NO: 22346 - DNA, 120 bp, synthetic construct
  misc_feature 1..120: note = Artificially Synthesized Probe
  source 1..120: mol_type = other DNA
cactctaaatggagccccaagcattgtaattcagtttaatcctaaaggtgttgttatatgttacaagccagtcgtgcagtctacagatgctattgatatagtgatgctggaggagtgata

SEQ ID NO: 22347 - DNA, 120 bp, synthetic construct
  misc_feature 1..120: note = Artificially Synthesized Probe
  source 1..120: mol_type = other DNA
cagagtccacaggagaccatcagtggcaagaccatacttttttgtacattacatgattcctacttcagaaagctctaacttaaggaagttcatctataggttgagccaaaatattcttcc

SEQ ID NO: 22348 - DNA, 120 bp, synthetic construct
  misc_feature 1..120: note = Artificially Synthesized Probe
  source 1..120: mol_type = other DNA
acttgtgaagccaagttataatcagaatgttgctttctgagtttaaaaccagaagagagtaagtgagttgaacttaagagaaagtcctgactctgatagcctgggccataacctgcagct

SEQ ID NO: 22349 - DNA, 120 bp, synthetic construct
  misc_feature 1..120: note = Artificially Synthesized Probe
  source 1..120: mol_type = other DNA
tggagaaccataacccacgtctcacttacactgtgaagtggtctaaaaatgttcgtcttcacctacgagactctggacgtctttgagtattcattccttcattctttcattatgtattaa

SEQ ID NO: 22350 - DNA, 120 bp, synthetic construct
  misc_feature 1..120: note = Artificially Synthesized Probe
  source 1..120: mol_type = other DNA
acacaaaaactctttcaataattgcagggttgacaggtggataggatttgaatggagaggcggaagttactggacacttggatgatgcctttaataacttttcttcttccacaatgccaa

SEQ ID NO: 22351 - DNA, 120 bp, synthetic construct
  misc_feature 1..120: note = Artificially Synthesized Probe
  source 1..120: mol_type = other DNA
tgcatccaacagtgtggcttctttatgcaaacttcagggcctatgcttagtgtgcatttgtataactcatttaaccagttactaatatcacaagtgctttcaccccattttctagtggct

SEQ ID NO: 22352 - DNA, 120 bp, synthetic construct
  misc_feature 1..120: note = Artificially Synthesized Probe
  source 1..120: mol_type = other DNA
gtaagtctttgttaaagatactgcctctatctccatatcacatatgaagaaacaaagtcattgagatttgagatcagttgtccaagatcacggtgacctagcagatcatggtgacctagc

SEQ ID NO: 22353 - DNA, 120 bp, synthetic construct
  misc_feature 1..120: note = Artificially Synthesized Probe
  source 1..120: mol_type = other DNA
ctaacttgcactatgaatctctccttctgtgacgttttgggaacagcagcagttgactttggccatgtgaagggtaacacagaaaaatacgttcattaggttatgtatttaatcaaaact

SEQ ID NO: 22354 - DNA, 120 bp, synthetic construct
  misc_feature 1..120: note = Artificially Synthesized Probe
  source 1..120: mol_type = other DNA
atgttcctggctggaaatcttattcacctgaacaatagatgcctatcattcttgtatacaaagagattatcctgctctgacagttaatgcatggtcttcatcccacatcagccccttctt

SEQ ID NO: 22355 - DNA, 120 bp, synthetic construct
  misc_feature 1..120: note = Artificially Synthesized Probe
  source 1..120: mol_type = other DNA
ttagcaaagtgtctatttcttagttgagtttgaattgctcttcagaaagagaagcagctgctattaacaggcctcattacagctgcctcttgaccttgagtgaatagaaatatttgtggc

SEQ ID NO: 22356 - DNA, 120 bp, synthetic construct
  misc_feature 1..120: note = Artificially Synthesized Probe
  source 1..120: mol_type = other DNA
aactagaatggcttcttgtatggcacagagatctgcattttcgtgtgtatctatatgattgccttagcagtagaaagaacctcttcattttgggtcttagatatagtgtacgtgtagtcc

SEQ ID NO: 22357 - DNA, 120 bp, synthetic construct
  misc_feature 1..120: note = Artificially Synthesized Probe
  source 1..120: mol_type = other DNA
gtttgccatttatgtcttcttttgagaaatgtctattcaaatcttttgcccattttaaaatcagattattagatttttttccttaagagttgtttgagcttctcatatattctggttatt

SEQ ID NO: 22358 - DNA, 120 bp, synthetic construct
  misc_feature 1..120: note = Artificially Synthesized Probe
  source 1..120: mol_type = other DNA
tttattttttatgtcccaaatttttaaagaaaggtagaggccagacacagtggctcacacctgtaatctgaacactttgggagactgaggcaggagcatcacttgagcccaggagtttga

SEQ ID NO: 22359 - DNA, 120 bp, synthetic construct
  misc_feature 1..120: note = Artificially Synthesized Probe
  source 1..120: mol_type = other DNA
gtctttcccagggctccactgctacatttgttcaattgtctatgtttttttgtgtgcttgttttcattttggtttgttctgcttgatcctgactacacttaaattatctaggggtgggaa

SEQ ID NO: 22360 - DNA, 120 bp, synthetic construct
  misc_feature 1..120: note = Artificially Synthesized Probe
  source 1..120: mol_type = other DNA
ggaattgtcttcttccctcaggtttgctgatggtatcctctgtcatcgccactccattgtggagcccagccaatgatttttaagatttttattgcattttttcagttctgtaaattccat

SEQ ID NO: 22361 - DNA, 120 bp, synthetic construct
  misc_feature 1..120: note = Artificially Synthesized Probe
  source 1..120: mol_type = other DNA
atttttcaaccaggcacttgttattgatggtttggttaagtgttgttaacttgtttgcatgagaaaccaggttttcctagatgtccttctctttgaactgttccactcccttccttcccc

SEQ ID NO: 22362 - DNA, 120 bp, synthetic construct
  misc_feature 1..120: note = Artificially Synthesized Probe
  source 1..120: mol_type = other DNA
acatcttctgaaatctaggcagaggttcccaaacctcagttcttgacttctgtgcactcgcaggctcaacaccacgtggaagctgccaaggcttggggttttcaccctctgaagccacag

SEQ ID NO: 22363 - DNA, 120 bp, synthetic construct
  misc_feature 1..120: note = Artificially Synthesized Probe
  source 1..120: mol_type = other DNA
tcactccgattttactttactaattttactgtctgagccagtggatctacaaccgcccttcccagcttcccaccaacaggagatgtgtgaggacaattagctcagtactaggagaaagta

SEQ ID NO: 22364 - DNA, 120 bp, synthetic construct
  misc_feature 1..120: note = Artificially Synthesized Probe
  source 1..120: mol_type = other DNA
tgagcttcttctgtgcagtatataattggtccacatatttttaaatcctctttaacaatctctgttattaagttggtatgtttaaccacctgcccttagcatacctattgatacgctagg

SEQ ID NO: 22365 - DNA, 120 bp, synthetic construct
  misc_feature 1..120: note = Artificially Synthesized Probe
  source 1..120: mol_type = other DNA
cagatgtatattctgatagctaatatgaaaggaatttgtaagctctacaactgtgcagatgtgcgatggacattatgtctcccacctcgaatcctgtgtatccttcgaagtagacgattt

SEQ ID NO: 22366 - DNA, 120 bp, synthetic construct
  misc_feature 1..120: note = Artificially Synthesized Probe
  source 1..120: mol_type = other DNA
gtaactcccaaggtctatcctatgtatacagtacatatagtgacaattacagctctcgagattcttccgctcatctccttctttgctgtgtctttgggaggacaagaatgagaaatagtt

SEQ ID NO: 22367 - DNA, 120 bp, synthetic construct
  misc_feature 1..120: note = Artificially Synthesized Probe
  source 1..120: mol_type = other DNA
gtttatgctgcttttacaaagatagatgctactgaattgtgtgtttggggctggtttttatggaagtagagcagcttgcattcttattccatattggttgaccccaaatgttggatagcc

SEQ ID NO: 22368 - DNA, 120 bp, synthetic construct
  misc_feature 1..120: note = Artificially Synthesized Probe
  source 1..120: mol_type = other DNA
aatgcataggcttctgtgtctctgaggagcagtataggctggacaggcagaaaagagaaaaggattgctgtatcctatggcatagacttttaaccatttagtcaattgtgattttgttta

SEQ ID NO: 22369 - DNA, 120 bp, synthetic construct
  misc_feature 1..120: note = Artificially Synthesized Probe
  source 1..120: mol_type = other DNA
tttatctatttttttctgcacttatggcaccttttgtcttacaaggtgcttttcattttttatcaaatcaggttgtttaacgtggagtcctgaaagagaggcagtgcgcctttgggacct

SEQ ID NO: 22370 - DNA, 120 bp, synthetic construct
  misc_feature 1..120: note = Artificially Synthesized Probe
  source 1..120: mol_type = other DNA
acagatggaacatccaggcatctaatagtctcctgaaagcgaaaaattgaagatgaaaaacttaagtgggaatggagacacaaatttaagagctgtggacatggaggtggtcattgaagt

SEQ ID NO: 22371 - DNA, 120 bp, synthetic construct
  misc_feature 1..120: note = Artificially Synthesized Probe
  source 1..120: mol_type = other DNA
ggtaatctgtggtgtttgccagttgtcacgtggggtcgcaaagggagaaatactgcgaatattatattttattaaaataacagattttaataaagggtcgtgttcttgcgtaaaagctgc

SEQ ID NO: 22372 - DNA, 120 bp, synthetic construct
  misc_feature 1..120: note = Artificially Synthesized Probe
  source 1..120: mol_type = other DNA
gagtgacatgatttttttacataagaatatgttgcccacaaatattttgagacatttgctgagaaaatcctgcatgaaaggaagccaggaacccagcagaggaaagaaagggagcaccag

SEQ ID NO: 22373 - DNA, 120 bp, synthetic construct
  misc_feature 1..120: note = Artificially Synthesized Probe
  source 1..120: mol_type = other DNA
tacccaaatgctggtatgaggcttgtaggatttagtggctttgtaactgaactctgaaatagcacattttcccatattccactttttctgttggcttaaaatgggaattcagcacacagc

SEQ ID NO: 22374 - DNA, 120 bp, synthetic construct
  misc_feature 1..120: note = Artificially Synthesized Probe
  source 1..120: mol_type = other DNA
tccatgattgcatcatcttcccttaaactgcactattttttttttaaatcagttttgcgatttgagtagtacccggcttttgctgtttcacgctttatggtcccctcattcagagcttgc

SEQ ID NO: 22375 - DNA, 120 bp, synthetic construct
  misc_feature 1..120: note = Artificially Synthesized Probe
  source 1..120: mol_type = other DNA
cgagcagctcagcctgtagctactggagagttagcaaagatgaaggggaaagaactggcaggtctatctcatttgatcttcttgtatagatgtttttaataattatacatcagtctgttg

SEQ ID NO: 22376 - DNA, 120 bp, synthetic construct
  misc_feature 1..120: note = Artificially Synthesized Probe
  source 1..120: mol_type = other DNA
gagctggccctgcatttgtgattaacaaagtatcacataactggacttctctagtccactcaggatcattggctctgattctgaatgtgcgtagagtcaaattgtttaccttttgaagat

SEQ ID NO: 22377 - DNA, 120 bp, synthetic construct
  misc_feature 1..120: note = Artificially Synthesized Probe
  source 1..120: mol_type = other DNA
taatttcttgttgactggctcatagaatacttatgaggatggaatatgaaagcagtgtgtgtactgcagcatcctgtgtgaacatacagcatttttgccatctccatgtcactgtgtgtc

SEQ ID NO: 22378 - DNA, 120 bp, synthetic construct
  misc_feature 1..120: note = Artificially Synthesized Probe
  source 1..120: mol_type = other DNA
caaccccaacaccagacattttgactaaacatcatataagtgtttcaggaacagacaaaatacattagctgatacacatcgcgtgtgttagaaatggcatactccgaagtgcattgagca

SEQ ID NO: 22379 - DNA, 120 bp, synthetic construct
  misc_feature 1..120: note = Artificially Synthesized Probe
  source 1..120: mol_type = other DNA
aacaaacttggaagacatgcatactggattccaatacctactctaaagatacaataatgaagacatatggatgcaagaaacatagtcggaaggccacaaatagacccacacaagcgtgtg

SEQ ID NO: 22380 - DNA, 120 bp, synthetic construct
  misc_feature 1..120: note = Artificially Synthesized Probe
  source 1..120: mol_type = other DNA
tagtaagaaaaaggcctgaactaacaacatggatgcgcctcagcaatgttatcctgagagaaagaagtgagacccaagcaaatactactctacgattcaatttatgaagctctggaaaag

SEQ ID NO: 22381 - DNA, 120 bp, synthetic construct
  misc_feature 1..120: note = Artificially Synthesized Probe
  source 1..120: mol_type = other DNA
ttgcagaagtgggggaaaggcagtaaacatcagtgaaacttcaggtactcggggtaatagaatattaagcatagaaaaattaaacgctctgtgcagatgtcaattagttccttctgcgaa

SEQ ID NO: 22382 - DNA, 120 bp, synthetic construct
  misc_feature 1..120: note = Artificially Synthesized Probe
  source 1..120: mol_type = other DNA
cattcaacaaagatggatgaaatcggagaagttcagaggaaaaaactggcatacacccaggggcattagcatatgaaaccattgtctgatgtgctagttcagcttacttgcacattgaat

SEQ ID NO: 22383 - DNA, 120 bp, synthetic construct
  misc_feature 1..120: note = Artificially Synthesized Probe
  source 1..120: mol_type = other DNA
ggtccaaaacttacttttctacatgaaccttgtaggtccaaagcttactttttagcatgaaccttgtataaatttgaactctccagcttcgcatggcaccaggaaagctgaaaggatatc

SEQ ID NO: 22384 - DNA, 120 bp, synthetic construct
  misc_feature 1..120: note = Artificially Synthesized Probe
  source 1..120: mol_type = other DNA
acacccactaagatgactgaaattaaaaagacttaagaatgccaaacattagtgaggacatggaggagcatctggaattgttgggcattgctggtagtactgtaaaaatggtacagccaa

SEQ ID NO: 22385 - DNA, 120 bp, synthetic construct
  misc_feature 1..120: note = Artificially Synthesized Probe
  source 1..120: mol_type = other DNA
aataaaggagattcacagacacgccacataatgctgtggtccggtttggaccctgcgccagaatttcttcttcttttatctgttttgctataaaccacattgttggaacatctaatgaaa

SEQ ID NO: 22386 - DNA, 120 bp, synthetic construct
  misc_feature 1..120: note = Artificially Synthesized Probe
  source 1..120: mol_type = other DNA
ggagacgaaatggtgtccaaatgttagagaagtgacaagccgtggttctgcagctgtattcattttaagcaggctagaaatctttactcaatgtatgtattttctttctctgacttcctg

SEQ ID NO: 22387 - DNA, 120 bp, synthetic construct
  misc_feature 1..120: note = Artificially Synthesized Probe
  source 1..120: mol_type = other DNA
gctaccatttcttgtttaagagataccgagggacttgtgcttggctctgcttttttccttagacaactttgtgttagatcagggaaatctatatgcattcagagtgagtggttttgttat

SEQ ID NO: 22388 - DNA, 120 bp, synthetic construct
  misc_feature 1..120: note = Artificially Synthesized Probe
  source 1..120: mol_type = other DNA
aatcaacgttaggacatttcagcttaatatcatttaccagaaggcatgtgtaacagatttaatgagctagcaggtcacctgaatccagctgttcccgaccagctttatgaaacagagaat

SEQ ID NO: 22389 - DNA, 120 bp, synthetic construct
  misc_feature 1..120: note = Artificially Synthesized Probe
  source 1..120: mol_type = other DNA
tgaagacattttttctactcaatcttaaattgatcacatggctctgttgttcttcacttgttttctgcaatcctgatgccttacacttgtaccctgtgtggagatcactctcacagccat

SEQ ID NO: 22390 - DNA, 120 bp, synthetic construct
  misc_feature 1..120: note = Artificially Synthesized Probe
  source 1..120: mol_type = other DNA
tgcggcactattcacaatagcaaagacttggaaccaacccaaatgtccaacaatgatagactggattaagaaaatgtggcacatatacaccatggaatattatgcagccataaaaaatga

SEQ ID NO: 22391 - DNA, 120 bp, synthetic construct
  misc_feature 1..120: note = Artificially Synthesized Probe
  source 1..120: mol_type = other DNA
gcaactttaattttcaatgatgttttgacacaatgtgttacatgaaaaaaagtaacctaggtctgagggcatgaatctgaacagccagtggctaacatgatagcttgtgatttccctgag

SEQ ID NO: 22392 - DNA, 120 bp, synthetic construct
  misc_feature 1..120: note = Artificially Synthesized Probe
  source 1..120: mol_type = other DNA
gcttcacctgaaagatcatacatatgtgcatcgaatgcttggagaatgattataataatcagaatgatggcatcaacgtcacattaaggtgcgtagatagcctttagtagggtgcagtga

SEQ ID NO: 22393 - DNA, 120 bp, synthetic construct
  misc_feature 1..120: note = Artificially Synthesized Probe
  source 1..120: mol_type = other DNA
aacagaatgcgttcaacccagcacacatgatggaatctttcctcaaaagttgtctgaaatgccaaatatctccaaccctgtatttctgtcaattcgcatgtgaaaatcaggagagacatt

SEQ ID NO: 22394 - DNA, 120 bp, synthetic construct
  misc_feature 1..120: note = Artificially Synthesized Probe
  source 1..120: mol_type = other DNA
ttctcttcaggcagcttgttggaaattcaggtttgccatcttaacatgtctgccttagcatccatatcacacttcatgcttggttcttaggacacagacctctaaattctgttttgttta

SEQ ID NO: 22395 - DNA, 120 bp, synthetic construct
  misc_feature 1..120: note = Artificially Synthesized Probe
  source 1..120: mol_type = other DNA
caaattcttgttaacacatgatatggagacactcaacaaaaattgtcaggtcattggctcttaagggaaagggaccagagttagaaccttctacagacacttacacactattccagctct

SEQ ID NO: 22396 - DNA, 120 bp, synthetic construct
  misc_feature 1..120: note = Artificially Synthesized Probe
  source 1..120: mol_type = other DNA
caagtttttgtatgcatgggaaagtccttgattcagcctcccataaaaataaacttctattatggaatgtatttgtcaagtgactgcttgatggatggagctgcatttaccccttggcag

SEQ ID NO: 22397 - DNA, 120 bp, synthetic construct
  misc_feature 1..120: note = Artificially Synthesized Probe
  source 1..120: mol_type = other DNA
tcagacttgggaatgtatgtttgaggagactaaagtgaacagcgggtctatgggagttttgattcttcgttagaacatagtactgactttttagaaggatttccatttgttgaatctccg

SEQ ID NO: 22398 - DNA, 120 bp, synthetic construct
  misc_feature 1..120: note = Artificially Synthesized Probe
  source 1..120: mol_type = other DNA
cacagaaggcaactctatgagccagttctttgaaatttgttgtagcttgccttttggtacagcagtgagccctttgataaatgtttcatctgggcttccatagattaagcttattaattg

SEQ ID NO: 22399 - DNA, 120 bp, synthetic construct
  misc_feature 1..120: note = Artificially Synthesized Probe
  source 1..120: mol_type = other DNA
tgttgagttacaagctaaatttcgaaagtggtttctagacagggaaaggtaaatggttttctcggccaaaggaataactcattgaaatgcacaggctcaaggggaataagtttagtgtgg

SEQ ID NO: 22400 - DNA, 120 bp, synthetic construct
  misc_feature 1..120: note = Artificially Synthesized Probe
  source 1..120: mol_type = other DNA
catcccagggacccattatcctccttacagcatttctattctgttttaatattgagtagaataggctccctttctcttctgtttattccagaatatactttcagggaattggcatctttg

SEQ ID NO: 22401 - DNA, 120 bp, synthetic construct
  misc_feature 1..120: note = Artificially Synthesized Probe
  source 1..120: mol_type = other DNA
gagcctggatttgaacctattcaggttgattccagaacccaagtcttaaccccactacactacactgccaagaaaatagacacaccctatttcaatagtcataagacttttgtttttgca

SEQ ID NO: 22402 - DNA, 120 bp, synthetic construct
  misc_feature 1..120: note = Artificially Synthesized Probe
  source 1..120: mol_type = other DNA
tttgaagagcaaacaacacttaagtccatgaaatgctgccctgtcatactatcaaataatggctccttgtcaagtacagtcagatctccttaagaacaacagaggatgtggcatctccaa

SEQ ID NO: 22403 - DNA, 120 bp, synthetic construct
  misc_feature 1..120: note = Artificially Synthesized Probe
  source 1..120: mol_type = other DNA
aatattaaagtaaacctgtaacactagcactctgttacagctgtttgacatgacagttgagctgtcacattgtagaatgtatcgtcaatacattctgtttatggtgtccttgggcacctg

SEQ ID NO: 22404 - DNA, 120 bp, synthetic construct
  misc_feature 1..120: note = Artificially Synthesized Probe
  source 1..120: mol_type = other DNA
aagggtttgtaggaggcacataacgtgtgtcactatgataacagacgtagaacacctaattgtatcatgaaaaggagaccgtgcctgatgcccatagagtttgaaacttttttccttaat

SEQ ID NO: 22405 - DNA, 120 bp, synthetic construct
  misc_feature 1..120: note = Artificially Synthesized Probe
  source 1..120: mol_type = other DNA
tttctaagaaaaaagccttcaacttcatgtaactgctaccaaatgaattgggcagtttggggtagcttggtcccagcttattgaggatgtactaggggttaaaaacagtgtgaactaatc

SEQ ID NO: 22406 - DNA, 120 bp, synthetic construct
  misc_feature 1..120: note = Artificially Synthesized Probe
  source 1..120: mol_type = other DNA
cagtagattatacattcctttccccaccgccatattcgtatagccagctaatttggggagactactaatgtttgccttttgcttttgctgtcatgcagaatagtgtgaaagggatataat

SEQ ID NO: 22407 - DNA, 120 bp, synthetic construct
  misc_feature 1..120: note = Artificially Synthesized Probe
  source 1..120: mol_type = other DNA
aaatgggttttttgaggttatgattgtgagtagtgccgtcaatcccatataaggacaagtattggaaggcatgtatttatgaatgttagcgtggtggatgttgatttgtgtcctcatgca

SEQ ID NO: 22408 - DNA, 120 bp, synthetic construct
  misc_feature 1..120: note = Artificially Synthesized Probe
  source 1..120: mol_type = other DNA
gattttatcttagcttacccattagctcaccatattccagaaaaagcaggtgtctaacacttccaccatctgaaaacaggactcgagtgtaagctgaaatatgtaaaactgagtggcagt

SEQ ID NO: 22409 - DNA, 120 bp, synthetic construct
  misc_feature 1..120: note = Artificially Synthesized Probe
  source 1..120: mol_type = other DNA
gcacctgccccatgtggcagctgagcacatgccaggacctgagtttttttaactaatttctagcaaaaggtccactaagcaaactgtaattgaattcaaaaagaaaatattcttgggtgg

SEQ ID NO: 22410 - DNA, 120 bp, synthetic construct
  misc_feature 1..120: note = Artificially Synthesized Probe
  source 1..120: mol_type = other DNA
gtctacaggctttgtgtgcctgtagagagcacacatattaataatgtatattaactctttaactgctctccattattttctattaccagtttcataaaccccacttagaacatagacctg

SEQ ID NO: 22411 - DNA, 120 bp, synthetic construct
  misc_feature 1..120: note = Artificially Synthesized Probe
  source 1..120: mol_type = other DNA
ttactcatcacaagaacagcaagggggaaatctgcccccatgatccagtcacctcccaccaggtccctcccccaacattgggaattgaagtttgacttgaaatttgggtggggacacaga

SEQ ID NO: 22412 - DNA, 120 bp, synthetic construct
  misc_feature 1..120: note = Artificially Synthesized Probe
  source 1..120: mol_type = other DNA
ttctgtatttcacctcatttcattttcacaccagccataggaggtagataccatcctccccttttaagaggagaaaactgagtcttgcctgagttctattaaatgacagaaccaagattc

SEQ ID NO: 22413 - DNA, 120 bp, synthetic construct
  misc_feature 1..120: note = Artificially Synthesized Probe
  source 1..120: mol_type = other DNA
ctatcaaagtcacaataaaagatacataaacacttggtgtaacgtgcatctgctgcaggtaatggtgctcattggttcctagtttttggacattaacttgatgatgtgaatcaggtgcct

SEQ ID NO: 22414 - DNA, 120 bp, synthetic construct
  misc_feature 1..120: note = Artificially Synthesized Probe
  source 1..120: mol_type = other DNA
gttcattgcagcactattaacaatagcaaagacacggagttgacccagatgctcatcagtgatagactggattttaaaaatgtgatgcacgtacaccgtggaatactatgcagccatgaa

SEQ ID NO: 22415 - DNA, 120 bp, synthetic construct
  misc_feature 1..120: note = Artificially Synthesized Probe
  source 1..120: mol_type = other DNA
gttatttaccattgtaattttactagtttgtggtgcgttggttttgatcaatctgcaacaaatattgagctccctcttcagaacgcactgtgctaagttatggggcaagtttcgatctag

SEQ ID NO: 22416 - DNA, 120 bp, synthetic construct
  misc_feature 1..120: note = Artificially Synthesized Probe
  source 1..120: mol_type = other DNA
ttatttgcgtatgtgtcacatcggttatcaagtttgcacatgtgacagcttcaacagccgtcgcgcaaaatgcatagagcttgtaaccatatgtttttgcttgacaaaaagctaaaactc

SEQ ID NO: 22417 - DNA, 120 bp, synthetic construct
  misc_feature 1..120: note = Artificially Synthesized Probe
  source 1..120: mol_type = other DNA
atctgtaaggttttcagtttgttataaataacacggcgttaattgaatcaacatccactacgtagaaggtgtctctcactttagagtgttgtcttgcaggcagcttgggcaaaaaccaga

SEQ ID NO: 22418 - DNA, 120 bp, synthetic construct
  misc_feature 1..120: note = Artificially Synthesized Probe
  source 1..120: mol_type = other DNA
gccgtgtttattaatggtatgtgattggccacatgcacacctcactaaatactttgagcatagattataccggatgatgaaaggatttccttgcctaagtcgatgactgcttcttcagaa

SEQ ID NO: 22419 - DNA, 120 bp, synthetic construct
  misc_feature 1..120: note = Artificially Synthesized Probe
  source 1..120: mol_type = other DNA
acgtgatgagcagttctgtctgttctgtcctctgctgggccactgcagtcctggaagattccaattttgagtatttactcattcaaaactgtgttttctttataaaacatgaacgctcat

SEQ ID NO: 22420 - DNA, 120 bp, synthetic construct
  misc_feature 1..120: note = Artificially Synthesized Probe
  source 1..120: mol_type = other DNA
ggcagaaggagggctctgcatctgcgaacatggatgatttatacgtgatgcacccatctcttacattagacttcacttttagatcagacactttattttgttagaatagctgaaaatctg

SEQ ID NO: 22421 - DNA, 120 bp, synthetic construct
  misc_feature 1..120: note = Artificially Synthesized Probe
  source 1..120: mol_type = other DNA
aggatgaattcttgcaacagaggctgcttcgcttcagaaacgttatgaagaacgtgtgtgatgaccaatcatgagcattacattaaaaatatggggaagaggtttcctgtaaatgtgtgc

SEQ ID NO: 22422 - DNA, 120 bp, synthetic construct
  misc_feature 1..120: note = Artificially Synthesized Probe
  source 1..120: mol_type = other DNA
aacacagattgcagacctcataatcacctgtaaagggccaggggagctgattaataaggggagttcagcttcctgtgctattcagtaatataatggtcatcatatttaaaacagcttcag

SEQ ID NO: 22423 - DNA, 120 bp, synthetic construct
  misc_feature 1..120: note = Artificially Synthesized Probe
  source 1..120: mol_type = other DNA
tttgtattaagtgttttttgagacttggacccagagtgagaaaggtacttggcaatactctttagggtttacagcacttggcaatttttagcagctgatccaggaaaacatgttaccctt

SEQ ID NO: 22424 - DNA, 120 bp, synthetic construct
  misc_feature 1..120: note = Artificially Synthesized Probe
  source 1..120: mol_type = other DNA
gggaagatagcattagataactaagagtgctcagaatagggggaagacagtattagataactaagactgctcagaattgggggaagacagtattagataactaagagtgctcggaatggg

SEQ ID NO: 22425 - DNA, 120 bp, synthetic construct
  misc_feature 1..120: note = Artificially Synthesized Probe
  source 1..120: mol_type = other DNA
tcagtttttctgtcaatggcttcccgtgggatatatcatctttaaaagaaacagtgataagaaattgtgccctcttcccttctcctttccctgaccctctgaaaaataatcgcattaaac

SEQ ID NO: 22426 - DNA, 120 bp, synthetic construct
  misc_feature 1..120: note = Artificially Synthesized Probe
  source 1..120: mol_type = other DNA
ctgggggaaactaagttgacatgtgggaggttaatgtatacactttagattcctcgcttggtttgctgttttcttcttcataactctaggtaaacagtttgtgctgccatttaatgcaca

SEQ ID NO: 22427 - DNA, 120 bp, synthetic construct
  misc_feature 1..120: note = Artificially Synthesized Probe
  source 1..120: mol_type = other DNA
tagtgtcaagaagaataatgtcttgcttgccctttctcctaggttattgcataggttatacaaagattgggatgagttaatagaaaacaaagaaaccagaggtggcaggaatgggtgaga

SEQ ID NO: 22428 - DNA, 120 bp, synthetic construct
  misc_feature 1..120: note = Artificially Synthesized Probe
  source 1..120: mol_type = other DNA
ttttatttatccctcagagttgtcaactgataccagaagtatttccactcttttggggttgctgcctttggccatctaattgcttcttaggaaggaagagggaaattgcttctagaacta

SEQ ID NO: 22429 - DNA, 120 bp, synthetic construct
  misc_feature 1..120: note = Artificially Synthesized Probe
  source 1..120: mol_type = other DNA
tgagcagagaatgtgtcccttctcaggggggcacgtgctcattgctcttccctggtaattgataatcttagaagttatactcattgggaattttaactgatgtcaaagttttagttaatt

SEQ ID NO: 22430 - DNA, 120 bp, synthetic construct
  misc_feature 1..120: note = Artificially Synthesized Probe
  source 1..120: mol_type = other DNA
acttaggcagatatctgaggttatttggtggcaatcaagaactcgcagcacttcaactaatgggttatgatcagaaactgttcctaatagccagctagacggatctgaatatgaagattt

SEQ ID NO: 22431 - DNA, 120 bp, synthetic construct
  misc_feature 1..120: note = Artificially Synthesized Probe
  source 1..120: mol_type = other DNA
ctctctctctggttctttcatttagaacgtttggcctttaacttcctataaacagaggcccatttttcacaccatgtcattcattgacatctgcccccaaaattctgtgctgcattttat

SEQ ID NO: 22432 - DNA, 120 bp, synthetic construct
  misc_feature 1..120: note = Artificially Synthesized Probe
  source 1..120: mol_type = other DNA
actctttctaatacttctaatccagacttctaaacaacattctaatttgtgaaaaacagctttgaaacatgctgtgacaaagcacatggagaacggtagagctccacgtgtgatgccggc

SEQ ID NO: 22433 - DNA, 120 bp, synthetic construct
  misc_feature 1..120: note = Artificially Synthesized Probe
  source 1..120: mol_type = other DNA
acaaatgtcaatacagacatcagcgagtgtctcccacagatgtaacactaagcccagcctggtagaagcccatcttcagctttagataatttgcatttcattctttttaggtatctgatt

SEQ ID NO: 22434 - DNA, 120 bp, synthetic construct
  misc_feature 1..120: note = Artificially Synthesized Probe
  source 1..120: mol_type = other DNA
cagttggatgtgttttgtcaaatgtttgcaatcatgcaagcacaaccaagttagagaacgtttccattaccccaaaaagttgcctagtgccactcttcagtaaatctcttctcctagcac

SEQ ID NO: 22435 - DNA, 120 bp, synthetic construct
  misc_feature 1..120: note = Artificially Synthesized Probe
  source 1..120: mol_type = other DNA
agtactgataaaaaggcttcacttgccaagtaaagagtcctgcattacagggttgacaacaccatggtccaactgaggacatataattggcaggtatccggatataaaaatatttacagg

SEQ ID NO: 22436 - DNA, 120 bp, synthetic construct
  misc_feature 1..120: note = Artificially Synthesized Probe
  source 1..120: mol_type = other DNA
gctaaagaccaccatgtacttaatattctgaccaacactgaagacttatttgtacatcatagttcttccaggtacttcaccatactccacactcagtttaaacacgttggtgcaaattcc

SEQ ID NO: 22437 - DNA, 120 bp, synthetic construct
  misc_feature 1..120: note = Artificially Synthesized Probe
  source 1..120: mol_type = other DNA
cttaatgcaacagtatttgcatatgatgaaccaaccagctccaacatggcttcttttgaggattctgaatttccattcaaatgatccgaagtcattcttatttgagatcacactgggcca

SEQ ID NO: 22438 - DNA, 120 bp, synthetic construct
  misc_feature 1..120: note = Artificially Synthesized Probe
  source 1..120: mol_type = other DNA
aagcccaaaagtctcttgtcagaatttggcatttgcctcccggatgtcccttgacctctgtccttcaatatatactagtcgaatttaagtcaaataaattatgttcatggcagttactct

SEQ ID NO: 22439 - DNA, 120 bp, synthetic construct
  misc_feature 1..120: note = Artificially Synthesized Probe
  source 1..120: mol_type = other DNA
gaaagagtggagtatctttgttgagaaaaatacctgatgacgtttaatagtgagtagagacgaaggtaaacacatgaatgtctgtatttccgcacacatcatgccaagtttcacctgcct

SEQ ID NO: 22440 - DNA, 120 bp, synthetic construct
  misc_feature 1..120: note = Artificially Synthesized Probe
  source 1..120: mol_type = other DNA
gggcctgctatttgcaagcatatatttgcaaataacatattttgcttgtgaacagttatgattcctaaaaactgaaaaaattaaattggagggtgggaaggggcagaaggggtgagcagg

SEQ ID NO: 22441 - DNA, 120 bp, synthetic construct
  misc_feature 1..120: note = Artificially Synthesized Probe
  source 1..120: mol_type = other DNA
ctgagcagcttatcatcatattattaccgttctttgcctgaactctgtacttgtattgatgtagccacatcagtgtattgatcctaccagtggctagaacttggaagtcattttctgtca

SEQ ID NO: 22442 - DNA, 120 bp, synthetic construct
  misc_feature 1..120: note = Artificially Synthesized Probe
  source 1..120: mol_type = other DNA
aggtgtcctgaggaatcaaacccaagcatgctgacaccagagctcatgctctttctcttacctggaggatgttttaaagagtagtcaatccttcctttttagatttgtcttctttttaaa

SEQ ID NO: 22443 - DNA, 120 bp, synthetic construct
  misc_feature 1..120: note = Artificially Synthesized Probe
  source 1..120: mol_type = other DNA
aactgttccagttcttagatatcctaccctttaaaaactttaacagctcttaaagaattaacaagtgttgctcaaacattgtgtgtcgggacttattccagccatgctgctgctagtctg

SEQ ID NO: 22444 - DNA, 120 bp, synthetic construct
  misc_feature 1..120: note = Artificially Synthesized Probe
  source 1..120: mol_type = other DNA
aaagcctttaatttccctgataaactgctaataatttttttaaaagatagttttcctgtttacgccctcttggaacacagtggaatcgtgtggtcctgtaattggccccagccccatgac

SEQ ID NO: 22445 - DNA, 120 bp, synthetic construct
  misc_feature 1..120: note = Artificially Synthesized Probe
  source 1..120: mol_type = other DNA
aacttagatatttaggaaaatgttgaaaatgaagatagtagtttctactggttaggaagaaaatgcgttatcgttttctaccttgacaatgtcagcgtccagtccgcccactcggtcctg

SEQ ID NO: 22446 - DNA, 120 bp, synthetic construct
  misc_feature 1..120: note = Artificially Synthesized Probe
  source 1..120: mol_type = other DNA
attgggagttcatagactatcagaggacatttaggaaaaggtggttgggattcctaatttcctgattccataagaatgcctattccagtttgttacgtctttaagtcaaacagaggcagc

SEQ ID NO: 22447 - DNA, 120 bp, synthetic construct
  misc_feature 1..120: note = Artificially Synthesized Probe
  source 1..120: mol_type = other DNA
tgtatgtgaaagaatttttcggaaatggtgtgaatctcagctaatttttacagaaaagcaatttccccatctcttcttataaaacagcagcgtcatgaaatgcggggcatggcgaagact

SEQ ID NO: 22448 - DNA, 120 bp, synthetic construct
  misc_feature 1..120: note = Artificially Synthesized Probe
  source 1..120: mol_type = other DNA
taatcgcatcgtattcaaggtgctttcattacgacaaggaaccatcccagcattctcaagcttactgggcctacgaaaatataaaatctaaagtacatccagtgtctgagatgtaaccta

SEQ ID NO: 22449 - DNA, 120 bp, synthetic construct
  misc_feature 1..120: note = Artificially Synthesized Probe
  source 1..120: mol_type = other DNA
ggatgtcattacaggggaaacttctctctgtaggccctgtttactgcaaaattttttagtctgtaatgacatttttcattcacaacgtatgccttcaagagagggggcccttgttttatt

SEQ ID NO: 22450 - DNA, 120 bp, synthetic construct
  misc_feature 1..120: note = Artificially Synthesized Probe
  source 1..120: mol_type = other DNA
tctgattgaggctgttacattttataggtgctatttttcaaagcagtactgacagcactcgaagttattaaattgctgaatcaaaagatggacccgcgctcgcatttatgaactgtgatg

SEQ ID NO: 22451 - DNA, 120 bp, synthetic construct
  misc_feature 1..120: note = Artificially Synthesized Probe
  source 1..120: mol_type = other DNA
aaatgacattaaaattagagaacggacagaaacaaatcaaggttgacatgtgaagatggcgctgggtagaaaagtagggttggggagaaattgcaagcataccagagaaagaatgtgtca

SEQ ID NO: 22452 - DNA, 120 bp, synthetic construct
  misc_feature 1..120: note = Artificially Synthesized Probe
  source 1..120: mol_type = other DNA
cacactttacagagttgcctgagaaagaagatatattaattagtacttatcagttaattaatactttcaaatccaggaccgtgttcctccagcctgagtaagagctgggccatgtcccct

SEQ ID NO: 22453 - DNA, 120 bp, synthetic construct
  misc_feature 1..120: note = Artificially Synthesized Probe
  source 1..120: mol_type = other DNA
cttatggtatcttctacacacgttgttttcactaaggcatttggggctggcacttcagatcgtaaatttcttaccctctgttacagtcctgtagttttcctgctaaaaacattcagcacg

SEQ ID NO: 22454 - DNA, 120 bp, synthetic construct
  misc_feature 1..120: note = Artificially Synthesized Probe
  source 1..120: mol_type = other DNA
tataatatttggtcattaaaaaaagattttccgttgggttaggagatactactgctggctgtttgctgaactttacttagcacccgtgacggaacgcattgttacaaaagacatgatggt

SEQ ID NO: 22455 - DNA, 120 bp, synthetic construct
  misc_feature 1..120: note = Artificially Synthesized Probe
  source 1..120: mol_type = other DNA
cgctgtgatacaacaggtgaccaagcaggagattttaaacctctcggaggctggagtcgctccccccgaggcatcctcagccctggatgcattgctctgtgcggtcactgaattagggga

SEQ ID NO: 22456 - DNA, 120 bp, synthetic construct
  misc_feature 1..120: note = Artificially Synthesized Probe
  source 1..120: mol_type = other DNA
tgcacctgcttgtgcagtcagcatgtagctgcctttccatttcattctctactgggctaaaaattgcagctacaagtgttaccatcttgaagcagtccacttccattcaatttttttttt

SEQ ID NO: 22457 - DNA, 120 bp, synthetic construct
  misc_feature 1..120: note = Artificially Synthesized Probe
  source 1..120: mol_type = other DNA
gtaaattcagtagactagtggagagtctactgggactgggccacagaggaggggaagtgatcagatcttggatggatatcaaaaactgaacagacaggaattcctgttgcatcagatgtg

SEQ ID NO: 22458 - DNA, 120 bp, synthetic construct
  misc_feature 1..120: note = Artificially Synthesized Probe
  source 1..120: mol_type = other DNA
caggcagccaggttgccaaaaggaatggtatgtgctcaggtttctcagacccaggtcccagtttattaacttgtgaatttatgaggtaagtatttaagcactaattgatcatagttcata

SEQ ID NO: 22459 - DNA, 120 bp, synthetic construct
  misc_feature 1..120: note = Artificially Synthesized Probe
  source 1..120: mol_type = other DNA
taagaatgagtttgatacaaacaatcgtcctattgagtaaataccattattattgccatgttgcagatggcaacaccaaggcacagggaagttgagcacttttccaagggcacacaacag

SEQ ID NO: 22460 - DNA, 120 bp, synthetic construct
  misc_feature 1..120: note = Artificially Synthesized Probe
  source 1..120: mol_type = other DNA
ttctcatttctggcaaccaatgacaggaggtttagaaggcatagtgatcaacattagaaaatacatggaggtaaggttgagctgggaatgcttagacaacctcagatctccattatgtct

SEQ ID NO: 22461 - DNA, 120 bp, synthetic construct
  misc_feature 1..120: note = Artificially Synthesized Probe
  source 1..120: mol_type = other DNA
agcaattgagtcaccaatgtgattgctgtttgactgtgttgttcctgcaagaccctcctccaaggttctttctgtactattttgttttctttcctgtggtccatgatgagataagtcatt

SEQ ID NO: 22462 - DNA, 120 bp, synthetic construct
  misc_feature 1..120: note = Artificially Synthesized Probe
  source 1..120: mol_type = other DNA
tctttatttctgctagcagccccaggcactaattactgggtgtgttagacacatctgtgagagtgctgcctcctcacaccaaagtctacatttacttcttcaacatttatcttctgtcag

SEQ ID NO: 22463 - DNA, 120 bp, synthetic construct
  misc_feature 1..120: note = Artificially Synthesized Probe
  source 1..120: mol_type = other DNA
gccaaagctcaaccctcatgcaacatcgaaaagttcacattggagaaaagccttttaagtgcaatgaatgtgggagattgtttagagagaattccagccttgttaaacatcagagggttc

SEQ ID NO: 22464 - DNA, 120 bp, synthetic construct
  misc_feature 1..120: note = Artificially Synthesized Probe
  source 1..120: mol_type = other DNA
tcccatacacccttatgaccatttccagagactgaattgtgtttttataattttcacccttttggctgtgtaacaggtctgcaaagctcctcattcagttattctgtaagttgatccaaa

SEQ ID NO: 22465 - DNA, 120 bp, synthetic construct
  misc_feature 1..120: note = Artificially Synthesized Probe
  source 1..120: mol_type = other DNA
tgcttggccttgttttcagttcttaacagtatctttcctagagcagattgtcttaattttatggagcccaatttatccatttgttattttattcattgtgcatttggtgttgcatcctct

SEQ ID NO: 22466 - DNA, 120 bp, synthetic construct
  misc_feature 1..120: note = Artificially Synthesized Probe
  source 1..120: mol_type = other DNA
ggaccctcccagcgctcgcggcgcccggcccggctcccccgacctcctcctcccgggcccggacgtgcggggcagcgagcgccggggcccggcgggggccgcagccttgcccggagcgga

SEQ ID NO: 22467 - DNA, 120 bp, synthetic construct
  misc_feature 1..120: note = Artificially Synthesized Probe
  source 1..120: mol_type = other DNA
cgtgttatcacgtttaatccttacgtcctgagatccgtgttaacccaagtcttagatgcagaaactgatggtcagagtgggctgatgctgggaagtgagcacagcacgcggtagtgtcgt

SEQ ID NO: 22468 - DNA, 120 bp, synthetic construct
  misc_feature 1..120: note = Artificially Synthesized Probe
  source 1..120: mol_type = other DNA
aaaaaaaaaattctgttaccctgcctgcctccttgtccaaacatagggctgatgatgtggggaatgcctgtgtagtagttaagagtccaggctctgggaacagctgctaggggctgtgtg

SEQ ID NO: 22469 - DNA, 120 bp, synthetic construct
  misc_feature 1..120: note = Artificially Synthesized Probe
  source 1..120: mol_type = other DNA
ctctagtgattcctttccagacacagctccatccacctacctcgagagaccagccgcttccaggtcaagcctgtctccaagtggctttaaggtcccaggcctctcaactgaaccccatga

SEQ ID NO: 22470 - DNA, 120 bp, synthetic construct
  misc_feature 1..120: note = Artificially Synthesized Probe
  source 1..120: mol_type = other DNA
tagacttcctgctcagtactcaccccagccctgccaggagtgaagtggtctctgagaatcacactgttgctgaaagggagctggccttggggaggagaattccaaatataagctgttttt

SEQ ID NO: 22471 - DNA, 120 bp, synthetic construct
  misc_feature 1..120: note = Artificially Synthesized Probe
  source 1..120: mol_type = other DNA
attccgtcccctggctaactgctaacagcgcctgtcctgtctctgggctgttcgcagggccagcatcccagccagcggccaaacagagtccacattcatgagcagccattgaggctttcc

SEQ ID NO: 22472 - DNA, 120 bp, synthetic construct
  misc_feature 1..120: note = Artificially Synthesized Probe
  source 1..120: mol_type = other DNA
tttttatcaccccaaaaaaaaccctgtgcccatgaagaagtcactccctattcccctctcccagccctcggcagccgctccttcctgcctgtggatttgtgcattctggacacttcgagt

SEQ ID NO: 22473 - DNA, 120 bp, synthetic construct
  misc_feature 1..120: note = Artificially Synthesized Probe
  source 1..120: mol_type = other DNA
tcctgacccaagtctcacttggacacaacctccagggggcctcagtttccccttcctaggcaagctgacttttcctgcactgtcagctactctcagctggagaaaacaggaagcagggac

SEQ ID NO: 22474 - DNA, 120 bp, synthetic construct
  misc_feature 1..120: note = Artificially Synthesized Probe
  source 1..120: mol_type = other DNA
aagcacccgacacatcttcaggagatgcgaggggacaggcttatggcggccacatctcatcggctttcaagagaagcctgactgaacttttctgtaacatctcttggctggaaattttta

SEQ ID NO: 22475 - DNA, 120 bp, synthetic construct
  misc_feature 1..120: note = Artificially Synthesized Probe
  source 1..120: mol_type = other DNA
tgtaaagaaacagatgaagttaattgtattgtatctgcaaagtattctcattccaccatgtgattgatacaaacgtcagtgagttcacattctccttgctgcgccctcaggaagtcgcgt

SEQ ID NO: 22476 - DNA, 120 bp, synthetic construct
  misc_feature 1..120: note = Artificially Synthesized Probe
  source 1..120: mol_type = other DNA
gggttttgttaaggtatttcacaccctcagcctcagttttcccacctgttccctggtatcacaagtcctgccttcaggacacaggtgacaaccagcaaggctggcaattggtctgaaagg

SEQ ID NO: 22477 - DNA, 120 bp, synthetic construct
  misc_feature 1..120: note = Artificially Synthesized Probe
  source 1..120: mol_type = other DNA
agtttgagccacactcaagtttcaggtgctcagtggcttcagatgagaaaagaggtgaaatgaactttaatgatacatttcatttagcccggcataaccgcaatagtttcacgttaacat

SEQ ID NO: 22478 - DNA, 120 bp, synthetic construct
  misc_feature 1..120: note = Artificially Synthesized Probe
  source 1..120: mol_type = other DNA
atatatgtacaaatataaattatataactgatatgttcttggtttgggtgtgccactcttgagtatgacatactaggcaccatgctgtgacctgcccaggttcgttggtgtcagggatcc

SEQ ID NO: 22479 - DNA, 120 bp, synthetic construct
  misc_feature 1..120: note = Artificially Synthesized Probe
  source 1..120: mol_type = other DNA
tctgttgagtgcgagtgacagaaacacaactcatagaacacaatagagaatttcttggcttgtgatactgaaaggtccatggaatgatggacttaaggcaaagctaaatccaggttctca

SEQ ID NO: 22480 - DNA, 120 bp, synthetic construct
  misc_feature 1..120: note = Artificially Synthesized Probe
  source 1..120: mol_type = other DNA
aaatttcaggatctcagggggttaaagggcaaggtcgtgtatctcaatgttagcagtctttgccccaccatgtaaatccaaagctgaatatttataaggcatatatgtatgtagtatgtg

SEQ ID NO: 22481 - DNA, 120 bp, synthetic construct
  misc_feature 1..120: note = Artificially Synthesized Probe
  source 1..120: mol_type = other DNA
tgaggggtgtgtgagccacagatgaagagaatgcgcgagccacagacaaagggacatgtgccacagatgaagggggcatgtgagccatggatgaagggacatatgagccacagatgaagg

SEQ ID NO: 22482 - DNA, 120 bp, synthetic construct
  misc_feature 1..120: note = Artificially Synthesized Probe
  source 1..120: mol_type = other DNA
gccaggttctggggacaaggatacactccatgtctggatgggacacaatgcagagactgggaccacattcaattacttgcccagagtcacagctacaagatgacagtgttggaatttaaa

SEQ ID NO: 22483 - DNA, 120 bp, synthetic construct
  misc_feature 1..120: note = Artificially Synthesized Probe
  source 1..120: mol_type = other DNA
cctccttggagcctcagtgtcctgtggccccacctgctgaaagcccagcaaaatgtgcccaggcctggcagcttgaagccctgctgcaaaattggcctaccaggacaacggctccatttt

SEQ ID NO: 22484 - DNA, 120 bp, synthetic construct
  misc_feature 1..120: note = Artificially Synthesized Probe
  source 1..120: mol_type = other DNA
tcaagcagaaaagtgcgttcagaccccagaagactgggtacagtttctctctcccatgggacccagagacaaccaagagtaaatgcaagagaggggcaacttatctcttctcccagcatt

SEQ ID NO: 22485 - DNA, 120 bp, synthetic construct
  misc_feature 1..120: note = Artificially Synthesized Probe
  source 1..120: mol_type = other DNA
tcccatctagtgcaggaagcagattcacccaggtgaacaggtggatcaagaactgggccccagttatgctaaggatgctgagtgctgtgggtagcaccatggctggaccatgaagtcatg

SEQ ID NO: 22486 - DNA, 120 bp, synthetic construct
  misc_feature 1..120: note = Artificially Synthesized Probe
  source 1..120: mol_type = other DNA
ccctcggcccccacagtttgtaccatttgtttctgtcttgatcattgaccctttccattctgcaattgttacaaacttataacttgaattgttttactctcagaagtagcctggtgccca

SEQ ID NO: 22487 - DNA, 120 bp, synthetic construct
  misc_feature 1..120: note = Artificially Synthesized Probe
  source 1..120: mol_type = other DNA
ccctgcaattctgggatcctttagaaaaacagtgattgttgttttgcgggacccttgtgtttatgcttttattgtggacctttttaaacatatacaagagcagcgagagacatgtcacag

SEQ ID NO: 22488 - DNA, 120 bp, synthetic construct
  misc_feature 1..120: note = Artificially Synthesized Probe
  source 1..120: mol_type = other DNA
atacaggacgaggctggcacacgggtagcccctgggctaccgctgtggtttggccaccactgtttttaaaatattagaagtgcacgagaatatccaagcttctgttggaaaccagagggg

SEQ ID NO: 22489 - DNA, 120 bp, synthetic construct
  misc_feature 1..120: note = Artificially Synthesized Probe
  source 1..120: mol_type = other DNA
tgtatgtgtgcacgtgtgtgttcatccgtgtacacatgtgtgtgttccagggcagctgtgtgtgtggaatgtgtctcaggatggccctgtgtatgtgtgcctcagtttacctgcctatcc

SEQ ID NO: 22490 - DNA, 120 bp, synthetic construct
  misc_feature 1..120: note = Artificially Synthesized Probe
  source 1..120: mol_type = other DNA
ctacaatctttctgccttaaaaatcagcataaacatgttttaagagaccaggagatcgcgcctgtgatactggggacagtgcttatctgagaagcctgccctgattgctgtgaccgccgc

SEQ ID NO: 22491 - DNA, 120 bp, synthetic construct
  misc_feature 1..120: note = Artificially Synthesized Probe
  source 1..120: mol_type = other DNA
ccaggaagctcagagcttagacttcctgtaagctttttggtttgtggtttgtgtctcaacctcttgtcgtataggcctcattttccctaagcccccttagtacttttttttgttttttgt

SEQ ID NO: 22492 - DNA, 120 bp, synthetic construct
  misc_feature 1..120: note = Artificially Synthesized Probe
  source 1..120: mol_type = other DNA
gtgcaccccatgcacatatgctatatgagcgtgtgcactcacagacactttttgaatggagacgaaaaatgcatgtgttcacacgtgtgcagctctgcgtgaggaaaatgcaaacaaagc

SEQ ID NO: 22493 - DNA, 120 bp, synthetic construct
  misc_feature 1..120: note = Artificially Synthesized Probe
  source 1..120: mol_type = other DNA
atgataccgttgatagtgcaggtcacacagtgacatctatggtgcatggttcacagtaacgtctatgatgctgttgatggtgcaggtcacacagtttacggtgacgtctatgatgctgtt

SEQ ID NO: 22494 - DNA, 120 bp, synthetic construct
  misc_feature 1..120: note = Artificially Synthesized Probe
  source 1..120: mol_type = other DNA
ttggatgtagagcccctgtaatccagggcgactcctcttagctaatcgcatctgcaaagaccctatgtctaggtaaggtcacattcgtaggtgctggggttaggacttgcttttggggga

SEQ ID NO: 22495 - DNA, 120 bp, synthetic construct
  misc_feature 1..120: note = Artificially Synthesized Probe
  source 1..120: mol_type = other DNA
ctcgcttaacctctctgagccctgctgtgtgactgcaggcacctcgcttaacctctctgaaccctgctgcatcggagttcatgaggtctttgccagtgaaggcttttcctgctccaatgg

SEQ ID NO: 22496 - DNA, 120 bp, synthetic construct
  misc_feature 1..120: note = Artificially Synthesized Probe
  source 1..120: mol_type = other DNA
cttccttgaacaaatctgggccattatctctgccttatccaaggcacgggggccatagtcgtgcgtaaagctaattaaaatctgggtccccgcacgcacgtgataaatgggacaaacagc

SEQ ID NO: 22497 - DNA, 120 bp, synthetic construct
  misc_feature 1..120: note = Artificially Synthesized Probe
  source 1..120: mol_type = other DNA
ggcttcagtctccaacacaaacacctgctgggcatcgggaaacgggaacaaactttggtgtggggtggaggcatctggcctcgggggcacctggaggaggccacagtctcgttacctcca

SEQ ID NO: 22498 - DNA, 120 bp, synthetic construct
  misc_feature 1..120: note = Artificially Synthesized Probe
  source 1..120: mol_type = other DNA
ttttacagctgaacacactgagactgagcccccagcctgggaatggcagtgcagtgggaatgcctgtcactcaggccccctctgcaaagtgtctggaaaatcacagctggcactccaggt

SEQ ID NO: 22499 - DNA, 120 bp, synthetic construct
  misc_feature 1..120: note = Artificially Synthesized Probe
  source 1..120: mol_type = other DNA
aaaattataatcacttttaattgaaaaaggaggctgatatgattccgaaccccacagcagcgggagagtaattaacgcagccaccaggcgtcgcagaaacccattaatcatgtcactcag

SEQ ID NO: 22500 - DNA, 120 bp, synthetic construct
  misc_feature 1..120: note = Artificially Synthesized Probe
  source 1..120: mol_type = other DNA
atctgtgaagtgggcacactgaccgagtcaccctcaacgatcctcattctagaaatccaaggcagggctgctcgaccggccaatgagagaaaggcacccccgtctttggattttaaagtg

SEQ ID NO: 22501 - DNA, 120 bp, synthetic construct
  misc_feature 1..120: note = Artificially Synthesized Probe
  source 1..120: mol_type = other DNA
attttcgaagacatcattttctttccccatgtgcccccttatctccctcctgttaaaggatctcgaataggcaccccgataagacaggacgaacaccattccccagcccctccaatgccg

SEQ ID NO: 22502 - DNA, 120 bp, synthetic construct
  misc_feature 1..120: note = Artificially Synthesized Probe
  source 1..120: mol_type = other DNA
cagggtgacacagctcggacaggatcagccctggtgggcagccagaggccggagggaaccgacagactggaccgagctggtccgaggacgggccggtgcctcccaaacagaccgggagag

SEQ ID NO: 22503 - DNA, 120 bp, synthetic construct
  misc_feature 1..120: note = Artificially Synthesized Probe
  source 1..120: mol_type = other DNA
aggagcaggttgcttaggatgcctggctgcaagtgggactgcgtgagcgttgatatcagggtgtcacagacaggcccaaggacccatcagatccaacctccatttacagttggtgaaact

SEQ ID NO: 22504 - DNA, 120 bp, synthetic construct
  misc_feature 1..120: note = Artificially Synthesized Probe
  source 1..120: mol_type = other DNA
ccaacctgctcttgagttaccagagcgcttggccggctaaagaggggccagttcctatttctgagagaaaaggagccgctcgtgctcctccggggtctccctggggccagccctagatct

SEQ ID NO: 22505 - DNA, 120 bp, synthetic construct
  misc_feature 1..120: note = Artificially Synthesized Probe
  source 1..120: mol_type = other DNA
gtagaagcatggatggatgggtggatggataggtgggtaatggatggatggatggatgagtgggtggatagatgggtgagtgatggatggatgggtgaatgggcaggtggatggggggat

SEQ ID NO: 22506 - DNA, 120 bp, synthetic construct
  misc_feature 1..120: note = Artificially Synthesized Probe
  source 1..120: mol_type = other DNA
actcacattagggcctctgggttctctacattgctaggaggggcatgagttacggttgtctattgctgtatcataaagaacagactgaaacaacaaacctttattatctcttagtttcca

SEQ ID NO: 22507 - DNA, 120 bp, synthetic construct
  misc_feature 1..120: note = Artificially Synthesized Probe
  source 1..120: mol_type = other DNA
aatgttgtgggattatctacaggatatgttgttacatgaaaaaaaggtcaggtgcagaacagtgagcgtagccgacgatcttctgttgaaggaaggaggaaaggcagtgtgtgttcctgt

SEQ ID NO: 22508 - DNA, 120 bp, synthetic construct
  misc_feature 1..120: note = Artificially Synthesized Probe
  source 1..120: mol_type = other DNA
tgataaatcagaccagctccttcccttgacaaagcccctgggcacagctgtgttctcaacactcctccccaccatccaggactccgtaaaggccacctcctccaggaggcctttatgatg

SEQ ID NO: 22509 - DNA, 120 bp, synthetic construct
  misc_feature 1..120: note = Artificially Synthesized Probe
  source 1..120: mol_type = other DNA
tcccgtatgtcatgacatgagaacagacatgatgagtgtgaagccagccctgggtgagcaaggggccaggctcctctgggcaagcggctcctgctacatctggcatgtgccagaatggga

SEQ ID NO: 22510 - DNA, 120 bp, synthetic construct
  misc_feature 1..120: note = Artificially Synthesized Probe
  source 1..120: mol_type = other DNA
gctgcacgcagcctcttctgcttctggcccggccacacccgcatggagagcctagaagctccctgtctaggcgagggccacccagcccctctgccccactcacccctgacctttccttcc

SEQ ID NO: 22511 - DNA, 120 bp, synthetic construct
  misc_feature 1..120: note = Artificially Synthesized Probe
  source 1..120: mol_type = other DNA
acctcagtggtgccctctcttcccctggagctgctcactcggccccgagacccttctctgacagtttacacaagagcctgaccaaaatccttcccgaaagaccaccttcagcccaggatg

SEQ ID NO: 22512 - DNA, 120 bp, synthetic construct
  misc_feature 1..120: note = Artificially Synthesized Probe
  source 1..120: mol_type = other DNA
gggtagtgggagcctcccccagcgagtccccactgccgtcaccggccaccaacacggccggcagcacctgctcttccctgtcgccgatgtccagcagcccagccaaccccagctcagagg

SEQ ID NO: 22513 - DNA, 120 bp, synthetic construct
  misc_feature 1..120: note = Artificially Synthesized Probe
  source 1..120: mol_type = other DNA
gggacaggggctgcccagcccgaggcaggcccaaaacgcgttccctgggtctggcccccaccgaggcggatgcgcccagccagggcaggcagcagaggagggggaagcagttgaagctgt

SEQ ID NO: 22514 - DNA, 120 bp, synthetic construct
  misc_feature 1..120: note = Artificially Synthesized Probe
  source 1..120: mol_type = other DNA
cagcctggagaatttctggcacccgtggctaacccctcaagtaccgcctgccccaaacccagtgttctgtcttcaaagatctccagttttggctgtgaccctgctggttttaacagagac

SEQ ID NO: 22515 - DNA, 120 bp, synthetic construct
  misc_feature 1..120: note = Artificially Synthesized Probe
  source 1..120: mol_type = other DNA
tttgcctgggaaggggagtggatgtagcgttgctcttatgagtcacctgtccgaggatgaactggagatccagaaattggtcaccgaattagaaagtcagctgcaaaggagcaaagacac

SEQ ID NO: 22516 - DNA, 120 bp, synthetic construct
  misc_feature 1..120: note = Artificially Synthesized Probe
  source 1..120: mol_type = other DNA
ctggagtggctaagagtaaagatggcatcctgggcttgcaggagctgacacctgctgcccagagccctccacgagtgaacccctcaggtctggaagggggcactgtggaaggagggaagg

SEQ ID NO: 22517 - DNA, 120 bp, synthetic construct
  misc_feature 1..120: note = Artificially Synthesized Probe
  source 1..120: mol_type = other DNA
tggaagacccttcctcctggcctcctggctccgtcagtgctgtaacctgcactcacagtggggacacccccaaagacagcactttaagaattccagaggattccagaaaagagaagctgt

SEQ ID NO: 22518 - DNA, 120 bp, synthetic construct
  misc_feature 1..120: note = Artificially Synthesized Probe
  source 1..120: mol_type = other DNA
agagcccaccgtggactctcctagccactcagaggggaagtcaaataagaaaaggggaaagctgagagggagaaggctccgggaggagagcattcttccagtctctgctgatgtgatttc

SEQ ID NO: 22519 - DNA, 120 bp, synthetic construct
  misc_feature 1..120: note = Artificially Synthesized Probe
  source 1..120: mol_type = other DNA
tgatgcctctggctccagtgccaaggatcctccaagcttgtttgatgatgaggtctctttctcccagctcttccctccaggcggtcgcttgactagaaagaggaacccgcatgtctacgg

SEQ ID NO: 22520 - DNA, 120 bp, synthetic construct
  misc_feature 1..120: note = Artificially Synthesized Probe
  source 1..120: mol_type = other DNA
accacaggggcaagcgctccgccggcaaggccgccgggagcccgggagacccgtgggggcaagagggagaagccaagaaagacagcccgggcgagagggcgaaaccccgggcacgcagca

SEQ ID NO: 22521 - DNA, 120 bp, synthetic construct
  misc_feature 1..120: note = Artificially Synthesized Probe
  source 1..120: mol_type = other DNA
aaagagggctcctctcgtgttctcagggaaacgcagggccccgggtgcccgtggcaggtgtgcccctgaccatttccaggaagaccacctacttcagaaagagaaggaggtgtcctcaag

SEQ ID NO: 22522 - DNA, 120 bp, synthetic construct
  misc_feature 1..120: note = Artificially Synthesized Probe
  source 1..120: mol_type = other DNA
agtgacctcctcagccagctcttcgggcagagactaactggcttcaaaatccctttaaagaaagatgcttccgagtaatttctaggagcaagagcctgggaccggagctgggcgttcctg

SEQ ID NO: 22523 - DNA, 120 bp, synthetic construct
  misc_feature 1..120: note = Artificially Synthesized Probe
  source 1..120: mol_type = other DNA
cctatttgcaatgttactctgaagtttctggtgctatttttgtgttgtaatgtgaatacaggcttccttgatttttttttttaatgggggtattgggtgggacagacggggtcagggagg

SEQ ID NO: 22524 - DNA, 120 bp, synthetic construct
  misc_feature 1..120: note = Artificially Synthesized Probe
  source 1..120: mol_type = other DNA
ctcgaaggtaattatgaatctcgaaaaaaactacttctttaacatgtatatggtgttagctttggatctcttttacactcaaccctctgatttagtgtaatgtatgaagtttcagtgcct

SEQ ID NO: 22525 - DNA, 120 bp, synthetic construct
  misc_feature 1..120: note = Artificially Synthesized Probe
  source 1..120: mol_type = other DNA
gaggtgtgcttaaatgctctgtcacatttttatgtaagcagagtttctctccagtataaaattttttagtgagtaagcatggagaaccagttaaagggtttgccacatttttttctgcaa

SEQ ID NO: 22526 - DNA, 120 bp, synthetic construct
  misc_feature 1..120: note = Artificially Synthesized Probe
  source 1..120: mol_type = other DNA
ggtctctctccagtatgaattctcttgtggtcagtgagggttgaggataagctaaaggctttgccacattcttcacatttgtagggtctctctccagtatgaattctcttgtggtcagtg

SEQ ID NO: 22527 - DNA, 120 bp, synthetic construct
  misc_feature 1..120: note = Artificially Synthesized Probe
  source 1..120: mol_type = other DNA
tttttggagtgaatctttgatgccctgctctggctgaaggtcttgggtgaaatgggaacgcgtaactgaaagacacaaaaagcacaagttactccactttctggactcatataaatatat

SEQ ID NO: 22528 - DNA, 120 bp, synthetic construct
  misc_feature 1..120: note = Artificially Synthesized Probe
  source 1..120: mol_type = other DNA
acacatcctgagaacatgtttgtgagaatcccagaatctctaccaaagacaattggtgtcatgctatgacaggaaggagctgcattataaagatcatgaaaggtagttttatgttagtgt

SEQ ID NO: 22529 - DNA, 120 bp, synthetic construct
  misc_feature 1..120: note = Artificially Synthesized Probe
  source 1..120: mol_type = other DNA
actgttgtaacatttaagatgttttacagaatctccaatgtagcacaaagaaaaagtctttatagacacatgaaagcaaatgagtcgattactagaatgagacaaagattgatattatat

SEQ ID NO: 22530 - DNA, 120 bp, synthetic construct
  misc_feature 1..120: note = Artificially Synthesized Probe
  source 1..120: mol_type = other DNA
tacagtctgggaaacagagtgagaaaatctgagtcaaaaaaaaaataagaagagcaaaatcatacagtatatgttttctaacccaaactgaataaaactaaaaagaaaaaaagtaatact

SEQ ID NO: 22531 - DNA, 120 bp, synthetic construct
  misc_feature 1..120: note = Artificially Synthesized Probe
  source 1..120: mol_type = other DNA
gcaaagacatgacattggtcttggcacattttcttagatatgccatcaaatgcatgtgcaacaaagaggagaacagaaaaatttaattgggctaaacttcaaaatttctgcaatcaaata

SEQ ID NO: 22532 - DNA, 120 bp, synthetic construct
  misc_feature 1..120: note = Artificially Synthesized Probe
  source 1..120: mol_type = other DNA
attattgaagcagaagtggaatccttagagactttaacagcatgaggcaggaggtgtccctatgtgagagcaaaagaaaaaaatgacttgagcttctcagaaactcttttcatcaaagca

SEQ ID NO: 22533 - DNA, 120 bp, synthetic construct
  misc_feature 1..120: note = Artificially Synthesized Probe
  source 1..120: mol_type = other DNA
agctatgtctctgaatgtcaacagtccctggaaaacaaacaaacaaaaccactcatgaacacacaagcacttaccacacggccataggcagagatttttatttgactcaagttaaaaaag

SEQ ID NO: 22534 - DNA, 120 bp, synthetic construct
  misc_feature 1..120: note = Artificially Synthesized Probe
  source 1..120: mol_type = other DNA
gatggtttatgcacttcagctagtaaatctcctaagtgtccttaacaattaagagaataagaattaactctagagtggaaaaaaatgtcatagagatcttgaaccaagtgaataaaattg

SEQ ID NO: 22535 - DNA, 120 bp, synthetic construct
  misc_feature 1..120: note = Artificially Synthesized Probe
  source 1..120: mol_type = other DNA
agttgaaacaaactcattagggatcaacagcacaagtagagaagtaaaaatttgcaagatctgaacacaaggcattccaaaaggcagcagtggacactgcgcttgatctgagacatgctc

SEQ ID NO: 22536 - DNA, 120 bp, synthetic construct
  misc_feature 1..120: note = Artificially Synthesized Probe
  source 1..120: mol_type = other DNA
tttacagggacaacagaagacagtaatgtctgagtgaatctgcacctgggaaacctgtacacatgtactaataaaatgtttattaagcaggtattgtgtgctcaggagcatgtcacagaa

SEQ ID NO: 22537 - DNA, 120 bp, synthetic construct
  misc_feature 1..120: note = Artificially Synthesized Probe
  source 1..120: mol_type = other DNA
tgtggagaaattgaatgcttatatgctgctggtgagagtataaatttatttaaccattgagaaaagcagtttggcattttgacaaaaacctgaaaacagaattaccattcccaatcccgc

SEQ ID NO: 22538 - DNA, 120 bp, synthetic construct
  misc_feature 1..120: note = Artificially Synthesized Probe
  source 1..120: mol_type = other DNA
tctcccatggatcacaacccacaaaccatagctgggtgctctatgattcttgaatcacactttgatcagattctcatttttacagtgactcccatacatctctaaaaggaaaaatgagga

SEQ ID NO: 22539 - DNA, 120 bp, synthetic construct
  misc_feature 1..120: note = Artificially Synthesized Probe
  source 1..120: mol_type = other DNA
gaagcaaaaataacagcctaggctgcagccttcacaggcagggcttcttcctcgatcggagccaggccaacttcagaggatatttgcatttaaccttgtgtataatgtcatatgcattta

SEQ ID NO: 22540 - DNA, 120 bp, synthetic construct
  misc_feature 1..120: note = Artificially Synthesized Probe
  source 1..120: mol_type = other DNA
cttcaccttctgtcatggtcatgaatttaagtttcccaaggattctgcagccatgtaggactatgattcaatttacttaaaaaaaaaaatgactcagtctgagctatttgtttgtagcag

SEQ ID NO: 22541 - DNA, 120 bp, synthetic construct
  misc_feature 1..120: note = Artificially Synthesized Probe
  source 1..120: mol_type = other DNA
aactcatgaataatccaccccttgcttagcatataatcaagaaataactgttaaatatccttagttgagtggcccacattgctgctctgcctagagagtagctattcttttattcctcta

SEQ ID NO: 22542 - DNA, 120 bp, synthetic construct
  misc_feature 1..120: note = Artificially Synthesized Probe
  source 1..120: mol_type = other DNA
aggacttgtctttgtattaatttgccttgcactttttgctagtggctgtgactgacagaattaggtgagtacagaatcatggaacatgtggagatttttcctccctaaagtgggaaactt

SEQ ID NO: 22543 - DNA, 120 bp, synthetic construct
  misc_feature 1..120: note = Artificially Synthesized Probe
  source 1..120: mol_type = other DNA
aaagaagtccctgaaacaaacaacaacaacagcaagaaaataatggatgaaatttccctcttgttttatgttcttgggagcttgaccttgtagccatgtggcagtattttctcttggttt

SEQ ID NO: 22544 - DNA, 120 bp, synthetic construct
  misc_feature 1..120: note = Artificially Synthesized Probe
  source 1..120: mol_type = other DNA
ttcacaggtgtgattgtgtcatatagtttcactcagtatctgactgatttttctcttttgcctgggcccggcctgcagtttaaattgtgaaatattcttaggttgagcacctagataatg

SEQ ID NO: 22545 - DNA, 120 bp, synthetic construct
  misc_feature 1..120: note = Artificially Synthesized Probe
  source 1..120: mol_type = other DNA
tcttcctcacacattgacaaaacttattggtgaagtcttgactctcatatgaggacacgatacacagttagaatattgaccatccaatgtggatctgtccaaaggtcagatggtgagtca

SEQ ID NO: 22546 - DNA, 120 bp, synthetic construct
  misc_feature 1..120: note = Artificially Synthesized Probe
  source 1..120: mol_type = other DNA
gtgaagccaggacatttgtggggttttaaatcttatctttaaacctttctgcaggtgtaattgtgacatatacattttcccagcctctgattaattttactctgttgcttgggcccagtg

SEQ ID NO: 22547 - DNA, 80 bp, synthetic construct
  misc_feature 1..80: note = Artificially Synthesized Probe
  source 1..80: mol_type = other DNA
tgttttggattgaaaaacaaaatacttataggtatcagaataagaggaaagccaagactcttggaaacgtttggatccta

SEQ ID NO: 22548 - DNA, 80 bp, synthetic construct
  misc_feature 1..80: note = Artificially Synthesized Probe
  source 1..80: mol_type = other DNA
agaaataggcaggaagttctgaactatctgggaagatagcaagagaaatctactgatgagatggcttgtgcagagccaaa

SEQ ID NO: 22549 - DNA, 80 bp, synthetic construct
  misc_feature 1..80: note = Artificially Synthesized Probe
  source 1..80: mol_type = other DNA
ttcaaaatgtgccctgtaatttcccagtcgtgtggttcttctaaccagagccatcctggctttacattttttggatccaa

SEQ ID NO: 22550 - DNA, 80 bp, synthetic construct
  misc_feature 1..80: note = Artificially Synthesized Probe
  source 1..80: mol_type = other DNA
tcttgttgttcttagaagtgggacacacttctgagaagggtgctaaatgccaccttgtttacttctttataaggactgca

SEQ ID NO: 22551 - DNA, 80 bp, synthetic construct
  misc_feature 1..80: note = Artificially Synthesized Probe
  source 1..80: mol_type = other DNA
ctttttataagccacccagtctatggtattttgttgtagcagcctgagtggactgagacagtctgggaattcctcttctt

SEQ ID NO: 22552 - DNA, 80 bp, synthetic construct
  misc_feature 1..80: note = Artificially Synthesized Probe
  source 1..80: mol_type = other DNA
gacctcagtgcaatttgtaatgtttaattccttaaaaaagaaaaagagtctgggaaacatagcaagaacgctgtctctac

SEQ ID NO: 22553 - DNA, 80 bp, synthetic construct
  misc_feature 1..80: note = Artificially Synthesized Probe
  source 1..80: mol_type = other DNA
gctttcttgttacaacttaatctgtttcttcaatgtggagtttaactcaagccaaatcctttttagaatcctccttccca

SEQ ID NO: 22554 - DNA, 80 bp, synthetic construct
  misc_feature 1..80: note = Artificially Synthesized Probe
  source 1..80: mol_type = other DNA
gagaccattatctgatgtacctttagccagcgcgtccttatcttgacagtgggcagaacacacacgtttgtaggtgggct

SEQ ID NO: 22555 - DNA, 80 bp, synthetic construct
  misc_feature 1..80: note = Artificially Synthesized Probe
  source 1..80: mol_type = other DNA
ccaccgtgcctggccagtttcgctttttccgaatgagactccatcatagaaatgtgctcacacatgccagggactccact

SEQ ID NO: 22556 - DNA, 80 bp, synthetic construct
  misc_feature 1..80: note = Artificially Synthesized Probe
  source 1..80: mol_type = other DNA
aatagtttctatcctcttatcttgacatatcttcctcacaacctgaaaggccatgtgtaaattgagaaattctaaggcaa

SEQ ID NO: 22557 - DNA, 80 bp, synthetic construct
  misc_feature 1..80: note = Artificially Synthesized Probe
  source 1..80: mol_type = other DNA
ttgcttttttgggtgtcacctgtcagaaattcaagtgatgttctgacagtcgtactgattaagatgtcagccgaatagat

SEQ ID NO: 22558 - DNA, 80 bp, synthetic construct
  misc_feature 1..80: note = Artificially Synthesized Probe
  source 1..80: mol_type = other DNA
tgaggtgggaatggaactctggagttctactcactggcttgctctctcaatttgacaacatattgtgaaatatcgtacac

SEQ ID NO: 22559 - DNA, 80 bp, synthetic construct
  misc_feature 1..80: note = Artificially Synthesized Probe
  source 1..80: mol_type = other DNA
tgggtgcatggttgattgaaggaatgtatagtgtgagaatggtagcttgaggaggaaagtctatgggaacttgttaatga

SEQ ID NO: 22560 - DNA, 80 bp, synthetic construct
  misc_feature 1..80: note = Artificially Synthesized Probe
  source 1..80: mol_type = other DNA
acctgttggtttccttcttgtcttctcctatgttctcagcagcttctaaaggagcccctcatctctcctgtctcccacag

SEQ ID NO: 22561 - DNA, 80 bp, synthetic construct
  misc_feature 1..80: note = Artificially Synthesized Probe
  source 1..80: mol_type = other DNA
agcaagttgcttaactgccctgagcctcatctgtaaaacaaggattctgagcatatctatgttatagatttgcagtgagg

SEQ ID NO: 22562 - DNA, 80 bp, synthetic construct
  misc_feature 1..80: note = Artificially Synthesized Probe
  source 1..80: mol_type = other DNA
ctcctgggatacagaatggtcctttggacaaatggatgcttcttatggagctctttgctgactagtagaataatacagca

SEQ ID NO: 22563 - DNA, 80 bp, synthetic construct
  misc_feature 1..80: note = Artificially Synthesized Probe
  source 1..80: mol_type = other DNA
attgagggattctcgtaaggacacatatttaatgcagagctagaactagaactttggtttcatcattctcggatcaagac

SEQ ID NO: 22564 - DNA, 80 bp, synthetic construct
  misc_feature 1..80: note = Artificially Synthesized Probe
  source 1..80: mol_type = other DNA
ctgagcaaatagtgattaatgaatctggcagcactcaaaaacaggaccagttcagaggctcccccaagcaatttggtcag

SEQ ID NO: 22565 - DNA, 80 bp, synthetic construct
  misc_feature 1..80: note = Artificially Synthesized Probe
  source 1..80: mol_type = other DNA
aaagtggtttccaattgatgagtttattgatttggagattccagccattgaataagggtcttgaatgccagtgggtgttt

SEQ ID NO: 22566 - DNA, 80 bp, synthetic construct
  misc_feature 1..80: note = Artificially Synthesized Probe
  source 1..80: mol_type = other DNA
aggccccttctaccctgagagcctctgcacagtaaccagaaagatcatgtgaagaagcttcttggtttttggagatcaaa

SEQ ID NO: 22567 - DNA, 80 bp, synthetic construct
  misc_feature 1..80: note = Artificially Synthesized Probe
  source 1..80: mol_type = other DNA
gatgaaaagaagagagatgggtgtagatacagtcagaacatatatgtacactgtgctgtagttttaaattgtttccactt

SEQ ID NO: 22568 - DNA, 80 bp, synthetic construct
  misc_feature 1..80: note = Artificially Synthesized Probe
  source 1..80: mol_type = other DNA
ggacccagccgcaggtcgagtttgaacaactcagcttgccttccgccagccctgggctgcagcccaccctccaccctcct

SEQ ID NO: 22569 - DNA, 80 bp, synthetic construct
  misc_feature 1..80: note = Artificially Synthesized Probe
  source 1..80: mol_type = other DNA
tgggctcgacagcttcacagcccacaacctggtgaagaccttgtccaggctggccaaaggcaaccggctggtgctcatct

SEQ ID NO: 22570 - DNA, 80 bp, synthetic construct
  misc_feature 1..80: note = Artificially Synthesized Probe
  source 1..80: mol_type = other DNA
actgtagcaaggaccccaccagtaaacaggacaacagcgatcatctccttgaaggcaaacatggggcccaaacatgccag

SEQ ID NO: 22571 - DNA, 80 bp, synthetic construct
  misc_feature 1..80: note = Artificially Synthesized Probe
  source 1..80: mol_type = other DNA
tgggctcagtttgccttttctggcattgccagggccttggaggtagaaggcagaggcactgcaagaggacagctgtggtg

SEQ ID NO: 22572 - DNA, 80 bp, synthetic construct
  misc_feature 1..80: note = Artificially Synthesized Probe
  source 1..80: mol_type = other DNA
tggaaagaattctcagtctttagttagaactctcgctatctttgtggatacagttctcaccctccagagagaactctcac

SEQ ID NO: 22573 - DNA, 80 bp, synthetic construct
  misc_feature 1..80: note = Artificially Synthesized Probe
  source 1..80: mol_type = other DNA
tctatctggatagaactctccccatgtagatagaactctccctatctggatacaattttcccatctgaatagaactctct

SEQ ID NO: 22574 - DNA, 80 bp, synthetic construct
  misc_feature 1..80: note = Artificially Synthesized Probe
  source 1..80: mol_type = other DNA
catctgaggatagatttccaactatctatctggatataattcccactctgtcgttagaactctcactacctgtctagata

SEQ ID NO: 22575 - DNA, 80 bp, synthetic construct
  misc_feature 1..80: note = Artificially Synthesized Probe
  source 1..80: mol_type = other DNA
tggatagaattctcaccgtctgggtagaactctcactatctggatagaattctcactctggatagaactctgactatcta

SEQ ID NO: 22576 - DNA, 80 bp, synthetic construct
  misc_feature 1..80: note = Artificially Synthesized Probe
  source 1..80: mol_type = other DNA
aactctcactatctatctggatagagctcttactatctggatagaattctcactctgcatagaactctcactatctatct

SEQ ID NO: 22577 - DNA, 80 bp, synthetic construct
  misc_feature 1..80: note = Artificially Synthesized Probe
  source 1..80: mol_type = other DNA
agagaactctcactgtctatctcgataaaactctcactacctatctggatagaactctcgctatctggatagaattgtca

SEQ ID NO: 22578 - DNA, 80 bp, synthetic construct
  misc_feature 1..80: note = Artificially Synthesized Probe
  source 1..80: mol_type = other DNA
taaacatctcactatctttcttgatagaactcttactacttggaaagaatgctcactatctgtatagaattctaaccatc

SEQ ID NO: 22579 - DNA, 80 bp, synthetic construct
  misc_feature 1..80: note = Artificially Synthesized Probe
  source 1..80: mol_type = other DNA
ttaccatctggatagaactctcactatctgaatagaattctcactctctggatagaactctcactttctagcttgctaga

SEQ ID NO: 22580 - DNA, 80 bp, synthetic construct
  misc_feature 1..80: note = Artificially Synthesized Probe
  source 1..80: mol_type = other DNA
agaactctcgctattcatctagagagaattcccatctgaatagtactctcactaactggatagaattcctactctctgga

SEQ ID NO: 22581 - DNA, 80 bp, synthetic construct
  misc_feature 1..80: note = Artificially Synthesized Probe
  source 1..80: mol_type = other DNA
gatagatctctcaccatctgtctgggtagaattctctccatctgtatagaactctaactatctggatagaattctcacca

SEQ ID NO: 22582 - DNA, 80 bp, synthetic construct
  misc_feature 1..80: note = Artificially Synthesized Probe
  source 1..80: mol_type = other DNA
gaactctcactatctgtctaggtacaattctcatcatctgcttagagctctcactatctggatagaattctcagtctctg

SEQ ID NO: 22583 - DNA, 80 bp, synthetic construct
  misc_feature 1..80: note = Artificially Synthesized Probe
  source 1..80: mol_type = other DNA
ctaccatcagagtgaacaggcaacccacaaaataggaaaaaattttcgcaacctactcatctgacaaagggctaatatcc

SEQ ID NO: 22584 - DNA, 80 bp, synthetic construct
  misc_feature 1..80: note = Artificially Synthesized Probe
  source 1..80: mol_type = other DNA
taaaaaaaaaaaagaattctcaccctctggagagaactctcactatctggataaaattctcactctagatagaactctca

SEQ ID NO: 22585 - DNA, 80 bp, synthetic construct
  misc_feature 1..80: note = Artificially Synthesized Probe
  source 1..80: mol_type = other DNA
ctcgatataattttcattctctggatagatctctcactgtctgcctggatcgaattctcattctatggatagaactctca

SEQ ID NO: 22586 - DNA, 80 bp, synthetic construct
  misc_feature 1..80: note = Artificially Synthesized Probe
  source 1..80: mol_type = other DNA
ctcactatcattctggacataattcttaccctctgggttgaactctcactatctggatagaattctcaccatgtgggtgg

SEQ ID NO: 22587 - DNA, 80 bp, synthetic construct
  misc_feature 1..80: note = Artificially Synthesized Probe
  source 1..80: mol_type = other DNA
ctggattgaattttcaccatctggatggaattctcactgtcgatcacgttggaattctcactctgtggatagaactgtga

SEQ ID NO: 22588 - DNA, 80 bp, synthetic construct
  misc_feature 1..80: note = Artificially Synthesized Probe
  source 1..80: mol_type = other DNA
tctgtctcattagatctctcactgtctgtctggatagaactctaactctctggatagaactcttaataactcgatagaac

SEQ ID NO: 22589 - DNA, 80 bp, synthetic construct
  misc_feature 1..80: note = Artificially Synthesized Probe
  source 1..80: mol_type = other DNA
agtgcgtgacttagatgactttctatggaaagcagagacgaaggatcttgacgaggacacctgtgtggaaaggtaaggtg

SEQ ID NO: 22590 - DNA, 80 bp, synthetic construct
  misc_feature 1..80: note = Artificially Synthesized Probe
  source 1..80: mol_type = other DNA
tcaaaaaaaggaaacagcattgttgggaccagcactaaccttcagtgcgacacagaacacccctattgcttttattcttt

SEQ ID NO: 22591 - DNA, 80 bp, synthetic construct
  misc_feature 1..80: note = Artificially Synthesized Probe
  source 1..80: mol_type = other DNA
cttcatggatacagccgccctcttgttcatgatcggtgctctcatccctttcaacgtcattctggatgtcatctccaaat

SEQ ID NO: 22592 - DNA, 80 bp, synthetic construct
  misc_feature 1..80: note = Artificially Synthesized Probe
  source 1..80: mol_type = other DNA
tgggtcatgtgaagtcaccgatgccaccagatgccacattttctaggggagtttcagagacttgaacttttattttaaac

SEQ ID NO: 22593 - DNA, 80 bp, synthetic construct
  misc_feature 1..80: note = Artificially Synthesized Probe
  source 1..80: mol_type = other DNA
ttgcccactgccctggaggccaaaggaatgattccattagagattccagatgcacctcctcctatcccacagctgatatc

SEQ ID NO: 22594 - DNA, 80 bp, synthetic construct
  misc_feature 1..80: note = Artificially Synthesized Probe
  source 1..80: mol_type = other DNA
ggaatatggggagacggtgagaatatgggaagactgcaagaatatagggagaccatgggaatatggggagactatgggaa

SEQ ID NO: 22595 - DNA, 80 bp, synthetic construct
  misc_feature 1..80: note = Artificially Synthesized Probe
  source 1..80: mol_type = other DNA
aatatggggagactgaatatatgggagactgtgggaatatggggagatcatgcaaatatgggcagaccatgggaatatgg

SEQ ID NO: 22596 - DNA, 80 bp, synthetic construct
  misc_feature 1..80: note = Artificially Synthesized Probe
  source 1..80: mol_type = other DNA
ctgaagcaaaaattcattttcctaagggcacatggatactttgtggtggagtcatatggggatcagaaaagcctttgagg

SEQ ID NO: 22597 - DNA, 80 bp, synthetic construct
  misc_feature 1..80: note = Artificially Synthesized Probe
  source 1..80: mol_type = other DNA
cccaaaggaaaattagagtttagaatcaaaagaaggggaaggtgcgtgtttgggaggtaaatagcaaatactcttcatag

SEQ ID NO: 22598 - DNA, 80 bp, synthetic construct
  misc_feature 1..80: note = Artificially Synthesized Probe
  source 1..80: mol_type = other DNA
cctggtgtcacaggttcatcttgtattttcccatctcagccctggaatccgatgtttctccagagaatctgggttcctct

SEQ ID NO: 22599 - DNA, 80 bp, synthetic construct
  misc_feature 1..80: note = Artificially Synthesized Probe
  source 1..80: mol_type = other DNA
gagactctgatcccatgggtctgttttgtttaaaatgctcttcaaggcattgtgaggccaggaaaacaaagaaccaaggc

SEQ ID NO: 22600 - DNA, 80 bp, synthetic construct
  misc_feature 1..80: note = Artificially Synthesized Probe
  source 1..80: mol_type = other DNA
aaaacaggcaggttgctagatttgacctgagggtgtagtttgcagagccttggtaaaggttttcaaatttgcattttaag

SEQ ID NO: 22601 - DNA, 80 bp, synthetic construct
  misc_feature 1..80: note = Artificially Synthesized Probe
  source 1..80: mol_type = other DNA
aatagtgctcacatcatttgtatgattgtctcgtctctttaaaattggaaatattcttgtttccccaaactgctaataag

SEQ ID NO: 22602 - DNA, 80 bp, synthetic construct
  misc_feature 1..80: note = Artificially Synthesized Probe
  source 1..80: mol_type = other DNA
aacaatgagattttctaatgccgggcatggatgataggtgtttttgttcttggcttgctccctgggtgctgaaatagtca

SEQ ID NO: 22603 - DNA, 80 bp, synthetic construct
  misc_feature 1..80: note = Artificially Synthesized Probe
  source 1..80: mol_type = other DNA
agggccttgtggcatctctcctgcgccctgcacttccctggggccaatgccaagggcaaggccagccgtggcgggcagca

SEQ ID NO: 22604 - DNA, 80 bp, synthetic construct
  misc_feature 1..80: note = Artificially Synthesized Probe
  source 1..80: mol_type = other DNA
gcagcgtgaccctgtccaggtcacctcctgggaaactgaggcccagccaggcagaactgggtctcctggttccagccacc

SEQ ID NO: 22605 - DNA, 80 bp, synthetic construct
  misc_feature 1..80: note = Artificially Synthesized Probe
  source 1..80: mol_type = other DNA
gcattgcagatcattttacatttttaagaaaaaatgcagtttctctacaaagtcatccccctccaaaaacaaaacaaaac

SEQ ID NO: 22606 - DNA, 80 bp, synthetic construct
  misc_feature 1..80: note = Artificially Synthesized Probe
  source 1..80: mol_type = other DNA
acagccacacccttccgtaggccaaaggaagcaagagctttttctttctcactgttctcagggattcattgtttttgttt

SEQ ID NO: 22607 - DNA, 80 bp, synthetic construct
  misc_feature 1..80: note = Artificially Synthesized Probe
  source 1..80: mol_type = other DNA
cctccatgccgggcattactttttaagagcatatataacttagccacgagaaaaacagcagcatttttcagcaacaacaa

SEQ ID NO: 22608 - DNA, 80 bp, synthetic construct
  misc_feature 1..80: note = Artificially Synthesized Probe
  source 1..80: mol_type = other DNA
ggtctcttccaaattccccaggcataggaacagccacaagagccaactcacatttcccaaagccctctgggggcacggca

SEQ ID NO: 22609 - DNA, 80 bp, synthetic construct
  misc_feature 1..80: note = Artificially Synthesized Probe
  source 1..80: mol_type = other DNA
ggcacaaagtcgggacaacaaaatggtgtgcacagaatgactcatttcatgtttttaaaaaccttttggccgggcgcggt

SEQ ID NO: 22610 - DNA, 80 bp, synthetic construct
  misc_feature 1..80: note = Artificially Synthesized Probe
  source 1..80: mol_type = other DNA
tctcccatgaccatttattactcttttaatcatgaagaaaaagaggcttccttgttggagtccggtcaagcaagaaggaa

SEQ ID NO: 22611 - DNA, 80 bp, synthetic construct
  misc_feature 1..80: note = Artificially Synthesized Probe
  source 1..80: mol_type = other DNA
cgcctggcaaagggaattttaaaagcaccctaggtgactctaacatgcagccaagattaaaaccattgttttctagagag

SEQ ID NO: 22612 - DNA, 80 bp, synthetic construct
  misc_feature 1..80: note = Artificially Synthesized Probe
  source 1..80: mol_type = other DNA
agaactaacatcaggaatggttaatgaaacgtagaagttaaagtcatgacagggaagattgtagaagtatgaacatcaca

SEQ ID NO: 22613 - DNA, 80 bp, synthetic construct
  misc_feature 1..80: note = Artificially Synthesized Probe
  source 1..80: mol_type = other DNA
ttgacctagtagttgagtctgaaagatctggaagctctgtgcgcatcagtgtcatttacactggtagaagtaattatgtc

SEQ ID NO: 22614 - DNA, 80 bp, synthetic construct
  misc_feature 1..80: note = Artificially Synthesized Probe
  source 1..80: mol_type = other DNA
aaaatcatttacagacattcaacaagttaattctgttataaatgataggccatatgtatgttccaacctgcttcctttta

SEQ ID NO: 22615 - DNA, 80 bp, synthetic construct
  misc_feature 1..80: note = Artificially Synthesized Probe
  source 1..80: mol_type = other DNA
ttttttacccacggagaccgtattgcaaaggtataaagtggtctacccaacaaagtattttacagatgatggcgatgaaa

SEQ ID NO: 22616 - DNA, 80 bp, synthetic construct
  misc_feature 1..80: note = Artificially Synthesized Probe
  source 1..80: mol_type = other DNA
tttaggaagaagaaaaaaccaccctgccacaaaccagcaaactaatcgcacctgtatgttcacagggatgggatgcgcaa

SEQ ID NO: 22617 - DNA, 80 bp, synthetic construct
  misc_feature 1..80: note = Artificially Synthesized Probe
  source 1..80: mol_type = other DNA
ctgccagcagggaggacaggactgggtgatgggagcttagttttggaataaaaaaatctgcaaaggagcctatctgtcca

SEQ ID NO: 22618 - DNA, 80 bp, synthetic construct
  misc_feature 1..80: note = Artificially Synthesized Probe
  source 1..80: mol_type = other DNA
tttactggggctcagccttcacccactgaggggccctggatggaagcatgtgtttgcttggtggggatgacaagtcgaat

SEQ ID NO: 22619 - DNA, 80 bp, synthetic construct
  misc_feature 1..80: note = Artificially Synthesized Probe
  source 1..80: mol_type = other DNA
gggagaagctaaggtgtagacctctctagcaaaatacacaatttccccaactgtagattggtcttttgagatatcttttc

SEQ ID NO: 22620 - DNA, 80 bp, synthetic construct
  misc_feature 1..80: note = Artificially Synthesized Probe
  source 1..80: mol_type = other DNA
tagggagacatgagacatcaatcaaatacatgcaagatccacattgcttctgtccagaaaggtaggacaactcgaaggtg

SEQ ID NO: 22621 - DNA, 80 bp, synthetic construct
  misc_feature 1..80: note = Artificially Synthesized Probe
  source 1..80: mol_type = other DNA
gcggtgaggagggggacccagggcacctaaaggctaattcttgctagagtcatttaaattttaacttaaattttctaatg

SEQ ID NO: 22622 - DNA, 80 bp, synthetic construct
  misc_feature 1..80: note = Artificially Synthesized Probe
  source 1..80: mol_type = other DNA
atgacactttggggctgccctctccccagccctcctgggcaaagtcggtgcgtcccaggagtcagcctggacttgaacct

SEQ ID NO: 22623 - DNA, 80 bp, synthetic construct
  misc_feature 1..80: note = Artificially Synthesized Probe
  source 1..80: mol_type = other DNA
ttctttctgcctcatatatctgtgactgtgtgctggaaaagccagcaacacgaaacaccaaaagacacagacaaaaacca

SEQ ID NO: 22624 - DNA, 80 bp, synthetic construct
  misc_feature 1..80: note = Artificially Synthesized Probe
  source 1..80: mol_type = other DNA
tgaaataaataaaataatcctaaaattcgtatgagggagtaacacctgctccacagtggcacaaagcactgtcaggtgcc

SEQ ID NO: 22625 - DNA, 80 bp, synthetic construct
  misc_feature 1..80: note = Artificially Synthesized Probe
  source 1..80: mol_type = other DNA
tgtgtatgtaatggtgtctctgtggcggggagggtgtgtgtgtgattttgtgtctgtgtgtgtctttctgtgtgtgtctg

SEQ ID NO: 22626 - DNA, 80 bp, synthetic construct
  misc_feature 1..80: note = Artificially Synthesized Probe
  source 1..80: mol_type = other DNA
gaactccatgtccacgtccacgcacaccaggtaatccacctcgctgaggaagcgccgctcgcagaagtcactgatcatct

SEQ ID NO: 22627 - DNA, 80 bp, synthetic construct
  misc_feature 1..80: note = Artificially Synthesized Probe
  source 1..80: mol_type = other DNA
gctctgccagcatcctctttctagggtccaaggacagcaaacaggtgtccccctcctgctatctctggtcagtgagcagg

SEQ ID NO: 22628 - DNA, 80 bp, synthetic construct
  misc_feature 1..80: note = Artificially Synthesized Probe
  source 1..80: mol_type = other DNA
cagatgtcaggagaatctgagaggagagaacgaagcagccccaactgagatttacatcaaggaaaccgccctctaatacc

SEQ ID NO: 22629 - DNA, 80 bp, synthetic construct
  misc_feature 1..80: note = Artificially Synthesized Probe
  source 1..80: mol_type = other DNA
aaaacacaggtaccattgactccacttataaaaggtagttggagtagcagactcataacaacagaccatggaatggtgag

SEQ ID NO: 22630 - DNA, 80 bp, synthetic construct
  misc_feature 1..80: note = Artificially Synthesized Probe
  source 1..80: mol_type = other DNA
tggtcaggttccctaacagccatgctgcagaatgagaacacaggagatgaagtttagtctaggagcaggatttagggcac

SEQ ID NO: 22631 - DNA, 80 bp, synthetic construct
  misc_feature 1..80: note = Artificially Synthesized Probe
  source 1..80: mol_type = other DNA
cagggagagatagtaatcaatgattgtgattgttttccatggatggagtggtgtgttctgcagccatggatcactgacac

SEQ ID NO: 22632 - DNA, 80 bp, synthetic construct
  misc_feature 1..80: note = Artificially Synthesized Probe
  source 1..80: mol_type = other DNA
agtagaggtgacaggtgacttcactcttggttctgggaccttctgtgtctggaagcgactaacagcttgggacccagaat

SEQ ID NO: 22633 - DNA, 80 bp, synthetic construct
  misc_feature 1..80: note = Artificially Synthesized Probe
  source 1..80: mol_type = other DNA
ccagggagaggagccaccaacttcccctagtatctccctgctgtctcagaggctcatgttctggaaacaatcattgtctt

SEQ ID NO: 22634 - DNA, 80 bp, synthetic construct
  misc_feature 1..80: note = Artificially Synthesized Probe
  source 1..80: mol_type = other DNA
ggtatgtgtgtacaggagaaaacatactctctgtagggtttggtactatctgtggtttcagacatccactggggatctcg

SEQ ID NO: 22635 - DNA, 80 bp, synthetic construct
  misc_feature 1..80: note = Artificially Synthesized Probe
  source 1..80: mol_type = other DNA
catttctgagaagcacgccattgttaatccgccacaattcatttattctgtctcctattgacagacactgtggttttttc

SEQ ID NO: 22636 - DNA, 80 bp, synthetic construct
  misc_feature 1..80: note = Artificially Synthesized Probe
  source 1..80: mol_type = other DNA
gggtatgtagggatggttaatgtgtacaaataaatagaaagaatgaataagacccagtatttgatagcataacagggaga

SEQ ID NO: 22637 - DNA, 80 bp, synthetic construct
  misc_feature 1..80: note = Artificially Synthesized Probe
  source 1..80: mol_type = other DNA
acaaatattttctttcagtcggtggcttatttattcatttttccttaatttttcttttgaagggaagtgttaatttttat

SEQ ID NO: 22638 - DNA, 80 bp, synthetic construct
  misc_feature 1..80: note = Artificially Synthesized Probe
  source 1..80: mol_type = other DNA
atgcactgcaatctctgcctactgggctcaagtcatcctctcacctcagcctcctgagtagcaggggctacaggtgcatg

SEQ ID NO: 22639 - DNA, 80 bp, synthetic construct
  misc_feature 1..80: note = Artificially Synthesized Probe
  source 1..80: mol_type = other DNA
gaacatatacgacaataatactacaaaccacaagcaaggagggaggaaatggagttatactggagtcaagttcctgtatt

SEQ ID NO: 22640 - DNA, 80 bp, synthetic construct
  misc_feature 1..80: note = Artificially Synthesized Probe
  source 1..80: mol_type = other DNA
tgccatgatataaagtgaatacatcacgaaaatataacaaacagaaatatatacatacctgacaacctagccccaaaata

SEQ ID NO: 22641 - DNA, 80 bp, synthetic construct
  misc_feature 1..80: note = Artificially Synthesized Probe
  source 1..80: mol_type = other DNA
aagtaacatggcaaaaccctgtctataaaaaatgcaaaaatcagctaggcatgatggtacttgcctgtagttgcagctac

SEQ ID NO: 22642 - DNA, 80 bp, synthetic construct
  misc_feature 1..80: note = Artificially Synthesized Probe
  source 1..80: mol_type = other DNA
tttagctacattgaccagagagagagagaacacaaataactaaaatcaggactaaaagaggagacagcaattccaatctt

SEQ ID NO: 22643 - DNA, 80 bp, synthetic construct
  misc_feature 1..80: note = Artificially Synthesized Probe
  source 1..80: mol_type = other DNA
aaaagaaaattagaaccgttatacactgctgatgggaatgtaaaatggggcagtcactttggaaaacagtttgctagttt

SEQ ID NO: 22644 - DNA, 80 bp, synthetic construct
  misc_feature 1..80: note = Artificially Synthesized Probe
  source 1..80: mol_type = other DNA
agtcaattacttatgtcttgagatgaatgcacacttacacatagacatatagcttagaaggtatataagctctggaaaac

SEQ ID NO: 22645 - DNA, 80 bp, synthetic construct
  misc_feature 1..80: note = Artificially Synthesized Probe
  source 1..80: mol_type = other DNA
actaaatcaacatgcagaatgtgggtaacctgagaatgggcactcatttgccaggtttctcaaagacctaacctcttagt

SEQ ID NO: 22646 - DNA, 80 bp, synthetic construct
  misc_feature 1..80: note = Artificially Synthesized Probe
  source 1..80: mol_type = other DNA
atcttctggcgccaagaaaattaaggacaggtgatccaccctcggcctcccaaagtgctggggttacaggcctgagtcac

SEQ ID NO: 22647 - DNA, 80 bp, synthetic construct
  misc_feature 1..80: note = Artificially Synthesized Probe
  source 1..80: mol_type = other DNA
acgtccccctaggcagagtcgcttccccggccccggctcgcggccccacggagctctgcgtcccgcagactgaggaacct

SEQ ID NO: 22648 - DNA, 80 bp, synthetic construct
  misc_feature 1..80: note = Artificially Synthesized Probe
  source 1..80: mol_type = other DNA
gcaagggctccttgctaagctgctcacaggcagccgatggtcagtacttccttcctcttgggcatgtctttcctccgtgc

SEQ ID NO: 22649 - DNA, 80 bp, synthetic construct
  misc_feature 1..80: note = Artificially Synthesized Probe
  source 1..80: mol_type = other DNA
agtctttacactcaaaggaaatagaacagcagggaagggaactgaaaagcagtagaagaaacagtcagagatgcctcact

SEQ ID NO: 22650 - DNA, 80 bp, synthetic construct
  misc_feature 1..80: note = Artificially Synthesized Probe
  source 1..80: mol_type = other DNA
gccacagtccggcccctgctctgggtcttgcaggaatcccagggaagcctcccgcccttggaagcaacctcagagcttcc

SEQ ID NO: 22651 - DNA, 80 bp, synthetic construct
  misc_feature 1..80: note = Artificially Synthesized Probe
  source 1..80: mol_type = other DNA
gagctccaggacccttggccttcgctgtgggaactcctgaaggactcctggaaggggtcacctcgtctctgtctcctagg

SEQ ID NO: 22652 - DNA, 80 bp, synthetic construct
  misc_feature 1..80: note = Artificially Synthesized Probe
  source 1..80: mol_type = other DNA
ccctcaataccatcattcccaccctccaggcaggagctgtggctgcgcctgctttggaaacaggcaaacaaacactgtga

SEQ ID NO: 22653 - DNA, 80 bp, synthetic construct
  misc_feature 1..80: note = Artificially Synthesized Probe
  source 1..80: mol_type = other DNA
gggtttcaccttttttgactgtggcccacaatacaacccatgctgtaacacagtccacacgtctctatgtaactgaaaag

SEQ ID NO: 22654 - DNA, 80 bp, synthetic construct
  misc_feature 1..80: note = Artificially Synthesized Probe
  source 1..80: mol_type = other DNA
tcctgccagcggtggattctctttctccaccccttctgctgctggagcgtgggtgcaagcagccttccgtgggggctgaa

SEQ ID NO: 22655 - DNA, 80 bp, synthetic construct
  misc_feature 1..80: note = Artificially Synthesized Probe
  source 1..80: mol_type = other DNA
cttgggaaagggtgtttggggagtgaaatccatcacccagagttcagagccacattcataccatgtggcctgcagcttcc

SEQ ID NO: 22656 - DNA, 80 bp, synthetic construct
  misc_feature 1..80: note = Artificially Synthesized Probe
  source 1..80: mol_type = other DNA
agacacagccacacctgccccggctgggcctcccagactcactggcatcgaagacggccttgagcgcctggatgtccgtg

SEQ ID NO: 22657 - DNA, 80 bp, synthetic construct
  misc_feature 1..80: note = Artificially Synthesized Probe
  source 1..80: mol_type = other DNA
ggctggtgaatttcatggaaaattccactttgatctggttggggggtgaggcaggtaaagattccccagggtgtgagtgc

SEQ ID NO: 22658 - DNA, 80 bp, synthetic construct
  misc_feature 1..80: note = Artificially Synthesized Probe
  source 1..80: mol_type = other DNA
cgctccctggcactttctgaagtcaaaatctgaacatttccaagtttaaatagttgcaaagagtatgatttccaaaatca

SEQ ID NO: 22659 - DNA, 80 bp, synthetic construct
  misc_feature 1..80: note = Artificially Synthesized Probe
  source 1..80: mol_type = other DNA
tcttctttccctcacagagctcctggatcttctctccttgaatttgtttctattccatttctcctaaagaatgttgtcct

SEQ ID NO: 22660 - DNA, 80 bp, synthetic construct
  misc_feature 1..80: note = Artificially Synthesized Probe
  source 1..80: mol_type = other DNA
tggaatgctctctcaatgagatgggcggaacattttttgctttagttcgcgtatctatagggtattattttttgctagag

SEQ ID NO: 22661 - DNA, 80 bp, synthetic construct
  misc_feature 1..80: note = Artificially Synthesized Probe
  source 1..80: mol_type = other DNA
atggcgagatgctggctctcaggcagatggctttctggcaatagcacctatggcagctgagaatctgcaaactgatttcc

SEQ ID NO: 22662 - DNA, 80 bp, synthetic construct
  misc_feature 1..80: note = Artificially Synthesized Probe
  source 1..80: mol_type = other DNA
atgctctttgtcaactgagatgctacccttggaagaaacattctggagcggccatgccctcttttttttttttttttttt

SEQ ID NO: 22663 - DNA, 80 bp, synthetic construct
  misc_feature 1..80: note = Artificially Synthesized Probe
  source 1..80: mol_type = other DNA
cacattgcagttgtatgtatttatggggcgcagttcgatgttttgagaccaccccttcttgaggcaggtctctccacaca

SEQ ID NO: 22664 - DNA, 80 bp, synthetic construct
  misc_feature 1..80: note = Artificially Synthesized Probe
  source 1..80: mol_type = other DNA
gctctgtttcccaggaggctatcagcctccagaaaccaagtctatttcaggatatcatttaaacacagaggagggaggga

SEQ ID NO: 22665 - DNA, 80 bp, synthetic construct
  misc_feature 1..80: note = Artificially Synthesized Probe
  source 1..80: mol_type = other DNA
tgagcccctgcatccggccgactgttttctctttgtctgggcacttcgcctggtcaaatcatgactgcgcattcaggcct

SEQ ID NO: 22666 - DNA, 80 bp, synthetic construct
  misc_feature 1..80: note = Artificially Synthesized Probe
  source 1..80: mol_type = other DNA
ttaatccacagtaaggggcctgtggtggccctgcccaaggcaggtgggacttagaactggccactgggggtctcagtgga

SEQ ID NO: 22667 - DNA, 80 bp, synthetic construct
  misc_feature 1..80: note = Artificially Synthesized Probe
  source 1..80: mol_type = other DNA
ggggctcccaggccagcggccacggtggcagcccgggctggctttcccctgccctcccccaagggcagccccacgctcag

SEQ ID NO: 22668 - DNA, 80 bp, synthetic construct
  misc_feature 1..80: note = Artificially Synthesized Probe
  source 1..80: mol_type = other DNA
agcccccgggctgggcatggctgaccttgaggagaagcagacaaaatccaaacctgggctgctcttggaggccccacagc

SEQ ID NO: 22669 - DNA, 80 bp, synthetic construct
  misc_feature 1..80: note = Artificially Synthesized Probe
  source 1..80: mol_type = other DNA
gctccgagtctcacgttcagtggcgtcgtcgagaagaaccgtcttgcctgttgctatgcacagcgtgccaggacgggcac

SEQ ID NO: 22670 - DNA, 80 bp, synthetic construct
  misc_feature 1..80: note = Artificially Synthesized Probe
  source 1..80: mol_type = other DNA
caccttgtaagtgtcacctcagttgcgtcacaggctaagaatgatgcctcgtacagtacgtgttcaaaacatatcgtcac

SEQ ID NO: 22671 - DNA, 80 bp, synthetic construct
  misc_feature 1..80: note = Artificially Synthesized Probe
  source 1..80: mol_type = other DNA
gtttaggactaggaatcttgagacatggccaagatcatcacatgaactggattccaggagatcatcctgttcagctcctt

SEQ ID NO: 22672 - DNA, 80 bp, synthetic construct
  misc_feature 1..80: note = Artificially Synthesized Probe
  source 1..80: mol_type = other DNA
gttcccaaccacctgggcagtgagcgaggccactcagcagagggccaggcctctccagcaccagcgccctgtggccaaca

SEQ ID NO: 22673 - DNA, 80 bp, synthetic construct
  misc_feature 1..80: note = Artificially Synthesized Probe
  source 1..80: mol_type = other DNA
tggtaccatcaagaaggaataaacgacaggctctgtgaggggtggggttgtcctgcggtggcgatcaagctgacaaagaa

SEQ ID NO: 22674 - DNA, 80 bp, synthetic construct
  misc_feature 1..80: note = Artificially Synthesized Probe
  source 1..80: mol_type = other DNA
ccccttcccctccaaagctcaagcgagaatctagaattcagccccttcccatccaaagctcaaccaagaatctagaagag

SEQ ID NO: 22675 - DNA, 80 bp, synthetic construct
  misc_feature 1..80: note = Artificially Synthesized Probe
  source 1..80: mol_type = other DNA
gcacccttcccttaccccaccgaaacgaaactgcctagtcccagcccctcggcccaactgtgaagctcctgcaggaaaat

SEQ ID NO: 22676 - DNA, 80 bp, synthetic construct
  misc_feature 1..80: note = Artificially Synthesized Probe
  source 1..80: mol_type = other DNA
ccctggccagccggactggcactctgagacagctaactcggacagttgatttgatctgcagagttatcgagcacttcctg

SEQ ID NO: 22677 - DNA, 80 bp, synthetic construct
  misc_feature 1..80: note = Artificially Synthesized Probe
  source 1..80: mol_type = other DNA
gctggagagaaggcgcctgtggagcgctcagtcccggctgccagtcccgctagttccctagtcccgccggctttccccgc

SEQ ID NO: 22678 - DNA, 80 bp, synthetic construct
  misc_feature 1..80: note = Artificially Synthesized Probe
  source 1..80: mol_type = other DNA
tcttgaccttcaatttatttagtgaactttctaaccgcagagactaggacacaaattacgtctcaaggtaacagtgcaag

SEQ ID NO: 22679 - DNA, 80 bp, synthetic construct
  misc_feature 1..80: note = Artificially Synthesized Probe
  source 1..80: mol_type = other DNA
tgtcccctaactgaggcctcagtcacccttctccacccctccttcgcctgccccttccagggctccaggaggacccagac

SEQ ID NO: 22680 - DNA, 80 bp, synthetic construct
  misc_feature 1..80: note = Artificially Synthesized Probe
  source 1..80: mol_type = other DNA
ccatattacggcctcagaacaggacagacaaaatgccacgaacatcgagagatacaatttccagctggaggcaactgggg

SEQ ID NO: 22681 - DNA, 80 bp, synthetic construct
  misc_feature 1..80: note = Artificially Synthesized Probe
  source 1..80: mol_type = other DNA
gccagagccctcctcagacgacctgcaagactcccccggctggataaacagagcctggtggtaaggcccccacgaacaga

SEQ ID NO: 22682 - DNA, 80 bp, synthetic construct
  misc_feature 1..80: note = Artificially Synthesized Probe
  source 1..80: mol_type = other DNA
gaggagcctggcacccagctgaggatggggaccgaggggatgtggctcaggtctgccaagaacactccctctctcagcac

SEQ ID NO: 22683 - DNA, 80 bp, synthetic construct
  misc_feature 1..80: note = Artificially Synthesized Probe
  source 1..80: mol_type = other DNA
aaccctagcgattctcacagcacatttggtcatggaaaagggtgaaaaatgcacttgagcctttgggaacatcttgctta

SEQ ID NO: 22684 - DNA, 80 bp, synthetic construct
  misc_feature 1..80: note = Artificially Synthesized Probe
  source 1..80: mol_type = other DNA
ttgtaaggacacctctgggtcagacgctgaacctgcagctccagtcgtgtctctgcttctctccctcctttgggaaactc

SEQ ID NO: 22685 - DNA, 80 bp, synthetic construct
  misc_feature 1..80: note = Artificially Synthesized Probe
  source 1..80: mol_type = other DNA
gactcacacctccatctgcttcctgctggatgcttcctgcccagaatccactgggcagagtccaggctcccaaaatcagg

SEQ ID NO: 22686 - DNA, 80 bp, synthetic construct
  misc_feature 1..80: note = Artificially Synthesized Probe
  source 1..80: mol_type = other DNA
caaggcctccctcagggccaggggcccggctgtggtcagtgtggcccacgcgtgaggcctggaacggggaagcactgagg

SEQ ID NO: 22687 - DNA, 80 bp, synthetic construct
  misc_feature 1..80: note = Artificially Synthesized Probe
  source 1..80: mol_type = other DNA
ctttttttgagacagagtctcgctctgtagcccaggctggagtgtaatggcgcaatctcggctcaccgcaacctccacct

SEQ ID NO: 22688 - DNA, 80 bp, synthetic construct
  misc_feature 1..80: note = Artificially Synthesized Probe
  source 1..80: mol_type = other DNA
tgtctccatcctcagggacaaggttctttttctcaacgaaaggcaagagcgttttgggtggaaacaacccaaatgtgcac

SEQ ID NO: 22689 - DNA, 80 bp, synthetic construct
  misc_feature 1..80: note = Artificially Synthesized Probe
  source 1..80: mol_type = other DNA
ataaacagacatggcacctacattcacggacggatggatggataaacagatgtggcacctatatccacagacggataaac

SEQ ID NO: 22690 - DNA, 80 bp, synthetic construct
  misc_feature 1..80: note = Artificially Synthesized Probe
  source 1..80: mol_type = other DNA
tctagcctccttagcctcccaagtagtccacagctacaccacgtgagctactatgcctggcttctaccactattttttct

SEQ ID NO: 22691 - DNA, 80 bp, synthetic construct
  misc_feature 1..80: note = Artificially Synthesized Probe
  source 1..80: mol_type = other DNA
cccaggaatcccctccttttattcattccttctactggccttgcttgcagctccccgccacccctgctgaggctcctgac

SEQ ID NO: 22692 - DNA, 80 bp, synthetic construct
  misc_feature 1..80: note = Artificially Synthesized Probe
  source 1..80: mol_type = other DNA
tggtgacctttctgcctctgaattcctgcgggacaatcttccatcttcttatagcaggacaatcttccatcttcttacag

SEQ ID NO: 22693 - DNA, 80 bp, synthetic construct
  misc_feature 1..80: note = Artificially Synthesized Probe
  source 1..80: mol_type = other DNA
ccatgttggccaggcgagtctcaaactcccgacctcctaatccgcccgcctcggcctcccaaagtgctgggattacaggc

SEQ ID NO: 22694 - DNA, 80 bp, synthetic construct
  misc_feature 1..80: note = Artificially Synthesized Probe
  source 1..80: mol_type = other DNA
ctacaggccccctgaatatccccgagggctgggccctatctcaaagccacctccgactatgtcctcagcgcctgctggcg

SEQ ID NO: 22695 - DNA, 80 bp, synthetic construct
  misc_feature 1..80: note = Artificially Synthesized Probe
  source 1..80: mol_type = other DNA
ccccacagagagcaggtcccagggactgaatctctagagcccatttcctaaatcacgaaggactggctggcagttgcctg

SEQ ID NO: 22696 - DNA, 80 bp, synthetic construct
  misc_feature 1..80: note = Artificially Synthesized Probe
  source 1..80: mol_type = other DNA
ttaataggttggtgaatagcagccatcttcaaaattggcagaatgtttcagagacacaggctgcacacacagaggccttt

SEQ ID NO: 22697 - DNA, 80 bp, synthetic construct
  misc_feature 1..80: note = Artificially Synthesized Probe
  source 1..80: mol_type = other DNA
ggtgcgtgcctcagctttgcaaggaggagggagtaagcacggcccacgaaggacacgtcagattttctggagctcccaga

SEQ ID NO: 22698 - DNA, 80 bp, synthetic construct
  misc_feature 1..80: note = Artificially Synthesized Probe
  source 1..80: mol_type = other DNA
cctccgctgcacttaacataaaccaaagggatcttctctactcgtgcgtccctagtctctctccccccacgacgtaaaca

SEQ ID NO: 22699 - DNA, 80 bp, synthetic construct
  misc_feature 1..80: note = Artificially Synthesized Probe
  source 1..80: mol_type = other DNA
taccccaagaagcctccagctggagcaacagaaagaagacccaggtgggcctcagaacacacagaacggggctggggatt

SEQ ID NO: 22700 - DNA, 80 bp, synthetic construct
  misc_feature 1..80: note = Artificially Synthesized Probe
  source 1..80: mol_type = other DNA
cagagggagggttcgagaaggggctgggggagggctcacagggtcagagggagggttccggaacgggctgggggagggtt

SEQ ID NO: 22701 - DNA, 80 bp, synthetic construct
  misc_feature 1..80: note = Artificially Synthesized Probe
  source 1..80: mol_type = other DNA
tgccggaagacgtggattctgctgcaccacctgctactgtgtgactccaggaaggaaccttgagcccctccgagcctcgg

SEQ ID NO: 22702 - DNA, 80 bp, synthetic construct
  misc_feature 1..80: note = Artificially Synthesized Probe
  source 1..80: mol_type = other DNA
ctctggcaaatgggtagaaactattagctgtctaactgactcacagattcccgtgtggataacaggtagataaaaagcgc

SEQ ID NO: 22703 - DNA, 80 bp, synthetic construct
  misc_feature 1..80: note = Artificially Synthesized Probe
  source 1..80: mol_type = other DNA
ctccaggggaatgccccatgtctaaaggcgtgctggcagggccccatcctgggcagagcagtgcagaatccacaatggcc

SEQ ID NO: 22704 - DNA, 80 bp, synthetic construct
  misc_feature 1..80: note = Artificially Synthesized Probe
  source 1..80: mol_type = other DNA
attcaaggcctttcaagagctggtccctggaaacttccagcctcatttcccatacaccattttatctaccgggtctgctc

SEQ ID NO: 22705 - DNA, 80 bp, synthetic construct
  misc_feature 1..80: note = Artificially Synthesized Probe
  source 1..80: mol_type = other DNA
ggactaaatcatcatgtctttcagccaatcagttagattctttgggtctcaattaatccgtaacatccttaaacgctcac

SEQ ID NO: 22706 - DNA, 80 bp, synthetic construct
  misc_feature 1..80: note = Artificially Synthesized Probe
  source 1..80: mol_type = other DNA
agagtgggctgctctggactaaggaaggggctgtcttggtcccacccccacccatcctgacctttccattccgattgtgg

SEQ ID NO: 22707 - DNA, 80 bp, synthetic construct
  misc_feature 1..80: note = Artificially Synthesized Probe
  source 1..80: mol_type = other DNA
ccctgggcggggtgctatgcctccttctcttgagaaccctaaataatacaaatattacagtagtattaacctctctgtac

SEQ ID NO: 22708 - DNA, 80 bp, synthetic construct
  misc_feature 1..80: note = Artificially Synthesized Probe
  source 1..80: mol_type = other DNA
tacctcaaaaagaaagaaaaagaatctgatacatccaaagggctcaaagacccactgtggagtaaaatgctgaagttgca

SEQ ID NO: 22709 - DNA, 80 bp, synthetic construct
  misc_feature 1..80: note = Artificially Synthesized Probe
  source 1..80: mol_type = other DNA
aaacaaaaaacaaaaaacaaatcactgcttcttctgtgactcagaggacggcacctgtgcctctccagtgactcacatgt

SEQ ID NO: 22710 - DNA, 80 bp, synthetic construct
  misc_feature 1..80: note = Artificially Synthesized Probe
  source 1..80: mol_type = other DNA
atggaacagaagaaaatagcgctgtccctggagttcaaattccagtggggaagagaggagtctgacaatgcaattacaat

SEQ ID NO: 22711 - DNA, 80 bp, synthetic construct
  misc_feature 1..80: note = Artificially Synthesized Probe
  source 1..80: mol_type = other DNA
aactgagggctatgcatgttcctctagacactgttatgtgaactgagggctatgcatgttcctctagatgctgttgttac

SEQ ID NO: 22712 - DNA, 80 bp, synthetic construct
  misc_feature 1..80: note = Artificially Synthesized Probe
  source 1..80: mol_type = other DNA
ggctatgcatgttcctctagacactgttgttacgtgaactgagggctatacatgttcctctagacactgttgttatgtga

SEQ ID NO: 22713 - DNA, 80 bp, synthetic construct; identical to SEQ ID NO: 22712
  misc_feature 1..80: note = Artificially Synthesized Probe
  source 1..80: mol_type = other DNA

SEQ ID NO: 22714 - DNA, 80 bp, synthetic construct
  misc_feature 1..80: note = Artificially Synthesized Probe
  source 1..80: mol_type = other DNA
gttatgtgaactgagggctatgcatgttcctccagacgctgttgttatgtgaactgagggctatgcatgttcctctagac

SEQ ID NO: 22715 - DNA, 80 bp, synthetic construct
  misc_feature 1..80: note = Artificially Synthesized Probe
  source 1..80: mol_type = other DNA
tctccttatttatttgcctacttgatctgtcagtttctgagaggcctcccaggtccttttccttgcacaggtcctgcttt

SEQ ID NO: 22716 - DNA, 80 bp, synthetic construct
  misc_feature 1..80: note = Artificially Synthesized Probe
  source 1..80: mol_type = other DNA
ctatccgtgttcaatatccttcaggctagcaatggaatacaggtgttattccaaatgccacctcttatcaagagtggtca

SEQ ID NO: 22717 - DNA, 80 bp, synthetic construct
  misc_feature 1..80: note = Artificially Synthesized Probe
  source 1..80: mol_type = other DNA
gcttggcacactgcagttgatcactaagtgtgggtggaagaatgtgtgaatgaacgcagaatgagcctctgctcaaggca

SEQ ID NO: 22718 - DNA, 80 bp, synthetic construct
  misc_feature 1..80: note = Artificially Synthesized Probe
  source 1..80: mol_type = other DNA
ctcatgcttcagtgggggacggggtttcctccaatggccttatattatctttataattaaaaacatgacttactttcagg

SEQ ID NO: 22719 - DNA, 80 bp, synthetic construct
  misc_feature 1..80: note = Artificially Synthesized Probe
  source 1..80: mol_type = other DNA
ctgtcatcccttaaccaaaggtggttcaagcactgcctttggagtcacatgggcatgggtttgaatgccaacaggcttct

SEQ ID NO: 22720 - DNA, 80 bp, synthetic construct
  misc_feature 1..80: note = Artificially Synthesized Probe
  source 1..80: mol_type = other DNA
aaaaaaaggatgactgaaaacggagggtacgctaagccctctggagatttttcagatatccccagagtaaaacagacgac

SEQ ID NO: 22721 - DNA, 80 bp, synthetic construct
  misc_feature 1..80: note = Artificially Synthesized Probe
  source 1..80: mol_type = other DNA
ggatcaggattggagaggcaggaggcacccggtgccgcccgtgtgtgagagaaggggacgagggacctgccgcccgtgtg

SEQ ID NO: 22722 - DNA, 80 bp, synthetic construct
  misc_feature 1..80: note = Artificially Synthesized Probe
  source 1..80: mol_type = other DNA
agaccaggtggaggctcatccccccgagcagctgggagagaaaccctgtgtctgccctgcagctgctccaaggacactgg

SEQ ID NO: 22723 - DNA, 80 bp, synthetic construct
  misc_feature 1..80: note = Artificially Synthesized Probe
  source 1..80: mol_type = other DNA
cccgtagagtccagcacacctgccacacgcagaaccccagaatcacacagctccacccagccatgccctgcagagtctag

SEQ ID NO: 22724 - DNA, 80 bp, synthetic construct
  misc_feature 1..80: note = Artificially Synthesized Probe
  source 1..80: mol_type = other DNA
gctgtgctctcaaacacgtggcagcctgaggggcaaaggtttcctgaagcaactcaggttaggcctcacatatgagagcc

SEQ ID NO: 22725 - DNA, 80 bp, synthetic construct
  misc_feature 1..80: note = Artificially Synthesized Probe
  source 1..80: mol_type = other DNA
acagcctggccaacatggtgaaaccccatctctactaaaaatacaaaaattagccaggtgtggtggcaggcgcctataat

SEQ ID NO: 22726 - DNA, 80 bp, synthetic construct
  misc_feature 1..80: note = Artificially Synthesized Probe
  source 1..80: mol_type = other DNA
gtactgagttaactgctttgctctcattatttcctgtgattaaaacgggaagcaattctcactagccccattttacagac

SEQ ID NO: 22727 - DNA, 80 bp, synthetic construct
  misc_feature 1..80: note = Artificially Synthesized Probe
  source 1..80: mol_type = other DNA
accatccccctcaagtcagccttcgacaaggagctccaaggagctccaggttaccagggagataggaaagcaaagtgact

SEQ ID NO: 22728 - DNA, 80 bp, synthetic construct
  misc_feature 1..80: note = Artificially Synthesized Probe
  source 1..80: mol_type = other DNA
ttcaactctaggctggatgccgccaaaacgaagggggaattcaggtccagccgctcgcccaccctccttccctgcggccc

SEQ ID NO: 22729 - DNA, 80 bp, synthetic construct
  misc_feature 1..80: note = Artificially Synthesized Probe
  source 1..80: mol_type = other DNA
ccatggccatgggctgcctctgccaccccaatcccctgcaccacacctgtgaactcctggagcctcgtggagtccagtgg

SEQ ID NO: 22730 - DNA, 80 bp, synthetic construct
  misc_feature 1..80: note = Artificially Synthesized Probe
  source 1..80: mol_type = other DNA
ctggctggtgcctggactcccagatttcgggaatgtttcctcacgccccctccagtgaagtctagggtatgaaatcactc

SEQ ID NO: 22731 - DNA, 80 bp, synthetic construct
  misc_feature 1..80: note = Artificially Synthesized Probe
  source 1..80: mol_type = other DNA
ctgtcctcattgtggagaggggcctgtgttttcctattcctgcaagggactcaatagatacttttttttttccagacagg

SEQ ID NO: 22732 - DNA, 80 bp, synthetic construct
  misc_feature 1..80: note = Artificially Synthesized Probe
  source 1..80: mol_type = other DNA
gcaagaaccttaaaagacgacctatagtccaaatttcctcaagacttccctgtcataaatattacccagaagcttgttca

SEQ ID NO: 22733 - DNA, 80 bp, synthetic construct
  misc_feature 1..80: note = Artificially Synthesized Probe
  source 1..80: mol_type = other DNA
gaaaatgtcaggtgcaagaaagcaaatatcaggctaagtgttacccattagagtaaccacttcaccgactggcaagcgag

SEQ ID NO: 22734 - DNA, 80 bp, synthetic construct
  misc_feature 1..80: note = Artificially Synthesized Probe
  source 1..80: mol_type = other DNA
ccagcctcactacacgtttgcctgtcactcacacagtcacaacctgagtcacaaccacacagagcctcgcctcttctgag

SEQ ID NO: 22735 - DNA, 80 bp, synthetic construct
  misc_feature 1..80: note = Artificially Synthesized Probe
  source 1..80: mol_type = other DNA
ccgcgcccggccaatttaaactcttagactactcggggaagtgtaaattagtacaattatttggagagcaatttgttaat

SEQ ID NO: 22736 - DNA, 80 bp, synthetic construct
  misc_feature 1..80: note = Artificially Synthesized Probe
  source 1..80: mol_type = other DNA
gtgggtattagaaaatgtgaaatgatgtacgtggctcataagctatttccattagacagcagtgctctggagcaaatggc

SEQ ID NO: 22737 - DNA, 80 bp, synthetic construct
  misc_feature 1..80: note = Artificially Synthesized Probe
  source 1..80: mol_type = other DNA
cgctgtattttcttcattagaaggttctgctgttattctttggagtttctggtttaaatgtttttcaatacagcagcaag

SEQ ID NO: 22738 - DNA, 80 bp, synthetic construct
  misc_feature 1..80: note = Artificially Synthesized Probe
  source 1..80: mol_type = other DNA
ctggagtgatctcataaaacaaacagcagagacgctaattcccttctctcagtaacgaataatcaaatacccagagtctt

SEQ ID NO: 22739 - DNA, 80 bp, synthetic construct
  misc_feature 1..80: note = Artificially Synthesized Probe
  source 1..80: mol_type = other DNA
gcccagccatttttttttttttttttttttgagacagagtctcagtctgtcatccaggctggagtgcaatggtgtggttt

SEQ ID NO: 22740 - DNA, 80 bp, synthetic construct
  misc_feature 1..80: note = Artificially Synthesized Probe
  source 1..80: mol_type = other DNA
tggcacaaggcctgcatttggcgacttggaaagccttcttggaggaggtcccttctaagctgggaactgaccaggggagg

SEQ ID NO: 22741 - DNA, 80 bp, synthetic construct
  misc_feature 1..80: note = Artificially Synthesized Probe
  source 1..80: mol_type = other DNA
cccagagaacagggcaggaaggaggagaaggtcctctggccactcacacccagagaagaaccgcggcctggactcccagt

SEQ ID NO: 22742 - DNA, 80 bp, synthetic construct
  misc_feature 1..80: note = Artificially Synthesized Probe
  source 1..80: mol_type = other DNA
acaggttgtcatagaactccttgtggatctcatagatgtcctggatcttgtagaagatggtctcgatctgctggatggtg

SEQ ID NO: 22743 - DNA, 80 bp, synthetic construct
  misc_feature 1..80: note = Artificially Synthesized Probe
  source 1..80: mol_type = other DNA
gaatgaatatgaataatcagaaaaaaaaaaaccaaagatgaccaggctgtactgcaaaggccctgcaggacacagggcct

SEQ ID NO: 22744 - DNA, 80 bp, synthetic construct
  misc_feature 1..80: note = Artificially Synthesized Probe
  source 1..80: mol_type = other DNA
tctgatgaagtctcatctactcagatatatcgcctcactctgatggagacagaacccatgttcactggaagaagtcgtct

SEQ ID NO: 22745 - DNA, 80 bp, synthetic construct
  misc_feature 1..80: note = Artificially Synthesized Probe
  source 1..80: mol_type = other DNA
atggacgatgcgactgactgtaagcaccaaccacatggttccaaggttgtgctggagtagcctggagggctgcatggagg

SEQ ID NO: 22746 - DNA, 80 bp, synthetic construct
  misc_feature 1..80: note = Artificially Synthesized Probe
  source 1..80: mol_type = other DNA
ccgttatttgtctctggtgaagtcctgcgtatgggctcaggggcaggagggtggactgaaaggcaaggtgacccacactg

SEQ ID NO: 22747 - DNA, 80 bp, synthetic construct
  misc_feature 1..80: note = Artificially Synthesized Probe
  source 1..80: mol_type = other DNA
ccccgtgtgtgcacatggttttaggtacacacacccagccctttgcatatcaggaagtgttcagatgaaagcaaacaggc

SEQ ID NO: 22748 - DNA, 80 bp, synthetic construct
  misc_feature 1..80: note = Artificially Synthesized Probe
  source 1..80: mol_type = other DNA
gtgtgttgtggcagaaaccacgaagccctaacctgtctcctctcccagcaatagagaaattaacagtgtcaacgaacact

SEQ ID NO: 22749 - DNA, 80 bp, synthetic construct
  misc_feature 1..80: note = Artificially Synthesized Probe
  source 1..80: mol_type = other DNA
catcttcagatccagaaatggaggctcaaggaatttatgtagggcttgcccaaagccagcagttttcttttctttttttt

SEQ ID NO: 22750 - DNA, 80 bp, synthetic construct
  misc_feature 1..80: note = Artificially Synthesized Probe
  source 1..80: mol_type = other DNA
aactgggattacaggtatgcaccaccacgcctggcttttttttgcatttctagcagagacaaggtttcaccacattggcc

SEQ ID NO: 22751 - DNA, 80 bp, synthetic construct
  misc_feature 1..80: note = Artificially Synthesized Probe
  source 1..80: mol_type = other DNA
acctcatatttcctgacacggggcctcaggatggcactaacggttccctcacccagggaggtagaaggacttggacacaa

SEQ ID NO: 22752 - DNA, 80 bp, synthetic construct
  misc_feature 1..80: note = Artificially Synthesized Probe
  source 1..80: mol_type = other DNA
cacaatctcggctcactgcaacctccgcctcccgggttccagtgattcccctgcctcagcctcccgagtagctgggatta

SEQ ID NO: 22753 - DNA, 80 bp, synthetic construct
  misc_feature 1..80: note = Artificially Synthesized Probe
  source 1..80: mol_type = other DNA
ggcccaccatatcctttatgagccacctgcagtggcccggatgcccgtccctacccttccagtctttcccacagccagga

SEQ ID NO: 22754 - DNA, 80 bp, synthetic construct
  misc_feature 1..80: note = Artificially Synthesized Probe
  source 1..80: mol_type = other DNA
atttgtgtggttttaagcccttaagtttgtggcgatttgtttcagcagcattagaaaagcaagacagaccccacgcttca

SEQ ID NO: 22755 - DNA, 80 bp, synthetic construct
  misc_feature 1..80: note = Artificially Synthesized Probe
  source 1..80: mol_type = other DNA
tgaggaaattcacattgtttcttcagtctttgcagggcgtctcttgtctcatcaaaaaccaggctcaccactcactcacc

SEQ ID NO: 22756 - DNA, 80 bp, synthetic construct
  misc_feature 1..80: note = Artificially Synthesized Probe
  source 1..80: mol_type = other DNA
ccatagggcacaggcaatgttttgaaactttggttgttcatatcccacccttaaaattttgccatactcacataccacca

SEQ ID NO: 22757 - DNA, 80 bp, synthetic construct
  misc_feature 1..80: note = Artificially Synthesized Probe
  source 1..80: mol_type = other DNA
gagacctgggcaggtgaaacagaaatagagatgtttcagatgatccattaaaaactggcacagaattgggctgggctcag

SEQ ID NO: 22758 - DNA, 80 bp, synthetic construct
  misc_feature 1..80: note = Artificially Synthesized Probe
  source 1..80: mol_type = other DNA
catccaggccatccccaactccactagaagtggtcccttctcccctgaatttggtgcccttttatcagtactcttctcac

SEQ ID NO: 22759 - DNA, 80 bp, synthetic construct
  misc_feature 1..80: note = Artificially Synthesized Probe
  source 1..80: mol_type = other DNA
acatggtcctggtcctccaggagaatgggatataattgcggaggcaaatgtctagagttctgagcatctgagcagaatga

SEQ ID NO: 22760 - DNA, 80 bp, synthetic construct
  misc_feature 1..80: note = Artificially Synthesized Probe
  source 1..80: mol_type = other DNA
gcggttgccgtggaaacgggggattcctgcccacccgctccagggaggcggcgaggctcgggctgacaggcgcgccaggt

SEQ ID NO: 22761 - DNA, 80 bp, synthetic construct
  misc_feature 1..80: note = Artificially Synthesized Probe
  source 1..80: mol_type = other DNA
gaggccgcttcccagacgcatcttcattccccgcgcgcggccgagccaggagcccggcgagcaggggcgacccccagagc

SEQ ID NO: 22762 - DNA, 80 bp, synthetic construct
  misc_feature 1..80: note = Artificially Synthesized Probe
  source 1..80: mol_type = other DNA
taaaacgatggcaaataattaacattttaaaacaacatggtgccgtctaaatgaaccacacctgtggcccgagttcaggc

SEQ ID NO: 22763 - DNA, 80 bp, synthetic construct
  misc_feature 1..80: note = Artificially Synthesized Probe
  source 1..80: mol_type = other DNA
cctgagctccacactccatctgcctcggcctggctcctaatgttctccatagaagcagcctgcttcaaaggcccccccaa

SEQ ID NO: 22764 - DNA, 80 bp, synthetic construct
  misc_feature 1..80: note = Artificially Synthesized Probe
  source 1..80: mol_type = other DNA
tggcactaacgctgcctgagagtgaaagcttcacaggacagtggcttctgagtagcatctggaaatagggaagggtttcc

SEQ ID NO: 22765 - DNA, 80 bp, synthetic construct
  misc_feature 1..80: note = Artificially Synthesized Probe
  source 1..80: mol_type = other DNA
aggggagcagtgtcagaactctgcagctgaggtgccacttttctggaagggataacatggaaacacctattgcgattttt

SEQ ID NO: 22766 - DNA, 80 bp, synthetic construct
  misc_feature 1..80: note = Artificially Synthesized Probe
  source 1..80: mol_type = other DNA
tcttgtggtcccggcttcttgggaggctgaggcaggaggattgcttgggtcaggatattgaggctgcaatgaactgtgtt

SEQ ID NO: 22767 - DNA, 80 bp, synthetic construct
  misc_feature 1..80: note = Artificially Synthesized Probe
  source 1..80: mol_type = other DNA
gttctcggcaccagagactgcaatgagcaagttttgttacaaaaccgacaaaatctctctctcgtgagagttcacaattc

SEQ ID NO: 22768 - DNA, 80 bp, synthetic construct
  misc_feature 1..80: note = Artificially Synthesized Probe
  source 1..80: mol_type = other DNA
taatccccgctactagggaggctgaggcagaagaatcacttgaaccccgggaggcggaagctgcagtgagccgagatcac

SEQ ID NO: 22769 - DNA, 80 bp, synthetic construct
  misc_feature 1..80: note = Artificially Synthesized Probe
  source 1..80: mol_type = other DNA
tcttcacgcacctaccagcaacctcgaatcccaagccctaagccttctgaagagaccaagaaagggaagaagaggctgca

SEQ ID NO: 22770 - DNA, 80 bp, synthetic construct
  misc_feature 1..80: note = Artificially Synthesized Probe
  source 1..80: mol_type = other DNA
ttatccctgagcctgagtcctcccagcgttaaccctgagcctgagttcctcccagcgttatccctgagcctgagttcctc

SEQ ID NO: 22771 - DNA, 80 bp, synthetic construct
  misc_feature 1..80: note = Artificially Synthesized Probe
  source 1..80: mol_type = other DNA
atccctgagcctgagttcctccccagcgttatccctgagcctgagttcctcccagcgttatccctgagcctgagtcctcc

SEQ ID NO: 22772 - DNA, 80 bp, synthetic construct
  misc_feature 1..80: note = Artificially Synthesized Probe
  source 1..80: mol_type = other DNA
gtgcaggctctggcatcatagaaacccaagtttcaataacacgctgccccactggctgcatggtcttggacaaacaataa

SEQ ID NO: 22773 - DNA, 80 bp, synthetic construct
  misc_feature 1..80: note = Artificially Synthesized Probe
  source 1..80: mol_type = other DNA
cccctgtttcgattttacattgacaaagcattctgccaaacaccatctcacagaaacctcacaacagctgtgaggtttga

SEQ ID NO: 22774 - DNA, 80 bp, synthetic construct
  misc_feature 1..80: note = Artificially Synthesized Probe
  source 1..80: mol_type = other DNA
tttgcagtggtaatgctgttggctccccagccctctaaacctggcgagaaaagtcttgtgggccctggtggccaagggct

SEQ ID NO: 22775 - DNA, 80 bp, synthetic construct
  misc_feature 1..80: note = Artificially Synthesized Probe
  source 1..80: mol_type = other DNA
tacttgtccaaacattaatccggacatatttgtgaggcatttgggatgaggttgatatgtgtattggtggactgagtaaa

SEQ ID NO: 22776 - DNA, 80 bp, synthetic construct
  misc_feature 1..80: note = Artificially Synthesized Probe
  source 1..80: mol_type = other DNA
agaaggcacctgccagcaccaaaggaatcggaaaatcgacggacacggaaaccagtcatggtggtcacgcgacaaggaca

SEQ ID NO: 22777 - DNA, 80 bp, synthetic construct
  misc_feature 1..80: note = Artificially Synthesized Probe
  source 1..80: mol_type = other DNA
cccacagaggaccggcttggattcttctcccccaccagctccaggcaaacaacccccagaacctctgttttgctcgttca

SEQ ID NO: 22778 - DNA, 80 bp, synthetic construct
  misc_feature 1..80: note = Artificially Synthesized Probe
  source 1..80: mol_type = other DNA
ctcattcccctctccgtcgtactcgtccgtcccgtagctgaagtctgagacaaggaacaagaaaggccactgagaatcct

SEQ ID NO: 22779 - DNA, 80 bp, synthetic construct
  misc_feature 1..80: note = Artificially Synthesized Probe
  source 1..80: mol_type = other DNA
gcttatttctatcaccccagtgtgggcttccttcaaaggaggagggaaggaaaggcgaccgggaagttgagccgcattaa

SEQ ID NO: 22780 - DNA, 80 bp, synthetic construct
  misc_feature 1..80: note = Artificially Synthesized Probe
  source 1..80: mol_type = other DNA
tgtgtatgaagaaccacaggacccagggatgccccatcactgagatgagtgtacaccacacacccgggcaggacccaggg

SEQ ID NO: 22781 - DNA, 80 bp, synthetic construct
  misc_feature 1..80: note = Artificially Synthesized Probe
  source 1..80: mol_type = other DNA
ttttcccaatttacatacaattgccgaagatcacaggatcagaacccaggtctcaaatgccctccctttccctctgaatc

SEQ ID NO: 22782 - DNA, 80 bp, synthetic construct
  misc_feature 1..80: note = Artificially Synthesized Probe
  source 1..80: mol_type = other DNA
tccttctcaggctccttggtgaaatcttctttctctacccatcccttaaaaattgctgttcccatggaggggaacgtcac

SEQ ID NO: 22783 - DNA, 80 bp, synthetic construct
  misc_feature 1..80: note = Artificially Synthesized Probe
  source 1..80: mol_type = other DNA
aacaacaaaaaaaccaagatggaatgatgatgttcagagggatggaaagatggacagctgtgtgataaagcaagcgcata

SEQ ID NO: 22784 - DNA, 80 bp, synthetic construct
  misc_feature 1..80: note = Artificially Synthesized Probe
  source 1..80: mol_type = other DNA
gaataaatgaagggtctcaagatgagatcattgtcgattaaccggtgggtcctaaatccaatgctgtgtccctatggaaa

SEQ ID NO: 22785 - DNA, 80 bp, synthetic construct
  misc_feature 1..80: note = Artificially Synthesized Probe
  source 1..80: mol_type = other DNA
ctgacacgcacacagctcccccctttgcacaccaaatgcagtgcctgacacgcacacagctccccctttgcacaccaaat

SEQ ID NO: 22786 - DNA, 80 bp, synthetic construct
  misc_feature 1..80: note = Artificially Synthesized Probe
  source 1..80: mol_type = other DNA
atgcaccaccatgcctggctaattgttgtatttttagtaaagacggggtttcaccgtgttagccgggatggtctccaact

SEQ ID NO: 22787 - DNA, 80 bp, synthetic construct
  misc_feature 1..80: note = Artificially Synthesized Probe
  source 1..80: mol_type = other DNA
ccttccgattctggaaattttgaaaaaattaatgtacggtctctgcgctctagggcactggcagacacccgacacccgtc

SEQ ID NO: 22788 - DNA, 80 bp, synthetic construct
  misc_feature 1..80: note = Artificially Synthesized Probe
  source 1..80: mol_type = other DNA
tcatgggaaatacaagtccctatatattgggttttctgctgcttacaatgaacacatttccaaatgatatcctcacagcc

SEQ ID NO: 22789 - DNA, 80 bp, synthetic construct
  misc_feature 1..80: note = Artificially Synthesized Probe
  source 1..80: mol_type = other DNA
tgtcgcaagggtgatacagaggctgactgttaagtgataaacttattttctgcccaagaattgaggatgggaatgagaga

SEQ ID NO: 22790 - DNA, 80 bp, synthetic construct
  misc_feature 1..80: note = Artificially Synthesized Probe
  source 1..80: mol_type = other DNA
tcttccaatagaaggctgttttgtctacattgaaaatctgatctgttttgtttttgttttgtttggttttgttgttgttg

SEQ ID NO: 22791 - DNA, 80 bp, synthetic construct
  misc_feature 1..80: note = Artificially Synthesized Probe
  source 1..80: mol_type = other DNA
ttgatttaaagtgacagacgcacacctcgaggccactgtagggttactcactggactaacttggatatttttgtgtctca

SEQ ID NO: 22792 - DNA, 80 bp, synthetic construct
  misc_feature 1..80: note = Artificially Synthesized Probe
  source 1..80: mol_type = other DNA
ctcaactacttttgcaccagcctaaatacaaagctcaagaacaggcgaaacaaatggatggtgatagaagtccatggcag

SEQ ID NO: 22793 - DNA, 80 bp, synthetic construct
  misc_feature 1..80: note = Artificially Synthesized Probe
  source 1..80: mol_type = other DNA
gaaaggagtaacagtaaaggaatttctctttcttttttccttcaaccttgctctaaaaggcgggtgtgtggagcccattt

SEQ ID NO: 22794 - DNA, 80 bp, synthetic construct
  misc_feature 1..80: note = Artificially Synthesized Probe
  source 1..80: mol_type = other DNA
gctcttaaaatgttatcatatgtaggactcatacaaataccaaacacgaagtgtgtgggctgccctgaggggttcatatg

SEQ ID NO: 22795 - DNA, 80 bp, synthetic construct
  misc_feature 1..80: note = Artificially Synthesized Probe
  source 1..80: mol_type = other DNA
actgtctcaaagaaacaagatgaggataacgataccatgtcacagggtggttgtgaaaatgacattaaataacatgatgt

SEQ ID NO: 22796 - DNA, 80 bp, synthetic construct
  misc_feature 1..80: note = Artificially Synthesized Probe
  source 1..80: mol_type = other DNA
caagctttgtcagctaactctgctgttcatcagtcagcctccattcagcacaggctggtggactagttacgacttaaatt

SEQ ID NO: 22797 - DNA, 80 bp, synthetic construct
  misc_feature 1..80: note = Artificially Synthesized Probe
  source 1..80: mol_type = other DNA
caattcagccagcacagggaaggctgcccggaagaggcagggcttgtcctcagtcttggggactgtgggattcgctgggg

SEQ ID NO: 22798 - DNA, 80 bp, synthetic construct
  misc_feature 1..80: note = Artificially Synthesized Probe
  source 1..80: mol_type = other DNA
gagaagcgcatgtggcttcaccagtctccagctcttggggatggatgggacatgctgagtattatctgcgcagtgtttta

SEQ ID NO: 22799 - DNA, 80 bp, synthetic construct
  misc_feature 1..80: note = Artificially Synthesized Probe
  source 1..80: mol_type = other DNA
gagtgacaagagataccagataaaaagagcatttcacaaacaataacgcgttcagtcaatcaggcaaaaaaaaaaaaagg

SEQ ID NO: 22800 - DNA, 80 bp, synthetic construct
  misc_feature 1..80: note = Artificially Synthesized Probe
  source 1..80: mol_type = other DNA
tcctcggagcccccctcccatctatggctttgtaagtccttagggtatttatgaaaaattaaatgacaatctagtgctga

SEQ ID NO: 22801 - DNA, 80 bp, synthetic construct
  misc_feature 1..80: note = Artificially Synthesized Probe
  source 1..80: mol_type = other DNA
ggaatgataggattgttgtggggattccatgagatgacgtctgtaaacagctcagcacagtgcggggcacatgaagatga

SEQ ID NO: 22802 - DNA, 80 bp, synthetic construct
  misc_feature 1..80: note = Artificially Synthesized Probe
  source 1..80: mol_type = other DNA
gccaggtgctcagtcctggctaacaaactgtaagtggacatgacaagtatcatttcacggctgaacagtgaaaaattaca

SEQ ID NO: 22803 - DNA, 80 bp, synthetic construct
  misc_feature 1..80: note = Artificially Synthesized Probe
  source 1..80: mol_type = other DNA
aaaggttgtcggggaaatacccgcattcctaagagcattattgacacttgccaaaaaacagaaacacctcaagtgtctat

SEQ ID NO: 22804 - DNA, 80 bp, synthetic construct
  misc_feature 1..80: note = Artificially Synthesized Probe
  source 1..80: mol_type = other DNA
gcaccagagtgtgaacgtgcctcgggccactgatgcgtacactggatggaaaattttaggcatgtgtattttgccatgat

SEQ ID NO: 22805 - DNA, 80 bp, synthetic construct
  misc_feature 1..80: note = Artificially Synthesized Probe
  source 1..80: mol_type = other DNA
cgtggtataacgttagtggctgttattgtcgtcactgacgttgtcactgctgttgtccctgttgttatgatttctcccca

SEQ ID NO: 22806 - DNA, 80 bp, synthetic construct
  misc_feature 1..80: note = Artificially Synthesized Probe
  source 1..80: mol_type = other DNA
actcctgggggtgaggaggtcacgtatgcaacttgctgtcatctttctaaaaggtaagaatggaggcaggagaacatttg

SEQ ID NO: 22807 - DNA, 80 bp, synthetic construct
  misc_feature 1..80: note = Artificially Synthesized Probe
  source 1..80: mol_type = other DNA
gcggagagattgtcatggtttttccagcaggggatggagaagtgtgtttcttcacaggacatcctgagaatgcctgattc

SEQ ID NO: 22808 - DNA, 80 bp, synthetic construct
  misc_feature 1..80: note = Artificially Synthesized Probe
  source 1..80: mol_type = other DNA
gggaggctgaagcagaagaatcacttgagtccaggaggtggaagttacagtgagccgagatcgcgccactgcactccagc

SEQ ID NO: 22809 - DNA, 80 bp, synthetic construct
  misc_feature 1..80: note = Artificially Synthesized Probe
  source 1..80: mol_type = other DNA
tggggacccaggcacacctgcgggagggctgggggtccaggcacacctgcgggagggctgggggtccaggcacacctacg

SEQ ID NO: 22810 - DNA, 80 bp, synthetic construct
  misc_feature 1..80: note = Artificially Synthesized Probe
  source 1..80: mol_type = other DNA
ttcatggaacgagcacacagaaaggatgggggtcacctcgtcctgcctgcccgcccaccccccacacactgcggacacag

SEQ ID NO: 22811 - DNA, 80 bp, synthetic construct
  misc_feature 1..80: note = Artificially Synthesized Probe
  source 1..80: mol_type = other DNA
aacacttctttgcttcaaaggaccccatcaagaaagtgaaaagacaatgtgcagaggggaagaaaacatatctagactat

SEQ ID NO: 22812 - DNA, 80 bp, synthetic construct
  misc_feature 1..80: note = Artificially Synthesized Probe
  source 1..80: mol_type = other DNA
aatcctcttaacaattacttggtgaatagtgagttccactactatccccatttcatagaggagtaaactgaggcacaggg

SEQ ID NO: 22813 - DNA, 80 bp, synthetic construct
  misc_feature 1..80: note = Artificially Synthesized Probe
  source 1..80: mol_type = other DNA
gatgaaggaaaggaaccggcaggcacaccgctctcacgccaatgcgtgcggacagcctggtgggatcagcaggaccatga

SEQ ID NO: 22814 - DNA, 80 bp, synthetic construct
  misc_feature 1..80: note = Artificially Synthesized Probe
  source 1..80: mol_type = other DNA
agtctttagtaaaccaaacccagacattgtatgtgctgttttgcatattgctacatttcacatataacacagaaaatggc

SEQ ID NO: 22815 - DNA, 80 bp, synthetic construct
  misc_feature 1..80: note = Artificially Synthesized Probe
  source 1..80: mol_type = other DNA
acaggagaagtaagaatgcggtactcacacacgggagaagtaggaatgcggtactcacacacgggagaggtaagaatgcg

SEQ ID NO: 22816 - DNA, 80 bp, synthetic construct
  misc_feature 1..80: note = Artificially Synthesized Probe
  source 1..80: mol_type = other DNA
cctcttatgggccaggcactcacacattatttaagcaaagttcatgaaatgtcagctctgcaactgtacagtcagtagga

SEQ ID NO: 22817 - DNA, 80 bp, synthetic construct
  misc_feature 1..80: note = Artificially Synthesized Probe
  source 1..80: mol_type = other DNA
gctaattttttaaaattttttttgtagagacagggtcttgatatgttgcccggactggtcttgaactcttagtctcgagc

SEQ ID NO: 22818 - DNA, 80 bp, synthetic construct
  misc_feature 1..80: note = Artificially Synthesized Probe
  source 1..80: mol_type = other DNA
cagaactgaggatgtgaaaagactcagttcgtggtgaggacccagtgagtgtttatcaacagcaacaattatcccttact

SEQ ID NO: 22819 - DNA, 80 bp, synthetic construct
  misc_feature 1..80: note = Artificially Synthesized Probe
  source 1..80: mol_type = other DNA
aaaatctcaatgtttctgtgacaattccatagaaacttttcttcagcttggcctctaggagccagggggtggcacaaaag

SEQ ID NO: 22820 - DNA, 80 bp, synthetic construct
  misc_feature 1..80: note = Artificially Synthesized Probe
  source 1..80: mol_type = other DNA
ctgaatccagacgcagggaccccagataaactgcaagacgcccagtgaacatggatgtcggagcatctaggtgggaccct

SEQ ID NO: 22821 - DNA, 80 bp, synthetic construct
  misc_feature 1..80: note = Artificially Synthesized Probe
  source 1..80: mol_type = other DNA
ttatttttatttgctgaaaaactcagcagtgctttcagtgtggttggtaagattgttcccattctaaaggtgagaaaaac

SEQ ID NO: 22822 - DNA, 80 bp, synthetic construct
  misc_feature 1..80: note = Artificially Synthesized Probe
  source 1..80: mol_type = other DNA
aggtggagtttcacttcggtcattctcagctctatttttactcaaaggtggtaggaacaccacacgttcaaagcaggaca

SEQ ID NO: 22823 - DNA, 80 bp, synthetic construct
  misc_feature 1..80: note = Artificially Synthesized Probe
  source 1..80: mol_type = other DNA
aaaacaacaaacaagcaaacaaaggaaatgcagaatctgagctccggacctgccaaatcaaaatgtgcatgtccatcatg

SEQ ID NO: 22824 - DNA, 80 bp, synthetic construct
  misc_feature 1..80: note = Artificially Synthesized Probe
  source 1..80: mol_type = other DNA
agtcttggggaagcatgaaacaggataaaaatggctaagaactcagcaggttgccggaggctaaatgagatactgttagc

SEQ ID NO: 22825 - DNA, 80 bp, synthetic construct
  misc_feature 1..80: note = Artificially Synthesized Probe
  source 1..80: mol_type = other DNA
ttccatcctttcttcccagggagcaggagaccgaatcagctcctgcctttggtttctgaagattctacacccaaagatgg

SEQ ID NO: 22826 - DNA, 80 bp, synthetic construct
  misc_feature 1..80: note = Artificially Synthesized Probe
  source 1..80: mol_type = other DNA
atggctgagggctctctttattttccttttgaaatgtggaggtggattttaaaaggctggagagcagggccagcacgctt

SEQ ID NO: 22827 - DNA, 80 bp, synthetic construct
  misc_feature 1..80: note = Artificially Synthesized Probe
  source 1..80: mol_type = other DNA
gcagggccaaccgagcgcacagtccctggcttgtagtctgcgaccttgaattaattaatttagtttgtttatgtatttat

SEQ ID NO: 22828 - DNA, 80 bp, synthetic construct
  misc_feature 1..80: note = Artificially Synthesized Probe
  source 1..80: mol_type = other DNA
gatccattaaacctttgctgctgaccaggagccgctgcccaggaggaaggggttagcccagaacactcacagaagcagcc

SEQ ID NO: 22829 - DNA, 80 bp, synthetic construct
  misc_feature 1..80: note = Artificially Synthesized Probe
  source 1..80: mol_type = other DNA
ccacggcctcagatggtcccgcctcaaagggctctttgccaaatgcccaggcaggggtgggattgggcattatcttcagc

SEQ ID NO: 22830 - DNA, 80 bp, synthetic construct
  misc_feature 1..80: note = Artificially Synthesized Probe
  source 1..80: mol_type = other DNA
caagggcctggcaggggcagtgggcgcagggttgtcttgaagccgcctgccctaggtttgcgcccaaagggctcaagctc

SEQ ID NO: 22831 - DNA, 80 bp, synthetic construct
  misc_feature 1..80: note = Artificially Synthesized Probe
  source 1..80: mol_type = other DNA
cagcatcttccagccaattccccacaaatttccttccttttcccgaagaacaacagtagccaacaatcacaaccacagaa

SEQ ID NO: 22832 - DNA, 80 bp, synthetic construct
  misc_feature 1..80: note = Artificially Synthesized Probe
  source 1..80: mol_type = other DNA
aaataaaaaaataacaaagagaagatgatacgtgtttagcagaaagggtgattaaagacctagaggcattatgaccaaga

SEQ ID NO: 22833 - DNA, 80 bp, synthetic construct
  misc_feature 1..80: note = Artificially Synthesized Probe
  source 1..80: mol_type = other DNA
cctgggctccaggcccagcccccaggtcctgcaagaggcacagggccaggttggggtcagagccattgaagccatttacc

SEQ ID NO: 22834 - DNA, 80 bp, synthetic construct
  misc_feature 1..80: note = Artificially Synthesized Probe
  source 1..80: mol_type = other DNA
ggagccacaaaaccttgctgccaggcaaatgacagctcgggtatttgttttaatttaggctcttgtcaagaggaaagttg

SEQ ID NO: 22835 - DNA, 80 bp, synthetic construct
  misc_feature 1..80: note = Artificially Synthesized Probe
  source 1..80: mol_type = other DNA
atgacctggacccaaggggatgctgaggtcagaggttgaatgttgggtaccacacagcctccagagtaaggctttggggc

SEQ ID NO: 22836 - DNA, 80 bp, synthetic construct
  misc_feature 1..80: note = Artificially Synthesized Probe
  source 1..80: mol_type = other DNA
gggattttcagctcccgcatccaaacggcccccgcggatatctgcaccccccgtctcccctcccacccgatcccacccca

SEQ ID NO: 22837 - DNA, 80 bp, synthetic construct
  misc_feature 1..80: note = Artificially Synthesized Probe
  source 1..80: mol_type = other DNA
ccagatagtgacatttcagataccggagctgtctccaccccaccccatccccaggcagcttaaggggaaaacttctggga

SEQ ID NO: 22838 - DNA, 80 bp, synthetic construct
  misc_feature 1..80: note = Artificially Synthesized Probe
  source 1..80: mol_type = other DNA
tatctacaaaggcttgaacaagctattttcagcatcctccaagctaaaatgtggcagttgctttccttcgcgttgccata

SEQ ID NO: 22839 - DNA, 80 bp, synthetic construct
  misc_feature 1..80: note = Artificially Synthesized Probe
  source 1..80: mol_type = other DNA
tggcttccagtagatgttaacaccacggccagatgctaaccttggccacagagacaagtgtgtgagcctttgagcaccac

SEQ ID NO: 22840 - DNA, 80 bp, synthetic construct
  misc_feature 1..80: note = Artificially Synthesized Probe
  source 1..80: mol_type = other DNA
accaaaaccaaaaatagactgtgatgaccaaaaaaccgagagtttgcaccctcactggcccatcaggtccttaaaagctg

SEQ ID NO: 22841 - DNA, 80 bp, synthetic construct
  misc_feature 1..80: note = Artificially Synthesized Probe
  source 1..80: mol_type = other DNA
catggtgcctccagatcagctttctgccgagcgcccagcagatcggcattcaataatgcacattgaacaaataaaattaa

SEQ ID NO: 22842 - DNA, 80 bp, synthetic construct
  misc_feature 1..80: note = Artificially Synthesized Probe
  source 1..80: mol_type = other DNA
cctggggtggcctgttttccgtgctttgctctattcccatttccttggtacagtaaagcagcatttactattcttttttt

SEQ ID NO: 22843 - DNA, 80 bp, synthetic construct
  misc_feature 1..80: note = Artificially Synthesized Probe
  source 1..80: mol_type = other DNA
agaggtgaactggaagcccttcccagttagtcatttctgcaccaaacttttgtgtcagcttgagtcatgggaagacctgc

SEQ ID NO: 22844 - DNA, 80 bp, synthetic construct
  misc_feature 1..80: note = Artificially Synthesized Probe
  source 1..80: mol_type = other DNA
aggagagagcagaagcccccaggagtgacatggggagaatgatcatcccgccggacaaaaccttcactaaaatatcctca

SEQ ID NO: 22845 - DNA, 80 bp, synthetic construct
  misc_feature 1..80: note = Artificially Synthesized Probe
  source 1..80: mol_type = other DNA
agcttgcagtgaaccaagatcgcaccactgtactccagcctgggtgacagagggagactccgtctcaaaaaaaaaaaaaa

SEQ ID NO: 22846 - DNA, 80 bp, synthetic construct
  misc_feature 1..80: note = Artificially Synthesized Probe
  source 1..80: mol_type = other DNA
gctcacgagactgacatcaaagatatgaagatcaattagaggaaagagtttcccagtgtctaacagcaactgaaggcttg

SEQ ID NO: 22847 - DNA, 80 bp, synthetic construct
  misc_feature 1..80: note = Artificially Synthesized Probe
  source 1..80: mol_type = other DNA
taggatgggatttggggtgggagaattgctgttccaattaattctctaactgctcacaaaaaaccctaactgaaaattcc

SEQ ID NO: 22848 - DNA, 80 bp, synthetic construct
  misc_feature 1..80: note = Artificially Synthesized Probe
  source 1..80: mol_type = other DNA
cctttccatgttcccgtcaccaaaacaaagaaataaacaaaacaaccaatgtcaaatcaagatccggttctcgggcctcg

SEQ ID NO: 22849 - DNA, 80 bp, synthetic construct
  misc_feature 1..80: note = Artificially Synthesized Probe
  source 1..80: mol_type = other DNA
gcagtagctgataaaggaagggggaaactttcctgtttcccgcccttcagttcctatattccaggaagtttaatgggttt

SEQ ID NO: 22850 - DNA, 80 bp, synthetic construct
  misc_feature 1..80: note = Artificially Synthesized Probe
  source 1..80: mol_type = other DNA
cttgaacccaggaggcggaggctgtagtgagccgagattgcgccattgcactccagcctgagcaaaaagagcgaaactct

SEQ ID NO: 22851 - DNA, 80 bp, synthetic construct
  misc_feature 1..80: note = Artificially Synthesized Probe
  source 1..80: mol_type = other DNA
aggaagagctcggtttccagcacgccagggagtactggcaactgacgctaattcaagcacatcagtgcagccctttttgt

SEQ ID NO: 22852 - DNA, 80 bp, synthetic construct
  misc_feature 1..80: note = Artificially Synthesized Probe
  source 1..80: mol_type = other DNA
ctctatcgcccagactggagtgtagtggtgcaatcatagctcactacagtctcgacctcccaggctcaagccatccccct

SEQ ID NO: 22853 - DNA, 80 bp, synthetic construct
  misc_feature 1..80: note = Artificially Synthesized Probe
  source 1..80: mol_type = other DNA
tctctctcccaaaggcagcccccagccctgcctgacccaggctcagcaagtagcgtaaggagcattttaaagaaaattat

SEQ ID NO: 22854 - DNA, 80 bp, synthetic construct
  misc_feature 1..80: note = Artificially Synthesized Probe
  source 1..80: mol_type = other DNA
aactttctgaaaaatcctgtcagtgctctgaacaaggctcgagtccctgggagaagacggcaccacaggaagctacagga

SEQ ID NO: 22855 - DNA, 80 bp, synthetic construct
  misc_feature 1..80: note = Artificially Synthesized Probe
  source 1..80: mol_type = other DNA
tgagttattttcccagttgctgtttctgtctgattgtgaaagattctttcctcccaaaagccacatgcctgtcacatgag

SEQ ID NO: 22856 - DNA, 80 bp, synthetic construct
  misc_feature 1..80: note = Artificially Synthesized Probe
  source 1..80: mol_type = other DNA
cgtcggtacacgtggcacgttgcccaaggccgagctgctgctgatttttagtgtgactttcaggaccaaaaaggaagagg

SEQ ID NO: 22857 - DNA, 80 bp, synthetic construct
  misc_feature 1..80: note = Artificially Synthesized Probe
  source 1..80: mol_type = other DNA
gggctcatctgtacccatgtcatagaccaccaagaggccacacggaaggtacaaaacatacaggctgttggggtttttgt

SEQ ID NO: 22858 - DNA, 80 bp, synthetic construct
  misc_feature 1..80: note = Artificially Synthesized Probe
  source 1..80: mol_type = other DNA
agcatttgcaatgtattaggtattaaaaataacctagagataagttaaagtacacgggggtcgggggcaggcatggtgac

SEQ ID NO: 22859 - DNA, 80 bp, synthetic construct
  misc_feature 1..80: note = Artificially Synthesized Probe
  source 1..80: mol_type = other DNA
agggacaccagagataaagcctcatctataacatccccagtaaaaagctgagaattgctcctgacaaggtcctggggctc

SEQ ID NO: 22860 - DNA, 80 bp, synthetic construct
  misc_feature 1..80: note = Artificially Synthesized Probe
  source 1..80: mol_type = other DNA
accgcgcccatcctgcttactagtgtttcttaaaaagtcaaagcaacgctattcttcataagtgtgttcctcccatactt

SEQ ID NO: 22861 - DNA, 80 bp, synthetic construct
  misc_feature 1..80: note = Artificially Synthesized Probe
  source 1..80: mol_type = other DNA
acatcttcacatatgagctggcagcaaatgttgcatgaaatgaagaccctgttaggaaagggaaggtgatccatagccat

SEQ ID NO: 22862 - DNA, 80 bp, synthetic construct
  misc_feature 1..80: note = Artificially Synthesized Probe
  source 1..80: mol_type = other DNA
tgcctagtcctccaggcgcggttaatccagtcgggaacccctgagtcaccgcccgccgccgctgcgaggagcccggcgag

SEQ ID NO: 22863 - DNA, 80 bp, synthetic construct
  misc_feature 1..80: note = Artificially Synthesized Probe
  source 1..80: mol_type = other DNA
tataccattgagcctactatgtacctgggctgtatgttagtatttaggtttgtgtgaaatatacagccaggtgatttttg

SEQ ID NO: 22864 - DNA, 80 bp, synthetic construct
  misc_feature 1..80: note = Artificially Synthesized Probe
  source 1..80: mol_type = other DNA
ggtcggggggagaggtgacaggaaatgacaggcttcatttccaagatttcagtagcgtttgaatcttttctattgaaaat

SEQ ID NO: 22865 - DNA, 80 bp, synthetic construct
  misc_feature 1..80: note = Artificially Synthesized Probe
  source 1..80: mol_type = other DNA
cagggtttatcccaggaatacaagcctagctcaatattagacaatctgcatgattcactacattaatttattattattaa

SEQ ID NO: 22866 - DNA, 80 bp, synthetic construct
  misc_feature 1..80: note = Artificially Synthesized Probe
  source 1..80: mol_type = other DNA
gtgtctcaaaaaaaaaaatgtgaacagattctctcaaaaagaagtaaggtgagaatataaattggatcaacttttctgaa

SEQ ID NO: 22867 - DNA, 80 bp, synthetic construct
  misc_feature 1..80: note = Artificially Synthesized Probe
  source 1..80: mol_type = other DNA
ttataaaagagaagttgctcgacccccagatgagtccctgggtggaaaggaaatggtggatactagaacttgttcttcct

SEQ ID NO: 22868 - DNA, 80 bp, synthetic construct
  misc_feature 1..80: note = Artificially Synthesized Probe
  source 1..80: mol_type = other DNA
tgtacatacatgtatgtagtgaacacctgtttgctagcctagtaccacagttacactgaaggctcctgaagcagaatttt

SEQ ID NO: 22869 - DNA, 80 bp, synthetic construct
  misc_feature 1..80: note = Artificially Synthesized Probe
  source 1..80: mol_type = other DNA
caaagtccagcaggtatccccagttatttacaaattcagcaaatttacgaatcacaacaaagctgccatcttaactccac

SEQ ID NO: 22870 - DNA, 80 bp, synthetic construct
  misc_feature 1..80: note = Artificially Synthesized Probe
  source 1..80: mol_type = other DNA
acctgtagggccagatggacggaaagggccctatattttaaaggtgccagacatttaccacctcatatcaagcacttggc

SEQ ID NO: 22871 - DNA, 80 bp, synthetic construct
  misc_feature 1..80: note = Artificially Synthesized Probe
  source 1..80: mol_type = other DNA
ctttactgccataaggtggtatctgccttcagcaatgctagcaaggtgggaacaatatgtaaattactgtaacaaggccg

SEQ ID NO: 22872 - DNA, 80 bp, synthetic construct
  misc_feature 1..80: note = Artificially Synthesized Probe
  source 1..80: mol_type = other DNA
tggggagaagctgtatctgggatgggaatttggacttaagaaatttttcacccttttaccaaacagctaaaggagtgtga

SEQ ID NO: 22873 - DNA, 80 bp, synthetic construct
  misc_feature 1..80: note = Artificially Synthesized Probe
  source 1..80: mol_type = other DNA
actgtcttaaccccacagtgatttcacttcttcaaagatgacagactctatggttccaaagcgacaaaactgtgaaaaca

SEQ ID NO: 22874 - DNA, 80 bp, synthetic construct
  misc_feature 1..80: note = Artificially Synthesized Probe
  source 1..80: mol_type = other DNA
gagtaaccaccaccccagggatgacttaggcaaaatatttaaattattccttaacaagtttaaattaccctaacaatgct

SEQ ID NO: 22875 - DNA, 80 bp, synthetic construct
  misc_feature 1..80: note = Artificially Synthesized Probe
  source 1..80: mol_type = other DNA
actgcaacctccctgcctgattctcctgcctcagcctgccgagtgcctgcgattgcaggcgcgcgctgccatgcctgact

SEQ ID NO: 22876 - DNA, 80 bp, synthetic construct
  misc_feature 1..80: note = Artificially Synthesized Probe
  source 1..80: mol_type = other DNA
cctcccattcacattgcccatcttcccatctttcaagaaaatccagaaatccagattgctaggtaaaacctggttttaaa

SEQ ID NO: 22877 - DNA, 80 bp, synthetic construct
  misc_feature 1..80: note = Artificially Synthesized Probe
  source 1..80: mol_type = other DNA
cgctgttccagctcttggattattcaaattacaggattttcagtttcaattaaggttatgaccaggcaacaagatgagca

SEQ ID NO: 22878 - DNA, 80 bp, synthetic construct
  misc_feature 1..80: note = Artificially Synthesized Probe
  source 1..80: mol_type = other DNA
ctagtccagtcaccttattttaaagtgaaaagctatagtctggagaggttaacagttagtggtgagctggagtagagaat

SEQ ID NO: 22879 - DNA, 80 bp, synthetic construct
  misc_feature 1..80: note = Artificially Synthesized Probe
  source 1..80: mol_type = other DNA
catgggtgacaaggaggatccttctcactatgttagtgatttaataaccttgcacctgcagcaatgaaccatcctgtaag

SEQ ID NO: 22880 - DNA, 80 bp, synthetic construct
  misc_feature 1..80: note = Artificially Synthesized Probe
  source 1..80: mol_type = other DNA
ccgtctaaaaaaaaaaaaaatttaaagtaatcatttttctcagcagttgaaaaacgcgacgtgaggtccaggcagcctcc

SEQ ID NO: 22881 - DNA, 80 bp, synthetic construct
  misc_feature 1..80: note = Artificially Synthesized Probe
  source 1..80: mol_type = other DNA
tttgtttactgactcaataaattaatagatggcataataataagacaattgtgccgtgtggggcccgctctaagaaccgc

SEQ ID NO: 22882 - DNA, 80 bp, synthetic construct
  misc_feature 1..80: note = Artificially Synthesized Probe
  source 1..80: mol_type = other DNA
atataagcagtagcctggtttagccaactgaaaattcctggacttataacagcaacaataaagacaccatcgaggaagag

SEQ ID NO: 22883 - DNA, 80 bp, synthetic construct
  misc_feature 1..80: note = Artificially Synthesized Probe
  source 1..80: mol_type = other DNA
cccagctactcggggggctgaggctggagaattgcttgaactcaggaggcggaggttgcagtgagccgagatcttgccat

SEQ ID NO: 22884 - DNA, 80 bp, synthetic construct
  misc_feature 1..80: note = Artificially Synthesized Probe
  source 1..80: mol_type = other DNA
tgaattaaagcatacgaagtgctcagaacaggagctggcaaaagtaagcccttagggttagcgacgtttattattcccat

SEQ ID NO: 22885 - DNA, 80 bp, synthetic construct
  misc_feature 1..80: note = Artificially Synthesized Probe
  source 1..80: mol_type = other DNA
gagtgcagtggcacaatcatagctcactgaagcctcgacctcctgggttcaagtgatcctcccacttcagcctcctgagt

SEQ ID NO: 22886 - DNA, 80 bp, synthetic construct
  misc_feature 1..80: note = Artificially Synthesized Probe
  source 1..80: mol_type = other DNA
aaagaaaaatgacctgtagtagtggttaattaacacttatgggtgcttcctacgtgccaggacccgtccaaaacgcttta

SEQ ID NO: 22887 - DNA, 80 bp, synthetic construct
  misc_feature 1..80: note = Artificially Synthesized Probe
  source 1..80: mol_type = other DNA
gtatgtgtgtgcatgcatttatgtggcactgtgcacatgtacatatgcaggtgtgtgtgcatgtatgtacatgtgaaggt

SEQ ID NO: 22888 - DNA, 80 bp, synthetic construct
  misc_feature 1..80: note = Artificially Synthesized Probe
  source 1..80: mol_type = other DNA
accaagggcatttggaacttggcactagggtgaaatcttcaggctcttcccttaagttaaagagacatataaaaatgtta

SEQ ID NO: 22889 - DNA, 80 bp, synthetic construct
  misc_feature 1..80: note = Artificially Synthesized Probe
  source 1..80: mol_type = other DNA
aacacacagagcagcctggagaagaggagactaagttcagaaaatggagtggaaggttcggccttccgcggttaggaaag

SEQ ID NO: 22890 - DNA, 80 bp, synthetic construct
  misc_feature 1..80: note = Artificially Synthesized Probe
  source 1..80: mol_type = other DNA
gcgcggcctgcgggagcgaggctttgagctgctcctccgccagcacctgttgcagccgctccaggttgagtctgcggcgc

SEQ ID NO: 22891 - DNA, 80 bp, synthetic construct
  misc_feature 1..80: note = Artificially Synthesized Probe
  source 1..80: mol_type = other DNA
agaaatctacacaagacagaactttattgatgtagggcttcctggcaggagtgtgtgggccccagggcagggtctgtagc

SEQ ID NO: 22892 - DNA, 80 bp, synthetic construct
  misc_feature 1..80: note = Artificially Synthesized Probe
  source 1..80: mol_type = other DNA
cgatgtcactaggctgttttgaggatttaagagagagagtgtagggttgggggccaacacagacacattagtaatgagaa

SEQ ID NO: 22893 - DNA, 80 bp, synthetic construct
  misc_feature 1..80: note = Artificially Synthesized Probe
  source 1..80: mol_type = other DNA
gtgggtgagtcagggtatttttcagaacattgactattttgtgtgatcatgatgtctgttgatgactatggatggatatg

SEQ ID NO: 22894 - DNA, 80 bp, synthetic construct
  misc_feature 1..80: note = Artificially Synthesized Probe
  source 1..80: mol_type = other DNA
gggtggatcattttattgcatctcccttctggggcacccctcaagtgaatatatcatttacatcccgtgacagataaaga

SEQ ID NO: 22895 - DNA, 80 bp, synthetic construct
  misc_feature 1..80: note = Artificially Synthesized Probe
  source 1..80: mol_type = other DNA
caatgtctggagacgtttttagttgtcataacttgggagaaggctgctactggcacccagtgggtagaagccggggatgc

SEQ ID NO: 22896 - DNA, 80 bp, synthetic construct
  misc_feature 1..80: note = Artificially Synthesized Probe
  source 1..80: mol_type = other DNA
ggtggtctgcgctcttgcaaaggaccacgcggtggcggaggcccggcccgcagctgggggtgcactgcagttggaagggg

SEQ ID NO: 22897 - DNA, 80 bp, synthetic construct
  misc_feature 1..80: note = Artificially Synthesized Probe
  source 1..80: mol_type = other DNA
cccccataactcctatagaaccatcactgcagcactcggcccactgtcactccgactctgcactaatctgctccccaccc

SEQ ID NO: 22898 - DNA, 80 bp, synthetic construct
  misc_feature 1..80: note = Artificially Synthesized Probe
  source 1..80: mol_type = other DNA
cttggcatgtccccaacacctgcctgcctcccctgtccccggcccatgaggataacagctaactattactgcgctaaaca

SEQ ID NO: 22899 - DNA, 80 bp, synthetic construct
  misc_feature 1..80: note = Artificially Synthesized Probe
  source 1..80: mol_type = other DNA
ggcaccactgcactctagcctgtgtgacagagcgagaccccatctcaaaaaaaaaaaaaaaaaaaagaattttgtagagt

SEQ ID NO: 22900 - DNA, 80 bp, synthetic construct
  misc_feature 1..80: note = Artificially Synthesized Probe
  source 1..80: mol_type = other DNA
cctggctgagcccgcaggacttttggggactcctgacactccacggggcccctggggtctgaggagttagtgatctcagc

SEQ ID NO: 22901 - DNA, 80 bp, synthetic construct
  misc_feature 1..80: note = Artificially Synthesized Probe
  source 1..80: mol_type = other DNA
agaaaaggggtgctcagagaaagatgggctggaggagggaggctagaggcagggaggccagggaggaggctgtggtggtc

SEQ ID NO: 22902 - DNA, 80 bp, synthetic construct
  misc_feature 1..80: note = Artificially Synthesized Probe
  source 1..80: mol_type = other DNA
agtccaaagctctcactgccctctaaaacaccccctccccagtaaacttctcactgctcactgatggttgcaggtcagct

SEQ ID NO: 22903 - DNA, 80 bp, synthetic construct
  misc_feature 1..80: note = Artificially Synthesized Probe
  source 1..80: mol_type = other DNA
ccacggtgcccggcctctgatagctgtttttaatgcttcctccccccacccctcaaggggtttgggggaactcacatccg

SEQ ID NO: 22904 - DNA, 80 bp, synthetic construct
  misc_feature 1..80: note = Artificially Synthesized Probe
  source 1..80: mol_type = other DNA
gcccgcccggcttgggaggacccagatgtccggctcactgccggtcccagagcagagagcccggtgctcccttcctggct

SEQ ID NO: 22905 - DNA, 80 bp, synthetic construct
  misc_feature 1..80: note = Artificially Synthesized Probe
  source 1..80: mol_type = other DNA
agaagtaggtggtccttctgtaattatcaagtgtaatccccgctttgaacccaattcttgtaagctttccagatgtggga

SEQ ID NO: 22906 - DNA, 80 bp, synthetic construct
  misc_feature 1..80: note = Artificially Synthesized Probe
  source 1..80: mol_type = other DNA
taaatgtcagacaccatgatcattgttaggatacctgggtcacagcagatgttgaggagtagcttcagaattctttagga

SEQ ID NO: 22907 - DNA, 80 bp, synthetic construct
  misc_feature 1..80: note = Artificially Synthesized Probe
  source 1..80: mol_type = other DNA
cactgtctgattgcttaggacattttgcacactccatgcacctctgtcctcccaggtcaccatgggggctcacctcaccc

SEQ ID NO: 22908 - DNA, 80 bp, synthetic construct
  misc_feature 1..80: note = Artificially Synthesized Probe
  source 1..80: mol_type = other DNA
gtgggagaataagtgaatgagggcatcggtgcccaaatggtcccaaacctcccttacccattattctcaagcagcccctc

SEQ ID NO: 22909 - DNA, 80 bp, synthetic construct
  misc_feature 1..80: note = Artificially Synthesized Probe
  source 1..80: mol_type = other DNA
ccacttcccaggttcaaatgattctactgcttcagcctcccaagtagctgagactataggcgcacatcactatgcccact

SEQ ID NO: 22910 - DNA, 80 bp, synthetic construct
  misc_feature 1..80: note = Artificially Synthesized Probe
  source 1..80: mol_type = other DNA
cagtggtcagaggaaaggaggaagcagccccagggatgagctggcacagaagacagaggccaggctgtgcagggatcttg

SEQ ID NO: 22911 - DNA, 80 bp, synthetic construct
  misc_feature 1..80: note = Artificially Synthesized Probe
  source 1..80: mol_type = other DNA
tatttatttatgaatgaatgaatgacagggattataacccactgcgtctcaaactcctgggctcaagtgatcctcctgcc

SEQ ID NO: 22912 - DNA, 80 bp, synthetic construct
  misc_feature 1..80: note = Artificially Synthesized Probe
  source 1..80: mol_type = other DNA
gcccaagcaggttccctctgccccagggcacctctgcatctagtcactgtgcttatgctctttctcctcctcgttcattg

SEQ ID NO: 22913 - DNA, 80 bp, synthetic construct
  misc_feature 1..80: note = Artificially Synthesized Probe
  source 1..80: mol_type = other DNA
ttctcttgttgtccagctacctgtgtgatggtctgtctgcccaatgggctgccaaacacctcatcgtttttcttattctt

SEQ ID NO: 22914 - DNA, 80 bp, synthetic construct
  misc_feature 1..80: note = Artificially Synthesized Probe
  source 1..80: mol_type = other DNA
tttctgtctgtactgctgactgtggctgtatgtctaccacagcatcctactcatagagtatctgattatatacttaattc

SEQ ID NO: 22915 - DNA, 80 bp, synthetic construct
  misc_feature 1..80: note = Artificially Synthesized Probe
  source 1..80: mol_type = other DNA
gataagattattccatagctccactggttcgccgtctgaggatatgtctctgctgtcccctggatagaactccctatttt

SEQ ID NO: 22916 - DNA, 80 bp, synthetic construct
  misc_feature 1..80: note = Artificially Synthesized Probe
  source 1..80: mol_type = other DNA
ctcagcctcccaaggatctgggactataggagcacaccaatatgtttggctaatttttaaaatttttaatttatttttca

SEQ ID NO: 22917 - DNA, 80 bp, synthetic construct
  misc_feature 1..80: note = Artificially Synthesized Probe
  source 1..80: mol_type = other DNA
gtgagggtcagaggcctggggtgggccctggtcttattggacccctgtgtcctggctgttaggctgctggagcaagtgat

SEQ ID NO: 22918 - DNA, 80 bp, synthetic construct
  misc_feature 1..80: note = Artificially Synthesized Probe
  source 1..80: mol_type = other DNA
acgctgggagtatctcctatgtgccagctactggccctagttttcacaccactgcatttctgttcttttgttaagagaca

SEQ ID NO: 22919 - DNA, 80 bp, synthetic construct
  misc_feature 1..80: note = Artificially Synthesized Probe
  source 1..80: mol_type = other DNA
gttcagattgtgacatgttctctagaaggtatcaatggggagactgggaagcagaggttcaaagcataagaaatcaatgg

SEQ ID NO: 22920 - DNA, 80 bp, synthetic construct
  misc_feature 1..80: note = Artificially Synthesized Probe
  source 1..80: mol_type = other DNA
ggggagctcactcacagatattctgtgacccctgttgcactctttagctgggctaatgtccattccttctgttgttgttc

SEQ ID NO: 22921 - DNA, 80 bp, synthetic construct
  misc_feature 1..80: note = Artificially Synthesized Probe
  source 1..80: mol_type = other DNA
gcctggtgccccatcctcctccttcaggggctctctctggtcttgtctagagtgtctttgggtctgtcctggtcccccta

SEQ ID NO: 22922 - DNA, 80 bp, synthetic construct
  misc_feature 1..80: note = Artificially Synthesized Probe
  source 1..80: mol_type = other DNA
acaaaagacgcaggacgcctccaccgcagacacacacgccgacaggctcagtgcacactcacacacccggagacaaacac

SEQ ID NO: 22923 - DNA, 80 bp, synthetic construct
  misc_feature 1..80: note = Artificially Synthesized Probe
  source 1..80: mol_type = other DNA
gcggagaaaatccccttcttttttttctctctctttttttctttttgagacggaatctcactctttcacccagactggag

SEQ ID NO: 22924 - DNA, 80 bp, synthetic construct
  misc_feature 1..80: note = Artificially Synthesized Probe
  source 1..80: mol_type = other DNA
gcatcccagttgccccagcaggagaatgagatgaataagacttgcctgcccgagggtcccggggagagaaacttaaacaa

SEQ ID NO: 22925 - DNA, 80 bp, synthetic construct
  misc_feature 1..80: note = Artificially Synthesized Probe
  source 1..80: mol_type = other DNA
ccgtacaacggagccatcagacgggacacctcatacatcccagaccccattctcaggagccccagggacagggcccgctc

SEQ ID NO: 22926 - DNA, 80 bp, synthetic construct
  misc_feature 1..80: note = Artificially Synthesized Probe
  source 1..80: mol_type = other DNA
caggtgccgggcctgcaaggaaactcttcaagttggatggaggctgctgaggagggaggggcagagcccgagttggcctc

SEQ ID NO: 22927 - DNA, 80 bp, synthetic construct
  misc_feature 1..80: note = Artificially Synthesized Probe
  source 1..80: mol_type = other DNA
cttagcacgcacaccgccgctgggtgtcttgcctgaagcaggcattactaatcattcaccaagctccttcttgctaagcc

SEQ ID NO: 22928 - DNA, 80 bp, synthetic construct
  misc_feature 1..80: note = Artificially Synthesized Probe
  source 1..80: mol_type = other DNA
tgagccctctaccatctgggggtccctctcacccaggacaacagcccaacatccaatagcctggaggggggcaccgacgc

SEQ ID NO: 22929 - DNA, 80 bp, synthetic construct
  misc_feature 1..80: note = Artificially Synthesized Probe
  source 1..80: mol_type = other DNA
gcctggcacacaacccatgtggttgtttcaattctgtgtactgagcccctgtgctatgtgctgctgatgtagaagtgaat

SEQ ID NO: 22930 - DNA, 80 bp, synthetic construct
  misc_feature 1..80: note = Artificially Synthesized Probe
  source 1..80: mol_type = other DNA
gatgagtctcttgtctgcacgctgggttcctctttatggagtcaggaccacgatcttcctgatttacgcagtgtgcatgg

SEQ ID NO: 22931 - DNA, 80 bp, synthetic construct
  misc_feature 1..80: note = Artificially Synthesized Probe
  source 1..80: mol_type = other DNA
cccatggaaagcaagtagctcaggcaacagtgtaaatgcttcatccttctcctgctcacccgcaagggccagggctgggg

SEQ ID NO: 22932 - DNA, 80 bp, synthetic construct
  misc_feature 1..80: note = Artificially Synthesized Probe
  source 1..80: mol_type = other DNA
cctccgttggcttgcaagaatgggcaaccctttgttgaggacctgctgggtaccagtggacacttggcttgggggtcaca

SEQ ID NO: 22933 - DNA, 80 bp, synthetic construct
  misc_feature 1..80: note = Artificially Synthesized Probe
  source 1..80: mol_type = other DNA
tttctacttttggagggatgtcacttgtaatgcttggcattagattgaacacacttttggttctgaagaaatgtttgagg

SEQ ID NO: 22934 - DNA, 80 bp, synthetic construct
  misc_feature 1..80: note = Artificially Synthesized Probe
  source 1..80: mol_type = other DNA
ggctgtgggatgggctggggtattaaatgctcaagaatcttgtgagctgcttgctaatttgaaaattaaagtataacagt

SEQ ID NO: 22935 - DNA, 80 bp, synthetic construct
  misc_feature 1..80: note = Artificially Synthesized Probe
  source 1..80: mol_type = other DNA
ttgtcctttctcacccacgtctttgagtgtagctagccttgaaagtcaacgtgttgttgtcacaagacaggattttaaaa

SEQ ID NO: 22936 - DNA, 80 bp, synthetic construct
  misc_feature 1..80: note = Artificially Synthesized Probe
  source 1..80: mol_type = other DNA
actgagaggaagtcggtgcagaggtaggattccgactcaggtctggggtctcatgctgatgttcttgccattagtcagac

SEQ ID NO: 22937 - DNA, 80 bp, synthetic construct
  misc_feature 1..80: note = Artificially Synthesized Probe
  source 1..80: mol_type = other DNA
gggtttttcaagcagacatgtcctgcttgttgcgtctgtctgataataaattaattgccccggctcctctgttcatattg

SEQ ID NO: 22938 - DNA, 80 bp, synthetic construct
  misc_feature 1..80: note = Artificially Synthesized Probe
  source 1..80: mol_type = other DNA
cagactctccatgatgggagtttcctgtctcgggagcatttgagccggggttctggagggcagggctggtggtggttccc

SEQ ID NO: 22939 - DNA, 80 bp, synthetic construct
  misc_feature 1..80: note = Artificially Synthesized Probe
  source 1..80: mol_type = other DNA
aggctctggtggcttggtgcctcagcaccgaaaatatgtaaaggacttgtcatgtcactgaagtcaggtgacatcaagaa

SEQ ID NO: 22940 - DNA, 80 bp, synthetic construct
  misc_feature 1..80: note = Artificially Synthesized Probe
  source 1..80: mol_type = other DNA
tagaattgcattggtttctttctcagggagccttacaggaggaagtttagtgggctgaactgcagctggtgtaggggcta

SEQ ID NO: 22941 - DNA, 80 bp, synthetic construct
  misc_feature 1..80: note = Artificially Synthesized Probe
  source 1..80: mol_type = other DNA
aaaccaaggtctccagaccacagaccccagagctgcagggatggggaacacacagtccccaagtggtggctgggaatgat

SEQ ID NO: 22942 - DNA, 80 bp, synthetic construct
  misc_feature 1..80: note = Artificially Synthesized Probe
  source 1..80: mol_type = other DNA
gatgtgatcagcttgtcacccagtagctgagtggcctttagaggtggtactttagaggcttagtgttgaggccagagact

SEQ ID NO: 22943 - DNA, 80 bp, synthetic construct
  misc_feature 1..80: note = Artificially Synthesized Probe
  source 1..80: mol_type = other DNA
ctacaggctttccagaaattccatctgacatctttccctaccacagatatctctattcctataggatctgccaggtcata

SEQ ID NO: 22944 - DNA, 80 bp, synthetic construct
  misc_feature 1..80: note = Artificially Synthesized Probe
  source 1..80: mol_type = other DNA
acatacggttgtccaccccaggggaatgaaatagtttctggtccaccttcttgacagggatagaaaagaacatattttcc

SEQ ID NO: 22945 - DNA, 80 bp, synthetic construct
  misc_feature 1..80: note = Artificially Synthesized Probe
  source 1..80: mol_type = other DNA
cctttacttccacaaacctctgcaagtttttaacccctacccctgccccagccaactctcaaacacttgagctattgcac

SEQ ID NO: 22946 - DNA, 80 bp, synthetic construct
  misc_feature 1..80: note = Artificially Synthesized Probe
  source 1..80: mol_type = other DNA
aacggcaaaagcccctccatcaccttcgagtacacgctgctgcagccgccacacgagagccgcccccagcccatctacta

SEQ ID NO: 22947 - DNA, 80 bp, synthetic construct
  misc_feature 1..80: note = Artificially Synthesized Probe
  source 1..80: mol_type = other DNA
tccactacagaagtcgattgaattcccatcagcaagagatgatccaggcaggtctcatgcctccgttttgcccgaattac

SEQ ID NO: 22948 - DNA, 80 bp, synthetic construct
  misc_feature 1..80: note = Artificially Synthesized Probe
  source 1..80: mol_type = other DNA
agccagggacagagctcagcattttatatgcatggaaacatgtcatcgtcacaaccgcccttagtggtggggttgctatt

SEQ ID NO: 22949 - DNA, 80 bp, synthetic construct
  misc_feature 1..80: note = Artificially Synthesized Probe
  source 1..80: mol_type = other DNA
tccctggtgagccaggagccccaggggatgcctgccgcttttctcaaactgttttctgaggccaccgaggtgcctggggc

SEQ ID NO: 22950 - DNA, 80 bp, synthetic construct
  misc_feature 1..80: note = Artificially Synthesized Probe
  source 1..80: mol_type = other DNA
tgctcagagaaggcaaaatcaaaggggcagcccagaaaggaaaggctattttcatctttccagaaaagcttcaaacaatc

SEQ ID NO: 22951 - DNA, 80 bp, synthetic construct
  misc_feature 1..80: note = Artificially Synthesized Probe
  source 1..80: mol_type = other DNA
gcatgggttggatcttttcatctctttttgttcttggggagaatttaaagctgttgaaagtaggtggggaactggtcagc

SEQ ID NO: 22952 - DNA, 80 bp, synthetic construct
  misc_feature 1..80: note = Artificially Synthesized Probe
  source 1..80: mol_type = other DNA
caaaacagaagagcaatgctcacccgcttgcctaacacattgtaaactccccattcaatccaaacccatgtctgtatcac

SEQ ID NO: 22953 - DNA, 80 bp, synthetic construct
  misc_feature 1..80: note = Artificially Synthesized Probe
  source 1..80: mol_type = other DNA
acaatgccaatcaatcctaaaatgtgcccctctgcgggcgcctcatccgttccacttcagacagtgggaactctgaccgt

SEQ ID NO: 22954 - DNA, 80 bp, synthetic construct
  misc_feature 1..80: note = Artificially Synthesized Probe
  source 1..80: mol_type = other DNA
cttcatgtttggatgtagaggatacccagctggccctcaaaaggtttgatgctcctggtcccgccccagtgccacccatt

SEQ ID NO: 22955 - DNA, 80 bp, synthetic construct
  misc_feature 1..80: note = Artificially Synthesized Probe
  source 1..80: mol_type = other DNA
tggtgggcaccggcttggccaggcttgcaccgcctggttgaccacaccatgggccctgggcaaattgccaaagccttccg

SEQ ID NO: 22956 - DNA, 80 bp, synthetic construct
  misc_feature 1..80: note = Artificially Synthesized Probe
  source 1..80: mol_type = other DNA
gggagagagagagagagagggagagagagagagaagggagagagagagagagagagaaagggggagagagacagagagag

SEQ ID NO: 22957 - DNA, 80 bp, synthetic construct
  misc_feature 1..80: note = Artificially Synthesized Probe
  source 1..80: mol_type = other DNA
tggctcagggggtttgaaaagcaccgttttcgagatgggtgtcatgaagagggtgcccagaaaaaacgtcctggcatttg

SEQ ID NO: 22958 - DNA, 80 bp, synthetic construct
  misc_feature 1..80: note = Artificially Synthesized Probe
  source 1..80: mol_type = other DNA
tcccccagtgggattacagagtacggggcaccaacaaagacaggcacacagtgatgattaaagaaagttcaggcctggcg

SEQ ID NO: 22959 - DNA, 80 bp, synthetic construct
  misc_feature 1..80: note = Artificially Synthesized Probe
  source 1..80: mol_type = other DNA
tgtgactgatccccaagccagaaagctgagctgagaggtcaggtgacttgccccaagtcctgaggcctgtctgctgggct

SEQ ID NO: 22960 - DNA, 80 bp, synthetic construct
  misc_feature 1..80: note = Artificially Synthesized Probe
  source 1..80: mol_type = other DNA
ttccaagtctatctgcctggaagacttccgggtctcactcataacccctcccagctcaagctaaggggaaggagaggtct

SEQ ID NO: 22961 - DNA, 80 bp, synthetic construct
  misc_feature 1..80: note = Artificially Synthesized Probe
  source 1..80: mol_type = other DNA
gtctctgttcctctgttggtctgtctctgtctccccgtctctgtttgtctccgagtctctctgtctgtctccccatctct

SEQ ID NO: 22962 - DNA, 80 bp, synthetic construct
  misc_feature 1..80: note = Artificially Synthesized Probe
  source 1..80: mol_type = other DNA
atacaaaaggcttaaaaggtaggaaaacaccttacaagtccccaaatctcaattttgcatggctcagtggtacgtgcaga

SEQ ID NO: 22963 - DNA, 80 bp, synthetic construct
  misc_feature 1..80: note = Artificially Synthesized Probe
  source 1..80: mol_type = other DNA
cctctgggagccacagccaaggcagccgcttggaatttagggagacagtaatagacatgcacccccatgtcaggacaccg

SEQ ID NO: 22964 - DNA, 80 bp, synthetic construct
  misc_feature 1..80: note = Artificially Synthesized Probe
  source 1..80: mol_type = other DNA
agtttcctgatgggccaactctgaatacccaggcgacaaaatgggggtgtcagacggaactcagagcctggaacgttcat

SEQ ID NO: 22965 - DNA, 80 bp, synthetic construct
  misc_feature 1..80: note = Artificially Synthesized Probe
  source 1..80: mol_type = other DNA
gaaacacggacccactaggtgcaggtaccttgctgggtgatgagccatggcacggggggagccatgaagcgatgaagcgg

SEQ ID NO: 22966 - DNA, 80 bp, synthetic construct
  misc_feature 1..80: note = Artificially Synthesized Probe
  source 1..80: mol_type = other DNA
ggttccccgccccctgcccaggcccctgccccatcaggaggctttccccatgccttctgtctctcccacaccagtgcacc

SEQ ID NO: 22967 - DNA, 80 bp, synthetic construct
  misc_feature 1..80: note = Artificially Synthesized Probe
  source 1..80: mol_type = other DNA
ctgggtgtgacatctgtagctcctttaggcatcactcctcttgggacacagatcaaatcacctggcatgatctgggacag

SEQ ID NO: 22968 - DNA, 80 bp, synthetic construct
  misc_feature 1..80: note = Artificially Synthesized Probe
  source 1..80: mol_type = other DNA
cgggcagaggcgcttgcccacgggacgtttggggatggacctcggcccccgcccctgcagtcagcgtcagtgctcatcta

SEQ ID NO: 22969 - DNA, 80 bp, synthetic construct
  misc_feature 1..80: note = Artificially Synthesized Probe
  source 1..80: mol_type = other DNA
taagaattaagggacagactatgggctggaggactttgaggatgtctgtctcataacacttgggttgtatctgttctatg

SEQ ID NO: 22970 - DNA, 80 bp, synthetic construct
  misc_feature 1..80: note = Artificially Synthesized Probe
  source 1..80: mol_type = other DNA
ttgctgttagtatacaaactctggttcaaagctcctctttattgcttgtcttggaaaatttgctgttcttcatggtttct

SEQ ID NO: 22971 - DNA, 80 bp, synthetic construct
  misc_feature 1..80: note = Artificially Synthesized Probe
  source 1..80: mol_type = other DNA
gccttatctgacccctccaaagatgtcatgagttcctcttttcattctactaatcacagcatccatcacaccatgttgtg

SEQ ID NO: 22972 - DNA, 80 bp, synthetic construct
  misc_feature 1..80: note = Artificially Synthesized Probe
  source 1..80: mol_type = other DNA
atatttgagtaaagtcccccttgaggaagagtagaagaactgcactttgtaaatactatcctggaatccaaacggataga

SEQ ID NO: 22973 - DNA, 80 bp, synthetic construct
  misc_feature 1..80: note = Artificially Synthesized Probe
  source 1..80: mol_type = other DNA
tcatcttgagttgctaagtgaatgatgcacctgacccactttataaagacacatgtgcaaataaaattattataggactt

SEQ ID NO: 22974 - DNA, 80 bp, synthetic construct
  misc_feature 1..80: note = Artificially Synthesized Probe
  source 1..80: mol_type = other DNA
tgaaaagagtataaaagaatttcagcatgattttccatattgtgcttccaccactgccaataacaaaataactagcaacc

SEQ ID NO: 22975 - DNA, 80 bp, synthetic construct
  misc_feature 1..80: note = Artificially Synthesized Probe
  source 1..80: mol_type = other DNA
tttattttgctttccagcttccatattggattcttaccaatgtactgcagagataagtttagctgacctgtaagttttgc

SEQ ID NO: 22976 - DNA, 80 bp, synthetic construct
  misc_feature 1..80: note = Artificially Synthesized Probe
  source 1..80: mol_type = other DNA
aaactatacttgagaaaaataagcttgctgcaggtctgttccttaaggattcacacgtatttttgtttcagggctaccat

SEQ ID NO: 22977 - DNA, 80 bp, synthetic construct
  misc_feature 1..80: note = Artificially Synthesized Probe
  source 1..80: mol_type = other DNA
atactctgttatggtggggttaattaggtggctgaaagacaatgtacctggaatatcatagaagagatgctcctttaagg

SEQ ID NO: 22978 - DNA, 80 bp, synthetic construct
  misc_feature 1..80: note = Artificially Synthesized Probe
  source 1..80: mol_type = other DNA
atgtctgaaatgtggtatgtctgtgtgtgtgtgtgtatatgtatatatatgtatgtatataccataatatatacatatgt

SEQ ID NO: 22979 - DNA, 80 bp, synthetic construct
  misc_feature 1..80: note = Artificially Synthesized Probe
  source 1..80: mol_type = other DNA
gcaagcctaatttagtatttttgcaatgtactcatgtactcccagtaagaggtataatgtttctttggtgttgtgtctgc

SEQ ID NO: 22980 - DNA, 80 bp, synthetic construct
  misc_feature 1..80: note = Artificially Synthesized Probe
  source 1..80: mol_type = other DNA
gttacttcctaaaccagataaatagagagattgcccttagaacatctctgctatggcgactatccaggtgcataacccca

SEQ ID NO: 22981 - DNA, 80 bp, synthetic construct
  misc_feature 1..80: note = Artificially Synthesized Probe
  source 1..80: mol_type = other DNA
tgctataaatgggaaggagtaagtgaaagaaaacggagaaaaggaggagcagaggagagagaaaaaatgaagaactatga

SEQ ID NO: 22982 - DNA, 80 bp, synthetic construct
  misc_feature 1..80: note = Artificially Synthesized Probe
  source 1..80: mol_type = other DNA
tagaaccatgaactcttaggatcagaaggaagctaacggataagtcagtttaacacttactaaagcctagctgagataat

SEQ ID NO: 22983 - DNA, 80 bp, synthetic construct
  misc_feature 1..80: note = Artificially Synthesized Probe
  source 1..80: mol_type = other DNA
tttgtggggccagctcacagtttacagagctaccaccttgaaagatatggctggaatcaagccttaaaacatgtttcctt

SEQ ID NO: 22984 - DNA, 80 bp, synthetic construct
  misc_feature 1..80: note = Artificially Synthesized Probe
  source 1..80: mol_type = other DNA
agccactatgacagacacttgttttaaaagcacaggctgacctcaaggaattcacagtctgataggagagataagacagt

SEQ ID NO: 22985 - DNA, 80 bp, synthetic construct
  misc_feature 1..80: note = Artificially Synthesized Probe
  source 1..80: mol_type = other DNA
gaattttcagtcccatgacaggtatatatgtaagctctgcctctctctggccacttaggtgcattgccattttattatct

SEQ ID NO: 22986 - DNA, 80 bp, synthetic construct
  misc_feature 1..80: note = Artificially Synthesized Probe
  source 1..80: mol_type = other DNA
ccttctttctttgttcccttctccctccctcccctttcttcctttttctaaagctggctttgagatcctttattaaagaa

SEQ ID NO: 22987 - DNA, 80 bp, synthetic construct
  misc_feature 1..80: note = Artificially Synthesized Probe
  source 1..80: mol_type = other DNA
ctagaataaagttcagatttaggagacacatagtgacaactgattggtgacagaactaatcctataatctgggaatacgg

SEQ ID NO: 22988 - DNA, 80 bp, synthetic construct
  misc_feature 1..80: note = Artificially Synthesized Probe
  source 1..80: mol_type = other DNA
atgaatattcaagaagacatcctcagcttgctgtctcagtaattctaagagttgctaaaggataccaggagttattggag

SEQ ID NO: 22989 - DNA, 80 bp, synthetic construct
  misc_feature 1..80: note = Artificially Synthesized Probe
  source 1..80: mol_type = other DNA
gtgagaagaagcaaggcggctaaaaactcatgaatgactcagcaggacttagttaaaaaatgcttctttcaggtttctcg

SEQ ID NO: 22990 - DNA, 80 bp, synthetic construct
  misc_feature 1..80: note = Artificially Synthesized Probe
  source 1..80: mol_type = other DNA
attggttccctttcgcagggtatagggtacagcacaggataagtattatgttctgaatagtaaaatgactttcgagtcag

SEQ ID NO: 22991 - DNA, 80 bp, synthetic construct
  misc_feature 1..80: note = Artificially Synthesized Probe
  source 1..80: mol_type = other DNA
tctcattctcctaaccaggctgacattattatcggacacttatgtatcagacatgaaatgactccagtaaaccctggtgt

SEQ ID NO: 22992 - DNA, 80 bp, synthetic construct
  misc_feature 1..80: note = Artificially Synthesized Probe
  source 1..80: mol_type = other DNA
atgttgcctgttctggcaagctttttctattgctctggtctactttctattgctctggtctaagtccaacatgaaaggct

SEQ ID NO: 22993 - DNA, 80 bp, synthetic construct
  misc_feature 1..80: note = Artificially Synthesized Probe
  source 1..80: mol_type = other DNA
tgcagctcatttcatactcaaaatacttgctatggaattttctgtagtggataatgaaaggaagaccctacaaatttata

SEQ ID NO: 22994 - DNA, 80 bp, synthetic construct
  misc_feature 1..80: note = Artificially Synthesized Probe
  source 1..80: mol_type = other DNA
gattgttatagaagaaaactgttgatgtgaaagaatattgttttctccctggcttttactatcccaggttgttggcatca

SEQ ID NO: 22995 - DNA, 80 bp, synthetic construct
  misc_feature 1..80: note = Artificially Synthesized Probe
  source 1..80: mol_type = other DNA
aatagcattaagtgttggttattataggagattaaagctatccaaggatggatttacagcactagatcacttggtgaact

SEQ ID NO: 22996 - DNA, 80 bp, synthetic construct
  misc_feature 1..80: note = Artificially Synthesized Probe
  source 1..80: mol_type = other DNA
atttgggaatggggagattgcccacctgttatctttgagcagactaatctcttgtaagcagaagtgccattcggagtctc

SEQ ID NO: 22997 - DNA, 80 bp, synthetic construct
  misc_feature 1..80: note = Artificially Synthesized Probe
  source 1..80: mol_type = other DNA
ttggtaaattacttcatatgtaattttgctttgggtatgcatgtagttttgcctttgtataactgtctcttttcctttgt

SEQ ID NO: 22998 - DNA, 80 bp, synthetic construct
  misc_feature 1..80: note = Artificially Synthesized Probe
  source 1..80: mol_type = other DNA
gattacaagcataagccaccgggcatggccccaattctgagcattaatttatttattggtgagatgaaagtggtaatttc

SEQ ID NO: 22999 - DNA, 80 bp, synthetic construct
  misc_feature 1..80: note = Artificially Synthesized Probe
  source 1..80: mol_type = other DNA
agcaggttttctcatgcctgtccttatacccgtactcccatcagattcctttatatctgttaaatctcatttactgtcag

SEQ ID NO: 23000 - DNA, 80 bp, synthetic construct
  misc_feature 1..80: note = Artificially Synthesized Probe
  source 1..80: mol_type = other DNA
aaaaataaaataaaatctgtgaggatagggacagccttacaaacttagtgcagtgtactgctgattgattactagaactc

SEQ ID NO: 23001 - DNA, 80 bp, synthetic construct
  misc_feature 1..80: note = Artificially Synthesized Probe
  source 1..80: mol_type = other DNA
catcaaagccctcatatttctttccttctctcttttctacaagaaggaattcctcctcgtttttaagactgatatttcta

SEQ ID NO: 23002 - DNA, 80 bp, synthetic construct
  misc_feature 1..80: note = Artificially Synthesized Probe
  source 1..80: mol_type = other DNA
atttgcattagaggtctacagagtggctatgtatcccttggggtatgcgctgatatatctattgggctacagaaagaaaa

SEQ ID NO: 23003 - DNA, 80 bp, synthetic construct
  misc_feature 1..80: note = Artificially Synthesized Probe
  source 1..80: mol_type = other DNA
acctctcccccttttctattccacaaaaccgccgtcgtcatcatggcccgttctcaatgagctgttgggtacacctccca

SEQ ID NO: 23004 - DNA, 80 bp, synthetic construct
  misc_feature 1..80: note = Artificially Synthesized Probe
  source 1..80: mol_type = other DNA
gaggggggaagagggagagggctcttttcttttctctctacctgttttagttttttaagtctgttatatgttagcaacat

SEQ ID NO: 23005 - DNA, 80 bp, synthetic construct
  misc_feature 1..80: note = Artificially Synthesized Probe
  source 1..80: mol_type = other DNA
tcctgaaggtagagcactgatccaaatactgttttggagattttagatgagttttaacctttgctctgcaagttctctga

SEQ ID NO: 23006 - DNA, 80 bp, synthetic construct
  misc_feature 1..80: note = Artificially Synthesized Probe
  source 1..80: mol_type = other DNA
gagaagaaattcttagtttcactatagagcattctcttagtgtcttttactgaaatcttttgttcacagaaaatatccct

SEQ ID NO: 23007 - DNA, 80 bp, synthetic construct
  misc_feature 1..80: note = Artificially Synthesized Probe
  source 1..80: mol_type = other DNA
tggtagctcccaagttttacagactatcacatactttctgacaccatagagaaactagctttctctgttgcagttagaaa

SEQ ID NO: 23008 - DNA, 80 bp, synthetic construct
  misc_feature 1..80: note = Artificially Synthesized Probe
  source 1..80: mol_type = other DNA
gaagtcacctaacttgtaaatgttactgtatgaaccatggcagtgcaatttttatagtgcttccttgagatgcaaataga

SEQ ID NO: 23009 - DNA, 80 bp, synthetic construct
  misc_feature 1..80: note = Artificially Synthesized Probe
  source 1..80: mol_type = other DNA
acaaccagatcttgtgaaaactcactcactatcatgagaacaagggggaaatccacctctgtgatcaaacacctctcacc

SEQ ID NO: 23010 - DNA, 80 bp, synthetic construct
  misc_feature 1..80: note = Artificially Synthesized Probe
  source 1..80: mol_type = other DNA
accactgcacctgatctcaatattaattttctgcttttaagttggataatacatgaagaaaggaatgagaagttcactga

SEQ ID NO: 23011 - DNA, 80 bp, synthetic construct
  misc_feature 1..80: note = Artificially Synthesized Probe
  source 1..80: mol_type = other DNA
ctgatgttgtctacaatcatactggtatgagcttcattgactgccttcattaattttgatgagaatttatgcacacacac

SEQ ID NO: 23012 - DNA, 80 bp, synthetic construct
  misc_feature 1..80: note = Artificially Synthesized Probe
  source 1..80: mol_type = other DNA
attaaaatagatcagatttttccagctagtgatccttgaggaaatggttgctcccctcacctgtcagaggagctgagcct

SEQ ID NO: 23013 - DNA, 80 bp, synthetic construct
  misc_feature 1..80: note = Artificially Synthesized Probe
  source 1..80: mol_type = other DNA
tgtatttctgagacatttgggagattctgtgcaatgtaaaagaagtaaaccttgccacagccttacttgaaaagtgttgc

SEQ ID NO: 23014 - DNA, 80 bp, synthetic construct
  misc_feature 1..80: note = Artificially Synthesized Probe
  source 1..80: mol_type = other DNA
gtccttggtgattgaaccaagacctgctccattatcttacacaaatgcctctgttatggaagctgtatcacaggtgctcc

SEQ ID NO: 23015 - DNA, 80 bp, synthetic construct
  misc_feature 1..80: note = Artificially Synthesized Probe
  source 1..80: mol_type = other DNA
tgaaaaaagaaacagttttaggattttgctattttaaaaattggggacgggtggagtggctcacacctgtaatcccagca

SEQ ID NO: 23016 - DNA, 80 bp, synthetic construct
  misc_feature 1..80: note = Artificially Synthesized Probe
  source 1..80: mol_type = other DNA
catattctgaagagagacttggccaagttaattcctgactgtatgacttgggctgagttacttaactctctgtgcttcag

SEQ ID NO: 23017 - DNA, 80 bp, synthetic construct
  misc_feature 1..80: note = Artificially Synthesized Probe
  source 1..80: mol_type = other DNA
atagtaaatggatccaggaacatccagaatgtgcctataatcttgtgaattctccacacttaaaacctgcctgggtctta

SEQ ID NO: 23018 - DNA, 80 bp, synthetic construct
  misc_feature 1..80: note = Artificially Synthesized Probe
  source 1..80: mol_type = other DNA
aacaagttttgaaattgagagatgtgatagtctcctgttgtctatagtaagaaccttaactgacgtagaggggctcccag

SEQ ID NO: 23019 - DNA, 80 bp, synthetic construct
  misc_feature 1..80: note = Artificially Synthesized Probe
  source 1..80: mol_type = other DNA
cttatgtttacttgcttatgtgagtcaatctgaaggatacattgttaaacatggaattattgagtcaaagggtatacaga

SEQ ID NO: 23020 - DNA, 80 bp, synthetic construct
  misc_feature 1..80: note = Artificially Synthesized Probe
  source 1..80: mol_type = other DNA
caatgtagtcaaacttttcaatctctgatggcttccaatttcatatcatgcttagaaaagaccttccatcaacattctct

SEQ ID NO: 23021 - DNA, 80 bp, synthetic construct
  misc_feature 1..80: note = Artificially Synthesized Probe
  source 1..80: mol_type = other DNA
ttgaaagcaatcttgaaaaagaactcctgaggttagaatatttggtagcaccggggaggaaaacgggttccactaaagtc

SEQ ID NO: 23022 - DNA, 80 bp, synthetic construct
  misc_feature 1..80: note = Artificially Synthesized Probe
  source 1..80: mol_type = other DNA
tatatctgcatttctccatctgctctagcaaggggccagcagcaattgaagaatgctgtaattggtttcataaaagaatg

SEQ ID NO: 23023 - DNA, 80 bp, synthetic construct
  misc_feature 1..80: note = Artificially Synthesized Probe
  source 1..80: mol_type = other DNA
cataaagcataggttgggcaactagagtgcagtaaaagcctttgcatatctttacttagagtcttttttaaaaatatctt

SEQ ID NO: 23024 - DNA, 80 bp, synthetic construct
  misc_feature 1..80: note = Artificially Synthesized Probe
  source 1..80: mol_type = other DNA
ttggccagaggtattaagaatttcagtggcaattaaaccagaacctaatggttttaggtcccccctcactcttagtgtct

SEQ ID NO: 23025 - DNA, 80 bp, synthetic construct
  misc_feature 1..80: note = Artificially Synthesized Probe
  source 1..80: mol_type = other DNA
gaagtttacctaaggagagaacttatttgctggggagacagtgttaaattacgctatgggaataaaccagaggactgtcc

SEQ ID NO: 23026 - DNA, 80 bp, synthetic construct
  misc_feature 1..80: note = Artificially Synthesized Probe
  source 1..80: mol_type = other DNA
agaaaccctacagtggcactgcttataagatttttgataccttactagtgaccagtgtcacttaggtgttctttggaaat

SEQ ID NO: 23027 - DNA, 80 bp, synthetic construct
  misc_feature 1..80: note = Artificially Synthesized Probe
  source 1..80: mol_type = other DNA
aaaatctaatcttcctttttaaccgttttcttctcttgataaattctcttgtttctatgtgttttggtatgtttgatatc

SEQ ID NO: 23028 - DNA, 80 bp, synthetic construct
  misc_feature 1..80: note = Artificially Synthesized Probe
  source 1..80: mol_type = other DNA
tataatagtcatgaagagggcagattagtttaccgatatggaggagaacctgttggatcctttgttcagccctgtttgag

SEQ ID NO: 23029 - DNA, 80 bp, synthetic construct
  misc_feature 1..80: note = Artificially Synthesized Probe
  source 1..80: mol_type = other DNA
agtggaatcctgaagcattgccttcaaacacaggtgaagttaatttccaaagcggcattattgcagccaggtgtgctatc

SEQ ID NO: 23030 - DNA, 80 bp, synthetic construct
  misc_feature 1..80: note = Artificially Synthesized Probe
  source 1..80: mol_type = other DNA
actatgcgaattgtctggatctttcaaggtctaaagttgcacctcctttgttcagtgattcttctgaacatgtagcaatt

SEQ ID NO: 23031 - DNA, 80 bp, synthetic construct
  misc_feature 1..80: note = Artificially Synthesized Probe
  source 1..80: mol_type = other DNA
tggcatttgaagtaaatgtgctgtagctgatgcagcagtgtgaatgaatctaaaaaatacattgttgaccactaaaaagc

SEQ ID NO: 23032 - DNA, 80 bp, synthetic construct
  misc_feature 1..80: note = Artificially Synthesized Probe
  source 1..80: mol_type = other DNA
gctggagttgccacaaaagggcccaatgaatatattcaagaaatagaatttgaaaacttgtctccaggaagtgttattat

SEQ ID NO: 23033 - DNA, 80 bp, synthetic construct
  misc_feature 1..80: note = Artificially Synthesized Probe
  source 1..80: mol_type = other DNA
tgaatccttagttattccctttctagatgtttctgcatactacagaagaatataggttttgaggtttagacctaggttta

SEQ ID NO: 23034 - DNA, 80 bp, synthetic construct
  misc_feature 1..80: note = Artificially Synthesized Probe
  source 1..80: mol_type = other DNA
gtatagaaccagactaactggatttgaattccattgcagactcttattagctataagaagtaagacctggctgagtgcag

SEQ ID NO: 23035 - DNA, 80 bp, synthetic construct
  misc_feature 1..80: note = Artificially Synthesized Probe
  source 1..80: mol_type = other DNA
ccatgatagtcttccctctgacagttatcaggaggcatcttaatctgagaaaaatcctggtttcttgaataaacaagctg

SEQ ID NO: 23036 - DNA, 80 bp, synthetic construct
  misc_feature 1..80: note = Artificially Synthesized Probe
  source 1..80: mol_type = other DNA
tccaattcttagtcttgcctccagattaactttggctgagctaaatcagatcctttaccgatgtgaatcagaagaaaagg

SEQ ID NO: 23037 - DNA, 80 bp, synthetic construct
  misc_feature 1..80: note = Artificially Synthesized Probe
  source 1..80: mol_type = other DNA
atttctttgtcctccagacaccattgcatttattttctatacctcttacttggcccttgaaatatattgccttattttga

SEQ ID NO: 23038 - DNA, 80 bp, synthetic construct
  misc_feature 1..80: note = Artificially Synthesized Probe
  source 1..80: mol_type = other DNA
ctgctcctttcatcctcagtatccaatcagtcattatgatttgtggattcttttccatgttctgttgggtacaccatatc

SEQ ID NO: 23039 - DNA, 80 bp, synthetic construct
  misc_feature 1..80: note = Artificially Synthesized Probe
  source 1..80: mol_type = other DNA
tcagtatgcctttgtaacttggctcaagccagtattgtcatacttatctccaactgtattaagcagtgttgtggactggg

SEQ ID NO: 23040 - DNA, 80 bp, synthetic construct
  misc_feature 1..80: note = Artificially Synthesized Probe
  source 1..80: mol_type = other DNA
aagcagatgtcaaggtatatccaacaaagcttgaataaatgggcatatctgtgttgaaactatatacagagtcacttcat

SEQ ID NO: 23041 - DNA, 80 bp, synthetic construct
  misc_feature 1..80: note = Artificially Synthesized Probe
  source 1..80: mol_type = other DNA
tcacctgccctaatggatgtaccttataggttaaatgagatcacaaaagaaaaggagcaatgttgtgtttctctagctgc

SEQ ID NO: 23042 - DNA, 80 bp, synthetic construct
  misc_feature 1..80: note = Artificially Synthesized Probe
  source 1..80: mol_type = other DNA
ctcatgaaactgaccttagccataggggcaaaggaaacattgatgtaaataacttggttttaaagcctactttttagaac

SEQ ID NO: 23043 - DNA, 80 bp, synthetic construct
  misc_feature 1..80: note = Artificially Synthesized Probe
  source 1..80: mol_type = other DNA
tattcatgtttcatacaaggaattaaatgggtcagagtaccaggaagtgtgtatggcacagagtgctatatatatgttag

SEQ ID NO: 23044 - DNA, 80 bp, synthetic construct
  misc_feature 1..80: note = Artificially Synthesized Probe
  source 1..80: mol_type = other DNA
tagattgcaccattaatcatactattttatcttgtatataaaacctccaattacctagaatgaaggatttaatgtgccag

SEQ ID NO: 23045 - DNA, 80 bp, synthetic construct
  misc_feature 1..80: note = Artificially Synthesized Probe
  source 1..80: mol_type = other DNA
gatttgcaggtgcctgccttgtaccccaggtttagagtaactgttctatagtaatggagttcataggtttgtgtgtatta

SEQ ID NO: 23046 - DNA, 80 bp, synthetic construct
  misc_feature 1..80: note = Artificially Synthesized Probe
  source 1..80: mol_type = other DNA
gaaatctgtgttttcacaaggtctctggatgattatcaacagtctaaggctgaagtttgaaagcactgctctaaaagata

SEQ ID NO: 23047 - DNA, 80 bp, synthetic construct
  misc_feature 1..80: note = Artificially Synthesized Probe
  source 1..80: mol_type = other DNA
catagaactgtctagattattggttagcaaactgtggcctatcacctgttttgtatggcctatgagcaaagaatagcttt

SEQ ID NO: 23048 - DNA, 80 bp, synthetic construct
  misc_feature 1..80: note = Artificially Synthesized Probe
  source 1..80: mol_type = other DNA
acatatacctctaccacagatggttctacttcctccctctatagaggtaatcatgaatcagaagtcgttttattaaaatg

SEQ ID NO: 23049 - DNA, 80 bp, synthetic construct
  misc_feature 1..80: note = Artificially Synthesized Probe
  source 1..80: mol_type = other DNA
aagccttctgagtagctgggactacaggcacgcaccaccattcctggcttatttttgtatttttagtagagacagcgttt

SEQ ID NO: 23050 - DNA, 80 bp, synthetic construct
  misc_feature 1..80: note = Artificially Synthesized Probe
  source 1..80: mol_type = other DNA
tgtaaaatggttccaaatggtctagacattctcaagtgcccagtttccagaatgtatcctacagatgattctgctccttt

SEQ ID NO: 23051 - DNA, 80 bp, synthetic construct
  misc_feature 1..80: note = Artificially Synthesized Probe
  source 1..80: mol_type = other DNA
agattatggaaagggtgagccaggttatggagagccttgactaccaatccagggagcttaaagattatcttatgaacagt

SEQ ID NO: 23052 - DNA, 80 bp, synthetic construct
  misc_feature 1..80: note = Artificially Synthesized Probe
  source 1..80: mol_type = other DNA
tactgatgttaaatatttgtatgctcgtctgtattatttggtatataggagctgcttcttccctggcctcaccccaattc

SEQ ID NO: 23053 - DNA, 80 bp, synthetic construct
  misc_feature 1..80: note = Artificially Synthesized Probe
  source 1..80: mol_type = other DNA
ttctagatccctgaggaatcgccacactgacttccacaatggttgaactagttaacagtccccccaacagtgtaaaagtg

SEQ ID NO: 23054 - DNA, 80 bp, synthetic construct
  misc_feature 1..80: note = Artificially Synthesized Probe
  source 1..80: mol_type = other DNA
aagttgaaaaaatgatacatagtatgccatgaactcttcacccagtacagcatcagagtcaggagattgacattagtatg

SEQ ID NO: 23055 - DNA, 80 bp, synthetic construct
  misc_feature 1..80: note = Artificially Synthesized Probe
  source 1..80: mol_type = other DNA
atcttccctctttgctgaaatgtcggttcacgtattttgcacattgtctctttctttattattttttagagacagggtcc

SEQ ID NO: 23056 - DNA, 80 bp, synthetic construct
  misc_feature 1..80: note = Artificially Synthesized Probe
  source 1..80: mol_type = other DNA
taccttgcaaaacaaactctatactcgtgaaacactagttcttcctcctctatccccactcttcccaggccttagtaacc

SEQ ID NO: 23057 - DNA, 80 bp, synthetic construct
  misc_feature 1..80: note = Artificially Synthesized Probe
  source 1..80: mol_type = other DNA
ttcaattcttttgggtatctacctagaagagaacttgctggatcatatgataattgtttgttgacctttttgagtaacta

SEQ ID NO: 23058 - DNA, 80 bp, synthetic construct
  misc_feature 1..80: note = Artificially Synthesized Probe
  source 1..80: mol_type = other DNA
tccatattgagttaatttttgcatatgatattaagtccaagtccattttttttttttgcatgtgaatatccagtttactc

SEQ ID NO: 23059 - DNA, 80 bp, synthetic construct
  misc_feature 1..80: note = Artificially Synthesized Probe
  source 1..80: mol_type = other DNA
tcagtctctgctgacagcatgctgtcaggagaggggagcactgtccctaacgacctgcttccactgggggtggaagtcta

SEQ ID NO: 23060 - DNA, 80 bp, synthetic construct
  misc_feature 1..80: note = Artificially Synthesized Probe
  source 1..80: mol_type = other DNA
catgtacatacattatttagctccattttgatacatgtaaatccagttcattaatttcaaatggtatagagggtttccca

SEQ ID NO: 23061 - DNA, 80 bp, synthetic construct
  misc_feature 1..80: note = Artificially Synthesized Probe
  source 1..80: mol_type = other DNA
cctgttgatataagttatcaagtaacactatctgttcttttctgtaagtgctcgtgggttgattctctacaagcacctca

SEQ ID NO: 23062 - DNA, 80 bp, synthetic construct
  misc_feature 1..80: note = Artificially Synthesized Probe
  source 1..80: mol_type = other DNA
tgtgaggatgatagacaatggcaaaaccgtgagaggaaaaaatctttacatgatatagtacacattcctatagagtaagg

SEQ ID NO: 23063 - DNA, 80 bp, synthetic construct
  misc_feature 1..80: note = Artificially Synthesized Probe
  source 1..80: mol_type = other DNA
gccaagttcatactactgcactccagcttgggtggacaataccagacgctgtcttaaaaaaaaaaaaagacattttattt

SEQ ID NO: 23064 - DNA, 80 bp, synthetic construct
  misc_feature 1..80: note = Artificially Synthesized Probe
  source 1..80: mol_type = other DNA
aaaagaaaagaaaagaaaatgatatttgtatagcacaataggttacatggagtaggctgcttgtgctagatccaactact

SEQ ID NO: 23065 - DNA, 80 bp, synthetic construct
  misc_feature 1..80: note = Artificially Synthesized Probe
  source 1..80: mol_type = other DNA
gttaaaataaaagtgtgttctgccttcagtgtagctgtggcaacttccttttggagctgagtaactttcttgaggtgaca

SEQ ID NO: 23066 - DNA, 80 bp, synthetic construct
  misc_feature 1..80: note = Artificially Synthesized Probe
  source 1..80: mol_type = other DNA
tcatttttaacacatgattaaagtcctgtgaactcagtatgtactaatttaaggttagatggatgatgtactaatgccga

SEQ ID NO: 23067 - DNA, 80 bp, synthetic construct
  misc_feature 1..80: note = Artificially Synthesized Probe
  source 1..80: mol_type = other DNA
atctcctttcttacaagcacataagggacttctgcgtgtttcatattaatagagccactcctggtctgttttgtttggtt

SEQ ID NO: 23068 - DNA, 80 bp, synthetic construct
  misc_feature 1..80: note = Artificially Synthesized Probe
  source 1..80: mol_type = other DNA
ggactttctccatcatgtcttgtagtgtttgcctcctcatgatgaattctttcaattcttataagtgtaaaacatctgtg

SEQ ID NO: 23069 - DNA, 80 bp, synthetic construct
  misc_feature 1..80: note = Artificially Synthesized Probe
  source 1..80: mol_type = other DNA
tttgctggttggtacactacagatacttgagtgggaccctctgcatatcttcagagttctctctttgtacagctccttcc

SEQ ID NO: 23070 - DNA, 80 bp, synthetic construct
  misc_feature 1..80: note = Artificially Synthesized Probe
  source 1..80: mol_type = other DNA
tcacctaccttgctctgtcccacctaatgacttcaggatgaatttttcaggaaagcaagggaaaggggacttccttatat

SEQ ID NO: 23071 - DNA, 80 bp, synthetic construct
  misc_feature 1..80: note = Artificially Synthesized Probe
  source 1..80: mol_type = other DNA
tgataaggagggctggaacaagttatttaacctctataaatctctcttacctctctatagataggaatacttatggtacc

SEQ ID NO: 23072 - DNA, 80 bp, synthetic construct
  misc_feature 1..80: note = Artificially Synthesized Probe
  source 1..80: mol_type = other DNA
cgctgtggttcattaatattaacaccacgtactatagtattcttaatacagtgctcactgcatttaataaatatttaata

SEQ ID NO: 23073 - DNA, 80 bp, synthetic construct
  misc_feature 1..80: note = Artificially Synthesized Probe
  source 1..80: mol_type = other DNA
gtcaaatacccatgcttgaaagctcgtgtaatttactttaagattatctgcctgctcttcttcaaagctgaccttgcttt

SEQ ID NO: 23074 - DNA, 80 bp, synthetic construct
  misc_feature 1..80: note = Artificially Synthesized Probe
  source 1..80: mol_type = other DNA
ggtgtcatttgactaaacgtttcggtagaatgcttcatacttgagtgatgctggataaggtattgtatttcaacaatgga

SEQ ID NO: 23075 - DNA, 80 bp, synthetic construct
  misc_feature 1..80: note = Artificially Synthesized Probe
  source 1..80: mol_type = other DNA
gtacccccaaaaccatctcctgggaccagaaatccactcatttccctccacggaggtggagaaggtggcagcttctttca

SEQ ID NO: 23076 - DNA, 80 bp, synthetic construct
  misc_feature 1..80: note = Artificially Synthesized Probe
  source 1..80: mol_type = other DNA
ctcctccactgcccaagcttgctgggaggtgggccctgagcactgggcaggtggggagaagtgtggaaggcaggcacccc

SEQ ID NO: 23077 - DNA, 80 bp, synthetic construct
  misc_feature 1..80: note = Artificially Synthesized Probe
  source 1..80: mol_type = other DNA
tagggagaagctggacaggtgaatgtccccagctgttcaagcccctgtgttagcccagacctccgtctagacgggcccgc

SEQ ID NO: 23078 - DNA, 80 bp, synthetic construct
  misc_feature 1..80: note = Artificially Synthesized Probe
  source 1..80: mol_type = other DNA
ctgggaggacatgataaccttggtcctcttctgggcactcatggtctggggaaaagatgggggcatcgtggactcaggat

SEQ ID NO: 23079 - DNA, 80 bp, synthetic construct
  misc_feature 1..80: note = Artificially Synthesized Probe
  source 1..80: mol_type = other DNA
ggacttcctttcctcagtttctcacctggccctgccagatcttcctggccctgcccagccaaggcccctcccccagtcaa

SEQ ID NO: 23080 - DNA, 80 bp, synthetic construct
  misc_feature 1..80: note = Artificially Synthesized Probe
  source 1..80: mol_type = other DNA
tggggttgaggggcccgacagccccagaccaggctcccctcagtgtggggcagtctaggagttgggggaggtttctggga

SEQ ID NO: 23081 - DNA, 80 bp, synthetic construct
  misc_feature 1..80: note = Artificially Synthesized Probe
  source 1..80: mol_type = other DNA
aatcattagccccacagcctgcagaaggcgggatggggctgctccagggaagggggtgcccgtgcctcggggccacaggt

SEQ ID NO: 23082 - DNA, 80 bp, synthetic construct
  misc_feature 1..80: note = Artificially Synthesized Probe
  source 1..80: mol_type = other DNA
tctgcaggtgctgcctctgagatgaccagtgtggtttctgaaggtttgagatgaaggcatgctgggtcccttggggcggc

SEQ ID NO: 23083 - DNA, 80 bp, synthetic construct
  misc_feature 1..80: note = Artificially Synthesized Probe
  source 1..80: mol_type = other DNA
gcccctcatgggccaagggcacccacagccacgccaccctttccgaaggaaccgagccccagcccctcgtgggccaaggg

SEQ ID NO: 23084 - DNA, 80 bp, synthetic construct
  misc_feature 1..80: note = Artificially Synthesized Probe
  source 1..80: mol_type = other DNA
gcatggtgctgtgagatcagcgtgtgtgtgtgcagtgcatggtgctgtgagtgtgagatcgtgtgtgtgtatgcagtgca

SEQ ID NO: 23085 - DNA, 80 bp, synthetic construct
  misc_feature 1..80: note = Artificially Synthesized Probe
  source 1..80: mol_type = other DNA
tgtgtgcagtgcatggtgctgagtgtgagatcagcatgtgtgtgtgcagtgcatggtgctgtgagtgtatcagcatgtct

SEQ ID NO: 23086 - DNA, 80 bp, synthetic construct
  misc_feature 1..80: note = Artificially Synthesized Probe
  source 1..80: mol_type = other DNA
agatcccaaaatagctcatgtcgcctgagctccctccctggctgggcctggggcctcaatggccctttgtctttctgaag

SEQ ID NO: 23087 - DNA, 80 bp, synthetic construct
  misc_feature 1..80: note = Artificially Synthesized Probe
  source 1..80: mol_type = other DNA
gaggccagcaggggtgggtctccaagtgcttcctttgacagctgctctggatgggacgtggcttggggtgggtgagaacc

SEQ ID NO: 23088 - DNA, 80 bp, synthetic construct
  misc_feature 1..80: note = Artificially Synthesized Probe
  source 1..80: mol_type = other DNA
acgttcccggaacggcctcttgggggcgttccagccccacggacccgcagggagtccccgccgcaatttgcatggggctc

SEQ ID NO: 23089 - DNA, 80 bp, synthetic construct
  misc_feature 1..80: note = Artificially Synthesized Probe
  source 1..80: mol_type = other DNA
gggctcccagtccctcctccgcctacctcggagcccacatttgggatttctactccgggagaattctgccctcctcccac

SEQ ID NO: 23090 - DNA, 80 bp, synthetic construct
  misc_feature 1..80: note = Artificially Synthesized Probe
  source 1..80: mol_type = other DNA
ggagcctaacttggggatttgttttcttccagataaacccgggacccacttcactccagtgcctccgacgcctcctgatg

SEQ ID NO: 23091 - DNA, 80 bp, synthetic construct
  misc_feature 1..80: note = Artificially Synthesized Probe
  source 1..80: mol_type = other DNA
ggacgacctggggaatcctgaagtgatctgaagacagagccctgggctggatagatcgtctcggccactttccaggtctt

SEQ ID NO: 23092 - DNA, 80 bp, synthetic construct
  misc_feature 1..80: note = Artificially Synthesized Probe
  source 1..80: mol_type = other DNA
gagtcacggagggctccacaccaaggccatcgtgacccacatgccacctaactgtggtcatagttacgggccagagctca

SEQ ID NO: 23093 - DNA, 80 bp, synthetic construct
  misc_feature 1..80: note = Artificially Synthesized Probe
  source 1..80: mol_type = other DNA
tcctgagctcactcttgaggggcagatgtgtttccagcctggatggggataggagggagggaccagcactgtgaccttta

SEQ ID NO: 23094 - DNA, 80 bp, synthetic construct
  misc_feature 1..80: note = Artificially Synthesized Probe
  source 1..80: mol_type = other DNA
tgctgggcaccctctaagctttgcagatactggcccatttaaccccacaatcctgggaggtaggtcctattgctcctatt

SEQ ID NO: 23095 - DNA, 80 bp, synthetic construct
  misc_feature 1..80: note = Artificially Synthesized Probe
  source 1..80: mol_type = other DNA
atagtagaggcggaggccaggaatttgcacttctccagggaagctggggaagagttggggagagggaggcaagaagattc

SEQ ID NO: 23096 - DNA, 80 bp, synthetic construct
  misc_feature 1..80: note = Artificially Synthesized Probe
  source 1..80: mol_type = other DNA
atgacagtgattgctggcggcagcaggctgagtgccggcagcagcgtgccatccccagcaagcaccagggcccgtgtggt

SEQ ID NO: 23097 - DNA, 80 bp, synthetic construct
  misc_feature 1..80: note = Artificially Synthesized Probe
  source 1..80: mol_type = other DNA
tgtgtgttccgctcgcctctgccgcgtgtctgtccctttctctgccgtgtctgctgtgcatctggcccttctcctgtgtt

SEQ ID NO: 23098 - DNA, 80 bp, synthetic construct
  misc_feature 1..80: note = Artificially Synthesized Probe
  source 1..80: mol_type = other DNA
gtcctgtgcctccctcagcctgggcctgccgacccctgcctggctctgtctcctgcagagacctgtggagatgccgtgtg

SEQ ID NO: 23099 - DNA, 80 bp, synthetic construct
  misc_feature 1..80: note = Artificially Synthesized Probe
  source 1..80: mol_type = other DNA
gtgatctttggatgctctgtgtgttgtgtgttcctggatctgcatttacagacatgttcttgcgtaagatgtgggagcct

SEQ ID NO: 23100 - DNA, 80 bp, synthetic construct
  misc_feature 1..80: note = Artificially Synthesized Probe
  source 1..80: mol_type = other DNA
agagccagggttggggaccaggctctggaggaggtggggaagcccgtccaggtgcggacatcacgttcctccccgatttt

SEQ ID NO: 23101 - DNA, 80 bp, synthetic construct
  misc_feature 1..80: note = Artificially Synthesized Probe
  source 1..80: mol_type = other DNA
cgtggccacccctgggccacctgtcgagagggcttcctgctacaactccgcgttgggctgctgctctgatgggaagacgc

SEQ ID NO: 23102 - DNA, 80 bp, synthetic construct
  misc_feature 1..80: note = Artificially Synthesized Probe
  source 1..80: mol_type = other DNA
tgccacagctggacgacctcttccggaattcagacgtcaagaaggattttcggagtgtccgcttgcgggacctggggccc

SEQ ID NO: 23103 - DNA, 80 bp, synthetic construct
  misc_feature 1..80: note = Artificially Synthesized Probe
  source 1..80: mol_type = other DNA
aggctttgagttgggggcaggagcccggattaaggcggggtttcggccagatgcggtggctcacgcctgtaatcccagca

SEQ ID NO: 23104 - DNA, 80 bp, synthetic construct
  misc_feature 1..80: note = Artificially Synthesized Probe
  source 1..80: mol_type = other DNA
gacacagacctctttgtgggcggcgtacccgaggaccaggctgccgtgtgagtcccttggagggtggtgtggccccgacc

SEQ ID NO: 23105 - DNA, 80 bp, synthetic construct
  misc_feature 1..80: note = Artificially Synthesized Probe
  source 1..80: mol_type = other DNA
ccacctccgtctctcctgtggggaggggacagcaaagacaccccgactccccatgaccccagggagaagatggcgctgga

SEQ ID NO: 23106 - DNA, 80 bp, synthetic construct
  misc_feature 1..80: note = Artificially Synthesized Probe
  source 1..80: mol_type = other DNA
atggggcctcctgcgtcccgagggaggctgcctatgtgtgcctgtgtcccgggggattctcaggaccgcactgcgagaag

SEQ ID NO: 23107 - DNA, 80 bp, synthetic construct
  misc_feature 1..80: note = Artificially Synthesized Probe
  source 1..80: mol_type = other DNA
tgtctatgtatatggagtggatgtgcaagtgtgtgtgaatatccagctgtgtgtgtgcatgggtccatgtatatgtgtgt

SEQ ID NO: 23108 - DNA, 80 bp, synthetic construct
  misc_feature 1..80: note = Artificially Synthesized Probe
  source 1..80: mol_type = other DNA
gctgtgctcccctgctgtctgcacgtgggtgtctgcacgtgggtgtctgcatgtgggtgtctgtgccctcaagtgtctcg

SEQ ID NO: 23109 - DNA, 80 bp, synthetic construct
  misc_feature 1..80: note = Artificially Synthesized Probe
  source 1..80: mol_type = other DNA
tgctgcctgagccgaggtcactgccagtgggaggaggaagggccaagaagatgcaggagaagcaatgatcagtttccacg

SEQ ID NO: 23110 - DNA, 80 bp, synthetic construct
  misc_feature 1..80: note = Artificially Synthesized Probe
  source 1..80: mol_type = other DNA
gctgtaattattttctatttttgtaaacttgttgctttttgatatgattttcttgcctgagtgttggccggagggactgc

SEQ ID NO: 23111 - DNA, 80 bp, synthetic construct
  misc_feature 1..80: note = Artificially Synthesized Probe
  source 1..80: mol_type = other DNA
tcctaggagcaggacccgatgaagcgggcggcggtggggctgggtgccgtgttactaactctagtatgtttctgtgtcaa

SEQ ID NO: 23112 - DNA, 80 bp, synthetic construct
  misc_feature 1..80: note = Artificially Synthesized Probe
  source 1..80: mol_type = other DNA
gccaaatattttggtttttattgaactcactgggctcaaggacagaaagaaaaaaatgggatgaaagggagtgggatgaa

SEQ ID NO: 23113 - DNA, 80 bp, synthetic construct
  misc_feature 1..80: note = Artificially Synthesized Probe
  source 1..80: mol_type = other DNA
agcctctgcctgttactttgactctttgagactcaattcctgcatctgaaaatggatgggttgaactagaaaaaaaaatt

SEQ ID NO: 23114 - DNA, 80 bp, synthetic construct
  misc_feature 1..80: note = Artificially Synthesized Probe
  source 1..80: mol_type = other DNA
gatctgcccgcctcggcctcccaaagtgctgggattacagatgtgagccaccacgcccagccaatactactgatctttaa

SEQ ID NO: 23115 - DNA, 80 bp, synthetic construct
  misc_feature 1..80: note = Artificially Synthesized Probe
  source 1..80: mol_type = other DNA
taacacgtaagcactgtacatgaaccatcgcaaccatacatcaactctgaagacaggtattcttattattctcactttaa

SEQ ID NO: 23116 - DNA, 80 bp, synthetic construct
  misc_feature 1..80: note = Artificially Synthesized Probe
  source 1..80: mol_type = other DNA
agggagggacggaagcaaaaaaaatagtgctgtaagtgacagtctgccacttctgggcctagacttgaagaaatctgaaa

SEQ ID NO: 23117 - DNA, 80 bp, synthetic construct
  misc_feature 1..80: note = Artificially Synthesized Probe
  source 1..80: mol_type = other DNA
cagcagaagacagaaatatgacactggattcaaagcctacttactagctctgtgctgttgaacaaattgctgaatctccc

SEQ ID NO: 23118 - DNA, 80 bp, synthetic construct
  misc_feature 1..80: note = Artificially Synthesized Probe
  source 1..80: mol_type = other DNA
ctgggtggaaacaaagatgatgggaaccagtgataaagggctacttgcctggcctaaactcagatattggcccctctcta

SEQ ID NO: 23119 - DNA, 80 bp, synthetic construct
  misc_feature 1..80: note = Artificially Synthesized Probe
  source 1..80: mol_type = other DNA
ctcaggaagtgtgtgttgaatggagaaattaacatataagtaactcctacaacacggtggtgccctttttcattgacctg

SEQ ID NO: 23120 - DNA, 80 bp, synthetic construct
  misc_feature 1..80: note = Artificially Synthesized Probe
  source 1..80: mol_type = other DNA
agaggtgatagttgggaaatgaggggatcacggaaaggcaagagagctgggaaatgaggggatcatggaaaggcaagaga

SEQ ID NO: 23121 - DNA, 80 bp, synthetic construct
  misc_feature 1..80: note = Artificially Synthesized Probe
  source 1..80: mol_type = other DNA
gttgaaagatggatgagcctccaatggaaaaaagacaacagagaaaagcatttcaggattggagaggggagagctccaag

SEQ ID NO: 23122 - DNA, 80 bp, synthetic construct
  misc_feature 1..80: note = Artificially Synthesized Probe
  source 1..80: mol_type = other DNA
ctctctccaaaagaatgttaagctcaactaaggccagaatttttgtctttttcactactaaacctcagcacctagaacaa

SEQ ID NO: 23123 - DNA, 80 bp, synthetic construct
  misc_feature 1..80: note = Artificially Synthesized Probe
  source 1..80: mol_type = other DNA
ccgtagttcatattgcctatttttcccccattggaatatggaacctgaccgaaatggtgaaagaaaccccatctctacta

SEQ ID NO: 23124 - DNA, 80 bp, synthetic construct
  misc_feature 1..80: note = Artificially Synthesized Probe
  source 1..80: mol_type = other DNA
aaggagggaggagctgtcaggatcagcactgatcatgattaatagcaggtttgcaaaacacagggaagggtcacccttta

SEQ ID NO: 23125 - DNA, 80 bp, synthetic construct
  misc_feature 1..80: note = Artificially Synthesized Probe
  source 1..80: mol_type = other DNA
gttggggatattaatagtatctacttcaaaggctggtcaataaataactgatgggagtagggtgtggccaagcaagtgct

SEQ ID NO: 23126 - DNA, 80 bp, synthetic construct
  misc_feature 1..80: note = Artificially Synthesized Probe
  source 1..80: mol_type = other DNA
ggaccccaaactcaattcataccctcaagaattccctatgctagggtgtgaaaacacctgaaatccccaggcgccatgag

SEQ ID NO: 23127 - DNA, 80 bp, synthetic construct
  misc_feature 1..80: note = Artificially Synthesized Probe
  source 1..80: mol_type = other DNA
cctcgcacagcaaatgcgtgcacagaaagtgcgtgttgttttcgtgcaccaggaactcagagttgcgcacccacgtcttg

SEQ ID NO: 23128 - DNA, 80 bp, synthetic construct
  misc_feature 1..80: note = Artificially Synthesized Probe
  source 1..80: mol_type = other DNA
acacatgagaactgaccaaccatgtctctagctttctggaggagaatgcctgagggcttgactgccccaaaaagactggg

SEQ ID NO: 23129 - DNA, 80 bp, synthetic construct
  misc_feature 1..80: note = Artificially Synthesized Probe
  source 1..80: mol_type = other DNA
tagacatctcctgcctggctctgctcacttgtcgtgaaggtcttatggcaccagaagatgttctgcatgtcatccagctt

SEQ ID NO: 23130 - DNA, 80 bp, synthetic construct
  misc_feature 1..80: note = Artificially Synthesized Probe
  source 1..80: mol_type = other DNA
cctcccaagtagcagatgtgccccaccatgccctgcaacattattttataatatggagaagcatgcttgaaattaaaatg

SEQ ID NO: 23131 - DNA, 80 bp, synthetic construct
  misc_feature 1..80: note = Artificially Synthesized Probe
  source 1..80: mol_type = other DNA
acaacaacaaaaggaatggaacatggaacaagtaggcgtgtggcaataggtcaataacataggatgtataaagatgtgtg

SEQ ID NO: 23132 - DNA, 80 bp, synthetic construct
  misc_feature 1..80: note = Artificially Synthesized Probe
  source 1..80: mol_type = other DNA
agcgagatcgtcttggtggctgagtatcgaacattgggctccatgtacatcagggatgggatgtcaattttcatggggaa

SEQ ID NO: 23133 - DNA, 80 bp, synthetic construct
  misc_feature 1..80: note = Artificially Synthesized Probe
  source 1..80: mol_type = other DNA
gttactattggtgttctcagttcagattcagggtcactattaaagtggggttaggtccaaataagagtcctgatccaagc

SEQ ID NO: 23134 - DNA, 80 bp, synthetic construct
  misc_feature 1..80: note = Artificially Synthesized Probe
  source 1..80: mol_type = other DNA
agtcaataccgtctgcaaaaccctcgcatttcagggcttgagaggctcccttttttcagaaaacatctacttgggagccc

SEQ ID NO: 23135 - DNA, 80 bp, synthetic construct
  misc_feature 1..80: note = Artificially Synthesized Probe
  source 1..80: mol_type = other DNA
aggaaacccaggctcagagaggggaagcgacttgcccaaagcccacggtcaattatgggaggagtttaggagccagggga

SEQ ID NO: 23136 - DNA, 80 bp, synthetic construct
  misc_feature 1..80: note = Artificially Synthesized Probe
  source 1..80: mol_type = other DNA
tcatccgtgtgaatcactaaacagtggagagttgcacttggtcataaatcacacgtgactgcagccacacgcaggtgagt

SEQ ID NO: 23137 - DNA, 80 bp, synthetic construct
  misc_feature 1..80: note = Artificially Synthesized Probe
  source 1..80: mol_type = other DNA
tcagaaagagaaacaaaatgcccaagattaaaggaaagaagatacaaaccacgcggatttgactccatttcaatacggct

SEQ ID NO: 23138 - DNA, 80 bp, synthetic construct
  misc_feature 1..80: note = Artificially Synthesized Probe
  source 1..80: mol_type = other DNA
cacttgtatttctagtagaaactatgccatttaaaagtgcacataaggggactggactggggtagcacatattttggaaa

SEQ ID NO: 23139 - DNA, 80 bp, synthetic construct
  misc_feature 1..80: note = Artificially Synthesized Probe
  source 1..80: mol_type = other DNA
agtcaaacatttatcttcttacaggaaagtcttccatgtgtctttatgaagctttcagttttttctcacggctctggtta

SEQ ID NO: 23140 - DNA, 80 bp, synthetic construct
  misc_feature 1..80: note = Artificially Synthesized Probe
  source 1..80: mol_type = other DNA
ttgaaacggtcgcgcactgacttgttctcgtcaccctgtggaaaccaaacacgggagtttcatcaggagccccagagacc

SEQ ID NO: 23141 - DNA, 80 bp, synthetic construct
  misc_feature 1..80: note = Artificially Synthesized Probe
  source 1..80: mol_type = other DNA
cctagctctcgccacatacaaacatcaaaccaaaatggatcaaagtctggaatccaagaccttaaacgatgaaaccacta

SEQ ID NO: 23142 - DNA, 80 bp, synthetic construct
  misc_feature 1..80: note = Artificially Synthesized Probe
  source 1..80: mol_type = other DNA
aaggaaaaggaatcagtatattgaaacggtgtccacactcccatatttaacgcaaccccatttactatagctaaggcttg

SEQ ID NO: 23143 - DNA, 80 bp, synthetic construct
  misc_feature 1..80: note = Artificially Synthesized Probe
  source 1..80: mol_type = other DNA
tatcagcatccagcccccaaagcaccatttggtccaactcatgttttctttaaagaaaatctgtcggctgggtgcggtgg

SEQ ID NO: 23144 - DNA, 80 bp, synthetic construct
  misc_feature 1..80: note = Artificially Synthesized Probe
  source 1..80: mol_type = other DNA
cctggcccagatgagcggcacacctgggtgcccgtgttcccttagccacccagtgtccctgctgtccccgtatgacagcc

SEQ ID NO: 23145 - DNA, 80 bp, synthetic construct
  misc_feature 1..80: note = Artificially Synthesized Probe
  source 1..80: mol_type = other DNA
gactcagcctccccactcctaggagcctgccctggaggcctcctccagtcccagcaacagacacaccaggaagcttctag

SEQ ID NO: 23146 - DNA, 80 bp, synthetic construct
  misc_feature 1..80: note = Artificially Synthesized Probe
  source 1..80: mol_type = other DNA
tatgacaccaggagcagaaggccccgcctcacgcctataggctcctgcctaagaagcatcatcgcaggccaggcctgggg

SEQ ID NO: 23147 - DNA, 80 bp, synthetic construct
  misc_feature 1..80: note = Artificially Synthesized Probe
  source 1..80: mol_type = other DNA
gcaggattctagtgacttttttcccctgtattttccaaattttctacagcagtcagactagtgttatgatccattaaacg

SEQ ID NO: 23148 - DNA, 80 bp, synthetic construct
  misc_feature 1..80: note = Artificially Synthesized Probe
  source 1..80: mol_type = other DNA
gagcagggccccatttggagggatctattttgggcccagacgtagcgcaaggagctgggggagtgggggtgattccgaga

SEQ ID NO: 23149 - DNA, 80 bp, synthetic construct
  misc_feature 1..80: note = Artificially Synthesized Probe
  source 1..80: mol_type = other DNA
agctgctgggtggagcgctgaaagcggcgtttgcgcggatgctgggcctgggcgtcgtcgtcctcggagccgcgggcctt

SEQ ID NO: 23150 - DNA, 80 bp, synthetic construct
  misc_feature 1..80: note = Artificially Synthesized Probe
  source 1..80: mol_type = other DNA
acgggttccgcttcaccatctgcggcatctttagtctgcaggggaagctccggcagggagaagggccccaggtccaggtc

SEQ ID NO: 23151 - DNA, 80 bp, synthetic construct
  misc_feature 1..80: note = Artificially Synthesized Probe
  source 1..80: mol_type = other DNA
ggcaggggcgccctgtcttccatcgagggtggcatgggagagtcgtagctggaggcagcaggaacgctctgctgcctgaa

SEQ ID NO: 23152 - DNA, 80 bp, synthetic construct
  misc_feature 1..80: note = Artificially Synthesized Probe
  source 1..80: mol_type = other DNA
ctctcttcttcttctcttttaggatgttgatggcactagatccataaggctttagttccttttctattttcttggaaggt

SEQ ID NO: 23153 - DNA, 80 bp, synthetic construct
  misc_feature 1..80: note = Artificially Synthesized Probe
  source 1..80: mol_type = other DNA
cgtccttcctccttctcctggaggccgtccgtcctcggcaagtcgctggcctctcccatcttgaacccgctccccatgca

SEQ ID NO: 23154 - DNA, 80 bp, synthetic construct
  misc_feature 1..80: note = Artificially Synthesized Probe
  source 1..80: mol_type = other DNA
acttttatgcttttcggtctgctctttcctcttctcagagtttttatccaaatagtccctgtccttctttcggaagaagg

SEQ ID NO: 23155 - DNA, 80 bp, synthetic construct
  misc_feature 1..80: note = Artificially Synthesized Probe
  source 1..80: mol_type = other DNA
gctcttcttctccgacagggaggctcgcttcctgtgctcctgcctcttcctcactggcttcagcgattccacactggagc

SEQ ID NO: 23156 - DNA, 80 bp, synthetic construct
  misc_feature 1..80: note = Artificially Synthesized Probe
  source 1..80: mol_type = other DNA
cctcttctgagctctctgttggaggtaggaagcgagaggtcacaggcaggctcaaaacagctctccccagaatggcagag

SEQ ID NO: 23157 - DNA, 80 bp, synthetic construct
  misc_feature 1..80: note = Artificially Synthesized Probe
  source 1..80: mol_type = other DNA
catcaccagcaacctggatttcctatgcccagaacagcaatgcactgaactcaagtacaaattaaatttaatcccaactt

SEQ ID NO: 23158 - DNA, 80 bp, synthetic construct
  misc_feature 1..80: note = Artificially Synthesized Probe
  source 1..80: mol_type = other DNA
cttgacatttttcgtaataaaaagtttaaaagtggtaattacagaactataaagctgcatcggatgccccagccccatca

SEQ ID NO: 23159 - DNA, 80 bp, synthetic construct
  misc_feature 1..80: note = Artificially Synthesized Probe
  source 1..80: mol_type = other DNA
ggggaaagctgggggcagacagagggcacagctcggccttgagggtgggcaaggcgaaaactcgctttcctgtgccccac

SEQ ID NO: 23160 - DNA, 80 bp, synthetic construct
  misc_feature 1..80: note = Artificially Synthesized Probe
  source 1..80: mol_type = other DNA
tggtttgatgggggtattttatgtaaagaaagggaatattaaactctaatcatggagctcttaagcccctgggccgtatc

SEQ ID NO: 23161 - DNA, 80 bp, synthetic construct
  misc_feature 1..80: note = Artificially Synthesized Probe
  source 1..80: mol_type = other DNA
ctgcagagcagacgcgcaccccacgaggccacagcccatccaacccgatgggaggctcacggctccaatgggggaggctc

SEQ ID NO: 23162 - DNA, 80 bp, synthetic construct
  misc_feature 1..80: note = Artificially Synthesized Probe
  source 1..80: mol_type = other DNA
gcccacctcacctctcagcagtgactgtgagaccatttaaacacctcgttaccagcccctcaagtctgctaagcctgggc

SEQ ID NO: 23163 - DNA, 80 bp, synthetic construct
  misc_feature 1..80: note = Artificially Synthesized Probe
  source 1..80: mol_type = other DNA
agcactcccaagaagcctctcttcaggacttctccctcggctggtgtttgatcctacagaggtgggagacatctctaaca

SEQ ID NO: 23164 - DNA, 80 bp, synthetic construct
  misc_feature 1..80: note = Artificially Synthesized Probe
  source 1..80: mol_type = other DNA
tttggagacacgaagccccctgagaacacgaggaaagcagaatccccgagatacacagactttgcaaagctgcacacagc

SEQ ID NO: 23165 - DNA, 80 bp, synthetic construct
  misc_feature 1..80: note = Artificially Synthesized Probe
  source 1..80: mol_type = other DNA
gagctttggtgaagaaagcctgagttggcttcccttacgcggccaggacagctttacagggctggctcccagcaattcgc

SEQ ID NO: 23166 - DNA, 80 bp, synthetic construct
  misc_feature 1..80: note = Artificially Synthesized Probe
  source 1..80: mol_type = other DNA
acagccagcaagttcctgtagcattctgcaaatttcctgtttctaccgtccaaatggaagccaaatacaatttctatgaa

SEQ ID NO: 23167 - DNA, 80 bp, synthetic construct
  misc_feature 1..80: note = Artificially Synthesized Probe
  source 1..80: mol_type = other DNA
aggtgggattggggggggctgtgaaccgcctgggggtgctctgcagggagtgtcttctctatctggctgccttttttttt

SEQ ID NO: 23168 - DNA, 80 bp, synthetic construct
  misc_feature 1..80: note = Artificially Synthesized Probe
  source 1..80: mol_type = other DNA
agcacgtgaggtccctggggctgacccctgctgaccctctcagaacagctttcttcctcaacgtcttgtaattccaacca

SEQ ID NO: 23169 - DNA, 80 bp, synthetic construct
  misc_feature 1..80: note = Artificially Synthesized Probe
  source 1..80: mol_type = other DNA
gactggcttctccttccaatctccaggtttctctctctttctgccttctttctgtcagttaccgtcattgatcacttaaa

SEQ ID NO: 23170 - DNA, 80 bp, synthetic construct
  misc_feature 1..80: note = Artificially Synthesized Probe
  source 1..80: mol_type = other DNA
ggaagcctttgctgcggcttggggattacagaattttaaacagcaagaaccttccctttgctagtccaagcttccctttg

SEQ ID NO: 23171 - DNA, 80 bp, synthetic construct
  misc_feature 1..80: note = Artificially Synthesized Probe
  source 1..80: mol_type = other DNA
tgtgtggggtgcctgccctgtgtgggatgcatggggtctgtgccctgtgtgaggtgcctgccctgtgtggggtgcgtggg

SEQ ID NO: 23172 - DNA, 80 bp, synthetic construct
  misc_feature 1..80: note = Artificially Synthesized Probe
  source 1..80: mol_type = other DNA
ccagagaccagggtgtcattcacaggtcaaagcaaaataagaaaatcataatttttccccttgttccaaagaaacatcca

SEQ ID NO: 23173 - DNA, 80 bp, synthetic construct
  misc_feature 1..80: note = Artificially Synthesized Probe
  source 1..80: mol_type = other DNA
aatttaatatgaatgctttcagtgataaggctttttaaactgagaccacccttgaggtggtagaggacagacttcaaaag

SEQ ID NO: 23174 - DNA, 80 bp, synthetic construct
  misc_feature 1..80: note = Artificially Synthesized Probe
  source 1..80: mol_type = other DNA
acttgctactttaagagggtcctggttaaaatgcaagcttctaggataagcaacgctccacactcatacatcagaacaat

SEQ ID NO: 23175 - DNA, 80 bp, synthetic construct
  misc_feature 1..80: note = Artificially Synthesized Probe
  source 1..80: mol_type = other DNA
cagagacatcacagaaacacctcaaaggtctgaggccaactcccgcatggccactgtgcaaagagctaacagctacgtat

SEQ ID NO: 23176 - DNA, 80 bp, synthetic construct
  misc_feature 1..80: note = Artificially Synthesized Probe
  source 1..80: mol_type = other DNA
tgggcatacacacatgagcgcacatatatacaggcacacacaggcacacaaaagcatacacatactcaggcacacatggg

SEQ ID NO: 23177 - DNA, 80 bp, synthetic construct
  misc_feature 1..80: note = Artificially Synthesized Probe
  source 1..80: mol_type = other DNA
aagggatgctttcagtcgtgatgtccaaattacattctcaagctctcaagattttgtttcatatgccaggagaagcgcat

SEQ ID NO: 23178 - DNA, 80 bp, synthetic construct
  misc_feature 1..80: note = Artificially Synthesized Probe
  source 1..80: mol_type = other DNA
cccctccgcagacacacgccacctacctccccctccgcagacacgtgccacctcccactccgcagacacgcgccacctac

SEQ ID NO: 23179 - DNA, 80 bp, synthetic construct
  misc_feature 1..80: note = Artificially Synthesized Probe
  source 1..80: mol_type = other DNA
ctgagtgaccatgaaagagctttccagaacatgctgcaagctcagagtgcaactggagtcaaagagaagctgccaagcag

SEQ ID NO: 23180 - DNA, 80 bp, synthetic construct
  misc_feature 1..80: note = Artificially Synthesized Probe
  source 1..80: mol_type = other DNA
aaagaaaatatccaaataagacaacgaacacctgaaaaggtgattctcatcaggaaaatgcaaatgacagccacgaggag

SEQ ID NO: 23181 - DNA, 80 bp, synthetic construct
  misc_feature 1..80: note = Artificially Synthesized Probe
  source 1..80: mol_type = other DNA
taatgtctatctatagttcactttaaaagttcacaaatttctttttcgcttcccagctccttacacctcaacgagctgcg

SEQ ID NO: 23182 - DNA, 80 bp, synthetic construct
  misc_feature 1..80: note = Artificially Synthesized Probe
  source 1..80: mol_type = other DNA
tccctattaactttggaatcgtcttatgaatttctacccaaaaaagcccacagggattttggctggcattacactgaatc

SEQ ID NO: 23183 - DNA, 80 bp, synthetic construct
  misc_feature 1..80: note = Artificially Synthesized Probe
  source 1..80: mol_type = other DNA
catggtgttttcagtcttataacaacttgaactgattgatattggaggttcaaccttgaattcttggaatcaaccctact

SEQ ID NO: 23184 - DNA, 80 bp, synthetic construct
  misc_feature 1..80: note = Artificially Synthesized Probe
  source 1..80: mol_type = other DNA
tcgctgcttcagagctaaacctccagtgggaggagatgaggacagtgtgttctacagagaggaatcacgcaggggagggg

SEQ ID NO: 23185 - DNA, 80 bp, synthetic construct
  misc_feature 1..80: note = Artificially Synthesized Probe
  source 1..80: mol_type = other DNA
ccatggggtggggacgacactgttctctgtagccctgcacacctttggatcagaacacactcaacgatgcagacacctgc

SEQ ID NO: 23186 - DNA, 80 bp, synthetic construct
  misc_feature 1..80: note = Artificially Synthesized Probe
  source 1..80: mol_type = other DNA
tgaaggatcacttgagctcagaagcttgagaccagccttggcaacatggtaagatctcgtctctacaaaagatacaaaaa

SEQ ID NO: 23187 - DNA, 80 bp, synthetic construct
  misc_feature 1..80: note = Artificially Synthesized Probe
  source 1..80: mol_type = other DNA
agccaagcagccctttcacagacgttctgaggtcctgggacccccacccacatcacccgtgtgaacatgacaggtttttg

SEQ ID NO: 23188 - DNA, 80 bp, synthetic construct
  misc_feature 1..80: note = Artificially Synthesized Probe
  source 1..80: mol_type = other DNA
tgctgcagagacaggaagctgactcaggagacacctgacttgttgacggtcacaaagataacacatggcaaagcctgaac

SEQ ID NO: 23189 - DNA, 80 bp, synthetic construct
  misc_feature 1..80: note = Artificially Synthesized Probe
  source 1..80: mol_type = other DNA
tctgcttcaaaagagaagacacacaattcactgaattcagaggcagctcaaaactcatccactctcacaccgcactcaac

SEQ ID NO: 23190 - DNA, 80 bp, synthetic construct
  misc_feature 1..80: note = Artificially Synthesized Probe
  source 1..80: mol_type = other DNA
attatttttatttattaatcatgttttattttaggaaattttgccatcttaacaagtttctggccagggagagactgccc

SEQ ID NO: 23191 - DNA, 80 bp, synthetic construct
  misc_feature 1..80: note = Artificially Synthesized Probe
  source 1..80: mol_type = other DNA
gcttctcctccaacaccatctcatgacctgctttgtctttctaaaataaatgataaaatcccaccaactgctgtcttggt

SEQ ID NO: 23192 - DNA, 80 bp, synthetic construct
  misc_feature 1..80: note = Artificially Synthesized Probe
  source 1..80: mol_type = other DNA
ccactctagagtctttttcaatgagagaccagatgaggacagaggctccagttgcttttgttctgttccaagacttgcca

SEQ ID NO: 23193 - DNA, 80 bp, synthetic construct
  misc_feature 1..80: note = Artificially Synthesized Probe
  source 1..80: mol_type = other DNA
agccccgcatctgtgccaaaataagacacaactcagcccagcggagtggacagtgtctgcggccagctctgggatccagg

SEQ ID NO: 23194 - DNA, 80 bp, synthetic construct
  misc_feature 1..80: note = Artificially Synthesized Probe
  source 1..80: mol_type = other DNA
ctgaacccaaacctgcattttaagcatgttctgttctgcacactaacacctgagaaggaccgtataagaaaaaacttgta

SEQ ID NO: 23195 - DNA, 80 bp, synthetic construct
  misc_feature 1..80: note = Artificially Synthesized Probe
  source 1..80: mol_type = other DNA
ctgcagcacacggccatgctccagataccttagctttatctgaagagttcttttgtttgtttgtttgtttgtttgagaca

SEQ ID NO: 23196 - DNA, 80 bp, synthetic construct
  misc_feature 1..80: note = Artificially Synthesized Probe
  source 1..80: mol_type = other DNA
ttcctcctcagggccgcaccagctctctctccttcccctcctcagggccacaccaactgtggggttccagctatcactct

SEQ ID NO: 23197 - DNA, 80 bp, synthetic construct
  misc_feature 1..80: note = Artificially Synthesized Probe
  source 1..80: mol_type = other DNA
aaaggatgtgtaactgttcctgggagcatcttgaggaagctgccaaaggagattcacattgagtcagtggacggggagag

SEQ ID NO: 23198 - DNA, 80 bp, synthetic construct
  misc_feature 1..80: note = Artificially Synthesized Probe
  source 1..80: mol_type = other DNA
gcgtttgctttgtggtctgctaagttgtacatttttactgggtggacgtttgggttctcagctgaagcagtctttcagaa

SEQ ID NO: 23199 - DNA, 80 bp, synthetic construct
  misc_feature 1..80: note = Artificially Synthesized Probe
  source 1..80: mol_type = other DNA
aatcagtcgaggtggcacgcacctgtaatcccagctccttgggagcctgaggcaggaagaccccttgggcccaggaggtc

SEQ ID NO: 23200 - DNA, 80 bp, synthetic construct
  misc_feature 1..80: note = Artificially Synthesized Probe
  source 1..80: mol_type = other DNA
taaaaattcctaggaaaacaggagtgtggagaaacatcctcaacacgataaaggccaactaccaagaactcaaggctgac

SEQ ID NO: 23201 - DNA, 80 bp, synthetic construct
  misc_feature 1..80: note = Artificially Synthesized Probe
  source 1..80: mol_type = other DNA
taagccgttagggaaacacaacttaaagccgcaatgagatattactgcacaccaatcggaacagctaaaatacaaaatac

SEQ ID NO: 23202 - DNA, 80 bp, synthetic construct
  misc_feature 1..80: note = Artificially Synthesized Probe
  source 1..80: mol_type = other DNA
ggctcatgtctgtcggtggctgtcgaggaggctctaggaccaggtatccaggataagacgggggatctgaatcaagtctg

SEQ ID NO: 23203 - DNA, 80 bp, synthetic construct
  misc_feature 1..80: note = Artificially Synthesized Probe
  source 1..80: mol_type = other DNA
aatacaaaaagcaatctctacaacttcaaaaaggaagaggaagcaatacacttagctgtgtgtccggtcaggggcaggac

SEQ ID NO: 23204 - DNA, 80 bp, synthetic construct
  misc_feature 1..80: note = Artificially Synthesized Probe
  source 1..80: mol_type = other DNA
actctttaaacttcccccagtggcttttgattaaaacctggtaatttgactgtacagttctagttagtgccatatgccct

SEQ ID NO: 23205 - DNA, 80 bp, synthetic construct
  misc_feature 1..80: note = Artificially Synthesized Probe
  source 1..80: mol_type = other DNA
tttttattttcatttagtctaagatacggtgatggttttgaatgttttcggcggatgcaatggtgtggactcgggtttgg

SEQ ID NO: 23206 - DNA, 80 bp, synthetic construct
  misc_feature 1..80: note = Artificially Synthesized Probe
  source 1..80: mol_type = other DNA
ttagggctgctttgttttttaacgcaagggtccacagttgagaacgtagttacaaactcaagaaacgagctgcaacagaa

SEQ ID NO: 23207 - DNA, 80 bp, synthetic construct
  misc_feature 1..80: note = Artificially Synthesized Probe
  source 1..80: mol_type = other DNA
ccatcacagaaagggacggtattattctgtgagtatgttcccagtatgtgggcgtgtgttgtgaacagagagataaacta

SEQ ID NO: 23208 - DNA, 80 bp, synthetic construct
  misc_feature 1..80: note = Artificially Synthesized Probe
  source 1..80: mol_type = other DNA
gcagaagagcaaatgagtccaggtggcccacaacacacggggcgcacgtgtccatagacagcacactggattcgaagagc

SEQ ID NO: 23209 - DNA, 80 bp, synthetic construct
  misc_feature 1..80: note = Artificially Synthesized Probe
  source 1..80: mol_type = other DNA
cagtgtgtgacagtgagaggccccagtgtgggttctcacaagcttgttttacggtttgacccagagagtacctgtgagtt

SEQ ID NO: 23210 - DNA, 80 bp, synthetic construct
  misc_feature 1..80: note = Artificially Synthesized Probe
  source 1..80: mol_type = other DNA
acaaggagtccccactctctacctatctgcttctaatgttctgactacatgagagatgataaaagggtttcaatacaagt

SEQ ID NO: 23211 - DNA, 80 bp, synthetic construct
  misc_feature 1..80: note = Artificially Synthesized Probe
  source 1..80: mol_type = other DNA
tttgccatcagacactcacagtttttgtcactgttaaccctactgcacaatacatgaacatggtctaagcaattcttttt

SEQ ID NO: 23212 - DNA, 80 bp, synthetic construct
  misc_feature 1..80: note = Artificially Synthesized Probe
  source 1..80: mol_type = other DNA
gacagccacctgcttacaggggtgctgacaaatactgactacctgcaaaattgaaacatgggtttgaaaagggcctgagt

SEQ ID NO: 23213 - DNA, 80 bp, synthetic construct
  misc_feature 1..80: note = Artificially Synthesized Probe
  source 1..80: mol_type = other DNA
gcacgcagcgcatgtgaagagtcagatataaaggtggctctttcacaaaccatttcggaaatttagacgaaccctcaatt

SEQ ID NO: 23214 - DNA, 80 bp, synthetic construct
  misc_feature 1..80: note = Artificially Synthesized Probe
  source 1..80: mol_type = other DNA
ctgatgaaatgtcacactgtatagtcattcacaaacatgtcatctttcacttttgattagggcagatgtcttctgttgta

SEQ ID NO: 23215 - DNA, 80 bp, synthetic construct
  misc_feature 1..80: note = Artificially Synthesized Probe
  source 1..80: mol_type = other DNA
attattaatcaggcaatcaaaccaaaaggaagcagacaatttaagttgtaacagggcaatctgcagattctcacaggttg

SEQ ID NO: 23216 - DNA, 80 bp, synthetic construct
  misc_feature 1..80: note = Artificially Synthesized Probe
  source 1..80: mol_type = other DNA
ttggcgtctgggcctcaaagcacaacacaggtactgacaggtaggtctccaccatgagagagaaaaagatgaggtcaact

SEQ ID NO: 23217 - DNA, 80 bp, synthetic construct
  misc_feature 1..80: note = Artificially Synthesized Probe
  source 1..80: mol_type = other DNA
aaaaacattattacagaataaccaaacttttgttccctcagagtgcctttctgtgatcgtttatgcccaactggcaaagg

SEQ ID NO: 23218 - DNA, 80 bp, synthetic construct
  misc_feature 1..80: note = Artificially Synthesized Probe
  source 1..80: mol_type = other DNA
ccaattaccttcacagaccacgactaacaggtttattacagatgagtcacagctcatgttttcaaggaagggtctccaac

SEQ ID NO: 23219 - DNA, 80 bp, synthetic construct
  misc_feature 1..80: note = Artificially Synthesized Probe
  source 1..80: mol_type = other DNA
gaacctcaaactgtattttccttagtttcattaccaggctccttgtagaaaataccagtgaaaaagaatggttggcagaa

SEQ ID NO: 23220 - DNA, 80 bp, synthetic construct
  misc_feature 1..80: note = Artificially Synthesized Probe
  source 1..80: mol_type = other DNA
aatgcattccaggaggtaaggtgagccactataatatggcaaaaagttcctttcacaagagagctaagacggtccgacat

SEQ ID NO: 23221 - DNA, 80 bp, synthetic construct
  misc_feature 1..80: note = Artificially Synthesized Probe
  source 1..80: mol_type = other DNA
tattcaaaattggaaatgacagagatgctatacagcaaggtgggagatccaggtaaagtggttgttagagggaaatgtat

SEQ ID NO: 23222 - DNA, 80 bp, synthetic construct
  misc_feature 1..80: note = Artificially Synthesized Probe
  source 1..80: mol_type = other DNA
tccaggttgtgaaaatgtgactattttacattctatttctccttatcggtttttcctaattttctaaaatgttgagtatt

SEQ ID NO: 23223 - DNA, 80 bp, synthetic construct
  misc_feature 1..80: note = Artificially Synthesized Probe
  source 1..80: mol_type = other DNA
ccaagtcagtcatccgggactgaaggtttctttgtgggaagggtgttaactaaaatttcaatttctttaatagatacagg

SEQ ID NO: 23224 - DNA, 80 bp, synthetic construct
  misc_feature 1..80: note = Artificially Synthesized Probe
  source 1..80: mol_type = other DNA
tcccagcactttgggagaacacggtgaaaccccatctctactcaaaataccaaaaattagccgggcgtggtggcgggcgc

SEQ ID NO: 23225 - DNA, 80 bp, synthetic construct
  misc_feature 1..80: note = Artificially Synthesized Probe
  source 1..80: mol_type = other DNA
ttggatgaacatgcgacatatctaccccctaaaaagctactcagtaaactactgacatacaccacagaacccagatcaat

SEQ ID NO: 23226 - DNA, 80 bp, synthetic construct
  misc_feature 1..80: note = Artificially Synthesized Probe
  source 1..80: mol_type = other DNA
atttctcaggatgcatcccccgaccgctattaaaattgatgcattccaaagtatttaaactgtacctcaaagaagctctc

SEQ ID NO: 23227 - DNA, 80 bp, synthetic construct
  misc_feature 1..80: note = Artificially Synthesized Probe
  source 1..80: mol_type = other DNA
tcttctttgaaaagcatgagacacgtttccctagggatggaatgctggacacgagacaagacttgtcctaaggactggat

SEQ ID NO: 23228 - DNA, 80 bp, synthetic construct
  misc_feature 1..80: note = Artificially Synthesized Probe
  source 1..80: mol_type = other DNA
ctctcacggcttgttctacttcacggcatgtttaagcaaagggggtcactacaacaaaattattttaaaacaaacatact

SEQ ID NO: 23229 - DNA, 80 bp, synthetic construct
  misc_feature 1..80: note = Artificially Synthesized Probe
  source 1..80: mol_type = other DNA
tggaacataatgtttttcatgatcaacagccactatgggaacacaacacacatcagccctgagacacccgaaacaagaca

SEQ ID NO: 23230 - DNA, 80 bp, synthetic construct
  misc_feature 1..80: note = Artificially Synthesized Probe
  source 1..80: mol_type = other DNA
cacagattcacatgctgaagacccaccagatgcaggaaggaaacgccagaacaacatgtttgctttcatctaaaaacatc

SEQ ID NO: 23231 - DNA, 80 bp, synthetic construct
  misc_feature 1..80: note = Artificially Synthesized Probe
  source 1..80: mol_type = other DNA
aaaaatagactgaaatgtcacagtatcgccaggatcaaaagaaggtctcttaaaaataaagggtttcttccattaataag

SEQ ID NO: 23232 - DNA, 80 bp, synthetic construct
  misc_feature 1..80: note = Artificially Synthesized Probe
  source 1..80: mol_type = other DNA
agaaaaaagaaaaaaaaagaacgtaatggtacaattttggggaccccaaaaggataatgcacataataaacaacaaaagc

SEQ ID NO: 23233 - DNA, 80 bp, synthetic construct
  misc_feature 1..80: note = Artificially Synthesized Probe
  source 1..80: mol_type = other DNA
gcaactgccaaaaaaaaacagtgtgacgattcctcaacaaattacaaaaggactaagcatatgatccagcagttcccctt

SEQ ID NO: 23234 - DNA, 80 bp, synthetic construct
  misc_feature 1..80: note = Artificially Synthesized Probe
  source 1..80: mol_type = other DNA
tcaaagagccacgtggataactgcctatattactggtactcaatttccaggttgggttggtaactggattgtttacaaca

SEQ ID NO: 23235 - DNA, 80 bp, synthetic construct
  misc_feature 1..80: note = Artificially Synthesized Probe
  source 1..80: mol_type = other DNA
aactgttattaatggcacagagctgctcatttcagcttcttttaccacgaaggtagccggctgttcacctctctgcctct

SEQ ID NO: 23236 - DNA, 80 bp, synthetic construct
  misc_feature 1..80: note = Artificially Synthesized Probe
  source 1..80: mol_type = other DNA
attattgttatgtgcattagccaatgtcagtggttccaatatttactttcaccactaaaatggcacgaaagcatgaagtc

SEQ ID NO: 23237 - DNA, 80 bp, synthetic construct
  misc_feature 1..80: note = Artificially Synthesized Probe
  source 1..80: mol_type = other DNA
atcattcaactttgaaacttagggtttgtgccagtccacctgtttatgttccatacttacatatcccaagccattaacaa

SEQ ID NO: 23238 - DNA, 80 bp, synthetic construct
  misc_feature 1..80: note = Artificially Synthesized Probe
  source 1..80: mol_type = other DNA
gattaggggatttttgttttattcttctgaaataccaactgccttcttcttccccttctgaaacaaccactggacaaact

SEQ ID NO: 23239 - DNA, 80 bp, synthetic construct
  misc_feature 1..80: note = Artificially Synthesized Probe
  source 1..80: mol_type = other DNA
attcaccctgtatttgacggtgcatgcgaatttgttatttatgcttaaatgccagccaaggagtaagattcagtctgcat

SEQ ID NO: 23240 - DNA, 80 bp, synthetic construct
  misc_feature 1..80: note = Artificially Synthesized Probe
  source 1..80: mol_type = other DNA
gactgaagtatgaaatggattcagcccccatcagcctaatgcagcttcatgagtgatcccaggtatgaccagcagaaaac

SEQ ID NO: 23241 - DNA, 80 bp, synthetic construct
  misc_feature 1..80: note = Artificially Synthesized Probe
  source 1..80: mol_type = other DNA
cttgttggctggtcagaaggggaagttccagagctggtttttgtagaaaacctcagattctttcaatcccaggccatctt

SEQ ID NO: 23242 - DNA, 80 bp, synthetic construct
  misc_feature 1..80: note = Artificially Synthesized Probe
  source 1..80: mol_type = other DNA
gtgttctcatcatttcgttcccattcataagtgacaacacgcagtatttggttttctgtccctgcattggtttgttaagg

SEQ ID NO: 23243 - DNA, 80 bp, synthetic construct
  misc_feature 1..80: note = Artificially Synthesized Probe
  source 1..80: mol_type = other DNA
tcacatcatcctgttgctgctgtgaacgaccctttaagaatgtgaagaccatccttcgcaatctggttgtacaaagacag

SEQ ID NO: 23244 - DNA, 80 bp, synthetic construct
  misc_feature 1..80: note = Artificially Synthesized Probe
  source 1..80: mol_type = other DNA
tttatctgatttctagtcctgttcacagtgctcactacgctactcattggtttaaaaaataagtcctacatcaaaccaga

SEQ ID NO: 23245 - DNA, 80 bp, synthetic construct
  misc_feature 1..80: note = Artificially Synthesized Probe
  source 1..80: mol_type = other DNA
aattagtcaggtgtggtggtgcacgcctgtggtttcagctactccagaggcaggcgggatcgcttgagccaggaggttga

SEQ ID NO: 23246 - DNA, 80 bp, synthetic construct
  misc_feature 1..80: note = Artificially Synthesized Probe
  source 1..80: mol_type = other DNA
ctgtacagaactcaataccctttccaagtaagggtgaaacagctgtctaagaccagagggtttcatcaatgccgatatac

SEQ ID NO: 23247 - DNA, 80 bp, synthetic construct
  misc_feature 1..80: note = Artificially Synthesized Probe
  source 1..80: mol_type = other DNA
agaccagaggctggagcacacctcctgctgatggaaacagcccagcagcgaccacagggccttccaggcagctcagcgtc

SEQ ID NO: 23248 - DNA, 80 bp, synthetic construct
  misc_feature 1..80: note = Artificially Synthesized Probe
  source 1..80: mol_type = other DNA
tctctctggtgcccaggctatgtggtctgtagtctgtgcaccacccacagatgagttctctcaaggaccagctcagattc

SEQ ID NO: 23249 - DNA, 80 bp, synthetic construct
  misc_feature 1..80: note = Artificially Synthesized Probe
  source 1..80: mol_type = other DNA
gaaagaaaaaaatttttttgaaaacatgaacaagtgcaaggaggagatggatcaacccgagctggtcaaatgctagtaaa

SEQ ID NO: 23250 - DNA, 80 bp, synthetic construct
  misc_feature 1..80: note = Artificially Synthesized Probe
  source 1..80: mol_type = other DNA
catgtgactgaggctgacgtcggaagttcacattcccacgagctgctttacttcacgaaatgaaaacatcatgtaactct

SEQ ID NO: 23251 - DNA, 80 bp, synthetic construct
  misc_feature 1..80: note = Artificially Synthesized Probe
  source 1..80: mol_type = other DNA
actgtacatccagaaaagcctaaaataccactaatcggcccagtacagaaaaagcctgtcaagccctgctctgtgagaga

SEQ ID NO: 23252 - DNA, 80 bp, synthetic construct
  misc_feature 1..80: note = Artificially Synthesized Probe
  source 1..80: mol_type = other DNA
gaaacgtaaacaaacgtaacgtcgcaggctcaagcagaagtgtatacaactcagtgcgggacataccacactgcacgctg

SEQ ID NO: 23253 - DNA, 80 bp, synthetic construct
  misc_feature 1..80: note = Artificially Synthesized Probe
  source 1..80: mol_type = other DNA
aagtggatgccagcaaaggatggtttgacagttttagaacgtttggctttaacaatgtcaagataacaggagaagcagct

SEQ ID NO: 23254 - DNA, 80 bp, synthetic construct
  misc_feature 1..80: note = Artificially Synthesized Probe
  source 1..80: mol_type = other DNA
taaacaccagctgccaggtatttggttttgcaacaaggctggaaagaacccctttttccggactgcttccattgatgctt

SEQ ID NO: 23255 - DNA, 80 bp, synthetic construct
  misc_feature 1..80: note = Artificially Synthesized Probe
  source 1..80: mol_type = other DNA
gagggaggactgtgaccatacaggaacatttctagagaaatgacaaagcacttcgtaagttacaccaaatgcgcctgcct

SEQ ID NO: 23256 - DNA, 80 bp, synthetic construct
  misc_feature 1..80: note = Artificially Synthesized Probe
  source 1..80: mol_type = other DNA
ctgtgtattttagtagagacggggtttcatcatgttggccaggctggtctcaaacttcaggcgctgtggtttaaaactct

SEQ ID NO: 23257 - DNA, 80 bp, synthetic construct
  misc_feature 1..80: note = Artificially Synthesized Probe
  source 1..80: mol_type = other DNA
tttcatctctatttaccaaacactattttctgcatctccaaacccctcaagcttcagtccaggtccaagtatcaatgggt

SEQ ID NO: 23258 - DNA, 80 bp, synthetic construct
  misc_feature 1..80: note = Artificially Synthesized Probe
  source 1..80: mol_type = other DNA
caataggagacaggcttctagatctgcagaaactctagaaataaatgaaggaaagcctgacgagtacctgcctgctttcc

SEQ ID NO: 23259 - DNA, 80 bp, synthetic construct
  misc_feature 1..80: note = Artificially Synthesized Probe
  source 1..80: mol_type = other DNA
taattatccaaacaagtaacttacatgcgatgatacgctttccaacaagaggagaacgatgaaagctgtcaacatccccc

SEQ ID NO: 23260 - DNA, 80 bp, synthetic construct
  misc_feature 1..80: note = Artificially Synthesized Probe
  source 1..80: mol_type = other DNA
taggtgtgagtcaactgtgttcagctgaaataaacgtttaaccaccaccttgacatcatatccaagaaacaaaagtagag

SEQ ID NO: 23261 - DNA, 80 bp, synthetic construct
  misc_feature 1..80: note = Artificially Synthesized Probe
  source 1..80: mol_type = other DNA
gtctcattcaaaacctcggggccatgtccagtggacgctgctgcctcctgtgtctgcaagaaggaagagccatgaagttc

SEQ ID NO: 23262 - DNA, 80 bp, synthetic construct
  misc_feature 1..80: note = Artificially Synthesized Probe
  source 1..80: mol_type = other DNA
aactacagaaagaatagaactcaattcttccctccttttacctcaatcaggtggccttttggtcttactgtatttttggc

SEQ ID NO: 23263 - DNA, 80 bp, synthetic construct
  misc_feature 1..80: note = Artificially Synthesized Probe
  source 1..80: mol_type = other DNA
tcaccatattcccaacacaacacactcacgatgatgcatttccacatttcactcaaatgctttaaagatttcaaaactac

SEQ ID NO: 23264 - DNA, 80 bp, synthetic construct
  misc_feature 1..80: note = Artificially Synthesized Probe
  source 1..80: mol_type = other DNA
ctttttttttttaaagcttgattattaagacagacaatgcactaattctcccttctgagggcagcacgaccaattcccaa

SEQ ID NO: 23265 - DNA, 80 bp, synthetic construct
  misc_feature 1..80: note = Artificially Synthesized Probe
  source 1..80: mol_type = other DNA
aaggaaacacacaggaagatctggagtgccaagttaaaaaaaaaaaaagcatctctcaagggagaggcctgaatggtggg

SEQ ID NO: 23266 - DNA, 80 bp, synthetic construct
  misc_feature 1..80: note = Artificially Synthesized Probe
  source 1..80: mol_type = other DNA
cacagtgaaattatctaattccaaaatcagcactaacaccagactattcaccaccacaaagacctgactccgacgcaatc

SEQ ID NO: 23267 - DNA, 80 bp, synthetic construct
  misc_feature 1..80: note = Artificially Synthesized Probe
  source 1..80: mol_type = other DNA
gtggaacaatttgagcaaaaaataaataggacagcaatggattacagtgctggagtgcagtggtacgacagcctccaggg

SEQ ID NO: 23268 - DNA, 80 bp, synthetic construct
  misc_feature 1..80: note = Artificially Synthesized Probe
  source 1..80: mol_type = other DNA
gcaccgagagagaagatcactggggcaaacaccgagtgtggcggggagcaccgagagagaagatcactagggcaaacacc

SEQ ID NO: 23269 - DNA, 80 bp, synthetic construct
  misc_feature 1..80: note = Artificially Synthesized Probe
  source 1..80: mol_type = other DNA
ttccacgacactggtgaacatgtaagtgtcaccctgatttgtgtgagccactctcataaaattattgcaccaggctgggc

SEQ ID NO: 23270 - DNA, 80 bp, synthetic construct
  misc_feature 1..80: note = Artificially Synthesized Probe
  source 1..80: mol_type = other DNA
aagacctgtgctgacattcctaaatatctgctagccttaataaagaaatcaatgtactttatgttcttagctcccacaat

SEQ ID NO: 23271 - DNA, 80 bp, synthetic construct
  misc_feature 1..80: note = Artificially Synthesized Probe
  source 1..80: mol_type = other DNA
aaggccctttctgtttccccaaaaattccttttctaaactccagcctatttcttcacattctacttcttattcaaggcct

SEQ ID NO: 23272 - DNA, 80 bp, synthetic construct
  misc_feature 1..80: note = Artificially Synthesized Probe
  source 1..80: mol_type = other DNA
gaaagtgcttgtaatagagactagtttacttgtgagggctacgaataagtgaagctcaaaccactaggtgccaaacatga

SEQ ID NO: 23273 - DNA, 80 bp, synthetic construct
  misc_feature 1..80: note = Artificially Synthesized Probe
  source 1..80: mol_type = other DNA
gatgagagaaccccctgttaaaaagatctccaaaccagcaaatacatcacggtatgattttaagtcactgcaatccagat

SEQ ID NO: 23274 - DNA, 80 bp, synthetic construct
  misc_feature 1..80: note = Artificially Synthesized Probe
  source 1..80: mol_type = other DNA
gatacagactcttctaagggtgtgaaatgtttgaaaagttgtcaataagcacacagactgacctgattcattcaacaaca

SEQ ID NO: 23275 - DNA, 80 bp, synthetic construct
  misc_feature 1..80: note = Artificially Synthesized Probe
  source 1..80: mol_type = other DNA
acagcgaggagaaccctgctgtcttctatgaagccacacattaatggggtttgtacaattttaaggaaatgctcctctaa

SEQ ID NO: 23276 - DNA, 80 bp, synthetic construct
  misc_feature 1..80: note = Artificially Synthesized Probe
  source 1..80: mol_type = other DNA
ccaagtggatccctggctgcaggacaaaggtgtgcatggcaaggggcccacctgcctcaggctgaggcataaactttccc

SEQ ID NO: 23277 - DNA, 80 bp, synthetic construct
  misc_feature 1..80: note = Artificially Synthesized Probe
  source 1..80: mol_type = other DNA
atcccaatacactgttagtgtctcaagcccaggttagaaattactcgtctagtctctgacagaaaaatcaggtgggctaa

SEQ ID NO: 23278 - DNA, 80 bp, synthetic construct
  misc_feature 1..80: note = Artificially Synthesized Probe
  source 1..80: mol_type = other DNA
gtggggatgctgagcccaggggtgcgggggaaccctctgtaatttatgttctattttgctgtgaacctaaagctaatata

SEQ ID NO: 23279 - DNA, 80 bp, synthetic construct
  misc_feature 1..80: note = Artificially Synthesized Probe
  source 1..80: mol_type = other DNA
cctctcacaggctccaccctgctcgggttcacagacacatcccccgtctgccccggggctgcctggcatggcacccaaga

SEQ ID NO: 23280 - DNA, 80 bp, synthetic construct
  misc_feature 1..80: note = Artificially Synthesized Probe
  source 1..80: mol_type = other DNA
acccgccgggcacaccagagactcccccatcccccagaacctggagagaggcctggagcagatgcccgcccccacccctc

SEQ ID NO: 23281 - DNA, 80 bp, synthetic construct
  misc_feature 1..80: note = Artificially Synthesized Probe
  source 1..80: mol_type = other DNA
ttggttgagcctgggagttcaagccttgagtgagctgtgggtggggggggcagcactgcagggtgaggtgaagggggtgg

SEQ ID NO: 23282 - DNA, 80 bp, synthetic construct
  misc_feature 1..80: note = Artificially Synthesized Probe
  source 1..80: mol_type = other DNA
aaaaaaagtacaccaccaaacagacaaagaccagagaccacttacataaaagccctgctgcctccccgggaagggatttc

SEQ ID NO: 23283 - DNA, 80 bp, synthetic construct
  misc_feature 1..80: note = Artificially Synthesized Probe
  source 1..80: mol_type = other DNA
agtttgaagggtatggggtaaagagaagagaaggaaaagctgcttttgaaaacactgttgactcgcaaagttaccagcac

SEQ ID NO: 23284 - DNA, 80 bp, synthetic construct
  misc_feature 1..80: note = Artificially Synthesized Probe
  source 1..80: mol_type = other DNA
taaggcatgttctcacagggacaattcaggaaatgcaccaaagcgtcctcaaggcctgtccacgaagctcctccttccag

SEQ ID NO: 23285 - DNA, 80 bp, synthetic construct
  misc_feature 1..80: note = Artificially Synthesized Probe
  source 1..80: mol_type = other DNA
tcagacacagggttttagttaaccaggactgtgatgccggcatctgcctggaggaaggaaggacagacttctgaagaaga

SEQ ID NO: 23286 - DNA, 80 bp, synthetic construct
  misc_feature 1..80: note = Artificially Synthesized Probe
  source 1..80: mol_type = other DNA
aggcacacgaggaacatcagcaaaggactgacagaaaaagactcatatttttatataaggaacacggggggaaaaagaaa

SEQ ID NO: 23287 - DNA, 80 bp, synthetic construct
  misc_feature 1..80: note = Artificially Synthesized Probe
  source 1..80: mol_type = other DNA
ctcggccaagaaactccctgagagagctcacaccagcgctgttccctcagaagcccagttctccaccctagagaagtggc

SEQ ID NO: 23288 - DNA, 80 bp, synthetic construct
  misc_feature 1..80: note = Artificially Synthesized Probe
  source 1..80: mol_type = other DNA
ttttaggtgaagccgacggtctgaggaaatgagatgagctcacacacctgatgacagcttccctcagcaattccacccgc

SEQ ID NO: 23289 - DNA, 80 bp, synthetic construct
  misc_feature 1..80: note = Artificially Synthesized Probe
  source 1..80: mol_type = other DNA
aggcgtgagccaccgcgtccagcctcaatctaaatttaaaacacagtttgctgttcagctacagggcagaatttcacacg

SEQ ID NO: 23290 - DNA, 80 bp, synthetic construct
  misc_feature 1..80: note = Artificially Synthesized Probe
  source 1..80: mol_type = other DNA
ccctgcacacagcggtgggaaaccttgactgcaccggaagaggagcaggctgccctggctgggccagacgctacacatct

SEQ ID NO: 23291 - DNA, 80 bp, synthetic construct
  misc_feature 1..80: note = Artificially Synthesized Probe
  source 1..80: mol_type = other DNA
gtactgggctgagatgtctcccagagtctcctggccgtgccccatccctcccctcagccagctactgggctgagatgcct

SEQ ID NO: 23292 - DNA, 80 bp, synthetic construct
  misc_feature 1..80: note = Artificially Synthesized Probe
  source 1..80: mol_type = other DNA
gggactctctgcccatcaaccagagcctggagggggagggagtaggagggggcgccgctcagccacaagtgcccattttc

SEQ ID NO: 23293 - DNA, 80 bp, synthetic construct
  misc_feature 1..80: note = Artificially Synthesized Probe
  source 1..80: mol_type = other DNA
tgaacaacactgcctttgttatcattaacaaaccactttcaaaacccccaatttttgggaaaggtaatttgaaagtccca

SEQ ID NO: 23294 - DNA, 80 bp, synthetic construct
  misc_feature 1..80: note = Artificially Synthesized Probe
  source 1..80: mol_type = other DNA
ggctcatttttttattttttgtagagatgcggtctcgtcatgttactcaggctggtctcgcactcctgagctcaagtgat

SEQ ID NO: 23295 - DNA, 80 bp, synthetic construct
  misc_feature 1..80: note = Artificially Synthesized Probe
  source 1..80: mol_type = other DNA
aacagacctcatgctaagggccttcctcgtattcaatctaaccaccacaggcaaacaaaagacaaaatcaatactgagga

SEQ ID NO: 23296 - DNA, 80 bp, synthetic construct
  misc_feature 1..80: note = Artificially Synthesized Probe
  source 1..80: mol_type = other DNA
gctcagtccacctccagatcttgaaaaatgtctcacctgatcacaaacatgcccactacccaggctggcttcattctaac

SEQ ID NO: 23297 - DNA, 80 bp, synthetic construct
  misc_feature 1..80: note = Artificially Synthesized Probe
  source 1..80: mol_type = other DNA
cctgccaaccatacacactggtctccagctcctaggaaaagccagaatagccatctagagggttcagcaacagcactatg

SEQ ID NO: 23298 - DNA, 80 bp, synthetic construct
  misc_feature 1..80: note = Artificially Synthesized Probe
  source 1..80: mol_type = other DNA
acgtcacaatgcagcaattgcaacaacttaaaggtaaatccaaagtccagcacaaaaaagagtagatgacactgatacaa

SEQ ID NO: 23299 - DNA, 80 bp, synthetic construct
  misc_feature 1..80: note = Artificially Synthesized Probe
  source 1..80: mol_type = other DNA
atgcgttttgcaaagatggagtgaggtttttcctccttacactcctggaagatggagtgaggtttttcctccttacactc

SEQ ID NO: 23300 - DNA, 80 bp, synthetic construct
  misc_feature 1..80: note = Artificially Synthesized Probe
  source 1..80: mol_type = other DNA
tgacagacaatctcagtaactgatcccattatctctggaagacagtaccaatccagagcctctaaaatatttggaataaa

SEQ ID NO: 23301 - DNA, 80 bp, synthetic construct
  misc_feature 1..80: note = Artificially Synthesized Probe
  source 1..80: mol_type = other DNA
tggggctgagacacgaagggtcagtgtgtgatgacggagtcagggatgggaccatcacccgtccatgtctgggggtgggg

SEQ ID NO: 23302 - DNA, 80 bp, synthetic construct
  misc_feature 1..80: note = Artificially Synthesized Probe
  source 1..80: mol_type = other DNA
ctgcactccacctgggcgagcgactgagaccctaagaatatccaaaccattaaaagaatttttttacagaatttttcttt

SEQ ID NO: 23303 - DNA, 80 bp, synthetic construct
  misc_feature 1..80: note = Artificially Synthesized Probe
  source 1..80: mol_type = other DNA
tttcatgagtacaggagcatacggatgggttttaagagactagtgcggagctgtggctttcttgacaaatactttttcag

SEQ ID NO: 23304 - DNA, 80 bp, synthetic construct
  misc_feature 1..80: note = Artificially Synthesized Probe
  source 1..80: mol_type = other DNA
aatcttgcttcctggctgggcgcagtggctcacacctataatcccagcactttgagtcaggcagatcacctgaggttggg

SEQ ID NO: 23305 - DNA, 80 bp, synthetic construct
  misc_feature 1..80: note = Artificially Synthesized Probe
  source 1..80: mol_type = other DNA
taccattcgaagagaggaggagactggccgaagtgtacaaagggctctcaaggatttcttacaacaaaacacaagctcaa

SEQ ID NO: 23306 - DNA, 80 bp, synthetic construct
  misc_feature 1..80: note = Artificially Synthesized Probe
  source 1..80: mol_type = other DNA
actcctgccaaaaccttcccttcctcaccggatccaggggaatggcaaaaacaattcgtgtttgaaagtaaacagataca

SEQ ID NO: 23307 - DNA, 80 bp, synthetic construct
  misc_feature 1..80: note = Artificially Synthesized Probe
  source 1..80: mol_type = other DNA
gatacaactccatgaagaaccatctcttggtatgcaacaaggtcttcagtcagtcagtcaatcaattcagcagagctgca

SEQ ID NO: 23308 - DNA, 80 bp, synthetic construct
  misc_feature 1..80: note = Artificially Synthesized Probe
  source 1..80: mol_type = other DNA
cttgaacccaggaggcagaggttgcagtgagctgagatcgtgccactacattccagcctgggagacagagtatgcctcaa

SEQ ID NO: 23309 - DNA, 80 bp, synthetic construct
  misc_feature 1..80: note = Artificially Synthesized Probe
  source 1..80: mol_type = other DNA
aagaatacaccactgtccctgaatgtgcactgttcttttaatttagaatgtgagcccacaatgatttgtacagcccaaca

SEQ ID NO: 23310 - DNA, 80 bp, synthetic construct
  misc_feature 1..80: note = Artificially Synthesized Probe
  source 1..80: mol_type = other DNA
agggattctcaactctcacgctcagacgttctagtacacagcaggtgcgctgtcctttaacaaggacaaaggtcaacaaa

SEQ ID NO: 23311 - DNA, 80 bp, synthetic construct; identical to SEQ ID NO: 23310
  misc_feature 1..80: note = Artificially Synthesized Probe
  source 1..80: mol_type = other DNA

SEQ ID NO: 23312 - DNA, 80 bp, synthetic construct
  misc_feature 1..80: note = Artificially Synthesized Probe
  source 1..80: mol_type = other DNA
tctgtgtttcttgtgagaaacatggaacataactggcactcatctagcatggtctcgcagtagcactgaacctacaaacc

SEQ ID NO: 23313 - DNA, 80 bp, synthetic construct
  misc_feature 1..80: note = Artificially Synthesized Probe
  source 1..80: mol_type = other DNA
tcacttatttacacctcagtctggtgtgcagaagtcactgggctaacaaggaatatattcatgttgtacatcgtgatgca

SEQ ID NO: 23314 - DNA, 80 bp, synthetic construct
  misc_feature 1..80: note = Artificially Synthesized Probe
  source 1..80: mol_type = other DNA
aacatatggatccctccaggctctttcagtctgctaacctacaagttaattagtccatttctaggaagaaagtgtccgtt

SEQ ID NO: 23315 - DNA, 80 bp, synthetic construct
  misc_feature 1..80: note = Artificially Synthesized Probe
  source 1..80: mol_type = other DNA
tcagaatccaagaactcctgagaaaacagctacatcgacatctggtattaacatttgattgtttaaccacactataaggg

SEQ ID NO: 23316 - DNA, 80 bp, synthetic construct
  misc_feature 1..80: note = Artificially Synthesized Probe
  source 1..80: mol_type = other DNA
ggggcagccttgccctgaggaagttatgctctaactggtgagactgcaccaaggcacaagaaaacccacgacaaactgaa

SEQ ID NO: 23317 - DNA, 80 bp, synthetic construct
  misc_feature 1..80: note = Artificially Synthesized Probe
  source 1..80: mol_type = other DNA
ttcttccaacaatatgactgcagaccccccagcaaaaggaaagattccccatttgggaaagtagactaaaattttcttct

SEQ ID NO: 23318 - DNA, 80 bp, synthetic construct
  misc_feature 1..80: note = Artificially Synthesized Probe
  source 1..80: mol_type = other DNA
gggaattaataactagagaactgttagagacccctgaaggttggacaatggtattgccgaagctttgtgttttgctcttc

SEQ ID NO: 23319 - DNA, 80 bp, synthetic construct
  misc_feature 1..80: note = Artificially Synthesized Probe
  source 1..80: mol_type = other DNA
agcatgccaccatctcccctgagcaaacagtcctccagagacagtcctccagagctctctccaacctgacatctctccca

SEQ ID NO: 23320 - DNA, 80 bp, synthetic construct
  misc_feature 1..80: note = Artificially Synthesized Probe
  source 1..80: mol_type = other DNA
agtttggaaggcattgcccccaagaaccaagcacagtcccttcgaagctaaagtattcaaatctcaagtcatcaaatgtt

SEQ ID NO: 23321 - DNA, 80 bp, synthetic construct
  misc_feature 1..80: note = Artificially Synthesized Probe
  source 1..80: mol_type = other DNA
aaatgcaatgtgatatttaggataaagctgaaacacaccacagcgcctcagcaattgaggctgtgaatacaaccacacaa

SEQ ID NO: 23322 - DNA, 80 bp, synthetic construct
  misc_feature 1..80: note = Artificially Synthesized Probe
  source 1..80: mol_type = other DNA
gccagaagttcagaccagcctgagcaacacactgaaacctcaactttgtaacaataaaaacagaataaaaacttagctgg

SEQ ID NO: 23323 - DNA, 80 bp, synthetic construct
  misc_feature 1..80: note = Artificially Synthesized Probe
  source 1..80: mol_type = other DNA
ttctgaagagactacagaacttctcaacacaggctctcttacacagactctattacacagacttttttaagatcttgcac

SEQ ID NO: 23324 - DNA, 80 bp, synthetic construct
  misc_feature 1..80: note = Artificially Synthesized Probe
  source 1..80: mol_type = other DNA
gccaggtcatgtctacgctttcctcactaaggatttaatttcagtattctacaatctaactctacactctcaaaacataa

SEQ ID NO: 23325 - DNA, 80 bp, synthetic construct
  misc_feature 1..80: note = Artificially Synthesized Probe
  source 1..80: mol_type = other DNA
tcactccaaccccatcacggcctggtgagcctccggcgctcctgccccttacagcacaagccggccaccacctcccacgg

SEQ ID NO: 23326 - DNA, 80 bp, synthetic construct
  misc_feature 1..80: note = Artificially Synthesized Probe
  source 1..80: mol_type = other DNA
aactccgcagaccaagaatacagtttccatagtaccctgtaactcaccaaggctgggacaaaggttaatgaaaagttcaa

SEQ ID NO: 23327 - DNA, 80 bp, synthetic construct
  misc_feature 1..80: note = Artificially Synthesized Probe
  source 1..80: mol_type = other DNA
aggaaaagaaaagctatcatgagccccttcagggtctagcagcatacaagactgcttttagaaattctactccaggcata

SEQ ID NO: 23328 - DNA, 80 bp, synthetic construct
  misc_feature 1..80: note = Artificially Synthesized Probe
  source 1..80: mol_type = other DNA
agcaggaaacaaagacagcaataaccacaagcacagggacaatgtcctgcctgacacctgaattcttactctgatatctc

SEQ ID NO: 23329 - DNA, 80 bp, synthetic construct
  misc_feature 1..80: note = Artificially Synthesized Probe
  source 1..80: mol_type = other DNA
gcatctgtactcccagctgacagggaggctaagaaggaaaggtcacttaagctcaacaggcagaggtggcagtgagctgt

SEQ ID NO: 23330 - DNA, 80 bp, synthetic construct
  misc_feature 1..80: note = Artificially Synthesized Probe
  source 1..80: mol_type = other DNA
aacatcacatagcacgatctagagtgtagcaaccacacagctaacacccaaatcagagggtcctcatgatcccatccatg

SEQ ID NO: 23331 - DNA, 80 bp, synthetic construct
  misc_feature 1..80: note = Artificially Synthesized Probe
  source 1..80: mol_type = other DNA
caccttgcagacactgggcacaggaattcagtaagactgataggtgatgtttttagttagggagaatatatgtgcaaatt

SEQ ID NO: 23332 - DNA, 80 bp, synthetic construct
  misc_feature 1..80: note = Artificially Synthesized Probe
  source 1..80: mol_type = other DNA
aaggcagctatcatggggcaaatttaaaccaggatctctggaaatgcgttattttttttttaaattatacccacacaccc

SEQ ID NO: 23333 - DNA, 80 bp, synthetic construct
  misc_feature 1..80: note = Artificially Synthesized Probe
  source 1..80: mol_type = other DNA
agaatacaacgaagtatacctggctggaagaacagcttttacagtgacagcaacaccctaatgggccctcaagacaaact

SEQ ID NO: 23334 - DNA, 80 bp, synthetic construct
  misc_feature 1..80: note = Artificially Synthesized Probe
  source 1..80: mol_type = other DNA
aagttaagtagtttcaacagagaaacctatggctggcaaagttctttaccacttggtcctctgtagaaaaagtttgccaa

SEQ ID NO: 23335 - DNA, 80 bp, synthetic construct
  misc_feature 1..80: note = Artificially Synthesized Probe
  source 1..80: mol_type = other DNA
aatctttaaaacatgtgtctagacgttcaaaatttaacctctggtatcaaatagctcatttgcgccgggtgcagtgtctc

SEQ ID NO: 23336 - DNA, 80 bp, synthetic construct
  misc_feature 1..80: note = Artificially Synthesized Probe
  source 1..80: mol_type = other DNA
tggtcttcttgaaagaaactgcacacgcccgctttttcatacaatcacacatgcgtggataaacacataccatcttttat

SEQ ID NO: 23337 - DNA, 80 bp, synthetic construct
  misc_feature 1..80: note = Artificially Synthesized Probe
  source 1..80: mol_type = other DNA
ccaagaagaagaacaggaagtattacatgaaggagaacaggaagtaaaacatgactggagacagaacttgtgaattcgag

SEQ ID NO: 23338 - DNA, 80 bp, synthetic construct
  misc_feature 1..80: note = Artificially Synthesized Probe
  source 1..80: mol_type = other DNA
tgcttccagggttcctcaagctgctcccctgggtgcttctagggttcctcaagctgctcccctgggtgcttctagggttc

SEQ ID NO: 23339 - DNA, 80 bp, synthetic construct
  misc_feature 1..80: note = Artificially Synthesized Probe
  source 1..80: mol_type = other DNA
tggtatatgcccaaaaagtgttcaaatggaaacctgtgcacacatgctcacagcactattgaaaacagaaaggtggaaac

SEQ ID NO: 23340 - DNA, 80 bp, synthetic construct
  misc_feature 1..80: note = Artificially Synthesized Probe
  source 1..80: mol_type = other DNA
ggtaaacaccctgcctacacccagacaatgcagcattattcacaagtaaacaggaatacagttccaagacatacaacata

SEQ ID NO: 23341 - DNA, 80 bp, synthetic construct
  misc_feature 1..80: note = Artificially Synthesized Probe
  source 1..80: mol_type = other DNA
aaaaaaagactacaaattccattcatatgaaattctaaaataagcaaaactaatccacaataacagaaagtgggctggca

SEQ ID NO: 23342 - DNA, 80 bp, synthetic construct
  misc_feature 1..80: note = Artificially Synthesized Probe
  source 1..80: mol_type = other DNA
acattaaagaaaatactttgccacgctttcactcatgattttgcagttccactggaaggctgaacatcactctggcaagt

SEQ ID NO: 23343 - DNA, 80 bp, synthetic construct
  misc_feature 1..80: note = Artificially Synthesized Probe
  source 1..80: mol_type = other DNA
tttgagccacgacacccggcctcttacaagttttttatttccaaccttaagtgaatttgtggaccaaatttcaaaacaac

SEQ ID NO: 23344 - DNA, 80 bp, synthetic construct
  misc_feature 1..80: note = Artificially Synthesized Probe
  source 1..80: mol_type = other DNA
tatagtgatccacgatcacaccactgcactccagcccgagcaagacagcaagactctgtctcaaaaataagtaaacaaaa

SEQ ID NO: 23345 - DNA, 80 bp, synthetic construct
  misc_feature 1..80: note = Artificially Synthesized Probe
  source 1..80: mol_type = other DNA
cctccgaaagtgctgagactacaggcgtgagccaccacaccccacttaataattccattttaataccgatttactaaaca

SEQ ID NO: 23346 - DNA, 80 bp, synthetic construct
  misc_feature 1..80: note = Artificially Synthesized Probe
  source 1..80: mol_type = other DNA
gccgcctgccttggcctcccaaagtgccgagactgcaacctctgcccggccgccaccccgtctgggaagtgaggagcgtc

SEQ ID NO: 23347 - DNA, 80 bp, synthetic construct
  misc_feature 1..80: note = Artificially Synthesized Probe
  source 1..80: mol_type = other DNA
atgtgctgtgtccactcagggttaaatggattaagggcggtgcaagatgtgctttgttaaacagacggttgaaggcagca

SEQ ID NO: 23348 - DNA, 80 bp, synthetic construct
  misc_feature 1..80: note = Artificially Synthesized Probe
  source 1..80: mol_type = other DNA
tgtagtcccagctactcgggaggctgagacacgagaatcacttgaacctgggaggtggaggctgtagcgagcgaagatcg

SEQ ID NO: 23349 - DNA, 80 bp, synthetic construct
  misc_feature 1..80: note = Artificially Synthesized Probe
  source 1..80: mol_type = other DNA
agtaatagttgtaactggaaaacagccaggctcgttttaagtgtggccccggttccttccatgatacaacagcagagctg

SEQ ID NO: 23350 - DNA, 80 bp, synthetic construct
  misc_feature 1..80: note = Artificially Synthesized Probe
  source 1..80: mol_type = other DNA
ggtgccaatcacaacagggaccagtaaaaggagattgtgtcataaactcaacaagctgcccagaaaaagatgctggcaga

SEQ ID NO: 23351 - DNA, 80 bp, synthetic construct
  misc_feature 1..80: note = Artificially Synthesized Probe
  source 1..80: mol_type = other DNA
cctaccctgtcagttcattagcttaaactctggtgtgatctgaaaggagctagttatgaataacaaatgacatcctatca

SEQ ID NO: 23352 - DNA, 80 bp, synthetic construct
  misc_feature 1..80: note = Artificially Synthesized Probe
  source 1..80: mol_type = other DNA
tcactttatgacactgtaatcatgaacttggaaagaagggtctattaacttagtgttaacttgaaaaggaaaaccaaagc

SEQ ID NO: 23353 - DNA, 80 bp, synthetic construct
  misc_feature 1..80: note = Artificially Synthesized Probe
  source 1..80: mol_type = other DNA
cagccaatgtatcctacaggaagaatgatacactgtcaccaagtgggtttaacccaggaatacatgattggttaaacgtt

SEQ ID NO: 23354 - DNA, 80 bp, synthetic construct
  misc_feature 1..80: note = Artificially Synthesized Probe
  source 1..80: mol_type = other DNA
tgggcgtggtggcgggcgcctgtagtcccagctactcgggaggctgaggcaggagaatggcgtgaacccgggagcggcag

SEQ ID NO: 23355 - DNA, 80 bp, synthetic construct
  misc_feature 1..80: note = Artificially Synthesized Probe
  source 1..80: mol_type = other DNA
ccaggcgggtggatcacaaggtcaggagatcaagactatcctggctaacacggtgaaaccccgtctctactaaaaaatac

SEQ ID NO: 23356 - DNA, 80 bp, synthetic construct
  misc_feature 1..80: note = Artificially Synthesized Probe
  source 1..80: mol_type = other DNA
gaacatcagggacaatggctatgaccctcgaggcatgcagccctgccaaacatcacatgctcattttatctccagacaca

SEQ ID NO: 23357 - DNA, 80 bp, synthetic construct
  misc_feature 1..80: note = Artificially Synthesized Probe
  source 1..80: mol_type = other DNA
ccattctaatggctgtgcacaccgtttaaatactgaccacagaggtgttactgttttattaggtatctgccctaagtgtg

SEQ ID NO: 23358 - DNA, 80 bp, synthetic construct
  misc_feature 1..80: note = Artificially Synthesized Probe
  source 1..80: mol_type = other DNA
tgcttctaacccacagaatgtggtgaaaacaatggaatggctttcccttgactgggttgcattaggtggcaaagttgctg

SEQ ID NO: 23359 - DNA, 80 bp, synthetic construct
  misc_feature 1..80: note = Artificially Synthesized Probe
  source 1..80: mol_type = other DNA
ttgaaagaaaagctttcatccatgctacttccttccatgcacaaataatgactggttgccagaaaggcagcacaggtcac

SEQ ID NO: 23360 - DNA, 80 bp, synthetic construct
  misc_feature 1..80: note = Artificially Synthesized Probe
  source 1..80: mol_type = other DNA
cgtaacccaccacgctgcactgtttctatagcaaccagaaagaaaatataaagcaagcagtttcacatgaaaattattct

SEQ ID NO: 23361 - DNA, 80 bp, synthetic construct
  misc_feature 1..80: note = Artificially Synthesized Probe
  source 1..80: mol_type = other DNA
agcagactgttaacgtgtcctattatcctcaggttcttgggttattcgtagaatagcaaagcaaactacctgctttgtaa

SEQ ID NO: 23362 - DNA, 80 bp, synthetic construct
  misc_feature 1..80: note = Artificially Synthesized Probe
  source 1..80: mol_type = other DNA
atttcttttttttctctctgagatggcgtctcactctgtcacccaggctggagtgcagtggtgcgattctggctcactgc

SEQ ID NO: 23363 - DNA, 80 bp, synthetic construct
  misc_feature 1..80: note = Artificially Synthesized Probe
  source 1..80: mol_type = other DNA
acagacatgcacgtcggactatcaccctagtgagaaagaaggaaagccacattggggttggttttttttttaacgtcctt

SEQ ID NO: 23364 - DNA, 80 bp, synthetic construct
  misc_feature 1..80: note = Artificially Synthesized Probe
  source 1..80: mol_type = other DNA
gagagtgcaacatcactagaaaaacattaatgacggccagacgcagtggcgagactccactcaaacaaaaacaaaaaaag

SEQ ID NO: 23365 - DNA, 80 bp, synthetic construct
  misc_feature 1..80: note = Artificially Synthesized Probe
  source 1..80: mol_type = other DNA
cttctcagaccacaagcctttttaaaaatcctaacttttaggccaggcgtgatggctgacgcctgtaatcccagcacttt

SEQ ID NO: 23366 - DNA, 80 bp, synthetic construct
  misc_feature 1..80: note = Artificially Synthesized Probe
  source 1..80: mol_type = other DNA
gccaggagttcaacatcagcctaagaaacatagcgaaaccccatttctacaaagaatttttaaaaattagcgcacgtctg

SEQ ID NO: 23367 - DNA, 80 bp, synthetic construct
  misc_feature 1..80: note = Artificially Synthesized Probe
  source 1..80: mol_type = other DNA
cacgtcagccacaccgtgctttacaaacatgccaatgtgtgaacggtcagtcacaaagacataaaaaaagatgactgccc

SEQ ID NO: 23368 - DNA, 80 bp, synthetic construct
  misc_feature 1..80: note = Artificially Synthesized Probe
  source 1..80: mol_type = other DNA
gaactataaaacaataaatctaaggttatggtggttagttacagcagcgctggaaaaccaacacgggcagcactgacaca

SEQ ID NO: 23369 - DNA, 80 bp, synthetic construct
  misc_feature 1..80: note = Artificially Synthesized Probe
  source 1..80: mol_type = other DNA
gagtggtgctctggggtttttttggttttttacttttatttcctgttttgcaagatgtaaaaccacatctagaaacatgg

SEQ ID NO: 23370 - DNA, 80 bp, synthetic construct
  misc_feature 1..80: note = Artificially Synthesized Probe
  source 1..80: mol_type = other DNA
gaacaggtacacattggttgctttacacgtggaaaaaagagccctacagatttccaggataataaataattcactgcaca

SEQ ID NO: 23371 - DNA, 80 bp, synthetic construct
  misc_feature 1..80: note = Artificially Synthesized Probe
  source 1..80: mol_type = other DNA
actctggcctgaaaacagcagtcctgctaaaagtgctttcacagaaagcactttcttcccacaaagacaactctcccttt

SEQ ID NO: 23372 - DNA, 80 bp, synthetic construct
  misc_feature 1..80: note = Artificially Synthesized Probe
  source 1..80: mol_type = other DNA
gtcgagatcatgccactgcactccagcctgggcaacaaagcgagactccgtctcaaaaaaaaaaaaaagaaaaaaacaat

SEQ ID NO: 23373 - DNA, 80 bp, synthetic construct
  misc_feature 1..80: note = Artificially Synthesized Probe
  source 1..80: mol_type = other DNA
aaaggggcacaaaaacttcttggaaaaatactgtccaacacaaacagcatagtttccttcactctatttgtagggagttc

SEQ ID NO: 23374 - DNA, 80 bp, synthetic construct
  misc_feature 1..80: note = Artificially Synthesized Probe
  source 1..80: mol_type = other DNA
catccgcccccccccctttttttctagtttaactacagttgcagagtaaaatcagaggacttctgtaatcattctctaac

SEQ ID NO: 23375 - DNA, 80 bp, synthetic construct
  misc_feature 1..80: note = Artificially Synthesized Probe
  source 1..80: mol_type = other DNA
cgccctccccctccggctcggagcccgagagccgcctgctctcatttcaaaacagcgataataatagggacgctgagaat

SEQ ID NO: 23376 - DNA, 80 bp, synthetic construct
  misc_feature 1..80: note = Artificially Synthesized Probe
  source 1..80: mol_type = other DNA
gggttaggcaggtgcaggcggcccaggctcagtctctgtccctctgggcctccgctaatgtgaagtgaagggtagaacta

SEQ ID NO: 23377 - DNA, 80 bp, synthetic construct
  misc_feature 1..80: note = Artificially Synthesized Probe
  source 1..80: mol_type = other DNA
agtctgccgagccagcccagccccattctactccgagtcgagtctgtaaagtgagctcactgcaggcagtgtggtggccc

SEQ ID NO: 23378 - DNA, 80 bp, synthetic construct
  misc_feature 1..80: note = Artificially Synthesized Probe
  source 1..80: mol_type = other DNA
tcagggtggggcggggtgggtgtagttgtcgagggcagatgctgatgctgatatgcttctccatcctccatgccttccag

SEQ ID NO: 23379 - DNA, 80 bp, synthetic construct
  misc_feature 1..80: note = Artificially Synthesized Probe
  source 1..80: mol_type = other DNA
ttgatgaggatgagcggaaactggctcacttgtgcattgctggagggagtgtaaaatggtacagctgctaaggaaaacag

SEQ ID NO: 23380 - DNA, 80 bp, synthetic construct
  misc_feature 1..80: note = Artificially Synthesized Probe
  source 1..80: mol_type = other DNA
aaagtctgacacaggctgcaacggggatgcgccttgtggacagtatgctacgtgaaatcagccagtcacaaaaggacaaa

SEQ ID NO: 23381 - DNA, 80 bp, synthetic construct
  misc_feature 1..80: note = Artificially Synthesized Probe
  source 1..80: mol_type = other DNA
tggtattgttaaagttttgtcagttttgtgtgttctgttttgtgtcaaagggattaacgtatgcctgatgtattatttcc

SEQ ID NO: 23382 - DNA, 80 bp, synthetic construct
  misc_feature 1..80: note = Artificially Synthesized Probe
  source 1..80: mol_type = other DNA
ggtatgtatagggaaagacagtatatataggtttgttactctgcacagtttcaggcatccaccgggttcttggatagatc

SEQ ID NO: 23383 - DNA, 80 bp, synthetic construct
  misc_feature 1..80: note = Artificially Synthesized Probe
  source 1..80: mol_type = other DNA
acagtgccgcccgggacagaacagacatgcacaggacctggcgggagacttttctggataatcttcgtgcggctgggctg

SEQ ID NO: 23384 - DNA, 80 bp, synthetic construct
  misc_feature 1..80: note = Artificially Synthesized Probe
  source 1..80: mol_type = other DNA
cccactcggggtttctttaccattttagcgccaattttacataatcaagcaatacagcctggctttgtctgtttgagatc

SEQ ID NO: 23385 - DNA, 80 bp, synthetic construct
  misc_feature 1..80: note = Artificially Synthesized Probe
  source 1..80: mol_type = other DNA
ctcccgaggctcaagccatcttcccagctcagcctcctgagtagctgggactacaggcccacaccaccatgcccggctaa

SEQ ID NO: 23386 - DNA, 80 bp, synthetic construct
  misc_feature 1..80: note = Artificially Synthesized Probe
  source 1..80: mol_type = other DNA
caaggtcatcatccagactcgagcaggtttgccctttagttgagggcaggggggactactgcaggggacgccggtggccc

SEQ ID NO: 23387 - DNA, 80 bp, synthetic construct
  misc_feature 1..80: note = Artificially Synthesized Probe
  source 1..80: mol_type = other DNA
tccatgggagtaggtgtcatgtatcaaataggagattcaaagtcagctgttaccacggctacagaaatgccagtcttttc

SEQ ID NO: 23388 - DNA, 80 bp, synthetic construct
  misc_feature 1..80: note = Artificially Synthesized Probe
  source 1..80: mol_type = other DNA
actctcctcacctggagttttcggcagggaatctgaggccaggtgcgcacgcttatcgcgtgtctgcatttccaaatgcc

SEQ ID NO: 23389 - DNA, 80 bp, synthetic construct
  misc_feature 1..80: note = Artificially Synthesized Probe
  source 1..80: mol_type = other DNA
tctgcactgttcacatgcccacagcttcctcgggagtgacaaccaggacaccttcttcacaagcaccaagaggcaccaaa

SEQ ID NO: 23390 - DNA, 80 bp, synthetic construct
  misc_feature 1..80: note = Artificially Synthesized Probe
  source 1..80: mol_type = other DNA
actaccctggcacaggggcgtcctgcatgtgcatgtgcggtggtgacacaaagtcccaagcctttccatcagatcgctat

SEQ ID NO: 23391 - DNA, 80 bp, synthetic construct
  misc_feature 1..80: note = Artificially Synthesized Probe
  source 1..80: mol_type = other DNA
actctattttttcttcatggagcaatcccagactcccaggcctgtctgcccatgtcccacactgaagcccctgcacctac

SEQ ID NO: 23392 - DNA, 80 bp, synthetic construct
  misc_feature 1..80: note = Artificially Synthesized Probe
  source 1..80: mol_type = other DNA
aagcaggccatctgccccaggcaaccccagagctgttcctcctgggtcctggctgccctcaccccactcagctcttggca

SEQ ID NO: 23393 - DNA, 80 bp, synthetic construct
  misc_feature 1..80: note = Artificially Synthesized Probe
  source 1..80: mol_type = other DNA
gtgtgaggtgagcacatgcctgtcttcaggagtgtcacagagggccttgtggacatggctgaaaggctggcaggtggaca

SEQ ID NO: 23394 - DNA, 80 bp, synthetic construct
  misc_feature 1..80: note = Artificially Synthesized Probe
  source 1..80: mol_type = other DNA
cctgacacaggtggacaggagtgctccaaggctgacaggtggacaggagtgctcccaggttgacacaagtggacaggagt

SEQ ID NO: 23395 - DNA, 80 bp, synthetic construct
  misc_feature 1..80: note = Artificially Synthesized Probe
  source 1..80: mol_type = other DNA
gtggacaggagtgttccaaggctgacagatgggcaggagtgctcccatgctaattttattggcactcttgtttattataa

SEQ ID NO: 23396 - DNA, 80 bp, synthetic construct
  misc_feature 1..80: note = Artificially Synthesized Probe
  source 1..80: mol_type = other DNA
cacaggcaaaaccaaaggttttgagcagaattcccaacttacaagacctgggcgggaggctcctgcagtctctgagcccc

SEQ ID NO: 23397 - DNA, 80 bp, synthetic construct
  misc_feature 1..80: note = Artificially Synthesized Probe
  source 1..80: mol_type = other DNA
attaactctaggtccaaaacctcatgaaaatatcagctcagaaagtcccaaatcgcatcctcaaagtcaggtgtgggtga

SEQ ID NO: 23398 - DNA, 80 bp, synthetic construct
  misc_feature 1..80: note = Artificially Synthesized Probe
  source 1..80: mol_type = other DNA
cacgggtgaggacgagccctacttccctgagaggagccgcgcgcgccgcatgctggccggctctgtggtgatcgtggtga

SEQ ID NO: 23399 - DNA, 80 bp, synthetic construct
  misc_feature 1..80: note = Artificially Synthesized Probe
  source 1..80: mol_type = other DNA
cgcatcgccagcctcacggggtctgtagtgaacctcgtcttcatcctcatcctctccaagatctatgtatccctggccca

SEQ ID NO: 23400 - DNA, 80 bp, synthetic construct
  misc_feature 1..80: note = Artificially Synthesized Probe
  source 1..80: mol_type = other DNA
ccatttgtttctgcaactgtggggttgctgtggggtgttgagcctccctctttccctcctgtaaccttcagcctttgatg

SEQ ID NO: 23401 - DNA, 80 bp, synthetic construct
  misc_feature 1..80: note = Artificially Synthesized Probe
  source 1..80: mol_type = other DNA
atcttgactttctcctaggtttgtgggatacccaggcaactaccacaccttgtttggagtccgcaatgaggaggtgagtg

SEQ ID NO: 23402 - DNA, 80 bp, synthetic construct
  misc_feature 1..80: note = Artificially Synthesized Probe
  source 1..80: mol_type = other DNA
ctgcaaagcagaccccaagacagagattctggtgcaagtaactgacgtgtgcatcaccccagaagtagtctccactgtgc

SEQ ID NO: 23403 - DNA, 80 bp, synthetic construct
  misc_feature 1..80: note = Artificially Synthesized Probe
  source 1..80: mol_type = other DNA
cggacttagcaccccttgcaaggcacgtgttcccaggaactccacctcccactggctcgaactgggtcaccgattggtgg

SEQ ID NO: 23404 - DNA, 80 bp, synthetic construct
  misc_feature 1..80: note = Artificially Synthesized Probe
  source 1..80: mol_type = other DNA
cacacgtctgcctcagatgcccctgccagggacaccctgaccacaaggctcccatagccagagtccttcaaagaggctgc

SEQ ID NO: 23405 - DNA, 80 bp, synthetic construct
  misc_feature 1..80: note = Artificially Synthesized Probe
  source 1..80: mol_type = other DNA
tagcagccactgagacccatgttggatcaaaggccattttcctgtattcccgtccccaggaagctaaagggctggtggca

SEQ ID NO: 23406 - DNA, 80 bp, synthetic construct
  misc_feature 1..80: note = Artificially Synthesized Probe
  source 1..80: mol_type = other DNA
ggcgaggagtggacgccctgaccctcctccactgaaccctggaccccaatgatctcactagtaattctcggcgaagaccc

SEQ ID NO: 23407 - DNA, 80 bp, synthetic construct
  misc_feature 1..80: note = Artificially Synthesized Probe
  source 1..80: mol_type = other DNA
cccgcagttgtggagacttcctttgtgatctggttacaatgaagttttgcatgtgtttcaataaacttgaaaagcatcat

SEQ ID NO: 23408 - DNA, 80 bp, synthetic construct
  misc_feature 1..80: note = Artificially Synthesized Probe
  source 1..80: mol_type = other DNA
atgaactcagttttgtttcctctctctgtgtatgactaggatcttcacatgccttaccacctagtaagcagcaatctctc

SEQ ID NO: 23409 - DNA, 80 bp, synthetic construct
  misc_feature 1..80: note = Artificially Synthesized Probe
  source 1..80: mol_type = other DNA
ggcagttcacgcctgtaatctcagctgctctggaggctggggcaggaggatcatttcaactcgggaggcggaggttgcag

SEQ ID NO: 23410 - DNA, 80 bp, synthetic construct
  misc_feature 1..80: note = Artificially Synthesized Probe
  source 1..80: mol_type = other DNA
accatcctggctaacacggtgaaaccccgtcttgactaaaaatacaaaaaattagctgggcattgtggcacgggcctgta

SEQ ID NO: 23411 - DNA, 80 bp, synthetic construct
  misc_feature 1..80: note = Artificially Synthesized Probe
  source 1..80: mol_type = other DNA
attttcaccgtgtaagtagactgaagtcatccgtagaagcacagacgtactggactgtcacatctactagaaaataaagc

SEQ ID NO: 23412 - DNA, 80 bp, synthetic construct
  misc_feature 1..80: note = Artificially Synthesized Probe
  source 1..80: mol_type = other DNA
cagagtctgtggagatcaaagtgaagcgggagtactacctggctaagcaggcactggctgagaatgaggtgaactgtaca

SEQ ID NO: 23413 - DNA, 80 bp, synthetic construct
  misc_feature 1..80: note = Artificially Synthesized Probe
  source 1..80: mol_type = other DNA
caggccacagcaaaggtctgttgaacccctccctccattcccagttatctgggtcctctggattcttctgtttcttgaat

SEQ ID NO: 23414 - DNA, 80 bp, synthetic construct
  misc_feature 1..80: note = Artificially Synthesized Probe
  source 1..80: mol_type = other DNA
atttcacccaccgtgatgcctggcctgagggcggcgtgcttgcttgtagcatttcttgaggatttgctacttgttcacct

SEQ ID NO: 23415 - DNA, 80 bp, synthetic construct
  misc_feature 1..80: note = Artificially Synthesized Probe
  source 1..80: mol_type = other DNA
ctgcacccagcctgaaccactttcaagagaatccaatggaacacgtacattctcttcaataagattacacacactaataa

SEQ ID NO: 23416 - DNA, 80 bp, synthetic construct
  misc_feature 1..80: note = Artificially Synthesized Probe
  source 1..80: mol_type = other DNA
ccaaattcccttctccacttacctcccacaaacacacttcttgttcttaggcttagatgttgtttgtttgcttgtttgtt

SEQ ID NO: 23417 - DNA, 80 bp, synthetic construct
  misc_feature 1..80: note = Artificially Synthesized Probe
  source 1..80: mol_type = other DNA
ctctgtcacctaggccagtgtgcagtggtccaatcatagctcactgcagccttgaacttctgggctcaggagatcttcct

SEQ ID NO: 23418 - DNA, 80 bp, synthetic construct
  misc_feature 1..80: note = Artificially Synthesized Probe
  source 1..80: mol_type = other DNA
ggactccaggacaagaaccaggtgatggagcagctcatggatgggtgaaaatctctttctgacgtaaatttttttataaa

SEQ ID NO: 23419 - DNA, 80 bp, synthetic construct
  misc_feature 1..80: note = Artificially Synthesized Probe
  source 1..80: mol_type = other DNA
aggtttcttcccccagtcacattatttggtgaccactctctaataccattatgttttagtcttgaattcaggtgtaagcg

SEQ ID NO: 23420 - DNA, 80 bp, synthetic construct
  misc_feature 1..80: note = Artificially Synthesized Probe
  source 1..80: mol_type = other DNA
cttaaatacccattgattcttgatcaaattaaatgggcactgtgatagtgttattcttacctcagagtggggtcaccggt

SEQ ID NO: 23421 - DNA, 80 bp, synthetic construct
  misc_feature 1..80: note = Artificially Synthesized Probe
  source 1..80: mol_type = other DNA
cagatcatctgaggtcgggagttccagactagcctgaccaacatggagaaaccgcatctctactaaaaatacaaaaaaaa

SEQ ID NO: 23422 - DNA, 80 bp, synthetic construct
  misc_feature 1..80: note = Artificially Synthesized Probe
  source 1..80: mol_type = other DNA
aggaagtaaaaccaggcaaaaccacgtcctccattcagactctcaaaggtggttacaaacttaaaatggtccatgaatct

SEQ ID NO: 23423 - DNA, 80 bp, synthetic construct
  misc_feature 1..80: note = Artificially Synthesized Probe
  source 1..80: mol_type = other DNA
atttttcatatagagggctagccatatactgtgaagtatgctttctacggtaggcccaggccattcccatgaaaagaaag

SEQ ID NO: 23424 - DNA, 80 bp, synthetic construct
  misc_feature 1..80: note = Artificially Synthesized Probe
  source 1..80: mol_type = other DNA
tgcccggccaaaattgggtttttatttcaggtttgatagatgattaaataggtgttggagtccttggttacaggtacatt

SEQ ID NO: 23425 - DNA, 80 bp, synthetic construct
  misc_feature 1..80: note = Artificially Synthesized Probe
  source 1..80: mol_type = other DNA
ttgcactccagcctgggcaacaagagtgaaactccctctcaaaaaaaaaaaaaaaaaaaaaaaaaaaaatatatatatat

SEQ ID NO: 23426 - DNA, 80 bp, synthetic construct
  misc_feature 1..80: note = Artificially Synthesized Probe
  source 1..80: mol_type = other DNA
ggcgacagagcgagactacgtctcaaaaaaataaataaataaaataaaataaagtttcaatttaaagaaagggtatttgg

SEQ ID NO: 23427 - DNA, 80 bp, synthetic construct
  misc_feature 1..80: note = Artificially Synthesized Probe
  source 1..80: mol_type = other DNA
taagtgggagctaaaccttgggtacacatggacataaagacaggaacagccaggcatggtggctcacacctctaatccca

SEQ ID NO: 23428 - DNA, 80 bp, synthetic construct
  misc_feature 1..80: note = Artificially Synthesized Probe
  source 1..80: mol_type = other DNA
cgggaggattgcttgaggctaggaaattgagactaccgtaagcaacacagcaagaccccgtctctaaaaacaaaacaaaa

SEQ ID NO: 23429 - DNA, 80 bp, synthetic construct
  misc_feature 1..80: note = Artificially Synthesized Probe
  source 1..80: mol_type = other DNA
ccagctctggatagtatgctaagtgtaagaagccattagagagtatggggatgattcaagggagagtactgaattttaga

SEQ ID NO: 23430 - DNA, 80 bp, synthetic construct
  misc_feature 1..80: note = Artificially Synthesized Probe
  source 1..80: mol_type = other DNA
accaccttcataagaaaagtccagggaaggtattagctactacaatcaaataatgtgtttggtctttcccccagtatgcc

SEQ ID NO: 23431 - DNA, 80 bp, synthetic construct
  misc_feature 1..80: note = Artificially Synthesized Probe
  source 1..80: mol_type = other DNA
ttgagcctggcattcgaagtcctctatagtataataacacttcaaatttgctttctggtcttactgcaaattgtttacat

SEQ ID NO: 23432 - DNA, 80 bp, synthetic construct
  misc_feature 1..80: note = Artificially Synthesized Probe
  source 1..80: mol_type = other DNA
ggtgtgagccacagcgcctggctacttaattttttatcatggtgaaacaaacactgatttggttaaagtcacttggagat

SEQ ID NO: 23433 - DNA, 80 bp, synthetic construct
  misc_feature 1..80: note = Artificially Synthesized Probe
  source 1..80: mol_type = other DNA
aaactcaatgatcaggagaaatgcttttattttaaaatttaggaagaagagagcctggttcccaaaggctccctcctgca

SEQ ID NO: 23434 - DNA, 80 bp, synthetic construct
  misc_feature 1..80: note = Artificially Synthesized Probe
  source 1..80: mol_type = other DNA
gttttccagaaagcagaatagaaagtagatgggcaaccatcaatcagacaggccaaagaaaaggagctcaggccctcggg

SEQ ID NO: 23435 - DNA, 80 bp, synthetic construct
  misc_feature 1..80: note = Artificially Synthesized Probe
  source 1..80: mol_type = other DNA
cactcccctcctcctgtcctcctgccagcccttccttcccctgctccactgcagtcctcctggccaacaactaaagggga

SEQ ID NO: 23436 - DNA, 80 bp, synthetic construct
  misc_feature 1..80: note = Artificially Synthesized Probe
  source 1..80: mol_type = other DNA
ttgtctcctcctctggacacagggatctttgtccaatttacagaaagatgtggaagtcctgggacagatgaattaacaca

SEQ ID NO: 23437 - DNA, 80 bp, synthetic construct
  misc_feature 1..80: note = Artificially Synthesized Probe
  source 1..80: mol_type = other DNA
ccctctcagagtttgctgactgctgggaaaactttgtggaccacgagaaaccgctttccttcaacccctataagatgtta

SEQ ID NO: 23438 - DNA, 80 bp, synthetic construct
  misc_feature 1..80: note = Artificially Synthesized Probe
  source 1..80: mol_type = other DNA
ggtggatcacttgagcccaggagttcaaagaccagcctgggcaacatggcaaatccccatctctacaaaaaatacaaaaa

SEQ ID NO: 23439 - DNA, 80 bp, synthetic construct
  misc_feature 1..80: note = Artificially Synthesized Probe
  source 1..80: mol_type = other DNA
tcccactcattatcaagaagcaactcaagatgactttccctggggcatgtcagttgcctcatagcctgctggtcctgtaa

SEQ ID NO: 23440 - DNA, 80 bp, synthetic construct
  misc_feature 1..80: note = Artificially Synthesized Probe
  source 1..80: mol_type = other DNA
tcctgcttcgacagccttgaaagtgggtaagctgggtggggggctctgggagaggtcagtgctgagtaaggcaattccca

SEQ ID NO: 23441 - DNA, 80 bp, synthetic construct
  misc_feature 1..80: note = Artificially Synthesized Probe
  source 1..80: mol_type = other DNA
ataacaaatttttggccgggcagggtggctcatgcctgtaatcccagcactttgggaggccgaggcgggcagatcacttg

SEQ ID NO: 23442 - DNA, 80 bp, synthetic construct
  misc_feature 1..80: note = Artificially Synthesized Probe
  source 1..80: mol_type = other DNA
ccaagatgaacagattgaaaaaaaaacaagtcctggagaggctgacaacatccctctggtcacacagctagatctcaagg

SEQ ID NO: 23443 - DNA, 80 bp, synthetic construct
  misc_feature 1..80: note = Artificially Synthesized Probe
  source 1..80: mol_type = other DNA
tgggtaacagaatgagaccctgtctcaacaaaaaaagaaaagaaaagagaagaaaagagaaaagaaagacagggagggag

SEQ ID NO: 23444 - DNA, 80 bp, synthetic construct
  misc_feature 1..80: note = Artificially Synthesized Probe
  source 1..80: mol_type = other DNA
ccaccacgccagctaattttttgtattcttagtagaatgtagaatttacttagtagaattttttgtattcttagccagca

SEQ ID NO: 23445 - DNA, 80 bp, synthetic construct
  misc_feature 1..80: note = Artificially Synthesized Probe
  source 1..80: mol_type = other DNA
tctgaaatttcccacaccccagcgcctgtgctgaggactccctccatgtggccccaggtgccaccaataaaaatcctaca

SEQ ID NO: 23446 - DNA, 80 bp, synthetic construct
  misc_feature 1..80: note = Artificially Synthesized Probe
  source 1..80: mol_type = other DNA
tcggggagtgtgtgtgtcggtggctgagagtgaagtgtgaatgtcacattggtacaaactgggatcatctgtgtgtgtgc

SEQ ID NO: 23447 - DNA, 80 bp, synthetic construct
  misc_feature 1..80: note = Artificially Synthesized Probe
  source 1..80: mol_type = other DNA
tatttttggtagagacagggttttgccatgttgcccaggctggtcttgaaatcctgacctcaggtgatccgcccgccttg

SEQ ID NO: 23448 - DNA, 80 bp, synthetic construct
  misc_feature 1..80: note = Artificially Synthesized Probe
  source 1..80: mol_type = other DNA
gagatggcccagccggacggggtggctcacatctgtaatcccagcattttgggagcccgaggtgggtggatcacttgagg

SEQ ID NO: 23449 - DNA, 80 bp, synthetic construct
  misc_feature 1..80: note = Artificially Synthesized Probe
  source 1..80: mol_type = other DNA
agaccagcctgggcaacacagcgagatctcttgggggtaaaacaaaaagaaaaaaaaaagttcatacttctccaataaat

SEQ ID NO: 23450 - DNA, 80 bp, synthetic construct
  misc_feature 1..80: note = Artificially Synthesized Probe
  source 1..80: mol_type = other DNA
ggagatggagtctcgctatgtagcccaggctagactcaaactcctgggctcaagcaatcctcctgcctcagcctccccag

SEQ ID NO: 23451 - DNA, 80 bp, synthetic construct
  misc_feature 1..80: note = Artificially Synthesized Probe
  source 1..80: mol_type = other DNA
gatgatgatattgtgccctgtgcatgttcttcgtcaccaaaagtgcctctctcatagagcaggtgagaactcagtgagga

SEQ ID NO: 23452 - DNA, 80 bp, synthetic construct
  misc_feature 1..80: note = Artificially Synthesized Probe
  source 1..80: mol_type = other DNA
taataattaaaatgttaaaatcaggagtagaatcacagaatgttggaaagtgaggcccaagaagggggctgtgtccaagt

SEQ ID NO: 23453 - DNA, 80 bp, synthetic construct
  misc_feature 1..80: note = Artificially Synthesized Probe
  source 1..80: mol_type = other DNA
tgctgaagggagaggagtaacagccagaccccccatcagtggacaaggggagagtcccctactcccctgatcccccaggt

SEQ ID NO: 23454 - DNA, 80 bp, synthetic construct
  misc_feature 1..80: note = Artificially Synthesized Probe
  source 1..80: mol_type = other DNA
gagcccgaggggcgagctggcttcgcctggggggtcgtgcagtaacttagattttccggtaaaggagaagaatgcggtcc

SEQ ID NO: 23455 - DNA, 80 bp, synthetic construct
  misc_feature 1..80: note = Artificially Synthesized Probe
  source 1..80: mol_type = other DNA
cctgcacctcaactgtcctgcaccccacctgtccccctgatccccacctgtcctctgcacctcacctgtccccctacacc

SEQ ID NO: 23456 - DNA, 80 bp, synthetic construct
  misc_feature 1..80: note = Artificially Synthesized Probe
  source 1..80: mol_type = other DNA
ctcacttacgaagttgctagaaggcgttgtatggggaagtgctgcttaaaacaaagatgtttggcataaattagagcaaa

SEQ ID NO: 23457 - DNA, 80 bp, synthetic construct
  misc_feature 1..80: note = Artificially Synthesized Probe
  source 1..80: mol_type = other DNA
ttttccaaattttgataaaaaagtgatctttttttttgaaatggagtatcactctgttgcccaggctggagtgcagtgga

SEQ ID NO: 23458 - DNA, 80 bp, synthetic construct
  misc_feature 1..80: note = Artificially Synthesized Probe
  source 1..80: mol_type = other DNA
ttctttgttttgttttgtgcccgtggcttgttgtccagctgtggggaacagacccttacacttggatgtggtcgttatta

SEQ ID NO: 23459 - DNA, 80 bp, synthetic construct
  misc_feature 1..80: note = Artificially Synthesized Probe
  source 1..80: mol_type = other DNA
caggatacctgcgtgggccgtgtagacacaacccagggagctccagagttaatgaccctcctggttcagaagctccgtat

SEQ ID NO: 23460 - DNA, 80 bp, synthetic construct
  misc_feature 1..80: note = Artificially Synthesized Probe
  source 1..80: mol_type = other DNA
tgcaaacacctgcgagcaccttcttggtcccttgaggcctttctctgttggcttaggtttagtgcccttttgtgcttatg

SEQ ID NO: 23461 - DNA, 80 bp, synthetic construct
  misc_feature 1..80: note = Artificially Synthesized Probe
  source 1..80: mol_type = other DNA
acagtgtgggagagccacggaggggccatgtgacagagagctgtagcagacagggtgatggacatccatggagggacagt

SEQ ID NO: 23462 - DNA, 80 bp, synthetic construct
  misc_feature 1..80: note = Artificially Synthesized Probe
  source 1..80: mol_type = other DNA
gacagagggagagagagacagagacaggcagagacagagacagagacagaggcagaggcagagacagagagaggcagagg

SEQ ID NO: 23463 - DNA, 80 bp, synthetic construct
  misc_feature 1..80: note = Artificially Synthesized Probe
  source 1..80: mol_type = other DNA
ggcagagagagacagagacagaggcagagagacagagacagaggcagagagacagagacagaggcagagagagacagagg

SEQ ID NO: 23464 - DNA, 80 bp, synthetic construct
  misc_feature 1..80: note = Artificially Synthesized Probe
  source 1..80: mol_type = other DNA
tgactgactgtgttataaagcccttgcgagactgaatgcatttgcttctcttttcactgttttttcttttctgggagcgt

SEQ ID NO: 23465 - DNA, 80 bp, synthetic construct
  misc_feature 1..80: note = Artificially Synthesized Probe
  source 1..80: mol_type = other DNA
ggatggaggaaatggcccctgcatcattcgccaagcgggtccgccacaacgctctgagctcggctcggtcggggagtgct

SEQ ID NO: 23466 - DNA, 80 bp, synthetic construct
  misc_feature 1..80: note = Artificially Synthesized Probe
  source 1..80: mol_type = other DNA
actctgccatggaaaaaaaaaaaagaaaaaaaaaaacacaatccaaatgcacaatgaaatctttcattaagatgcttaaa

SEQ ID NO: 23467 - DNA, 80 bp, synthetic construct
  misc_feature 1..80: note = Artificially Synthesized Probe
  source 1..80: mol_type = other DNA
ggaatgcagtttttaagggacactaatttggaaggaaatttttggagtttacagtctgcctgagacttgtgtatgggtca

SEQ ID NO: 23468 - DNA, 80 bp, synthetic construct
  misc_feature 1..80: note = Artificially Synthesized Probe
  source 1..80: mol_type = other DNA
tattcattgtctcctccatagagttcagggcgtttattcattgtctcctcttcgtatggtggatgcgtctttgtctgtcc

SEQ ID NO: 23469 - DNA, 80 bp, synthetic construct
  misc_feature 1..80: note = Artificially Synthesized Probe
  source 1..80: mol_type = other DNA
cgcactcttcagcacagttggtgttggctgaatatttttgactgaggctaaagggtcattttgggttttgtcagggtctc

SEQ ID NO: 23470 - DNA, 80 bp, synthetic construct
  misc_feature 1..80: note = Artificially Synthesized Probe
  source 1..80: mol_type = other DNA
gggtactgtccggtgtggggactgtctggtgtggggactgtctggtgtagggactgtctggtgtggggactgtctggtgt

SEQ ID NO: 23471 - DNA, 80 bp, synthetic construct
  misc_feature 1..80: note = Artificially Synthesized Probe
  source 1..80: mol_type = other DNA
tgttgtggtccaagcatgtctgtctgaccttaacttggatatgacagctttccctccaaggataacatcctttgtcatcc

SEQ ID NO: 23472 - DNA, 80 bp, synthetic construct
  misc_feature 1..80: note = Artificially Synthesized Probe
  source 1..80: mol_type = other DNA
atgtgaaagggctcccatccctcaaaccgaagttccgctcttttctcagcagtcgtgttaacagatgagacaatcgcagc

SEQ ID NO: 23473 - DNA, 80 bp, synthetic construct
  misc_feature 1..80: note = Artificially Synthesized Probe
  source 1..80: mol_type = other DNA
ggccttcccgggactcgctggcatctagctcacactcaaactggtgtcctcgaagcagggagggaaacacgaagtgtaga

SEQ ID NO: 23474 - DNA, 80 bp, synthetic construct
  misc_feature 1..80: note = Artificially Synthesized Probe
  source 1..80: mol_type = other DNA
ctgaaattcccttaagattccccttagcctgatgcaatcggagatggagcgggagggttgttacagaatggcgccttcca

SEQ ID NO: 23475 - DNA, 80 bp, synthetic construct
  misc_feature 1..80: note = Artificially Synthesized Probe
  source 1..80: mol_type = other DNA
tctcttctgggggtgacgtcggccggtctccttgcctttttgtcgccatggtgctcgttgtcgccacagttcacttacgt

SEQ ID NO: 23476 - DNA, 80 bp, synthetic construct
  misc_feature 1..80: note = Artificially Synthesized Probe
  source 1..80: mol_type = other DNA
tggcagatggatgctgcctttcaccctgttttgccctctgtttcaaagaaggcggaaacaccgttttctcattaaattta

SEQ ID NO: 23477 - DNA, 80 bp, synthetic construct
  misc_feature 1..80: note = Artificially Synthesized Probe
  source 1..80: mol_type = other DNA
acttaggtgagtttctagccaataacttttacgacaaatagaaatagggataatggcctggtgtcttttctgaggattct

SEQ ID NO: 23478 - DNA, 80 bp, synthetic construct
  misc_feature 1..80: note = Artificially Synthesized Probe
  source 1..80: mol_type = other DNA
ggttcacaaaaaatcatttaccaaatacctggtaacttccataatgagctcagacagacgccagcactcacactggcatc

SEQ ID NO: 23479 - DNA, 80 bp, synthetic construct
  misc_feature 1..80: note = Artificially Synthesized Probe
  source 1..80: mol_type = other DNA
agtttgaactcagctctccgactccagaagccgttctctaatccacgactctgtacttagcatttcttgtgtagatttgt

SEQ ID NO: 23480 - DNA, 80 bp, synthetic construct
  misc_feature 1..80: note = Artificially Synthesized Probe
  source 1..80: mol_type = other DNA
tcagtgctggtcacccctagacaccgctccccaccccgggcagagggtaactaaattttaaactaaacttagatacttta

SEQ ID NO: 23481 - DNA, 80 bp, synthetic construct
  misc_feature 1..80: note = Artificially Synthesized Probe
  source 1..80: mol_type = other DNA
acagcaaatgctgaggagggcgtggggcggccacgtggacatagagggcaaatgctgaggagggcgtgggccggctgcgt

SEQ ID NO: 23482 - DNA, 80 bp, synthetic construct
  misc_feature 1..80: note = Artificially Synthesized Probe
  source 1..80: mol_type = other DNA
agagaagccaacctgaaaaggctgcgcccggtgcgattccaaccacgtgacattctagaaaacaaaattatacagtaaca

SEQ ID NO: 23483 - DNA, 80 bp, synthetic construct
  misc_feature 1..80: note = Artificially Synthesized Probe
  source 1..80: mol_type = other DNA
ctgcagtaagctgcgatcgcaatactgcactccagcgcgggcaacagagcatgactctgtctcaaaaaaaaaaaaaatta

SEQ ID NO: 23484 - DNA, 80 bp, synthetic construct
  misc_feature 1..80: note = Artificially Synthesized Probe
  source 1..80: mol_type = other DNA
ctagcagcagcatttcgaagattggattgtcaggtaacttcctcgcccttttttgcatataggcataacttaaaatgggc

SEQ ID NO: 23485 - DNA, 80 bp, synthetic construct
  misc_feature 1..80: note = Artificially Synthesized Probe
  source 1..80: mol_type = other DNA
agatgctttcagcagcccttgagcatcttttctagtttgcaaattgtagtttttctcatcagtgttctccttcagctgaa

SEQ ID NO: 23486 - DNA, 80 bp, synthetic construct
  misc_feature 1..80: note = Artificially Synthesized Probe
  source 1..80: mol_type = other DNA
tgcagcctcaggtggttacattgagcacaacttctttgagttcttgtagaaaggctatttttttcttactggaactgaat

SEQ ID NO: 23487 - DNA, 80 bp, synthetic construct
  misc_feature 1..80: note = Artificially Synthesized Probe
  source 1..80: mol_type = other DNA
gacaatataaaaatctagtgtgattgtgtcaccgtctggatgaatctgaacatgtgcctggcagtgactttttttggggt

SEQ ID NO: 23488 - DNA, 80 bp, synthetic construct
  misc_feature 1..80: note = Artificially Synthesized Probe
  source 1..80: mol_type = other DNA
cccctctgtgtatttgtggtgacctaaaaatctgtttccttcaaaaggcactcctagaatgtatgactagtttaggagat

SEQ ID NO: 23489 - DNA, 80 bp, synthetic construct
  misc_feature 1..80: note = Artificially Synthesized Probe
  source 1..80: mol_type = other DNA
gagacctgtgactcgcctcctgcaaaatgtttcttatcaagcacttacttggaacagttattaaccatgctctttaataa

SEQ ID NO: 23490 - DNA, 80 bp, synthetic construct
  misc_feature 1..80: note = Artificially Synthesized Probe
  source 1..80: mol_type = other DNA
aaatatgataccaataataatgaagaggaagagggagaacagttcgattttgacagtggagatgaaatcccagaagcgga

SEQ ID NO: 23491 - DNA, 80 bp, synthetic construct
  misc_feature 1..80: note = Artificially Synthesized Probe
  source 1..80: mol_type = other DNA
cttcaggtgtagtaccagcctgtcagtttgcacagtgtttctctctgcttgcacggcatttctttgggtgcagcaccagc

SEQ ID NO: 23492 - DNA, 80 bp, synthetic construct
  misc_feature 1..80: note = Artificially Synthesized Probe
  source 1..80: mol_type = other DNA
cgtctaggggtcctggcatgggatgatggtgggagctcatacctgcttcccacttgcgctccaggagggcatgcctgcca

SEQ ID NO: 23493 - DNA, 80 bp, synthetic construct
  misc_feature 1..80: note = Artificially Synthesized Probe
  source 1..80: mol_type = other DNA
tcacgggagtgtgtgcagtttttggcctgtatgacttactgtgctagatgacagttaccgttatgtatgtcccgtgtcac

SEQ ID NO: 23494 - DNA, 80 bp, synthetic construct
  misc_feature 1..80: note = Artificially Synthesized Probe
  source 1..80: mol_type = other DNA
gaaaaatctcaattttggattttgggaaacacagaggtttcagaatagacggcctcctgtgcgttttcctgttgaagtcg

SEQ ID NO: 23495 - DNA, 80 bp, synthetic construct
  misc_feature 1..80: note = Artificially Synthesized Probe
  source 1..80: mol_type = other DNA
agcacgtcctgcctttgtccctctgcaaaacacaagtaaaagctttgtggctctttgggtgtttcttttcctttttttct

SEQ ID NO: 23496 - DNA, 80 bp, synthetic construct
  misc_feature 1..80: note = Artificially Synthesized Probe
  source 1..80: mol_type = other DNA
gctgcggtttgaaaacggttgagaactgttgctcattccaaagataaattccctttagaaagtgtttcatggacagctgc

SEQ ID NO: 23497 - DNA, 80 bp, synthetic construct
  misc_feature 1..80: note = Artificially Synthesized Probe
  source 1..80: mol_type = other DNA
agaaacaccagaagtcacagaagatcgccagcccaattctctgagttccgaggagcctccaaccaggtatctgcatccgt

SEQ ID NO: 23498 - DNA, 80 bp, synthetic construct
  misc_feature 1..80: note = Artificially Synthesized Probe
  source 1..80: mol_type = other DNA
gcatggggcatcccgcagcacccacagggccatcaccaggacacgggctctcttccctcatcctcaaggtcctgcaggta

SEQ ID NO: 23499 - DNA, 80 bp, synthetic construct
  misc_feature 1..80: note = Artificially Synthesized Probe
  source 1..80: mol_type = other DNA
ccgtgcgtaggccaaacatctggaatacttatttacagagttatgagtgaaagcttgaacttgggatgtcctataataat

SEQ ID NO: 23500 - DNA, 80 bp, synthetic construct
  misc_feature 1..80: note = Artificially Synthesized Probe
  source 1..80: mol_type = other DNA
cttatttatttgtaacttaaaaataagttctgtagcgtatttttccaaaacaatagcctgaagcaaatgtgcttgaaaag

SEQ ID NO: 23501 - DNA, 80 bp, synthetic construct
  misc_feature 1..80: note = Artificially Synthesized Probe
  source 1..80: mol_type = other DNA
ttggtctcattttctgtcttatgtggctgaggaagcggttgtctgtatgtttttgatgcagtcatatgtcatagtttgga

SEQ ID NO: 23502 - DNA, 80 bp, synthetic construct
  misc_feature 1..80: note = Artificially Synthesized Probe
  source 1..80: mol_type = other DNA
tacgatgacgttccaagggaaaactcagactctgaaccaggtttgattttgtctggaattgatttgaggagattcagctc

SEQ ID NO: 23503 - DNA, 80 bp, synthetic construct
  misc_feature 1..80: note = Artificially Synthesized Probe
  source 1..80: mol_type = other DNA
ttcatgccgtgtgttctgaagttctgaagtcggcatttttcagggggaggatcttgttaccgattttttttttttttttt

SEQ ID NO: 23504 - DNA, 80 bp, synthetic construct
  misc_feature 1..80: note = Artificially Synthesized Probe
  source 1..80: mol_type = other DNA
aaaatcagtaaaccataaaagattagaacagcaatgtagtatgattgacttgaaggtcatatacagatctttgaagcaag

SEQ ID NO: 23505 - DNA, 80 bp, synthetic construct
  misc_feature 1..80: note = Artificially Synthesized Probe
  source 1..80: mol_type = other DNA
gaactgagtatccagccagctgcacgaaagagcagcagagtcaaaggaagtggcaggaaaaaaataatgggcaaggcaaa

SEQ ID NO: 23506 - DNA, 80 bp, synthetic construct
  misc_feature 1..80: note = Artificially Synthesized Probe
  source 1..80: mol_type = other DNA
cttgctgagattcagtgaccatccaacattaaaaactgctgatagaaggaaactcacttagctgaattaaggacgtgttc

SEQ ID NO: 23507 - DNA, 80 bp, synthetic construct
  misc_feature 1..80: note = Artificially Synthesized Probe
  source 1..80: mol_type = other DNA
tatgggagaattccttactagatgttacagaggccacacagggccacttttttcttttttttttattgtgtcaggtatac

SEQ ID NO: 23508 - DNA, 80 bp, synthetic construct
  misc_feature 1..80: note = Artificially Synthesized Probe
  source 1..80: mol_type = other DNA
tgaggtgaaaaaggtaacatgtgtgaaaaccatgtctgtgtagacttgttttgtatggaccagaaaagttggaagtccag

SEQ ID NO: 23509 - DNA, 80 bp, synthetic construct
  misc_feature 1..80: note = Artificially Synthesized Probe
  source 1..80: mol_type = other DNA
ggctgctgttgacctgccagaacttttaatcagacatttggaggacctgttttgtagtcagtggagaaatattacaagga

SEQ ID NO: 23510 - DNA, 80 bp, synthetic construct
  misc_feature 1..80: note = Artificially Synthesized Probe
  source 1..80: mol_type = other DNA
ctgtaagtttatataaaggaagatttttcttcttgtgaagttctctaaggctgacaagttacctggcatgactgtggcgg

SEQ ID NO: 23511 - DNA, 80 bp, synthetic construct
  misc_feature 1..80: note = Artificially Synthesized Probe
  source 1..80: mol_type = other DNA
cctaagacacagcacatctgcactttgctttaagtgaggtttcaactttagcatgttcagcatgaaaaggaagacgtaaa

SEQ ID NO: 23512 - DNA, 80 bp, synthetic construct
  misc_feature 1..80: note = Artificially Synthesized Probe
  source 1..80: mol_type = other DNA
aggagaatctactagatcttggcagtcagctcacctacccagtttcattcacaagttcttccaggaattagatcttttct

SEQ ID NO: 23513 - DNA, 80 bp, synthetic construct
  misc_feature 1..80: note = Artificially Synthesized Probe
  source 1..80: mol_type = other DNA
tcagttagagagaaagtgatctcaggttggagacccttgaaaatccgtgctgccatccccaaaatatgtcactttcagta

SEQ ID NO: 23514 - DNA, 80 bp, synthetic construct
  misc_feature 1..80: note = Artificially Synthesized Probe
  source 1..80: mol_type = other DNA
atcctctcaatgtaaaattgtcccaaagaaccaaaaagagcctttttgtgaaaagactgtgtctctttatgctgtagctt

SEQ ID NO: 23515 - DNA, 80 bp, synthetic construct
  misc_feature 1..80: note = Artificially Synthesized Probe
  source 1..80: mol_type = other DNA
cacagacacggggagtgccctggctgaagcaggtgagggcactgtgggaagtgggaaaggaaggctggggaggcagccag

SEQ ID NO: 23516 - DNA, 80 bp, synthetic construct
  misc_feature 1..80: note = Artificially Synthesized Probe
  source 1..80: mol_type = other DNA
ctgcactgctggtccctttgagaggtccctgggatggggacatcggttgtcccataagagatcatcttttaaagacgaaa

SEQ ID NO: 23517 - DNA, 80 bp, synthetic construct
  misc_feature 1..80: note = Artificially Synthesized Probe
  source 1..80: mol_type = other DNA
attgagaatcattgagaatcactggctggacataggaagggctgtgcaggggcctctgtcactgtggattcttagtattg

SEQ ID NO: 23518 - DNA, 80 bp, synthetic construct
  misc_feature 1..80: note = Artificially Synthesized Probe
  source 1..80: mol_type = other DNA
aggggtttatttggtgatggagacgggcaggtgcattctaataaaatgtgcagtagtatcatgccctgatgaggtgccat

SEQ ID NO: 23519 - DNA, 80 bp, synthetic construct
  misc_feature 1..80: note = Artificially Synthesized Probe
  source 1..80: mol_type = other DNA
cttagatagatgtttctgtgcagccagggtttgggatctttgaactagaaaaactcaggtttctatcatctaaaagtgcc

SEQ ID NO: 23520 - DNA, 80 bp, synthetic construct
  misc_feature 1..80: note = Artificially Synthesized Probe
  source 1..80: mol_type = other DNA
ggctgttgaccagcagagctgtgctagtttttaaatatttgtgtgtttgatgctggttggtaaatatttgctgtctcaaa

SEQ ID NO: 23521 - DNA, 80 bp, synthetic construct
  misc_feature 1..80: note = Artificially Synthesized Probe
  source 1..80: mol_type = other DNA
acacagaaatgcttagtgactggccaggtttaaaaagagatgaaaagggatacctgcgagctgttcataattgaccaggc

SEQ ID NO: 23522 - DNA, 80 bp, synthetic construct
  misc_feature 1..80: note = Artificially Synthesized Probe
  source 1..80: mol_type = other DNA
ctgtgaggagacactgagtgcaatgtgaggggtctgtgaggagacagtgagtgggatgagggtttgtgagaagacgctag

SEQ ID NO: 23523 - DNA, 80 bp, synthetic construct
  misc_feature 1..80: note = Artificially Synthesized Probe
  source 1..80: mol_type = other DNA
tgaggtttgtgaggaaacacagagtgtggtaagggtcctgaggaaacactgagttgggtgagggtttgtgaggagacact

SEQ ID NO: 23524 - DNA, 80 bp, synthetic construct
  misc_feature 1..80: note = Artificially Synthesized Probe
  source 1..80: mol_type = other DNA
gagtggggtgaggggtttgtgaggagacactgagtgtgggtgaggggtctgtgaggagtcatggagtgtggtgtgagttg

SEQ ID NO: 23525 - DNA, 80 bp, synthetic construct
  misc_feature 1..80: note = Artificially Synthesized Probe
  source 1..80: mol_type = other DNA
ttctgaggagacactgatggggtgagggttgtgagcagatactgagtggggtgagagttgtgaggatacactgagttggg

SEQ ID NO: 23526 - DNA, 80 bp, synthetic construct
  misc_feature 1..80: note = Artificially Synthesized Probe
  source 1..80: mol_type = other DNA
gtggaaaaaggcaaatgttctttttgaaataaagaagggtcgttctttacttggaaagtacccttgatgctggaggacag

SEQ ID NO: 23527 - DNA, 80 bp, synthetic construct
  misc_feature 1..80: note = Artificially Synthesized Probe
  source 1..80: mol_type = other DNA
atacacaaatacatttttatgtttgacccccacaactgtgactcaggagccttgggagagtgtttgggaatctgaatttc

SEQ ID NO: 23528 - DNA, 80 bp, synthetic construct
  misc_feature 1..80: note = Artificially Synthesized Probe
  source 1..80: mol_type = other DNA
gcacctctaagtgacatgaataatttactgtccacattcttggcctcataggtagatctttggatggttgaaagatcttt

SEQ ID NO: 23529 - DNA, 80 bp, synthetic construct
  misc_feature 1..80: note = Artificially Synthesized Probe
  source 1..80: mol_type = other DNA
tgaatatttacattcatttatctaagctttaaaaatgtctgggccaggctcggtggctcacccctgtaatcctagcactt

SEQ ID NO: 23530 - DNA, 80 bp, synthetic construct
  misc_feature 1..80: note = Artificially Synthesized Probe
  source 1..80: mol_type = other DNA
agaaaacacgtgatgggaaaattcctagatgttttctcaaacttttgcccttggctgtagcttctgttgtgtagatacag

SEQ ID NO: 23531 - DNA, 80 bp, synthetic construct
  misc_feature 1..80: note = Artificially Synthesized Probe
  source 1..80: mol_type = other DNA
ttgcatgactttcttgcctggaggttgaacccaccaagtgagacttggcaggaacttaaaatcaccatccttatttgtct

SEQ ID NO: 23532 - DNA, 80 bp, synthetic construct
  misc_feature 1..80: note = Artificially Synthesized Probe
  source 1..80: mol_type = other DNA
atccccaaaaaagaagtcaagatcagatcccaaagttacctttccctcactgtccttcggtatggtattaggaatcaaat

SEQ ID NO: 23533 - DNA, 80 bp, synthetic construct
  misc_feature 1..80: note = Artificially Synthesized Probe
  source 1..80: mol_type = other DNA
cagttgtggcctctgtcctttggctagggaaccatctctttcttttggggaaagaaaacatggactcacttaagagctca

SEQ ID NO: 23534 - DNA, 80 bp, synthetic construct
  misc_feature 1..80: note = Artificially Synthesized Probe
  source 1..80: mol_type = other DNA
atcagtggcccacaggtcacagctcccttctccagtgtgtctgtgtctggtctaggatcacatgaaaaatgattctcgcc

SEQ ID NO: 23535 - DNA, 80 bp, synthetic construct
  misc_feature 1..80: note = Artificially Synthesized Probe
  source 1..80: mol_type = other DNA
gtgttttatttctttagctgacaaatatgtactgagttctaatacgtgcgagacgctgttggcttccggcaagcagccac

SEQ ID NO: 23536 - DNA, 80 bp, synthetic construct
  misc_feature 1..80: note = Artificially Synthesized Probe
  source 1..80: mol_type = other DNA
ttagggaagctgatgattctcccatggtgacacagcccgacagatgtgctgggattctaacacagttgtctagccacaaa

SEQ ID NO: 23537 - DNA, 80 bp, synthetic construct
  misc_feature 1..80: note = Artificially Synthesized Probe
  source 1..80: mol_type = other DNA
tctccgttgttgtgcaaagataagtaacaatttctgataataacagcagcgagaaacttcacttttctccttccctgagc

SEQ ID NO: 23538 - DNA, 80 bp, synthetic construct
  misc_feature 1..80: note = Artificially Synthesized Probe
  source 1..80: mol_type = other DNA
cattgcagaaccacatttaattctgagaaagagtgtttcaagttcacgtttgccccttcagcaaacgtcagcgtgtcgaa

SEQ ID NO: 23539 - DNA, 80 bp, synthetic construct
  misc_feature 1..80: note = Artificially Synthesized Probe
  source 1..80: mol_type = other DNA
aatgaaagaaagagagatgctgatcaacgctgtgaagtgaagcaaatagccaaagccataaacgaaagatacctgaacaa

SEQ ID NO: 23540 - DNA, 80 bp, synthetic construct
  misc_feature 1..80: note = Artificially Synthesized Probe
  source 1..80: mol_type = other DNA
gccctggctcacagggagatggtaatttgtatgaactgtgttaagttattgcatctaatattcattattgctaaaaatca

SEQ ID NO: 23541 - DNA, 80 bp, synthetic construct
  misc_feature 1..80: note = Artificially Synthesized Probe
  source 1..80: mol_type = other DNA
ctgatggttttgctttggctcagtgaagtaaaatatggcctacctttaagaagttaagatagtcatttaactatgcttaa

SEQ ID NO: 23542 - DNA, 80 bp, synthetic construct
  misc_feature 1..80: note = Artificially Synthesized Probe
  source 1..80: mol_type = other DNA
agaggtttatatactctttaaacagggctgatggcggaactagaaactcaattgaatttcttcataaccctcctaaatca

SEQ ID NO: 23543 - DNA, 80 bp, synthetic construct
  misc_feature 1..80: note = Artificially Synthesized Probe
  source 1..80: mol_type = other DNA
aggatgcttagaattgcgaggatgcagagtaaggtgtctccacccgtttccctggtgttatgaggtgcttcccatagtgt

SEQ ID NO: 23544 - DNA, 80 bp, synthetic construct
  misc_feature 1..80: note = Artificially Synthesized Probe
  source 1..80: mol_type = other DNA
aactcatgggcatttctgtttttctaaattggaggcacagtctaattcacggaacacaacccatctttcctcttactgtg

SEQ ID NO: 23545 - DNA, 80 bp, synthetic construct
  misc_feature 1..80: note = Artificially Synthesized Probe
  source 1..80: mol_type = other DNA
accgccagagaatatctctatccacataggagacttttcctggtaatcgagcacctttgctcagagtcatcagcaagcac

SEQ ID NO: 23546 - DNA, 80 bp, synthetic construct
  misc_feature 1..80: note = Artificially Synthesized Probe
  source 1..80: mol_type = other DNA
gctgggcagcgttgtgatgtctttactcagtttccccatggaggcagtgcttgtccatgaacttcccaaggtgaaaggag

SEQ ID NO: 23547 - DNA, 80 bp, synthetic construct
  misc_feature 1..80: note = Artificially Synthesized Probe
  source 1..80: mol_type = other DNA
gaggagccgagggagaggggacatggggacagagaaatcatttctgacatgattcattaacattttattcaagagcaaat

SEQ ID NO: 23548 - DNA, 80 bp, synthetic construct
  misc_feature 1..80: note = Artificially Synthesized Probe
  source 1..80: mol_type = other DNA
aggtacatccatgaaccacatctccatggggctgcctgtaatacctccctcagagttttcatcaaatggcttcaaattca

SEQ ID NO: 23549 - DNA, 80 bp, synthetic construct
  misc_feature 1..80: note = Artificially Synthesized Probe
  source 1..80: mol_type = other DNA
tagggagctccccatccctgcaaaagcaccgtgtggattgtgggtttgctgtccgatgttagattcagcagggagctccc

SEQ ID NO: 23550 - DNA, 80 bp, synthetic construct
  misc_feature 1..80: note = Artificially Synthesized Probe
  source 1..80: mol_type = other DNA
ggtcaccttttaacggaacaggattggcctctgatgtttctggctttgcttgttattggaccagcatctacctggtccaa

SEQ ID NO: 23551 - DNA, 80 bp, synthetic construct
  misc_feature 1..80: note = Artificially Synthesized Probe
  source 1..80: mol_type = other DNA
aatatacacctgactgatcctcctgaagtagaaggcagcaggagaagcggagctgtatttttaaaacgtgaaacggttcc

SEQ ID NO: 23552 - DNA, 80 bp, synthetic construct
  misc_feature 1..80: note = Artificially Synthesized Probe
  source 1..80: mol_type = other DNA
aagtgaatggagcaaaacagtcacatcacagattctgggcagtgggtaaaaatgtgtccatgagttattctacttttcta

SEQ ID NO: 23553 - DNA, 80 bp, synthetic construct
  misc_feature 1..80: note = Artificially Synthesized Probe
  source 1..80: mol_type = other DNA
gtggacggggtcctatctctgtgggaatcacacacgtgtgtcctactacacatggacacatacaagttaggtgttgagca

SEQ ID NO: 23554 - DNA, 80 bp, synthetic construct
  misc_feature 1..80: note = Artificially Synthesized Probe
  source 1..80: mol_type = other DNA
actacgaacagtgacgtggagacatccttacacattagtctgataatttccttagaagtggaattttcaggtcaaagagt

SEQ ID NO: 23555 - DNA, 80 bp, synthetic construct
  misc_feature 1..80: note = Artificially Synthesized Probe
  source 1..80: mol_type = other DNA
aactctagaaactgtcagctagagggctggaagtcaactctaacaaaaattctgatttgcaggtgtttctttctttttct

SEQ ID NO: 23556 - DNA, 80 bp, synthetic construct
  misc_feature 1..80: note = Artificially Synthesized Probe
  source 1..80: mol_type = other DNA
gctaagtagcttatgccttccttcacacacttaccatttgttcatggtgagaaccttaaagtctactcttagtgattttc

SEQ ID NO: 23557 - DNA, 80 bp, synthetic construct
  misc_feature 1..80: note = Artificially Synthesized Probe
  source 1..80: mol_type = other DNA
ttgttttatgggtaatggagctgttctgtcagtgatggagctgttctgtgggtaataaactgttctgtcaagtgatgaag

SEQ ID NO: 23558 - DNA, 80 bp, synthetic construct
  misc_feature 1..80: note = Artificially Synthesized Probe
  source 1..80: mol_type = other DNA
tttatagagtttatcatcaaagtttgcgaatgaaagcaaatatgtgtgttatgaaacattttaaattataagcattctgt

SEQ ID NO: 23559 - DNA, 80 bp, synthetic construct
  misc_feature 1..80: note = Artificially Synthesized Probe
  source 1..80: mol_type = other DNA
agcctgtcctgctgaaacacaaggcactttactcaacttaaatgaatttcttctccttgggtttgaattttggctccttc

SEQ ID NO: 23560 - DNA, 80 bp, synthetic construct
  misc_feature 1..80: note = Artificially Synthesized Probe
  source 1..80: mol_type = other DNA
tccctgggctgaatccgggactaggaaatgacattcatgtgaaagcggtgaggtttgaagacggtctgtaggtcagtcag

SEQ ID NO: 23561 - DNA, 80 bp, synthetic construct
  misc_feature 1..80: note = Artificially Synthesized Probe
  source 1..80: mol_type = other DNA
agcacgttttataaaatgaatgcttgtctgttgtttctggcagatctgggcgaccgacgttctttacagctgtgttcaat

SEQ ID NO: 23562 - DNA, 80 bp, synthetic construct
  misc_feature 1..80: note = Artificially Synthesized Probe
  source 1..80: mol_type = other DNA
ggttactaaagatcctcccagcaccaaagatcaaccctgtggttttactgtagatggatgtgactttatgatttccttgt

SEQ ID NO: 23563 - DNA, 80 bp, synthetic construct
  misc_feature 1..80: note = Artificially Synthesized Probe
  source 1..80: mol_type = other DNA
ccctgtacaaacagaatgccagaaacttcccctgctatgacctgtggagctgcaggtctttgcatgtgagttaactgcat

SEQ ID NO: 23564 - DNA, 80 bp, synthetic construct
  misc_feature 1..80: note = Artificially Synthesized Probe
  source 1..80: mol_type = other DNA
ttttagattgaatgtgctgcttataaccctgaaccttacctaaataatgaaagccagccagattcattttccacggcaca

SEQ ID NO: 23565 - DNA, 80 bp, synthetic construct
  misc_feature 1..80: note = Artificially Synthesized Probe
  source 1..80: mol_type = other DNA
ctcctgcttggtcagtgttcctagttgagtgtcagaaattgaacaacccaattagctggtatttcatttgtaccaaccta

SEQ ID NO: 23566 - DNA, 80 bp, synthetic construct
  misc_feature 1..80: note = Artificially Synthesized Probe
  source 1..80: mol_type = other DNA
tgggcccttaccttcatattgtgatgagtacgtgatttttaaagtatagaaatgtgactttgtagaaatgaaagttacgc

SEQ ID NO: 23567 - DNA, 80 bp, synthetic construct
  misc_feature 1..80: note = Artificially Synthesized Probe
  source 1..80: mol_type = other DNA
actcttaaagagaagtggtatttctttaaaggggacagtttggctgtttgccactgaaatgtctcatttatattaatggt

SEQ ID NO: 23568 - DNA, 80 bp, synthetic construct
  misc_feature 1..80: note = Artificially Synthesized Probe
  source 1..80: mol_type = other DNA
cctctttgccccggtgctgtgccctcggtcccgtgccctcggtccctgctgttctcttggccacagggctaaggactcca

SEQ ID NO: 23569 - DNA, 80 bp, synthetic construct
  misc_feature 1..80: note = Artificially Synthesized Probe
  source 1..80: mol_type = other DNA
tcagttctccatggacggttttgtgtcttcggggttgggctctcccattccagtcctgctttgtcattcacctgttgtca

SEQ ID NO: 23570 - DNA, 80 bp, synthetic construct
  misc_feature 1..80: note = Artificially Synthesized Probe
  source 1..80: mol_type = other DNA
accttaaccgagggaaacgtctgaagtaggccatcgtgtcattgatctttgagttctcgtttcaaaggaatggtgctatt

SEQ ID NO: 23571 - DNA, 80 bp, synthetic construct
  misc_feature 1..80: note = Artificially Synthesized Probe
  source 1..80: mol_type = other DNA
gaacaaagagataagaactgaggccgtgttctcctgagtgaagtgtgtttatttgattaggaagtcgacggcattgatgg

SEQ ID NO: 23572 - DNA, 80 bp, synthetic construct
  misc_feature 1..80: note = Artificially Synthesized Probe
  source 1..80: mol_type = other DNA
ttgaatgaaatgaaatattttcttttaagatggatcctgggattcagaacctcaaaaagtgatcaagttaggcgtcctac

SEQ ID NO: 23573 - DNA, 80 bp, synthetic construct
  misc_feature 1..80: note = Artificially Synthesized Probe
  source 1..80: mol_type = other DNA
aacctctaagataaaaagcagtagaacagttttattactttgcaatggagaaagcctctccaagcatgccacaaacccag

SEQ ID NO: 23574 - DNA, 80 bp, synthetic construct
  misc_feature 1..80: note = Artificially Synthesized Probe
  source 1..80: mol_type = other DNA
tgcacgcacatctaagggtatccattgcaaccttgttggtatcacaaacacttgggagtgtcctaaatgcatgtgcatgg

SEQ ID NO: 23575 - DNA, 80 bp, synthetic construct
  misc_feature 1..80: note = Artificially Synthesized Probe
  source 1..80: mol_type = other DNA
tcattaagagcttctaaaaatacttctctagaccatcgttaggagggatgtatcagttccccaggttaggaactttaaga

SEQ ID NO: 23576 - DNA, 80 bp, synthetic construct
  misc_feature 1..80: note = Artificially Synthesized Probe
  source 1..80: mol_type = other DNA
ctaaatacatttttagaaagaagcaaaaatctgctctctgaaaacatgatattcatcctgtcgttcccgttgtgcagggg

SEQ ID NO: 23577 - DNA, 80 bp, synthetic construct
  misc_feature 1..80: note = Artificially Synthesized Probe
  source 1..80: mol_type = other DNA
ctgtttaaatctcatagtgttaggaacacgatgcagtgctaagggatctgacgtctgacgtttaggaaaagggtgaatca

SEQ ID NO: 23578 - DNA, 80 bp, synthetic construct
  misc_feature 1..80: note = Artificially Synthesized Probe
  source 1..80: mol_type = other DNA
ctgtggaatccatagcctgctttctttcagacaccttcagaatcacacaatttcaaggcaaacggagacttagagatcct

SEQ ID NO: 23579 - DNA, 80 bp, synthetic construct
  misc_feature 1..80: note = Artificially Synthesized Probe
  source 1..80: mol_type = other DNA
attctgaactagctaaagaaaccagctatgatggagacttgtgtgtgaaacaggcagcaggtggccaacaaattagataa

SEQ ID NO: 23580 - DNA, 80 bp, synthetic construct
  misc_feature 1..80: note = Artificially Synthesized Probe
  source 1..80: mol_type = other DNA
agggaaaaagagtggaggactcagatgaaaggaagaagtaaagttgcatttgcatatgatatcctcttgtatgtagaata

SEQ ID NO: 23581 - DNA, 80 bp, synthetic construct
  misc_feature 1..80: note = Artificially Synthesized Probe
  source 1..80: mol_type = other DNA
actagacagtggtttcttagatctgacacctcaagcacaagcaaccaatgtggaaaaataagatacactgggcttcatta

SEQ ID NO: 23582 - DNA, 80 bp, synthetic construct
  misc_feature 1..80: note = Artificially Synthesized Probe
  source 1..80: mol_type = other DNA
gagtggttaaagttggcaacttcccgaatatactaaaaagcacagaattgcgccctatagaagggtgaacttcatgatat

SEQ ID NO: 23583 - DNA, 80 bp, synthetic construct
  misc_feature 1..80: note = Artificially Synthesized Probe
  source 1..80: mol_type = other DNA
tgatgcagactcctttgcaattgtgagcaccagttccttctcattgacaaatatttaaattcaacttgtgattattgaag

SEQ ID NO: 23584 - DNA, 80 bp, synthetic construct
  misc_feature 1..80: note = Artificially Synthesized Probe
  source 1..80: mol_type = other DNA
ctcagattgtgggacaactcgtagggccaagatgtcagtctggttatttcctgtgggtttttatgagtttcatcacttta

SEQ ID NO: 23585 - DNA, 80 bp, synthetic construct
  misc_feature 1..80: note = Artificially Synthesized Probe
  source 1..80: mol_type = other DNA
cgtgtccggcgtcgggatctggattgccttcacctcagggtccacgctccgcctttttcacacggaaactctcaagcacc

SEQ ID NO: 23586 - DNA, 80 bp, synthetic construct
  misc_feature 1..80: note = Artificially Synthesized Probe
  source 1..80: mol_type = other DNA
cagtccatgacgggccatttatgatacgttgaaaaaaaccacaatgattaggggtctggttctagaacgggtgtgaggcc

SEQ ID NO: 23587 - DNA, 80 bp, synthetic construct
  misc_feature 1..80: note = Artificially Synthesized Probe
  source 1..80: mol_type = other DNA
gggcgaagcagcccacggttaccctggtttcagagttccgagagcagccacggaaatgcagcggccctgcaggatccttg

SEQ ID NO: 23588 - DNA, 80 bp, synthetic construct
  misc_feature 1..80: note = Artificially Synthesized Probe
  source 1..80: mol_type = other DNA
gtctttacttattcctacacgacatagtcaggtctgcattttagacccgcatgaaagcaaacacatgagtctgtccagat

SEQ ID NO: 23589 - DNA, 80 bp, synthetic construct
  misc_feature 1..80: note = Artificially Synthesized Probe
  source 1..80: mol_type = other DNA
tgaatctgtagctaaggccctggcttttctccttctatttggaattcacttctgaaaaccatttagctcacgttctttca

SEQ ID NO: 23590 - DNA, 80 bp, synthetic construct
  misc_feature 1..80: note = Artificially Synthesized Probe
  source 1..80: mol_type = other DNA
gtaaaattaaagatgttgattggcagactgcttggaaaatgcaatggaaaaccactctctggaacttaactcttttacgt

SEQ ID NO: 23591 - DNA, 80 bp, synthetic construct
  misc_feature 1..80: note = Artificially Synthesized Probe
  source 1..80: mol_type = other DNA
ctgaactcatatgcacaccggttttctctctcataagacaatcatgtttcatgcttaaaatacttactgttgagtcaaac

SEQ ID NO: 23592 - DNA, 80 bp, synthetic construct
  misc_feature 1..80: note = Artificially Synthesized Probe
  source 1..80: mol_type = other DNA
taggccatgcgtctcccacattgttttgcagccactttctagccttgtcactgccggagcaaattgtttagtttctctgg

SEQ ID NO: 23593 - DNA, 80 bp, synthetic construct
  misc_feature 1..80: note = Artificially Synthesized Probe
  source 1..80: mol_type = other DNA
tggctgcatcctgtcttgcaggctcgtggagcatagcagtgtgtagtgtgatttaacatcctaggattctttaaacaatt

SEQ ID NO: 23594 - DNA, 80 bp, synthetic construct
  misc_feature 1..80: note = Artificially Synthesized Probe
  source 1..80: mol_type = other DNA
actcctcgtcctgttaagttcagtaaaccacagccttagattctatgtgggttactatgtcagccagggggaaatactaa

SEQ ID NO: 23595 - DNA, 80 bp, synthetic construct
  misc_feature 1..80: note = Artificially Synthesized Probe
  source 1..80: mol_type = other DNA
cctcctctgtagttgtaccaatttgtatcttaaagggtacttttcacctttccggcttttgcattttcctagctgtccca

SEQ ID NO: 23596 - DNA, 80 bp, synthetic construct
  misc_feature 1..80: note = Artificially Synthesized Probe
  source 1..80: mol_type = other DNA
aggacgtgcactcactgtgtttctttggatggtagctaggtgctacccatttgcattacacatcaagcctctgtatattt

SEQ ID NO: 23597 - DNA, 80 bp, synthetic construct
  misc_feature 1..80: note = Artificially Synthesized Probe
  source 1..80: mol_type = other DNA
tcatgtatgcaagttacttacaggctttgttatttgggcagggaggaatgcgttggggttaagccctgcactttttgctt

SEQ ID NO: 23598 - DNA, 80 bp, synthetic construct
  misc_feature 1..80: note = Artificially Synthesized Probe
  source 1..80: mol_type = other DNA
aagccaggtaacacctaccagtccagttagcatgatttgctttcagaagtgagctgggttttccaaagtggtataatgtg

SEQ ID NO: 23599 - DNA, 80 bp, synthetic construct
  misc_feature 1..80: note = Artificially Synthesized Probe
  source 1..80: mol_type = other DNA
tatgttctaggttgcatatatcccccatgtgaaagtgatttcttcccaagcttctcaaactgttagctgctgtctgactt

SEQ ID NO: 23600 - DNA, 80 bp, synthetic construct
  misc_feature 1..80: note = Artificially Synthesized Probe
  source 1..80: mol_type = other DNA
ggcttgacttcttcttctcctcgttttcctctttctccatccccctccttcctcatctccttattttttttgtttatttg

SEQ ID NO: 23601 - DNA, 80 bp, synthetic construct
  misc_feature 1..80: note = Artificially Synthesized Probe
  source 1..80: mol_type = other DNA
cgggcgggacgtcatctttgaaataaaaaagagtacgattcataggggaaatgtacacaaagagactgtgagttgagaaa

SEQ ID NO: 23602 - DNA, 80 bp, synthetic construct
  misc_feature 1..80: note = Artificially Synthesized Probe
  source 1..80: mol_type = other DNA
ttttcactcttccttcgggttagcctcctctcaagtgccttcaggacttgttcaatacagtcagtaattgggcttttaga

SEQ ID NO: 23603 - DNA, 80 bp, synthetic construct
  misc_feature 1..80: note = Artificially Synthesized Probe
  source 1..80: mol_type = other DNA
gccaccgagcccggtcattgcttaacgttttaaatcctcatcttccattttcctgggctcctaaatggcctggatacact

SEQ ID NO: 23604 - DNA, 80 bp, synthetic construct
  misc_feature 1..80: note = Artificially Synthesized Probe
  source 1..80: mol_type = other DNA
ttatccattgtcttattgatggacacatggagtgtttgcagttgggggctattactgaacagaagcattaggaacatctg

SEQ ID NO: 23605 - DNA, 80 bp, synthetic construct
  misc_feature 1..80: note = Artificially Synthesized Probe
  source 1..80: mol_type = other DNA
gaatgacttaagctgaagtaactggttcctttttttaaatgttgtgccatcatttcacccgatgagcatttcttggagcc

SEQ ID NO: 23606 - DNA, 80 bp, synthetic construct
  misc_feature 1..80: note = Artificially Synthesized Probe
  source 1..80: mol_type = other DNA
ctgatctaaactcaatatggattctgactgtgtttgagtaaaggttaaacctgttggcagttactgcttttcacaaagtg

SEQ ID NO: 23607 - DNA, 80 bp, synthetic construct
  misc_feature 1..80: note = Artificially Synthesized Probe
  source 1..80: mol_type = other DNA
aaatattcgatacctgcattgtccaacatgtagccactgaatggctactgagcgcttgaaatagcactagccacatatgg

SEQ ID NO: 23608 - DNA, 80 bp, synthetic construct
  misc_feature 1..80: note = Artificially Synthesized Probe
  source 1..80: mol_type = other DNA
cttggctattcttgaacttctatatttccacataaactttaggataactttataaattctaccaaaaaaaaccctgctgg

SEQ ID NO: 23609 - DNA, 80 bp, synthetic construct
  misc_feature 1..80: note = Artificially Synthesized Probe
  source 1..80: mol_type = other DNA
gttgtttgatgctggcatattgacataataattaaaattttgtatttatacttgcatacagcaaccctgcttaattaact

SEQ ID NO: 23610 - DNA, 80 bp, synthetic construct
  misc_feature 1..80: note = Artificially Synthesized Probe
  source 1..80: mol_type = other DNA
cattccaaatctactcttctagttattttgaaaggtacaataaattatacttaattatactcaccctattgtgctaccaa

SEQ ID NO: 23611 - DNA, 80 bp, synthetic construct
  misc_feature 1..80: note = Artificially Synthesized Probe
  source 1..80: mol_type = other DNA
agaagcccagccagcttcacctctcacaaggtcttatttcttctattctaattgtattttgttttgttttgatttttgag

SEQ ID NO: 23612 - DNA, 80 bp, synthetic construct
  misc_feature 1..80: note = Artificially Synthesized Probe
  source 1..80: mol_type = other DNA
agccaccatgcctggcccatataccacgttttttaaatccattcatttgttgatggacagttaggttgatttcatatctt

SEQ ID NO: 23613 - DNA, 80 bp, synthetic construct
  misc_feature 1..80: note = Artificially Synthesized Probe
  source 1..80: mol_type = other DNA
tgaggtcttactcaagaaatctttgccaggaccaacatcctcaagcatttccacaatgttttcttctagtggtttcatag

SEQ ID NO: 23614 - DNA, 80 bp, synthetic construct
  misc_feature 1..80: note = Artificially Synthesized Probe
  source 1..80: mol_type = other DNA
gtgacctcttcaatttcttgaatcaatgttttatagttttcattgtagagatctttcacttctttggtcgtttatgccta

SEQ ID NO: 23615 - DNA, 80 bp, synthetic construct
  misc_feature 1..80: note = Artificially Synthesized Probe
  source 1..80: mol_type = other DNA
aagctaaggaggggccgagggcagcttggcattggcctgcaggtgtcccttggcatgataacctgggtgcgatggacagc

SEQ ID NO: 23616 - DNA, 80 bp, synthetic construct
  misc_feature 1..80: note = Artificially Synthesized Probe
  source 1..80: mol_type = other DNA
caccccgaggatcctgcaacagtactaggttgaataaaagtggtgaaagcagtcatccttgtcttgttccagatgttaga

SEQ ID NO: 23617 - DNA, 80 bp, synthetic construct
  misc_feature 1..80: note = Artificially Synthesized Probe
  source 1..80: mol_type = other DNA
taatatgggtctacgggtgacaaatttttctcaggtattatttgtctgaaattgtctttatttccaccttcatttacgaa

SEQ ID NO: 23618 - DNA, 80 bp, synthetic construct
  misc_feature 1..80: note = Artificially Synthesized Probe
  source 1..80: mol_type = other DNA
gagtttatctgatgttttcccacctgcccttgttaattttgatcactccattgagatatttccattctttacccttataa

SEQ ID NO: 23619 - DNA, 80 bp, synthetic construct
  misc_feature 1..80: note = Artificially Synthesized Probe
  source 1..80: mol_type = other DNA
cagtctgcttgttgctgaaagctttactagttcgacttgcaaatccaacagcatggttgagacagtctgctagagaggct

SEQ ID NO: 23620 - DNA, 80 bp, synthetic construct
  misc_feature 1..80: note = Artificially Synthesized Probe
  source 1..80: mol_type = other DNA
ttctgccaacatatacagcaatcttattgctacttcaacttccatgaaccgtgtagtctgccaattctgcagtgtagaac

SEQ ID NO: 23621 - DNA, 80 bp, synthetic construct
  misc_feature 1..80: note = Artificially Synthesized Probe
  source 1..80: mol_type = other DNA
gaggattcgcaggtacagatctactccccttggatttaggtccactactgagagaatgtcaaaaaaaaaacttgggccac

SEQ ID NO: 23622 - DNA, 80 bp, synthetic construct
  misc_feature 1..80: note = Artificially Synthesized Probe
  source 1..80: mol_type = other DNA
ataggggttagagctgtctttccatagagatacccagtttttttcacacatctgttaaacaggcattcctttgcctcact

SEQ ID NO: 23623 - DNA, 80 bp, synthetic construct
  misc_feature 1..80: note = Artificially Synthesized Probe
  source 1..80: mol_type = other DNA
aaaaagaaagcctggggatatttaccaggacccttcctccttttcaggtaccttactacaatttatgtctcatcagccct

SEQ ID NO: 23624 - DNA, 80 bp, synthetic construct
  misc_feature 1..80: note = Artificially Synthesized Probe
  source 1..80: mol_type = other DNA
accacttcttcaccactcccttctaaaaaggagagattgggaaaaatatagccttgttcattacttttatccagtcccac

SEQ ID NO: 23625 - DNA, 80 bp, synthetic construct
  misc_feature 1..80: note = Artificially Synthesized Probe
  source 1..80: mol_type = other DNA
atatggaaagaggtgatccaagtgatcctcttgaggaaggagagaatcaaggagtaaaaactaacttttgtggatgcttg

SEQ ID NO: 23626 - DNA, 80 bp, synthetic construct
  misc_feature 1..80: note = Artificially Synthesized Probe
  source 1..80: mol_type = other DNA
tacttcagagatggtttatgtgccatctacacgtgtagaactgacatacccataaaaggaacagataataaaaagactag

SEQ ID NO: 23627 - DNA, 80 bp, synthetic construct
  misc_feature 1..80: note = Artificially Synthesized Probe
  source 1..80: mol_type = other DNA
tgaggaggtcttcaagcagaatgtgggacttgaagaatttgtggaatataaaaagaggatgttgaaagggaaacaaatgg

SEQ ID NO: 23628 - DNA, 80 bp, synthetic construct
  misc_feature 1..80: note = Artificially Synthesized Probe
  source 1..80: mol_type = other DNA
attttagaaaaagaaaactggaaccatacagactaagaaggtgtgtgtgagcctaattctggcagtgaaggtctctaggg

SEQ ID NO: 23629 - DNA, 80 bp, synthetic construct
  misc_feature 1..80: note = Artificially Synthesized Probe
  source 1..80: mol_type = other DNA
ctctccctctccccacggtctccctctcatgcggagctgaagctggactgtactgctgccatctcggctcactgcaacct

SEQ ID NO: 23630 - DNA, 80 bp, synthetic construct
  misc_feature 1..80: note = Artificially Synthesized Probe
  source 1..80: mol_type = other DNA
tttcattttgttctgcactaagaaaaattcttctgccttgggatcctgttgatctgtgaccttacccccaaccctgtgct

SEQ ID NO: 23631 - DNA, 80 bp, synthetic construct
  misc_feature 1..80: note = Artificially Synthesized Probe
  source 1..80: mol_type = other DNA
cttgtctcaaccttctttctagattggatcctgcatgttttttttatcattatacttttggcagccctaccactaggctt

SEQ ID NO: 23632 - DNA, 80 bp, synthetic construct
  misc_feature 1..80: note = Artificially Synthesized Probe
  source 1..80: mol_type = other DNA
atttttaatgggttcttgttggcatatacaaaaaccactgattttaaaatacttatgtaataactagatgtgcacctact

SEQ ID NO: 23633 - DNA, 80 bp, synthetic construct
  misc_feature 1..80: note = Artificially Synthesized Probe
  source 1..80: mol_type = other DNA
aacttcctcagtctgataaagctcatctacaaaaaatctacagctaacttacatacttaatttttttttatgttttatag

SEQ ID NO: 23634 - DNA, 80 bp, synthetic construct
  misc_feature 1..80: note = Artificially Synthesized Probe
  source 1..80: mol_type = other DNA
accatattcgtggatcagaggactcaatattgttctgatgtcagttctccccaggtttatcaatagattcaacacaactc

SEQ ID NO: 23635 - DNA, 80 bp, synthetic construct
  misc_feature 1..80: note = Artificially Synthesized Probe
  source 1..80: mol_type = other DNA
aaagtcttcacttcctttctaaatacaaatgctagaatgtcggaatcacacgtggatgttttgaaaagcgtgctgagcct

SEQ ID NO: 23636 - DNA, 80 bp, synthetic construct
  misc_feature 1..80: note = Artificially Synthesized Probe
  source 1..80: mol_type = other DNA
tgaaataagctcatacagatggaaataagctcattagggaaatacaaattatcactgcaatgagatactactatgtacct

SEQ ID NO: 23637 - DNA, 80 bp, synthetic construct
  misc_feature 1..80: note = Artificially Synthesized Probe
  source 1..80: mol_type = other DNA
gtccaatttatctcatacagcatagaccactgtcaataaatccccaagcagcaagatgagacaaacctgcagtattgacc

SEQ ID NO: 23638 - DNA, 80 bp, synthetic construct
  misc_feature 1..80: note = Artificially Synthesized Probe
  source 1..80: mol_type = other DNA
tttattccatctctcaatggtaccaccagtctgaagataatgaattggctaccaaatactttgactataagcccattgtt

SEQ ID NO: 23639 - DNA, 80 bp, synthetic construct
  misc_feature 1..80: note = Artificially Synthesized Probe
  source 1..80: mol_type = other DNA
tgaagtgcctttaatctgccagtctgtaatcttctaagtagcagacaagaccactagtgcctaagaatcagtaaaaatat

SEQ ID NO: 23640 - DNA, 80 bp, synthetic construct
  misc_feature 1..80: note = Artificially Synthesized Probe
  source 1..80: mol_type = other DNA
aagaagaatctgcttcactgaaggcaatgagactaacaaaagttcacgaaggttctatatgggatatggagaaacttcta

SEQ ID NO: 23641 - DNA, 80 bp, synthetic construct
  misc_feature 1..80: note = Artificially Synthesized Probe
  source 1..80: mol_type = other DNA
aagaaagaaaaggctaaacctgactatgatattgaatttactgctagctctaggtggtttaaatgattcaagaatcatgg

SEQ ID NO: 23642 - DNA, 80 bp, synthetic construct
  misc_feature 1..80: note = Artificially Synthesized Probe
  source 1..80: mol_type = other DNA
ctttgtagtaagttttgaaatcaagaagtgtgagtcctccagctttattctttttcaagattattttggctatttggggt

SEQ ID NO: 23643 - DNA, 80 bp, synthetic construct
  misc_feature 1..80: note = Artificially Synthesized Probe
  source 1..80: mol_type = other DNA
tctgcttgatggtgtcccacatgtcccttaggcagtgtttacttttctccaatcttatttatgttcctcagactcagtaa

SEQ ID NO: 23644 - DNA, 80 bp, synthetic construct
  misc_feature 1..80: note = Artificially Synthesized Probe
  source 1..80: mol_type = other DNA
catcttcccagaatactttcctggctaattatttctaagggaataatttaagcccccaaagacacctgggccaagtcttt

SEQ ID NO: 23645 - DNA, 80 bp, synthetic construct
  misc_feature 1..80: note = Artificially Synthesized Probe
  source 1..80: mol_type = other DNA
aactttaaagcattctattttggaagcaaggattgcagtttgaggcatacacactaaccaggtggtcttcagtgtgtctg

SEQ ID NO: 23646 - DNA, 80 bp, synthetic construct
  misc_feature 1..80: note = Artificially Synthesized Probe
  source 1..80: mol_type = other DNA
caattctaaagaattgggagaaatatgggaagaacagaccacaagacttctggcaaccagaatgagtatgaaggcatgac

SEQ ID NO: 23647 - DNA, 80 bp, synthetic construct
  misc_feature 1..80: note = Artificially Synthesized Probe
  source 1..80: mol_type = other DNA
tccatattcacacattttaatgcccattaaaggaagctcaggttaatgttttcaattgtaggtgagttcgctctgcttca

SEQ ID NO: 23648 - DNA, 80 bp, synthetic construct
  misc_feature 1..80: note = Artificially Synthesized Probe
  source 1..80: mol_type = other DNA
tgattactgagaaggagaaaaggcagagaagtgatttctggagagcataaacaaaaccaatatagtacccactaaggtct

SEQ ID NO: 23649 - DNA, 80 bp, synthetic construct
  misc_feature 1..80: note = Artificially Synthesized Probe
  source 1..80: mol_type = other DNA
tacatatgtaacacataccagatagtctcgatggataaatttgctccaccagtaattctatttagtagaattcacagtta

SEQ ID NO: 23650 - DNA, 80 bp, synthetic construct
  misc_feature 1..80: note = Artificially Synthesized Probe
  source 1..80: mol_type = other DNA
atatgcgtaatattctaccacacaatgtgccatcacttgtttaatcattttccaattgttcatttgtaacatttgcaatt

SEQ ID NO: 23651 - DNA, 80 bp, synthetic construct
  misc_feature 1..80: note = Artificially Synthesized Probe
  source 1..80: mol_type = other DNA
catgacagtctccctgtttatttgactttggcaattaaaaaaacaagcaaccttgtacaaaacagtgaaaatgccaagga

SEQ ID NO: 23652 - DNA, 80 bp, synthetic construct
  misc_feature 1..80: note = Artificially Synthesized Probe
  source 1..80: mol_type = other DNA
agtactctgttggtaatgaacagactccacaataaaggactcgaagtgggtaattggcatctaacttggcactgttcctt

SEQ ID NO: 23653 - DNA, 80 bp, synthetic construct
  misc_feature 1..80: note = Artificially Synthesized Probe
  source 1..80: mol_type = other DNA
ggcatgagtcactgtaccctgctgatgctttttcttatatgacttttttttttgagacatggtctcattctgttccccaa

SEQ ID NO: 23654 - DNA, 80 bp, synthetic construct
  misc_feature 1..80: note = Artificially Synthesized Probe
  source 1..80: mol_type = other DNA
cattgtctattttcagaggtcagatttattctcagagggcaaatcctcaccataaaagaaatattcaggtcaggcacgat

SEQ ID NO: 23655 - DNA, 80 bp, synthetic construct
  misc_feature 1..80: note = Artificially Synthesized Probe
  source 1..80: mol_type = other DNA
actgctgaaactttactgagtgtaatgtaatgtttcccctaatccgcaaacttcttcataaccactgtgtcatatgatca

SEQ ID NO: 23656 - DNA, 80 bp, synthetic construct
  misc_feature 1..80: note = Artificially Synthesized Probe
  source 1..80: mol_type = other DNA
gcaggctgtcagagttgtgcctcatgaacacctagtatggtcagcagctgacactgttcactgtcttcaagaagactact

SEQ ID NO: 23657 - DNA, 80 bp, synthetic construct
  misc_feature 1..80: note = Artificially Synthesized Probe
  source 1..80: mol_type = other DNA
tgtaccctactcagggatgatctcaacactgttgtctcttatattccctcaagcagagatcttgcacattagcatacatg

SEQ ID NO: 23658 - DNA, 80 bp, synthetic construct
  misc_feature 1..80: note = Artificially Synthesized Probe
  source 1..80: mol_type = other DNA
accttgtgagattagagagatgatggctgtctatgaagaaataggccctcactagatatcgaatctgcctgcaccttgat

SEQ ID NO: 23659 - DNA, 80 bp, synthetic construct
  misc_feature 1..80: note = Artificially Synthesized Probe
  source 1..80: mol_type = other DNA
acagggttgggactaaagttacaggttaacagcatctcaaagcagaaacaatttttcttagtacagatcaaaatggagtt

SEQ ID NO: 23660 - DNA, 80 bp, synthetic construct
  misc_feature 1..80: note = Artificially Synthesized Probe
  source 1..80: mol_type = other DNA
aactgtcatcagagatatcacacatcaaataacagtcttcatcattgcagagtggaaagacagttgagaaacccagttac

SEQ ID NO: 23661 - DNA, 80 bp, synthetic construct
  misc_feature 1..80: note = Artificially Synthesized Probe
  source 1..80: mol_type = other DNA
tttaactttctccctattatacccaaataagatttactccactgagactttaccaatccaagactcagtccaactgtatg

SEQ ID NO: 23662 - DNA, 80 bp, synthetic construct
  misc_feature 1..80: note = Artificially Synthesized Probe
  source 1..80: mol_type = other DNA
cgagggcacaagctgctccagtataataaagaaaatatatagaataagaatagttatactagaaatagattatagatgtg

SEQ ID NO: 23663 - DNA, 80 bp, synthetic construct
  misc_feature 1..80: note = Artificially Synthesized Probe
  source 1..80: mol_type = other DNA
aggaaaacccaaagacacaaaataactacacgtaccgcctcctaatttataacatgcctcttgtaacttgccttaatcga

SEQ ID NO: 23664 - DNA, 80 bp, synthetic construct
  misc_feature 1..80: note = Artificially Synthesized Probe
  source 1..80: mol_type = other DNA
cagcccagccgggttgaatttatttctaatttgccttcctaattaatacccattaaagctagatgctgttatttgaaaaa

SEQ ID NO: 23665 - DNA, 80 bp, synthetic construct
  misc_feature 1..80: note = Artificially Synthesized Probe
  source 1..80: mol_type = other DNA
ccatatgaaatgtgagaagggcaaataagtactgtagtcactcatttgggctttgatgaccattaacaaatgataagtaa

SEQ ID NO: 23666 - DNA, 80 bp, synthetic construct
  misc_feature 1..80: note = Artificially Synthesized Probe
  source 1..80: mol_type = other DNA
cagctactcaggaggatgaggtgggaggatggcttgagcctgggaggttgagactgcagtggcccaagattgtgccactg

SEQ ID NO: 23667 - DNA, 80 bp, synthetic construct
  misc_feature 1..80: note = Artificially Synthesized Probe
  source 1..80: mol_type = other DNA
aaaaaaacacacagaagcagccaacacaccaccctctggacagcagagaccagtgcaatgcattgctttttctctttgct

SEQ ID NO: 23668 - DNA, 80 bp, synthetic construct
  misc_feature 1..80: note = Artificially Synthesized Probe
  source 1..80: mol_type = other DNA
gacttcacctgataataatcatagacatactgtgtggtaggcactgtgaggtgagtatggtctttattcatatttcacag

SEQ ID NO: 23669 - DNA, 80 bp, synthetic construct
  misc_feature 1..80: note = Artificially Synthesized Probe
  source 1..80: mol_type = other DNA
gaagaaagaaagaggatattctacacatatcagacagggaagggaggaacatcaacatttattgatcttcagtgtaacag

SEQ ID NO: 23670 - DNA, 80 bp, synthetic construct
  misc_feature 1..80: note = Artificially Synthesized Probe
  source 1..80: mol_type = other DNA
gagactggacttaaagaaggaggacccccaacctctggctaggaactaaatgaaagatttttcaggcctatattaacaaa

SEQ ID NO: 23671 - DNA, 80 bp, synthetic construct
  misc_feature 1..80: note = Artificially Synthesized Probe
  source 1..80: mol_type = other DNA
tttatgtctttttttttttttctttttttttgagatggagttttcgctctcgttgcccaggccagagttcggtggcgtga

SEQ ID NO: 23672 - DNA, 80 bp, synthetic construct
  misc_feature 1..80: note = Artificially Synthesized Probe
  source 1..80: mol_type = other DNA
aattacttgattgatactataggttgaggtctgaagctttggttgcttactatttcagacagacaatacatcttgtaaac

SEQ ID NO: 23673 - DNA, 80 bp, synthetic construct
  misc_feature 1..80: note = Artificially Synthesized Probe
  source 1..80: mol_type = other DNA
aggatttttgactgtgtgtaaagagtttgtgcccctaacccctgcattgttcaagggtcaactgtatataattatgatag

SEQ ID NO: 23674 - DNA, 80 bp, synthetic construct
  misc_feature 1..80: note = Artificially Synthesized Probe
  source 1..80: mol_type = other DNA
caaaaaaggcagattataaagtgttagaaaggcactaaggacacgttagcaccaaactgaccctttcaagttgaaaaaga

SEQ ID NO: 23675 - DNA, 80 bp, synthetic construct
  misc_feature 1..80: note = Artificially Synthesized Probe
  source 1..80: mol_type = other DNA
gtaatctcagcactttgggagggcgacaagagtgaaactggctctcaaaaaaaaaaaaaaaaaaaaaaaagaactgtgat

SEQ ID NO: 23676 - DNA, 80 bp, synthetic construct
  misc_feature 1..80: note = Artificially Synthesized Probe
  source 1..80: mol_type = other DNA
gggcagcgaagttaacaggggtcggagaggcaagcaagggccaaatctcaaaggccaaaagaaagttcatgtttcatttt

SEQ ID NO: 23677 - DNA, 80 bp, synthetic construct
  misc_feature 1..80: note = Artificially Synthesized Probe
  source 1..80: mol_type = other DNA
cagggctgcaggcgggcggaggttccaggagatgggacttcagggagacctggcttgggctaaaatcgaaatacaatata

SEQ ID NO: 23678 - DNA, 80 bp, synthetic construct
  misc_feature 1..80: note = Artificially Synthesized Probe
  source 1..80: mol_type = other DNA
acaaggcataggagcagcacagatgtttgtaaagcgtcatacttagtgtcttcatcatttgaatatccacgacgctccgg

SEQ ID NO: 23679 - DNA, 80 bp, synthetic construct
  misc_feature 1..80: note = Artificially Synthesized Probe
  source 1..80: mol_type = other DNA
tacatgccaggtactgttctgagcactagggattcaactatgagcaaaaaaagacaaaagccttgtcctcatggagctga

SEQ ID NO: 23680 - DNA, 80 bp, synthetic construct
  misc_feature 1..80: note = Artificially Synthesized Probe
  source 1..80: mol_type = other DNA
agggggagtgctactgctggggggctgtcagatcagggccagaaaaggcacctggaaaatccaacccagggttgggaggt

SEQ ID NO: 23681 - DNA, 80 bp, synthetic construct
  misc_feature 1..80: note = Artificially Synthesized Probe
  source 1..80: mol_type = other DNA
aagtgctgggattacacgtgtgagccaccgcacctagccactaatttgtatttgtattttttatttttttggcatgaatc

SEQ ID NO: 23682 - DNA, 80 bp, synthetic construct
  misc_feature 1..80: note = Artificially Synthesized Probe
  source 1..80: mol_type = other DNA
agcctcctgagtagctgggactacagggacaccagctaatttttgtatttttattatagagacagtgtttttccatgttg

SEQ ID NO: 23683 - DNA, 80 bp, synthetic construct
  misc_feature 1..80: note = Artificially Synthesized Probe
  source 1..80: mol_type = other DNA
acttctttcacttctgtattatttcagttcttttaatgagcatattctttttttttttttttttgagatggagtctcgct

SEQ ID NO: 23684 - DNA, 80 bp, synthetic construct
  misc_feature 1..80: note = Artificially Synthesized Probe
  source 1..80: mol_type = other DNA
aaaaaggctgaatgaggcaatcaaccctcctaccaacagagacacatgttttcattctatttatcacactgtggaaggaa

SEQ ID NO: 23685 - DNA, 80 bp, synthetic construct
  misc_feature 1..80: note = Artificially Synthesized Probe
  source 1..80: mol_type = other DNA
gctagtgtgtatcaagcacttaactacatgctaagtggggcctatatgctttccatatgggtctttcagttcacacagca

SEQ ID NO: 23686 - DNA, 80 bp, synthetic construct
  misc_feature 1..80: note = Artificially Synthesized Probe
  source 1..80: mol_type = other DNA
tctgcttacccagagagaaacctgaatactggtcttggttccctccctaacagaagcttattttcctactacttggagcc

SEQ ID NO: 23687 - DNA, 80 bp, synthetic construct
  misc_feature 1..80: note = Artificially Synthesized Probe
  source 1..80: mol_type = other DNA
aaatggggatgatgctatctgtgctatgaggattaaacaaggtaatgcacttaaagggcctggcatagagaaaggacaga

SEQ ID NO: 23688 - DNA, 80 bp, synthetic construct
  misc_feature 1..80: note = Artificially Synthesized Probe
  source 1..80: mol_type = other DNA
tagcctgggcaatatggtaagagcctgtctctatacaaacctttttaaaaagttagctggatgtgatggcgtatacctgt

SEQ ID NO: 23689 - DNA, 80 bp, synthetic construct
  misc_feature 1..80: note = Artificially Synthesized Probe
  source 1..80: mol_type = other DNA
ttcctggaaaagccaggaatctggattactccatgagggatttgctcatgtttaaataccatgcttacccaacaaaattc

SEQ ID NO: 23690 - DNA, 80 bp, synthetic construct
  misc_feature 1..80: note = Artificially Synthesized Probe
  source 1..80: mol_type = other DNA
actgagagataactagaatttgccatccagcagaaggaaaaggcttcccaggaggatggaatggtgtgagcaaaggcctg

SEQ ID NO: 23691 - DNA, 80 bp, synthetic construct
  misc_feature 1..80: note = Artificially Synthesized Probe
  source 1..80: mol_type = other DNA
tctttggcttcagagatatctctgaggcagaaagtgagtaatgagataggacgctgccagctaaggtctctcatggctac

SEQ ID NO: 23692 - DNA, 80 bp, synthetic construct
  misc_feature 1..80: note = Artificially Synthesized Probe
  source 1..80: mol_type = other DNA
aagaaaacatttttcccccactcctaaaatatgtgctcttgccataagggcagggaccccacaggccttgttccccactg

SEQ ID NO: 23693 - DNA, 80 bp, synthetic construct
  misc_feature 1..80: note = Artificially Synthesized Probe
  source 1..80: mol_type = other DNA
tttcctcattttactaaaaatagagtgtagggagaataaataaagttactggaatgttcccctagctgttatccagggaa

SEQ ID NO: 23694 - DNA, 80 bp, synthetic construct
  misc_feature 1..80: note = Artificially Synthesized Probe
  source 1..80: mol_type = other DNA
atggtgctgtggccaggctgactctgaaagagtactgaggagggaggtgcagctgtgttttcaactctgtggcagccaag

SEQ ID NO: 23695 - DNA, 80 bp, synthetic construct
  misc_feature 1..80: note = Artificially Synthesized Probe
  source 1..80: mol_type = other DNA
accctcgtgaccagccctatggcctcactctacctctgtcctgttgtcctccttccctaaaagagggccagaaggcctgc

SEQ ID NO: 23696 - DNA, 80 bp, synthetic construct
  misc_feature 1..80: note = Artificially Synthesized Probe
  source 1..80: mol_type = other DNA
aaccagactgagaaatgtataacattctggaaacagcctgcagttttatgcctctgcacctctgcacatgccattctctt

SEQ ID NO: 23697 - DNA, 80 bp, synthetic construct
  misc_feature 1..80: note = Artificially Synthesized Probe
  source 1..80: mol_type = other DNA
ttaaccccattttatagttggggaaacatagcttggctgtccagggtcaccccattagaggccagcttttgaagctttgt

SEQ ID NO: 23698 - DNA, 80 bp, synthetic construct
  misc_feature 1..80: note = Artificially Synthesized Probe
  source 1..80: mol_type = other DNA
aaccatatcaccatctctaaaaaaaaccaaacacacctgacattctggaaagaatgagggcagggtggtgaggaatagtg

SEQ ID NO: 23699 - DNA, 80 bp, synthetic construct
  misc_feature 1..80: note = Artificially Synthesized Probe
  source 1..80: mol_type = other DNA
actcacctacaaggacaagtttgtcatcatctgcgtgaatatttttgagtatggcctgaaacagcaggagaagcggaaaa

SEQ ID NO: 23700 - DNA, 80 bp, synthetic construct
  misc_feature 1..80: note = Artificially Synthesized Probe
  source 1..80: mol_type = other DNA
caccaatctttgtatttgatggcaactgcctctttgagttggcattacttttaaagacaggatgcttagcctgttgtaaa

SEQ ID NO: 23701 - DNA, 80 bp, synthetic construct
  misc_feature 1..80: note = Artificially Synthesized Probe
  source 1..80: mol_type = other DNA
agtccctgtccagccttccttcctgatatttatctggtccctgtagccactgggcttgggagtgtcagctagctggctct

SEQ ID NO: 23702 - DNA, 80 bp, synthetic construct
  misc_feature 1..80: note = Artificially Synthesized Probe
  source 1..80: mol_type = other DNA
gcgtgcacacgcgcacatagcatgccctattctgtactttgctttcgtgtgtgtgtgtgagcatagcatgccctgttctg

SEQ ID NO: 23703 - DNA, 80 bp, synthetic construct
  misc_feature 1..80: note = Artificially Synthesized Probe
  source 1..80: mol_type = other DNA
ttttttttttagctagtcaaatttagcagtgggagactgtataccaacttcagtgacaccaaatttaataagttctcata

SEQ ID NO: 23704 - DNA, 80 bp, synthetic construct
  misc_feature 1..80: note = Artificially Synthesized Probe
  source 1..80: mol_type = other DNA
agtagagtttaccaatcttctggttatatttggcaagatctcagattatttgttaaaaatctcccaggtttggccggacg

SEQ ID NO: 23705 - DNA, 80 bp, synthetic construct
  misc_feature 1..80: note = Artificially Synthesized Probe
  source 1..80: mol_type = other DNA
cgaaagcttatatacttagttggacagagagtagtgaattgtgagaacgtgacaagacaaagaggtttgggctaaggcag

SEQ ID NO: 23706 - DNA, 80 bp, synthetic construct
  misc_feature 1..80: note = Artificially Synthesized Probe
  source 1..80: mol_type = other DNA
aatcactatgccaaagcggcatattttggtgtgaaatgctctgaaccccatgaaagccatggctccttctaccctgccta

SEQ ID NO: 23707 - DNA, 80 bp, synthetic construct
  misc_feature 1..80: note = Artificially Synthesized Probe
  source 1..80: mol_type = other DNA
caggctgtagctttcttgctcatcagtcctgtttgcttttattacattttaatcatttacattggaagtgattcttgtgg

SEQ ID NO: 23708 - DNA, 80 bp, synthetic construct
  misc_feature 1..80: note = Artificially Synthesized Probe
  source 1..80: mol_type = other DNA
ttgttccttcaatcaacactaactcccatttgggccttaggtgccttgctaagcaccacaaaacagcaactaactgaaag

SEQ ID NO: 23709 - DNA, 80 bp, synthetic construct
  misc_feature 1..80: note = Artificially Synthesized Probe
  source 1..80: mol_type = other DNA
gacaacatccaaactgtttgcagtaggctcccagcatgattgttctcatatgagtgatgttcactaggaaatgacgcccc

SEQ ID NO: 23710 - DNA, 80 bp, synthetic construct
  misc_feature 1..80: note = Artificially Synthesized Probe
  source 1..80: mol_type = other DNA
tagatggtttcaactttccaacagggtcgtttccaaaagttcaattatgtggaggcttctggcactttctaagagaagca

SEQ ID NO: 23711 - DNA, 80 bp, synthetic construct
  misc_feature 1..80: note = Artificially Synthesized Probe
  source 1..80: mol_type = other DNA
cctggcttgtccttgtcattcagatttcagcttgactatcagctcttgggagaggcctttcttcatcaacttccagaaaa

SEQ ID NO: 23712 - DNA, 80 bp, synthetic construct
  misc_feature 1..80: note = Artificially Synthesized Probe
  source 1..80: mol_type = other DNA
agcaacaaaaaatgtgacctacccttctcaggaggaaaaagtatgctctgactatatgagtaataccaacatcactttga

SEQ ID NO: 23713 - DNA, 80 bp, synthetic construct
  misc_feature 1..80: note = Artificially Synthesized Probe
  source 1..80: mol_type = other DNA
atcccacatgccatggggcagcaagtcctcaagccactagcagtgcggtggtcctggggaggggcaccagctgttgcctt

SEQ ID NO: 23714 - DNA, 80 bp, synthetic construct
  misc_feature 1..80: note = Artificially Synthesized Probe
  source 1..80: mol_type = other DNA
gcctaggatgaggttttaaagattatgccagtgcagaagcagacctgccccagccagcgcagcaggttcaaggcgtttgt

SEQ ID NO: 23715 - DNA, 80 bp, synthetic construct
  misc_feature 1..80: note = Artificially Synthesized Probe
  source 1..80: mol_type = other DNA
cagccaactgatttttgacaaaagcgccaagaacactcactggggaaaagacagtctcttcaatagattttgctgggaaa

SEQ ID NO: 23716 - DNA, 80 bp, synthetic construct
  misc_feature 1..80: note = Artificially Synthesized Probe
  source 1..80: mol_type = other DNA
gaaaaaggaactcatatactgtaagtaagaatgtaaactaggacagccactaggaagaacattgtggagggccctcaaaa

SEQ ID NO: 23717 - DNA, 80 bp, synthetic construct
  misc_feature 1..80: note = Artificially Synthesized Probe
  source 1..80: mol_type = other DNA
ggtcttgaactcctgactgaggtgatccacccaccttcccgccttggcctcccaaagtgctgagattacaggcatgtgac

SEQ ID NO: 23718 - DNA, 80 bp, synthetic construct
  misc_feature 1..80: note = Artificially Synthesized Probe
  source 1..80: mol_type = other DNA
accttgtacacacatggaaagaacttaataatttcttgacatttctcccttgtgactgtgctaattggtcccccagacac

SEQ ID NO: 23719 - DNA, 80 bp, synthetic construct
  misc_feature 1..80: note = Artificially Synthesized Probe
  source 1..80: mol_type = other DNA
gacttccaaatgctccttctctgttcagctccctttgtgttcacggtataatgacacacactttctcattggattctttt

SEQ ID NO: 23720 - DNA, 80 bp, synthetic construct
  misc_feature 1..80: note = Artificially Synthesized Probe
  source 1..80: mol_type = other DNA
tcttcaaaacatagcaccagccccagccaggagaaggaagtgcacacgcctcacccgcacctctagagagttgctgggca

SEQ ID NO: 23721 - DNA, 80 bp, synthetic construct
  misc_feature 1..80: note = Artificially Synthesized Probe
  source 1..80: mol_type = other DNA
atcaggtgaccttgtcaagcctgtccaggcttttagcccagaaacaacttctattttctactttctagagtaaatcattt

SEQ ID NO: 23722 - DNA, 80 bp, synthetic construct
  misc_feature 1..80: note = Artificially Synthesized Probe
  source 1..80: mol_type = other DNA
ctgcctcctgaccaaagccacgttccattccaataggttggctgagggcaacaggtttgtatcttgccaaaacacatgag

SEQ ID NO: 23723 - DNA, 80 bp, synthetic construct
  misc_feature 1..80: note = Artificially Synthesized Probe
  source 1..80: mol_type = other DNA
ccatgtgggtggaataactaaatcaagtaaggccacgcagtggcttcaactctgactcttgtggtagtcacagaactaca

SEQ ID NO: 23724 - DNA, 80 bp, synthetic construct
  misc_feature 1..80: note = Artificially Synthesized Probe
  source 1..80: mol_type = other DNA
aattctgagcccactaaatcaaaacttgtatacaaacagcagctacccctatgctcctctgccagccagataaaatgtca

SEQ ID NO: 23725 - DNA, 80 bp, synthetic construct
  misc_feature 1..80: note = Artificially Synthesized Probe
  source 1..80: mol_type = other DNA
cagagctttccgcacccagtctagtgattggttcatggatggacatgtgacccaagccagggcaatgagattgaactcaa

SEQ ID NO: 23726 - DNA, 80 bp, synthetic construct
  misc_feature 1..80: note = Artificially Synthesized Probe
  source 1..80: mol_type = other DNA
aatgctcattcattcacctggaatctccatcaaaaggccatctgccttttacatctctttaaagtttttcacatttgagg

SEQ ID NO: 23727 - DNA, 80 bp, synthetic construct
  misc_feature 1..80: note = Artificially Synthesized Probe
  source 1..80: mol_type = other DNA
gctacttgggaggctgaggcaggaaaatggcataaaacctgggaggcggagcttgcagtgagctgagatcacgccactgc

SEQ ID NO: 23728 - DNA, 80 bp, synthetic construct
  misc_feature 1..80: note = Artificially Synthesized Probe
  source 1..80: mol_type = other DNA
tttattcctcctcaaaccctgagaggtagggattattagccccatttatagacaagaaaattgaagctcagagagatcaa

SEQ ID NO: 23729 - DNA, 80 bp, synthetic construct
  misc_feature 1..80: note = Artificially Synthesized Probe
  source 1..80: mol_type = other DNA
agaaatacacattctcaggttgcatgcctacagaaatcagaacctctggaggggggcccagcaatctgttttaacaagcc

SEQ ID NO: 23730 - DNA, 80 bp, synthetic construct
  misc_feature 1..80: note = Artificially Synthesized Probe
  source 1..80: mol_type = other DNA
cattgtttctcaactttcctttggcatcactgaacaattagccaagaaacatagacacagaggagaattcagaactggag

SEQ ID NO: 23731 - DNA, 80 bp, synthetic construct
  misc_feature 1..80: note = Artificially Synthesized Probe
  source 1..80: mol_type = other DNA
agttaataagacatgtattagtgatggagctcaaatctgactggaaacctttaccagctgcctcccttacaccttagaaa

SEQ ID NO: 23732 - DNA, 80 bp, synthetic construct
  misc_feature 1..80: note = Artificially Synthesized Probe
  source 1..80: mol_type = other DNA
catctgcctccagtggatcttatattcaactaatatttactgagtaccaactaaattacctgctagtggctgtccagaca

SEQ ID NO: 23733 - DNA, 80 bp, synthetic construct
  misc_feature 1..80: note = Artificially Synthesized Probe
  source 1..80: mol_type = other DNA
ataacgttgagacaactcaggaagcgacaggaccagcttgtatcattactgctaatgttgattgattggcttgattttca

SEQ ID NO: 23734 - DNA, 80 bp, synthetic construct
  misc_feature 1..80: note = Artificially Synthesized Probe
  source 1..80: mol_type = other DNA
cggccaaatagtttgcctttaacgctaaaaaaaaaaaaaaaaaaaaaaaaaggctggtcgcagtggctcatgcctataat

SEQ ID NO: 23735 - DNA, 80 bp, synthetic construct
  misc_feature 1..80: note = Artificially Synthesized Probe
  source 1..80: mol_type = other DNA
tgaaaattcaggagaaattagtatgtgtgcatggacagggaagggtaatggagaagtgggcaactggttttactccaaat

SEQ ID NO: 23736 - DNA, 80 bp, synthetic construct
  misc_feature 1..80: note = Artificially Synthesized Probe
  source 1..80: mol_type = other DNA
acaaaaatatgtgtgtgtctaccatgtgtcttggcacttgggatacaagagtgaataaaatagacagagtttaaagtgtt

SEQ ID NO: 23737 - DNA, 80 bp, synthetic construct
  misc_feature 1..80: note = Artificially Synthesized Probe
  source 1..80: mol_type = other DNA
aataagaaaaaactagatgggagtgggatagatggagggcagggaagaagccaccaaaaatttctccaagcagaagaaaa

SEQ ID NO: 23738 - DNA, 80 bp, synthetic construct
  misc_feature 1..80: note = Artificially Synthesized Probe
  source 1..80: mol_type = other DNA
aaaaaatcagcctagctttgtaggatcatgcagaactggcctttcctttagaaagattaccagcctcaggaaccacaact

SEQ ID NO: 23739 - DNA, 80 bp, synthetic construct
  misc_feature 1..80: note = Artificially Synthesized Probe
  source 1..80: mol_type = other DNA
aaaacaatggtcaagggatctgaatagacgtttcttcaaagaaaatatacaaatagccattaagcacgtgaaaagatact

SEQ ID NO: 23740 - DNA, 80 bp, synthetic construct
  misc_feature 1..80: note = Artificially Synthesized Probe
  source 1..80: mol_type = other DNA
agggaaatctataaaagaacaaaggaaagtagtagttgccaagggatggaagtagtaagggtggatgatagctaaagggt

SEQ ID NO: 23741 - DNA, 80 bp, synthetic construct
  misc_feature 1..80: note = Artificially Synthesized Probe
  source 1..80: mol_type = other DNA
gtttaatcttctactacttcaaatacgcacaaatatctcacaactggtaaggtctttagagagaacacgtgggggtcggg

SEQ ID NO: 23742 - DNA, 80 bp, synthetic construct
  misc_feature 1..80: note = Artificially Synthesized Probe
  source 1..80: mol_type = other DNA
gtgaactcctgaatgtgtcccctttgctatgcctccctgggatgcccttcctttctcttctttactggcccttcatggcc

SEQ ID NO: 23743 - DNA, 80 bp, synthetic construct
  misc_feature 1..80: note = Artificially Synthesized Probe
  source 1..80: mol_type = other DNA
ctagatacccaacactctcccacctttttgctgaactcctactcatctatcatggctcagcttaaacaaacgccctttca

SEQ ID NO: 23744 - DNA, 80 bp, synthetic construct
  misc_feature 1..80: note = Artificially Synthesized Probe
  source 1..80: mol_type = other DNA
gagcaggaaacacagagcgatgggatccccaaagccgcacggtcgggctgtacggaaacctctcaacgcctcctcagagc

SEQ ID NO: 23745 - DNA, 80 bp, synthetic construct
  misc_feature 1..80: note = Artificially Synthesized Probe
  source 1..80: mol_type = other DNA
gtccaccttctccactttgccgatgatcttctcctcaaagacgggcaggacggcctcgtcctctcgaacctcctcaaaca

SEQ ID NO: 23746 - DNA, 80 bp, synthetic construct
  misc_feature 1..80: note = Artificially Synthesized Probe
  source 1..80: mol_type = other DNA
gggcttggcttttcagtcaggcaaaagcacatgagtccagagcctggagacaaggtcggcctaggggagcctaacacaag

SEQ ID NO: 23747 - DNA, 80 bp, synthetic construct
  misc_feature 1..80: note = Artificially Synthesized Probe
  source 1..80: mol_type = other DNA
cccattcaaacacctggggcccgcagcccccgcacagcatctcaatctgggatctagtccgctagcagtggagtcggctc

SEQ ID NO: 23748 - DNA, 80 bp, synthetic construct
  misc_feature 1..80: note = Artificially Synthesized Probe
  source 1..80: mol_type = other DNA
acggcccatgtgggatcacatggtctgagccctttctcacgggttcagagcagtcagcattgtaggtgggagcagagccc

SEQ ID NO: 23749 - DNA, 80 bp, synthetic construct
  misc_feature 1..80: note = Artificially Synthesized Probe
  source 1..80: mol_type = other DNA
tgggatgacatctcgtcccgagagtctgtccttcagtctcttggcatgaattccccaccgatagcgtggacactggctct

SEQ ID NO: 23750 - DNA, 80 bp, synthetic construct
  misc_feature 1..80: note = Artificially Synthesized Probe
  source 1..80: mol_type = other DNA
cgaacacgatcacagggtcacagatgtttggtcataaagtggtcaccctttgggtttgaggtaactgtgaccctttctgg

SEQ ID NO: 23751 - DNA, 80 bp, synthetic construct
  misc_feature 1..80: note = Artificially Synthesized Probe
  source 1..80: mol_type = other DNA
tacctctgcttggagggtgctcggctggctctcttttcttcctcctccagacgtcggcgcgcctcctccagctgggttag

SEQ ID NO: 23752 - DNA, 80 bp, synthetic construct
  misc_feature 1..80: note = Artificially Synthesized Probe
  source 1..80: mol_type = other DNA
atcccaatactctgggaggccaaggtgggtggatcgcctgaggtcaggagttcaagaacagcctggccaacatggcaaaa

SEQ ID NO: 23753 - DNA, 80 bp, synthetic construct
  misc_feature 1..80: note = Artificially Synthesized Probe
  source 1..80: mol_type = other DNA
atttttaacagctttactgggatacaaattatatactaatcctagaggccggcggatagctttgagtccaggaggctgag

SEQ ID NO: 23754 - DNA, 80 bp, synthetic construct
  misc_feature 1..80: note = Artificially Synthesized Probe
  source 1..80: mol_type = other DNA
ctgagaccccctctacaaaaaatgagccaggcaaggtgctgtgcacccctgttccctcgggagccccagaaaaacgatga

SEQ ID NO: 23755 - DNA, 80 bp, synthetic construct
  misc_feature 1..80: note = Artificially Synthesized Probe
  source 1..80: mol_type = other DNA
ggggtgctcacccgtggccggtcctgcggtgcctgctgatctccttttccccctcaatgatccactgcatgattttctgg

SEQ ID NO: 23756 - DNA, 80 bp, synthetic construct
  misc_feature 1..80: note = Artificially Synthesized Probe
  source 1..80: mol_type = other DNA
cctcctcctgtgtggggacaagcagcaccatcacctctcagcaccagctgcacacttggggaaaacaaaaagcatcaggc

SEQ ID NO: 23757 - DNA, 80 bp, synthetic construct
  misc_feature 1..80: note = Artificially Synthesized Probe
  source 1..80: mol_type = other DNA
tttcacttgattctccaagttaacaggtgctgaagcttatctgtcagagcaaacatttgatcactttaattccaagttgc

SEQ ID NO: 23758 - DNA, 80 bp, synthetic construct
  misc_feature 1..80: note = Artificially Synthesized Probe
  source 1..80: mol_type = other DNA
ccaggctgtagtgcaatctccgcctcccgggttcaagtaattctcctgcctcagcctcccgggtagctgggattacaggc

SEQ ID NO: 23759 - DNA, 80 bp, synthetic construct
  misc_feature 1..80: note = Artificially Synthesized Probe
  source 1..80: mol_type = other DNA
atggggctgtgaaatgttacagattaacttaaccactcggctaatggtttttgttttcttctttgtgctttaatttccca

SEQ ID NO: 23760 - DNA, 80 bp, synthetic construct
  misc_feature 1..80: note = Artificially Synthesized Probe
  source 1..80: mol_type = other DNA
tacagacggccaacatgacagcaaagcgttccacagaaaattacagcggccggcgaccgacacaacaacaaaacagcaaa

SEQ ID NO: 23761 - DNA, 80 bp, synthetic construct
  misc_feature 1..80: note = Artificially Synthesized Probe
  source 1..80: mol_type = other DNA
ggagacgagaggatgcagctccacatggtggcaaaacaatttactgaggataaaacaaatcgacgtctgtgtgtgagaca

SEQ ID NO: 23762 - DNA, 80 bp, synthetic construct
  misc_feature 1..80: note = Artificially Synthesized Probe
  source 1..80: mol_type = other DNA
tgggattcaatctgcgaggcgggaagcacactagcagaactctggctttgcgggaagtgattttttttttttttgaggta

SEQ ID NO: 23763 - DNA, 80 bp, synthetic construct
  misc_feature 1..80: note = Artificially Synthesized Probe
  source 1..80: mol_type = other DNA
accgacgcggcccactcaccatgcgcacgcgcttcagccgctcctccagcttctcctcggcctcccgcgtgcgctgcaca

SEQ ID NO: 23764 - DNA, 80 bp, synthetic construct
  misc_feature 1..80: note = Artificially Synthesized Probe
  source 1..80: mol_type = other DNA
attacttgagcccagaaattaagagaccagtctggccaacaaagtgagacctcatctctacaaacaaaaattttttttaa

SEQ ID NO: 23765 - DNA, 80 bp, synthetic construct
  misc_feature 1..80: note = Artificially Synthesized Probe
  source 1..80: mol_type = other DNA
ctgaaccagttagagtgtatttaacaaaagcaaggtcgctctcatacctaaccacagtacaaatatggatggttaaaaaa

SEQ ID NO: 23766 - DNA, 80 bp, synthetic construct
  misc_feature 1..80: note = Artificially Synthesized Probe
  source 1..80: mol_type = other DNA
aaatgaaaacgtgaaacttccaagtaattgtaaaggctaaagatgaagaggcccctccccgcagggcacgcattctggta

SEQ ID NO: 23767 - DNA, 80 bp, synthetic construct
  misc_feature 1..80: note = Artificially Synthesized Probe
  source 1..80: mol_type = other DNA
ccttctgaggggaggttgtctgcctgatgccccctcatccagagtctgtggcatgcactttctacacacgaagactctga

SEQ ID NO: 23768 - DNA, 80 bp, synthetic construct
  misc_feature 1..80: note = Artificially Synthesized Probe
  source 1..80: mol_type = other DNA
ttcccgtaacatctttcctgttcaaagtcaacccatcaaaataaggaaagatcattaatctgttcatcagcgcaggaatg

SEQ ID NO: 23769 - DNA, 80 bp, synthetic construct
  misc_feature 1..80: note = Artificially Synthesized Probe
  source 1..80: mol_type = other DNA
gaacatgtacacacaaaggttcacacgtgatggtaaagcccaggtgcccagccacgcgtcttcctagctggtatttactg

SEQ ID NO: 23770 - DNA, 80 bp, synthetic construct
  misc_feature 1..80: note = Artificially Synthesized Probe
  source 1..80: mol_type = other DNA
tccaggagctggcagggcagtgtggtctctgagggaggcacaaggtagctctttagcaacaggttttcttttattttttt

SEQ ID NO: 23771 - DNA, 80 bp, synthetic construct
  misc_feature 1..80: note = Artificially Synthesized Probe
  source 1..80: mol_type = other DNA
acttgcctcggggtttgttgaagtgtcctgaagccaccaacctactggtttcttagacatgatacttggattgggtaacc

SEQ ID NO: 23772 - DNA, 80 bp, synthetic construct
  misc_feature 1..80: note = Artificially Synthesized Probe
  source 1..80: mol_type = other DNA
aacattttattttgaagattcaaaattaaacgaggatgaaagaaaccaggagaagccacacacagcagctctgcccggaa

SEQ ID NO: 23773 - DNA, 80 bp, synthetic construct
  misc_feature 1..80: note = Artificially Synthesized Probe
  source 1..80: mol_type = other DNA
ggaagaggtcataaaacaagcacgttcctacacatggggtttccctggacaatgaaagaataagcttctgcctgtcacct

SEQ ID NO: 23774 - DNA, 80 bp, synthetic construct
  misc_feature 1..80: note = Artificially Synthesized Probe
  source 1..80: mol_type = other DNA
tatctcaatgtattaattaaaaacacaagcaatttggagaaaataaggagcatggagaaaagaccaacatctccacctgt

SEQ ID NO: 23775 - DNA, 80 bp, synthetic construct
  misc_feature 1..80: note = Artificially Synthesized Probe
  source 1..80: mol_type = other DNA
atacgcaaaaaacattttctccctaaatgtcatttttctttttaacattgctcaggttgattttggtcaaacaaaatttt

SEQ ID NO: 23776 - DNA, 80 bp, synthetic construct
  misc_feature 1..80: note = Artificially Synthesized Probe
  source 1..80: mol_type = other DNA
tagcattaaataccaaataacccatcttgtcctcaataattttaagcgcctctctccaccacatctaactcctgtcaaag

SEQ ID NO: 23777 - DNA, 80 bp, synthetic construct
  misc_feature 1..80: note = Artificially Synthesized Probe
  source 1..80: mol_type = other DNA
ggttcacgatgtcaggcccctgccagggccgatgtccacgagtccctctgacccacccactgtggcctggtcgctcactg

SEQ ID NO: 23778 - DNA, 80 bp, synthetic construct
  misc_feature 1..80: note = Artificially Synthesized Probe
  source 1..80: mol_type = other DNA
acagcagaacgaagccttctgtgttcatgtgtccaattccaaatccttctcccactctgacttcccaggtgtgcctttca

SEQ ID NO: 23779 - DNA, 80 bp, synthetic construct
  misc_feature 1..80: note = Artificially Synthesized Probe
  source 1..80: mol_type = other DNA
caaaaacaaaaatgtcgtggagaggaggcatgagaagacacggtgacttagggaaaaacgtgcccatcacagaagggaaa

SEQ ID NO: 23780 - DNA, 80 bp, synthetic construct
  misc_feature 1..80: note = Artificially Synthesized Probe
  source 1..80: mol_type = other DNA
catttcctccctctgaaaaagtaaatgttgtacagttctttcattggttcctgtgcctggacatgtctcaatcccacaca

SEQ ID NO: 23781 - DNA, 80 bp, synthetic construct
  misc_feature 1..80: note = Artificially Synthesized Probe
  source 1..80: mol_type = other DNA
tgggattacaggcttaagccactgcgcctgcccacaaaaaatgtttcatgccaaaagaccacctggtgtgacggatgcca

SEQ ID NO: 23782 - DNA, 80 bp, synthetic construct
  misc_feature 1..80: note = Artificially Synthesized Probe
  source 1..80: mol_type = other DNA
tggaattagtaaaatggctggaaacacacatctgtgagccctggatgataagccaggaatgagccaatgaaagcccaatt

SEQ ID NO: 23783 - DNA, 80 bp, synthetic construct
  misc_feature 1..80: note = Artificially Synthesized Probe
  source 1..80: mol_type = other DNA
atggtgggtgaatcctacacacagaatcgctggctcccggggaccctcttcattttctggagctgtgggcggtggacgga

SEQ ID NO: 23784 - DNA, 80 bp, synthetic construct
  misc_feature 1..80: note = Artificially Synthesized Probe
  source 1..80: mol_type = other DNA
gtgggtgcaaagggaaaaggtgtcaactgcgacaggggatggaatacggcacagaatgagcaacccaccctggagacacc

SEQ ID NO: 23785 - DNA, 80 bp, synthetic construct
  misc_feature 1..80: note = Artificially Synthesized Probe
  source 1..80: mol_type = other DNA
aagaccacacgccgcacgtcagcacatgacacagacacacttacttgatccctgttttgacaagctaagtcgtactttat

SEQ ID NO: 23786 - DNA, 80 bp, synthetic construct
  misc_feature 1..80: note = Artificially Synthesized Probe
  source 1..80: mol_type = other DNA
caagaaacgaccaaagcagacaggcactgggagaagcaggacaagcatttcctcacctcacatgaacttccatatgaatg

SEQ ID NO: 23787 - DNA, 80 bp, synthetic construct
  misc_feature 1..80: note = Artificially Synthesized Probe
  source 1..80: mol_type = other DNA
agataaataacctacctttgcacccaaaggtcacaaagtttatactaaaaaatgtgattgagagccggacacggtggttc

SEQ ID NO: 23788 - DNA, 80 bp, synthetic construct
  misc_feature 1..80: note = Artificially Synthesized Probe
  source 1..80: mol_type = other DNA
acaacacaccaaaggccctttatgatcaaaatcaaacagtgacgatagggagggtgtgtgtttctgcagactgtccacag

SEQ ID NO: 23789 - DNA, 80 bp, synthetic construct
  misc_feature 1..80: note = Artificially Synthesized Probe
  source 1..80: mol_type = other DNA
tgggagttcgcaaccagcctgaccaacatggagaaaccccatctctactaaaaaaaaaaaaattagccaggcgtggtggc

SEQ ID NO: 23790 - DNA, 80 bp, synthetic construct
  misc_feature 1..80: note = Artificially Synthesized Probe
  source 1..80: mol_type = other DNA
gagcagtgggatatcagaccatttctttgttctgtgttttctttcttttcttttttttggatatggcatctttctctgtt

SEQ ID NO: 23791 - DNA, 80 bp, synthetic construct
  misc_feature 1..80: note = Artificially Synthesized Probe
  source 1..80: mol_type = other DNA
caaacgtctttcatatagaactctgacaacaatctgtctttgcattgactgaaaactatgcaataatgtacatgaagaac

SEQ ID NO: 23792 - DNA, 80 bp, synthetic construct
  misc_feature 1..80: note = Artificially Synthesized Probe
  source 1..80: mol_type = other DNA
cttgaagtaatttagaaactgcaagttccaagctgggtctaccctctttatgacattctcagggatcctggagcccttcc

SEQ ID NO: 23793 - DNA, 80 bp, synthetic construct
  misc_feature 1..80: note = Artificially Synthesized Probe
  source 1..80: mol_type = other DNA
aaggacagtttagagaactcgcagcagcaacatcacaatcacaagtaaagcatatttaacttttagaaacaggatataaa

SEQ ID NO: 23794 - DNA, 80 bp, synthetic construct
  misc_feature 1..80: note = Artificially Synthesized Probe
  source 1..80: mol_type = other DNA
gaaataacatttctggccagatgcaatcaatggctcacacctgcaatttcaactctctgagaggccaaagtaggaggagt

SEQ ID NO: 23795 - DNA, 80 bp, synthetic construct
  misc_feature 1..80: note = Artificially Synthesized Probe
  source 1..80: mol_type = other DNA
cataacaccagtaccacagcacaacagtaacacagcacgaggtaccacagcatgccaataacacagcacccagtaccaca

SEQ ID NO: 23796 - DNA, 80 bp, synthetic construct
  misc_feature 1..80: note = Artificially Synthesized Probe
  source 1..80: mol_type = other DNA
agcatgccaataacacagcacctagtaccacaacacactaatatcacagcacccagtgccacagcatgccaataacacag

SEQ ID NO: 23797 - DNA, 80 bp, synthetic construct
  misc_feature 1..80: note = Artificially Synthesized Probe
  source 1..80: mol_type = other DNA
aatcaaatgaaaaaaacggccattattaactcaaaaacaaacacacaaaattgtacaggaaagaaaatggccaggcgtgg

SEQ ID NO: 23798 - DNA, 80 bp, synthetic construct
  misc_feature 1..80: note = Artificially Synthesized Probe
  source 1..80: mol_type = other DNA
tcctgggttcaagcaattctcccgcctcggcctcttgagtagctgggattacagacatgcgccaccacacctggctaatt

SEQ ID NO: 23799 - DNA, 80 bp, synthetic construct
  misc_feature 1..80: note = Artificially Synthesized Probe
  source 1..80: mol_type = other DNA
cacaagtaggcagcggaggggcccaagaaagagccaacaggcggccctctctccctgacagccaccatagcccagcctgg

SEQ ID NO: 23800 - DNA, 80 bp, synthetic construct
  misc_feature 1..80: note = Artificially Synthesized Probe
  source 1..80: mol_type = other DNA
ctgggattacaggcatgagccaccgtgcctggccaggaatcatttttaaagttttccttggacatccacaaacaaaaaaa

SEQ ID NO: 23801 - DNA, 80 bp, synthetic construct
  misc_feature 1..80: note = Artificially Synthesized Probe
  source 1..80: mol_type = other DNA
acggacatggaaacccaaaaccactcctccacagacaactctgtacacattttgggccctttctttttcttcttcttctt

SEQ ID NO: 23802 - DNA, 80 bp, synthetic construct
  misc_feature 1..80: note = Artificially Synthesized Probe
  source 1..80: mol_type = other DNA
ctttcctaggctgagacaaagacctaagcagaacacttcactttcctcaaatcaagtatgtgaaaccaccacgcggctca

SEQ ID NO: 23803 - DNA, 80 bp, synthetic construct
  misc_feature 1..80: note = Artificially Synthesized Probe
  source 1..80: mol_type = other DNA
ccgccatgcctaagccccccaccccctccgtgggctcctgtgcggaccgagtctccccgacgagcgcccggtcccattga

SEQ ID NO: 23804 - DNA, 80 bp, synthetic construct
  misc_feature 1..80: note = Artificially Synthesized Probe
  source 1..80: mol_type = other DNA
ggaagcatctgtaaacaagggagcccagagcccaaggtcactgcagcagccacctccaacacaaagcccacgaagtcgcc

SEQ ID NO: 23805 - DNA, 80 bp, synthetic construct
  misc_feature 1..80: note = Artificially Synthesized Probe
  source 1..80: mol_type = other DNA
gtgagctgagattgcactactgcactccagcctgggcgacagagcgagactccatctcaaacaaaaaaacaagcaaaaaa

SEQ ID NO: 23806 - DNA, 80 bp, synthetic construct
  misc_feature 1..80: note = Artificially Synthesized Probe
  source 1..80: mol_type = other DNA
gaggctggggcaggagaacggcgtgaacctgggaggcggagcttgcagtgagccgagatggcgccaccgcactccagcct

SEQ ID NO: 23807 - DNA, 80 bp, synthetic construct
  misc_feature 1..80: note = Artificially Synthesized Probe
  source 1..80: mol_type = other DNA
aggaaaaaaggcccaatcctggaatgcccactatagccacaggaagttttcaaagtactctgaccattccccacacgtaa

SEQ ID NO: 23808 - DNA, 80 bp, synthetic construct
  misc_feature 1..80: note = Artificially Synthesized Probe
  source 1..80: mol_type = other DNA
agactttggggctctccgagcctgtcctcgtatattccaaataaatatcagacttaaggaaggagggataggtgttttcc

SEQ ID NO: 23809 - DNA, 80 bp, synthetic construct
  misc_feature 1..80: note = Artificially Synthesized Probe
  source 1..80: mol_type = other DNA
gaacaatgagcgctgcaccctaatacatcagtacttacagctccaaagtgaatcaatctgtcctgttgaaaccattaaga

SEQ ID NO: 23810 - DNA, 80 bp, synthetic construct
  misc_feature 1..80: note = Artificially Synthesized Probe
  source 1..80: mol_type = other DNA
ctctctgatgaggattcagatagcaaatagtaaatgggtacttcaaggaacagagaaggtacagaataaaaggaaatgca

SEQ ID NO: 23811 - DNA, 80 bp, synthetic construct
  misc_feature 1..80: note = Artificially Synthesized Probe
  source 1..80: mol_type = other DNA
ctgcactccagcctgggcaacagagcaagatcctgtctctaaaaaaaaaataggccgggcacagtggctcacacctgtaa

SEQ ID NO: 23812 - DNA, 80 bp, synthetic construct
  misc_feature 1..80: note = Artificially Synthesized Probe
  source 1..80: mol_type = other DNA
taaaaaagaaaagacatttgtcacagacgccaaacactggctctctacaggggctgaactactgtaccacagaaaacagc

SEQ ID NO: 23813 - DNA, 80 bp, synthetic construct
  misc_feature 1..80: note = Artificially Synthesized Probe
  source 1..80: mol_type = other DNA
accagctgaaaatcaaacaaaaacagtctgtttttcatgctttcccatccttgtccctgaatggagatcttaaaactgaa

SEQ ID NO: 23814 - DNA, 80 bp, synthetic construct
  misc_feature 1..80: note = Artificially Synthesized Probe
  source 1..80: mol_type = other DNA
tcgcttgaggccaagaattcaacacctgctgggcaatatagtgacaccccatctctacaaaaaatatatatatatatatc

SEQ ID NO: 23815 - DNA, 80 bp, synthetic construct
  misc_feature 1..80: note = Artificially Synthesized Probe
  source 1..80: mol_type = other DNA
aaaaaaaacaacaaacagggccttattccttcatcctctctgtgccacatgggttcccagaactcggggcagagtggcag

SEQ ID NO: 23816 - DNA, 80 bp, synthetic construct
  misc_feature 1..80: note = Artificially Synthesized Probe
  source 1..80: mol_type = other DNA
ccatcctggtgctcacctcctcaaacagctcccggctgtaggtgttgtcatcgtcagcaaagtagacgactccttgggtc

SEQ ID NO: 23817 - DNA, 80 bp, synthetic construct
  misc_feature 1..80: note = Artificially Synthesized Probe
  source 1..80: mol_type = other DNA
cccatctctactaaaaaaatacaaaaatttgctgggtgtagtggcacatgcctgtaatctcagctacttgggaggctgag

SEQ ID NO: 23818 - DNA, 80 bp, synthetic construct
  misc_feature 1..80: note = Artificially Synthesized Probe
  source 1..80: mol_type = other DNA
aaaaaattactggccaggcatggtggctcacacctgtaatcccagcactttgagaggccgaagcaggtggaacacgaagt

SEQ ID NO: 23819 - DNA, 80 bp, synthetic construct
  misc_feature 1..80: note = Artificially Synthesized Probe
  source 1..80: mol_type = other DNA
ttgccaaacggtccctaaggagagagagttaattcactgccaagctcaaaatttctttgaaatgttattgttctatctta

SEQ ID NO: 23820 - DNA, 80 bp, synthetic construct
  misc_feature 1..80: note = Artificially Synthesized Probe
  source 1..80: mol_type = other DNA
ctatacctctcgtgtgggaaactcactgcctcaagcagcagaccctctccaactttaataaattccattgttacaatttt

SEQ ID NO: 23821 - DNA, 80 bp, synthetic construct
  misc_feature 1..80: note = Artificially Synthesized Probe
  source 1..80: mol_type = other DNA
ggctgcagcagagcgagggagaggggtggaaatggggttgggagaggcggacggcagcaggatcatgcggggccttgcag

SEQ ID NO: 23822 - DNA, 80 bp, synthetic construct
  misc_feature 1..80: note = Artificially Synthesized Probe
  source 1..80: mol_type = other DNA
tcctctagggcccaccagctctgagcagatcatgaagacaggggcccttttgcttcaggggtgagtttgaggtctgatta

SEQ ID NO: 23823 - DNA, 80 bp, synthetic construct
  misc_feature 1..80: note = Artificially Synthesized Probe
  source 1..80: mol_type = other DNA
ttttattcattcaacaagcatttactggacctgctatgtgccaggcctatacctggcacctgggacacagcactgtacaa

SEQ ID NO: 23824 - DNA, 80 bp, synthetic construct
  misc_feature 1..80: note = Artificially Synthesized Probe
  source 1..80: mol_type = other DNA
tgggaaaggaaggcacagttgggcaggggcagattgtgtggagtttttcgggctgctggaaagactttttcttttctttt

SEQ ID NO: 23825 - DNA, 80 bp, synthetic construct
  misc_feature 1..80: note = Artificially Synthesized Probe
  source 1..80: mol_type = other DNA
gtgatcatagctcactgcagcctcaaaccgctggggtcaagcagttctctcgcctcagtctccagagtagctgagactac

SEQ ID NO: 23826 - DNA, 80 bp, synthetic construct
  misc_feature 1..80: note = Artificially Synthesized Probe
  source 1..80: mol_type = other DNA
gcagggggatcatgaggtcaggagatcgagaccatcctggctaacatggtgaaaccccgtctctactaaaaatacaaaaa

SEQ ID NO: 23827 - DNA, 80 bp, synthetic construct
  misc_feature 1..80: note = Artificially Synthesized Probe
  source 1..80: mol_type = other DNA
cttgtgggctgcactgtgccttcgggtcttcatcctgagggtactggggagccacagaaggctcaggggtggggcagttg

SEQ ID NO: 23828 - DNA, 80 bp, synthetic construct
  misc_feature 1..80: note = Artificially Synthesized Probe
  source 1..80: mol_type = other DNA
tctccccatcttcagatcatcagatgtggtctataatgcgttttccttacgtgtctgatcaatccccgattcatctaccc

SEQ ID NO: 23829 - DNA, 80 bp, synthetic construct
  misc_feature 1..80: note = Artificially Synthesized Probe
  source 1..80: mol_type = other DNA
attggatggatgaggtgttaagaacaatgaataaatggaggtgtgttcctgtatccacctacaaccacgctgttcaatag

SEQ ID NO: 23830 - DNA, 80 bp, synthetic construct
  misc_feature 1..80: note = Artificially Synthesized Probe
  source 1..80: mol_type = other DNA
ccttggccccctggagtccagtatgcagcctcccaagaggaggtcacaaaattttatttgtgtatagctgggggaagcta

SEQ ID NO: 23831 - DNA, 80 bp, synthetic construct
  misc_feature 1..80: note = Artificially Synthesized Probe
  source 1..80: mol_type = other DNA
cctggagttactttttctatattgcacagcccagcctttcagccatattaaactctattccatcaagaagaacaaaagaa

SEQ ID NO: 23832 - DNA, 80 bp, synthetic construct
  misc_feature 1..80: note = Artificially Synthesized Probe
  source 1..80: mol_type = other DNA
ggggaaggtcagagcaggcaacaatttccataaatgtttgggaaacaacatttcctcttgctttcagagggggagaagag

SEQ ID NO: 23833 - DNA, 80 bp, synthetic construct
  misc_feature 1..80: note = Artificially Synthesized Probe
  source 1..80: mol_type = other DNA
tggatgcctataaaggtctgcatgagcatccccattccccagggagtggaaattaaatagcagataaaaattaccataac

SEQ ID NO: 23834 - DNA, 80 bp, synthetic construct
  misc_feature 1..80: note = Artificially Synthesized Probe
  source 1..80: mol_type = other DNA
ggttagaaatgtagctaccagagaaaagtccgttagagagattcattcctcttaggaagagtgaggtatatgattggaag

SEQ ID NO: 23835 - DNA, 80 bp, synthetic construct
  misc_feature 1..80: note = Artificially Synthesized Probe
  source 1..80: mol_type = other DNA
acagggggtggggtcagttttccatgaaaactagggaaaattagatgtgatgcaaagactggggattttgaagccagaca

SEQ ID NO: 23836 - DNA, 80 bp, synthetic construct
  misc_feature 1..80: note = Artificially Synthesized Probe
  source 1..80: mol_type = other DNA
agagttagatgagttgattttaaattccctttgtaagaacagaaagacaagaatggccaggaaagaaaaactaagaaaga

SEQ ID NO: 23837 - DNA, 80 bp, synthetic construct
  misc_feature 1..80: note = Artificially Synthesized Probe
  source 1..80: mol_type = other DNA
aaattatataggcatttatgtatacataatttgacccagcagtcctgtttctaggacacactcccaatgacacactggca

SEQ ID NO: 23838 - DNA, 80 bp, synthetic construct
  misc_feature 1..80: note = Artificially Synthesized Probe
  source 1..80: mol_type = other DNA
ttgatagcatagtcacacgaagaagaactattccaagtggctttttaaaccacaggaatttaactgtacattcctagtgg

SEQ ID NO: 23839 - DNA, 80 bp, synthetic construct
  misc_feature 1..80: note = Artificially Synthesized Probe
  source 1..80: mol_type = other DNA
tcaagataagcaacatgaaccataaagcccggaccgtggcgggtatgaaagaacaagaaaggcgggatcaggaaattcaa

SEQ ID NO: 23840 - DNA, 80 bp, synthetic construct
  misc_feature 1..80: note = Artificially Synthesized Probe
  source 1..80: mol_type = other DNA
tgtgagccacttccaagtgaatccatagagacctgttagctcccctcttgggaaatagacaaaatgtcatttacagtttt

SEQ ID NO: 23841 - DNA, 80 bp, synthetic construct
  misc_feature 1..80: note = Artificially Synthesized Probe
  source 1..80: mol_type = other DNA
tctcaggcagagtggcaagacgtgtgggcacaagtaaaacaaaataggccacgtgcttataatcaaggaagctgggtgat

SEQ ID NO: 23842 - DNA, 80 bp, synthetic construct
  misc_feature 1..80: note = Artificially Synthesized Probe
  source 1..80: mol_type = other DNA
gagacagggcaggagcaggcttactttggggtatatactctttgacactgtttggaggttttaccttaaataaaatatgc

SEQ ID NO: 23843 - DNA, 80 bp, synthetic construct
  misc_feature 1..80: note = Artificially Synthesized Probe
  source 1..80: mol_type = other DNA
catgtttattgcaggaccaacgaataaccatctaaataagcgctaactaaataacactacagtgtggaagttagaaagcc

SEQ ID NO: 23844 - DNA, 80 bp, synthetic construct
  misc_feature 1..80: note = Artificially Synthesized Probe
  source 1..80: mol_type = other DNA
cctactcatccctgccctctcccttctattcactcctgtcctctcccctctacttgccccagtcctctcccctctactca

SEQ ID NO: 23845 - DNA, 80 bp, synthetic construct
  misc_feature 1..80: note = Artificially Synthesized Probe
  source 1..80: mol_type = other DNA
gccatctcccctctattcatccctgccatctcccctccacttacccttctactgactcctaccacctcccctctattcac

SEQ ID NO: 23846 - DNA, 80 bp, synthetic construct
  misc_feature 1..80: note = Artificially Synthesized Probe
  source 1..80: mol_type = other DNA
tcacctctactcacccctttacttgcccctacactctcccttctactcacccctgccctctcccttctattcacccctgt

SEQ ID NO: 23847 - DNA, 80 bp, synthetic construct
  misc_feature 1..80: note = Artificially Synthesized Probe
  source 1..80: mol_type = other DNA
cctctactcacccctgccatctcccctctactcacccgtcctctcccctctactcacctctgtcacctctcctctattca

SEQ ID NO: 23848 - DNA, 80 bp, synthetic construct
  misc_feature 1..80: note = Artificially Synthesized Probe
  source 1..80: mol_type = other DNA
gaactttcactctctgtcttaatttgggcctctccataacatacggggctacctaggaagatgggattatgtgcagtgta

SEQ ID NO: 23849 - DNA, 80 bp, synthetic construct
  misc_feature 1..80: note = Artificially Synthesized Probe
  source 1..80: mol_type = other DNA
tgtccttctctgcctcttttaatttggaagaaactgtcagaaagggtgattgatccttctgcaagcacatctctaactgg

SEQ ID NO: 23850 - DNA, 80 bp, synthetic construct
  misc_feature 1..80: note = Artificially Synthesized Probe
  source 1..80: mol_type = other DNA
ttccaccatgatcacagagtgagctggtctgattattgctgatattctgtaaacgctcgtgcataggtgagaatactctg

SEQ ID NO: 23851 - DNA, 80 bp, synthetic construct
  misc_feature 1..80: note = Artificially Synthesized Probe
  source 1..80: mol_type = other DNA
caatccttggccttccttggcccgtagatgcatcacccccatctctaccttcattcttccatatgtctgtgtccaaattt

SEQ ID NO: 23852 - DNA, 80 bp, synthetic construct
  misc_feature 1..80: note = Artificially Synthesized Probe
  source 1..80: mol_type = other DNA
ctcattgtccccattctttggttggctggctggaaatgggaatgttcagtacattttgggcacctccttcattcctgagg

SEQ ID NO: 23853 - DNA, 80 bp, synthetic construct
  misc_feature 1..80: note = Artificially Synthesized Probe
  source 1..80: mol_type = other DNA
attcactccaccgggttgttgtgggaattaaataattcacttagaacacttagcatagtgcttgcccatggtaagcattc

SEQ ID NO: 23854 - DNA, 80 bp, synthetic construct
  misc_feature 1..80: note = Artificially Synthesized Probe
  source 1..80: mol_type = other DNA
agtttagagtcaaaggtcctgagttccagtctcagcccaccaaatacttttgcccaggtccctaatctctcccacctcca

SEQ ID NO: 23855 - DNA, 80 bp, synthetic construct
  misc_feature 1..80: note = Artificially Synthesized Probe
  source 1..80: mol_type = other DNA
ataaggctggcacaggtttcggttttattatggtcattcatgagatttttaatgagggcttactatgcaccaagcactat

SEQ ID NO: 23856 - DNA, 80 bp, synthetic construct
  misc_feature 1..80: note = Artificially Synthesized Probe
  source 1..80: mol_type = other DNA
tattgttttaagttagtgtcacagcatctgggtccggctaacattaaagtcagattctttctcttggggacacttttctg

SEQ ID NO: 23857 - DNA, 80 bp, synthetic construct
  misc_feature 1..80: note = Artificially Synthesized Probe
  source 1..80: mol_type = other DNA
actcccagccatgctggttttattgattctgggtctccaagatggtgcccttctaaagaatttccaaggatcattttgtg

SEQ ID NO: 23858 - DNA, 80 bp, synthetic construct
  misc_feature 1..80: note = Artificially Synthesized Probe
  source 1..80: mol_type = other DNA
gactaaagctcaaaacagtttgaccttgaggttttccaggaggaaaagcatgaggctgaggagaacacttatgttagatt

SEQ ID NO: 23859 - DNA, 80 bp, synthetic construct
  misc_feature 1..80: note = Artificially Synthesized Probe
  source 1..80: mol_type = other DNA
agccacctaatactcagcattgtcaactcagtgttatttgttaaaaaacctttttttaaaacctgaaatcaaagatttta

SEQ ID NO: 23860 - DNA, 80 bp, synthetic construct
  misc_feature 1..80: note = Artificially Synthesized Probe
  source 1..80: mol_type = other DNA
cttactttcttcacttattgtgtttttgagatttatctgtgttgacaaatctatcatttcattgtatatgaggggacttc

SEQ ID NO: 23861 - DNA, 80 bp, synthetic construct
  misc_feature 1..80: note = Artificially Synthesized Probe
  source 1..80: mol_type = other DNA
gagctaggtcccaattcttcctcagcctccgctcctccaccctggtccgctccttttatcacctcccctcctcacacctg

SEQ ID NO: 23862 - DNA, 80 bp, synthetic construct
  misc_feature 1..80: note = Artificially Synthesized Probe
  source 1..80: mol_type = other DNA
gaactctggcccgaggctctctgactgactccttcttggcttagcggctgaagactgatgctgcccgatcgcctcagaag

SEQ ID NO: 23863 - DNA, 80 bp, synthetic construct
  misc_feature 1..80: note = Artificially Synthesized Probe
  source 1..80: mol_type = other DNA
tgctctccctgccgatcgtgtccgactaatctctcaaaccccagcaccttctacaaaacaacaactcctttccttcctag

SEQ ID NO: 23864 - DNA, 80 bp, synthetic construct
  misc_feature 1..80: note = Artificially Synthesized Probe
  source 1..80: mol_type = other DNA
attagtcaaatcagccaagcattttttcaggctcttagtattcagtgacagactagcggtctattaaaaacacacctcac

SEQ ID NO: 23865 - DNA, 80 bp, synthetic construct
  misc_feature 1..80: note = Artificially Synthesized Probe
  source 1..80: mol_type = other DNA
agccctgagaaacatcgcccattctctctctccataccaccccccaaaaattttcgccgccccaacacttcaacaccatt

SEQ ID NO: 23866 - DNA, 80 bp, synthetic construct
  misc_feature 1..80: note = Artificially Synthesized Probe
  source 1..80: mol_type = other DNA
cattgaaaactctgctcttgtctgcggctgagctgggcaaaacagtgttggcacccattaagtggaaagttcgcttaact

SEQ ID NO: 23867 - DNA, 80 bp, synthetic construct
  misc_feature 1..80: note = Artificially Synthesized Probe
  source 1..80: mol_type = other DNA
tttctatcacaaacaagagagagcataagctctctctagtgaggaactgccatggcataatacataacaagtgcttaaaa

SEQ ID NO: 23868 - DNA, 80 bp, synthetic construct
  misc_feature 1..80: note = Artificially Synthesized Probe
  source 1..80: mol_type = other DNA
actgtcttccacaatggttgaactaggcaaagcagctcaattttataagaaaaggaactgagggctgggcacagtggttc

SEQ ID NO: 23869 - DNA, 80 bp, synthetic construct
  misc_feature 1..80: note = Artificially Synthesized Probe
  source 1..80: mol_type = other DNA
gcagggtgcggggagaggaaagtgtgggtcagggaaatgttggtctctagaaggtcttcagtgctgtttaactttttaaa

SEQ ID NO: 23870 - DNA, 80 bp, synthetic construct
  misc_feature 1..80: note = Artificially Synthesized Probe
  source 1..80: mol_type = other DNA
atggagaaaggcaggaaaagatcagaataacatgcagcataaaaactgcagagattgatataccacagtgagtatgggga

SEQ ID NO: 23871 - DNA, 80 bp, synthetic construct
  misc_feature 1..80: note = Artificially Synthesized Probe
  source 1..80: mol_type = other DNA
gggcatctggagaaaattaagccctaaagggctgtctcacaacaaactcatctgacataaacaaccaggactgtgttata

SEQ ID NO: 23872 - DNA, 80 bp, synthetic construct
  misc_feature 1..80: note = Artificially Synthesized Probe
  source 1..80: mol_type = other DNA
tgcttgggcttcttagtttttgtccccaggtaacaactatcaggttaaaccagaaaagagatgattaggacttgaaccaa

SEQ ID NO: 23873 - DNA, 80 bp, synthetic construct
  misc_feature 1..80: note = Artificially Synthesized Probe
  source 1..80: mol_type = other DNA
ttgaaggccacttcagaagactgggttttactctaagtataagagacacttctatagagttttgttttgttttgtgtgtt

SEQ ID NO: 23874 - DNA, 80 bp, synthetic construct
  misc_feature 1..80: note = Artificially Synthesized Probe
  source 1..80: mol_type = other DNA
gtgaagacctcaaagagagggtgagtatgcaagtgtggagctgagcagaaagttctgagatagacatttaaatgtgaaag

SEQ ID NO: 23875 - DNA, 80 bp, synthetic construct
  misc_feature 1..80: note = Artificially Synthesized Probe
  source 1..80: mol_type = other DNA
aagcaggatcagtgccagactgcacaaacccatcaaattcattcgacattcattgaacaactgctttgtacaaagacaaa

SEQ ID NO: 23876 - DNA, 80 bp, synthetic construct
  misc_feature 1..80: note = Artificially Synthesized Probe
  source 1..80: mol_type = other DNA
ccacttagtgcacagatcacctctgtaacctgctcaagccctttcaaaggcttcccagtaaatctcaactcctttccatt

SEQ ID NO: 23877 - DNA, 80 bp, synthetic construct
  misc_feature 1..80: note = Artificially Synthesized Probe
  source 1..80: mol_type = other DNA
accaagaccccatagataccaaaggacaactgtacataggttttctataagctttaattttggagggtaggaattgttac

SEQ ID NO: 23878 - DNA, 80 bp, synthetic construct
  misc_feature 1..80: note = Artificially Synthesized Probe
  source 1..80: mol_type = other DNA
gaggcttggggattcaagtttgaaaaaccactcctcaaggctccatgaaacccctaaactatatccacaatgtttatgtt

SEQ ID NO: 23879 - DNA, 80 bp, synthetic construct
  misc_feature 1..80: note = Artificially Synthesized Probe
  source 1..80: mol_type = other DNA
tctccaacctgggcatatcagaattacctgggcacttaaaaatgtcagtgcagtgcacaagccatagactaattaaatca

SEQ ID NO: 23880 - DNA, 80 bp, synthetic construct
  misc_feature 1..80: note = Artificially Synthesized Probe
  source 1..80: mol_type = other DNA
ctgtaaaatactttcagatccttgaagtgggtcaggttaccccagcagtctcaaactcaaatagcttcaggaaccagtgt

SEQ ID NO: 23881 - DNA, 80 bp, synthetic construct
  misc_feature 1..80: note = Artificially Synthesized Probe
  source 1..80: mol_type = other DNA
tttgtttgtttgtttgtttgtttgtttgtttgttttattttgatttctgctttgggcctgggcttgtggagaccaaccta

SEQ ID NO: 23882 - DNA, 80 bp, synthetic construct
  misc_feature 1..80: note = Artificially Synthesized Probe
  source 1..80: mol_type = other DNA
tgtattactgaagagcataaactagtgcactgcctttgaataagaaatttagtaatatgcaccaagagtgttaaaatgcc

SEQ ID NO: 23883 - DNA, 80 bp, synthetic construct
  misc_feature 1..80: note = Artificially Synthesized Probe
  source 1..80: mol_type = other DNA
aatgggattagcagtcgttgcctttgagtgatggatcagtctgacactttgagatgttttttcttttttgtttttgagta

SEQ ID NO: 23884 - DNA, 80 bp, synthetic construct
  misc_feature 1..80: note = Artificially Synthesized Probe
  source 1..80: mol_type = other DNA
ccaatcattgagccaggtcactacaaacacttttttatggcaaatagagcctagttattcaaaaaatgacttcccctcgc

SEQ ID NO: 23885 - DNA, 80 bp, synthetic construct
  misc_feature 1..80: note = Artificially Synthesized Probe
  source 1..80: mol_type = other DNA
aagcaaagaagggaaccaacaaagaatgcctaatcaaaccagttaccactgtgggagactgacgtgtaaaccaagaagaa

SEQ ID NO: 23886 - DNA, 80 bp, synthetic construct
  misc_feature 1..80: note = Artificially Synthesized Probe
  source 1..80: mol_type = other DNA
aatcctttttgtcccctatgctcttacaaaatgcttctgacaccaaatatgtaggtttgttccacaccaagcagatctcc

SEQ ID NO: 23887 - DNA, 80 bp, synthetic construct
  misc_feature 1..80: note = Artificially Synthesized Probe
  source 1..80: mol_type = other DNA
cactgcacataattgtatgtgctagacttttatatgactggcagtgcaataggtttgtttacactgcatcatcacagggt

SEQ ID NO: 23888 - DNA, 80 bp, synthetic construct
  misc_feature 1..80: note = Artificially Synthesized Probe
  source 1..80: mol_type = other DNA
tgttttgccttcttagccttcttcctgagatgctccttccattcaatttccatttgcccaaagctgactccacactttca

SEQ ID NO: 23889 - DNA, 80 bp, synthetic construct
  misc_feature 1..80: note = Artificially Synthesized Probe
  source 1..80: mol_type = other DNA
agatgactagtgactgctctattagaggacagcataggtctagatttacccacgaggagaatagaaaccttgaatagcat

SEQ ID NO: 23890 - DNA, 80 bp, synthetic construct
  misc_feature 1..80: note = Artificially Synthesized Probe
  source 1..80: mol_type = other DNA
ctagtcacagaaaaagttgtcaacctctgttctagctaacagatgccccagaatttgtttagcctgttccctactgctgg

SEQ ID NO: 23891 - DNA, 80 bp, synthetic construct
  misc_feature 1..80: note = Artificially Synthesized Probe
  source 1..80: mol_type = other DNA
tctctcaggcccttatcttcttatgttgtgtgtttaaactcacaactggttgactaccaatatctgggtaactacatagg

SEQ ID NO: 23892 - DNA, 80 bp, synthetic construct
  misc_feature 1..80: note = Artificially Synthesized Probe
  source 1..80: mol_type = other DNA
tgttataataacgatagctgatcctcttaatgaaaaggagatttgatctcatcctattcctggtagatcctcctcttctt

SEQ ID NO: 23893 - DNA, 80 bp, synthetic construct
  misc_feature 1..80: note = Artificially Synthesized Probe
  source 1..80: mol_type = other DNA
agccaccatgcccagctgatttcttttttaagaataaataagtgacatcttgtggaatgtgaggttggagaggcctttgt

SEQ ID NO: 23894 - DNA, 80 bp, synthetic construct
  misc_feature 1..80: note = Artificially Synthesized Probe
  source 1..80: mol_type = other DNA
tcaggtcctgtgcagtttcaaagcctagggatcaacatatctgaatttcatcacacaccctaacaactgcaccgggcaac

SEQ ID NO: 23895 - DNA, 80 bp, synthetic construct
  misc_feature 1..80: note = Artificially Synthesized Probe
  source 1..80: mol_type = other DNA
acacctaaatacagtatttttgctaatgaaactaagacatggtgtttcagccaagaaaccagtaaatatcacggaagctg

SEQ ID NO: 23896 - DNA, 80 bp, synthetic construct
  misc_feature 1..80: note = Artificially Synthesized Probe
  source 1..80: mol_type = other DNA
ccttctcccgattcctcccttggggtggggtgtccgcatgtgcgatggcctgctagcacttcggaggggagcatgcgcag

SEQ ID NO: 23897 - DNA, 80 bp, synthetic construct
  misc_feature 1..80: note = Artificially Synthesized Probe
  source 1..80: mol_type = other DNA
agacaaggagtatacttcagaatgatccacctgagtttggggaagatacctccaattttagggatcttaaattggtagat

SEQ ID NO: 23898 - DNA, 80 bp, synthetic construct
  misc_feature 1..80: note = Artificially Synthesized Probe
  source 1..80: mol_type = other DNA
ggtaaaaatggtaattccagaaaaccgtaacctaggaaagtagagttttttccctcctccattcttggctaggagacgtt

SEQ ID NO: 23899 - DNA, 80 bp, synthetic construct
  misc_feature 1..80: note = Artificially Synthesized Probe
  source 1..80: mol_type = other DNA
gcctttgcaccaacctaatatgtactgatatagaataatttctaagatactttaagtaccaaagcacggggggggcaata

SEQ ID NO: 23900 - DNA, 80 bp, synthetic construct
  misc_feature 1..80: note = Artificially Synthesized Probe
  source 1..80: mol_type = other DNA
ctggtgtccttgtgctaattttaactctctactgtcaaattccagtattatggatcttagtttccaggggattcccatct

SEQ ID NO: 23901 - DNA, 80 bp, synthetic construct
  misc_feature 1..80: note = Artificially Synthesized Probe
  source 1..80: mol_type = other DNA
tttgagaacttgctatgttcctagaactgtaccaagtgctttggagacataaaactaatgagatatggtccctgcctcca

SEQ ID NO: 23902 - DNA, 80 bp, synthetic construct
  misc_feature 1..80: note = Artificially Synthesized Probe
  source 1..80: mol_type = other DNA
tggagataattgttgtagctgccaatgcaagtgtgagccactttaggatcgtaatagaatttacctcataacgtcattga

SEQ ID NO: 23903 - DNA, 80 bp, synthetic construct
  misc_feature 1..80: note = Artificially Synthesized Probe
  source 1..80: mol_type = other DNA
tctgccataatgtcagggacttaggtggggaagctggattcggactttaagggtgagatggaagacacatataacctttg

SEQ ID NO: 23904 - DNA, 80 bp, synthetic construct
  misc_feature 1..80: note = Artificially Synthesized Probe
  source 1..80: mol_type = other DNA
aaggggtttattgattagctctgtagttttcaggacatggtgcatgggaagatgagaagaaagaagtttccagtctaatg

SEQ ID NO: 23905 - DNA, 80 bp, synthetic construct
  misc_feature 1..80: note = Artificially Synthesized Probe
  source 1..80: mol_type = other DNA
tggcttcattttggacaccttgatgtgaggtctgagtatatgtttccagtaagaagttcagtggcaggtccatagctact

SEQ ID NO: 23906 - DNA, 80 bp, synthetic construct
  misc_feature 1..80: note = Artificially Synthesized Probe
  source 1..80: mol_type = other DNA
ataattattttccaaacactgtagaagtatttaagaagaaatcaccccagacttcctctcacataggcacccattcccac

SEQ ID NO: 23907 - DNA, 80 bp, synthetic construct
  misc_feature 1..80: note = Artificially Synthesized Probe
  source 1..80: mol_type = other DNA
tctttatctttgtcaccccatggttaccatatgccagccacagatccaaacatcacatcctcattcctggccggaagtgg

SEQ ID NO: 23908 - DNA, 80 bp, synthetic construct
  misc_feature 1..80: note = Artificially Synthesized Probe
  source 1..80: mol_type = other DNA
cttgattatttttgtttatcctccaaaccctgccaagacaacctcatgatccgtgttttagagacaggaaacaaagcctc

SEQ ID NO: 23909 - DNA, 80 bp, synthetic construct
  misc_feature 1..80: note = Artificially Synthesized Probe
  source 1..80: mol_type = other DNA
gcttgggactccgggaactcgggccccagatccttgttcgagctggtcttcagtttccccatctgtacgctgaagagcct

SEQ ID NO: 23910 - DNA, 80 bp, synthetic construct
  misc_feature 1..80: note = Artificially Synthesized Probe
  source 1..80: mol_type = other DNA
tatcaccccccacccccgctcccatcttggtgtcacccatgggggctaatccggtccccttggataatgctttatattgg

SEQ ID NO: 23911 - DNA, 80 bp, synthetic construct
  misc_feature 1..80: note = Artificially Synthesized Probe
  source 1..80: mol_type = other DNA
ttctgtttcccaagtccagcagtgtcgtgggataggttttgctttcttttactgtctccatcctacttacacctccctga

SEQ ID NO: 23912 - DNA, 80 bp, synthetic construct
  misc_feature 1..80: note = Artificially Synthesized Probe
  source 1..80: mol_type = other DNA
ggttctgtatttactcgtattttattaattcaacacacacgttttgggtacctgacctgtgctgcggctaggggtatagc

SEQ ID NO: 23913 - DNA, 80 bp, synthetic construct
  misc_feature 1..80: note = Artificially Synthesized Probe
  source 1..80: mol_type = other DNA
tttagatacaattttcttggcaccatgattagagccatgaagaagtaaaggagctttatgaaggtggagcgggatccacc

SEQ ID NO: 23914 - DNA, 80 bp, synthetic construct
  misc_feature 1..80: note = Artificially Synthesized Probe
  source 1..80: mol_type = other DNA
acacctagggcgagtggatcacaattcaaagaggatgatctcccagaacttcccttttctttttcttttcttttcttttt

SEQ ID NO: 23915 - DNA, 80 bp, synthetic construct
  misc_feature 1..80: note = Artificially Synthesized Probe
  source 1..80: mol_type = other DNA
gatggaagaatcacttgagcccaggaggtcgaggctgcagtgagccatgattgtgccattgcactcgagcctgggcaaca

SEQ ID NO: 23916 - DNA, 80 bp, synthetic construct
  misc_feature 1..80: note = Artificially Synthesized Probe
  source 1..80: mol_type = other DNA
tgtgcaggatgagagggtcagacatgcaccaaaatgctaataacacccactccacaaatatttgctaaccacatttcaag

SEQ ID NO: 23917 - DNA, 80 bp, synthetic construct
  misc_feature 1..80: note = Artificially Synthesized Probe
  source 1..80: mol_type = other DNA
cactccggcctgggcgatagagtgagactccgtctcaacaacaacaacaaaaaaaaagtgctagggttacaggcatgagc

SEQ ID NO: 23918 - DNA, 80 bp, synthetic construct
  misc_feature 1..80: note = Artificially Synthesized Probe
  source 1..80: mol_type = other DNA
aacaatgtggcatgctgtatgcgcagggacgcttgaggaagctgctcgactgtgagaatgtcgccagagtgaaacagagt

SEQ ID NO: 23919 - DNA, 80 bp, synthetic construct
  misc_feature 1..80: note = Artificially Synthesized Probe
  source 1..80: mol_type = other DNA
tgcctcagcctcccagagtgctgggattataggcatgagccaccgcaactggtcaattacacccttttcgttattttttt

SEQ ID NO: 23920 - DNA, 80 bp, synthetic construct
  misc_feature 1..80: note = Artificially Synthesized Probe
  source 1..80: mol_type = other DNA
gttgcccaggctggagtgtaatggtgcgatctcacctcaccacaacctctacctcccaggttcaagtgattctcctgcct

SEQ ID NO: 23921 - DNA, 80 bp, synthetic construct
  misc_feature 1..80: note = Artificially Synthesized Probe
  source 1..80: mol_type = other DNA
gagactctgatgcattctttagtttgtcaattgaatttttcaactccagaacttctgcctgattcttttaattatttcaa

SEQ ID NO: 23922 - DNA, 80 bp, synthetic construct
  misc_feature 1..80: note = Artificially Synthesized Probe
  source 1..80: mol_type = other DNA
ggtattacaggcatgagccactgtgcccggccggctttatttagtttctgtggtgaggtcatgttttcctggatggtttt

SEQ ID NO: 23923 - DNA, 80 bp, synthetic construct
  misc_feature 1..80: note = Artificially Synthesized Probe
  source 1..80: mol_type = other DNA
ctactgtggctgagctggcacacaagccacaagacaaaatcttccccactcttttttctgcaagcaggggagcctctccc

SEQ ID NO: 23924 - DNA, 80 bp, synthetic construct
  misc_feature 1..80: note = Artificially Synthesized Probe
  source 1..80: mol_type = other DNA
cgctcacctgattttggttcttatgaagtgcttttttgtgtggatagttgttcagctggttgttcttctgaaggagatga

SEQ ID NO: 23925 - DNA, 80 bp, synthetic construct
  misc_feature 1..80: note = Artificially Synthesized Probe
  source 1..80: mol_type = other DNA
tttttttttttttttttttaatgagatggagtctcactttgtcgcccaggctagagtgcagtggcacgatctcagctcac

SEQ ID NO: 23926 - DNA, 80 bp, synthetic construct
  misc_feature 1..80: note = Artificially Synthesized Probe
  source 1..80: mol_type = other DNA
gttaattggggaggaggcaaggggtaatgactgcatgaagggttgcatctgagccactgtcaatattgtatttcttcata

SEQ ID NO: 23927 - DNA, 80 bp, synthetic construct
  misc_feature 1..80: note = Artificially Synthesized Probe
  source 1..80: mol_type = other DNA
tctgctagtcattcccctattgatgatcattcagggtgttccctattgtttgtgactacatatggtgtggcaaagaatat

SEQ ID NO: 23928 - DNA, 80 bp, synthetic construct
  misc_feature 1..80: note = Artificially Synthesized Probe
  source 1..80: mol_type = other DNA
aaaatcaattttaggaaagtgtctgagagagatcagtgactcagaagagtttgagtggggaagtgctcagaagccatggc

SEQ ID NO: 23929 - DNA, 80 bp, synthetic construct
  misc_feature 1..80: note = Artificially Synthesized Probe
  source 1..80: mol_type = other DNA
gggagtccatgaaaaatctctagccagccctcctgaagcactagacaggggaacaagtcagagtttgcaggaaaatctgg

SEQ ID NO: 23930 - DNA, 80 bp, synthetic construct
  misc_feature 1..80: note = Artificially Synthesized Probe
  source 1..80: mol_type = other DNA
cctagcctgtgaggtttccactgaagtctgctgccagacgtattggagctccattgtatgtttgtttttgtttttgtttt

SEQ ID NO: 23931 - DNA, 80 bp, synthetic construct
  misc_feature 1..80: note = Artificially Synthesized Probe
  source 1..80: mol_type = other DNA
caggtgtgagccactgcgcctggcctttattcttttttattttttcttttgtctcctctggctgtgtcttgtcctgtctc

SEQ ID NO: 23932 - DNA, 80 bp, synthetic construct
  misc_feature 1..80: note = Artificially Synthesized Probe
  source 1..80: mol_type = other DNA
atccttcttgggaaggcttgccaggaaattgagtgttgtgaactaaacttttggtcactgcagctgtatctgcattaggg

SEQ ID NO: 23933 - DNA, 80 bp, synthetic construct
  misc_feature 1..80: note = Artificially Synthesized Probe
  source 1..80: mol_type = other DNA
cttcggccagcaggtggtgaagcctgccgggcttgtgtccttcccttcaggatggtgagttctctcctggcccagggcag

SEQ ID NO: 23934 - DNA, 80 bp, synthetic construct
  misc_feature 1..80: note = Artificially Synthesized Probe
  source 1..80: mol_type = other DNA
tgttcactcaaggcccaggccctcttcagtcagcttgtggtgagtgctgccaggcctgggtcttttccttcagggaagac

SEQ ID NO: 23935 - DNA, 80 bp, synthetic construct
  misc_feature 1..80: note = Artificially Synthesized Probe
  source 1..80: mol_type = other DNA
taatgatcatttaaatgctccctccatgggtggtgtctgatttctgccccatggtgctttccactgtaatagaacagcgc

SEQ ID NO: 23936 - DNA, 80 bp, synthetic construct
  misc_feature 1..80: note = Artificially Synthesized Probe
  source 1..80: mol_type = other DNA
aagatggcgtcttacatgtctgacatctcagttgggatggctagatcagctgcggctgaccagttatctatctctctctc

SEQ ID NO: 23937 - DNA, 80 bp, synthetic construct
  misc_feature 1..80: note = Artificially Synthesized Probe
  source 1..80: mol_type = other DNA
aaaatggaccacatcactaaatgcaaaacttaacatttctagaaggaaacataggagaaaatctttgtgaccctagatga

SEQ ID NO: 23938 - DNA, 80 bp, synthetic construct
  misc_feature 1..80: note = Artificially Synthesized Probe
  source 1..80: mol_type = other DNA
tttttgagcaaggatctcactcttttgcccaggctggagtgcagtggtgtgatcatggctcacttctgcctcgaactcct

SEQ ID NO: 23939 - DNA, 80 bp, synthetic construct
  misc_feature 1..80: note = Artificially Synthesized Probe
  source 1..80: mol_type = other DNA
cacctgccttgtttttttaatggtcactgtagagtttatagtccacatctttaacttctcgcagtctacattcaagtgct

SEQ ID NO: 23940 - DNA, 80 bp, synthetic construct
  misc_feature 1..80: note = Artificially Synthesized Probe
  source 1..80: mol_type = other DNA
gcctctctttttgtaacttcttatgaatctataatctcttagaaataaaaataatcagtcaggtgccatcgctcatacct

SEQ ID NO: 23941 - DNA, 80 bp, synthetic construct
  misc_feature 1..80: note = Artificially Synthesized Probe
  source 1..80: mol_type = other DNA
aaggaggactggggagacggtggtcaaaggatacaaatttcagttaggaggagtaagttcaggagatctattgcacaaca

SEQ ID NO: 23942 - DNA, 80 bp, synthetic construct
  misc_feature 1..80: note = Artificially Synthesized Probe
  source 1..80: mol_type = other DNA
aatagagacagagagattagtgtctgcttagggctagaaagttactagggagattggatattaactacaaatgagtatga

SEQ ID NO: 23943 - DNA, 80 bp, synthetic construct
  misc_feature 1..80: note = Artificially Synthesized Probe
  source 1..80: mol_type = other DNA
gtgcccagccaaaagctgtttttcaatggaggaccaacatctgaaaagtacattgacaaactgaggctcttatatgttta

SEQ ID NO: 23944 - DNA, 80 bp, synthetic construct
  misc_feature 1..80: note = Artificially Synthesized Probe
  source 1..80: mol_type = other DNA
caggaacctcagcccagagaggggcagcttcctgcctcgggtcaggaagcacagccttgggctccgagagtccctcgtct

SEQ ID NO: 23945 - DNA, 80 bp, synthetic construct
  misc_feature 1..80: note = Artificially Synthesized Probe
  source 1..80: mol_type = other DNA
tccccctaccttttttttttttttttttttttgagaaagggtcttgctttgttgaccaggctggagtgcagtggcacagt

SEQ ID NO: 23946 - DNA, 80 bp, synthetic construct
  misc_feature 1..80: note = Artificially Synthesized Probe
  source 1..80: mol_type = other DNA
ccagaacttcacttccaaccatctccaaatcccccttacaaccaaccccagaaccagccctgggatcttccttttcaccc

SEQ ID NO: 23947 - DNA, 80 bp, synthetic construct
  misc_feature 1..80: note = Artificially Synthesized Probe
  source 1..80: mol_type = other DNA
ccgcctcctgggctcaagcaattctcctgcctcagcctcccgagtagctgggattacaggagtgtgccatcacacctggc

SEQ ID NO: 23948 - DNA, 80 bp, synthetic construct
  misc_feature 1..80: note = Artificially Synthesized Probe
  source 1..80: mol_type = other DNA
tcaaaaaaaaaagaaaaaaagttggcatgtaagatgcttatttaggtctgaaataagaactcattgagtgagaactggaa

SEQ ID NO: 23949 - DNA, 80 bp, synthetic construct
  misc_feature 1..80: note = Artificially Synthesized Probe
  source 1..80: mol_type = other DNA
tactatggccacatttgagaaaaatccataatataatctcctcccagttttgcaggtaatttggaactctgggaaacatc

SEQ ID NO: 23950 - DNA, 80 bp, synthetic construct
  misc_feature 1..80: note = Artificially Synthesized Probe
  source 1..80: mol_type = other DNA
tgtcctcaaaccaaggaatacatgaaaaggggggatttcctttttcttggtctaaaccaaagagcaatgacaactactga

SEQ ID NO: 23951 - DNA, 80 bp, synthetic construct
  misc_feature 1..80: note = Artificially Synthesized Probe
  source 1..80: mol_type = other DNA
ggctggccgggagaagcagatggtttgtacaaacattttttgatactaccatgaataaacatattttagttgttttcaga

SEQ ID NO: 23952 - DNA, 80 bp, synthetic construct
  misc_feature 1..80: note = Artificially Synthesized Probe
  source 1..80: mol_type = other DNA
aatcaagtcccgggaagaaatttacatttcaaactctgaaaaatcagtgtctaggttggcagcagtactctggaaactga

SEQ ID NO: 23953 - DNA, 80 bp, synthetic construct
  misc_feature 1..80: note = Artificially Synthesized Probe
  source 1..80: mol_type = other DNA
aactattcattacctcattctgaagaggtagttttttgtagaggtcacctgaaccctgcaatgtggtttcgaactaaagc

SEQ ID NO: 23954 - DNA, 80 bp, synthetic construct
  misc_feature 1..80: note = Artificially Synthesized Probe
  source 1..80: mol_type = other DNA
ttacaaacaatcctctgtagttgctctcaaatttttcagaaggcttcacctctccctaccaaaaataaaacacactacag

SEQ ID NO: 23955 - DNA, 80 bp, synthetic construct
  misc_feature 1..80: note = Artificially Synthesized Probe
  source 1..80: mol_type = other DNA
cttctgaatacatgtatgttagcaaaaatctaatggtagtgagcttttagtggctgcaatatagacagcagggcctggag

SEQ ID NO: 23956 - DNA, 80 bp, synthetic construct
  misc_feature 1..80: note = Artificially Synthesized Probe
  source 1..80: mol_type = other DNA
atttctcacattcaaaactgttattaagcagttttgtgggggtttagttagatactgccacggcattttgtgccctggac

SEQ ID NO: 23957 - DNA, 80 bp, synthetic construct
  misc_feature 1..80: note = Artificially Synthesized Probe
  source 1..80: mol_type = other DNA
ggctacttgaaggctgcaaattctcctgtagagggaggacaagagctaattttaaaaaagtcatctcaaataacctagag

SEQ ID NO: 23958 - DNA, 80 bp, synthetic construct
  misc_feature 1..80: note = Artificially Synthesized Probe
  source 1..80: mol_type = other DNA
gggattacaggtgtgagccactgcacccggccgccattatttttcatctaccattttgtccatagtttctacttgtaact

SEQ ID NO: 23959 - DNA, 80 bp, synthetic construct
  misc_feature 1..80: note = Artificially Synthesized Probe
  source 1..80: mol_type = other DNA
ttcccaatctgaatacaactactaatgaactgcagatagtctattatctctttctatgcatgaattccttttaacaagca

SEQ ID NO: 23960 - DNA, 80 bp, synthetic construct
  misc_feature 1..80: note = Artificially Synthesized Probe
  source 1..80: mol_type = other DNA
acacacgcacacaacttcagatgtttcctgttcattataatgattagaaatttcattttgttgaagtgtcatactccaca

SEQ ID NO: 23961 - DNA, 80 bp, synthetic construct
  misc_feature 1..80: note = Artificially Synthesized Probe
  source 1..80: mol_type = other DNA
ccacaaccggccatgcattttcaagttaactttatttaggaatagagcagagaacaactgggaagactgaaaaaaaaaaa

SEQ ID NO: 23962 - DNA, 80 bp, synthetic construct
  misc_feature 1..80: note = Artificially Synthesized Probe
  source 1..80: mol_type = other DNA
tcttaaactaagagtgactcacttgagagaaaggccatttaagctggtatattaaatagccaatgttttagagaggacaa

SEQ ID NO: 23963 - DNA, 80 bp, synthetic construct
  misc_feature 1..80: note = Artificially Synthesized Probe
  source 1..80: mol_type = other DNA
ggaaatcaactttaatttcaaaaaaaaaaaagagggctcaggttttaggaaaaaagcagtcacaaaagaacaaatgttct

SEQ ID NO: 23964 - DNA, 80 bp, synthetic construct
  misc_feature 1..80: note = Artificially Synthesized Probe
  source 1..80: mol_type = other DNA
ttggctacatttaaaaatcatgacaaaaccaaattgagtaagtgaagatatagttaagaggctgacagtgaagcagagat

SEQ ID NO: 23965 - DNA, 80 bp, synthetic construct
  misc_feature 1..80: note = Artificially Synthesized Probe
  source 1..80: mol_type = other DNA
gaagtttactacttaaaataaccaagtgaatgatacaaacccggaacagaaagtaaagcctctagaagaggctctgccaa

SEQ ID NO: 23966 - DNA, 80 bp, synthetic construct
  misc_feature 1..80: note = Artificially Synthesized Probe
  source 1..80: mol_type = other DNA
gccctttaaagaaacctagccatgggaaatgttttacatacacctaattgaaagcagaacctcacagacccagagtgcta

SEQ ID NO: 23967 - DNA, 80 bp, synthetic construct
  misc_feature 1..80: note = Artificially Synthesized Probe
  source 1..80: mol_type = other DNA
tcagtacctttttttatgtataaaaatacatacatgaaaacaaggcccacctgaacaccactttttttttttggagatgg

SEQ ID NO: 23968 - DNA, 80 bp, synthetic construct
  misc_feature 1..80: note = Artificially Synthesized Probe
  source 1..80: mol_type = other DNA
tttaaaattttacatagaatgctcctcctcacttcccaacattgttcccagtgctggatattaccaacctgagaggcgaa

SEQ ID NO: 23969 - DNA, 80 bp, synthetic construct
  misc_feature 1..80: note = Artificially Synthesized Probe
  source 1..80: mol_type = other DNA
acccagccaaccacttagctttccctttcttttcttaggcaacaccctgacagacttgttaaaaccatcaattttatctt

SEQ ID NO: 23970 - DNA, 80 bp, synthetic construct
  misc_feature 1..80: note = Artificially Synthesized Probe
  source 1..80: mol_type = other DNA
aaaggaaagcttgaatctgtttaccaccaagaagaaataaagcagtggttcacaaaatgtggtccgtggaccaccagggg

SEQ ID NO: 23971 - DNA, 80 bp, synthetic construct
  misc_feature 1..80: note = Artificially Synthesized Probe
  source 1..80: mol_type = other DNA
ctggagtctgcacatagaatccaaactcatgaaatacacactgtgtgcccaaaaaagtgctcagaaatctgtctatgaat

SEQ ID NO: 23972 - DNA, 80 bp, synthetic construct
  misc_feature 1..80: note = Artificially Synthesized Probe
  source 1..80: mol_type = other DNA
tatgtagtagaggttaaaggatgaaccttggaaagagttactgaattgaggggattacagttttctttcacaatgccccc

SEQ ID NO: 23973 - DNA, 80 bp, synthetic construct
  misc_feature 1..80: note = Artificially Synthesized Probe
  source 1..80: mol_type = other DNA
tctttttgtgatatgtatcttatctaagttctccaatgagactatgggtgctcaggcagagagattgtgactcatacata

SEQ ID NO: 23974 - DNA, 80 bp, synthetic construct
  misc_feature 1..80: note = Artificially Synthesized Probe
  source 1..80: mol_type = other DNA
caacttactggtatcccctttgaaaaaactgatttgccagagaaccactcaagtggaagtgtaacacttatcttgctttc

SEQ ID NO: 23975 - DNA, 80 bp, synthetic construct
  misc_feature 1..80: note = Artificially Synthesized Probe
  source 1..80: mol_type = other DNA
cacaccttttacccatatgtaacctaactatagtatacattgtcccagggtgtaaaaacctctggggcaacaaagagaca

SEQ ID NO: 23976 - DNA, 80 bp, synthetic construct
  misc_feature 1..80: note = Artificially Synthesized Probe
  source 1..80: mol_type = other DNA
gtaataaactgtaactgtgaatgtaacagttgtcagtgagtcttgagcagctttcagtgagttttcagcaagtcctttta

SEQ ID NO: 23977 - DNA, 80 bp, synthetic construct
  misc_feature 1..80: note = Artificially Synthesized Probe
  source 1..80: mol_type = other DNA
atttttcatactttcaatacacactcagtactcctggtgtctcgaccctgtcaattcactccatggtattactggagctc

SEQ ID NO: 23978 - DNA, 80 bp, synthetic construct
  misc_feature 1..80: note = Artificially Synthesized Probe
  source 1..80: mol_type = other DNA
tggaagaaattcttagccgaattcccttattttgcaggtaattgaaaaaagaaaaaaggccaggtgcagtggttcacgcc

SEQ ID NO: 23979 - DNA, 80 bp, synthetic construct
  misc_feature 1..80: note = Artificially Synthesized Probe
  source 1..80: mol_type = other DNA
tagggggtaatgaagcagaatgggggtagttgtaagaggacatcattcttttacctccttcttctccattaaatacttaa

SEQ ID NO: 23980 - DNA, 80 bp, synthetic construct
  misc_feature 1..80: note = Artificially Synthesized Probe
  source 1..80: mol_type = other DNA
gattggaccctccccatttaattacaatctgctccagtttctccatttttaagcaaaatttccaggtgattctgaggcaa

SEQ ID NO: 23981 - DNA, 80 bp, synthetic construct
  misc_feature 1..80: note = Artificially Synthesized Probe
  source 1..80: mol_type = other DNA
catgactgatattctgaggaaaggacttaacgtgttgctattactgccaaaagtatacaaacgatttctaaaactggtaa

SEQ ID NO: 23982 - DNA, 80 bp, synthetic construct
  misc_feature 1..80: note = Artificially Synthesized Probe
  source 1..80: mol_type = other DNA
atgctttattaacaaaagcaagacagcaggtagatttagtaaaagatggtataaagaatcttctggctgctgcttcttgg

SEQ ID NO: 23983 - DNA, 80 bp, synthetic construct
  misc_feature 1..80: note = Artificially Synthesized Probe
  source 1..80: mol_type = other DNA
gggtactgttggctattattctctcgtcttaaaactcagcatgaaagaataaaggagaaacccatttacacaggtatcaa

SEQ ID NO: 23984 - DNA, 80 bp, synthetic construct
  misc_feature 1..80: note = Artificially Synthesized Probe
  source 1..80: mol_type = other DNA
acataaagtttgtggctttgaaagcccttacaacttttctgtttccagcagggtgcccgaaagtcttagtgcagattaag

SEQ ID NO: 23985 - DNA, 80 bp, synthetic construct
  misc_feature 1..80: note = Artificially Synthesized Probe
  source 1..80: mol_type = other DNA
cgaaacagcttctctgttaaaaggagtagttctcttagcaaaaccataataatggctgtggatcacacctgccttaaatt

SEQ ID NO: 23986 - DNA, 80 bp, synthetic construct
  misc_feature 1..80: note = Artificially Synthesized Probe
  source 1..80: mol_type = other DNA
tctgatagattttcttgtaatgttcagttgtcgagaaaccaaaagcaggctgtggtatcctgctctcctatacatgcatg

SEQ ID NO: 23987 - DNA, 80 bp, synthetic construct
  misc_feature 1..80: note = Artificially Synthesized Probe
  source 1..80: mol_type = other DNA
aatacaaattctaactcctgagtgaagctttcccatgactaaccgaactgaaagtgctctttcactgctcaacttatgta

SEQ ID NO: 23988 - DNA, 80 bp, synthetic construct
  misc_feature 1..80: note = Artificially Synthesized Probe
  source 1..80: mol_type = other DNA
gagagacctgggatctagtatacagccaaggtgttggtctttgaaaggaggttctttttcctgcaagacttaaaaacaaa

SEQ ID NO: 23989 - DNA, 80 bp, synthetic construct
  misc_feature 1..80: note = Artificially Synthesized Probe
  source 1..80: mol_type = other DNA
acagaagtactaggaaagaacaaatatgctatcaaccaaaggaacaacacattctcttgataggtttctcttaacagtct

SEQ ID NO: 23990 - DNA, 80 bp, synthetic construct
  misc_feature 1..80: note = Artificially Synthesized Probe
  source 1..80: mol_type = other DNA
gccaccacgcccagccttaggattttaaattttgtagacatggtctataatttcagattaaaactttagctttcactaaa

SEQ ID NO: 23991 - DNA, 80 bp, synthetic construct
  misc_feature 1..80: note = Artificially Synthesized Probe
  source 1..80: mol_type = other DNA
tccttatactttgatgccctctgctcccttattacaaccctggaaagtaagattaacgagaatggcattctgttacttct

SEQ ID NO: 23992 - DNA, 80 bp, synthetic construct
  misc_feature 1..80: note = Artificially Synthesized Probe
  source 1..80: mol_type = other DNA
tgggtatatcacaacttatctatttacttattggacactgtgttgttcctagtttgtggcaaatatgaagaagatgctgt

SEQ ID NO: 23993 - DNA, 80 bp, synthetic construct
  misc_feature 1..80: note = Artificially Synthesized Probe
  source 1..80: mol_type = other DNA
tgtgatcaactgtatcagatgtttctgacaggtcaaataaactgtggactgagaattttactgctggatctagcaacatg

SEQ ID NO: 23994 - DNA, 80 bp, synthetic construct
  misc_feature 1..80: note = Artificially Synthesized Probe
  source 1..80: mol_type = other DNA
gaagagagtgggggccaatattcaacattcttaaagaaaacaattttcaacccagaatttcatatccagccaaactaagc

SEQ ID NO: 23995 - DNA, 80 bp, synthetic construct
  misc_feature 1..80: note = Artificially Synthesized Probe
  source 1..80: mol_type = other DNA
taataatgggagactttaacatcccactgtcaacattagacagatcaacgcgacagaaagttaataaggacacccaggaa

SEQ ID NO: 23996 - DNA, 80 bp, synthetic construct
  misc_feature 1..80: note = Artificially Synthesized Probe
  source 1..80: mol_type = other DNA
cagcacatgtttcagagggcacagggttgggggtaaggtcacagatcaacaggatcacaaggcagaagaatttttcttag

SEQ ID NO: 23997 - DNA, 80 bp, synthetic construct
  misc_feature 1..80: note = Artificially Synthesized Probe
  source 1..80: mol_type = other DNA
gaattctaccagagatacaaggaggaactggtaccattccttctgaaactattccaatcaatagaaaaagagggaatcct

SEQ ID NO: 23998 - DNA, 80 bp, synthetic construct
  misc_feature 1..80: note = Artificially Synthesized Probe
  source 1..80: mol_type = other DNA
tggaagaacattccatgctcatgggtagaagaatcagttatcatgaaaatggccatattgcccaaggtaatttacagatt

SEQ ID NO: 23999 - DNA, 80 bp, synthetic construct
  misc_feature 1..80: note = Artificially Synthesized Probe
  source 1..80: mol_type = other DNA
cgtatgtttattgcggcactattcacaatagcaaagacttggaaccaacccaaatgtccaacaatgatagactggattaa

SEQ ID NO: 24000 - DNA, 80 bp, synthetic construct
  misc_feature 1..80: note = Artificially Synthesized Probe
  source 1..80: mol_type = other DNA
tgtgaaccactgcactcagtgaaagatgttttatttatttacttatttttgagacagagtcttgctctgtcacccaggct

SEQ ID NO: 24001 - DNA, 80 bp, synthetic construct
  misc_feature 1..80: note = Artificially Synthesized Probe
  source 1..80: mol_type = other DNA
agtatattttaagaaaccccacagaacatagttggcataaagaaaaaggggagacagtgagttaacagtatgtagcagag

SEQ ID NO: 24002 - DNA, 80 bp, synthetic construct
  misc_feature 1..80: note = Artificially Synthesized Probe
  source 1..80: mol_type = other DNA
tgcttctccaccatgttaccatgcagtaggaaagccctcaccagaagcccagcagatgttagcaccaatgcccttggact

SEQ ID NO: 24003 - DNA, 80 bp, synthetic construct
  misc_feature 1..80: note = Artificially Synthesized Probe
  source 1..80: mol_type = other DNA
tgatcctattaccctagtcttccaaagtgctgggattagaggcatgagccactgcatccagaccaatttttcactattat

SEQ ID NO: 24004 - DNA, 80 bp, synthetic construct
  misc_feature 1..80: note = Artificially Synthesized Probe
  source 1..80: mol_type = other DNA
atctaccattagaacagctctgctccttttcaagtaaacctaggaatcagaaatagtttttcactgaggtacaaatggaa

SEQ ID NO: 24005 - DNA, 80 bp, synthetic construct
  misc_feature 1..80: note = Artificially Synthesized Probe
  source 1..80: mol_type = other DNA
gcttctaactgggaatagcttctggagataattccaaaacaaagccctcaagatgaaactatggttggcattcaagatga

SEQ ID NO: 24006 - DNA, 80 bp, synthetic construct
  misc_feature 1..80: note = Artificially Synthesized Probe
  source 1..80: mol_type = other DNA
tagtgtgctttagtcattgacactagagaagaaaacaggaatatccacttcaagactcactgatgcaatctggttatgtg

SEQ ID NO: 24007 - DNA, 80 bp, synthetic construct
  misc_feature 1..80: note = Artificially Synthesized Probe
  source 1..80: mol_type = other DNA
agtctactgctaggatagggatggagcagttacctggtgagtaagagaacagatttagagaaataacagcttttcaaaca

SEQ ID NO: 24008 - DNA, 80 bp, synthetic construct
  misc_feature 1..80: note = Artificially Synthesized Probe
  source 1..80: mol_type = other DNA
cagccacatttctcagctgtgatgtgagaaggatttggcatctctttcttctgaaaggtaaatctatcaataatatgcag

SEQ ID NO: 24009 - DNA, 80 bp, synthetic construct
  misc_feature 1..80: note = Artificially Synthesized Probe
  source 1..80: mol_type = other DNA
gtgggggtgttactgaataaggtaataatttgctgtaataagtattttggccgaatataggcttgtaaacaatctaaatt

SEQ ID NO: 24010 - DNA, 80 bp, synthetic construct
  misc_feature 1..80: note = Artificially Synthesized Probe
  source 1..80: mol_type = other DNA
tagcaggtttttgctgtttctatcttctgaacctctcttgcttagctcaatcactgagtgctaagcctaagtttgcagtc

SEQ ID NO: 24011 - DNA, 80 bp, synthetic construct
  misc_feature 1..80: note = Artificially Synthesized Probe
  source 1..80: mol_type = other DNA
tatatctgacaggcaactagaggttgcttaaataccttcaactatgggaagttcatcactcagttgtagctgactctcat

SEQ ID NO: 24012 - DNA, 80 bp, synthetic construct
  misc_feature 1..80: note = Artificially Synthesized Probe
  source 1..80: mol_type = other DNA
ctaacaatgatattcctgtactagtatttcaaaatatcaatccaaaaaatagccaaccttgtttgttccatggaaatttg

SEQ ID NO: 24013 - DNA, 80 bp, synthetic construct
  misc_feature 1..80: note = Artificially Synthesized Probe
  source 1..80: mol_type = other DNA
agagaggtgattggctagaagaggacatgggagggtgtttctagagtgctagtaatgttctgtttatttaatttttttag

SEQ ID NO: 24014 - DNA, 80 bp, synthetic construct
  misc_feature 1..80: note = Artificially Synthesized Probe
  source 1..80: mol_type = other DNA
atgtcactcaaaagtgacattatatgttattaggcttttacatgaatttagtgtgaatatttatgaacacctgtgaaaag

SEQ ID NO: 24015 - DNA, 80 bp, synthetic construct
  misc_feature 1..80: note = Artificially Synthesized Probe
  source 1..80: mol_type = other DNA
aacctggaggaattcccctttaaaaattattactgtaataaaatggtaggagtcccgactgctgtgaacagtttttattt

SEQ ID NO: 24016 - DNA, 80 bp, synthetic construct
  misc_feature 1..80: note = Artificially Synthesized Probe
  source 1..80: mol_type = other DNA
caggaatgtatattactgaaataagtaaaatgtttttatcatctggaagactttaaggagcaagataagtgctgctatat

SEQ ID NO: 24017 - DNA, 80 bp, synthetic construct
  misc_feature 1..80: note = Artificially Synthesized Probe
  source 1..80: mol_type = other DNA
agaaaaatgtatacattaaggaggagcaagtatgttaatttatcaggggtagaaggttgggggatatttagacttaattt

SEQ ID NO: 24018 - DNA, 80 bp, synthetic construct
  misc_feature 1..80: note = Artificially Synthesized Probe
  source 1..80: mol_type = other DNA
ctggggcctgaatacagctgagtagaactcagatgtccaggcaatagttctatatacagaacaacaaaatgacctcaaga

SEQ ID NO: 24019 - DNA, 80 bp, synthetic construct
  misc_feature 1..80: note = Artificially Synthesized Probe
  source 1..80: mol_type = other DNA
ccaccgcgcctggcccgacttaagtttttacaaatcagtttaactactaaataaaacatggcaagatgaaatgggagaat

SEQ ID NO: 24020 - DNA, 80 bp, synthetic construct
  misc_feature 1..80: note = Artificially Synthesized Probe
  source 1..80: mol_type = other DNA
ttagaagagaaagagaggggcaggcaaacacaggaagacagacacacagaagaaatgaaagaagtcatggggaataaaca

SEQ ID NO: 24021 - DNA, 80 bp, synthetic construct
  misc_feature 1..80: note = Artificially Synthesized Probe
  source 1..80: mol_type = other DNA
gtacatttaaaacacttccagaaagttgaaggaagtggttgataatgtctgacaaaccccctcttcagaatgatttagca

SEQ ID NO: 24022 - DNA, 80 bp, synthetic construct
  misc_feature 1..80: note = Artificially Synthesized Probe
  source 1..80: mol_type = other DNA
ctctaatcaagtcctacaaataaatagtaatgtatatttattccaagcaagcatataatcagagagtagcgataacactg

SEQ ID NO: 24023 - DNA, 80 bp, synthetic construct
  misc_feature 1..80: note = Artificially Synthesized Probe
  source 1..80: mol_type = other DNA
tggataagggcacactagaagaggaaagaaacaaagtggctcatagaaaggttttgttaaaatttgtccttttttttgag

SEQ ID NO: 24024 - DNA, 80 bp, synthetic construct
  misc_feature 1..80: note = Artificially Synthesized Probe
  source 1..80: mol_type = other DNA
ataacaacgatggtagtggggacagtcgctactggtaatgcaatttgggccttgatgggtagaacttgcattagtctgtt

SEQ ID NO: 24025 - DNA, 80 bp, synthetic construct
  misc_feature 1..80: note = Artificially Synthesized Probe
  source 1..80: mol_type = other DNA
aggccatatccctttcttttctgttgcatcagctctgaaactctccacaactatggattaaccaaattttgctttctcca

SEQ ID NO: 24026 - DNA, 80 bp, synthetic construct
  misc_feature 1..80: note = Artificially Synthesized Probe
  source 1..80: mol_type = other DNA
tggtattcttgaaaccccttttcttcctttggcttctgcaacacttgttcttagttatctggggctagacttaggaagag

SEQ ID NO: 24027 - DNA, 80 bp, synthetic construct
  misc_feature 1..80: note = Artificially Synthesized Probe
  source 1..80: mol_type = other DNA
gtcattttcaacatgattcctaagactcttaccactaattcactaattcatagtctccctccccaaaacacactctttct

SEQ ID NO: 24028 - DNA, 80 bp, synthetic construct
  misc_feature 1..80: note = Artificially Synthesized Probe
  source 1..80: mol_type = other DNA
agatacaaagatgacactctaaatgaagcccaacataccagggaacagtggtaacaatcagagaaaaagggaatagtcta

SEQ ID NO: 24029 - DNA, 80 bp, synthetic construct
  misc_feature 1..80: note = Artificially Synthesized Probe
  source 1..80: mol_type = other DNA
agatgacttttatagagatggtatcataagggaaaaaaatcagagtgactgtataacctggagtcagtgaaatatttaat

SEQ ID NO: 24030 - DNA, 80 bp, synthetic construct
  misc_feature 1..80: note = Artificially Synthesized Probe
  source 1..80: mol_type = other DNA
tcagagtgccaatatctctcatattctggattttttatcatgcccattattgataacagagacacaagagaatcatatat

SEQ ID NO: 24031 - DNA, 80 bp, synthetic construct
  misc_feature 1..80: note = Artificially Synthesized Probe
  source 1..80: mol_type = other DNA
ggaaaaagaatgcaaaaatgacattagtcaataaagttttagaaagggcactgactgactgacaaccatttacaggctga

SEQ ID NO: 24032 - DNA, 80 bp, synthetic construct
  misc_feature 1..80: note = Artificially Synthesized Probe
  source 1..80: mol_type = other DNA
ctcaatttggtagttggtatctaatagttgtgtcttggtccaccaagtcaacttctctagctttcagggcaagtacaagg

SEQ ID NO: 24033 - DNA, 80 bp, synthetic construct
  misc_feature 1..80: note = Artificially Synthesized Probe
  source 1..80: mol_type = other DNA
atcattaccattataaaccttcagagaggccaagctaatttcattagggtgttttataactgctcacagaactgggacct

SEQ ID NO: 24034 - DNA, 80 bp, synthetic construct
  misc_feature 1..80: note = Artificially Synthesized Probe
  source 1..80: mol_type = other DNA
tttttttttaaagcatgtgcttccagacgcagcctaaataacgctgccccaaattcaatgtgaaagagtacacagacctg

SEQ ID NO: 24035 - DNA, 80 bp, synthetic construct
  misc_feature 1..80: note = Artificially Synthesized Probe
  source 1..80: mol_type = other DNA
aatctgcttaaagacctttaagtctaaattctggcctcaattccaagactctccataatctggttttacacatggtagtt

SEQ ID NO: 24036 - DNA, 80 bp, synthetic construct
  misc_feature 1..80: note = Artificially Synthesized Probe
  source 1..80: mol_type = other DNA
gttggaaatgtttctaattaaccaggagatccaaaagaaagcagttcaagaagcatgtcactgaagagcagaagtcaaat

SEQ ID NO: 24037 - DNA, 80 bp, synthetic construct
  misc_feature 1..80: note = Artificially Synthesized Probe
  source 1..80: mol_type = other DNA
atcttactcaaataaattgggggaagggagctgaatggggatgaaggagagagaggaagaatataaacgtaatttacaaa

SEQ ID NO: 24038 - DNA, 80 bp, synthetic construct
  misc_feature 1..80: note = Artificially Synthesized Probe
  source 1..80: mol_type = other DNA
tgccgactggtgttgacggaacaagaaaggcatatattaaagttacaaaggcacccaatagaagaaccaaaaaactacta

SEQ ID NO: 24039 - DNA, 80 bp, synthetic construct
  misc_feature 1..80: note = Artificially Synthesized Probe
  source 1..80: mol_type = other DNA
gccttcacattcactcaccactcactcaccagagcaatttccagtcctaaaagctctgttcatattaggtatcctacaca

SEQ ID NO: 24040 - DNA, 80 bp, synthetic construct
  misc_feature 1..80: note = Artificially Synthesized Probe
  source 1..80: mol_type = other DNA
agaataaatatcaaaatgtgagtggctacttcagagtggcgagagcatgggtgacttctatttcattatttgttctttgc

SEQ ID NO: 24041 - DNA, 80 bp, synthetic construct
  misc_feature 1..80: note = Artificially Synthesized Probe
  source 1..80: mol_type = other DNA
agccaaggctattggtgcacaccaccatgcccacctactttttgtatttttttggagagatgaggttttgtcatgttacc

SEQ ID NO: 24042 - DNA, 80 bp, synthetic construct
  misc_feature 1..80: note = Artificially Synthesized Probe
  source 1..80: mol_type = other DNA
aaggtaatttgcatgcattaatttgtaaggtgtggggctgtgtgaaggaagacactgagtgtctgcagaaaaaggagaag

SEQ ID NO: 24043 - DNA, 80 bp, synthetic construct
  misc_feature 1..80: note = Artificially Synthesized Probe
  source 1..80: mol_type = other DNA
ggtgtatcttacacttctcccaaaaaatgccttacagaaacacaaacatgatttcattattcactactaatggaggcttg

SEQ ID NO: 24044 - DNA, 80 bp, synthetic construct
  misc_feature 1..80: note = Artificially Synthesized Probe
  source 1..80: mol_type = other DNA
tccgtgacatcctgttgaattaaaaaaaaataaggcaaagaatatcacatagcatggctctactttgatttaagaaaggg

SEQ ID NO: 24045 - DNA, 80 bp, synthetic construct
  misc_feature 1..80: note = Artificially Synthesized Probe
  source 1..80: mol_type = other DNA
aaaaaatcacaggtacggacttatctatccattcaaggaaaaagagtactcaagggacagggacaacatgcccccaaaat

SEQ ID NO: 24046 - DNA, 80 bp, synthetic construct
  misc_feature 1..80: note = Artificially Synthesized Probe
  source 1..80: mol_type = other DNA
gtactagaaaagctatcaagggtcactacttttatgtcactacagatgacagaagctggctaatcagtttcccatacccc

SEQ ID NO: 24047 - DNA, 80 bp, synthetic construct
  misc_feature 1..80: note = Artificially Synthesized Probe
  source 1..80: mol_type = other DNA
gctgaattcaaataatatattgaagggggaaagagtccagaaagcctaattaggatctatgaccagaaataacaggacgc

SEQ ID NO: 24048 - DNA, 80 bp, synthetic construct
  misc_feature 1..80: note = Artificially Synthesized Probe
  source 1..80: mol_type = other DNA
agaaggctataatgtccctggcagagtaagtacatgtgttaggccagcttccttcaggcatgagttatagtaatgtcagc

SEQ ID NO: 24049 - DNA, 80 bp, synthetic construct
  misc_feature 1..80: note = Artificially Synthesized Probe
  source 1..80: mol_type = other DNA
gagagaaagacttctgagaatctaatgaaagcctcaaatgtgctctctgaaacaaaatttcatagggtttgtggaatctg

SEQ ID NO: 24050 - DNA, 80 bp, synthetic construct
  misc_feature 1..80: note = Artificially Synthesized Probe
  source 1..80: mol_type = other DNA
aatatttaaatgctggaaggaagaaagggaaggagagtgaaacaaaccataaaagaactagaagaaagcatggcaccttc

SEQ ID NO: 24051 - DNA, 80 bp, synthetic construct
  misc_feature 1..80: note = Artificially Synthesized Probe
  source 1..80: mol_type = other DNA
cttatgtctatattttaaaaaccatgaaaatccatacatgcgtgtacacacatgcacatgcatgcggacgcatacataca

SEQ ID NO: 24052 - DNA, 80 bp, synthetic construct
  misc_feature 1..80: note = Artificially Synthesized Probe
  source 1..80: mol_type = other DNA
tagtacattaatttggtagtttgttttacagtgcagacgattatatgccttaagtaagcttcatgatacagtaacatctt

SEQ ID NO: 24053 - DNA, 80 bp, synthetic construct
  misc_feature 1..80: note = Artificially Synthesized Probe
  source 1..80: mol_type = other DNA
actggccaagaaccagaaaccacaggatttataaaggtgacattttttactgctaaattgctgtcccaatcaaatcaaaa

SEQ ID NO: 24054 - DNA, 80 bp, synthetic construct
  misc_feature 1..80: note = Artificially Synthesized Probe
  source 1..80: mol_type = other DNA
actcaaagatgttaaaattaatttagtagttttaggtaccgtttcagacttttcatcagacaacagacccacagctagaa

SEQ ID NO: 24055 - DNA, 80 bp, synthetic construct
  misc_feature 1..80: note = Artificially Synthesized Probe
  source 1..80: mol_type = other DNA
gaaaggacagtctcttcaaatgatactccctgtcccaggaattccactttcaggtttgtgacaccttgttatatgtgtac

SEQ ID NO: 24056 - DNA, 80 bp, synthetic construct
  misc_feature 1..80: note = Artificially Synthesized Probe
  source 1..80: mol_type = other DNA
gcttatctagtctaccttatactgaagacagcttacctatcttacgtagtctaccttacactgaagatagcttacctagg

SEQ ID NO: 24057 - DNA, 80 bp, synthetic construct
  misc_feature 1..80: note = Artificially Synthesized Probe
  source 1..80: mol_type = other DNA
gaatgttcacagcagcattgctcataacagctaaaaagtagaaacgacacagatgtccatcagctgataaatgtgtaaac

SEQ ID NO: 24058 - DNA, 80 bp, synthetic construct
  misc_feature 1..80: note = Artificially Synthesized Probe
  source 1..80: mol_type = other DNA
tgagatacaactactctaaacaatacatgaataaatatataatcaccctgaacaatcataaaaaacagacaccttggcat

SEQ ID NO: 24059 - DNA, 80 bp, synthetic construct
  misc_feature 1..80: note = Artificially Synthesized Probe
  source 1..80: mol_type = other DNA
gcctcagctccaagtaactgggattacaggtgtgcaccaccatggctggctaatttttttttttgtatttttagtagaga

SEQ ID NO: 24060 - DNA, 80 bp, synthetic construct
  misc_feature 1..80: note = Artificially Synthesized Probe
  source 1..80: mol_type = other DNA
acattcaagataatgaacatacccatcactttctgaaaggttccttgtgctcctatgtaaatcttccatcctgccatagt

SEQ ID NO: 24061 - DNA, 80 bp, synthetic construct
  misc_feature 1..80: note = Artificially Synthesized Probe
  source 1..80: mol_type = other DNA
ccatattttgttcatccactcctctatcaacagaaatctgggttgcttctgcctttggctactatagtgaataatgctgc

SEQ ID NO: 24062 - DNA, 80 bp, synthetic construct
  misc_feature 1..80: note = Artificially Synthesized Probe
  source 1..80: mol_type = other DNA
tcagttgccagcatcatttgctgaacagattctctttacttcatggagtggtcctggtacccttgtcaaagatcatttga

SEQ ID NO: 24063 - DNA, 80 bp, synthetic construct
  misc_feature 1..80: note = Artificially Synthesized Probe
  source 1..80: mol_type = other DNA
catggcttacaaagattatcaatctgtggtttctctttttattctcttaatactgtcttttgaagagcagaagttttaca

SEQ ID NO: 24064 - DNA, 80 bp, synthetic construct
  misc_feature 1..80: note = Artificially Synthesized Probe
  source 1..80: mol_type = other DNA
tgctacatcctcaaatgagtatcagtatgttcactcttttttcctagagataactgtttcttttgaactttctacatttc

SEQ ID NO: 24065 - DNA, 80 bp, synthetic construct
  misc_feature 1..80: note = Artificially Synthesized Probe
  source 1..80: mol_type = other DNA
cttggttctttcttaggagtctaaccctgctgttttaagtctgctaactcactgattgtagactgtttccttgcatgtct

SEQ ID NO: 24066 - DNA, 80 bp, synthetic construct
  misc_feature 1..80: note = Artificially Synthesized Probe
  source 1..80: mol_type = other DNA
gcatgaaaccagccacagacaacatataaacagattagcattgttgtgttccaataacattttactgatggacactgaaa

SEQ ID NO: 24067 - DNA, 80 bp, synthetic construct
  misc_feature 1..80: note = Artificially Synthesized Probe
  source 1..80: mol_type = other DNA
atgatctcatagttttaatttgtacactcacaactgactgactgcatctgaacagtgttcacatgctttactgttcattt

SEQ ID NO: 24068 - DNA, 80 bp, synthetic construct
  misc_feature 1..80: note = Artificially Synthesized Probe
  source 1..80: mol_type = other DNA
ccttctagccctcagtttgccaatgagaaaacgatccagttttcattctcccgcagattaccagtttatctttctgaaaa

SEQ ID NO: 24069 - DNA, 80 bp, synthetic construct
  misc_feature 1..80: note = Artificially Synthesized Probe
  source 1..80: mol_type = other DNA
cacacctatatgatgaagcttccataaaaatcactgaaatgcaatgttcctagagcttccagggtgctgaacatttggag

SEQ ID NO: 24070 - DNA, 80 bp, synthetic construct
  misc_feature 1..80: note = Artificially Synthesized Probe
  source 1..80: mol_type = other DNA
gggacatctgatgttcagttccaccatttaaacacacacagcagtcacatagaactctccaggcagaaattttgtttaga

SEQ ID NO: 24071 - DNA, 80 bp, synthetic construct
  misc_feature 1..80: note = Artificially Synthesized Probe
  source 1..80: mol_type = other DNA
cctggctgagaagatgtatgtaaagtccttagcacagaacttggaacacagcatggcaaatgctcaaatagtaactgtta

SEQ ID NO: 24072 - DNA, 80 bp, synthetic construct
  misc_feature 1..80: note = Artificially Synthesized Probe
  source 1..80: mol_type = other DNA
tgtatacagaaactcacaaaattactaagttgagtggaacctggaaggaacaataccgtgatgaagagaagggaaacgcc

SEQ ID NO: 24073 - DNA, 80 bp, synthetic construct
  misc_feature 1..80: note = Artificially Synthesized Probe
  source 1..80: mol_type = other DNA
atcaatcacactgaacgttcaacatctgataatataactcagaaaggagatttctcaagggtgaagaatgagtcttacct

SEQ ID NO: 24074 - DNA, 80 bp, synthetic construct
  misc_feature 1..80: note = Artificially Synthesized Probe
  source 1..80: mol_type = other DNA
aggacacagtaccagatctcactgttagtaccaaaacctccttaatagggtttagaagatgtgtaactgccacattcttt

SEQ ID NO: 24075 - DNA, 80 bp, synthetic construct
  misc_feature 1..80: note = Artificially Synthesized Probe
  source 1..80: mol_type = other DNA
attgtagagagtatatacgccatgctatcaagtctgaatgtaagggaggaagggagaattataaaatgtagaggagaatg

SEQ ID NO: 24076 - DNA, 80 bp, synthetic construct
  misc_feature 1..80: note = Artificially Synthesized Probe
  source 1..80: mol_type = other DNA
aatgatgaaatgatctcgatttagaacctcacgcacccctggggcacacatacttatcccaacttcttaaatgtctatct

SEQ ID NO: 24077 - DNA, 80 bp, synthetic construct
  misc_feature 1..80: note = Artificially Synthesized Probe
  source 1..80: mol_type = other DNA
ctctactaatatgagcaagccactccaacatatgtgcaaacctcaaccacaaccaccaccaccatttcttttggttattc

SEQ ID NO: 24078 - DNA, 80 bp, synthetic construct
  misc_feature 1..80: note = Artificially Synthesized Probe
  source 1..80: mol_type = other DNA
cacacagaagaatgaagttgggctactacctcacaacatatccaaaaactaactcgaaataggccaggcatgttggctca

SEQ ID NO: 24079 - DNA, 80 bp, synthetic construct
  misc_feature 1..80: note = Artificially Synthesized Probe
  source 1..80: mol_type = other DNA
tcacccgtcaggaagttgcctcaagaggtaatagttgatctacaaccaaaagtaagactgctagagttttcagccacctc

SEQ ID NO: 24080 - DNA, 80 bp, synthetic construct
  misc_feature 1..80: note = Artificially Synthesized Probe
  source 1..80: mol_type = other DNA
tcaagcgatcctcccatctcagcctcccgggcaggtgggactacaggcatgcaccaccacgcctggataatttttgtatt

SEQ ID NO: 24081 - DNA, 80 bp, synthetic construct
  misc_feature 1..80: note = Artificially Synthesized Probe
  source 1..80: mol_type = other DNA
aaatcttacaaactgcccataaatgatatataatggactgttctgcattccacaggaagcatccagcttccagtattaat

SEQ ID NO: 24082 - DNA, 80 bp, synthetic construct
  misc_feature 1..80: note = Artificially Synthesized Probe
  source 1..80: mol_type = other DNA
aatgaagaaactctggggaacaacttttcagagtaaatttatcttttcttcctttggatgatggtagaaaaaagggaacc

SEQ ID NO: 24083 - DNA, 80 bp, synthetic construct
  misc_feature 1..80: note = Artificially Synthesized Probe
  source 1..80: mol_type = other DNA
aaacaaaattagatgggcgtggtggcgggcgcctgtagtcccagctactcgggaggctgaggcaggagaatggcgtgaac

SEQ ID NO: 24084 - DNA, 80 bp, synthetic construct
  misc_feature 1..80: note = Artificially Synthesized Probe
  source 1..80: mol_type = other DNA
acagcataaagacagacatatagaccaatggaatagaaagcccagaaataaactcttgcatatatagtcaaatggttttc

SEQ ID NO: 24085 - DNA, 80 bp, synthetic construct
  misc_feature 1..80: note = Artificially Synthesized Probe
  source 1..80: mol_type = other DNA
taagtgttggtaaggatgtaaaaaattagaaccccatgcgatgccagtaggaatataaaacagggcaggtgctacagaaa

SEQ ID NO: 24086 - DNA, 80 bp, synthetic construct
  misc_feature 1..80: note = Artificially Synthesized Probe
  source 1..80: mol_type = other DNA
atggtgaaacctgtctccactaaaaatacaaaaattagtcgggagtcataacgcacacctgtaatcccagctacttgaga

SEQ ID NO: 24087 - DNA, 80 bp, synthetic construct
  misc_feature 1..80: note = Artificially Synthesized Probe
  source 1..80: mol_type = other DNA
tgtacatgtgtatatgcatacctttgcatactacatacacataatacacacacattgtataccacaagtccccaagataa

SEQ ID NO: 24088 - DNA, 80 bp, synthetic construct
  misc_feature 1..80: note = Artificially Synthesized Probe
  source 1..80: mol_type = other DNA
ttaactaggagtgtgatctgggatgagccacatgaagaagaggagaaagaaaacagcatattagctgttatttccaaact

SEQ ID NO: 24089 - DNA, 80 bp, synthetic construct
  misc_feature 1..80: note = Artificially Synthesized Probe
  source 1..80: mol_type = other DNA
aattttggggaaactcattctggaaaaaatattttaaaaaattaccccattttccaatatggtaactggtttgctgagct

SEQ ID NO: 24090 - DNA, 80 bp, synthetic construct
  misc_feature 1..80: note = Artificially Synthesized Probe
  source 1..80: mol_type = other DNA
cacagtaactgccagtgttcctcaaattttgagcttagagatcatttagtacagtggtttttctcttttattatgaaaca

SEQ ID NO: 24091 - DNA, 80 bp, synthetic construct
  misc_feature 1..80: note = Artificially Synthesized Probe
  source 1..80: mol_type = other DNA
aactggctattaggttatacggaagattctgtttctaagttgaatgatctaaatctgcagctttaaggcttgtccaaaaa

SEQ ID NO: 24092 - DNA, 80 bp, synthetic construct
  misc_feature 1..80: note = Artificially Synthesized Probe
  source 1..80: mol_type = other DNA
ccatctcagatctactgaactttaacaaaatgattcatatgcatattaaagtctgagaagcagtgatagaggttccaaat

SEQ ID NO: 24093 - DNA, 80 bp, synthetic construct
  misc_feature 1..80: note = Artificially Synthesized Probe
  source 1..80: mol_type = other DNA
aaaacaaaactataactgcagatcacatgtcattctcttgctcaaaaccctccactggcttccccactaaaaatcaccaa

SEQ ID NO: 24094 - DNA, 80 bp, synthetic construct
  misc_feature 1..80: note = Artificially Synthesized Probe
  source 1..80: mol_type = other DNA
cccctcatgatttattttggtgtcttagtcataataggtatgcaattaaagctgaagatttaagctggtttcagaatagg

SEQ ID NO: 24095 - DNA, 80 bp, synthetic construct
  misc_feature 1..80: note = Artificially Synthesized Probe
  source 1..80: mol_type = other DNA
tattggctaggtatagtggggccagaccataagtgtctggaagtcaggttttttatctccccaaagaagagtaattttat

SEQ ID NO: 24096 - DNA, 80 bp, synthetic construct
  misc_feature 1..80: note = Artificially Synthesized Probe
  source 1..80: mol_type = other DNA
cactttgggaggctgaggcaggtggataacctgaggccaggagtttgagaccagcctggccaacaaggcaaaaccctttc

SEQ ID NO: 24097 - DNA, 80 bp, synthetic construct
  misc_feature 1..80: note = Artificially Synthesized Probe
  source 1..80: mol_type = other DNA
tgaaagacacgaagcacaaaatgagttaatctgggaggtaaacagggaatggggagatatttgaacagaagctggccata

SEQ ID NO: 24098 - DNA, 80 bp, synthetic construct
  misc_feature 1..80: note = Artificially Synthesized Probe
  source 1..80: mol_type = other DNA
cattaatgggggaaagggccagcattacagcatttcaaacctatctattattattcaagaagagagatctaggaacatct

SEQ ID NO: 24099 - DNA, 80 bp, synthetic construct
  misc_feature 1..80: note = Artificially Synthesized Probe
  source 1..80: mol_type = other DNA
gtttagggatggaagatagctgcaagagacattcttgggacaaccatggaaatctgaacacatatcagatgtaagatgat

SEQ ID NO: 24100 - DNA, 80 bp, synthetic construct
  misc_feature 1..80: note = Artificially Synthesized Probe
  source 1..80: mol_type = other DNA
tacaccaaatgacatgtatgtgtgcatgcagatgtgttccccttcacttgacaaagacctacataaatatccttttatgg

SEQ ID NO: 24101 - DNA, 80 bp, synthetic construct
  misc_feature 1..80: note = Artificially Synthesized Probe
  source 1..80: mol_type = other DNA
aaaaaattgggcctaataatacaagagttggtaatcatgtacatgtagcaacaaacactatcatattctacatgtggtat

SEQ ID NO: 24102 - DNA, 80 bp, synthetic construct
  misc_feature 1..80: note = Artificially Synthesized Probe
  source 1..80: mol_type = other DNA
atattattccctacactttactatatacttgaagtagaaaggaaaagtgggagggcgagagggaaagagggaagatactg

SEQ ID NO: 24103 - DNA, 80 bp, synthetic construct
  misc_feature 1..80: note = Artificially Synthesized Probe
  source 1..80: mol_type = other DNA
atggtctgagtaaaagggctcagtgaggctaaggcggatgaattaaaagactcatatctacataaatcctagtttacata

SEQ ID NO: 24104 - DNA, 80 bp, synthetic construct
  misc_feature 1..80: note = Artificially Synthesized Probe
  source 1..80: mol_type = other DNA
atagtgactgtggctatatggtaagcaaggggagagtagaaacaagatgggtatcagaaaaattaggcaatatgccaggt

SEQ ID NO: 24105 - DNA, 80 bp, synthetic construct
  misc_feature 1..80: note = Artificially Synthesized Probe
  source 1..80: mol_type = other DNA
acaagagagtataggccaagaaggctcagccctggggatcataaacatttacaagagaaaccaaaaatggctgaaaagaa

SEQ ID NO: 24106 - DNA, 80 bp, synthetic construct
  misc_feature 1..80: note = Artificially Synthesized Probe
  source 1..80: mol_type = other DNA
gttttggtatacatttaaagcactacattcaattgcctaagtgcaggcaggtagcgggcattttgtcaggcccatatgat

SEQ ID NO: 24107 - DNA, 80 bp, synthetic construct
  misc_feature 1..80: note = Artificially Synthesized Probe
  source 1..80: mol_type = other DNA
aaaattaaaagtctgtgggaaacactgtcacaaataaacaactgaggcatgacagcctgttaggactgtgcgctctgtga

SEQ ID NO: 24108 - DNA, 80 bp, synthetic construct
  misc_feature 1..80: note = Artificially Synthesized Probe
  source 1..80: mol_type = other DNA
ggcccaagtcagacagctaagtaaatggtagaattactcatatattgcatggtctatgtctctataagaagtagaagaaa

SEQ ID NO: 24109 - DNA, 80 bp, synthetic construct
  misc_feature 1..80: note = Artificially Synthesized Probe
  source 1..80: mol_type = other DNA
ttagtgcagtgcagaatatagtgtgctcattgacccaagcagtggttgttttaagcactatgctttggagtggcttttgt

SEQ ID NO: 24110 - DNA, 80 bp, synthetic construct
  misc_feature 1..80: note = Artificially Synthesized Probe
  source 1..80: mol_type = other DNA
atgaactatagtgtaaatgccaagaaaccagatgggaaatgatggccaagtgaaagatgatggtggcttttatcagactg

SEQ ID NO: 24111 - DNA, 80 bp, synthetic construct
  misc_feature 1..80: note = Artificially Synthesized Probe
  source 1..80: mol_type = other DNA
aaccaaaaaaaggaagaaagaaagacgataaaagagggcaagggggaaaggaaggaaagagtaatcatcattgcatgtag

SEQ ID NO: 24112 - DNA, 80 bp, synthetic construct
  misc_feature 1..80: note = Artificially Synthesized Probe
  source 1..80: mol_type = other DNA
tgaacactaaagcaaaagaggaaacggaaccacgaagagcacttctaaacttcattgtgaacctacatgactatcactcc

SEQ ID NO: 24113 - DNA, 80 bp, synthetic construct
  misc_feature 1..80: note = Artificially Synthesized Probe
  source 1..80: mol_type = other DNA
agctgcactcactaaagaaaacaaaaatactaaattgcacagaggccagacacggtggctcatgcctgtaatcctagcac

SEQ ID NO: 24114 - DNA, 80 bp, synthetic construct
  misc_feature 1..80: note = Artificially Synthesized Probe
  source 1..80: mol_type = other DNA
tgggaggttgaggtgggaggactgcttgagctcaggagcttgagaccaacctgggcaacatagcgagacctcatctctac

SEQ ID NO: 24115 - DNA, 80 bp, synthetic construct
  misc_feature 1..80: note = Artificially Synthesized Probe
  source 1..80: mol_type = other DNA
gagggtgttgacaattgatttggagtgctgtgaatttaagtgataacctccactgcaagttgggggcttaatacactttc

SEQ ID NO: 24116 - DNA, 80 bp, synthetic construct
  misc_feature 1..80: note = Artificially Synthesized Probe
  source 1..80: mol_type = other DNA
taaaaaaaaaaaaaaaaaaaggcaaagaaataacattcaaagatagtgtctcagttttttcccctcacttttctcacgta

SEQ ID NO: 24117 - DNA, 80 bp, synthetic construct
  misc_feature 1..80: note = Artificially Synthesized Probe
  source 1..80: mol_type = other DNA
aaaacagagaaaaacaatccataaaatataggggaacaccacttcaaatgacaacaggtttctcagcagaaaccatgaag

SEQ ID NO: 24118 - DNA, 80 bp, synthetic construct
  misc_feature 1..80: note = Artificially Synthesized Probe
  source 1..80: mol_type = other DNA
tcaaacaatctaaaagaatgcaggaaagacagagtaatggaaaacagaagcagctaacagaaaacaaattactaaactgg

SEQ ID NO: 24119 - DNA, 80 bp, synthetic construct
  misc_feature 1..80: note = Artificially Synthesized Probe
  source 1..80: mol_type = other DNA
atgagattgaaaacagaaaaaaatgttgaaaacaaaagcttgtttgttgaaaagaccaatacaatttacaaatctctagc

SEQ ID NO: 24120 - DNA, 80 bp, synthetic construct
  misc_feature 1..80: note = Artificially Synthesized Probe
  source 1..80: mol_type = other DNA
tcaaaggacaatttatagcaataaatgtccacccctacctcacaccatattttaaaaaccctcaaaatgaataaatgata

SEQ ID NO: 24121 - DNA, 80 bp, synthetic construct
  misc_feature 1..80: note = Artificially Synthesized Probe
  source 1..80: mol_type = other DNA
agtctcgaactcctgacttcaagtgatccacctgccttggcctcccaaagagccaggattacaagcatgagccaccacgc

SEQ ID NO: 24122 - DNA, 80 bp, synthetic construct
  misc_feature 1..80: note = Artificially Synthesized Probe
  source 1..80: mol_type = other DNA
caacaatgaagtctgctgtgccgactgactttttttcacaaaagatttctctgaaccaggcaatatggtctgatagcatc

SEQ ID NO: 24123 - DNA, 80 bp, synthetic construct
  misc_feature 1..80: note = Artificially Synthesized Probe
  source 1..80: mol_type = other DNA
gtacatcatcagagctcttgggtgatcaggtatattatcaacgattagtaatatgttggaagggatctttttttcttctg

SEQ ID NO: 24124 - DNA, 80 bp, synthetic construct
  misc_feature 1..80: note = Artificially Synthesized Probe
  source 1..80: mol_type = other DNA
gtgtggtttgtggcaccccaaaacaattacaatagtaacatgcaagatcacagaacaccaaaacagacaaagtttgaaat

SEQ ID NO: 24125 - DNA, 80 bp, synthetic construct
  misc_feature 1..80: note = Artificially Synthesized Probe
  source 1..80: mol_type = other DNA
tcctatggctttctgctatgaataccaaaacagttgatcttcttatctcttggcaaacattctgcactgggatcttgagg

SEQ ID NO: 24126 - DNA, 80 bp, synthetic construct
  misc_feature 1..80: note = Artificially Synthesized Probe
  source 1..80: mol_type = other DNA
accaaaccacaaatcaaagaaagaacggccatctacagtagactttgataacaaaatttggtgcttgcttcagcagcaca

SEQ ID NO: 24127 - DNA, 80 bp, synthetic construct
  misc_feature 1..80: note = Artificially Synthesized Probe
  source 1..80: mol_type = other DNA
tacagggacggattacaggcatgtgctaccacacccagctaccatatttttggtaaagacgaggtttcatcatgttggcc

SEQ ID NO: 24128 - DNA, 80 bp, synthetic construct
  misc_feature 1..80: note = Artificially Synthesized Probe
  source 1..80: mol_type = other DNA
taagtgtatgtgggagtaagagtattccagccatagtaaacaatcatcagtggcatcaaggtacaggaaatgttcatgat

SEQ ID NO: 24129 - DNA, 80 bp, synthetic construct
  misc_feature 1..80: note = Artificially Synthesized Probe
  source 1..80: mol_type = other DNA
taatgagagtctgaactattgttgaggaatactctcacaactaccctgtaaggtagcaaggaggaagccacagttttgag

SEQ ID NO: 24130 - DNA, 80 bp, synthetic construct
  misc_feature 1..80: note = Artificially Synthesized Probe
  source 1..80: mol_type = other DNA
agaaacttagaaaaagtcagcatttaatatttattttttgagatgtagggtttcactctgtgcccaggctggagtgcagt

SEQ ID NO: 24131 - DNA, 80 bp, synthetic construct
  misc_feature 1..80: note = Artificially Synthesized Probe
  source 1..80: mol_type = other DNA
ctaatctagtggtccttaaccagaagcaattttgcccctcaagacatttggaaatgtctcccggcatttttgatgtttct

SEQ ID NO: 24132 - DNA, 80 bp, synthetic construct
  misc_feature 1..80: note = Artificially Synthesized Probe
  source 1..80: mol_type = other DNA
aaattcaacccatcagtcaaaagtcagtgaggatgccaaaaggtataaggagagcaacacaagctgtccactgtggttaa

SEQ ID NO: 24133 - DNA, 80 bp, synthetic construct
  misc_feature 1..80: note = Artificially Synthesized Probe
  source 1..80: mol_type = other DNA
caataaatatctaccaaatccctgtatgtgctcaggctcatgctaggagttgaggatacagtggtgagcaagacggacaa

SEQ ID NO: 24134 - DNA, 80 bp, synthetic construct
  misc_feature 1..80: note = Artificially Synthesized Probe
  source 1..80: mol_type = other DNA
acaacaccatgatccttggatgcggaagtctcttatataaaaagggagggtatttgcatataacttactttccatatact

SEQ ID NO: 24135 - DNA, 80 bp, synthetic construct
  misc_feature 1..80: note = Artificially Synthesized Probe
  source 1..80: mol_type = other DNA
ctcaacaggttagacaaggaggaacatttaaagtttcccaaaattgtaaactatggaacctatctttgggagaacacttt

SEQ ID NO: 24136 - DNA, 80 bp, synthetic construct
  misc_feature 1..80: note = Artificially Synthesized Probe
  source 1..80: mol_type = other DNA
acgagctttctgagacaagatgtctgagaaaaaagttatgcctgcttaggcttattctccctgctgttccccataacatt

SEQ ID NO: 24137 - DNA, 80 bp, synthetic construct
  misc_feature 1..80: note = Artificially Synthesized Probe
  source 1..80: mol_type = other DNA
gaaatgaaggccacggtggaaacagaaagaaatggctgaagaagaaaaaaggaagccattcttggcagaaaaaacagaac

SEQ ID NO: 24138 - DNA, 80 bp, synthetic construct
  misc_feature 1..80: note = Artificially Synthesized Probe
  source 1..80: mol_type = other DNA
cattttctttggtctgatataaaaactggccaaaatcacagaaaactctagaaaacgaatcagctcttgataccaaaacc

SEQ ID NO: 24139 - DNA, 80 bp, synthetic construct
  misc_feature 1..80: note = Artificially Synthesized Probe
  source 1..80: mol_type = other DNA
tactgatacagtgtctgtactagtttacattcccaccaagagcgtccaagagttctctttcctctgtatcttcaccagca

SEQ ID NO: 24140 - DNA, 80 bp, synthetic construct
  misc_feature 1..80: note = Artificially Synthesized Probe
  source 1..80: mol_type = other DNA
agactccatctcaaaaaaaaaaaaaaaaaaaggggtggggggggaagagacctataaacaaatgaagataaaaaccatgt

SEQ ID NO: 24141 - DNA, 80 bp, synthetic construct
  misc_feature 1..80: note = Artificially Synthesized Probe
  source 1..80: mol_type = other DNA
tgacaggtgtgagccaccgcgcccagccaggaaagatttcttaaaaaaatcaaaatcaaaatcaaaataaataaataaat

SEQ ID NO: 24142 - DNA, 80 bp, synthetic construct
  misc_feature 1..80: note = Artificially Synthesized Probe
  source 1..80: mol_type = other DNA
cacatccactttctctcctccctgaggtagtcactatcactcacttttatcatcattattcccttgatttttcttataat

SEQ ID NO: 24143 - DNA, 80 bp, synthetic construct
  misc_feature 1..80: note = Artificially Synthesized Probe
  source 1..80: mol_type = other DNA
gatatcctattattttccaaaggatttttccccccaatttacattcccatccatcagtggaagacagttcagactgcttc

SEQ ID NO: 24144 - DNA, 80 bp, synthetic construct
  misc_feature 1..80: note = Artificially Synthesized Probe
  source 1..80: mol_type = other DNA
gttttttgagtcttaagaaattcttctctgccttaaataatgtccctttatttttctaaaagctttcagggtttcccctt

SEQ ID NO: 24145 - DNA, 80 bp, synthetic construct
  misc_feature 1..80: note = Artificially Synthesized Probe
  source 1..80: mol_type = other DNA
gtcccagtacttaacctgtatttcaggaagtgttctattcaaaaccctagataccactacaagtggatctgaatgtgagc

SEQ ID NO: 24146 - DNA, 80 bp, synthetic construct
  misc_feature 1..80: note = Artificially Synthesized Probe
  source 1..80: mol_type = other DNA
tgatcttcgatgttactattgtaattcttttggggtgccacgaaccacacccatataaggcagtgaacttcttcagtaaa

SEQ ID NO: 24147 - DNA, 80 bp, synthetic construct
  misc_feature 1..80: note = Artificially Synthesized Probe
  source 1..80: mol_type = other DNA
attccttctaacacattactactcattgacaatgtgcctggtcacccaagagctctgatggagagctacaagaagatgaa

SEQ ID NO: 24148 - DNA, 80 bp, synthetic construct
  misc_feature 1..80: note = Artificially Synthesized Probe
  source 1..80: mol_type = other DNA
ctttcataggtggtaggtatttcttttttgggggaggcagggaggggtgtcaagaaacttcgtatctaaagacataacat

SEQ ID NO: 24149 - DNA, 80 bp, synthetic construct
  misc_feature 1..80: note = Artificially Synthesized Probe
  source 1..80: mol_type = other DNA
gtcattttatcatttgaggtgactcttctgccaataatgctttctgccttactgtccacctttgatattaactgtaccat

SEQ ID NO: 24150 - DNA, 80 bp, synthetic construct
  misc_feature 1..80: note = Artificially Synthesized Probe
  source 1..80: mol_type = other DNA
gctggggctatgggcatgcaccaccacacccagctaatttttatattatttgtagagacgggatttcactatgttgccca

SEQ ID NO: 24151 - DNA, 80 bp, synthetic construct
  misc_feature 1..80: note = Artificially Synthesized Probe
  source 1..80: mol_type = other DNA
gaaaagtcaaccatcagtccatagttgcttctttgaaaaacatctttttttctctctggctactttcaagacttttctcc

SEQ ID NO: 24152 - DNA, 80 bp, synthetic construct
  misc_feature 1..80: note = Artificially Synthesized Probe
  source 1..80: mol_type = other DNA
tcctgggctcaagcgggtcccaaattcctggcctcaagtgaccctcccacctcagtctcccaaagtattgggattacagg

SEQ ID NO: 24153 - DNA, 80 bp, synthetic construct
  misc_feature 1..80: note = Artificially Synthesized Probe
  source 1..80: mol_type = other DNA
caacttgaaaggtttatttttcttaatttccttttcctcctcctgctccattcaaccttccctgcaatcacatggatatg

SEQ ID NO: 24154 - DNA, 80 bp, synthetic construct
  misc_feature 1..80: note = Artificially Synthesized Probe
  source 1..80: mol_type = other DNA
atacaacaagcactgtgactgtggcagttacaactgcagactgaagagtatttgcgtcaccaatacagcacaagtgacac

SEQ ID NO: 24155 - DNA, 80 bp, synthetic construct
  misc_feature 1..80: note = Artificially Synthesized Probe
  source 1..80: mol_type = other DNA
caagcacaattccaatatattaatttatgaagtagaactgctttggttgaaacagaaattgcccacctacccccacaaac

SEQ ID NO: 24156 - DNA, 80 bp, synthetic construct
  misc_feature 1..80: note = Artificially Synthesized Probe
  source 1..80: mol_type = other DNA
aggaaatctgtatttcaggtggtaggaaaaacatgagcaaagacaagtcaaatttggagagtgtttgaaagaaagtaatg

SEQ ID NO: 24157 - DNA, 80 bp, synthetic construct
  misc_feature 1..80: note = Artificially Synthesized Probe
  source 1..80: mol_type = other DNA
cccattaattttactatttgtctccagttcatttatgctcccatactgctgcggagctactttcacatatccccaatcct

SEQ ID NO: 24158 - DNA, 80 bp, synthetic construct
  misc_feature 1..80: note = Artificially Synthesized Probe
  source 1..80: mol_type = other DNA
ctcctcctcctttctcaaatttttgttcaaatacccccttctcaagtgaggcctaccctgacctccctatttaaattgct

SEQ ID NO: 24159 - DNA, 80 bp, synthetic construct
  misc_feature 1..80: note = Artificially Synthesized Probe
  source 1..80: mol_type = other DNA
agttaacactgaaacagttctaggacaatcatcagtcagtcccacattaagaactgccaaaagtgttaactagagccctg

SEQ ID NO: 24160 - DNA, 80 bp, synthetic construct
  misc_feature 1..80: note = Artificially Synthesized Probe
  source 1..80: mol_type = other DNA
aaaataaatggtacaaggtaaaaaatacagtttaaaaatatcaagtcaattgagaaacaaccccaagcagtacattaaac

SEQ ID NO: 24161 - DNA, 80 bp, synthetic construct
  misc_feature 1..80: note = Artificially Synthesized Probe
  source 1..80: mol_type = other DNA
aatagtctgccaagatattgtattactctctccctggaagtgtagtttcaaaatcggcaaggtgatgctgggtgcggtgg

SEQ ID NO: 24162 - DNA, 80 bp, synthetic construct
  misc_feature 1..80: note = Artificially Synthesized Probe
  source 1..80: mol_type = other DNA
acttttcatgaacctcaccaccacataattcaagacagagatatattaactatatactgaagtcttaagtatttgggggt

SEQ ID NO: 24163 - DNA, 80 bp, synthetic construct
  misc_feature 1..80: note = Artificially Synthesized Probe
  source 1..80: mol_type = other DNA
tagacctctaacctacatcttactttgagaacctcaaatataacatatatagtctcccttagaccaggagtcagaacagt

SEQ ID NO: 24164 - DNA, 80 bp, synthetic construct
  misc_feature 1..80: note = Artificially Synthesized Probe
  source 1..80: mol_type = other DNA
tctgaagaaggtccttgaaaccccaaaacagtgtttttcaaactgcctgttgcagccaatttggctgtcaatttcataag

SEQ ID NO: 24165 - DNA, 80 bp, synthetic construct
  misc_feature 1..80: note = Artificially Synthesized Probe
  source 1..80: mol_type = other DNA
ggacacaaaaataatctcagagggtaggggggaaaaataattgcttaatgttagggtggagactgtattaaagagtatct

SEQ ID NO: 24166 - DNA, 80 bp, synthetic construct
  misc_feature 1..80: note = Artificially Synthesized Probe
  source 1..80: mol_type = other DNA
tccagctgctatatccagacccacctcctattcattctaatcaagaaagcaagggatagaaaaacaagaaaagtcagact

SEQ ID NO: 24167 - DNA, 80 bp, synthetic construct
  misc_feature 1..80: note = Artificially Synthesized Probe
  source 1..80: mol_type = other DNA
caggatgtgaaatttgttcattccccaacatattttaaagactaaaatctacatcctatgttcaagatgtttgatggcag

SEQ ID NO: 24168 - DNA, 80 bp, synthetic construct
  misc_feature 1..80: note = Artificially Synthesized Probe
  source 1..80: mol_type = other DNA
aaaactacacatctattacagagtaaaataaaatccagaggcacctgtgcctggttaagacaaaggcatatccgattcct

SEQ ID NO: 24169 - DNA, 80 bp, synthetic construct
  misc_feature 1..80: note = Artificially Synthesized Probe
  source 1..80: mol_type = other DNA
gctgactaatgcaaaaacaggctgagagaagcaaggactggagaggaaaaaggaaaaggaaaaaaataggacaaaaagga

SEQ ID NO: 24170 - DNA, 80 bp, synthetic construct
  misc_feature 1..80: note = Artificially Synthesized Probe
  source 1..80: mol_type = other DNA
taagaattacacgcgacagtaactcgggctgttgtctcagccccagcaactaacctatatcctccacgtcgaggccgccg

SEQ ID NO: 24171 - DNA, 80 bp, synthetic construct
  misc_feature 1..80: note = Artificially Synthesized Probe
  source 1..80: mol_type = other DNA
ctgagatccagattcaagtgccctttaagtatttttatttgggcggaggaggtcacttcctcccacctaatttattaata

SEQ ID NO: 24172 - DNA, 80 bp, synthetic construct
  misc_feature 1..80: note = Artificially Synthesized Probe
  source 1..80: mol_type = other DNA
ggtgagcgtcccctttggcctggagccaggggtcaggggctggttggtgcctgcccaacccgtcctgctggggctggact

SEQ ID NO: 24173 - DNA, 80 bp, synthetic construct
  misc_feature 1..80: note = Artificially Synthesized Probe
  source 1..80: mol_type = other DNA
ttgggaaatggattgaggtgtgtttttccgggagaaaagcatgacatcctttcttgcttcatagaaaatttcttcctttg

SEQ ID NO: 24174 - DNA, 80 bp, synthetic construct
  misc_feature 1..80: note = Artificially Synthesized Probe
  source 1..80: mol_type = other DNA
ggtggttcacagttttgttccttttgtgcatttgtgcaggagactgagaagggtttcttctgagcagaaagcttagcctg

SEQ ID NO: 24175 - DNA, 80 bp, synthetic construct
  misc_feature 1..80: note = Artificially Synthesized Probe
  source 1..80: mol_type = other DNA
aggctgtttttagatgaaggtgactttacttgagaacatgggttacgtctcatgtggccagaatcgaattctaacctttc

SEQ ID NO: 24176 - DNA, 80 bp, synthetic construct
  misc_feature 1..80: note = Artificially Synthesized Probe
  source 1..80: mol_type = other DNA
ccgtgacctgtgcactgccacgcagcctcggagccgtgtgcacgcatatgcacgtgtgtatgtgttgtgtgtgtttgcag

SEQ ID NO: 24177 - DNA, 80 bp, synthetic construct
  misc_feature 1..80: note = Artificially Synthesized Probe
  source 1..80: mol_type = other DNA
tgaggtagcagtggacgggacgcccacggtctttcccatgccatgctgtttccagccgggccccatcactctcccacaag

SEQ ID NO: 24178 - DNA, 80 bp, synthetic construct
  misc_feature 1..80: note = Artificially Synthesized Probe
  source 1..80: mol_type = other DNA
tctcagaaccttctgtgtccttcgcagcatctcgttctaagggattttcaaatttcaattcctagcgggaatattgtaaa

SEQ ID NO: 24179 - DNA, 80 bp, synthetic construct
  misc_feature 1..80: note = Artificially Synthesized Probe
  source 1..80: mol_type = other DNA
gaaaacggagttcaagtgagtgcctgaccacgccatgccgccacctgccccttctcacggctctcttgccgccagcggcc

SEQ ID NO: 24180 - DNA, 80 bp, synthetic construct
  misc_feature 1..80: note = Artificially Synthesized Probe
  source 1..80: mol_type = other DNA
agctggtacgcggctcacctgcctgctgtggttgcagggtggactccgacgaccagtggggagagtactcctgcgtcttc

SEQ ID NO: 24181 - DNA, 80 bp, synthetic construct
  misc_feature 1..80: note = Artificially Synthesized Probe
  source 1..80: mol_type = other DNA
agactgggggtcctggactcagcccttgcctttggtcccctaggccctcatgaacggctccgagagcaggttcttcgtga

SEQ ID NO: 24182 - DNA, 80 bp, synthetic construct
  misc_feature 1..80: note = Artificially Synthesized Probe
  source 1..80: mol_type = other DNA
gtggtgggcgggatctgctagccaggtgtgggctcctgggtcccgcctgtgggtcgctgggaggtgggtccagtctgagc

SEQ ID NO: 24183 - DNA, 80 bp, synthetic construct
  misc_feature 1..80: note = Artificially Synthesized Probe
  source 1..80: mol_type = other DNA
ggactccagaaccgcagaagcctccccagctcacccctggaggacggccggctctctatagcaccagggctcacgtggga

SEQ ID NO: 24184 - DNA, 80 bp, synthetic construct
  misc_feature 1..80: note = Artificially Synthesized Probe
  source 1..80: mol_type = other DNA
gtcagggaggggtacataacgctactttgaaaggagaagctaaatactgtaataaggacaaggtgatgaaaagtaagagc

SEQ ID NO: 24185 - DNA, 80 bp, synthetic construct
  misc_feature 1..80: note = Artificially Synthesized Probe
  source 1..80: mol_type = other DNA
ccttagggacattgatattatttgcagtccagtcttgctttttcagaagttattgtgacttgtcactccaaatcttactc

SEQ ID NO: 24186 - DNA, 80 bp, synthetic construct
  misc_feature 1..80: note = Artificially Synthesized Probe
  source 1..80: mol_type = other DNA
tgaatctgagtaagtcacaacttccctttggtgccatttaccctgctataacatgtctgtttattcagagtcagttttaa

SEQ ID NO: 24187 - DNA, 80 bp, synthetic construct
  misc_feature 1..80: note = Artificially Synthesized Probe
  source 1..80: mol_type = other DNA
agcatcaaataattagtgcacagtacacatggaagaactatccttttaatcaaacgggcatttttattactatttggctt

SEQ ID NO: 24188 - DNA, 80 bp, synthetic construct
  misc_feature 1..80: note = Artificially Synthesized Probe
  source 1..80: mol_type = other DNA
ttatttttcccctcaaatctgatggtttttctgcttcacttggtattggctgaggtgtgggaaagaccttcacttctcct

SEQ ID NO: 24189 - DNA, 80 bp, synthetic construct
  misc_feature 1..80: note = Artificially Synthesized Probe
  source 1..80: mol_type = other DNA
tttacatcagtgaaattgattaccaggtagtgggatgaacatctgaaactagttcttagtttaagttgtctgagtttttg

SEQ ID NO: 24190 - DNA, 80 bp, synthetic construct
  misc_feature 1..80: note = Artificially Synthesized Probe
  source 1..80: mol_type = other DNA
gcatgtgccaccacgcccagctaaattttgtgtttttagtagagacagggtttcaccgtgttgcccgggctggtctcgaa

SEQ ID NO: 24191 - DNA, 80 bp, synthetic construct
  misc_feature 1..80: note = Artificially Synthesized Probe
  source 1..80: mol_type = other DNA
acctggccagcaatattttaatatagcacagaagtcctttctaaatgtgtatagtgagaatccattgaggatgaaataga

SEQ ID NO: 24192 - DNA, 80 bp, synthetic construct
  misc_feature 1..80: note = Artificially Synthesized Probe
  source 1..80: mol_type = other DNA
aagtcttgctcctttctgtagtttggctttcctttcagggtatctgattttgccttcctgctcctaggcttgtgacctga

SEQ ID NO: 24193 - DNA, 80 bp, synthetic construct
  misc_feature 1..80: note = Artificially Synthesized Probe
  source 1..80: mol_type = other DNA
tcaaagtcatgctagcaggtatcctgagattaaatccaggcagtctgacttgagagccttacttacgtgcagtatacttc

SEQ ID NO: 24194 - DNA, 80 bp, synthetic construct
  misc_feature 1..80: note = Artificially Synthesized Probe
  source 1..80: mol_type = other DNA
tatttattctcttgaaattgtgggtttgctgggtagtggatgatctaaacttggcttactcaaagtcaaaagcccaaagt

SEQ ID NO: 24195 - DNA, 80 bp, synthetic construct
  misc_feature 1..80: note = Artificially Synthesized Probe
  source 1..80: mol_type = other DNA
agtctcactcactctgtcacccaggctgggtgatatttcttttctttaattctttttctttttaaaaattttttattttt

SEQ ID NO: 24196 - DNA, 80 bp, synthetic construct
  misc_feature 1..80: note = Artificially Synthesized Probe
  source 1..80: mol_type = other DNA
attatgggggcagaggggggtgaagatacaaagttgaataaaacttctctagagcttcacaatctaataagataggcatt

SEQ ID NO: 24197 - DNA, 80 bp, synthetic construct
  misc_feature 1..80: note = Artificially Synthesized Probe
  source 1..80: mol_type = other DNA
atataaatatatatatatataaatataaatatatatatatatatttttttcgagctagagtctcgctctgtcgcccaggc

SEQ ID NO: 24198 - DNA, 80 bp, synthetic construct
  misc_feature 1..80: note = Artificially Synthesized Probe
  source 1..80: mol_type = other DNA
ttccttaaacatatgtacatatttctgttgggtaggtacctgagaatggaatcgctgggtcacagggtatgaaaatgttt

SEQ ID NO: 24199 - DNA, 80 bp, synthetic construct
  misc_feature 1..80: note = Artificially Synthesized Probe
  source 1..80: mol_type = other DNA
gtaaacaagcacctttttaggtttgttgactgtttagacatagtcttttgttgaagtgtttattcaagtcttggcctttt

SEQ ID NO: 24200 - DNA, 80 bp, synthetic construct
  misc_feature 1..80: note = Artificially Synthesized Probe
  source 1..80: mol_type = other DNA
ttggctttcattatcctcaaaatattttcttagtcaatcagcccctttctatgtgaccactctcatgttgctgctgttcc

SEQ ID NO: 24201 - DNA, 80 bp, synthetic construct
  misc_feature 1..80: note = Artificially Synthesized Probe
  source 1..80: mol_type = other DNA
gatgaggtttcttcatgttgtccaggctggtctcaagctcctgggctcaagtgattcacctgcctctgcctccccaagtg

SEQ ID NO: 24202 - DNA, 80 bp, synthetic construct
  misc_feature 1..80: note = Artificially Synthesized Probe
  source 1..80: mol_type = other DNA
atgttacaagtacctcttcaagtccgtgagaagttttatttaccatttgcatttagctctgcaatccatctggaattaat

SEQ ID NO: 24203 - DNA, 80 bp, synthetic construct
  misc_feature 1..80: note = Artificially Synthesized Probe
  source 1..80: mol_type = other DNA
agctagtcagtttccacaaaacatacttttatgatttttattggaattgcattgaatccatatataagttttgggagagc

SEQ ID NO: 24204 - DNA, 80 bp, synthetic construct
  misc_feature 1..80: note = Artificially Synthesized Probe
  source 1..80: mol_type = other DNA
aagcagtaggtaggtaagggaaaatgagtgtttggtgggtgaagatattgggatggtccctaactataataaggagactt

SEQ ID NO: 24205 - DNA, 80 bp, synthetic construct
  misc_feature 1..80: note = Artificially Synthesized Probe
  source 1..80: mol_type = other DNA
tgctagatgacgagttagtgggtgcagtgcaccagcatggcacatgtatacatatgtatgtaacctgcacaatgtgcaca

SEQ ID NO: 24206 - DNA, 80 bp, synthetic construct
  misc_feature 1..80: note = Artificially Synthesized Probe
  source 1..80: mol_type = other DNA
cagcaagcatatcagatgtttctgatgctggtgtttctcaggatcatgctttgacaaaatatctagtccactgtgtgctg

SEQ ID NO: 24207 - DNA, 80 bp, synthetic construct
  misc_feature 1..80: note = Artificially Synthesized Probe
  source 1..80: mol_type = other DNA
tttgtaggtcatagggtaaggtggtggtggtggtggtgctttcacaacaacattctaacacaaagcaattcatacagact

SEQ ID NO: 24208 - DNA, 80 bp, synthetic construct
  misc_feature 1..80: note = Artificially Synthesized Probe
  source 1..80: mol_type = other DNA
agttggcattcccacaagcaatgggtgagagttctagttgatctacatccgtgtcagcatttgggattatcagtattttt

SEQ ID NO: 24209 - DNA, 80 bp, synthetic construct
  misc_feature 1..80: note = Artificially Synthesized Probe
  source 1..80: mol_type = other DNA
aagaattatgtttttcacatttggaatgcatacttgctgatcattggtatgttactcccattttatgaagctggaacata

SEQ ID NO: 24210 - DNA, 80 bp, synthetic construct
  misc_feature 1..80: note = Artificially Synthesized Probe
  source 1..80: mol_type = other DNA
aaactcttttcatgtaggtatgggtcacctttgattatatggtagtcttctgaatatggtcctcttacctgacacatatg

SEQ ID NO: 24211 - DNA, 80 bp, synthetic construct
  misc_feature 1..80: note = Artificially Synthesized Probe
  source 1..80: mol_type = other DNA
ttcctagatgtcatagatattgggcatgttgcttaacctccttgagtctcactttcctcatatagaaagcaaagataata

SEQ ID NO: 24212 - DNA, 80 bp, synthetic construct
  misc_feature 1..80: note = Artificially Synthesized Probe
  source 1..80: mol_type = other DNA
gtgaatggcacagctggtattccagctcagacattctagctccagagtgagtgtggttaatcattgtgctatactaacca

SEQ ID NO: 24213 - DNA, 80 bp, synthetic construct
  misc_feature 1..80: note = Artificially Synthesized Probe
  source 1..80: mol_type = other DNA
cggcccctaagaatgtcttttacagctctttaaaaaaaaatccaggatccaatcatgttatatataatatctctttagtt

SEQ ID NO: 24214 - DNA, 80 bp, synthetic construct
  misc_feature 1..80: note = Artificially Synthesized Probe
  source 1..80: mol_type = other DNA
actaaagctgcttagagaattgagttaagtttttaagggctttttgtaacaaaaagtatgtctgaattccctggaggact

SEQ ID NO: 24215 - DNA, 80 bp, synthetic construct
  misc_feature 1..80: note = Artificially Synthesized Probe
  source 1..80: mol_type = other DNA
tgctttcagtatttaagtaatctctgttatactttagcaactggttttgttaagtctgtgcaattagtaaagcaagtggc

SEQ ID NO: 24216 - DNA, 80 bp, synthetic construct
  misc_feature 1..80: note = Artificially Synthesized Probe
  source 1..80: mol_type = other DNA
gagacctttgagaggcttaaaagataggaagatcaactgaggacaagacatagaaggttttgaaatcgtgggacactact

SEQ ID NO: 24217 - DNA, 80 bp, synthetic construct
  misc_feature 1..80: note = Artificially Synthesized Probe
  source 1..80: mol_type = other DNA
cctagtagtgtcaggaaaaatggtacagagatgacttggctggtagttatcaaaaatcctcccagaacatcctgttctca

SEQ ID NO: 24218 - DNA, 80 bp, synthetic construct
  misc_feature 1..80: note = Artificially Synthesized Probe
  source 1..80: mol_type = other DNA
gtgacgaagggattccgtttcacttttttccatatggatttacaatggcccccagcatcatttattggaagaacatgcat

SEQ ID NO: 24219 - DNA, 80 bp, synthetic construct
  misc_feature 1..80: note = Artificially Synthesized Probe
  source 1..80: mol_type = other DNA
tgcctcaccttcccgagttgttgggattacaggtgcccaccaccacacccggctgatttttttttttcttgagacggagt

SEQ ID NO: 24220 - DNA, 80 bp, synthetic construct
  misc_feature 1..80: note = Artificially Synthesized Probe
  source 1..80: mol_type = other DNA
gagcactttattgagccagatcacttaagcatttgacctttagacaagtcttttatttatgttagagtttcttagccctt

SEQ ID NO: 24221 - DNA, 80 bp, synthetic construct
  misc_feature 1..80: note = Artificially Synthesized Probe
  source 1..80: mol_type = other DNA
aagctatgcatggtaaactttgttgttttgcctggcagagctggtcctttcccacctatgtctttgaccctgttaggtca

SEQ ID NO: 24222 - DNA, 80 bp, synthetic construct
  misc_feature 1..80: note = Artificially Synthesized Probe
  source 1..80: mol_type = other DNA
ttagagcaaatttgagaaagtacaaaataaaaaaaaagcagcctgccatcccacacaaccacttttatttaattttgttt

SEQ ID NO: 24223 - DNA, 80 bp, synthetic construct
  misc_feature 1..80: note = Artificially Synthesized Probe
  source 1..80: mol_type = other DNA
gacatgtaccttaatttgctatgttcttttaaaaataaatttgggaaatttgctctctagaacagtagcctcctaaccca

SEQ ID NO: 24224 - DNA, 80 bp, synthetic construct
  misc_feature 1..80: note = Artificially Synthesized Probe
  source 1..80: mol_type = other DNA
ataggtgtaagcttccgcacccgaccaattaaaagttttaatattccccctgtggtgctatatatgtatacataggtttt

SEQ ID NO: 24225 - DNA, 80 bp, synthetic construct
  misc_feature 1..80: note = Artificially Synthesized Probe
  source 1..80: mol_type = other DNA
aaggggtgttctggataagtcatagcagttaacaagaatgctaggacatacagggacacataattcatcagtcctgtcaa

SEQ ID NO: 24226 - DNA, 80 bp, synthetic construct
  misc_feature 1..80: note = Artificially Synthesized Probe
  source 1..80: mol_type = other DNA
gacatgtagatgttgcttaaaatcattgaaaaagtattctttttgcagcatcctgcttgcctggcttgtggatttcacct

SEQ ID NO: 24227 - DNA, 80 bp, synthetic construct
  misc_feature 1..80: note = Artificially Synthesized Probe
  source 1..80: mol_type = other DNA
tgtatattatttcaacccattccgttggtttaattttcgtgtgagagtctagccaggcaggctaggataggaaattattt

SEQ ID NO: 24228 - DNA, 80 bp, synthetic construct
  misc_feature 1..80: note = Artificially Synthesized Probe
  source 1..80: mol_type = other DNA
gttctttaaaaaaacacactgtctttgctctcatttcccaacatgatggacctagtaatggatatggtgatctagtagcc

SEQ ID NO: 24229 - DNA, 80 bp, synthetic construct
  misc_feature 1..80: note = Artificially Synthesized Probe
  source 1..80: mol_type = other DNA
ccttaagaatacaatcctaaaataaagttgttacatattgcagaaaggcagagtgattgtgttgttatggcaactcaaat

SEQ ID NO: 24230 - DNA, 80 bp, synthetic construct
  misc_feature 1..80: note = Artificially Synthesized Probe
  source 1..80: mol_type = other DNA
taaagatgtattaagtggtttaagagcagtttatattacaaataaggtggaagaaggtggagttctgtaagaccggacac

SEQ ID NO: 24231 - DNA, 80 bp, synthetic construct
  misc_feature 1..80: note = Artificially Synthesized Probe
  source 1..80: mol_type = other DNA
tcactgtatacattgcctggttttgcctggctaaccgaaatctggcctttcatgtaggtatagagaagaaaccttttttg

SEQ ID NO: 24232 - DNA, 80 bp, synthetic construct
  misc_feature 1..80: note = Artificially Synthesized Probe
  source 1..80: mol_type = other DNA
accatcacaaaagaaggcctcacaatgtatcaggcaatcaaatagccaataacctattctcctgctaaattccataaact

SEQ ID NO: 24233 - DNA, 80 bp, synthetic construct
  misc_feature 1..80: note = Artificially Synthesized Probe
  source 1..80: mol_type = other DNA
aatcatttgaaatttgtgtataggccagcttcacatcatcagaaattgtgtaaccccatgattcccaggcctcagctggt

SEQ ID NO: 24234 - DNA, 80 bp, synthetic construct
  misc_feature 1..80: note = Artificially Synthesized Probe
  source 1..80: mol_type = other DNA
attaagaaaaagaggctgcttgcagtggctcacacgtgtaatcctggcactttctgaggctgagtcgggaggatctcttg

SEQ ID NO: 24235 - DNA, 80 bp, synthetic construct
  misc_feature 1..80: note = Artificially Synthesized Probe
  source 1..80: mol_type = other DNA
aaataaacattaggagctgctccccctcttcgctttcttgtttaaagggattctcatccctttagtccaagtttcgtgga

SEQ ID NO: 24236 - DNA, 80 bp, synthetic construct
  misc_feature 1..80: note = Artificially Synthesized Probe
  source 1..80: mol_type = other DNA
tttatttgccattattttgttgaggatttttgcctatatggccataagggatattggtctgtaatctccattctgctgtt

SEQ ID NO: 24237 - DNA, 80 bp, synthetic construct
  misc_feature 1..80: note = Artificially Synthesized Probe
  source 1..80: mol_type = other DNA
tacattttgaaagcctttgcagttctattgagatatattccatgcgtgtgccacttgatggccattgtggaatctggatg

SEQ ID NO: 24238 - DNA, 80 bp, synthetic construct
  misc_feature 1..80: note = Artificially Synthesized Probe
  source 1..80: mol_type = other DNA
gaaggtttccttacttcagagttttagccttctttgggtctctgcttctgctgtggctttcctcatggaattgctttgag

SEQ ID NO: 24239 - DNA, 80 bp, synthetic construct
  misc_feature 1..80: note = Artificially Synthesized Probe
  source 1..80: mol_type = other DNA
tttgttccgaggtaaactttcatgttaacatagccatctcaggtttcttttttttttttttttttttttttttttgagac

SEQ ID NO: 24240 - DNA, 80 bp, synthetic construct
  misc_feature 1..80: note = Artificially Synthesized Probe
  source 1..80: mol_type = other DNA
aaaaattaggcgtagtggtatacacctgtagtcccatctacttggaaggctgaggcaggaggatctcttgagctcaggag

SEQ ID NO: 24241 - DNA, 80 bp, synthetic construct
  misc_feature 1..80: note = Artificially Synthesized Probe
  source 1..80: mol_type = other DNA
tcagtagccgtatgtgactagtggttattgtattggagagtatgtttagaccatacatttagtgtagtgatcagtatggt

SEQ ID NO: 24242 - DNA, 80 bp, synthetic construct
  misc_feature 1..80: note = Artificially Synthesized Probe
  source 1..80: mol_type = other DNA
taaaagcttttatccagtaagcagtttctttctattcccttccttcagcccttggcaatcaccaatctgcattctgccca

SEQ ID NO: 24243 - DNA, 80 bp, synthetic construct
  misc_feature 1..80: note = Artificially Synthesized Probe
  source 1..80: mol_type = other DNA
aaaagcttttgagactggacaggagtttactgataaagcttcttctagtacatctggatttcctggtatgcttctctcct

SEQ ID NO: 24244 - DNA, 80 bp, synthetic construct
  misc_feature 1..80: note = Artificially Synthesized Probe
  source 1..80: mol_type = other DNA
agcctggaaatatttcacttcacatatactgtattttcagttttctacattcctatcctttgtgttattattgtcatacg

SEQ ID NO: 24245 - DNA, 80 bp, synthetic construct
  misc_feature 1..80: note = Artificially Synthesized Probe
  source 1..80: mol_type = other DNA
cttttattctagtgtagttcatcccagcaactgagatgtgagctttctaaggctcctagtgaatgtcataagtattcatt

SEQ ID NO: 24246 - DNA, 80 bp, synthetic construct
  misc_feature 1..80: note = Artificially Synthesized Probe
  source 1..80: mol_type = other DNA
acttcaaggtctgttggcgattaagtttatatacagacaataaagtgtctagttgtattgtctttcccaatgttaagccc

SEQ ID NO: 24247 - DNA, 80 bp, synthetic construct
  misc_feature 1..80: note = Artificially Synthesized Probe
  source 1..80: mol_type = other DNA
gccactgcacccagcctgagggaagtggttttgatgcaaaagatgaagatgtcccagaggaaatctttacattaaaggaa

SEQ ID NO: 24248 - DNA, 80 bp, synthetic construct
  misc_feature 1..80: note = Artificially Synthesized Probe
  source 1..80: mol_type = other DNA
gtgacattgtagccaatgtaacgtcatataatgcaaggcattattcaggtgtttgtgttgatactggtgtaaatgaacct

SEQ ID NO: 24249 - DNA, 80 bp, synthetic construct
  misc_feature 1..80: note = Artificially Synthesized Probe
  source 1..80: mol_type = other DNA
tgatcctcctgctgcagtctcccgagtagctgggactacaggcatgtgccaccatgcctggctaatttaagtattttttg

SEQ ID NO: 24250 - DNA, 80 bp, synthetic construct
  misc_feature 1..80: note = Artificially Synthesized Probe
  source 1..80: mol_type = other DNA
attcttttcacagacatatccctttggttcagttgaggcatctctgtttttggtgcccttcattgttctggttcatgtga

SEQ ID NO: 24251 - DNA, 80 bp, synthetic construct
  misc_feature 1..80: note = Artificially Synthesized Probe
  source 1..80: mol_type = other DNA
ccttggctttcataacattgacatttttgaggattacacgccagtatcttgcagaacatttttcaaattgggtttttctg

SEQ ID NO: 24252 - DNA, 80 bp, synthetic construct
  misc_feature 1..80: note = Artificially Synthesized Probe
  source 1..80: mol_type = other DNA
taacaaattacctcaaattgagtggcttataataacacatacatttaggctgggcacagtggctcacaccagtaatccca

SEQ ID NO: 24253 - DNA, 80 bp, synthetic construct
  misc_feature 1..80: note = Artificially Synthesized Probe
  source 1..80: mol_type = other DNA
tattcattgtaaaatgcttgtctcaatcaagctaattaacatatctgtaacctagcatacatgtaacatctcacagtttc

SEQ ID NO: 24254 - DNA, 80 bp, synthetic construct
  misc_feature 1..80: note = Artificially Synthesized Probe
  source 1..80: mol_type = other DNA
attattttgacatgtctctgtcattcattgagcacctcaagaagatattccaagctcctcttaaactttcctgtccaagc

SEQ ID NO: 24255 - DNA, 80 bp, synthetic construct
  misc_feature 1..80: note = Artificially Synthesized Probe
  source 1..80: mol_type = other DNA
tactagatagaggtttactatcacatcagattcatgatttctgaacttggttactccctgcaccctccaaacgagtttca

SEQ ID NO: 24256 - DNA, 80 bp, synthetic construct
  misc_feature 1..80: note = Artificially Synthesized Probe
  source 1..80: mol_type = other DNA
aacaggccctgatgtgtgatgttcctcttctgtgtccaagtgttttcattgttcaattcccaccaagagtgagaacgtgc

SEQ ID NO: 24257 - DNA, 80 bp, synthetic construct
  misc_feature 1..80: note = Artificially Synthesized Probe
  source 1..80: mol_type = other DNA
ttaggtctaacatttaagtctttactccaccttgaattaatttttgtgtaaggtgtaaggaagagatccagtttcagctt

SEQ ID NO: 24258 - DNA, 80 bp, synthetic construct
  misc_feature 1..80: note = Artificially Synthesized Probe
  source 1..80: mol_type = other DNA
ctccacctgtgcccactttggtaatgaaaaaataaatggcttcccagaacagtttgaaatgcaagtggcattcacagaag

SEQ ID NO: 24259 - DNA, 80 bp, synthetic construct
  misc_feature 1..80: note = Artificially Synthesized Probe
  source 1..80: mol_type = other DNA
tgtaaatgaattgtgccattgaacctgatgggcactagatactatattcttcttgaagcactggaggcccttcattgcaa

SEQ ID NO: 24260 - DNA, 80 bp, synthetic construct
  misc_feature 1..80: note = Artificially Synthesized Probe
  source 1..80: mol_type = other DNA
ttgcaaaggagagtcaattggggtgacgttaggtgggaactgagctgaagaaactaatatgtgctgtgcagggctggatt

SEQ ID NO: 24261 - DNA, 80 bp, synthetic construct
  misc_feature 1..80: note = Artificially Synthesized Probe
  source 1..80: mol_type = other DNA
aaggggatggggtaagcactttcaaattctttgttgttagtagttttgatggaggatagggataaatgaatgaggaagtg

SEQ ID NO: 24262 - DNA, 80 bp, synthetic construct
  misc_feature 1..80: note = Artificially Synthesized Probe
  source 1..80: mol_type = other DNA
gagccaccgtgcccagcctgtgtacagcatttcttataacaatgagttacttttatgttaaggatttttttttttttttt

SEQ ID NO: 24263 - DNA, 80 bp, synthetic construct
  misc_feature 1..80: note = Artificially Synthesized Probe
  source 1..80: mol_type = other DNA
tggcagtgggggaaatgtcagattgacagagtgcttggatttcatacagtagatatctcatcatgaattattgatgagag

SEQ ID NO: 24264 - DNA, 80 bp, synthetic construct
  misc_feature 1..80: note = Artificially Synthesized Probe
  source 1..80: mol_type = other DNA
catggctctcattgtccatttatcaattttagatggtgtaaacagtgaataccatattttgtttcccaatattactttct

SEQ ID NO: 24265 - DNA, 80 bp, synthetic construct
  misc_feature 1..80: note = Artificially Synthesized Probe
  source 1..80: mol_type = other DNA
tttgaacgataacttctttttttacctcctttccttttggccactactgccccttttgggattctctctggggttaaagc

SEQ ID NO: 24266 - DNA, 80 bp, synthetic construct
  misc_feature 1..80: note = Artificially Synthesized Probe
  source 1..80: mol_type = other DNA
gtacagtattcaccttgagacactctagctagtgtttcatgaattaacagattccagttcccctcagcctttcttttttt

SEQ ID NO: 24267 - DNA, 80 bp, synthetic construct
  misc_feature 1..80: note = Artificially Synthesized Probe
  source 1..80: mol_type = other DNA
cactagtggtatgatcctgaacttatttccttatctgtaaatggatactatagtaagggcatgcagtgatggtagctgct

SEQ ID NO: 24268 - DNA, 80 bp, synthetic construct
  misc_feature 1..80: note = Artificially Synthesized Probe
  source 1..80: mol_type = other DNA
ctggggctctatcacatactgctcacatggctgacttctagtctcttatttcctcctggtgttgaaacttataggtatgg

SEQ ID NO: 24269 - DNA, 80 bp, synthetic construct
  misc_feature 1..80: note = Artificially Synthesized Probe
  source 1..80: mol_type = other DNA
tttaaggaccctactgaaaacaagactgttgtttcagagaataaagagaaaggggagaatagagtgagaaaagactgggg

SEQ ID NO: 24270 - DNA, 80 bp, synthetic construct
  misc_feature 1..80: note = Artificially Synthesized Probe
  source 1..80: mol_type = other DNA
tgaaatggatcatagacctaaatcggagttaacatgtataaaactaatagaaaatgtggcaaaaataatcattgtgactt

SEQ ID NO: 24271 - DNA, 80 bp, synthetic construct
  misc_feature 1..80: note = Artificially Synthesized Probe
  source 1..80: mol_type = other DNA
agtttcataatctgagtttcctcatactcctttccagtctgtacccatcccccatatgcaattactgttctgatttgtca

SEQ ID NO: 24272 - DNA, 80 bp, synthetic construct
  misc_feature 1..80: note = Artificially Synthesized Probe
  source 1..80: mol_type = other DNA
aaagagaagagaaatgaaattctgactgtaagaatataagtaaggggccgggcacggtgatgcacgcttataatctcagc

SEQ ID NO: 24273 - DNA, 80 bp, synthetic construct
  misc_feature 1..80: note = Artificially Synthesized Probe
  source 1..80: mol_type = other DNA
cagaaatgcttctcattctgtagctgataccctctctattgtatatgaataatttctgtgtagcacaatttctgtataat

SEQ ID NO: 24274 - DNA, 80 bp, synthetic construct
  misc_feature 1..80: note = Artificially Synthesized Probe
  source 1..80: mol_type = other DNA
gcatgcatggaattctgtgccctgtaaaattgacatgaagaaaaggagtattcattttcgtacttgattctttaacaaaa

SEQ ID NO: 24275 - DNA, 80 bp, synthetic construct
  misc_feature 1..80: note = Artificially Synthesized Probe
  source 1..80: mol_type = other DNA
aaatgtcagcctccaagtttgaatggcagcctgagggccttagaagctttttgttttctgagatggaaacacaaattgga

SEQ ID NO: 24276 - DNA, 80 bp, synthetic construct
  misc_feature 1..80: note = Artificially Synthesized Probe
  source 1..80: mol_type = other DNA
gcagtgacatagtttgttaaactgatagcctactatatggcagtattgccaggccaatcagaattcacccagctatttta

SEQ ID NO: 24277 - DNA, 80 bp, synthetic construct
  misc_feature 1..80: note = Artificially Synthesized Probe
  source 1..80: mol_type = other DNA
cagtctagtgaaatgcactggaaaaatggtgttggtaattcctgctttgaggtcatgctagaaagagagaagataatact

SEQ ID NO: 24278 - DNA, 80 bp, synthetic construct
  misc_feature 1..80: note = Artificially Synthesized Probe
  source 1..80: mol_type = other DNA
aaaaatccaaaaaattagccaggcgtggtagtacatgcctgtgatcccagctgcttgggaggctaaggcacgcgaatcgc

SEQ ID NO: 24279 - DNA, 80 bp, synthetic construct
  misc_feature 1..80: note = Artificially Synthesized Probe
  source 1..80: mol_type = other DNA
ccttcagtgacataaacgtaaaaaggaattaacgtttttgaaatgtcttagcatcatagaaaggataaatgatacagggc

SEQ ID NO: 24280 - DNA, 80 bp, synthetic construct
  misc_feature 1..80: note = Artificially Synthesized Probe
  source 1..80: mol_type = other DNA
tttgacatcaagtagatgtaaggctttacaaataacatggccattcacaactagccacaactccgattcgattcacagag

SEQ ID NO: 24281 - DNA, 80 bp, synthetic construct
  misc_feature 1..80: note = Artificially Synthesized Probe
  source 1..80: mol_type = other DNA
cctgaaaacaaaaaatctgaaggagataaattatggttgaatgcacatgcggtgccagcatagcagtgaacaaatttcct

SEQ ID NO: 24282 - DNA, 80 bp, synthetic construct
  misc_feature 1..80: note = Artificially Synthesized Probe
  source 1..80: mol_type = other DNA
gtcacttacacacagctgattgagatatctcatggagaatactgaataggaatgataatgtggcactgggacggaagatt

SEQ ID NO: 24283 - DNA, 80 bp, synthetic construct
  misc_feature 1..80: note = Artificially Synthesized Probe
  source 1..80: mol_type = other DNA
aaaaattaggccaggaaagattgcaatattcaacaccatcaaaaatgaagtctaggcaactggagttttaatgacttgct

SEQ ID NO: 24284 - DNA, 80 bp, synthetic construct
  misc_feature 1..80: note = Artificially Synthesized Probe
  source 1..80: mol_type = other DNA
aactctgtagtggtattttccattccataacgcaacaagtgctattgatgatagctaataacagatattagtatattatt

SEQ ID NO: 24285 - DNA, 80 bp, synthetic construct
  misc_feature 1..80: note = Artificially Synthesized Probe
  source 1..80: mol_type = other DNA
aatactaccttagggtctggctacttagagacccatgagaatgcagttaatctgagttatatttgctgttttctgtttaa

SEQ ID NO: 24286 - DNA, 80 bp, synthetic construct
  misc_feature 1..80: note = Artificially Synthesized Probe
  source 1..80: mol_type = other DNA
tgaaatccccctggtgaattttaattcattttgccttgcgtatttctctactttgtacattgttgttgcattttgaacag

SEQ ID NO: 24287 - DNA, 80 bp, synthetic construct
  misc_feature 1..80: note = Artificially Synthesized Probe
  source 1..80: mol_type = other DNA
aaatgttgtattgtgatattttcggtgacttgaaagttaagagaaagcagcactgctcattcatgcccttgccttgtcac

SEQ ID NO: 24288 - DNA, 80 bp, synthetic construct
  misc_feature 1..80: note = Artificially Synthesized Probe
  source 1..80: mol_type = other DNA
aatgtgtcatgcgctttgacataacatatctgtaatctctgaatacagaaagcactttctgtgttagctgtaggtgttaa

SEQ ID NO: 24289 - DNA, 80 bp, synthetic construct
  misc_feature 1..80: note = Artificially Synthesized Probe
  source 1..80: mol_type = other DNA
caagacatagttatgcagctataaccaacctatccatctgccaaccagattggaattctcctatccaaggcttccattaa

SEQ ID NO: 24290 - DNA, 80 bp, synthetic construct
  misc_feature 1..80: note = Artificially Synthesized Probe
  source 1..80: mol_type = other DNA
aatcggtctcaggattttttccttcaggtgggttgtcattctatacgatgatgagcagatgatttcatttttaaaatgtg

SEQ ID NO: 24291 - DNA, 80 bp, synthetic construct
  misc_feature 1..80: note = Artificially Synthesized Probe
  source 1..80: mol_type = other DNA
atgggcatggctatgggccagttaaactttatttgcaaaaatatgtgtcaggccagagcttgtaagtgctgttaactgat

SEQ ID NO: 24292 - DNA, 80 bp, synthetic construct
  misc_feature 1..80: note = Artificially Synthesized Probe
  source 1..80: mol_type = other DNA
ttgtgctgaacctctgaaatataagatgaaacagaaactggccctgccttgaaggaatttacagtagtgtggggtgggaa

SEQ ID NO: 24293 - DNA, 80 bp, synthetic construct
  misc_feature 1..80: note = Artificially Synthesized Probe
  source 1..80: mol_type = other DNA
aagaggtgttgtgggtctggactagagtagaagcagtggaaatgcaaaagtagggtcagatgtattaaaatagatgattc

SEQ ID NO: 24294 - DNA, 80 bp, synthetic construct
  misc_feature 1..80: note = Artificially Synthesized Probe
  source 1..80: mol_type = other DNA
attcatagggggtatgttccccagtggatgcctaaaccacagatagttctgaactccatgtatactatgttttttcctat

SEQ ID NO: 24295 - DNA, 80 bp, synthetic construct
  misc_feature 1..80: note = Artificially Synthesized Probe
  source 1..80: mol_type = other DNA
ccaggaaattgaatggataaacaaaactgtggcacatccatacagtagataatactacttggcaataaaaggaaaagaaa

SEQ ID NO: 24296 - DNA, 80 bp, synthetic construct
  misc_feature 1..80: note = Artificially Synthesized Probe
  source 1..80: mol_type = other DNA
tagttttaaattttacttaggtttttgagatggtgtcttgctgtgatgcccagactgctctcaaactcctggactcaggc

SEQ ID NO: 24297 - DNA, 80 bp, synthetic construct
  misc_feature 1..80: note = Artificially Synthesized Probe
  source 1..80: mol_type = other DNA
ttctttgccctagtgggatagaaaggggaaaggaactcctaagaagctctgtgttctatgttaggttagtaacacccttt

SEQ ID NO: 24298 - DNA, 80 bp, synthetic construct
  misc_feature 1..80: note = Artificially Synthesized Probe
  source 1..80: mol_type = other DNA
ggatcatcacaaatgtaaaatatcaagttaaacctcataagatatttctgcccaaaagaaacacattagggtactggcct

SEQ ID NO: 24299 - DNA, 80 bp, synthetic construct
  misc_feature 1..80: note = Artificially Synthesized Probe
  source 1..80: mol_type = other DNA
tgtatccagtgtcaacctgtgtcaaagtgcaagctagagatctaatgaatatgatctcctacacaatgcttaaagataca

SEQ ID NO: 24300 - DNA, 80 bp, synthetic construct
  misc_feature 1..80: note = Artificially Synthesized Probe
  source 1..80: mol_type = other DNA
agccgggcaaggtggctaacgcctataatcccaccactttgggaggctgaggcaggcgaatacctgaagtcgggagttcg

SEQ ID NO: 24301 - DNA, 80 bp, synthetic construct
  misc_feature 1..80: note = Artificially Synthesized Probe
  source 1..80: mol_type = other DNA
gcacccaccgtgaacatgatgcttatttgatttaaccctcacaataaccctgtaaagtttttagatatgatgtgacttcc

SEQ ID NO: 24302 - DNA, 80 bp, synthetic construct
  misc_feature 1..80: note = Artificially Synthesized Probe
  source 1..80: mol_type = other DNA
ttaatttaacaaccttcccccccaccccccccatggtgctttgaaatgatttttctaatatctgtcattcagtgttgaga

SEQ ID NO: 24303 - DNA, 80 bp, synthetic construct
  misc_feature 1..80: note = Artificially Synthesized Probe
  source 1..80: mol_type = other DNA
caaggccgccttatacctagtattgatacaagtaggatttgcatctcattaacttgagattcttttgcagatatttctaa

SEQ ID NO: 24304 - DNA, 80 bp, synthetic construct
  misc_feature 1..80: note = Artificially Synthesized Probe
  source 1..80: mol_type = other DNA
gaaaattgtggcattacaacgttcaactctttgcttctcattggtgctaataggatctgtcagccctgcctttctctgta

SEQ ID NO: 24305 - DNA, 80 bp, synthetic construct
  misc_feature 1..80: note = Artificially Synthesized Probe
  source 1..80: mol_type = other DNA
aaaacaaccacaacaacaaaaagtcattcataagccagtgaactgagagaaaacatactgtatttctgttctttggagga

SEQ ID NO: 24306 - DNA, 80 bp, synthetic construct
  misc_feature 1..80: note = Artificially Synthesized Probe
  source 1..80: mol_type = other DNA
ctcctgggttgcaatgaccataaagagtgtattttcatatagagagttgtgatactgggaataaattataaaggaaacag

SEQ ID NO: 24307 - DNA, 80 bp, synthetic construct
  misc_feature 1..80: note = Artificially Synthesized Probe
  source 1..80: mol_type = other DNA
ctagcagcagtgtgaaaattgaaaacttgttcagaattacagcctgctttcacaaagaaggtagttttcagcaaggcatc

SEQ ID NO: 24308 - DNA, 80 bp, synthetic construct
  misc_feature 1..80: note = Artificially Synthesized Probe
  source 1..80: mol_type = other DNA
cagtagtttattctctttcattgagttgaataaatatatcgcagtttgttttctgtctccttttggtggatatctgagcc

SEQ ID NO: 24309 - DNA, 80 bp, synthetic construct
  misc_feature 1..80: note = Artificially Synthesized Probe
  source 1..80: mol_type = other DNA
cccattgaattacatgaattcatttgtccaaaccatttagttatataagagttatattctcaaacctcctgaagaaaacg

SEQ ID NO: 24310 - DNA, 80 bp, synthetic construct
  misc_feature 1..80: note = Artificially Synthesized Probe
  source 1..80: mol_type = other DNA
ccatcttatagtttccctggtcagtcctggagtcaaccatatttccatgaatgtatgattccctttagtgcagaatggta

SEQ ID NO: 24311 - DNA, 80 bp, synthetic construct
  misc_feature 1..80: note = Artificially Synthesized Probe
  source 1..80: mol_type = other DNA
agatacctaacatcccctttttccttggctccgttcaaggttttatctttatcactcgttttcagcagttctgactgtga

SEQ ID NO: 24312 - DNA, 80 bp, synthetic construct
  misc_feature 1..80: note = Artificially Synthesized Probe
  source 1..80: mol_type = other DNA
tctcccgggttcaagcgattctcctccctctgcctcccaagtagctgggattacaggcacttgccaccatgcccagctaa

SEQ ID NO: 24313 - DNA, 80 bp, synthetic construct
  misc_feature 1..80: note = Artificially Synthesized Probe
  source 1..80: mol_type = other DNA
ctattgccagccactatggcagttttgaactcttatcacttgatatctcaagccaatagactgtggctttcagattgaat

SEQ ID NO: 24314 - DNA, 80 bp, synthetic construct
  misc_feature 1..80: note = Artificially Synthesized Probe
  source 1..80: mol_type = other DNA
aaaacagaactgactttataatatcgatggggagttatatatctctactattttccccattttttcttaaattttatcta

SEQ ID NO: 24315 - DNA, 80 bp, synthetic construct
  misc_feature 1..80: note = Artificially Synthesized Probe
  source 1..80: mol_type = other DNA
ttgaaaataagaggagccctaagagacatgacaaataaatgccatgtgggatcctagattagatgctgaacagaaaaagg

SEQ ID NO: 24316 - DNA, 80 bp, synthetic construct
  misc_feature 1..80: note = Artificially Synthesized Probe
  source 1..80: mol_type = other DNA
aagccctccttccagatgattctgatgcgcactaaagtttgataaacataatttataccatcagtaaaaacttaagacta

SEQ ID NO: 24317 - DNA, 80 bp, synthetic construct
  misc_feature 1..80: note = Artificially Synthesized Probe
  source 1..80: mol_type = other DNA
ctattttatctcttcaacattaccagatgtacttaagggataacttctaaggtctagataggcccagtgaggctgctctt

SEQ ID NO: 24318 - DNA, 80 bp, synthetic construct
  misc_feature 1..80: note = Artificially Synthesized Probe
  source 1..80: mol_type = other DNA
tacatacttgttcatgggcacatcagtggcttttgtagcctctatctttgccctcctccttttctaacttacctctcagt

SEQ ID NO: 24319 - DNA, 80 bp, synthetic construct
  misc_feature 1..80: note = Artificially Synthesized Probe
  source 1..80: mol_type = other DNA
ctaatgttggaaatactgcttttgttgatcttgatccacatggacaagtatgtttagtcatgtgtatgggctacctcttt

SEQ ID NO: 24320 - DNA, 80 bp, synthetic construct
  misc_feature 1..80: note = Artificially Synthesized Probe
  source 1..80: mol_type = other DNA
agcctttacctccagggctcaagccctgatcttcctgcctcagcctcccgagtagctgaaaacatgagtgcatgccacca

SEQ ID NO: 24321 - DNA, 80 bp, synthetic construct
  misc_feature 1..80: note = Artificially Synthesized Probe
  source 1..80: mol_type = other DNA
aaaaattttctttcttgcaacagtctccagtgaggtacccatagcatgagaatactgaaaaaggttttccttttttttgt

SEQ ID NO: 24322 - DNA, 80 bp, synthetic construct
  misc_feature 1..80: note = Artificially Synthesized Probe
  source 1..80: mol_type = other DNA
tccatgtgagaacaactgtaatattgtgatatcaaccatttttgtcctttagttcaaagagtgactttggcttggctaga

SEQ ID NO: 24323 - DNA, 80 bp, synthetic construct
  misc_feature 1..80: note = Artificially Synthesized Probe
  source 1..80: mol_type = other DNA
cctctttatgtttgggaaataaaccccttcagtagccctttgtggatgttctgtattttagttgttattggttgttgtca

SEQ ID NO: 24324 - DNA, 80 bp, synthetic construct
  misc_feature 1..80: note = Artificially Synthesized Probe
  source 1..80: mol_type = other DNA
gtgtttgtcagattaaggatgtaagaatacattttcttctagatgtgcgtgccgtttaagaaaaatacagacatggggca

SEQ ID NO: 24325 - DNA, 80 bp, synthetic construct
  misc_feature 1..80: note = Artificially Synthesized Probe
  source 1..80: mol_type = other DNA
tgttgggaaccactgatatatctgactgaggcacttcaagatgctagaatttattcatatttctatctagccagggagct

SEQ ID NO: 24326 - DNA, 80 bp, synthetic construct
  misc_feature 1..80: note = Artificially Synthesized Probe
  source 1..80: mol_type = other DNA
tttataccttcatctccagccccctaaaatgctgttcaggcagggtttagctaacatttttataaaatggtcatactcaa

SEQ ID NO: 24327 - DNA, 80 bp, synthetic construct
  misc_feature 1..80: note = Artificially Synthesized Probe
  source 1..80: mol_type = other DNA
tgaagggagcaccacagctgcacaatgccaggctcagtttctgaaaaggaaagcaaaaaaatctgtgttttatgttactt

SEQ ID NO: 24328 - DNA, 80 bp, synthetic construct
  misc_feature 1..80: note = Artificially Synthesized Probe
  source 1..80: mol_type = other DNA
taataattaggcatttatttgaagtactaatatgcaaaagctggttaccaggtacccacctgggtacagaattggtagga

SEQ ID NO: 24329 - DNA, 80 bp, synthetic construct
  misc_feature 1..80: note = Artificially Synthesized Probe
  source 1..80: mol_type = other DNA
tgggtgtaaatattctcctctctcgtttgacagtttcaaaagcctaggttcataagctctccatgaataaatatgttctt

SEQ ID NO: 24330 - DNA, 80 bp, synthetic construct
  misc_feature 1..80: note = Artificially Synthesized Probe
  source 1..80: mol_type = other DNA
aggcactatatagtgctagctatgtgttacttatttggattctcatgtgaacctggtgagatggactggatcccacttta

SEQ ID NO: 24331 - DNA, 80 bp, synthetic construct
  misc_feature 1..80: note = Artificially Synthesized Probe
  source 1..80: mol_type = other DNA
gtagtgtaagcatgcactggcagtcctttcataccaacacatttgtttttcccacttaaacttggttattaattttgtca

SEQ ID NO: 24332 - DNA, 80 bp, synthetic construct
  misc_feature 1..80: note = Artificially Synthesized Probe
  source 1..80: mol_type = other DNA
aaagggaaatatagagagaaaaccatgtttaaaaagaaatggttcctacagtgttaactatggagtctgtagcgtgactc

SEQ ID NO: 24333 - DNA, 80 bp, synthetic construct
  misc_feature 1..80: note = Artificially Synthesized Probe
  source 1..80: mol_type = other DNA
atggccttgtgctttcaaaccactgtgtttgtgaattttaatacatagaaattagggtagatgtagcaaatggggggatt

SEQ ID NO: 24334 - DNA, 80 bp, synthetic construct
  misc_feature 1..80: note = Artificially Synthesized Probe
  source 1..80: mol_type = other DNA
gaatgtggccaggttaatgtgaccagcagacataatgcaaaaccaaactaaggtggtaaattggcatcttggctttgttg

SEQ ID NO: 24335 - DNA, 80 bp, synthetic construct
  misc_feature 1..80: note = Artificially Synthesized Probe
  source 1..80: mol_type = other DNA
gcctcctttctaagtagatatttctctcctggcttcctgtgctgtgaactttgcaaaactggcataggcagcctattaat

SEQ ID NO: 24336 - DNA, 80 bp, synthetic construct
  misc_feature 1..80: note = Artificially Synthesized Probe
  source 1..80: mol_type = other DNA
accctttcaagggtaaacattatcctcacttctaacaccatacattagttctgcctggttttgagcctcatataaatgga

SEQ ID NO: 24337 - DNA, 80 bp, synthetic construct
  misc_feature 1..80: note = Artificially Synthesized Probe
  source 1..80: mol_type = other DNA
tttttgtatatgatgcgtggtagaggtgagaattctttgttttccagtgtgatacccagttgacctagcaccatttattg

SEQ ID NO: 24338 - DNA, 80 bp, synthetic construct
  misc_feature 1..80: note = Artificially Synthesized Probe
  source 1..80: mol_type = other DNA
aagttgagatatatattgacatatacagagagagtgattttgtgtgacatatacacacaaaaattccctaagttgtagtt

SEQ ID NO: 24339 - DNA, 80 bp, synthetic construct
  misc_feature 1..80: note = Artificially Synthesized Probe
  source 1..80: mol_type = other DNA
tttagtgggcacgtcctaatacagcctgaattgttgagatggtttcttggtgctagaaaataataatagcaggccagccg

SEQ ID NO: 24340 - DNA, 80 bp, synthetic construct
  misc_feature 1..80: note = Artificially Synthesized Probe
  source 1..80: mol_type = other DNA
atgcttggccactatgcagtactaccttttaaataattatgtatcttaccacctccataaataaagccctgggtccttca

SEQ ID NO: 24341 - DNA, 80 bp, synthetic construct
  misc_feature 1..80: note = Artificially Synthesized Probe
  source 1..80: mol_type = other DNA
agttgatgtgaaagaaatgaggcatattgaaacagaaaacttcaagaaggcattactagggcttcagatcctagtgtcag

SEQ ID NO: 24342 - DNA, 80 bp, synthetic construct
  misc_feature 1..80: note = Artificially Synthesized Probe
  source 1..80: mol_type = other DNA
tagactcaaagtttaagagccagactgagcttcagataatcccatccactcactcatgttacacatgaactcccatgcca

SEQ ID NO: 24343 - DNA, 80 bp, synthetic construct
  misc_feature 1..80: note = Artificially Synthesized Probe
  source 1..80: mol_type = other DNA
gaaggaagcaaaatatactctgtgccctacaggatgttagctctttggtagaaattgttcaagtggattttaaaaattag

SEQ ID NO: 24344 - DNA, 80 bp, synthetic construct
  misc_feature 1..80: note = Artificially Synthesized Probe
  source 1..80: mol_type = other DNA
tttaatgatattctattacataaactccttcagaaagacatttaagcttgcttcagtgtggcactttgagtctcagtgca

SEQ ID NO: 24345 - DNA, 80 bp, synthetic construct
  misc_feature 1..80: note = Artificially Synthesized Probe
  source 1..80: mol_type = other DNA
aatgctgggtcccttttgcatttggttatattcattctcccccttcccacctatttctcacttcatctctcctgtagcca

SEQ ID NO: 24346 - DNA, 80 bp, synthetic construct
  misc_feature 1..80: note = Artificially Synthesized Probe
  source 1..80: mol_type = other DNA
attacaggcgtgcaccactgcacctgagtatatatttatatatatatatgtgtatatatatgtatatatatatgtatatg

SEQ ID NO: 24347 - DNA, 80 bp, synthetic construct
  misc_feature 1..80: note = Artificially Synthesized Probe
  source 1..80: mol_type = other DNA
aagccatcagctcattggcactattgtagcacatggtgaatgttaaatacagttgctcaagttaggcttcaactctaagt

SEQ ID NO: 24348 - DNA, 80 bp, synthetic construct
  misc_feature 1..80: note = Artificially Synthesized Probe
  source 1..80: mol_type = other DNA
tgcagttaattgaattcttcaggcatggactcagggtctctgaaaaaatttgagtgagcaaaattctcttgctttgctcc

SEQ ID NO: 24349 - DNA, 80 bp, synthetic construct
  misc_feature 1..80: note = Artificially Synthesized Probe
  source 1..80: mol_type = other DNA
tagagcttgctgcagtgcagaggcaccccgggtatgtctgtgcctatttcaatcatttcttataattaaacattatgtcc

SEQ ID NO: 24350 - DNA, 80 bp, synthetic construct
  misc_feature 1..80: note = Artificially Synthesized Probe
  source 1..80: mol_type = other DNA
ttattatcccacttttgaacattaatttccttttttctgcatgttcaatttgtagctaaattctttcagtttatcttgaa

SEQ ID NO: 24351 - DNA, 80 bp, synthetic construct
  misc_feature 1..80: note = Artificially Synthesized Probe
  source 1..80: mol_type = other DNA
aacctcccaggctcaagtaatcctcccacctcagcctcccaagtaactgagactacaggcatgcaccaccacacacagct

SEQ ID NO: 24352 - DNA, 80 bp, synthetic construct
  misc_feature 1..80: note = Artificially Synthesized Probe
  source 1..80: mol_type = other DNA
aaaaatctcttcctttccccctcaaaatccttgtaagttttgccttgtttctcctggccgcaggagcaagaacactgttg

SEQ ID NO: 24353 - DNA, 80 bp, synthetic construct
  misc_feature 1..80: note = Artificially Synthesized Probe
  source 1..80: mol_type = other DNA
tgcccagctaatttttgtattttgggttttttgttttgttttgttttgttttgttttgcgacagagtctcactctgttgc

SEQ ID NO: 24354 - DNA, 80 bp, synthetic construct
  misc_feature 1..80: note = Artificially Synthesized Probe
  source 1..80: mol_type = other DNA
ttcggagaggaaactagtccctagcctttgagaactaagctgaaggacagttccagaaatacttaactcctttcattttg

SEQ ID NO: 24355 - DNA, 80 bp, synthetic construct
  misc_feature 1..80: note = Artificially Synthesized Probe
  source 1..80: mol_type = other DNA
agtcccatctctacatccagcctcaggcaaccactgatctgtttttctaacaattagaattactgttcctagagtttcat

SEQ ID NO: 24356 - DNA, 80 bp, synthetic construct
  misc_feature 1..80: note = Artificially Synthesized Probe
  source 1..80: mol_type = other DNA
taaatctagaattaagttaatttttgtatatgatgtgaagttaggaacagacttcatttcctctatggatatccaattgt

SEQ ID NO: 24357 - DNA, 80 bp, synthetic construct
  misc_feature 1..80: note = Artificially Synthesized Probe
  source 1..80: mol_type = other DNA
ttagaatcagcgagttaatttgcctgctgagactttgatattgcactaactctataggttgatttggaaagaataaacat

SEQ ID NO: 24358 - DNA, 80 bp, synthetic construct
  misc_feature 1..80: note = Artificially Synthesized Probe
  source 1..80: mol_type = other DNA
aggtctttttactccagggccaaagcttttaaaacaatacagtatggggtagtggttgagagtaacccatttgttaatgg

SEQ ID NO: 24359 - DNA, 80 bp, synthetic construct
  misc_feature 1..80: note = Artificially Synthesized Probe
  source 1..80: mol_type = other DNA
actaataacttacacaaaaagcagccctaaactcccccaaggcctgtgtccaacaaggttcttagtaatcatttttagtc

SEQ ID NO: 24360 - DNA, 80 bp, synthetic construct
  misc_feature 1..80: note = Artificially Synthesized Probe
  source 1..80: mol_type = other DNA
ctatttatgtcccatatagttttaaaggaccacatagcagtggtccttttaaacggtgtcagattgtgtcgctattatgc

SEQ ID NO: 24361 - DNA, 80 bp, synthetic construct
  misc_feature 1..80: note = Artificially Synthesized Probe
  source 1..80: mol_type = other DNA
cgtatttattaattctgtgtgtagttctgagggtcagaagtgtggcacatagtggctgggttctctgctgagagcatctc

SEQ ID NO: 24362 - DNA, 80 bp, synthetic construct
  misc_feature 1..80: note = Artificially Synthesized Probe
  source 1..80: mol_type = other DNA
ctaagtatttgcttgtattttgtttgtttgtttgtttgtttggggggacagagtctcgccctgttgcccaggctggaggg

SEQ ID NO: 24363 - DNA, 80 bp, synthetic construct
  misc_feature 1..80: note = Artificially Synthesized Probe
  source 1..80: mol_type = other DNA
caggaaaattgcttgaagccaggagtttgagaccagcctgggcaacaaaagaagactccatctctacaaaaaaaaatgtt

SEQ ID NO: 24364 - DNA, 80 bp, synthetic construct
  misc_feature 1..80: note = Artificially Synthesized Probe
  source 1..80: mol_type = other DNA
tcaagtggaatttgtggaacatcttatatcccaaatgtgtcattaccaacatgggcacataaactcgtatcttaaaccta

SEQ ID NO: 24365 - DNA, 80 bp, synthetic construct
  misc_feature 1..80: note = Artificially Synthesized Probe
  source 1..80: mol_type = other DNA
gccaagactccttttacctatcttcttactcatgcccttctattcaacctatttttacccatacataggtccaaataaaa

SEQ ID NO: 24366 - DNA, 80 bp, synthetic construct
  misc_feature 1..80: note = Artificially Synthesized Probe
  source 1..80: mol_type = other DNA
gctaagttattaatattttggcaggtagcctgttttctctacgtatgtgtatttgcctataaagctttgatcataaatgt

SEQ ID NO: 24367 - DNA, 80 bp, synthetic construct
  misc_feature 1..80: note = Artificially Synthesized Probe
  source 1..80: mol_type = other DNA
gtaatgcatgtctccatctgcttatgcttacatacgaacatgtgatgccagccaaacaaaatccatttaatgctttcttt

SEQ ID NO: 24368 - DNA, 80 bp, synthetic construct
  misc_feature 1..80: note = Artificially Synthesized Probe
  source 1..80: mol_type = other DNA
tgtctttctcttgggatatttccatgccattctgtatttccttcttctctcctttctgcatgcccaaaattctataaccc

SEQ ID NO: 24369 - DNA, 80 bp, synthetic construct
  misc_feature 1..80: note = Artificially Synthesized Probe
  source 1..80: mol_type = other DNA
atgatattgtattaatactgctttgcaaaaaataatggaaagctgatcagccctcctgtttaaaacattctgttatctgg

SEQ ID NO: 24370 - DNA, 80 bp, synthetic construct
  misc_feature 1..80: note = Artificially Synthesized Probe
  source 1..80: mol_type = other DNA
cagatttttatcattctggctattaggaagactgtttaaatttttctctcaaattgaattaaaggaacaaaaaaactagg

SEQ ID NO: 24371 - DNA, 80 bp, synthetic construct
  misc_feature 1..80: note = Artificially Synthesized Probe
  source 1..80: mol_type = other DNA
tatccacagaaacccattcccgctcttttgagtatccttcagagttctgactatatccccttgtctttgggcatgtttat

SEQ ID NO: 24372 - DNA, 80 bp, synthetic construct
  misc_feature 1..80: note = Artificially Synthesized Probe
  source 1..80: mol_type = other DNA
tgtagatagtatcattgcataggaagaaagtcttggagtgctagagattaaaagaagacaggaatctcaggaatggtggg

SEQ ID NO: 24373 - DNA, 80 bp, synthetic construct
  misc_feature 1..80: note = Artificially Synthesized Probe
  source 1..80: mol_type = other DNA
cctagctgctgctggacacacctgtgatccttttgttttctgatgaaatgaactgaattgctcctttcaaagcatagttg

SEQ ID NO: 24374 - DNA, 80 bp, synthetic construct
  misc_feature 1..80: note = Artificially Synthesized Probe
  source 1..80: mol_type = other DNA
ccccatctctactaaaatacaaaaattagccagcatggtggcagatgactgtaatcacagctactcaggaggctgaggca

SEQ ID NO: 24375 - DNA, 80 bp, synthetic construct
  misc_feature 1..80: note = Artificially Synthesized Probe
  source 1..80: mol_type = other DNA
gcaatggccatcacatatgtaagagcactgagtgtataacctcacgtagttcgtagcttttcttctcttgatgagtagtc

SEQ ID NO: 24376 - DNA, 80 bp, synthetic construct
  misc_feature 1..80: note = Artificially Synthesized Probe
  source 1..80: mol_type = other DNA
acgtaataggaccaacaagtctccacagcaccccatcatcacattgatcaaaaggatcttatttgccatcctagatctgg

SEQ ID NO: 24377 - DNA, 80 bp, synthetic construct
  misc_feature 1..80: note = Artificially Synthesized Probe
  source 1..80: mol_type = other DNA
gaaaagacggttcctgttttttgtcttttgacttaaaggcatagcaaggcatagcaaacttggcccttgtagttactgac

SEQ ID NO: 24378 - DNA, 80 bp, synthetic construct
  misc_feature 1..80: note = Artificially Synthesized Probe
  source 1..80: mol_type = other DNA
taaatctcatctatcacttccagagtgtgggatgtaaatacaggtgaaatgctaaacacgttgattcaccattgtgaagc

SEQ ID NO: 24379 - DNA, 80 bp, synthetic construct
  misc_feature 1..80: note = Artificially Synthesized Probe
  source 1..80: mol_type = other DNA
ttgttatgtttataatcaactgtttttcctttctgtagcttcttacaggtcagaagtttgccccaggcagagaagcagca

SEQ ID NO: 24380 - DNA, 80 bp, synthetic construct
  misc_feature 1..80: note = Artificially Synthesized Probe
  source 1..80: mol_type = other DNA
gttataacattccaggcttagaaaagaatacgtgaaaattcacctgacttaattttctcttccagattatgggacataga

SEQ ID NO: 24381 - DNA, 80 bp, synthetic construct
  misc_feature 1..80: note = Artificially Synthesized Probe
  source 1..80: mol_type = other DNA
tttagttcatgagttaactacactgatacattcattagccaatgcaagcagcaggaagtgtagactgctcacttcttctg

SEQ ID NO: 24382 - DNA, 80 bp, synthetic construct
  misc_feature 1..80: note = Artificially Synthesized Probe
  source 1..80: mol_type = other DNA
ttggagagcaggtgggggaagaaattaaacgttgatgtgctgtggaatatggatttgaatttaatagttacaacctcaca

SEQ ID NO: 24383 - DNA, 80 bp, synthetic construct
  misc_feature 1..80: note = Artificially Synthesized Probe
  source 1..80: mol_type = other DNA
ctaaatcctgactgtcatcatttaggcattcttggctctggagaagagaaagaggttacatttcttgtcttccttgttgg

SEQ ID NO: 24384 - DNA, 80 bp, synthetic construct
  misc_feature 1..80: note = Artificially Synthesized Probe
  source 1..80: mol_type = other DNA
caaagggttgggcttttttacacatgaatatccagttgttccagcaccatttattcaaaagactgtcctttcgaaatgct

SEQ ID NO: 24385 - DNA, 80 bp, synthetic construct
  misc_feature 1..80: note = Artificially Synthesized Probe
  source 1..80: mol_type = other DNA
agagtgaatgtcccttttttgttcatgatcttaggcgaaaggcattcagtctttcaccgtttcacatatgtgtatatata

SEQ ID NO: 24386 - DNA, 80 bp, synthetic construct
  misc_feature 1..80: note = Artificially Synthesized Probe
  source 1..80: mol_type = other DNA
gggatattggtttgttgctttattttctgtgtctctggttgactgtcatgataatgttggccttataaaattttgaagtg

SEQ ID NO: 24387 - DNA, 80 bp, synthetic construct
  misc_feature 1..80: note = Artificially Synthesized Probe
  source 1..80: mol_type = other DNA
atgagccatggcacctggcctgcttcatggttttttttgttgttgtcgttgtttttgagacggagtttctctcttgtcac

SEQ ID NO: 24388 - DNA, 80 bp, synthetic construct
  misc_feature 1..80: note = Artificially Synthesized Probe
  source 1..80: mol_type = other DNA
ttttcacccccatcctttatgctattgttgctacagattttacttctaaatatgttatcatccccacagcacttgttatt

SEQ ID NO: 24389 - DNA, 80 bp, synthetic construct
  misc_feature 1..80: note = Artificially Synthesized Probe
  source 1..80: mol_type = other DNA
agccacagatatgccactgcactccagcttgggtgagaatgagaccctgtctcaaaaaaaaaaaaagaaaaaaagctaga

SEQ ID NO: 24390 - DNA, 80 bp, synthetic construct
  misc_feature 1..80: note = Artificially Synthesized Probe
  source 1..80: mol_type = other DNA
taatttctattttttgagccccctagtgtatgccatactttgttatggcacccctagccctgatggaccattctaacact

SEQ ID NO: 24391 - DNA, 80 bp, synthetic construct
  misc_feature 1..80: note = Artificially Synthesized Probe
  source 1..80: mol_type = other DNA
aagagatcccagatcttcacagaatcaatacttaataattatctttccaaacagagaaactaagcctaggcagatccact

SEQ ID NO: 24392 - DNA, 80 bp, synthetic construct
  misc_feature 1..80: note = Artificially Synthesized Probe
  source 1..80: mol_type = other DNA
tatacactgtgaccaagtgagatttatgccaggtatgcaaggctggttcagcattcagaaatcaatcagtgtaatccatc

SEQ ID NO: 24393 - DNA, 80 bp, synthetic construct
  misc_feature 1..80: note = Artificially Synthesized Probe
  source 1..80: mol_type = other DNA
gaggccggcagattgcctgagctcagcagttggagaccagcctgggcaacacggtggaatcctgtctttactaaaataca

SEQ ID NO: 24394 - DNA, 80 bp, synthetic construct
  misc_feature 1..80: note = Artificially Synthesized Probe
  source 1..80: mol_type = other DNA
cactccagcaggggcgaaagagcgagactctgtctcaaaaaaaaaaaaaaaaaaaaaaagatgatgatgataaaattgga

SEQ ID NO: 24395 - DNA, 80 bp, synthetic construct
  misc_feature 1..80: note = Artificially Synthesized Probe
  source 1..80: mol_type = other DNA
ccatagcctttccgtagactccttttgacatgttgctgaatttgtgtcctattgattttgagtagttcaagttcctaccc

SEQ ID NO: 24396 - DNA, 80 bp, synthetic construct
  misc_feature 1..80: note = Artificially Synthesized Probe
  source 1..80: mol_type = other DNA
gtccatacatattgtggtatattcagatcatacctgctgttctaaccagttcgaatacactaggttgttaccagtttgag

SEQ ID NO: 24397 - DNA, 80 bp, synthetic construct
  misc_feature 1..80: note = Artificially Synthesized Probe
  source 1..80: mol_type = other DNA
gccaccgcacccggcctgtctctggcttttcttccttatctgagttccttcttaggctgccttctctattcccaaggctt

SEQ ID NO: 24398 - DNA, 80 bp, synthetic construct
  misc_feature 1..80: note = Artificially Synthesized Probe
  source 1..80: mol_type = other DNA
ccattaaagttgcggtatttaacgtatctgccaataccaggatgagcaacaacagtaacaatcaaactactgcccagttt

SEQ ID NO: 24399 - DNA, 80 bp, synthetic construct
  misc_feature 1..80: note = Artificially Synthesized Probe
  source 1..80: mol_type = other DNA
tcagcagtctccttgattccatgtagagtgtggaaaggagttgctgattgcatttcctctcattaacaattgggtgtgta

SEQ ID NO: 24400 - DNA, 80 bp, synthetic construct
  misc_feature 1..80: note = Artificially Synthesized Probe
  source 1..80: mol_type = other DNA
catatgctgctattacaaagtggaagctgttgaatgtttattggtgcccagggttttgctctccaatctaggttcagttg

SEQ ID NO: 24401 - DNA, 80 bp, synthetic construct
  misc_feature 1..80: note = Artificially Synthesized Probe
  source 1..80: mol_type = other DNA
gtatttcactgctgagaacatcctttaacttggtgtgcaatttgaaaggatgtgaatcatggatggaaggccatttgtac

SEQ ID NO: 24402 - DNA, 80 bp, synthetic construct
  misc_feature 1..80: note = Artificially Synthesized Probe
  source 1..80: mol_type = other DNA
tgttttattaaggatcagtgcagttaagtcgtattttaaagtgttacctcccctcctaacccttccccttcttggacact

SEQ ID NO: 24403 - DNA, 80 bp, synthetic construct
  misc_feature 1..80: note = Artificially Synthesized Probe
  source 1..80: mol_type = other DNA
tgtttttttttttccacactgctctctggattcgaacctagtgaattctgggctcagtcctcctcctccatctctttctt

SEQ ID NO: 24404 - DNA, 80 bp, synthetic construct
  misc_feature 1..80: note = Artificially Synthesized Probe
  source 1..80: mol_type = other DNA
cttttctctttctcctcccatccccacacctccgtcattggcctattgacaggctcttcttgttcttgtttttttttttt

SEQ ID NO: 24405 - DNA, 80 bp, synthetic construct
  misc_feature 1..80: note = Artificially Synthesized Probe
  source 1..80: mol_type = other DNA
gggccaaaggtcaaaggctcaactctagaaggaaagaatgtcaagtgttcagaggctctagacctatattttgttttaat

SEQ ID NO: 24406 - DNA, 80 bp, synthetic construct
  misc_feature 1..80: note = Artificially Synthesized Probe
  source 1..80: mol_type = other DNA
gtgatggtggtgttggtgttggtaatgatggtggtgacagtggtgttggtaatggtgttagtaatagtggtggtgataat

SEQ ID NO: 24407 - DNA, 80 bp, synthetic construct
  misc_feature 1..80: note = Artificially Synthesized Probe
  source 1..80: mol_type = other DNA
tagtaatggtgatggtggtgatgatggtgttggtggtgatggtggtgttggtgtcagtaatggtggtggtgatagtggtg

SEQ ID NO: 24408 - DNA, 80 bp, synthetic construct
  misc_feature 1..80: note = Artificially Synthesized Probe
  source 1..80: mol_type = other DNA
tgctggaacttcagtgaggggagtgtgagttgtctacctgcagagcaggctcagaagcttagaaaagatagtcagtgggg

SEQ ID NO: 24409 - DNA, 80 bp, synthetic construct
  misc_feature 1..80: note = Artificially Synthesized Probe
  source 1..80: mol_type = other DNA
tgtgaagtgctgttgctattgagcagggacaagactaggaaatggcagtctttgaaatgaaaagttactggacaaatgaa

SEQ ID NO: 24410 - DNA, 80 bp, synthetic construct
  misc_feature 1..80: note = Artificially Synthesized Probe
  source 1..80: mol_type = other DNA
ccctgccttttcagttccttcagctctcttgagttattggactagggcaatagttcttaaacttggctgtgcattagaat

SEQ ID NO: 24411 - DNA, 80 bp, synthetic construct
  misc_feature 1..80: note = Artificially Synthesized Probe
  source 1..80: mol_type = other DNA
gtgatgaaatcctgccttatgtgtgttttcaggggaaggtgaaaagggatccccatgacccaattctagttgtgtgggaa

SEQ ID NO: 24412 - DNA, 80 bp, synthetic construct
  misc_feature 1..80: note = Artificially Synthesized Probe
  source 1..80: mol_type = other DNA
cacattcatcaaggtctggaaggcattcaggaaggagggttaagcttctgctgggagacctgagtagtggctctgatctt

SEQ ID NO: 24413 - DNA, 80 bp, synthetic construct
  misc_feature 1..80: note = Artificially Synthesized Probe
  source 1..80: mol_type = other DNA
cggtaagacgtgccattgtcatgtaattcacgcataatctccaggggtctcctgggaatggtagttgttggaccttcgca

SEQ ID NO: 24414 - DNA, 80 bp, synthetic construct
  misc_feature 1..80: note = Artificially Synthesized Probe
  source 1..80: mol_type = other DNA
gatcacagtggttgtttcaaagttgttggggtaaggcttggggaacagaggggaagtcacctccccaaataacttctgag

SEQ ID NO: 24415 - DNA, 80 bp, synthetic construct
  misc_feature 1..80: note = Artificially Synthesized Probe
  source 1..80: mol_type = other DNA
gagggagcccgcgtcatgcacagcagggaggggagggttttctgtggagtggaggggggaccattcccggaggaatgttg

SEQ ID NO: 24416 - DNA, 80 bp, synthetic construct
  misc_feature 1..80: note = Artificially Synthesized Probe
  source 1..80: mol_type = other DNA
agaggtcacagccacccacaatgtctagtaacatactattcatactatgcaatgagagtgactcatatgcacaaaatact

SEQ ID NO: 24417 - DNA, 80 bp, synthetic construct
  misc_feature 1..80: note = Artificially Synthesized Probe
  source 1..80: mol_type = other DNA
cccatcacccactcaccatagtccactcctggctcacaggccttgtccagccgttcttccagggtgaccttgtcatccga

SEQ ID NO: 24418 - DNA, 80 bp, synthetic construct
  misc_feature 1..80: note = Artificially Synthesized Probe
  source 1..80: mol_type = other DNA
ttcatactacgaatgctcaaatccctggactccttagaccttcattctcagatccccacaattcatatatacctgggact

SEQ ID NO: 24419 - DNA, 80 bp, synthetic construct
  misc_feature 1..80: note = Artificially Synthesized Probe
  source 1..80: mol_type = other DNA
agaatatttatgaagaaacaagaacaaaaattcagctggggccaggcaccaggggcttatgcctgtaatctcagcacttt

SEQ ID NO: 24420 - DNA, 80 bp, synthetic construct
  misc_feature 1..80: note = Artificially Synthesized Probe
  source 1..80: mol_type = other DNA
ttatagaagatgctgggttgacccccttattttacaagctccttcccctacaactcagcagcacagaccctgtctcctct

SEQ ID NO: 24421 - DNA, 80 bp, synthetic construct
  misc_feature 1..80: note = Artificially Synthesized Probe
  source 1..80: mol_type = other DNA
aatggagttatcaaagaatagcagactatggtgatgttgaccctgctgccatttgagagataggtagtgtagaggaactc

SEQ ID NO: 24422 - DNA, 80 bp, synthetic construct
  misc_feature 1..80: note = Artificially Synthesized Probe
  source 1..80: mol_type = other DNA
cacagtgaggccctgcctctagaaagaataaaaaataaaaatcagccaggtgtcatggcacacgcctgtagtcccagcta

SEQ ID NO: 24423 - DNA, 80 bp, synthetic construct
  misc_feature 1..80: note = Artificially Synthesized Probe
  source 1..80: mol_type = other DNA
cttggtctgcagagtgaaaagagagaagagagcatgttgggaattaagccttctgctgcctgtgatggtcacctggccct

SEQ ID NO: 24424 - DNA, 80 bp, synthetic construct
  misc_feature 1..80: note = Artificially Synthesized Probe
  source 1..80: mol_type = other DNA
agaacctatagatgggtttgcaagtaataaaaactgattctcaactccactgcaatcacactggctcgtgggaatgaaga

SEQ ID NO: 24425 - DNA, 80 bp, synthetic construct
  misc_feature 1..80: note = Artificially Synthesized Probe
  source 1..80: mol_type = other DNA
gtgtaggatctctgtaggttcatgtagttggcttcaaggaagtctcctgctttagtgatgctgcctggcaggctctatga

SEQ ID NO: 24426 - DNA, 80 bp, synthetic construct
  misc_feature 1..80: note = Artificially Synthesized Probe
  source 1..80: mol_type = other DNA
tgagagatgcagtaattttgcaaagaccacctaggaaataagtggcagagttaggatccaaacacagccttctggggatg

SEQ ID NO: 24427 - DNA, 80 bp, synthetic construct
  misc_feature 1..80: note = Artificially Synthesized Probe
  source 1..80: mol_type = other DNA
cttgaccccaggagtctggtttcacagcctgtgctatactctgctacaatgttgctatgttgtagcagaaacaaatctct

SEQ ID NO: 24428 - DNA, 80 bp, synthetic construct
  misc_feature 1..80: note = Artificially Synthesized Probe
  source 1..80: mol_type = other DNA
atgctctggaggctgaaacagtaaagtcccttgaacctgggaggcaaagggtgcagtgagctgagatcatgccactgcat

SEQ ID NO: 24429 - DNA, 80 bp, synthetic construct
  misc_feature 1..80: note = Artificially Synthesized Probe
  source 1..80: mol_type = other DNA
taagtgctcaaaagatgttagctattaacatgactgcagtgatgtctgttattgcactgggagagctgcaaattccctga

SEQ ID NO: 24430 - DNA, 80 bp, synthetic construct
  misc_feature 1..80: note = Artificially Synthesized Probe
  source 1..80: mol_type = other DNA
agtgattctccatctcaagcacacattagcatcacctggaggaatgcgggcacttttaaaaactcagattcctaggccgg

SEQ ID NO: 24431 - DNA, 80 bp, synthetic construct
  misc_feature 1..80: note = Artificially Synthesized Probe
  source 1..80: mol_type = other DNA
aggagttttgtgtttaagtgccacagggggagccacgggactttctaagaactgatccagctggatttgaaaaaatcacc

SEQ ID NO: 24432 - DNA, 80 bp, synthetic construct
  misc_feature 1..80: note = Artificially Synthesized Probe
  source 1..80: mol_type = other DNA
ctgagctggctgttgggactcaccaggtgctgggtgcccgtttcacgaaggccgcaaaggcagagctgggttgtctgaag

SEQ ID NO: 24433 - DNA, 80 bp, synthetic construct
  misc_feature 1..80: note = Artificially Synthesized Probe
  source 1..80: mol_type = other DNA
tcttgagatgaggtgggatcttaggggagggatgcgctcggaaaggggtccctggggtctccaagaggggcagggagccc

SEQ ID NO: 24434 - DNA, 80 bp, synthetic construct
  misc_feature 1..80: note = Artificially Synthesized Probe
  source 1..80: mol_type = other DNA
gatactattattctacccctaccaaaggtgaaaaaaccaaggctcttgccccaaagccttatagcttacaggttgcaagt

SEQ ID NO: 24435 - DNA, 80 bp, synthetic construct
  misc_feature 1..80: note = Artificially Synthesized Probe
  source 1..80: mol_type = other DNA
aatgtaaaagagggaaaacagatcacagatgggctgttctagctgaaggggaagagaaaggtgcgggttaaacacctcca

SEQ ID NO: 24436 - DNA, 80 bp, synthetic construct
  misc_feature 1..80: note = Artificially Synthesized Probe
  source 1..80: mol_type = other DNA
gctctgcttctgaaattctgggacttccaaatttcctaagctggacactatgattcttagtgtctcagagcctggatctc

SEQ ID NO: 24437 - DNA, 80 bp, synthetic construct
  misc_feature 1..80: note = Artificially Synthesized Probe
  source 1..80: mol_type = other DNA
tttgctgaagcctgtgaactaaacgctgtcaatggcgacaaatgacagatgatgatggtggtggctgggagttaccatta

SEQ ID NO: 24438 - DNA, 80 bp, synthetic construct
  misc_feature 1..80: note = Artificially Synthesized Probe
  source 1..80: mol_type = other DNA
caggtgatctgcctgcctgggcctcccaaagtgctgggattacaggtgtgagccaccgtgcccgacctgagttgtacatt

SEQ ID NO: 24439 - DNA, 80 bp, synthetic construct
  misc_feature 1..80: note = Artificially Synthesized Probe
  source 1..80: mol_type = other DNA
tatcatcagtaattttgatatactagtagattattatcaaatattaaaaggttatagtcacattattagtgggttgtggt

SEQ ID NO: 24440 - DNA, 80 bp, synthetic construct
  misc_feature 1..80: note = Artificially Synthesized Probe
  source 1..80: mol_type = other DNA
catcaattttagagactgtacccccaccctgtctagcttttgacactgttagagtaggcagataggcggaaatgagcagg

SEQ ID NO: 24441 - DNA, 80 bp, synthetic construct
  misc_feature 1..80: note = Artificially Synthesized Probe
  source 1..80: mol_type = other DNA
cttaacccttgctatgtgactcttggctgaattctttcttccaagttagacaggaactaaggattcccacagttcctggt

SEQ ID NO: 24442 - DNA, 80 bp, synthetic construct
  misc_feature 1..80: note = Artificially Synthesized Probe
  source 1..80: mol_type = other DNA
acttgaacccaggaggtggaggttgcagtgagctgagatcacacgactacactccagcccaggcgacagagacagactcc

SEQ ID NO: 24443 - DNA, 80 bp, synthetic construct
  misc_feature 1..80: note = Artificially Synthesized Probe
  source 1..80: mol_type = other DNA
aagcaagcatgtgcatgtggctctaaaggatcaccgtcccgagaaaccgtgtctgcttcctctgagggatttgtccattc

SEQ ID NO: 24444 - DNA, 80 bp, synthetic construct
  misc_feature 1..80: note = Artificially Synthesized Probe
  source 1..80: mol_type = other DNA
tcaggaggctgaggcaggagaatcgcttgaacccatgaggtggaggttgcggtgagccgaggttgtgccactgtacttca

SEQ ID NO: 24445 - DNA, 80 bp, synthetic construct
  misc_feature 1..80: note = Artificially Synthesized Probe
  source 1..80: mol_type = other DNA
agtagctgggactacaggtgtgcacccccacacccggctaattattttattttatttttgtagatatggggttctgccat

SEQ ID NO: 24446 - DNA, 80 bp, synthetic construct
  misc_feature 1..80: note = Artificially Synthesized Probe
  source 1..80: mol_type = other DNA
ccatcagactaggcccttctcctccctcaggcctgggcctcctggctcctcatctgaaggcctctgtcccttccagacag

SEQ ID NO: 24447 - DNA, 80 bp, synthetic construct
  misc_feature 1..80: note = Artificially Synthesized Probe
  source 1..80: mol_type = other DNA
gcggaccgagaagaagatggatgaggcacctactaggtgtcctcggttcacccctcacgatcgtgtgaggtgggggtgtt

SEQ ID NO: 24448 - DNA, 80 bp, synthetic construct
  misc_feature 1..80: note = Artificially Synthesized Probe
  source 1..80: mol_type = other DNA
ctccattcctcctttcctccttcctttgctccccctttccttccctccttccctccttccttccttccttctttccttcc

SEQ ID NO: 24449 - DNA, 80 bp, synthetic construct
  misc_feature 1..80: note = Artificially Synthesized Probe
  source 1..80: mol_type = other DNA
aaaaaagtccaattctcaggaccatccccaattggaacccatgtccaacctcattcccatcttcagcttcaaccatccct

SEQ ID NO: 24450 - DNA, 80 bp, synthetic construct
  misc_feature 1..80: note = Artificially Synthesized Probe
  source 1..80: mol_type = other DNA
gagagagaaaaggagagagatggagagaaagagagatcgagagagggagagagagaaggaaagagaaataaagagagagg

SEQ ID NO: 24451 - DNA, 80 bp, synthetic construct
  misc_feature 1..80: note = Artificially Synthesized Probe
  source 1..80: mol_type = other DNA
gagccaggacttctgacctctcaaactatagacccataaatgtgtgttgctttagatcactaggctgtggccatttctca

SEQ ID NO: 24452 - DNA, 80 bp, synthetic construct
  misc_feature 1..80: note = Artificially Synthesized Probe
  source 1..80: mol_type = other DNA
atgaggtcaaagggcattcctggtttgaagtacttgggtgtcttggtgaagtggatctggtagggagaggtcacgatggg

SEQ ID NO: 24453 - DNA, 80 bp, synthetic construct
  misc_feature 1..80: note = Artificially Synthesized Probe
  source 1..80: mol_type = other DNA
ggcagggaaatcctctgttcgccatcctggatcccgaagatgacaaaggcagttccctccactttcttcccgtagaggaa

SEQ ID NO: 24454 - DNA, 80 bp, synthetic construct
  misc_feature 1..80: note = Artificially Synthesized Probe
  source 1..80: mol_type = other DNA
tacttgacgagttccggaatgtcccaagacaagggcaagacgccaagctggttctgagaagacaaggagtcctgcttgac

SEQ ID NO: 24455 - DNA, 80 bp, synthetic construct
  misc_feature 1..80: note = Artificially Synthesized Probe
  source 1..80: mol_type = other DNA
gttcaagaccagcctgggaaatgtagggagactccatctctacaaaaattttttaaaattagctggatgtggtggcgcac

SEQ ID NO: 24456 - DNA, 80 bp, synthetic construct
  misc_feature 1..80: note = Artificially Synthesized Probe
  source 1..80: mol_type = other DNA
gccactgcacctggccaaaaatctgtttttctagcttctgttggaaacaaggaaatttctgtggatagtgtactctggtt

SEQ ID NO: 24457 - DNA, 80 bp, synthetic construct
  misc_feature 1..80: note = Artificially Synthesized Probe
  source 1..80: mol_type = other DNA
agggtgggtatttgcgactttataggttactcagagagacctcattgtaaaattgagacattggtgacatttgagcaaag

SEQ ID NO: 24458 - DNA, 80 bp, synthetic construct
  misc_feature 1..80: note = Artificially Synthesized Probe
  source 1..80: mol_type = other DNA
tgtatgttgtgtattgtgttgtgtgtgttgtgtgttgtgtgtgtggtcatgcacgttgtgctgtgtgtattgtgttgtgt

SEQ ID NO: 24459 - DNA, 80 bp, synthetic construct
  misc_feature 1..80: note = Artificially Synthesized Probe
  source 1..80: mol_type = other DNA
agggaaggggctgacatgggaggggctcagaaagggggagggactcaggtgagggaacttagaaagtgatggagactaag

SEQ ID NO: 24460 - DNA, 80 bp, synthetic construct
  misc_feature 1..80: note = Artificially Synthesized Probe
  source 1..80: mol_type = other DNA
aaacctcaaatcttagagcaccccaaacccagcctaaacctccaacaccccagtcctaataaatacaatcaattccaaat

SEQ ID NO: 24461 - DNA, 80 bp, synthetic construct
  misc_feature 1..80: note = Artificially Synthesized Probe
  source 1..80: mol_type = other DNA
tccccagcagcatgaatgcagctgcaccctgccctggactctcccagggtcagggccacctggtgaacacagacctttct

SEQ ID NO: 24462 - DNA, 80 bp, synthetic construct
  misc_feature 1..80: note = Artificially Synthesized Probe
  source 1..80: mol_type = other DNA
atattcatattgatcaacatctaaaaggtacaaatgtgtatagcagtaaaggtggtcttcctcccatccctgttgacagc

SEQ ID NO: 24463 - DNA, 80 bp, synthetic construct
  misc_feature 1..80: note = Artificially Synthesized Probe
  source 1..80: mol_type = other DNA
gtattgatttacacacttatgagccctgcatgaaatgaattgtcagtttcttccacagcctcatcacaagggcatgttga

SEQ ID NO: 24464 - DNA, 80 bp, synthetic construct
  misc_feature 1..80: note = Artificially Synthesized Probe
  source 1..80: mol_type = other DNA
gtggagcatgagaacaaacctggcgtctgtctgcactgattgcgacacactctttggaagaggaggaggaggaggagaga

SEQ ID NO: 24465 - DNA, 80 bp, synthetic construct
  misc_feature 1..80: note = Artificially Synthesized Probe
  source 1..80: mol_type = other DNA
ctagcctgggcgacaagagcgagactctgtctcaaaacaaaacaaaacaaacaacaacaacaaagaattagctgagcatg

SEQ ID NO: 24466 - DNA, 80 bp, synthetic construct
  misc_feature 1..80: note = Artificially Synthesized Probe
  source 1..80: mol_type = other DNA
caggagttcgagaccagcctgagaaatacagtgagacttcgtctctacaattgaaaaaaaaaaaaaaattagcagggcat

SEQ ID NO: 24467 - DNA, 80 bp, synthetic construct
  misc_feature 1..80: note = Artificially Synthesized Probe
  source 1..80: mol_type = other DNA
gcccctgcctggaatctcccagcttatcctccctctccacacctgtgatctctgccctcacctctgccccagcctcctcc

SEQ ID NO: 24468 - DNA, 80 bp, synthetic construct
  misc_feature 1..80: note = Artificially Synthesized Probe
  source 1..80: mol_type = other DNA
ctttgtattcctttgaccgatcatgagcgcactgacgctcacaaacgcctatgagatgcgggtggcagcaacttatctat

SEQ ID NO: 24469 - DNA, 80 bp, synthetic construct
  misc_feature 1..80: note = Artificially Synthesized Probe
  source 1..80: mol_type = other DNA
cagataatccaagataatctcccccattttaagagccttaatcccatgcacaaagtcccttttgccgtgtgacagaacat

SEQ ID NO: 24470 - DNA, 80 bp, synthetic construct
  misc_feature 1..80: note = Artificially Synthesized Probe
  source 1..80: mol_type = other DNA
acctcaaggaggtttcttaccctctctgtgcctcacaggctttttaacaaattaaaatccacagaagccttaatagacag

SEQ ID NO: 24471 - DNA, 80 bp, synthetic construct
  misc_feature 1..80: note = Artificially Synthesized Probe
  source 1..80: mol_type = other DNA
aggtttctacattgtaaacacaacctccgtgtagaccccaacccccaaaaaggcaagacaacggcgtagccaaacagatt

SEQ ID NO: 24472 - DNA, 80 bp, synthetic construct
  misc_feature 1..80: note = Artificially Synthesized Probe
  source 1..80: mol_type = other DNA
tttaggcttggggggtccatactctgtctacttaactgtagcgatgtagtgtggatacagccaaagacaatacataacag

SEQ ID NO: 24473 - DNA, 80 bp, synthetic construct
  misc_feature 1..80: note = Artificially Synthesized Probe
  source 1..80: mol_type = other DNA
ttttaaaagctccttttagtgagtttcttggatttatggtgaacaatacataaatggttaccatcctcacattgcttaca

SEQ ID NO: 24474 - DNA, 80 bp, synthetic construct
  misc_feature 1..80: note = Artificially Synthesized Probe
  source 1..80: mol_type = other DNA
ctacaccataaaattactatccctttctaattaataagtctcttgggagagatacattgagaggacacaaattctcgttc

SEQ ID NO: 24475 - DNA, 80 bp, synthetic construct
  misc_feature 1..80: note = Artificially Synthesized Probe
  source 1..80: mol_type = other DNA
gattttagttgtttttgcggtatgaattatgactgatttctgagagtcagagctacacacaaaggtatactcagagaagt

SEQ ID NO: 24476 - DNA, 80 bp, synthetic construct
  misc_feature 1..80: note = Artificially Synthesized Probe
  source 1..80: mol_type = other DNA
cccggcccctcattaatttttaaaaacatctttattgaggccaggcatggtggctcacgcctgtaatcccagactttggg

SEQ ID NO: 24477 - DNA, 80 bp, synthetic construct
  misc_feature 1..80: note = Artificially Synthesized Probe
  source 1..80: mol_type = other DNA
taagctgcttccattatcttgcagttacaaacagtgctgcacggtgaataattctgtgcatatgtatttttgtattgttg

SEQ ID NO: 24478 - DNA, 80 bp, synthetic construct
  misc_feature 1..80: note = Artificially Synthesized Probe
  source 1..80: mol_type = other DNA
tcatctgtcatgaacagttgggttgctttcaccatttttttttttttcttagcttcagcttaaaggaggccacctttcga

SEQ ID NO: 24479 - DNA, 80 bp, synthetic construct
  misc_feature 1..80: note = Artificially Synthesized Probe
  source 1..80: mol_type = other DNA
ttccatatgtacttgagtctaattctggacctcatctttttgtgtacatatgcagcagtacctcactgtttcattatgaa

SEQ ID NO: 24480 - DNA, 80 bp, synthetic construct
  misc_feature 1..80: note = Artificially Synthesized Probe
  source 1..80: mol_type = other DNA
actgctgacctcaagcaatccacccacctcagcctcgcagagcactgggattacaggcatgagccaccatgccccgcctg

SEQ ID NO: 24481 - DNA, 80 bp, synthetic construct
  misc_feature 1..80: note = Artificially Synthesized Probe
  source 1..80: mol_type = other DNA
ttatgaatagatattgaattttgtcagactttcccttctgtggagataatcatgtaattatttttcccttagatgattac

SEQ ID NO: 24482 - DNA, 80 bp, synthetic construct
  misc_feature 1..80: note = Artificially Synthesized Probe
  source 1..80: mol_type = other DNA
atcttcctgccttggcctgccaaagtgttgggattacaggtgtgagccacagtgcccgatcaatttgtcttttttaaaaa

SEQ ID NO: 24483 - DNA, 80 bp, synthetic construct
  misc_feature 1..80: note = Artificially Synthesized Probe
  source 1..80: mol_type = other DNA
tagacttgttaccaccaccatcattaccactatcaggataaggaacagtccattgcttatggcacccctttacagacacc

SEQ ID NO: 24484 - DNA, 80 bp, synthetic construct
  misc_feature 1..80: note = Artificially Synthesized Probe
  source 1..80: mol_type = other DNA
acctgagtggaattgctgggtcatgtagcaattccatgtctgactttttgaggaactactaaactgttttccacaggggc

SEQ ID NO: 24485 - DNA, 80 bp, synthetic construct
  misc_feature 1..80: note = Artificially Synthesized Probe
  source 1..80: mol_type = other DNA
ttaagaggctattgccagatccaaggacatgaagatttttccatatgttttttcctaagaattgcttctctcttgctgct

SEQ ID NO: 24486 - DNA, 80 bp, synthetic construct
  misc_feature 1..80: note = Artificially Synthesized Probe
  source 1..80: mol_type = other DNA
gtattccttgttgtttgtgggcactgtagattctgttccattatttctttggtcagccagtgacctgacaacgatttcct

SEQ ID NO: 24487 - DNA, 80 bp, synthetic construct
  misc_feature 1..80: note = Artificially Synthesized Probe
  source 1..80: mol_type = other DNA
tccacccatctctgtctcccaaagtgctaggattatagacttgatccactgggcctggactaattttttttatgttttgt

SEQ ID NO: 24488 - DNA, 80 bp, synthetic construct
  misc_feature 1..80: note = Artificially Synthesized Probe
  source 1..80: mol_type = other DNA
gaatcttccagttcttcaacgtggtatgtctttccatttgtttaggtctactttgagttatttcaccactgttttcttgg

SEQ ID NO: 24489 - DNA, 80 bp, synthetic construct
  misc_feature 1..80: note = Artificially Synthesized Probe
  source 1..80: mol_type = other DNA
ttgttattatgggaataggttcattattgcaaggatgggcttgttacagaagtgagttcatcccccttttgctttgtcat

SEQ ID NO: 24490 - DNA, 80 bp, synthetic construct
  misc_feature 1..80: note = Artificially Synthesized Probe
  source 1..80: mol_type = other DNA
ttatggagaggtgcagttgtatgactattccatccttaggaatatggttacagggctcagcttccttatgtctaatatga

SEQ ID NO: 24491 - DNA, 80 bp, synthetic construct
  misc_feature 1..80: note = Artificially Synthesized Probe
  source 1..80: mol_type = other DNA
tttccttgatgaaatgttgtgtagacagtaaaactgtatacctacaagtatgcctcagttcagtatgtgtctgtgcccag

SEQ ID NO: 24492 - DNA, 80 bp, synthetic construct
  misc_feature 1..80: note = Artificially Synthesized Probe
  source 1..80: mol_type = other DNA
agacagcatatggggccagacaccccactctggggttcctcactgttttttttctccaacttgcctagttatttagtcat

SEQ ID NO: 24493 - DNA, 80 bp, synthetic construct
  misc_feature 1..80: note = Artificially Synthesized Probe
  source 1..80: mol_type = other DNA
ctccacgctagtcaagctattgtcgccattttatatacaaggacaccaagggttgtaaaggatcagggagtcaagtatct

SEQ ID NO: 24494 - DNA, 80 bp, synthetic construct
  misc_feature 1..80: note = Artificially Synthesized Probe
  source 1..80: mol_type = other DNA
gggtcatgtagtaattctgtacttaattttctgaggaactgccatacctttttccatagtagctgcaccattttacattc

SEQ ID NO: 24495 - DNA, 80 bp, synthetic construct
  misc_feature 1..80: note = Artificially Synthesized Probe
  source 1..80: mol_type = other DNA
tacatgagccactgtgtccagcccctagcagttattttaattgataaaagtggagcacatgttcaatctgtctgtttgag

SEQ ID NO: 24496 - DNA, 80 bp, synthetic construct
  misc_feature 1..80: note = Artificially Synthesized Probe
  source 1..80: mol_type = other DNA
aatagggtttgtgctcctatgagaatctaatgctgctgctaatccgacaggaggcagagttcaggcagtaatgcttgctc

SEQ ID NO: 24497 - DNA, 80 bp, synthetic construct
  misc_feature 1..80: note = Artificially Synthesized Probe
  source 1..80: mol_type = other DNA
attccattcttcaaggcttgatgcagtaacttactcctttgccttccttaatcgctttgaattgttctttgctgccttta

SEQ ID NO: 24498 - DNA, 80 bp, synthetic construct
  misc_feature 1..80: note = Artificially Synthesized Probe
  source 1..80: mol_type = other DNA
tcttctctgtaggtggaccttctcatttctatagagggaacctcattttaaatacatttaggcatctcctcagtggggct

SEQ ID NO: 24499 - DNA, 80 bp, synthetic construct
  misc_feature 1..80: note = Artificially Synthesized Probe
  source 1..80: mol_type = other DNA
catcctccccaggcaatgatcaggctatggcagagtggtgagtagaaaaacatggaaaccaggccgggtgcggtggctca

SEQ ID NO: 24500 - DNA, 80 bp, synthetic construct
  misc_feature 1..80: note = Artificially Synthesized Probe
  source 1..80: mol_type = other DNA
ttttaaacagagattccatcacataggcatgattgattaaatcattggtgatcagctcaatctccagcctctcttccctt

SEQ ID NO: 24501 - DNA, 80 bp, synthetic construct
  misc_feature 1..80: note = Artificially Synthesized Probe
  source 1..80: mol_type = other DNA
gagtccatggtttgctgatacctaatgatcctactggcagcacattttagcaaatgccatttgagtaaaagaccatgagc

SEQ ID NO: 24502 - DNA, 80 bp, synthetic construct
  misc_feature 1..80: note = Artificially Synthesized Probe
  source 1..80: mol_type = other DNA
agagtggtgctgaatgtaggtagtctgttaggtggaggttagttaaaagcatccactgttatgtgcatgtccatgtgtat

SEQ ID NO: 24503 - DNA, 80 bp, synthetic construct
  misc_feature 1..80: note = Artificially Synthesized Probe
  source 1..80: mol_type = other DNA
tcagacactaacgttttagttaaattagcaattgtctatgctcatgtgatgagttatagagttgggagctcagtctcttg

SEQ ID NO: 24504 - DNA, 80 bp, synthetic construct
  misc_feature 1..80: note = Artificially Synthesized Probe
  source 1..80: mol_type = other DNA
tcatgccatcttgcaaggaaggagtctttatcctcactttagtgatgaggaaatggaggctcaggatcattctgctaatc

SEQ ID NO: 24505 - DNA, 80 bp, synthetic construct
  misc_feature 1..80: note = Artificially Synthesized Probe
  source 1..80: mol_type = other DNA
ttttatatgccattatcactctagatcttggaaacgtgcgactccaggaaagatgagctggcattacttgtcagttataa

SEQ ID NO: 24506 - DNA, 80 bp, synthetic construct
  misc_feature 1..80: note = Artificially Synthesized Probe
  source 1..80: mol_type = other DNA
ttttttttttttttgctttgcaaggttttgtttgcttgacagaagtggctatcttatttcctccctgcactgtcccattt

SEQ ID NO: 24507 - DNA, 80 bp, synthetic construct
  misc_feature 1..80: note = Artificially Synthesized Probe
  source 1..80: mol_type = other DNA
gagatacctgattaaatctgtggttcatgcccacactgatcttataagaaaattgttggtcagtcacactcatagtgttc

SEQ ID NO: 24508 - DNA, 80 bp, synthetic construct
  misc_feature 1..80: note = Artificially Synthesized Probe
  source 1..80: mol_type = other DNA
acctcgaaactctttaagcttatacccagttctaaagctctttccaacaccaggtgtggtagctacaggtagcatgcctg

SEQ ID NO: 24509 - DNA, 80 bp, synthetic construct
  misc_feature 1..80: note = Artificially Synthesized Probe
  source 1..80: mol_type = other DNA
gcacagcagtctctatgtcttgttattttgtgtggtctattatgtgcatttgcacaatgtagccattctgtacatgggca

SEQ ID NO: 24510 - DNA, 80 bp, synthetic construct
  misc_feature 1..80: note = Artificially Synthesized Probe
  source 1..80: mol_type = other DNA
tctggatatgctgtagcccagtcaaatagacacatacaattaatcataacagggactgaactgatacatacacctgtgag

SEQ ID NO: 24511 - DNA, 80 bp, synthetic construct
  misc_feature 1..80: note = Artificially Synthesized Probe
  source 1..80: mol_type = other DNA
cttccatgcgcagatttctacttctgctctggttttcctctgtgtgttgcttctcactcctaggtgcttcattttctagt

SEQ ID NO: 24512 - DNA, 80 bp, synthetic construct
  misc_feature 1..80: note = Artificially Synthesized Probe
  source 1..80: mol_type = other DNA
atagataatcactgtgagccctgttggatttttgcagtagtttctagaggtgggattcccaggtcatcgaggatctgtgt

SEQ ID NO: 24513 - DNA, 80 bp, synthetic construct
  misc_feature 1..80: note = Artificially Synthesized Probe
  source 1..80: mol_type = other DNA
ggctccttttgttaagactgccccaagtcccttgcagtttccaggcgtggtaccattgtgtggcatcctgtcttctcaac

SEQ ID NO: 24514 - DNA, 80 bp, synthetic construct
  misc_feature 1..80: note = Artificially Synthesized Probe
  source 1..80: mol_type = other DNA
gccctttctgtatttttgggtcgtgatacactttggtgagcttcacttttccgatgactttttgttggcatgggcagtat

SEQ ID NO: 24515 - DNA, 80 bp, synthetic construct
  misc_feature 1..80: note = Artificially Synthesized Probe
  source 1..80: mol_type = other DNA
atttaaaattctgacattgaatctttaagtttagcatgacttagcagtagcattccatttctactccccaccccctacct

SEQ ID NO: 24516 - DNA, 80 bp, synthetic construct
  misc_feature 1..80: note = Artificially Synthesized Probe
  source 1..80: mol_type = other DNA
ggagggagaagtagaagcaagagggagttaggctcagtagttaaatttgggatttggtcattaaaggaagagtgtagatt

SEQ ID NO: 24517 - DNA, 80 bp, synthetic construct
  misc_feature 1..80: note = Artificially Synthesized Probe
  source 1..80: mol_type = other DNA
actcccaagtagctgagactacaggtgcccaccaccacgcccggctaatttttttatttttagtagagatggggtttcac

SEQ ID NO: 24518 - DNA, 80 bp, synthetic construct
  misc_feature 1..80: note = Artificially Synthesized Probe
  source 1..80: mol_type = other DNA
agcctgaggcattagaagcaattaagggatggataaatggatacattgtagcataccacgcagcatagtagacaacacac

SEQ ID NO: 24519 - DNA, 80 bp, synthetic construct
  misc_feature 1..80: note = Artificially Synthesized Probe
  source 1..80: mol_type = other DNA
caagcactgtcagcaccaacccagctgtggctgtcgccgagcctgtggtctcctacacctctgtggctacaaccagcttc

SEQ ID NO: 24520 - DNA, 80 bp, synthetic construct
  misc_feature 1..80: note = Artificially Synthesized Probe
  source 1..80: mol_type = other DNA
aatcttgaaatctggcttgtgggtcctgtgaagtcaagaaaggtgtgagagttaaggggtttcaaattaattttactcag

SEQ ID NO: 24521 - DNA, 80 bp, synthetic construct
  misc_feature 1..80: note = Artificially Synthesized Probe
  source 1..80: mol_type = other DNA
aggaggagcttgtgaagtattcctgggtttcactcattcttagtgcttctcaggagcctaggggacaagcaggaaccagg

SEQ ID NO: 24522 - DNA, 80 bp, synthetic construct
  misc_feature 1..80: note = Artificially Synthesized Probe
  source 1..80: mol_type = other DNA
ttctgaggtgaaggtgaaatgcttagaaataatgattgttctcagtacttgacgcagaaccaaagtggggctgcagtgcc

SEQ ID NO: 24523 - DNA, 80 bp, synthetic construct
  misc_feature 1..80: note = Artificially Synthesized Probe
  source 1..80: mol_type = other DNA
gtacctgcttattggctgtgtctctctagagggtaagcttactgcaggcaggatctgccacatttagggctgctgtattt

SEQ ID NO: 24524 - DNA, 80 bp, synthetic construct
  misc_feature 1..80: note = Artificially Synthesized Probe
  source 1..80: mol_type = other DNA
cagtctttactgtcccaaagtaaataggagaccctggcatggaaggtactctttattcaagtcaggttgttcttgctccc

SEQ ID NO: 24525 - DNA, 80 bp, synthetic construct
  misc_feature 1..80: note = Artificially Synthesized Probe
  source 1..80: mol_type = other DNA
ctggtttgtggttgcagagctgataggttgaactagacatgggatgtgtgagggaatgagagtcatggggagggcttctc

SEQ ID NO: 24526 - DNA, 80 bp, synthetic construct
  misc_feature 1..80: note = Artificially Synthesized Probe
  source 1..80: mol_type = other DNA
aacattcagggatgcctggtggtctttctgacttgagagcacaggaggtagaagagcttgtaggtcagtcatcccttggt

SEQ ID NO: 24527 - DNA, 80 bp, synthetic construct
  misc_feature 1..80: note = Artificially Synthesized Probe
  source 1..80: mol_type = other DNA
gctttgctgttacacaagattgaaggaagtgggatctcagttttggtgtgactgttcaatgcagtgctttatgtattatg

SEQ ID NO: 24528 - DNA, 80 bp, synthetic construct
  misc_feature 1..80: note = Artificially Synthesized Probe
  source 1..80: mol_type = other DNA
gattgccttggcatcttgactctttgcttatgttttcctgagagagcccgagcaagtgaataaacagatacagagctttc

SEQ ID NO: 24529 - DNA, 80 bp, synthetic construct
  misc_feature 1..80: note = Artificially Synthesized Probe
  source 1..80: mol_type = other DNA
gggctgaacgaagagacattgtcatccggctgcccaacctccataatgactctgtggtttccctggaggaggtaagtgag

SEQ ID NO: 24530 - DNA, 80 bp, synthetic construct
  misc_feature 1..80: note = Artificially Synthesized Probe
  source 1..80: mol_type = other DNA
cctcccagacggggtcgcggccgggcagaggcgctcctcacatctcagataatgggcagccgggcagagacactcctcac

SEQ ID NO: 24531 - DNA, 80 bp, synthetic construct
  misc_feature 1..80: note = Artificially Synthesized Probe
  source 1..80: mol_type = other DNA
gaccgtagggagagggagagggagtgaaaggttttaaatggtattttttagtcaaaggtttcttgtgatttggcatagtt

SEQ ID NO: 24532 - DNA, 80 bp, synthetic construct
  misc_feature 1..80: note = Artificially Synthesized Probe
  source 1..80: mol_type = other DNA
gtccctcacacccacttgcaccttctctccttgcttgtttgtgtttattctctggaggttctgcggtagttcttaagaat

SEQ ID NO: 24533 - DNA, 80 bp, synthetic construct
  misc_feature 1..80: note = Artificially Synthesized Probe
  source 1..80: mol_type = other DNA
acgaagcattttaatcattaacattgttgaactgggaaatagttaagaggtgcgactatgggaacaaatggaagcacctc

SEQ ID NO: 24534 - DNA, 80 bp, synthetic construct
  misc_feature 1..80: note = Artificially Synthesized Probe
  source 1..80: mol_type = other DNA
tgttcatggttcactgtgttttttgttcctatgcttagacagtctttccaagagtggagaaatattcatccatttgttct

SEQ ID NO: 24535 - DNA, 80 bp, synthetic construct
  misc_feature 1..80: note = Artificially Synthesized Probe
  source 1..80: mol_type = other DNA
ctgtgtttccccatgcaccagcacagtgatgagagatcccaggcatttaaatgggttgtattctaggccaaaaaaaaaaa

SEQ ID NO: 24536 - DNA, 80 bp, synthetic construct
  misc_feature 1..80: note = Artificially Synthesized Probe
  source 1..80: mol_type = other DNA
ttccttcagttgtctctgctcaggccttgggcccagatgtgctgagctcaccgtgcacttcacctggcttcttgctgtac

SEQ ID NO: 24537 - DNA, 80 bp, synthetic construct
  misc_feature 1..80: note = Artificially Synthesized Probe
  source 1..80: mol_type = other DNA
cagccacagaggcacctttccaaaacagatatgaatgtgcttctccctcacttaaaacccttcatgttccctccaggttg

SEQ ID NO: 24538 - DNA, 80 bp, synthetic construct
  misc_feature 1..80: note = Artificially Synthesized Probe
  source 1..80: mol_type = other DNA
cagacgttgtgagtggggctcagtcctctcaatcccaggattttgcatgcgcttggacagaggcagaagtgtccttggtt

SEQ ID NO: 24539 - DNA, 80 bp, synthetic construct
  misc_feature 1..80: note = Artificially Synthesized Probe
  source 1..80: mol_type = other DNA
ggtttttctccttcccttcacattctctctataattttattcactgctcagaaagttaccagctgctcactacatgtcag

SEQ ID NO: 24540 - DNA, 80 bp, synthetic construct
  misc_feature 1..80: note = Artificially Synthesized Probe
  source 1..80: mol_type = other DNA
ctgtctctgcatgtccctcagcaggagaactgatggaagatagcaagttgaccaaatcctgggaaatattattaatattc

SEQ ID NO: 24541 - DNA, 80 bp, synthetic construct
  misc_feature 1..80: note = Artificially Synthesized Probe
  source 1..80: mol_type = other DNA
ttatggcccagagtttcaaaaatactaagggacctttataaacaaataatacttctagtggtaaacaaatgtgtaactgg

SEQ ID NO: 24542 - DNA, 80 bp, synthetic construct
  misc_feature 1..80: note = Artificially Synthesized Probe
  source 1..80: mol_type = other DNA
tcactgtagttaccgaagcttgtcagaaagtctgataagactttcttgccagaaagttcccttgtgtacctgaggctcag

SEQ ID NO: 24543 - DNA, 80 bp, synthetic construct
  misc_feature 1..80: note = Artificially Synthesized Probe
  source 1..80: mol_type = other DNA
tgtatagagctcatgtatgtatagagcttgacagtttgcaagacacttaggctgaatatgtgatttgtccaggagaccca

SEQ ID NO: 24544 - DNA, 80 bp, synthetic construct
  misc_feature 1..80: note = Artificially Synthesized Probe
  source 1..80: mol_type = other DNA
gaatgaacaaacataaagacattcattaatttccccagaaatgcttgctgagcactcatgattctgggtgccatggaggg

SEQ ID NO: 24545 - DNA, 80 bp, synthetic construct
  misc_feature 1..80: note = Artificially Synthesized Probe
  source 1..80: mol_type = other DNA
gcactggttagtcgttattattcataacgcatgtccactcccccacctaccttcccaatcatcccacattattctgaagc

SEQ ID NO: 24546 - DNA, 80 bp, synthetic construct
  misc_feature 1..80: note = Artificially Synthesized Probe
  source 1..80: mol_type = other DNA
attccagtcttttatctgatacataagtttcaccagttttacgtgcacatattgtgtctgtgtgcttagttctatttcta

SEQ ID NO: 24547 - DNA, 80 bp, synthetic construct
  misc_feature 1..80: note = Artificially Synthesized Probe
  source 1..80: mol_type = other DNA
gctttgtaggttctagggtctctgttggaactactcagggcttccattgcctcagaaaagcagtcgtagatattatttaa

SEQ ID NO: 24548 - DNA, 80 bp, synthetic construct
  misc_feature 1..80: note = Artificially Synthesized Probe
  source 1..80: mol_type = other DNA
cttgggaggctgagacaggagaattgcttgaacccaggaggtggaggttacagtgagccgagattgttccactgcactcc

SEQ ID NO: 24549 - DNA, 80 bp, synthetic construct
  misc_feature 1..80: note = Artificially Synthesized Probe
  source 1..80: mol_type = other DNA
tttttggaatcaagtcatgcaggagcccaacagacatagccacctcaggttaaaagagttgatagagtggtggtttctct

SEQ ID NO: 24550 - DNA, 80 bp, synthetic construct
  misc_feature 1..80: note = Artificially Synthesized Probe
  source 1..80: mol_type = other DNA
ctaatggctcctcagtactgtcagttattctctgatcttagggattccatccactaaaatgtaagctccttaggacagag

SEQ ID NO: 24551 - DNA, 80 bp, synthetic construct
  misc_feature 1..80: note = Artificially Synthesized Probe
  source 1..80: mol_type = other DNA
gatgcactgttcatgtttgagtattttaagcccaagacccttcctgaatttgacagctataagaccagcaccgtgtctgc

SEQ ID NO: 24552 - DNA, 80 bp, synthetic construct
  misc_feature 1..80: note = Artificially Synthesized Probe
  source 1..80: mol_type = other DNA
tgcttccactgcaggcttcttaactatggttgccttcttggggacaagtaatagaaaaactcaagccagagttctctttt

SEQ ID NO: 24553 - DNA, 80 bp, synthetic construct
  misc_feature 1..80: note = Artificially Synthesized Probe
  source 1..80: mol_type = other DNA
tgtccatttgattgctgccttttctgttctttgtactagcattcagcaagtctcagactatcaagtgctcagagatcatc

SEQ ID NO: 24554 - DNA, 80 bp, synthetic construct
  misc_feature 1..80: note = Artificially Synthesized Probe
  source 1..80: mol_type = other DNA
ccatggggtccatctgcctgtccactaggctgtcattatcttccatgcttttcatgtagtgttgtttttagctggtgctt

SEQ ID NO: 24555 - DNA, 80 bp, synthetic construct
  misc_feature 1..80: note = Artificially Synthesized Probe
  source 1..80: mol_type = other DNA
tgcagtagcactgcaccctagagaggataggggaaagaagtgtcagcaccgcctcctctttaacattaccgtctttaaaa

SEQ ID NO: 24556 - DNA, 80 bp, synthetic construct
  misc_feature 1..80: note = Artificially Synthesized Probe
  source 1..80: mol_type = other DNA
ttcttgggattttctccctaatctcccaccaatgatggcaaatgagatttggcagagtgggagttttccaggaaataaat

SEQ ID NO: 24557 - DNA, 80 bp, synthetic construct
  misc_feature 1..80: note = Artificially Synthesized Probe
  source 1..80: mol_type = other DNA
tccaggtcacacagctacaaagcaattcaagtagaaggacatccttttagccattgccttttacttcagcacatttgcca

SEQ ID NO: 24558 - DNA, 80 bp, synthetic construct
  misc_feature 1..80: note = Artificially Synthesized Probe
  source 1..80: mol_type = other DNA
cttgctgcaaatgcagactcccagtcagtggctcttaagtggggctcaggaatttgcccttctacaagtactccacatct

SEQ ID NO: 24559 - DNA, 80 bp, synthetic construct
  misc_feature 1..80: note = Artificially Synthesized Probe
  source 1..80: mol_type = other DNA
aaattgtctttcctcactaacacaggttctaagaacctgaccttggtgatgacagtcagtgctacatagcatctcccagg

SEQ ID NO: 24560 - DNA, 80 bp, synthetic construct
  misc_feature 1..80: note = Artificially Synthesized Probe
  source 1..80: mol_type = other DNA
tgtgtgtgttttaaagagattcaaacaactcagaagtgtacagtgtgaatgtgaaggcccctagtgattccagtatgccc

SEQ ID NO: 24561 - DNA, 80 bp, synthetic construct
  misc_feature 1..80: note = Artificially Synthesized Probe
  source 1..80: mol_type = other DNA
ctaaaaaaaaaaaaattaaatttgcctgttttggggccatattcactgggctcatggagaagtgtggaaacacagcttcc

SEQ ID NO: 24562 - DNA, 80 bp, synthetic construct
  misc_feature 1..80: note = Artificially Synthesized Probe
  source 1..80: mol_type = other DNA
gttaatttggggggcaacccattccatgcaaccattgtagctatgtaactttgagtcagctggtaaatatgtatatcttg

SEQ ID NO: 24563 - DNA, 80 bp, synthetic construct
  misc_feature 1..80: note = Artificially Synthesized Probe
  source 1..80: mol_type = other DNA
agtgaacggagctgaagggttatcataatgagtggttattactctcatctcactaccatgtgcctgagttactgcgtgaa

SEQ ID NO: 24564 - DNA, 80 bp, synthetic construct
  misc_feature 1..80: note = Artificially Synthesized Probe
  source 1..80: mol_type = other DNA
tgtggttgtaagtcatctccacagcccagacttctttcactccaggcccaggtcctggtgccgccccatcctcaggggca

SEQ ID NO: 24565 - DNA, 80 bp, synthetic construct
  misc_feature 1..80: note = Artificially Synthesized Probe
  source 1..80: mol_type = other DNA
agtgtttctaatgtttctgctcaactatgttgcagcacatatccttgtacatgtgtgagcatgcagtaaatgcagatgtg

SEQ ID NO: 24566 - DNA, 80 bp, synthetic construct
  misc_feature 1..80: note = Artificially Synthesized Probe
  source 1..80: mol_type = other DNA
acattaggaggcttgcatgctggcctgtagctcgatttcttcatgttctctcatttttatagtgataagctagtgacaaa

SEQ ID NO: 24567 - DNA, 80 bp, synthetic construct
  misc_feature 1..80: note = Artificially Synthesized Probe
  source 1..80: mol_type = other DNA
aatattgagaaaacatactagcagcaaaccccttctcagggaattagtttttgccagctgcttcctgggaggaagcacta

SEQ ID NO: 24568 - DNA, 80 bp, synthetic construct
  misc_feature 1..80: note = Artificially Synthesized Probe
  source 1..80: mol_type = other DNA
ctgcaacatgaaaatgtttggggtcctaaaatagctgtgatcttagaatgttaaagtggccctttcagcagctatactag

SEQ ID NO: 24569 - DNA, 80 bp, synthetic construct
  misc_feature 1..80: note = Artificially Synthesized Probe
  source 1..80: mol_type = other DNA
atttagaaaagatttagaaaaatagctccaggtacatgtgggttgtttgacatttgataatagctgcttcataggaccca

SEQ ID NO: 24570 - DNA, 80 bp, synthetic construct
  misc_feature 1..80: note = Artificially Synthesized Probe
  source 1..80: mol_type = other DNA
tacagaatggcttggttcgtcacttggcctggctcagccctgctttgggatgtgttgatagtgcctttcttggactaaaa

SEQ ID NO: 24571 - DNA, 80 bp, synthetic construct
  misc_feature 1..80: note = Artificially Synthesized Probe
  source 1..80: mol_type = other DNA
taacataccaaattatctttacaaggacaaaggtgtaaaaatgcaaattgtgcacagtagccttgatgctctgaggtggg

SEQ ID NO: 24572 - DNA, 80 bp, synthetic construct
  misc_feature 1..80: note = Artificially Synthesized Probe
  source 1..80: mol_type = other DNA
tttagacatggagcttggagagtcctacagcttttggatactgaggtgactggggtggatgaaaaagagactttgagggg

SEQ ID NO: 24573 - DNA, 80 bp, synthetic construct
  misc_feature 1..80: note = Artificially Synthesized Probe
  source 1..80: mol_type = other DNA
cgtgagctgtttctggtcttactgctggagcaaatggaggaaacacacttaaagagacactggaaagttgcatcttgtaa

SEQ ID NO: 24574 - DNA, 80 bp, synthetic construct
  misc_feature 1..80: note = Artificially Synthesized Probe
  source 1..80: mol_type = other DNA
tcagcacaggccattagcacacaaagttgcatgtcagcccatttgaacctagggccacaggatcccaaagatcctgtgga

SEQ ID NO: 24575 - DNA, 80 bp, synthetic construct
  misc_feature 1..80: note = Artificially Synthesized Probe
  source 1..80: mol_type = other DNA
ccattctttaagagctttttcattcatcccttttgccctattgacgtgaaagaattgaaacttggtgttctttcagtctg

SEQ ID NO: 24576 - DNA, 80 bp, synthetic construct
  misc_feature 1..80: note = Artificially Synthesized Probe
  source 1..80: mol_type = other DNA
agcactttgagagtaaatatctacttgcctaaaccaatccttagttttcataatgatcacagctgggattccaccaaatt

SEQ ID NO: 24577 - DNA, 80 bp, synthetic construct
  misc_feature 1..80: note = Artificially Synthesized Probe
  source 1..80: mol_type = other DNA
gtattggctccaatatggcatcagcaaaaccctctgctcattcagacctaaagctgtaatggcacatttgagacataaga

SEQ ID NO: 24578 - DNA, 80 bp, synthetic construct
  misc_feature 1..80: note = Artificially Synthesized Probe
  source 1..80: mol_type = other DNA
tgcctaccctaccagtaggacccagctgattagcactaaaacatggaccaataccaggcttttaaggtagctgagcaaag

SEQ ID NO: 24579 - DNA, 80 bp, synthetic construct
  misc_feature 1..80: note = Artificially Synthesized Probe
  source 1..80: mol_type = other DNA
ctgctgtaattcttaactttgtccctctgtatctgatgtatctttctctgactgccttcaacattttgtatctttgggtt

SEQ ID NO: 24580 - DNA, 80 bp, synthetic construct
  misc_feature 1..80: note = Artificially Synthesized Probe
  source 1..80: mol_type = other DNA
aggttgtgcgctcctcgtgagaatctaatgccagagaatagtttcatcctgaaactatcccctccagcccccacagtctg

SEQ ID NO: 24581 - DNA, 80 bp, synthetic construct
  misc_feature 1..80: note = Artificially Synthesized Probe
  source 1..80: mol_type = other DNA
tcaaattcctttcatgttaccttgtgcttagtaggggagctggtttgccacaaggtttttctcaacattccagttccacc

SEQ ID NO: 24582 - DNA, 80 bp, synthetic construct
  misc_feature 1..80: note = Artificially Synthesized Probe
  source 1..80: mol_type = other DNA
atggtgggaatatttacactccagaaatcagtaagtgctattaatcagggctttctttttccctgagagccagttgttaa

SEQ ID NO: 24583 - DNA, 80 bp, synthetic construct
  misc_feature 1..80: note = Artificially Synthesized Probe
  source 1..80: mol_type = other DNA
aacccagccccgtactcttttctgtgctgggcactgtgttaattcatttggttctcccaagcaccctagaaaaaaagcac

SEQ ID NO: 24584 - DNA, 80 bp, synthetic construct
  misc_feature 1..80: note = Artificially Synthesized Probe
  source 1..80: mol_type = other DNA
aaaataagatttttaaaacttatcagacaagtaagacctaccatgtgtgctctgtggcctgtcaagccgtgactgctgta

SEQ ID NO: 24585 - DNA, 80 bp, synthetic construct
  misc_feature 1..80: note = Artificially Synthesized Probe
  source 1..80: mol_type = other DNA
atttgatctagggagaaagttgtccacagtttcatcacttaaacacaagcccactctatcatatcgttctgagggcaaga

SEQ ID NO: 24586 - DNA, 80 bp, synthetic construct
  misc_feature 1..80: note = Artificially Synthesized Probe
  source 1..80: mol_type = other DNA
ttgttgttgttgttgttgtttctgagacagggtcttgtccttgttacccatgctggaatgcagtgatgcaatcatggctc

SEQ ID NO: 24587 - DNA, 80 bp, synthetic construct
  misc_feature 1..80: note = Artificially Synthesized Probe
  source 1..80: mol_type = other DNA
tgagccacattttgaacacattagaaacctggcacattttttaataaagtgatggtatcccctgtaagatgggtgccagc

SEQ ID NO: 24588 - DNA, 80 bp, synthetic construct
  misc_feature 1..80: note = Artificially Synthesized Probe
  source 1..80: mol_type = other DNA
ggagctgggctcatgtcacatgagggcccatgtgggagcacttggctcacatatagcagcggcaaccctggagagggagt

SEQ ID NO: 24589 - DNA, 80 bp, synthetic construct
  misc_feature 1..80: note = Artificially Synthesized Probe
  source 1..80: mol_type = other DNA
cctgtgagggctgtgcagcaactcaaactctgatgtcgtgctccctcacccctgccattcacccatcgtctcagtgacag

SEQ ID NO: 24590 - DNA, 80 bp, synthetic construct
  misc_feature 1..80: note = Artificially Synthesized Probe
  source 1..80: mol_type = other DNA
cctgtattgtaggggacagcattggtctggaaggaagggagagcacccagacagagcaagcagcccaggaaggtggccat

SEQ ID NO: 24591 - DNA, 80 bp, synthetic construct
  misc_feature 1..80: note = Artificially Synthesized Probe
  source 1..80: mol_type = other DNA
ggtaccttctcaagaggcagatgtcgagatggaatttcgggtacaaaatatgtattaggaattggcacctgtgcaaggga

SEQ ID NO: 24592 - DNA, 80 bp, synthetic construct
  misc_feature 1..80: note = Artificially Synthesized Probe
  source 1..80: mol_type = other DNA
gatattcagacttaggatgccctacctgtatttcttctcaactccaatacacatgccctgttgattgtgtgctttcgaga

SEQ ID NO: 24593 - DNA, 80 bp, synthetic construct
  misc_feature 1..80: note = Artificially Synthesized Probe
  source 1..80: mol_type = other DNA
ggaaccattaactgggaagtagttaccactttccaaacacagctgtttgttaacaaacacttcccgctgtgtatatttga

SEQ ID NO: 24594 - DNA, 80 bp, synthetic construct
  misc_feature 1..80: note = Artificially Synthesized Probe
  source 1..80: mol_type = other DNA
gatcacaatcttcaccaagattttgaggcctgagtctacactcatagaaacctggctctttgagcccatataggcacccc

SEQ ID NO: 24595 - DNA, 80 bp, synthetic construct
  misc_feature 1..80: note = Artificially Synthesized Probe
  source 1..80: mol_type = other DNA
agctggtgagctttgagttgacactgactgagccaggaccacacagatagtagaaccaggcatcaggagggcatgctggc

SEQ ID NO: 24596 - DNA, 80 bp, synthetic construct
  misc_feature 1..80: note = Artificially Synthesized Probe
  source 1..80: mol_type = other DNA
aagaaaaacaaagcttggtaaggggttcgaggtgtgattgtgactatttagacagggagattgggaagacctgtctaagc

SEQ ID NO: 24597 - DNA, 80 bp, synthetic construct
  misc_feature 1..80: note = Artificially Synthesized Probe
  source 1..80: mol_type = other DNA
ggaagtagtctgattctagatggattcagacagaagagctgaatcaatggatcagacaacatgggaaacctagaggacat

SEQ ID NO: 24598 - DNA, 80 bp, synthetic construct
  misc_feature 1..80: note = Artificially Synthesized Probe
  source 1..80: mol_type = other DNA
ccccaggcaactctcaggaatgttgggtgcatttcctttccatcttctgcctactttctttacacacaaacagacacaca

SEQ ID NO: 24599 - DNA, 80 bp, synthetic construct
  misc_feature 1..80: note = Artificially Synthesized Probe
  source 1..80: mol_type = other DNA
gggagttccaggagctatgacagtcagcccaatgtgtgctgtagtgaaacgattgctggcagagtagtgcgagttagtgg

SEQ ID NO: 24600 - DNA, 80 bp, synthetic construct
  misc_feature 1..80: note = Artificially Synthesized Probe
  source 1..80: mol_type = other DNA
atggtccagatagtaggcaagggaggacataaggtgcctgtatgcttctacgattctttgccctacttctcttcaggacc

SEQ ID NO: 24601 - DNA, 80 bp, synthetic construct
  misc_feature 1..80: note = Artificially Synthesized Probe
  source 1..80: mol_type = other DNA
ggctttactttcttggtattcttaggaaaatgatggctactggagatgcttcttcaagtcagggtctcacatctcctcct

SEQ ID NO: 24602 - DNA, 80 bp, synthetic construct
  misc_feature 1..80: note = Artificially Synthesized Probe
  source 1..80: mol_type = other DNA
aaaatacagtgtcctacatcaccttcttgagtccacctatggctgattagaccaggatggacacctgcctgggctgagcc

SEQ ID NO: 24603 - DNA, 80 bp, synthetic construct
  misc_feature 1..80: note = Artificially Synthesized Probe
  source 1..80: mol_type = other DNA
ttgttcctcctagggtgctagagctcagaagttgaaggtcaggactgggtattttactgttttctgtgagtttgagcaaa

SEQ ID NO: 24604 - DNA, 80 bp, synthetic construct
  misc_feature 1..80: note = Artificially Synthesized Probe
  source 1..80: mol_type = other DNA
agcccttttcctttaggacagcatggtcctgaggtggagtgagatggccagtgcaaggtgcttggctgctgtggtgaaga

SEQ ID NO: 24605 - DNA, 80 bp, synthetic construct
  misc_feature 1..80: note = Artificially Synthesized Probe
  source 1..80: mol_type = other DNA
caggtttcctcctcctgctggagcagctcctgtggtctcaagcacgtaggagattctgactgcttaaaaaacaagtgtgg

SEQ ID NO: 24606 - DNA, 80 bp, synthetic construct
  misc_feature 1..80: note = Artificially Synthesized Probe
  source 1..80: mol_type = other DNA
ttggcaggtcatacaccccctctgagctttggtttcttctgtattttccttgattccctcttactcatggagaaactgaa

SEQ ID NO: 24607 - DNA, 80 bp, synthetic construct
  misc_feature 1..80: note = Artificially Synthesized Probe
  source 1..80: mol_type = other DNA
attctttttgatagctactgcatagtagtcccaacatagggatgtcccacagtttacctagccatccctccttttttttt

SEQ ID NO: 24608 - DNA, 80 bp, synthetic construct
  misc_feature 1..80: note = Artificially Synthesized Probe
  source 1..80: mol_type = other DNA
agtgatattggaaggaaggagccaacctccatgtcttcctcacaggggaagacctcagcctttctaatgataaagctggg

SEQ ID NO: 24609 - DNA, 80 bp, synthetic construct
  misc_feature 1..80: note = Artificially Synthesized Probe
  source 1..80: mol_type = other DNA
accatgcccagccaatttttaagttttttatagagacagagtcttgctatattgcccaggctcaatttcaacacctggag

SEQ ID NO: 24610 - DNA, 80 bp, synthetic construct
  misc_feature 1..80: note = Artificially Synthesized Probe
  source 1..80: mol_type = other DNA
atcttgtcatatatatcataatatcacagtgatataagaccacattttcactgccaacagttcagacacatagagtccac

SEQ ID NO: 24611 - DNA, 80 bp, synthetic construct
  misc_feature 1..80: note = Artificially Synthesized Probe
  source 1..80: mol_type = other DNA
gggaccttgggttcctatgtcagctttgctgacaggaactccttgcaaatgggaactgccccatgactggctggccccca

SEQ ID NO: 24612 - DNA, 80 bp, synthetic construct
  misc_feature 1..80: note = Artificially Synthesized Probe
  source 1..80: mol_type = other DNA
cagtgctaggatgtgactgaagcacggagcaggaggagctccaactcacacctggctggggcctccataagctcaaggcc

SEQ ID NO: 24613 - DNA, 80 bp, synthetic construct
  misc_feature 1..80: note = Artificially Synthesized Probe
  source 1..80: mol_type = other DNA
ctgtttgtcctgactgtgttgcttaaactgatgggaggtacagtcatcatgagctgtctttgtttcttgaaaacatttat

SEQ ID NO: 24614 - DNA, 80 bp, synthetic construct
  misc_feature 1..80: note = Artificially Synthesized Probe
  source 1..80: mol_type = other DNA
gttgcctcccagcaggtaaacaagccccaggactgtccacacagggtgttcctgcctaccttctctcatcagggccaggg

SEQ ID NO: 24615 - DNA, 80 bp, synthetic construct
  misc_feature 1..80: note = Artificially Synthesized Probe
  source 1..80: mol_type = other DNA
atagcatgtccgtgaggcttaggtactattatcatcctcattgtacagacggggaagttgttaccaataggctctgcagg

SEQ ID NO: 24616 - DNA, 80 bp, synthetic construct
  misc_feature 1..80: note = Artificially Synthesized Probe
  source 1..80: mol_type = other DNA
ctggcactctgttgcccctcctgcccacctctccctcaaggccatcctaggcctgttcagactgttggtggaggccattt

SEQ ID NO: 24617 - DNA, 80 bp, synthetic construct
  misc_feature 1..80: note = Artificially Synthesized Probe
  source 1..80: mol_type = other DNA
taatgcgcaatgtcatctggttttcagaagaaattgggattgattgtggcttttcctggggtatccccatgataacaagt

SEQ ID NO: 24618 - DNA, 80 bp, synthetic construct
  misc_feature 1..80: note = Artificially Synthesized Probe
  source 1..80: mol_type = other DNA
ttcctggtataaattattttctggctatccggagacagttttcatctccagatgtggattcaaaattctggcaaagccag

SEQ ID NO: 24619 - DNA, 80 bp, synthetic construct
  misc_feature 1..80: note = Artificially Synthesized Probe
  source 1..80: mol_type = other DNA
ccccaccacacccagcgcacatctttttttgagggacaggtctcattatgttgcccaggatggtgtcaaactcctgggct

SEQ ID NO: 24620 - DNA, 80 bp, synthetic construct
  misc_feature 1..80: note = Artificially Synthesized Probe
  source 1..80: mol_type = other DNA
atggacaatgtttgagctgttccaatagaagagtgtgtctttatggcagggccatatggattcattctcatggcagccaa

SEQ ID NO: 24621 - DNA, 80 bp, synthetic construct
  misc_feature 1..80: note = Artificially Synthesized Probe
  source 1..80: mol_type = other DNA
cttgtgatagggaaaaggaccatggataaaggcagacatgctacagataggctcactgaggtcagtgggggagaaggtga

SEQ ID NO: 24622 - DNA, 80 bp, synthetic construct
  misc_feature 1..80: note = Artificially Synthesized Probe
  source 1..80: mol_type = other DNA
ggaggcctttgacatggaaggctggctcccaagggctacagatgaggagctcctctcctgggagacaggagataactgtg

SEQ ID NO: 24623 - DNA, 80 bp, synthetic construct
  misc_feature 1..80: note = Artificially Synthesized Probe
  source 1..80: mol_type = other DNA
aagtttgttccctttctgaggcaacacaggggattgaaggatttctccctagagctgtcatgaggcagtaagaggtagtg

SEQ ID NO: 24624 - DNA, 80 bp, synthetic construct
  misc_feature 1..80: note = Artificially Synthesized Probe
  source 1..80: mol_type = other DNA
cccaggaaggtcatttctgtcttcctcatctctgcgtcctcactcatggctcacacagagcatttggactcagtgacatc

SEQ ID NO: 24625 - DNA, 80 bp, synthetic construct
  misc_feature 1..80: note = Artificially Synthesized Probe
  source 1..80: mol_type = other DNA
tccagcttgggcgacagagcagagaaaaaaaaagaaaggagccaggagaaatctacaggtctgcacccactcaggccttg

SEQ ID NO: 24626 - DNA, 80 bp, synthetic construct
  misc_feature 1..80: note = Artificially Synthesized Probe
  source 1..80: mol_type = other DNA
gagccacacactcaccacagacaacacacagtttcttcctggcctgggtgtgatgagcagatgttctcagcttcctttgg

SEQ ID NO: 24627 - DNA, 80 bp, synthetic construct
  misc_feature 1..80: note = Artificially Synthesized Probe
  source 1..80: mol_type = other DNA
aggaaccagcccaggggtaggccaggtggaaaccagccagctcagagaggagatgtcactaggacaggtgtcaccaggat

SEQ ID NO: 24628 - DNA, 80 bp, synthetic construct
  misc_feature 1..80: note = Artificially Synthesized Probe
  source 1..80: mol_type = other DNA
tctctggggccccacagcttcctgcagtgagagctgcacccactttgcccggcagcggtccacagcccgccaccagcggc

SEQ ID NO: 24629 - DNA, 80 bp, synthetic construct
  misc_feature 1..80: note = Artificially Synthesized Probe
  source 1..80: mol_type = other DNA
ggttgcatgggatggggggtgggcacatagagcctacagcagagttggcggcggggctctcccatgcacttggttgtttg

SEQ ID NO: 24630 - DNA, 80 bp, synthetic construct
  misc_feature 1..80: note = Artificially Synthesized Probe
  source 1..80: mol_type = other DNA
cccaggactgtagaggattttggtattttccccacagctgctcctgacctcagggccagattccatccccttcctggctc

SEQ ID NO: 24631 - DNA, 80 bp, synthetic construct
  misc_feature 1..80: note = Artificially Synthesized Probe
  source 1..80: mol_type = other DNA
atcctggtttttttctggctttcttcaaaaaccccccacatcccttgctctcctagcccattacttcttgttccagcttc

SEQ ID NO: 24632 - DNA, 80 bp, synthetic construct
  misc_feature 1..80: note = Artificially Synthesized Probe
  source 1..80: mol_type = other DNA
gcagcctgcccctgcaatgggcctttgcaagtcttaagaggcaccttttcaaaaccgaggtgaactggcatcactgcatt

SEQ ID NO: 24633 - DNA, 80 bp, synthetic construct
  misc_feature 1..80: note = Artificially Synthesized Probe
  source 1..80: mol_type = other DNA
gccccctcataaatggacagggcaagagcacaggctggcccggcagcatcctaccacctccacttaaccagctctcagtt

SEQ ID NO: 24634 - DNA, 80 bp, synthetic construct
  misc_feature 1..80: note = Artificially Synthesized Probe
  source 1..80: mol_type = other DNA
ctggccatgccccttcctcctgtgtgggccgtggtgaggaaaaccaggtgaagcaggggctgtcccttgtacctgtccca

SEQ ID NO: 24635 - DNA, 80 bp, synthetic construct
  misc_feature 1..80: note = Artificially Synthesized Probe
  source 1..80: mol_type = other DNA
tcttccatcctttctgaaatcagcagtgttatgttacaaaaggaaacggaaaggagatagggatccaaactgtgctggtg

SEQ ID NO: 24636 - DNA, 80 bp, synthetic construct
  misc_feature 1..80: note = Artificially Synthesized Probe
  source 1..80: mol_type = other DNA
tgggccaggccccatgccaaggagaaagcaatgtcactcataaccttggtccattctgggcagcagtttcttcagcgtgt

SEQ ID NO: 24637 - DNA, 80 bp, synthetic construct
  misc_feature 1..80: note = Artificially Synthesized Probe
  source 1..80: mol_type = other DNA
cctggaccagctcttcattctccttgggggcctctctgtcccagtgtctagaacctaaacaacacttcccacccccaggc

SEQ ID NO: 24638 - DNA, 80 bp, synthetic construct
  misc_feature 1..80: note = Artificially Synthesized Probe
  source 1..80: mol_type = other DNA
gagggagctcaggggaagcttctaggggagcagccccaaacaggtggttaggtggaacactgaggaacaaacaggcatcc

SEQ ID NO: 24639 - DNA, 80 bp, synthetic construct
  misc_feature 1..80: note = Artificially Synthesized Probe
  source 1..80: mol_type = other DNA
cttctctgataactgaaacacagccctggccagctggcagatgtccggagccacacagatgtcaggtgggagaggcccag

SEQ ID NO: 24640 - DNA, 80 bp, synthetic construct
  misc_feature 1..80: note = Artificially Synthesized Probe
  source 1..80: mol_type = other DNA
accatccctgctgttcactttctgcaatgagctttaaaaagtcaatattcaacctggaaggaagtgagagcccgtcacag

SEQ ID NO: 24641 - DNA, 80 bp, synthetic construct
  misc_feature 1..80: note = Artificially Synthesized Probe
  source 1..80: mol_type = other DNA
atttgaaggcttggttggagcccttgagtctgcctgccagcctcagcttgtgaggatgtaagtaactcagccatagaaat

SEQ ID NO: 24642 - DNA, 80 bp, synthetic construct
  misc_feature 1..80: note = Artificially Synthesized Probe
  source 1..80: mol_type = other DNA
aacataagcctccaagccagagggtaggtggcatgccatttgagtaggtgcagtcttttgtccccaggggtgtcccgatg

SEQ ID NO: 24643 - DNA, 80 bp, synthetic construct
  misc_feature 1..80: note = Artificially Synthesized Probe
  source 1..80: mol_type = other DNA
accctgggcccagagaagatgccactgtaggggctagctgccatcctctggttctctcctcccttaagcccaatcttgga

SEQ ID NO: 24644 - DNA, 80 bp, synthetic construct
  misc_feature 1..80: note = Artificially Synthesized Probe
  source 1..80: mol_type = other DNA
ctcagctgtgagaggctgcctcagggctgcctcacatcacctcaagacatgctgtcagggcactggagccttcacacctg

SEQ ID NO: 24645 - DNA, 80 bp, synthetic construct
  misc_feature 1..80: note = Artificially Synthesized Probe
  source 1..80: mol_type = other DNA
caccatcaagtcctccctgcggggagagtgtgagtatgggtaagggaggcaagcagtgccctcccgcccagtcgatccca

SEQ ID NO: 24646 - DNA, 80 bp, synthetic construct
  misc_feature 1..80: note = Artificially Synthesized Probe
  source 1..80: mol_type = other DNA
tggccaggctctgaaggccctataataggacagggatattccctaactaatttgtctccccagctggtggggccccagga

SEQ ID NO: 24647 - DNA, 80 bp, synthetic construct
  misc_feature 1..80: note = Artificially Synthesized Probe
  source 1..80: mol_type = other DNA
catcccttttcttctttctgcctcagtttcctgcataaaatggataagatgaagataatagcactgcaggatttggaatg

SEQ ID NO: 24648 - DNA, 80 bp, synthetic construct
  misc_feature 1..80: note = Artificially Synthesized Probe
  source 1..80: mol_type = other DNA
tgtaccagtcccatgctctcgtcttgtagtttttgagggtcaggaatttacagtggctttgtggggtaaagttggctcag

SEQ ID NO: 24649 - DNA, 80 bp, synthetic construct
  misc_feature 1..80: note = Artificially Synthesized Probe
  source 1..80: mol_type = other DNA
ccagcgtctactttggtcttagttgggttgtttggattttggtcctgacctcgtttctgaatgctgcttatgtgagctgg

SEQ ID NO: 24650 - DNA, 80 bp, synthetic construct
  misc_feature 1..80: note = Artificially Synthesized Probe
  source 1..80: mol_type = other DNA
gatggggaggaaatgggggtagtgcaggctggacaggggagccaagggagaggcccaggctgaagagtttaatgcgtggc

SEQ ID NO: 24651 - DNA, 80 bp, synthetic construct
  misc_feature 1..80: note = Artificially Synthesized Probe
  source 1..80: mol_type = other DNA
gccagagttgggtccctgcaggcctgagccaagtatttgcccagggtagaagccttggagcctgccagccagcacaaact

SEQ ID NO: 24652 - DNA, 80 bp, synthetic construct
  misc_feature 1..80: note = Artificially Synthesized Probe
  source 1..80: mol_type = other DNA
ctcgacgccgggatgagccggctctgcctgtgtcacagtggaggggtcctttagggccaggctcacccctcacccttttt

SEQ ID NO: 24653 - DNA, 80 bp, synthetic construct
  misc_feature 1..80: note = Artificially Synthesized Probe
  source 1..80: mol_type = other DNA
atccaatggggatcactaaagttcattccttctgtgaaattgattgaagtaatgttcgtgcctgttaatttttcccgaca

SEQ ID NO: 24654 - DNA, 80 bp, synthetic construct
  misc_feature 1..80: note = Artificially Synthesized Probe
  source 1..80: mol_type = other DNA
ccaaggcaggtggatcacctgaggtcaggacttcgagaccagcctgaacaatatggtgaaaccccctctctactaaaaat

SEQ ID NO: 24655 - DNA, 80 bp, synthetic construct
  misc_feature 1..80: note = Artificially Synthesized Probe
  source 1..80: mol_type = other DNA
ctggctactaggccttcattattgatgtgacatatgtaacaacttttcaaaaagaaacagttgtattttgctcagtagtg

SEQ ID NO: 24656 - DNA, 80 bp, synthetic construct
  misc_feature 1..80: note = Artificially Synthesized Probe
  source 1..80: mol_type = other DNA
ccgcgcacagcctagactcccatttcttaaaaaaaaaaaatctggatgtggtggcttgtgcctgtagtcctagctacttg

SEQ ID NO: 24657 - DNA, 80 bp, synthetic construct
  misc_feature 1..80: note = Artificially Synthesized Probe
  source 1..80: mol_type = other DNA
aggagcagcggtgtggaaacctcaagtagtggctagagtgaaaaatgatggtgcaaaaagtgatggtgatggccagatgt

SEQ ID NO: 24658 - DNA, 80 bp, synthetic construct
  misc_feature 1..80: note = Artificially Synthesized Probe
  source 1..80: mol_type = other DNA
tagagtgtacaggtgtgtgaagccatcaacctgcatattttagggggaaaagcgtaacaattaaatcctcaatttctttt

SEQ ID NO: 24659 - DNA, 80 bp, synthetic construct
  misc_feature 1..80: note = Artificially Synthesized Probe
  source 1..80: mol_type = other DNA
tcctacaaaaaagattagctgctctcaatttctttccataatgcatcaccgtagaataaccaacccacaaccattctttt

SEQ ID NO: 24660 - DNA, 80 bp, synthetic construct
  misc_feature 1..80: note = Artificially Synthesized Probe
  source 1..80: mol_type = other DNA
ctgcatctggtcacatgtgtgaatatcttattattgttgttaaaggacaatgtcctggctttccactcacttttgagtgt

SEQ ID NO: 24661 - DNA, 80 bp, synthetic construct
  misc_feature 1..80: note = Artificially Synthesized Probe
  source 1..80: mol_type = other DNA
ctgcttcagcctcctgagtagctagaaccacaggggtgcgccacctcactgggttaatttttaaaattgttgtagagatg

SEQ ID NO: 24662 - DNA, 80 bp, synthetic construct
  misc_feature 1..80: note = Artificially Synthesized Probe
  source 1..80: mol_type = other DNA
aattttcaatttttttttttttttttgagacggagtctcactctgttgcccaggctggagtgcagtggcgtgatctcagc

SEQ ID NO: 24663 - DNA, 80 bp, synthetic construct
  misc_feature 1..80: note = Artificially Synthesized Probe
  source 1..80: mol_type = other DNA
aaagttttaagttacactatacttaggtctatttcctgtggcccagtgtggtcccttcccagttctagcacaaattttaa

SEQ ID NO: 24664 - DNA, 80 bp, synthetic construct
  misc_feature 1..80: note = Artificially Synthesized Probe
  source 1..80: mol_type = other DNA
gcatcccaaatcaaaaaatcgcaaatctgaagtgttccaaaacccaaaacttttagaatcaacatgatgctcaaaggaaa

SEQ ID NO: 24665 - DNA, 80 bp, synthetic construct
  misc_feature 1..80: note = Artificially Synthesized Probe
  source 1..80: mol_type = other DNA
aacaaaatatactcatgaaggatcaggaatgacgctgcgctaagtaacgcaggaagttaaatcgatgtccttcccttact

SEQ ID NO: 24666 - DNA, 80 bp, synthetic construct
  misc_feature 1..80: note = Artificially Synthesized Probe
  source 1..80: mol_type = other DNA
gtgtggtggcatgtgcctgtagtcccagctactcaggagagtgaggcagaagaatcgcttaaacccaggaggcggaggtt

SEQ ID NO: 24667 - DNA, 80 bp, synthetic construct
  misc_feature 1..80: note = Artificially Synthesized Probe
  source 1..80: mol_type = other DNA
actaaaaatacaaaattaggccgggcgcggtggctcatgcctgtaatcccagcactttgggaggccgaggcgggaggatc

SEQ ID NO: 24668 - DNA, 80 bp, synthetic construct
  misc_feature 1..80: note = Artificially Synthesized Probe
  source 1..80: mol_type = other DNA
tgctcggctaatatttgtatatatatatattttttttcttgagacagagtcttgctcggttatccaggctggagtgcagt

SEQ ID NO: 24669 - DNA, 80 bp, synthetic construct
  misc_feature 1..80: note = Artificially Synthesized Probe
  source 1..80: mol_type = other DNA
ttctttttaatacgaaaattaaaatgagaaaaagtacccactaaccttttccttctgaggggcatggcccttgatcctca

SEQ ID NO: 24670 - DNA, 80 bp, synthetic construct
  misc_feature 1..80: note = Artificially Synthesized Probe
  source 1..80: mol_type = other DNA
aagaaacaaaaaaacaaggaaaggagccccttaagttctacctttgccttaatgtcttcatctgtaaaacgggaataaaa

SEQ ID NO: 24671 - DNA, 80 bp, synthetic construct
  misc_feature 1..80: note = Artificially Synthesized Probe
  source 1..80: mol_type = other DNA
atgaatacatcagcaaggtctcaattcagccacagtcccaagtcccccaaccttcctgattgcatctctattttaaatga

SEQ ID NO: 24672 - DNA, 80 bp, synthetic construct
  misc_feature 1..80: note = Artificially Synthesized Probe
  source 1..80: mol_type = other DNA
gaccctaggcagggaataaaaaattcaagtcattcacagaagtcttgaaaggcatgaggatttctgacagttcctagaaa

SEQ ID NO: 24673 - DNA, 80 bp, synthetic construct
  misc_feature 1..80: note = Artificially Synthesized Probe
  source 1..80: mol_type = other DNA
tgagtggggaccaccgccccgacgtggctcacagcgatgtcgccgaagtcaggggaggcgctcagcagcaggttggcgcc

SEQ ID NO: 24674 - DNA, 80 bp, synthetic construct
  misc_feature 1..80: note = Artificially Synthesized Probe
  source 1..80: mol_type = other DNA
ctatgtctaaaataaaaaacggttttggaggcaaatgcaggaggaagcaggttcccagcgactgggctgtggaagccaca

SEQ ID NO: 24675 - DNA, 80 bp, synthetic construct
  misc_feature 1..80: note = Artificially Synthesized Probe
  source 1..80: mol_type = other DNA
aggggcttggtgctggggctcccagtcttcctttcaatggatttgttcagaagctgtttttgctttttttaaactgattt

SEQ ID NO: 24676 - DNA, 80 bp, synthetic construct
  misc_feature 1..80: note = Artificially Synthesized Probe
  source 1..80: mol_type = other DNA
gcagcagtttacccttcagtaacatgaaaccaaagtctgggttttgagtgagaaccatctgtccccatggctttcagggc

SEQ ID NO: 24677 - DNA, 80 bp, synthetic construct
  misc_feature 1..80: note = Artificially Synthesized Probe
  source 1..80: mol_type = other DNA
cagtcacatcttagttccggaagctgcaggcgctggaggctgacttttccagaagaaacagtatttcactactctgtggc

SEQ ID NO: 24678 - DNA, 80 bp, synthetic construct
  misc_feature 1..80: note = Artificially Synthesized Probe
  source 1..80: mol_type = other DNA
cgcctttctattaatgcaaatgactgcagggaccagagtctgcgctgccctgactgcctggaggccagcgtgtctgtgcc

SEQ ID NO: 24679 - DNA, 80 bp, synthetic construct
  misc_feature 1..80: note = Artificially Synthesized Probe
  source 1..80: mol_type = other DNA
agggctgatcaccggggccttcccggcagcagggctggggttccccgtgctggacatcctcctctgactgcatccaggcc

SEQ ID NO: 24680 - DNA, 80 bp, synthetic construct
  misc_feature 1..80: note = Artificially Synthesized Probe
  source 1..80: mol_type = other DNA
atgtgcttttctgtgtgaatatacacttcgataaaaacataaggcactgccaccacgaaaaacctgactggcctcatcct

SEQ ID NO: 24681 - DNA, 80 bp, synthetic construct
  misc_feature 1..80: note = Artificially Synthesized Probe
  source 1..80: mol_type = other DNA
ttgtcaccattttacctccagaccccacactcccacagacactcaactgctgctgaataaatggcgaatctgttaatgaa

SEQ ID NO: 24682 - DNA, 80 bp, synthetic construct
  misc_feature 1..80: note = Artificially Synthesized Probe
  source 1..80: mol_type = other DNA
ttcttaaaacatgatgagatgagattttttgttaagctcatcagctatcaatggattttatgtgtggcccaagacaattc

SEQ ID NO: 24683 - DNA, 80 bp, synthetic construct
  misc_feature 1..80: note = Artificially Synthesized Probe
  source 1..80: mol_type = other DNA
aaggaattattttattttgcaaaaaaatttcaaatcagatgcctttgccacagcccatgctggtgtatgagctaccactg

SEQ ID NO: 24684 - DNA, 80 bp, synthetic construct
  misc_feature 1..80: note = Artificially Synthesized Probe
  source 1..80: mol_type = other DNA
gggagctagggagaggacagttagggagaggagttagggaggggggagttagggaggggagttagggagaggggagttag

SEQ ID NO: 24685 - DNA, 80 bp, synthetic construct
  misc_feature 1..80: note = Artificially Synthesized Probe
  source 1..80: mol_type = other DNA
tatggagcaaggagttagggaggggggagttagggagatgggagttagggagaggggggttagggagaggggagttaggg

SEQ ID NO: 24686 - DNA, 80 bp, synthetic construct
  misc_feature 1..80: note = Artificially Synthesized Probe
  source 1..80: mol_type = other DNA
tctcaaagaaacacttattaatgcctgctatgggccagactccttgaaaacgttacctgattcctgctttggcacttgca

SEQ ID NO: 24687 - DNA, 80 bp, synthetic construct
  misc_feature 1..80: note = Artificially Synthesized Probe
  source 1..80: mol_type = other DNA
acttcccataaaaccatcccagaggaacgcggggagcagcgtcctgcctgggaaccaggcgctccacatgaccactgcac

SEQ ID NO: 24688 - DNA, 80 bp, synthetic construct
  misc_feature 1..80: note = Artificially Synthesized Probe
  source 1..80: mol_type = other DNA
gtgagtgaaaacgttctggagtaccaagagcttttacaccaacacatttactaagctgccatgggctaggaaaatatggt

SEQ ID NO: 24689 - DNA, 80 bp, synthetic construct
  misc_feature 1..80: note = Artificially Synthesized Probe
  source 1..80: mol_type = other DNA
agagatgtgtctgctgatggaagagtggtcacaggtgctctgtgccaagcctagggtacacagagggcaagggaaagacc

SEQ ID NO: 24690 - DNA, 80 bp, synthetic construct
  misc_feature 1..80: note = Artificially Synthesized Probe
  source 1..80: mol_type = other DNA
aggcagataagcagtgatgacatcagcaggaaactagtatcaggctacccagtcctgaagattcagttttcacttaaaca

SEQ ID NO: 24691 - DNA, 80 bp, synthetic construct
  misc_feature 1..80: note = Artificially Synthesized Probe
  source 1..80: mol_type = other DNA
gcaatcctcccatctcagcttcctatgaagctgggaccacaggcatacaccaccaagcccagctaatttttgtatttttt

SEQ ID NO: 24692 - DNA, 80 bp, synthetic construct
  misc_feature 1..80: note = Artificially Synthesized Probe
  source 1..80: mol_type = other DNA
taattttttgtatttttagtagagaccaggtctcgccatgttgctcaggcttgaggtctaggattatgccttccctttct

SEQ ID NO: 24693 - DNA, 80 bp, synthetic construct
  misc_feature 1..80: note = Artificially Synthesized Probe
  source 1..80: mol_type = other DNA
tctgtccctttcaggctggccatgaaatctcaaggtcaacattggtattccagttcagataaaaactgtaaagtgagctt

SEQ ID NO: 24694 - DNA, 80 bp, synthetic construct
  misc_feature 1..80: note = Artificially Synthesized Probe
  source 1..80: mol_type = other DNA
ggattataggtgtgagccactgtgccaggctgatgacagtgtttaaaattgttcactgacatagtgtccacatcagagaa

SEQ ID NO: 24695 - DNA, 80 bp, synthetic construct
  misc_feature 1..80: note = Artificially Synthesized Probe
  source 1..80: mol_type = other DNA
ttatttgtcattttgggtgtgtgtcttagaaacctgctctacgaactgtcagaaggcattgactcagagaacttaaagga

SEQ ID NO: 24696 - DNA, 80 bp, synthetic construct
  misc_feature 1..80: note = Artificially Synthesized Probe
  source 1..80: mol_type = other DNA
caggtcagatccgtttggcaagactataggtagtcttgttttttcatcaggaggtacctgattttctctctctttttctt

SEQ ID NO: 24697 - DNA, 80 bp, synthetic construct
  misc_feature 1..80: note = Artificially Synthesized Probe
  source 1..80: mol_type = other DNA
tgctttgcctagttatccagtttttaagttaattggtatcttatcattctctgaaggtgacccattacaaaatatatata

SEQ ID NO: 24698 - DNA, 80 bp, synthetic construct
  misc_feature 1..80: note = Artificially Synthesized Probe
  source 1..80: mol_type = other DNA
agagatgtcatttcaagaccacaaactcgatgctggcatgctcattgcttttgagtaaatatatatgcacacactacgta

SEQ ID NO: 24699 - DNA, 80 bp, synthetic construct
  misc_feature 1..80: note = Artificially Synthesized Probe
  source 1..80: mol_type = other DNA
cctctttggattccaaatgatctcagcttttttttgttgggggcggggtggggagatctcattttttgtgtcagaattgt

SEQ ID NO: 24700 - DNA, 80 bp, synthetic construct
  misc_feature 1..80: note = Artificially Synthesized Probe
  source 1..80: mol_type = other DNA
tcctcctggtaggatgctgtcaagacatgagtttctggcctggcagggtggctcatgcctgtaatcccagcactttggga

SEQ ID NO: 24701 - DNA, 80 bp, synthetic construct
  misc_feature 1..80: note = Artificially Synthesized Probe
  source 1..80: mol_type = other DNA
taatctgacatgcctggaggacctctgcaaaacagttgtacctaaacttttgagaaacatagagaaatacaaaagagaga

SEQ ID NO: 24702 - DNA, 80 bp, synthetic construct
  misc_feature 1..80: note = Artificially Synthesized Probe
  source 1..80: mol_type = other DNA
atattttatacagatagaagcacagggcaaaagtcaaacctggctgccttaccacgtgtcagtacgctaaatatctgtgt

SEQ ID NO: 24703 - DNA, 80 bp, synthetic construct
  misc_feature 1..80: note = Artificially Synthesized Probe
  source 1..80: mol_type = other DNA
agtcttgctctgtcgcccaggctggagtgcagtggcatgatcttggctcactgaaacctccacctcccaagttcaagcga

SEQ ID NO: 24704 - DNA, 80 bp, synthetic construct
  misc_feature 1..80: note = Artificially Synthesized Probe
  source 1..80: mol_type = other DNA
ccatggtgattgcaagtaaacaacatgatatcaaccagagtgcacattttctgaaaatttaacagttggctgacactagc

SEQ ID NO: 24705 - DNA, 80 bp, synthetic construct
  misc_feature 1..80: note = Artificially Synthesized Probe
  source 1..80: mol_type = other DNA
tttagtaaaactttgtacccattaaacaataacttctcattttctccttccctccaacccctggaaaccaccattctact

SEQ ID NO: 24706 - DNA, 80 bp, synthetic construct
  misc_feature 1..80: note = Artificially Synthesized Probe
  source 1..80: mol_type = other DNA
acttcctcaccaagacgtattattctctttcatttttgatagtaggcatcctaatggaagtgaggtcctatttccctgtg

SEQ ID NO: 24707 - DNA, 80 bp, synthetic construct
  misc_feature 1..80: note = Artificially Synthesized Probe
  source 1..80: mol_type = other DNA
aatgtgaataatataaagaatacctatgtactgttttcctagatttacctacctgttgttgatgttttaccccatttgct

SEQ ID NO: 24708 - DNA, 80 bp, synthetic construct
  misc_feature 1..80: note = Artificially Synthesized Probe
  source 1..80: mol_type = other DNA
ttaatttcctcttttatgccattgagacttttgaagaatgcagtcactcctcccacctttcattaaatagaattttcctt

SEQ ID NO: 24709 - DNA, 80 bp, synthetic construct
  misc_feature 1..80: note = Artificially Synthesized Probe
  source 1..80: mol_type = other DNA
gaaaatagcccttgattcaattaattccaatcctagaaaagcgcctagatatctgattgaggtattgagggagagaggct

SEQ ID NO: 24710 - DNA, 80 bp, synthetic construct
  misc_feature 1..80: note = Artificially Synthesized Probe
  source 1..80: mol_type = other DNA
tatctgggcagccctttccctctccatcaaatgatgaataaaataaaacttggtgaaacatctcatgtttcttaagcacc

SEQ ID NO: 24711 - DNA, 80 bp, synthetic construct
  misc_feature 1..80: note = Artificially Synthesized Probe
  source 1..80: mol_type = other DNA
ggcagattagaccttaaagcttttttctagtccctgttctggctgactttatcagccaagggaagaacaaatcaaggaaa

SEQ ID NO: 24712 - DNA, 80 bp, synthetic construct
  misc_feature 1..80: note = Artificially Synthesized Probe
  source 1..80: mol_type = other DNA
tgcgtctttgtgaaccttctcctttggatggagagagttggttctcttcccatttcctgccaatgaactttctttttttt

SEQ ID NO: 24713 - DNA, 80 bp, synthetic construct
  misc_feature 1..80: note = Artificially Synthesized Probe
  source 1..80: mol_type = other DNA
ttttctggaaaattatccttcagagtccaagacacacagctttgctagcaatttgtctttttgcctaacacggaggttgt

SEQ ID NO: 24714 - DNA, 80 bp, synthetic construct
  misc_feature 1..80: note = Artificially Synthesized Probe
  source 1..80: mol_type = other DNA
gacaaataatgcattgctgactttctctctgtgatagagtcttttccagaggaatcagggagttggcaggaacacttcaa

SEQ ID NO: 24715 - DNA, 80 bp, synthetic construct
  misc_feature 1..80: note = Artificially Synthesized Probe
  source 1..80: mol_type = other DNA
ttgaagccacttgttttctgcttggataaagatgtaccacgatttcaaggatgattttagctgcccagaggctctgctaa

SEQ ID NO: 24716 - DNA, 80 bp, synthetic construct
  misc_feature 1..80: note = Artificially Synthesized Probe
  source 1..80: mol_type = other DNA
caggtgaagtctgaattttaatcaggatctggcatttcaccttggaattaattagctaattccacactagggccaggatc

SEQ ID NO: 24717 - DNA, 80 bp, synthetic construct
  misc_feature 1..80: note = Artificially Synthesized Probe
  source 1..80: mol_type = other DNA
tggcatggggagatacatcctgctcttcctcacagtggatccattggagtggttggttagaaacatttaaggccctaaga

SEQ ID NO: 24718 - DNA, 80 bp, synthetic construct
  misc_feature 1..80: note = Artificially Synthesized Probe
  source 1..80: mol_type = other DNA
cctggctattttttgtattttcagtagagatggggttttgccatctggccagactgttctcaaactcctgacctcaagtg

SEQ ID NO: 24719 - DNA, 80 bp, synthetic construct
  misc_feature 1..80: note = Artificially Synthesized Probe
  source 1..80: mol_type = other DNA
ctttggtaagggtgagagttctacgttgttctatccatgtacctgttcaaccatctgcctaccctcctgtttatctattt

SEQ ID NO: 24720 - DNA, 80 bp, synthetic construct
  misc_feature 1..80: note = Artificially Synthesized Probe
  source 1..80: mol_type = other DNA
ttgaaggaatggccatagtgctcttctgggaattcaggattggaaccttgagtcaactttgcttttctctcttctttacc

SEQ ID NO: 24721 - DNA, 80 bp, synthetic construct
  misc_feature 1..80: note = Artificially Synthesized Probe
  source 1..80: mol_type = other DNA
gagaacaagcagattttttctgtgtcttgcttatttcactctgggctcattcatgttgtcagacatgtcaggattttctt

SEQ ID NO: 24722 - DNA, 80 bp, synthetic construct
  misc_feature 1..80: note = Artificially Synthesized Probe
  source 1..80: mol_type = other DNA
aagatataattcctacaccctctcatctgataaagagttggaaaatgttgttggcagtaactagaattaatattgtggtg

SEQ ID NO: 24723 - DNA, 80 bp, synthetic construct
  misc_feature 1..80: note = Artificially Synthesized Probe
  source 1..80: mol_type = other DNA
tagagatagtaagagaattggtgaaaggtgtatgagtattagtatgttttctcgtgtaaaggaaggtttaatgctgttaa

SEQ ID NO: 24724 - DNA, 80 bp, synthetic construct
  misc_feature 1..80: note = Artificially Synthesized Probe
  source 1..80: mol_type = other DNA
actagtgtgtaaaataagagatatgtacctgcattgaggcgttctggttggttaccccatcgggtgataataattaagat

SEQ ID NO: 24725 - DNA, 80 bp, synthetic construct
  misc_feature 1..80: note = Artificially Synthesized Probe
  source 1..80: mol_type = other DNA
tttaagtcttacacattttgagttggtttttgtttatggtgagaggtaagtggttagtctcatttttctgtgtatggata

SEQ ID NO: 24726 - DNA, 80 bp, synthetic construct
  misc_feature 1..80: note = Artificially Synthesized Probe
  source 1..80: mol_type = other DNA
gggatgagagtagtcatactaatactaaaaatgatggtcagcagaacagtgtagccagtgttctaagtgcttgacccaat

SEQ ID NO: 24727 - DNA, 80 bp, synthetic construct
  misc_feature 1..80: note = Artificially Synthesized Probe
  source 1..80: mol_type = other DNA
tctaagacctggtacatggtacctggtgtcttttctaagacctggtgtgtggtttctacctcctgactgaaaaaagtttc

SEQ ID NO: 24728 - DNA, 80 bp, synthetic construct
  misc_feature 1..80: note = Artificially Synthesized Probe
  source 1..80: mol_type = other DNA
agtgatcctcccacctctgtccccaaaatactgggattataggcacgagccaccacacctggccagaaaactttcattat

SEQ ID NO: 24729 - DNA, 80 bp, synthetic construct
  misc_feature 1..80: note = Artificially Synthesized Probe
  source 1..80: mol_type = other DNA
ttattgcctctttcacattgaaacccaggagtggataacactggcttcaggcaaagcttgaatcaggactcaatctacag

SEQ ID NO: 24730 - DNA, 80 bp, synthetic construct
  misc_feature 1..80: note = Artificially Synthesized Probe
  source 1..80: mol_type = other DNA
gaatattcacaagaacactgttctgatatctctgattgtcatgtggatttgaatgtagcttgacagagggaatgtctaat

SEQ ID NO: 24731 - DNA, 80 bp, synthetic construct
  misc_feature 1..80: note = Artificially Synthesized Probe
  source 1..80: mol_type = other DNA
tttaaatctaactgtgctgaggtgcatataaatgcctttaggtggtagggtcttccggttgtaactgcaacagaaatagc

SEQ ID NO: 24732 - DNA, 80 bp, synthetic construct
  misc_feature 1..80: note = Artificially Synthesized Probe
  source 1..80: mol_type = other DNA
tgtctgtatttgtgtgtgcatgtctgcgtgaattttgagttcaggaataacaggtgatttgatcacagctatttgacagt

SEQ ID NO: 24733 - DNA, 80 bp, synthetic construct
  misc_feature 1..80: note = Artificially Synthesized Probe
  source 1..80: mol_type = other DNA
ccttccagatctgatgctttctgagtgatctggtcaatttgttctcaacctggaattcttgggcccttaggtgtttgtaa

SEQ ID NO: 24734 - DNA, 80 bp, synthetic construct
  misc_feature 1..80: note = Artificially Synthesized Probe
  source 1..80: mol_type = other DNA
agcctctgcctcctgtgctcaactgatcctcccacctgaacctcctgagtggcagctggggctacaggcaggtgtttttt

SEQ ID NO: 24735 - DNA, 80 bp, synthetic construct
  misc_feature 1..80: note = Artificially Synthesized Probe
  source 1..80: mol_type = other DNA
gacaaccacctcccatcattccatcttgcttcttctaggaccttcccttcaaggatcttcagtgccaccagggcttccag

SEQ ID NO: 24736 - DNA, 80 bp, synthetic construct
  misc_feature 1..80: note = Artificially Synthesized Probe
  source 1..80: mol_type = other DNA
tcatattatcaacatttaaaactctgtcagtaccaagtgtgggtgaagatacagagcaaagggaactctattacatcgat

SEQ ID NO: 24737 - DNA, 80 bp, synthetic construct
  misc_feature 1..80: note = Artificially Synthesized Probe
  source 1..80: mol_type = other DNA
taaggggtattgactcactttttattgccctgagccatccctgttgcaaaataatgatctggatataatctccagaccag

SEQ ID NO: 24738 - DNA, 80 bp, synthetic construct
  misc_feature 1..80: note = Artificially Synthesized Probe
  source 1..80: mol_type = other DNA
gaaacttcagaaggatccttccactagggcagaagggatgagagagtaagaatcttcacccctaccactcatgcctttct

SEQ ID NO: 24739 - DNA, 80 bp, synthetic construct
  misc_feature 1..80: note = Artificially Synthesized Probe
  source 1..80: mol_type = other DNA
gaaatagaactacaagcggatggttaaacaatttaaacaaatggtccatggggaaaagtgaatttcacactgtcccccaa

SEQ ID NO: 24740 - DNA, 80 bp, synthetic construct
  misc_feature 1..80: note = Artificially Synthesized Probe
  source 1..80: mol_type = other DNA
ttatgtttgttataaaatacgtgcgtgtggtcttaaaagcatcttccttaaggagaggggcggggatcaagagattgctt

SEQ ID NO: 24741 - DNA, 80 bp, synthetic construct
  misc_feature 1..80: note = Artificially Synthesized Probe
  source 1..80: mol_type = other DNA
gataacctgaggtcaggagttcaagaccagcccgggaaacatggtgaaacaccaactctactaaaaatacaaaaattagc

SEQ ID NO: 24742 - DNA, 80 bp, synthetic construct
  misc_feature 1..80: note = Artificially Synthesized Probe
  source 1..80: mol_type = other DNA
gctaccctgcagaaatcactcaggggtgctatttctctgaagggggaaaaatagaaaattgcttcattttcccacagtgt

SEQ ID NO: 24743 - DNA, 80 bp, synthetic construct
  misc_feature 1..80: note = Artificially Synthesized Probe
  source 1..80: mol_type = other DNA
gcccacatctagctcatctctggaccttggtatctgttttagcattacaacttttcctatattcctttcttcttatacca

SEQ ID NO: 24744 - DNA, 80 bp, synthetic construct
  misc_feature 1..80: note = Artificially Synthesized Probe
  source 1..80: mol_type = other DNA
atgcctgtaatctcagcactttgggaggttgaggcaggaggatcacttgagcccacgagtttaagaccaggctgaaaaat

SEQ ID NO: 24745 - DNA, 80 bp, synthetic construct
  misc_feature 1..80: note = Artificially Synthesized Probe
  source 1..80: mol_type = other DNA
aaaaaactgagcaagtacaagagtacaagtgcaattctcaccattcacctttttaggttaagaagtttttgtggccgggc

SEQ ID NO: 24746 - DNA, 80 bp, synthetic construct
  misc_feature 1..80: note = Artificially Synthesized Probe
  source 1..80: mol_type = other DNA
atttgacttgcttatttgttcaaggttctgagtcaataggacaagcaactactaagccactagagggcgcaacttgccta

SEQ ID NO: 24747 - DNA, 80 bp, synthetic construct
  misc_feature 1..80: note = Artificially Synthesized Probe
  source 1..80: mol_type = other DNA
agcaaacaaaaactgtaaaagaacattactgggacaatttggacacatttgaatatgggctgtattttagataatagtgt

SEQ ID NO: 24748 - DNA, 80 bp, synthetic construct
  misc_feature 1..80: note = Artificially Synthesized Probe
  source 1..80: mol_type = other DNA
ctggtttttggatttccaccagtacttcaaattgtaaaatttttggcctacatatttgtttctatgggcacaattgtctc

SEQ ID NO: 24749 - DNA, 80 bp, synthetic construct
  misc_feature 1..80: note = Artificially Synthesized Probe
  source 1..80: mol_type = other DNA
agggtgagagcactgtccctcagaaagcaggtttataagtacttggagtgtgtatgctggggaggagcagttttataaaa

SEQ ID NO: 24750 - DNA, 80 bp, synthetic construct
  misc_feature 1..80: note = Artificially Synthesized Probe
  source 1..80: mol_type = other DNA
gttcttccccttgggagaatagggccaaaaaaattaaatcccatgggtgcatagattttatgccttctatagtcacattt

SEQ ID NO: 24751 - DNA, 80 bp, synthetic construct
  misc_feature 1..80: note = Artificially Synthesized Probe
  source 1..80: mol_type = other DNA
caaaaaatgaggtgcatgagagggaaggctggcccaactcaccttatggggtgtccaagttgggggtcacggtcttatcg

SEQ ID NO: 24752 - DNA, 80 bp, synthetic construct
  misc_feature 1..80: note = Artificially Synthesized Probe
  source 1..80: mol_type = other DNA
tgattccatttatatgaaatgtccagaacagggaaaacctattttagacaacagagacacaaagtcgatcagcagttgcc

SEQ ID NO: 24753 - DNA, 80 bp, synthetic construct
  misc_feature 1..80: note = Artificially Synthesized Probe
  source 1..80: mol_type = other DNA
ttacaggcgtgagccactgtgcctggccaagccagtgttcttctgacatgagccccatgagcccccaggccaggttctac

SEQ ID NO: 24754 - DNA, 80 bp, synthetic construct
  misc_feature 1..80: note = Artificially Synthesized Probe
  source 1..80: mol_type = other DNA
ttgcattttggggaaacggaggcacagcaactgttggagaagggagccctgggagccctgagtgccgcaggcttctgtgg

SEQ ID NO: 24755 - DNA, 80 bp, synthetic construct
  misc_feature 1..80: note = Artificially Synthesized Probe
  source 1..80: mol_type = other DNA
gacgcccggggatgcgctcaggagttgcaaaacctcatgagcttgctgggagcggggctctgaggacagcccatcagtgg

SEQ ID NO: 24756 - DNA, 80 bp, synthetic construct
  misc_feature 1..80: note = Artificially Synthesized Probe
  source 1..80: mol_type = other DNA
aggagccaccgtgggcttctcccagaatgttctagctcttgttggataaccaagtgcatgcacaggcaaatgaggctggg

SEQ ID NO: 24757 - DNA, 80 bp, synthetic construct
  misc_feature 1..80: note = Artificially Synthesized Probe
  source 1..80: mol_type = other DNA
gtttgagctgcctgtaggtgactgggtacctgtttgaactgcttgtagatgactttgccaacttggtctgacggctgcac

SEQ ID NO: 24758 - DNA, 80 bp, synthetic construct
  misc_feature 1..80: note = Artificially Synthesized Probe
  source 1..80: mol_type = other DNA
catccacctgtcgctcaggaacttggtcctgcgggatgggggagtcaccgagtccccgcagggccccaccgggcccccgc

SEQ ID NO: 24759 - DNA, 80 bp, synthetic construct
  misc_feature 1..80: note = Artificially Synthesized Probe
  source 1..80: mol_type = other DNA
ttgattttcacagcattaagaggctgggaagccccacagcgtgagggcacgtgggcaggagagtggaggcggtgctcaca

SEQ ID NO: 24760 - DNA, 80 bp, synthetic construct
  misc_feature 1..80: note = Artificially Synthesized Probe
  source 1..80: mol_type = other DNA
atgggcaccaagtcacctttcgtgacagattcatctggaaaatgcttttcttttcttttttttttttttgagatggagtt

SEQ ID NO: 24761 - DNA, 80 bp, synthetic construct
  misc_feature 1..80: note = Artificially Synthesized Probe
  source 1..80: mol_type = other DNA
acacctgaggctcgtggccgccgcagtgacactcctcagaactgctgtcttacacatgcaggtcggtggctgactgaggg

SEQ ID NO: 24762 - DNA, 80 bp, synthetic construct
  misc_feature 1..80: note = Artificially Synthesized Probe
  source 1..80: mol_type = other DNA
aagccccgcctggacatgcctcgatattctattatgggagtggccaataccgccgttaacaactgcctgttaatgatctg

SEQ ID NO: 24763 - DNA, 80 bp, synthetic construct
  misc_feature 1..80: note = Artificially Synthesized Probe
  source 1..80: mol_type = other DNA
accacggtgggtaaccaaaaagttcaaaagaaaaacttcttctccagttggagcagccctcgttgctgcccttggtctgt

SEQ ID NO: 24764 - DNA, 80 bp, synthetic construct
  misc_feature 1..80: note = Artificially Synthesized Probe
  source 1..80: mol_type = other DNA
agggaggaaattgttctagagaaatgctctagaaaagcatttcacagagggaacatttgagctgggttctgaagggtgaa

SEQ ID NO: 24765 - DNA, 80 bp, synthetic construct
  misc_feature 1..80: note = Artificially Synthesized Probe
  source 1..80: mol_type = other DNA
cctgggacacaggggcacaccccgatgccggttcccttagggcccagggaagagggttctgtgggattccaaaattgccc

SEQ ID NO: 24766 - DNA, 80 bp, synthetic construct
  misc_feature 1..80: note = Artificially Synthesized Probe
  source 1..80: mol_type = other DNA
ttgggtcccctacgcccctatgcccagccatacccagcggcccctgccaaagcagcttgatgtcctgaagccacagcact

SEQ ID NO: 24767 - DNA, 80 bp, synthetic construct
  misc_feature 1..80: note = Artificially Synthesized Probe
  source 1..80: mol_type = other DNA
tgggacattagagcatctcaggatgaaaaagtcccaagccatgttactggttccctctccttcccactcgaactccaccc

SEQ ID NO: 24768 - DNA, 80 bp, synthetic construct
  misc_feature 1..80: note = Artificially Synthesized Probe
  source 1..80: mol_type = other DNA
acatcccacacacacgcctgaaacacacatacacacacatgcttagacatacaaatctataaaaagcaaatcatgcctgt

SEQ ID NO: 24769 - DNA, 80 bp, synthetic construct
  misc_feature 1..80: note = Artificially Synthesized Probe
  source 1..80: mol_type = other DNA
ccttgggtcctgccccccaggaggcgacccttagacctggggtgaacccagctcccagaggtcctgtgccatggagggag

SEQ ID NO: 24770 - DNA, 80 bp, synthetic construct
  misc_feature 1..80: note = Artificially Synthesized Probe
  source 1..80: mol_type = other DNA
actgagtatgtttgacactcagaccttctgggtttgtccactgtcacttctttctttctattgctgcactgagagtacac

SEQ ID NO: 24771 - DNA, 80 bp, synthetic construct
  misc_feature 1..80: note = Artificially Synthesized Probe
  source 1..80: mol_type = other DNA
gaatgtgcacacgcagccacagaccgggcaaagcatgtgacctgggcacatttatttatttattctggaactacttgctg

SEQ ID NO: 24772 - DNA, 80 bp, synthetic construct
  misc_feature 1..80: note = Artificially Synthesized Probe
  source 1..80: mol_type = other DNA
ggatgaacacacacagtaggctcatacacacactagaatattactcagccctaagagaaatgaattctggcacacgctac

SEQ ID NO: 24773 - DNA, 80 bp, synthetic construct
  misc_feature 1..80: note = Artificially Synthesized Probe
  source 1..80: mol_type = other DNA
ggcagtgaggagaaaactctgcaaatctgactcaagcgcggactttggttaatgtcaacaatggttatgtgatcgtggaa

SEQ ID NO: 24774 - DNA, 80 bp, synthetic construct
  misc_feature 1..80: note = Artificially Synthesized Probe
  source 1..80: mol_type = other DNA
tctcttccccagaaaaatgcacccgctttcagaggttcgtgtcccacgcttttctttctatcccaaccttgtaagaagcc

SEQ ID NO: 24775 - DNA, 80 bp, synthetic construct
  misc_feature 1..80: note = Artificially Synthesized Probe
  source 1..80: mol_type = other DNA
gcgatttgcaaacagccatttcccatccacaatgcagcgaactcaatgctgggcaccgaaacgtgcatctcccccggatt

SEQ ID NO: 24776 - DNA, 80 bp, synthetic construct
  misc_feature 1..80: note = Artificially Synthesized Probe
  source 1..80: mol_type = other DNA
gccccaagtcaggtcacacctcagtgccctgcgtcctgtatccccgataggctcctgaaggctgggcctttccaggatgg

SEQ ID NO: 24777 - DNA, 80 bp, synthetic construct
  misc_feature 1..80: note = Artificially Synthesized Probe
  source 1..80: mol_type = other DNA
cagcagcaactgcggagaaaggagagaataagcccgagtcacagctcagaagaaaaggccaggcagcttctgatccctga

SEQ ID NO: 24778 - DNA, 80 bp, synthetic construct
  misc_feature 1..80: note = Artificially Synthesized Probe
  source 1..80: mol_type = other DNA
tgaaacaaattggcatttcagattttccaaaacaaaagtcaaaaaaccccatcaccaccatcatccaccctacaccaacc

SEQ ID NO: 24779 - DNA, 80 bp, synthetic construct
  misc_feature 1..80: note = Artificially Synthesized Probe
  source 1..80: mol_type = other DNA
caaggggaattggcccccggcctcctagaactttttgttttatgtactttaaaatgtgagtttgagttcttctttgtgga

SEQ ID NO: 24780 - DNA, 80 bp, synthetic construct
  misc_feature 1..80: note = Artificially Synthesized Probe
  source 1..80: mol_type = other DNA
atacagattctcagacttcgcataattcagcttccaaattgttttttccaagtgctctcaggaaccccagaatcaccata

SEQ ID NO: 24781 - DNA, 80 bp, synthetic construct
  misc_feature 1..80: note = Artificially Synthesized Probe
  source 1..80: mol_type = other DNA
atccggtgttaggactcagtcatgggttcacaaaagtagttgttgatcaacaactgaaatgtccagcaccaagcaaccaa

SEQ ID NO: 24782 - DNA, 80 bp, synthetic construct
  misc_feature 1..80: note = Artificially Synthesized Probe
  source 1..80: mol_type = other DNA
cagaaactggtttctcagccctgcttctgtgagcatatctcagttctcccccagcttgctgtctgtgtggttaccttgca

SEQ ID NO: 24783 - DNA, 80 bp, synthetic construct
  misc_feature 1..80: note = Artificially Synthesized Probe
  source 1..80: mol_type = other DNA
gtgagagaaacgcctaaaagacttgttctccatccctccctcaaaccctatgcactgagacattttgcactgtggcgtca

SEQ ID NO: 24784 - DNA, 80 bp, synthetic construct
  misc_feature 1..80: note = Artificially Synthesized Probe
  source 1..80: mol_type = other DNA
agtgaagccactcagacacagagtgatacagacattagggcatgtgctagcatctgcgctttctctggggactttacaaa

SEQ ID NO: 24785 - DNA, 80 bp, synthetic construct
  misc_feature 1..80: note = Artificially Synthesized Probe
  source 1..80: mol_type = other DNA
acccctcttctcagctcctcaaatgctgtgccttacagtgcttgggccccgccaacttcctgctggacctaagagaaagg

SEQ ID NO: 24786 - DNA, 80 bp, synthetic construct
  misc_feature 1..80: note = Artificially Synthesized Probe
  source 1..80: mol_type = other DNA
gagtgaaatgagaaaaggattagaaagtcaggcagtcagtagtggcatttctgctcaagggcccctcccaaggtacccag

SEQ ID NO: 24787 - DNA, 80 bp, synthetic construct
  misc_feature 1..80: note = Artificially Synthesized Probe
  source 1..80: mol_type = other DNA
tgtcatagaatctagatgtggttttctgtactgaaagagcatcagcccttccttagtttcttatgttctgcccggctggg

SEQ ID NO: 24788 - DNA, 80 bp, synthetic construct
  misc_feature 1..80: note = Artificially Synthesized Probe
  source 1..80: mol_type = other DNA
gggaagggagattactcggcacttttcagctaaggagactttctagaagcaggtgctgctgcaggccgcaagcaggtgag

SEQ ID NO: 24789 - DNA, 80 bp, synthetic construct
  misc_feature 1..80: note = Artificially Synthesized Probe
  source 1..80: mol_type = other DNA
gcacagggatcagcctggacaggggctggatggacaggcgtgaccactggcagcatctggcagcactgcccttacaccag

SEQ ID NO: 24790 - DNA, 80 bp, synthetic construct
  misc_feature 1..80: note = Artificially Synthesized Probe
  source 1..80: mol_type = other DNA
gtattgaggctccacaaaaaactaaaaatagaactaccatatgacccaacaatcccgcttctgggtatttacccaaaaga

SEQ ID NO: 24791 - DNA, 80 bp, synthetic construct
  misc_feature 1..80: note = Artificially Synthesized Probe
  source 1..80: mol_type = other DNA
gctcccctacccacaggtatacccacaggtatagtgtctacaaagccaagaggtcaaaccccccagggaccataccccga

SEQ ID NO: 24792 - DNA, 80 bp, synthetic construct
  misc_feature 1..80: note = Artificially Synthesized Probe
  source 1..80: mol_type = other DNA
cttgggggctcactagtggcaggcactagactaagctcgttccatgcatcaagacattaaagcatgtaatctttatggcg

SEQ ID NO: 24793 - DNA, 80 bp, synthetic construct
  misc_feature 1..80: note = Artificially Synthesized Probe
  source 1..80: mol_type = other DNA
cagatctagagcattggaaacaaccttagaaatcatctagggcagcattttcaaacttaaaacaagaaactcagtaagat

SEQ ID NO: 24794 - DNA, 80 bp, synthetic construct
  misc_feature 1..80: note = Artificially Synthesized Probe
  source 1..80: mol_type = other DNA
cccacagggagacaataggtcaaatgatggtcaaatgagatcatttcaatatctgacagttaactaggacagggagaatc

SEQ ID NO: 24795 - DNA, 80 bp, synthetic construct
  misc_feature 1..80: note = Artificially Synthesized Probe
  source 1..80: mol_type = other DNA
attgcactgtgaatgaggagactcagattttagtctgaccatacttcctactaggtaaacgtgcagcaactcaacctgta

SEQ ID NO: 24796 - DNA, 80 bp, synthetic construct
  misc_feature 1..80: note = Artificially Synthesized Probe
  source 1..80: mol_type = other DNA
ttgaaatcagactgtcccaccacctgagcccctgaggaaaaagtgagaggatgtcggttcaagagcctatatcccccaaa

SEQ ID NO: 24797 - DNA, 80 bp, synthetic construct
  misc_feature 1..80: note = Artificially Synthesized Probe
  source 1..80: mol_type = other DNA
gcaattaattaaatattcattgggcatctgctctgtgccgggaactattgaaatggaatgaactctggattgcgtgcagg

SEQ ID NO: 24798 - DNA, 80 bp, synthetic construct
  misc_feature 1..80: note = Artificially Synthesized Probe
  source 1..80: mol_type = other DNA
aaatggggataacaacactacctgtctcattagatggtggtgagggttaaatacgatacttttttttttttttaagtgga

SEQ ID NO: 24799 - DNA, 80 bp, synthetic construct
  misc_feature 1..80: note = Artificially Synthesized Probe
  source 1..80: mol_type = other DNA
gatttacttgaattgcgttgtttgtctgtctgtctctgagccagactatgaacttctgctaacagggatcaggccttaat

SEQ ID NO: 24800 - DNA, 80 bp, synthetic construct
  misc_feature 1..80: note = Artificially Synthesized Probe
  source 1..80: mol_type = other DNA
aaatgtggaatctgccccattattggcttgttttggaacagttttcttaacctctctgagcgtcaattctcctatctgca

SEQ ID NO: 24801 - DNA, 80 bp, synthetic construct
  misc_feature 1..80: note = Artificially Synthesized Probe
  source 1..80: mol_type = other DNA
aactttgaacctagttctgccttcagaagcacaaatcacacagatcctccaatttctatagggcagcctttcaaacctca

SEQ ID NO: 24802 - DNA, 80 bp, synthetic construct
  misc_feature 1..80: note = Artificially Synthesized Probe
  source 1..80: mol_type = other DNA
gctgtggagtcccttctcccaggatcgaaccattatagcaggtcatattcttgactctacaattagctttctttcattga

SEQ ID NO: 24803 - DNA, 80 bp, synthetic construct
  misc_feature 1..80: note = Artificially Synthesized Probe
  source 1..80: mol_type = other DNA
cagggctgtatgatttcttaggggtagcgctttatgagcaaatgtttctcttcttgtatttttatttccattaaagttgt

SEQ ID NO: 24804 - DNA, 80 bp, synthetic construct
  misc_feature 1..80: note = Artificially Synthesized Probe
  source 1..80: mol_type = other DNA
aggcctgtaatcccaacacttggcgaggccaagctagcaggactgcttgagcccaggagttagagaccagcctgggcaac

SEQ ID NO: 24805 - DNA, 80 bp, synthetic construct
  misc_feature 1..80: note = Artificially Synthesized Probe
  source 1..80: mol_type = other DNA
gggttgttaggtagaacttccttggccagtggcttttactctgaatgagatggggaacagctgcagggttttctcttttg

SEQ ID NO: 24806 - DNA, 80 bp, synthetic construct
  misc_feature 1..80: note = Artificially Synthesized Probe
  source 1..80: mol_type = other DNA
cgagggagcaagactctatcaaaaaaaaaaaaaaaaaagatgagattaggacacagacatgtacagagggaagatgccgt

SEQ ID NO: 24807 - DNA, 80 bp, synthetic construct
  misc_feature 1..80: note = Artificially Synthesized Probe
  source 1..80: mol_type = other DNA
acacttattcttacctcttgttgccaacttggacatgtagctttctctggctgactccagggactgatgctgtaacaatc

SEQ ID NO: 24808 - DNA, 80 bp, synthetic construct
  misc_feature 1..80: note = Artificially Synthesized Probe
  source 1..80: mol_type = other DNA
ttattttacaagaaaaaacacgttaaaaatatatgtatatctggagggccgcacacacaaaaatgtcatccacggttact

SEQ ID NO: 24809 - DNA, 80 bp, synthetic construct
  misc_feature 1..80: note = Artificially Synthesized Probe
  source 1..80: mol_type = other DNA
agaggaaatgccacttggattttaaaaccgtcaccgatacgctataggtgaatatttcgctgggattttaaagagacgag

SEQ ID NO: 24810 - DNA, 80 bp, synthetic construct
  misc_feature 1..80: note = Artificially Synthesized Probe
  source 1..80: mol_type = other DNA
atcaacagctgctttcattttgagccctgtgagcaaaagtttcagggctttcctggcacacatacccagtgcatggagag

SEQ ID NO: 24811 - DNA, 80 bp, synthetic construct
  misc_feature 1..80: note = Artificially Synthesized Probe
  source 1..80: mol_type = other DNA
caagtgagccatgactttgacattgcatggccatcttatgttcattcctcaaactttgtcatgttaatgtgtactctctc

SEQ ID NO: 24812 - DNA, 80 bp, synthetic construct
  misc_feature 1..80: note = Artificially Synthesized Probe
  source 1..80: mol_type = other DNA
gatactgtcctttcccttcctctccattgatggtctccaagcctttcttagctttcatcttcccctaaggattccttctc

SEQ ID NO: 24813 - DNA, 80 bp, synthetic construct
  misc_feature 1..80: note = Artificially Synthesized Probe
  source 1..80: mol_type = other DNA
tcggctcaaatgttatttccctgggaaaactgcgctactttcagcaaaatgcatttccttttgatgggcatctgtttttt

SEQ ID NO: 24814 - DNA, 80 bp, synthetic construct
  misc_feature 1..80: note = Artificially Synthesized Probe
  source 1..80: mol_type = other DNA
tggtaatatttctaacttttcagatgctctgtagttcttggcacatttttcactaatatttggtgacaggtctgtccccg

SEQ ID NO: 24815 - DNA, 80 bp, synthetic construct
  misc_feature 1..80: note = Artificially Synthesized Probe
  source 1..80: mol_type = other DNA
gattatgaccaagagccgtatgtctcagatgttgaagggcaatatacctgtgcttcagaaaaatctgccctgtgtgccaa

SEQ ID NO: 24816 - DNA, 80 bp, synthetic construct
  misc_feature 1..80: note = Artificially Synthesized Probe
  source 1..80: mol_type = other DNA
gaaatacagatctcactgtagaaaagagactggaagaaattacagcaactgttagcagtggtttcatctctggtttgtga

SEQ ID NO: 24817 - DNA, 80 bp, synthetic construct
  misc_feature 1..80: note = Artificially Synthesized Probe
  source 1..80: mol_type = other DNA
ccactcagggtttaagattctcctttgatattctaggacatggaccaagttgggatttagggttgctcttgggttaccag

SEQ ID NO: 24818 - DNA, 80 bp, synthetic construct
  misc_feature 1..80: note = Artificially Synthesized Probe
  source 1..80: mol_type = other DNA
aatacctaaagcccctcatatctggaagcagagacctgaaaaagtcatcatttctttttttaaaaggagaaagggagagg

SEQ ID NO: 24819 - DNA, 80 bp, synthetic construct
  misc_feature 1..80: note = Artificially Synthesized Probe
  source 1..80: mol_type = other DNA
gttgtgtgtttgattgcgctagttttaccatggaatgtgccagttgtggctggaagtaattgtcttttcagtggacaaca

SEQ ID NO: 24820 - DNA, 80 bp, synthetic construct
  misc_feature 1..80: note = Artificially Synthesized Probe
  source 1..80: mol_type = other DNA
ttcccctctgtctccattttacgtttatttcctttttattggtttcactatctcttgctttttctcttctccctccaata

SEQ ID NO: 24821 - DNA, 80 bp, synthetic construct
  misc_feature 1..80: note = Artificially Synthesized Probe
  source 1..80: mol_type = other DNA
acactcctgacagcaattgccagggaatattgcttttctggactttgacaccagctccaactttgagaggaatttaagtg

SEQ ID NO: 24822 - DNA, 80 bp, synthetic construct
  misc_feature 1..80: note = Artificially Synthesized Probe
  source 1..80: mol_type = other DNA
agtcccagacctgaaccaggaggcaacggaagatttattacagatgctcattgcggtgcacttttaaaatttatcgtgga

SEQ ID NO: 24823 - DNA, 80 bp, synthetic construct
  misc_feature 1..80: note = Artificially Synthesized Probe
  source 1..80: mol_type = other DNA
atttcccatcatggacactttctcattccagacatttggtaacaaatagaagcatgagaggcgtattacatgccagagtt

SEQ ID NO: 24824 - DNA, 80 bp, synthetic construct
  misc_feature 1..80: note = Artificially Synthesized Probe
  source 1..80: mol_type = other DNA
gaaaccaaggctgagaaccctcacttttctttacccacctttgttcttagccctgccttctgctaaattgtaaccaacaa

SEQ ID NO: 24825 - DNA, 80 bp, synthetic construct
  misc_feature 1..80: note = Artificially Synthesized Probe
  source 1..80: mol_type = other DNA
ttttcaagaacaatgcagatctcccctcctcacccctttttttttcttccaataattaggcctgaaagcagagtgagaga

SEQ ID NO: 24826 - DNA, 80 bp, synthetic construct
  misc_feature 1..80: note = Artificially Synthesized Probe
  source 1..80: mol_type = other DNA
atttactcagctatgcccttattgttagaaatgcaggttatcgttgatttttagtattatagtgctgcagtcaacatcct

SEQ ID NO: 24827 - DNA, 80 bp, synthetic construct
  misc_feature 1..80: note = Artificially Synthesized Probe
  source 1..80: mol_type = other DNA
cctgtgtatttcctattttatgaattgtgtggtgatgacttttgcttatattttgtttatgtgttttagagatgggggtc

SEQ ID NO: 24828 - DNA, 80 bp, synthetic construct
  misc_feature 1..80: note = Artificially Synthesized Probe
  source 1..80: mol_type = other DNA
caaatgtgtttgtatgcactcacacacagtgtgtgcacatgcgggaaagcaagtctagcaaaatttattttatctattta

SEQ ID NO: 24829 - DNA, 80 bp, synthetic construct
  misc_feature 1..80: note = Artificially Synthesized Probe
  source 1..80: mol_type = other DNA
cagctgcaacctgcatattgtttcgaaaataaggttgcttcctgcctacctgcagaccacccacgcccacaggctactag

SEQ ID NO: 24830 - DNA, 80 bp, synthetic construct
  misc_feature 1..80: note = Artificially Synthesized Probe
  source 1..80: mol_type = other DNA
ttagataacagtggccaggcaggaatgatgagagtcatgccacagaaaagatctttagtgaaagacaagagccctacttc

SEQ ID NO: 24831 - DNA, 80 bp, synthetic construct
  misc_feature 1..80: note = Artificially Synthesized Probe
  source 1..80: mol_type = other DNA
ttattataaaattatcaaacacacataagagtggaatagtagaatgagcctctgtgcacctgtcgcacaacatcaacgat

SEQ ID NO: 24832 - DNA, 80 bp, synthetic construct
  misc_feature 1..80: note = Artificially Synthesized Probe
  source 1..80: mol_type = other DNA
tctttacttttctacatgttgaaacaggaagagttgtcctggaaaatagtcctggggtcccccttcagaagaaaagcagt

SEQ ID NO: 24833 - DNA, 80 bp, synthetic construct
  misc_feature 1..80: note = Artificially Synthesized Probe
  source 1..80: mol_type = other DNA
aaattaaacctctgcctacctggaatgccttaatatgaaattatcaggttactctccctcctctatcaggacccttagag

SEQ ID NO: 24834 - DNA, 80 bp, synthetic construct
  misc_feature 1..80: note = Artificially Synthesized Probe
  source 1..80: mol_type = other DNA
ctctgaagtcttgataatttcttgggatatcttagtgcaaaacttggaagccatatggagaaatgctggtgctgatgggg

SEQ ID NO: 24835 - DNA, 80 bp, synthetic construct
  misc_feature 1..80: note = Artificially Synthesized Probe
  source 1..80: mol_type = other DNA
actttctgtgcctcttaccttgtctgtgaaggcgagattaaaaagttgtacttatctcaaaaagttgttgtgaggaataa

SEQ ID NO: 24836 - DNA, 80 bp, synthetic construct
  misc_feature 1..80: note = Artificially Synthesized Probe
  source 1..80: mol_type = other DNA
gcaaacgccagttctttgcctgcaccaaataatttagcacaactgcattctttactgcttcgtgcctctcccctttggca

SEQ ID NO: 24837 - DNA, 80 bp, synthetic construct
  misc_feature 1..80: note = Artificially Synthesized Probe
  source 1..80: mol_type = other DNA
gaaacttcaggctgtggagcatgtaaacaagagtgactgtgggatatcctgctcaggtgattttaaagaaaatagggaca

SEQ ID NO: 24838 - DNA, 80 bp, synthetic construct
  misc_feature 1..80: note = Artificially Synthesized Probe
  source 1..80: mol_type = other DNA
ttttggtgccgtctataatgtgggtgggggcggaaagagaaactcagaatgactgctctgatcattttgtgtgaaatgtc

SEQ ID NO: 24839 - DNA, 80 bp, synthetic construct
  misc_feature 1..80: note = Artificially Synthesized Probe
  source 1..80: mol_type = other DNA
ccatggaggaccatggagtgaccttaaggaatccttctggacaaatatccaaagggctgtgtgcctattcacctgggaga

SEQ ID NO: 24840 - DNA, 80 bp, synthetic construct
  misc_feature 1..80: note = Artificially Synthesized Probe
  source 1..80: mol_type = other DNA
aaccaatatgctaatgacttcagttgatcaaccacagtgtccagtgaagaaaatcagggctcttctcagggtggtggtat

SEQ ID NO: 24841 - DNA, 80 bp, synthetic construct
  misc_feature 1..80: note = Artificially Synthesized Probe
  source 1..80: mol_type = other DNA
ttacccccaatcagcagacaccaccagctccctgcccatcttccttccctctgtttcctcctcttccctataggctgact

SEQ ID NO: 24842 - DNA, 80 bp, synthetic construct
  misc_feature 1..80: note = Artificially Synthesized Probe
  source 1..80: mol_type = other DNA
ttgtttttgggtggggaagctcccatcttggattgtagtgggggtggaagcagaagcaaaaacctagtctagggtgtgga

SEQ ID NO: 24843 - DNA, 80 bp, synthetic construct
  misc_feature 1..80: note = Artificially Synthesized Probe
  source 1..80: mol_type = other DNA
aaagtgagtggaaagaaaacatgttttcatcacaagatcaagaaactggtttggttcttgcaccagccccctcggttgtc

SEQ ID NO: 24844 - DNA, 80 bp, synthetic construct
  misc_feature 1..80: note = Artificially Synthesized Probe
  source 1..80: mol_type = other DNA
agagatagagtgagattccatctaaaacaaacaaaagaaaaaacgaagaaagaaaaggcagctccatggcaggcaggttc

SEQ ID NO: 24845 - DNA, 80 bp, synthetic construct
  misc_feature 1..80: note = Artificially Synthesized Probe
  source 1..80: mol_type = other DNA
gacttcattcaaaactgtcatgataggtagaaggatgattgcaatggggtcttgcagtgggacagaaagattgggctcaa

SEQ ID NO: 24846 - DNA, 80 bp, synthetic construct
  misc_feature 1..80: note = Artificially Synthesized Probe
  source 1..80: mol_type = other DNA
ccccccttccccaccccaaactctgcttataggttcttatatgataatttaaactatatatgatattaaattagcactcc

SEQ ID NO: 24847 - DNA, 80 bp, synthetic construct
  misc_feature 1..80: note = Artificially Synthesized Probe
  source 1..80: mol_type = other DNA
actgtgatgcatttgcgccttcaaaagcagtttttaaaatgcattaaacccaagattgaataccacccagttcggcctct

SEQ ID NO: 24848 - DNA, 80 bp, synthetic construct
  misc_feature 1..80: note = Artificially Synthesized Probe
  source 1..80: mol_type = other DNA
taaaaatacaaaaattagcctggtggggtggtgggtgcctataattccagctactcaggacgctgaagcaggagaatcgt

SEQ ID NO: 24849 - DNA, 80 bp, synthetic construct
  misc_feature 1..80: note = Artificially Synthesized Probe
  source 1..80: mol_type = other DNA
gcaaccaagcactcattgacagatggatggatgagcaaaatgcggcagatgcatacagtggaatattatttggccttgaa

SEQ ID NO: 24850 - DNA, 80 bp, synthetic construct
  misc_feature 1..80: note = Artificially Synthesized Probe
  source 1..80: mol_type = other DNA
ctgagtattttggggctgtatgcttattgttctacttttctgttgaagttattgcagttgctgccctcaaatttttcctg

SEQ ID NO: 24851 - DNA, 80 bp, synthetic construct
  misc_feature 1..80: note = Artificially Synthesized Probe
  source 1..80: mol_type = other DNA
tggcagagctaggatttgaaccttgacagtctggctagaagggaccttactgatcatctctgtccaaatcctccataatg

SEQ ID NO: 24852 - DNA, 80 bp, synthetic construct
  misc_feature 1..80: note = Artificially Synthesized Probe
  source 1..80: mol_type = other DNA
aagctacagtggtcttattgctgtgttttcctaattgtattttgcactgtggctttacacagcccatgtctctggattgt

SEQ ID NO: 24853 - DNA, 80 bp, synthetic construct
  misc_feature 1..80: note = Artificially Synthesized Probe
  source 1..80: mol_type = other DNA
tgctagaatgatcctgccaaaacatataatcatgtatcttttctgctccaagtccttgacctccatctcacttagagcaa

SEQ ID NO: 24854 - DNA, 80 bp, synthetic construct
  misc_feature 1..80: note = Artificially Synthesized Probe
  source 1..80: mol_type = other DNA
gggataaggcaagacaagaagtctaatcagggactgagtcggttagaagtttaaggattgttcctaaatggttatcagct

SEQ ID NO: 24855 - DNA, 80 bp, synthetic construct
  misc_feature 1..80: note = Artificially Synthesized Probe
  source 1..80: mol_type = other DNA
ttttaaataggatacagtgaaatcgctgactacaggtcctctttcgcttagttctcgttttctttagtattctagggcag

SEQ ID NO: 24856 - DNA, 80 bp, synthetic construct
  misc_feature 1..80: note = Artificially Synthesized Probe
  source 1..80: mol_type = other DNA
tcacaccccaggtaagatcaactgctaaaaccaacaatgccttgacatccttctacatgaatccacatcttcctaacatc

SEQ ID NO: 24857 - DNA, 80 bp, synthetic construct
  misc_feature 1..80: note = Artificially Synthesized Probe
  source 1..80: mol_type = other DNA
aaacatttggcaacgtctaaagatattttgagttgtcacaacttggggagtgctactgtcatctagtgggtagaggtcag

SEQ ID NO: 24858 - DNA, 80 bp, synthetic construct
  misc_feature 1..80: note = Artificially Synthesized Probe
  source 1..80: mol_type = other DNA
atttatgatgcagctttccattctccatgtgatgaaaacttgacatgacccaatgctttattgtcctacagtaattcctg

SEQ ID NO: 24859 - DNA, 80 bp, synthetic construct
  misc_feature 1..80: note = Artificially Synthesized Probe
  source 1..80: mol_type = other DNA
agaggcttacagactcattttcaaacagagatggaaaactgggagtcagaagaggtggaggtatatatggacccagccat

SEQ ID NO: 24860 - DNA, 80 bp, synthetic construct
  misc_feature 1..80: note = Artificially Synthesized Probe
  source 1..80: mol_type = other DNA
tgtatgtggagccgagatgtcagagctggagcagagaagaggagcacgcaggtagaactgtctaaaatccaaaacaagct

SEQ ID NO: 24861 - DNA, 80 bp, synthetic construct
  misc_feature 1..80: note = Artificially Synthesized Probe
  source 1..80: mol_type = other DNA
gaagtgaggcaggtgaaggaaggaatcattatgaggttagctactgtggttaacaactggaacttcatcctgctggcaag

SEQ ID NO: 24862 - DNA, 80 bp, synthetic construct
  misc_feature 1..80: note = Artificially Synthesized Probe
  source 1..80: mol_type = other DNA
tggtgtttcctggttttctggggcagaaaatcctattcctaccaccagatcttccctttgctaattcccttctccatgtg

SEQ ID NO: 24863 - DNA, 80 bp, synthetic construct
  misc_feature 1..80: note = Artificially Synthesized Probe
  source 1..80: mol_type = other DNA
tgcctaccttttgggatctcatccgttggtgaacaactgacaggaaaatctgggcacgtctctatttttgaaaagttaat

SEQ ID NO: 24864 - DNA, 80 bp, synthetic construct
  misc_feature 1..80: note = Artificially Synthesized Probe
  source 1..80: mol_type = other DNA
gtttcctcactgtggggatgatccaatgcctttttgtaccccctgaaacagttgaaagccatccccttcatggacaggat

SEQ ID NO: 24865 - DNA, 80 bp, synthetic construct
  misc_feature 1..80: note = Artificially Synthesized Probe
  source 1..80: mol_type = other DNA
caaatagctgagactacaggggggtgtcaccgtgcccagcgaatattttctctctctctcttttttattttttttgtatt

SEQ ID NO: 24866 - DNA, 80 bp, synthetic construct
  misc_feature 1..80: note = Artificially Synthesized Probe
  source 1..80: mol_type = other DNA
ccaaggccagccagggcaacgtagtgagaacctgtatctacaaaaaaagaaaaaattagtcaggcatgatggtgcacccc

SEQ ID NO: 24867 - DNA, 80 bp, synthetic construct
  misc_feature 1..80: note = Artificially Synthesized Probe
  source 1..80: mol_type = other DNA
atagatgggaacatttaacaatacagcatttgcaatgggcaggtgagagctggctaagtttttaaaggggatttcacagg

SEQ ID NO: 24868 - DNA, 80 bp, synthetic construct
  misc_feature 1..80: note = Artificially Synthesized Probe
  source 1..80: mol_type = other DNA
ccaacctattccgagggtgaaaaaaaaagaagattaaatgcgtgtttgcctattttagccaaaatacataggatggacac

SEQ ID NO: 24869 - DNA, 80 bp, synthetic construct
  misc_feature 1..80: note = Artificially Synthesized Probe
  source 1..80: mol_type = other DNA
ctcactgctgcacataaaaacacatccctgcagatgcaggcacacatccatcagcatacaggtgagcatacagtgcacca

SEQ ID NO: 24870 - DNA, 80 bp, synthetic construct
  misc_feature 1..80: note = Artificially Synthesized Probe
  source 1..80: mol_type = other DNA
ggaggagttagtgaaaaaacaaatctcaattcagagtctgtgcgtgacggtgtgctgttcttttagagaatctcatacac

SEQ ID NO: 24871 - DNA, 80 bp, synthetic construct
  misc_feature 1..80: note = Artificially Synthesized Probe
  source 1..80: mol_type = other DNA
cagcagaggctcccacttagaatgttaaaaatattgtggtaaggtgagagcccagatttaaaaagtatttggagaggcaa

SEQ ID NO: 24872 - DNA, 80 bp, synthetic construct
  misc_feature 1..80: note = Artificially Synthesized Probe
  source 1..80: mol_type = other DNA
aacagaagtctagagcatcctgcaaaatgctgttttactttaacctattctttcaaatgtcattcctggatttgcccaag

SEQ ID NO: 24873 - DNA, 80 bp, synthetic construct
  misc_feature 1..80: note = Artificially Synthesized Probe
  source 1..80: mol_type = other DNA
aatcactcaaactgccctgtcccctccactggtttaatttctggtttttgttttgtttttaaaataacattgtttaatac

SEQ ID NO: 24874 - DNA, 80 bp, synthetic construct
  misc_feature 1..80: note = Artificially Synthesized Probe
  source 1..80: mol_type = other DNA
gtaagcctgagaaacgctaaaattgaaaaatgaaatagctcatttggatgagcagagctaggcgattggagggcgaaaca

SEQ ID NO: 24875 - DNA, 80 bp, synthetic construct
  misc_feature 1..80: note = Artificially Synthesized Probe
  source 1..80: mol_type = other DNA
cagaaatcagaagagggatgagttggattgcaacagatggagaaaatgcccactgctgctttataacatattgaaagcaa

SEQ ID NO: 24876 - DNA, 80 bp, synthetic construct
  misc_feature 1..80: note = Artificially Synthesized Probe
  source 1..80: mol_type = other DNA
atttttctttctaacttcactttgcccctaccttggtctctccaagccgaacacaaatggaccagtgaggaaactgcagg

SEQ ID NO: 24877 - DNA, 80 bp, synthetic construct
  misc_feature 1..80: note = Artificially Synthesized Probe
  source 1..80: mol_type = other DNA
tggctgggcgctgctcgtggtggtgacttaaccaggcacatcgtctcatctgccccgtgttctgtcaatgccgggccctc

SEQ ID NO: 24878 - DNA, 80 bp, synthetic construct
  misc_feature 1..80: note = Artificially Synthesized Probe
  source 1..80: mol_type = other DNA
gttttattctgcagctacctccccaggaagtggaggactgtggggcctttgagaaagcacctgccgacagggccaagaaa

SEQ ID NO: 24879 - DNA, 80 bp, synthetic construct
  misc_feature 1..80: note = Artificially Synthesized Probe
  source 1..80: mol_type = other DNA
agctgactgcccgtaattatgtctttttttttttttttttttggagagggagtctggctctgccacccaggctggagtgc

SEQ ID NO: 24880 - DNA, 80 bp, synthetic construct; identical to SEQ ID NO: 24879
  misc_feature 1..80: note = Artificially Synthesized Probe
  source 1..80: mol_type = other DNA

SEQ ID NO: 24881 - DNA, 80 bp, synthetic construct
  misc_feature 1..80: note = Artificially Synthesized Probe
  source 1..80: mol_type = other DNA
tccctgcaagctcttcccctgagaccccactagctctaccttcctacaagcccactttattctatttgtttgtttgtttc

SEQ ID NO: 24882 - DNA, 80 bp, synthetic construct
  misc_feature 1..80: note = Artificially Synthesized Probe
  source 1..80: mol_type = other DNA
ctttctccaagagcacagtagtcactggctgtgatccgcaggagacaggcgaagtcccgggatataggaaccacactggc

SEQ ID NO: 24883 - DNA, 80 bp, synthetic construct
  misc_feature 1..80: note = Artificially Synthesized Probe
  source 1..80: mol_type = other DNA
ctgtgttttcccctcaattttcagatctcagctgatttcctgggagggttctcatgtccctcttggagacctaggaagca

SEQ ID NO: 24884 - DNA, 80 bp, synthetic construct
  misc_feature 1..80: note = Artificially Synthesized Probe
  source 1..80: mol_type = other DNA
aaaacaaacaaaaaaaaacccaggaacatttaacgtgaatgtcagggactttgggatgagtccagggacctagaagtgcg

SEQ ID NO: 24885 - DNA, 80 bp, synthetic construct
  misc_feature 1..80: note = Artificially Synthesized Probe
  source 1..80: mol_type = other DNA
ctgggggagtgtcatgaactgacgtgcggtgcagccagtgactaggcgttgtcggtgcgcggcggcggggcgaagcctcg

SEQ ID NO: 24886 - DNA, 80 bp, synthetic construct
  misc_feature 1..80: note = Artificially Synthesized Probe
  source 1..80: mol_type = other DNA
gctgagatctgaagaatgaataaaaattacctagatcagtggttctcagagtgaagtgtggcctgcagacccttgggagt

SEQ ID NO: 24887 - DNA, 80 bp, synthetic construct
  misc_feature 1..80: note = Artificially Synthesized Probe
  source 1..80: mol_type = other DNA
aatgagaagtagcacacagtactatatgctacagatgaagtacaatgctgtcaaataggggtacttgtgttaattgttgg

SEQ ID NO: 24888 - DNA, 80 bp, synthetic construct
  misc_feature 1..80: note = Artificially Synthesized Probe
  source 1..80: mol_type = other DNA
aggtggtatgcatagttggggatgtgtgttgagtttgctatgtccggtgagcttcccagtggagatgtccaatgggcaga

SEQ ID NO: 24889 - DNA, 80 bp, synthetic construct
  misc_feature 1..80: note = Artificially Synthesized Probe
  source 1..80: mol_type = other DNA
gaagactggaagaggggaaaagaggagaaaaagagtgaagaaggggagggaaaaaattagaaagaataaataaatataag

SEQ ID NO: 24890 - DNA, 80 bp, synthetic construct
  misc_feature 1..80: note = Artificially Synthesized Probe
  source 1..80: mol_type = other DNA
cttcacattttgaccaataattccttgtgctgtatcagatgctgtaggctgatacaaaatggccgccgccctcaaagtca

SEQ ID NO: 24891 - DNA, 80 bp, synthetic construct
  misc_feature 1..80: note = Artificially Synthesized Probe
  source 1..80: mol_type = other DNA
gaatcagaagtaggtgggcaggggtctgggtttgcaaggctctgagtttgagctctgttctgtacctttgaggggatgag

SEQ ID NO: 24892 - DNA, 80 bp, synthetic construct
  misc_feature 1..80: note = Artificially Synthesized Probe
  source 1..80: mol_type = other DNA
cagacacagacacagggagctgcaggctgggggcataagctgggggctgggaagcatagatacagaaatgcacagatgtg

SEQ ID NO: 24893 - DNA, 80 bp, synthetic construct
  misc_feature 1..80: note = Artificially Synthesized Probe
  source 1..80: mol_type = other DNA
ttcaccatcactggtggctagtctcccttcctcctttttcagaaacctccttcctgacctcttttcttcctacttccccg

SEQ ID NO: 24894 - DNA, 80 bp, synthetic construct
  misc_feature 1..80: note = Artificially Synthesized Probe
  source 1..80: mol_type = other DNA
catccggccttatatatctatcttgtctgtctgactgtctaatctaattcatctattttatctgtttatcttatctatca

SEQ ID NO: 24895 - DNA, 80 bp, synthetic construct
  misc_feature 1..80: note = Artificially Synthesized Probe
  source 1..80: mol_type = other DNA
tattaagccctggctacctcctcttccaggcagatggagtaactggaggcagctaacaaagatggagtcacttttcttat

SEQ ID NO: 24896 - DNA, 80 bp, synthetic construct
  misc_feature 1..80: note = Artificially Synthesized Probe
  source 1..80: mol_type = other DNA
gctagactgtcatctctgtcctcaaggggctcaagctagaggaggagagttgagaaaccaaatcactatacacaaagtag

SEQ ID NO: 24897 - DNA, 80 bp, synthetic construct
  misc_feature 1..80: note = Artificially Synthesized Probe
  source 1..80: mol_type = other DNA
ctctcccctttcctctccatctaacttatggttttcaaacttgagcgtgatcagttacctggagatttgtgaaaacccag

SEQ ID NO: 24898 - DNA, 80 bp, synthetic construct
  misc_feature 1..80: note = Artificially Synthesized Probe
  source 1..80: mol_type = other DNA
atcctcctcagcacagaccctttacgggtgtcgggctggggggctgtaaggtctttcccttcccatgaggccatatctca

SEQ ID NO: 24899 - DNA, 80 bp, synthetic construct
  misc_feature 1..80: note = Artificially Synthesized Probe
  source 1..80: mol_type = other DNA
tgcccaggatccagtcccagcatctcagcacggccttcaagcatttccacgtcctggcctggctccatggtctccccgcc

SEQ ID NO: 24900 - DNA, 80 bp, synthetic construct
  misc_feature 1..80: note = Artificially Synthesized Probe
  source 1..80: mol_type = other DNA
ttatcttctgtttttgctcacctgcctctttctcttgcttctgctcctactcattccttccttaatccaacctccaattc

SEQ ID NO: 24901 - DNA, 80 bp, synthetic construct
  misc_feature 1..80: note = Artificially Synthesized Probe
  source 1..80: mol_type = other DNA
cttgagtattgttgctacagacctatgtagataatactttgcacagtgactcatatgtataatcctagcactgtgggagg

SEQ ID NO: 24902 - DNA, 80 bp, synthetic construct
  misc_feature 1..80: note = Artificially Synthesized Probe
  source 1..80: mol_type = other DNA
cgatctgttgcccaggctggagtgcagtgggcatgatcttggctcactgcaagctctgcctcccaggttcaagcaattct

SEQ ID NO: 24903 - DNA, 80 bp, synthetic construct
  misc_feature 1..80: note = Artificially Synthesized Probe
  source 1..80: mol_type = other DNA
agctgggactacagacacgtgccaccatgcccagctaacttttttatttttttattagagacagggttccaccatgctag

SEQ ID NO: 24904 - DNA, 80 bp, synthetic construct
  misc_feature 1..80: note = Artificially Synthesized Probe
  source 1..80: mol_type = other DNA
gatcatcctggctaacacggtgaaaccccgtctctactaaaaataccaaaaaattagccaggcgtggtggcgggcacttg

SEQ ID NO: 24905 - DNA, 80 bp, synthetic construct
  misc_feature 1..80: note = Artificially Synthesized Probe
  source 1..80: mol_type = other DNA
gtgtacacagaaattaaaactacaataccatttataattgctcaaaaaggccaggcatggtggctcacacctgtaattcc

SEQ ID NO: 24906 - DNA, 80 bp, synthetic construct
  misc_feature 1..80: note = Artificially Synthesized Probe
  source 1..80: mol_type = other DNA
atccaattcctataaaaataccagcaagattttttgtagatataaacaagttggccaggtgtagtggcttacacctgtaa

SEQ ID NO: 24907 - DNA, 80 bp, synthetic construct
  misc_feature 1..80: note = Artificially Synthesized Probe
  source 1..80: mol_type = other DNA
acattaaaaccacaataggctatcactaaacctatcagaatggctaaatacaaaattggaacaccaccaaatgctgatga

SEQ ID NO: 24908 - DNA, 80 bp, synthetic construct
  misc_feature 1..80: note = Artificially Synthesized Probe
  source 1..80: mol_type = other DNA
atgttctgtattctgattgtgtcaatgtgagcatactggttgagatatagtgctacagttttgcaagttattaccatcag

SEQ ID NO: 24909 - DNA, 80 bp, synthetic construct
  misc_feature 1..80: note = Artificially Synthesized Probe
  source 1..80: mol_type = other DNA
ttgggaggctgaggcaggagaatcacttgaacccaggaggcgaagttgcagcgagccgagatcacactactgcactccag

SEQ ID NO: 24910 - DNA, 80 bp, synthetic construct
  misc_feature 1..80: note = Artificially Synthesized Probe
  source 1..80: mol_type = other DNA
aaaaaatgttctagtttcttcctcttctttgttcccatgggaatgccaccatcaccagccaaggctcacatacctcccac

SEQ ID NO: 24911 - DNA, 80 bp, synthetic construct
  misc_feature 1..80: note = Artificially Synthesized Probe
  source 1..80: mol_type = other DNA
aggatattaacataaacttatttcttggaccattggaaatgtgtgcctagaactgaggagagaggtcagggctggcagta

SEQ ID NO: 24912 - DNA, 80 bp, synthetic construct
  misc_feature 1..80: note = Artificially Synthesized Probe
  source 1..80: mol_type = other DNA
cacccagaaaatgcacagctaaagagaaaacttcccttggtgatggttattagattttacaagaagaggccaaaggagac

SEQ ID NO: 24913 - DNA, 80 bp, synthetic construct
  misc_feature 1..80: note = Artificially Synthesized Probe
  source 1..80: mol_type = other DNA
ttaaaataattttttttagagacgagggtctcgattggctgcctaggttggtcccagactcctgacgggctgcattttaa

SEQ ID NO: 24914 - DNA, 80 bp, synthetic construct
  misc_feature 1..80: note = Artificially Synthesized Probe
  source 1..80: mol_type = other DNA
agcctcccagtttttttttcttttaaatggggtctcattctgtcgcccagggtggagtgcagtggcatgatcatagctca

SEQ ID NO: 24915 - DNA, 80 bp, synthetic construct
  misc_feature 1..80: note = Artificially Synthesized Probe
  source 1..80: mol_type = other DNA
tatttgtgagctactgtcccagccaggtaaatggatatgatgagacctccttgccagaccgggtttctctgattagaacg

SEQ ID NO: 24916 - DNA, 80 bp, synthetic construct
  misc_feature 1..80: note = Artificially Synthesized Probe
  source 1..80: mol_type = other DNA
agctggagctccaggatagtggcacctggacatgcactgtcttgcagaaccagaagaaggtggagttcaaaatagacatc

SEQ ID NO: 24917 - DNA, 80 bp, synthetic construct
  misc_feature 1..80: note = Artificially Synthesized Probe
  source 1..80: mol_type = other DNA
ttggtttcagcctctgtgaaatggggatgatgttaactgccatagtgactacctcgtattaagttgaggactgatatacg

SEQ ID NO: 24918 - DNA, 80 bp, synthetic construct
  misc_feature 1..80: note = Artificially Synthesized Probe
  source 1..80: mol_type = other DNA
ttctggcttccttatctccttatcatcataacgactctgcaaatagtaatggctaacacttgatgctcagcacgtgtcgg

SEQ ID NO: 24919 - DNA, 80 bp, synthetic construct
  misc_feature 1..80: note = Artificially Synthesized Probe
  source 1..80: mol_type = other DNA
gctcctggcttttctccaaatccagacgcacttacacacacactcacacacatacactctcacacacatgcacacactcc

SEQ ID NO: 24920 - DNA, 80 bp, synthetic construct
  misc_feature 1..80: note = Artificially Synthesized Probe
  source 1..80: mol_type = other DNA
ccctgagtcctctaccaggagatcctgtatatgggaactgattttggcccagctccctctgcccactcgtaagttccctt

SEQ ID NO: 24921 - DNA, 80 bp, synthetic construct
  misc_feature 1..80: note = Artificially Synthesized Probe
  source 1..80: mol_type = other DNA
gctctctagtttccagaggcttaatcacaccgtcctccacgccatttccttttccttcaagcctagcccttctctcatta

SEQ ID NO: 24922 - DNA, 80 bp, synthetic construct
  misc_feature 1..80: note = Artificially Synthesized Probe
  source 1..80: mol_type = other DNA
gggtccatctcagagaatttacgagcagggatgaaggcctccctgtctaaaatccctccttcatcccccgctggtggcag

SEQ ID NO: 24923 - DNA, 80 bp, synthetic construct
  misc_feature 1..80: note = Artificially Synthesized Probe
  source 1..80: mol_type = other DNA
tttcccgaggatactgtaataacgtacaaatgtgaagaaagctttgtgaaaattcctggcgagaaggactcagtgatctg

SEQ ID NO: 24924 - DNA, 80 bp, synthetic construct
  misc_feature 1..80: note = Artificially Synthesized Probe
  source 1..80: mol_type = other DNA
aataagaggcccagtgaagagttgtttgggggctaacacagtaaccgtgtttgatactgatacctagtagaattaaaaga

SEQ ID NO: 24925 - DNA, 80 bp, synthetic construct
  misc_feature 1..80: note = Artificially Synthesized Probe
  source 1..80: mol_type = other DNA
cctattcctgtactgtatggtgctgtgtagttctttagggcagggtaaggaaaccaacatttattgaatgccagaactgg

SEQ ID NO: 24926 - DNA, 80 bp, synthetic construct
  misc_feature 1..80: note = Artificially Synthesized Probe
  source 1..80: mol_type = other DNA
agaaatatcaatggttcagatgatgaatttacatatatgtgcttgataattttttcaaaatttttacctgagctttattg

SEQ ID NO: 24927 - DNA, 80 bp, synthetic construct
  misc_feature 1..80: note = Artificially Synthesized Probe
  source 1..80: mol_type = other DNA
tatcacttgtctcctatacgaaacacagatattggttaggtcatgaacacaaaatctgggaagtactttgaaccctttaa

SEQ ID NO: 24928 - DNA, 80 bp, synthetic construct
  misc_feature 1..80: note = Artificially Synthesized Probe
  source 1..80: mol_type = other DNA
cacaattttgtgtaagaaaatagtgtcaatcagagggtctgtaagacttgaccccatatcctaaaacaagtggcaatgga

SEQ ID NO: 24929 - DNA, 80 bp, synthetic construct
  misc_feature 1..80: note = Artificially Synthesized Probe
  source 1..80: mol_type = other DNA
aaacagtctcccatctgaagccagtattttcacaagcacctgctgtgtcatgaatttgacagaaatgcaaacccacttta

SEQ ID NO: 24930 - DNA, 80 bp, synthetic construct
  misc_feature 1..80: note = Artificially Synthesized Probe
  source 1..80: mol_type = other DNA
tccaccacatccaccataacttgtatccaccctccattgtctgttgggttagaggtgagtatatcagcaggatagaccac

SEQ ID NO: 24931 - DNA, 80 bp, synthetic construct
  misc_feature 1..80: note = Artificially Synthesized Probe
  source 1..80: mol_type = other DNA
catcagaaagattcccaggctggctacttcgggatgacccttgcattttttattgaaatcatttctgaatcttttttccc

SEQ ID NO: 24932 - DNA, 80 bp, synthetic construct
  misc_feature 1..80: note = Artificially Synthesized Probe
  source 1..80: mol_type = other DNA
ctgttctctctcaaaagcatggtacatattaggtttaaactcaagttctatttccctgcccaagtcttctctgactacac

SEQ ID NO: 24933 - DNA, 80 bp, synthetic construct
  misc_feature 1..80: note = Artificially Synthesized Probe
  source 1..80: mol_type = other DNA
agatcagtgaagctggactaaacattgcctagtatcaataggtggcgtttaagtagtggtgaataccaacatgactcaag

SEQ ID NO: 24934 - DNA, 80 bp, synthetic construct
  misc_feature 1..80: note = Artificially Synthesized Probe
  source 1..80: mol_type = other DNA
ttagagcttaaaaaaccatatggaagtacccaagtaggtcatggcaggctgatgcttccattaaaacgactataaaatct

SEQ ID NO: 24935 - DNA, 80 bp, synthetic construct
  misc_feature 1..80: note = Artificially Synthesized Probe
  source 1..80: mol_type = other DNA
actcccaaggaacagaggcaagagcagaagtagatggagtcttactgaaactgaaacccagctcaattcctaataggttg

SEQ ID NO: 24936 - DNA, 80 bp, synthetic construct
  misc_feature 1..80: note = Artificially Synthesized Probe
  source 1..80: mol_type = other DNA
aaacagtgaatgtaatgtcctgtggggtctgaattatacatagaatacaaatgcacaataacaatgcgaaaggcagaaag

SEQ ID NO: 24937 - DNA, 80 bp, synthetic construct
  misc_feature 1..80: note = Artificially Synthesized Probe
  source 1..80: mol_type = other DNA
ctgggctctaagctacaatacattgcaaaagattgaagttattcagagcataccttctagccacagtggaattaaactag

SEQ ID NO: 24938 - DNA, 80 bp, synthetic construct
  misc_feature 1..80: note = Artificially Synthesized Probe
  source 1..80: mol_type = other DNA
tagaaaaggctgtgactgtctctgttggcttagttgttctagaacaacatcctgttgttctttagtattagcacaaaaga

SEQ ID NO: 24939 - DNA, 80 bp, synthetic construct
  misc_feature 1..80: note = Artificially Synthesized Probe
  source 1..80: mol_type = other DNA
tgttccagctacaggagtctcatcaacacctcaaagacacaccatagtaaatgtttcagctacaggaaccctaccaactc

SEQ ID NO: 24940 - DNA, 80 bp, synthetic construct
  misc_feature 1..80: note = Artificially Synthesized Probe
  source 1..80: mol_type = other DNA
ttttctccctctaaggcaattactgccctgaaactgatgtgcttacttcctgtctgttttcattcttatactccatgttt

SEQ ID NO: 24941 - DNA, 80 bp, synthetic construct
  misc_feature 1..80: note = Artificially Synthesized Probe
  source 1..80: mol_type = other DNA
tggcactcttgagtcaatgtgttcacctcgcttaggagagcagcttatttattgttataaatatgcttatctgaaagtaa

SEQ ID NO: 24942 - DNA, 80 bp, synthetic construct
  misc_feature 1..80: note = Artificially Synthesized Probe
  source 1..80: mol_type = other DNA
atcacacattattgctaactatactcaccctactctgctattgaatattagaatgtaatccttctatctaattgtatgtt

SEQ ID NO: 24943 - DNA, 80 bp, synthetic construct
  misc_feature 1..80: note = Artificially Synthesized Probe
  source 1..80: mol_type = other DNA
tttgtctaaaaatggccattctaactgaggttaagaactgatagctcattgtggagcttgatttgcatttccatgatgat

SEQ ID NO: 24944 - DNA, 80 bp, synthetic construct
  misc_feature 1..80: note = Artificially Synthesized Probe
  source 1..80: mol_type = other DNA
taaaatcgtatcattaaaaaagagggacaatttgacttcctctattccagtttggatgccttttatttctttcttttgcc

SEQ ID NO: 24945 - DNA, 80 bp, synthetic construct
  misc_feature 1..80: note = Artificially Synthesized Probe
  source 1..80: mol_type = other DNA
ggtctgttcagattttctgtttcttcctgactcagtcttgatagggagcatgtctccaagaatttattcatttcctctag

SEQ ID NO: 24946 - DNA, 80 bp, synthetic construct
  misc_feature 1..80: note = Artificially Synthesized Probe
  source 1..80: mol_type = other DNA
caatgtgttttcacagatgagatgaatttcttgaaagaaacgtatagttgggttgtgtttttgcatccattcagccagta

SEQ ID NO: 24947 - DNA, 80 bp, synthetic construct
  misc_feature 1..80: note = Artificially Synthesized Probe
  source 1..80: mol_type = other DNA
ccgcaccgggccagagaagacctttttaaattgtatctacttggtgatctctgagcctcctgtgtcaggatgtctacatt

SEQ ID NO: 24948 - DNA, 80 bp, synthetic construct
  misc_feature 1..80: note = Artificially Synthesized Probe
  source 1..80: mol_type = other DNA
ttttttcacgtttcctgcatcctgaagttgatatctgtgcatctgatgtgatatttgctgtttctaatttttcaaatttg

SEQ ID NO: 24949 - DNA, 80 bp, synthetic construct
  misc_feature 1..80: note = Artificially Synthesized Probe
  source 1..80: mol_type = other DNA
tgtctccaggcagcttcctatgttagatctagagcctacgagaatcaagggactcctgtagctaggattgtgggagtctt

SEQ ID NO: 24950 - DNA, 80 bp, synthetic construct
  misc_feature 1..80: note = Artificially Synthesized Probe
  source 1..80: mol_type = other DNA
aaacacattttttttcttccaccttttattttaggtttgggaggtacaggtgaaggtttgttacatgggtaaattgtgtg

SEQ ID NO: 24951 - DNA, 80 bp, synthetic construct
  misc_feature 1..80: note = Artificially Synthesized Probe
  source 1..80: mol_type = other DNA
ttttctctgttgatatatatttttttgccatgcagaagcactttagtttaattatgtcccacttgtcaatttttgttttt

SEQ ID NO: 24952 - DNA, 80 bp, synthetic construct
  misc_feature 1..80: note = Artificially Synthesized Probe
  source 1..80: mol_type = other DNA
gaagctttactgatgttgtttaacagttctaaaagcttttgggcagactatggagtattctaggtttaaactcatatcat

SEQ ID NO: 24953 - DNA, 80 bp, synthetic construct
  misc_feature 1..80: note = Artificially Synthesized Probe
  source 1..80: mol_type = other DNA
tggggttggtggtaatgtcccctttgtcatctgagattgtgtttatttggatgttctctctctttattaatctagctagt

SEQ ID NO: 24954 - DNA, 80 bp, synthetic construct
  misc_feature 1..80: note = Artificially Synthesized Probe
  source 1..80: mol_type = other DNA
actgttggaattcactttgttttaaatagaaataaatgtgtttcaaatgaaagtctgatgatttaatgatcacaaaagtg

SEQ ID NO: 24955 - DNA, 80 bp, synthetic construct
  misc_feature 1..80: note = Artificially Synthesized Probe
  source 1..80: mol_type = other DNA
ttgtggggggtggggggtgcgttaattcttgctctcttctcaccaaagacctttttagacatttttttttgatcatcctc

SEQ ID NO: 24956 - DNA, 80 bp, synthetic construct
  misc_feature 1..80: note = Artificially Synthesized Probe
  source 1..80: mol_type = other DNA
ccaggtactttaaaagatagaaagatgctcatcctagtgacagaccaagagacaatacaacccaaattggacaattaagg

SEQ ID NO: 24957 - DNA, 80 bp, synthetic construct
  misc_feature 1..80: note = Artificially Synthesized Probe
  source 1..80: mol_type = other DNA
tagctctgcaagttagaccttttgaagtgtctgggtcatcccacatttcttcaaaaaagatgatgtgcatcctctaggtc

SEQ ID NO: 24958 - DNA, 80 bp, synthetic construct
  misc_feature 1..80: note = Artificially Synthesized Probe
  source 1..80: mol_type = other DNA
aagatattgaaagtggtggaattagtgggaactggtgacagaaagggggaaacccaaaattttttaggagctgtgattta

SEQ ID NO: 24959 - DNA, 80 bp, synthetic construct
  misc_feature 1..80: note = Artificially Synthesized Probe
  source 1..80: mol_type = other DNA
aatgtaattttaattgctcatgtttctattaactgtgttaccatatcttttccccttcaaggatttcttgctggtactct

SEQ ID NO: 24960 - DNA, 80 bp, synthetic construct
  misc_feature 1..80: note = Artificially Synthesized Probe
  source 1..80: mol_type = other DNA
tacataatgttaagtataaatgtcacgattggctctgatgtgtcctgtagacagatgatgatttaaatcgaccctcttct

SEQ ID NO: 24961 - DNA, 80 bp, synthetic construct
  misc_feature 1..80: note = Artificially Synthesized Probe
  source 1..80: mol_type = other DNA
ttgtatgtcctattaaggacataaagtactggaacatcgaaggagggaatacagtaatttctgcttatcctcggttgggg

SEQ ID NO: 24962 - DNA, 80 bp, synthetic construct
  misc_feature 1..80: note = Artificially Synthesized Probe
  source 1..80: mol_type = other DNA
acatttctgtatcttgcaaaatatccattaatacccttggctagggggttcttcatgacttttaaaggataatagaggct

SEQ ID NO: 24963 - DNA, 80 bp, synthetic construct
  misc_feature 1..80: note = Artificially Synthesized Probe
  source 1..80: mol_type = other DNA
tgacaggtttgcttgggacgctagtaaccatgggcttgctgacttagccaaagaagagttaagaagaaaatacacacaag

SEQ ID NO: 24964 - DNA, 80 bp, synthetic construct
  misc_feature 1..80: note = Artificially Synthesized Probe
  source 1..80: mol_type = other DNA
ttcttaaacgtgactactttatttctaaataagaaattccctacctgcttcctacaagcagttcagaatgccatgccttg

SEQ ID NO: 24965 - DNA, 80 bp, synthetic construct
  misc_feature 1..80: note = Artificially Synthesized Probe
  source 1..80: mol_type = other DNA
gagcaagggctagactatgtcatgtgttctgtgtagaagtgaaaatttgtaagctctagactttttattctgctcgatct

SEQ ID NO: 24966 - DNA, 80 bp, synthetic construct
  misc_feature 1..80: note = Artificially Synthesized Probe
  source 1..80: mol_type = other DNA
ttctcagggacatatacatcaaggtcatcataaaaatgatgacacatgaggaggtgttatgtttgaagacaggcagagaa

SEQ ID NO: 24967 - DNA, 80 bp, synthetic construct
  misc_feature 1..80: note = Artificially Synthesized Probe
  source 1..80: mol_type = other DNA
ctacactgagttgatgaaagtgactgtagtaacctagtaagtcatgtgctaaagataacagaaccacagaaaggaaggag

SEQ ID NO: 24968 - DNA, 80 bp, synthetic construct
  misc_feature 1..80: note = Artificially Synthesized Probe
  source 1..80: mol_type = other DNA
tttctaccatcctatcaccaaaggatggctccccttccttttgaccttttcctcttttaggaactacacctttcaaaggc

SEQ ID NO: 24969 - DNA, 80 bp, synthetic construct
  misc_feature 1..80: note = Artificially Synthesized Probe
  source 1..80: mol_type = other DNA
acagtggagcattatgcagctctgaaaaaagaatgaggaatatctgtatgaactattatgaagtatttctaggatatatt

SEQ ID NO: 24970 - DNA, 80 bp, synthetic construct
  misc_feature 1..80: note = Artificially Synthesized Probe
  source 1..80: mol_type = other DNA
gggaatttgctcatgcaattatagaaacctagaagtcccataatatgccatcttcaagctggaatcccaggaaagcaggt

SEQ ID NO: 24971 - DNA, 80 bp, synthetic construct
  misc_feature 1..80: note = Artificially Synthesized Probe
  source 1..80: mol_type = other DNA
gtgtgatcttcgctcactgcaacctctgcctcctgagttcaagcaattctcctgcctcagccttcggagtagctgggatt

SEQ ID NO: 24972 - DNA, 80 bp, synthetic construct
  misc_feature 1..80: note = Artificially Synthesized Probe
  source 1..80: mol_type = other DNA
tatggcaggcaactttatgccaataaattcaataaactggggatcacgattatgatcaacattcacttttgaaagggcca

SEQ ID NO: 24973 - DNA, 80 bp, synthetic construct
  misc_feature 1..80: note = Artificially Synthesized Probe
  source 1..80: mol_type = other DNA
gaagaaagtcgtttttattggtagatgacatgaccaagtattaatacatagaaagcttaaagagtctactagaactaata

SEQ ID NO: 24974 - DNA, 80 bp, synthetic construct
  misc_feature 1..80: note = Artificially Synthesized Probe
  source 1..80: mol_type = other DNA
agttatgtgatatttatttggaggtcagaattaaggtgtaggtcaacttcctactgctgcttctatttccagcaagataa

SEQ ID NO: 24975 - DNA, 80 bp, synthetic construct
  misc_feature 1..80: note = Artificially Synthesized Probe
  source 1..80: mol_type = other DNA
tgggcagagctgcccgccagtcgcacgctgcggcgtgggcactcctcagcccttgggcagtcgatgggaccaggcgtggc

SEQ ID NO: 24976 - DNA, 80 bp, synthetic construct
  misc_feature 1..80: note = Artificially Synthesized Probe
  source 1..80: mol_type = other DNA
cttacagagaagaatatagcaatctggggaagcagaccacacttactgaaagtagcactgcagaagtagtgtttattaat

SEQ ID NO: 24977 - DNA, 80 bp, synthetic construct
  misc_feature 1..80: note = Artificially Synthesized Probe
  source 1..80: mol_type = other DNA
gctgtgtgggaaaagggatagattcatatatacttgttcttgagagcagacatgttgttaacaatgaatgaaatggaaac

SEQ ID NO: 24978 - DNA, 80 bp, synthetic construct
  misc_feature 1..80: note = Artificially Synthesized Probe
  source 1..80: mol_type = other DNA
agtgaaggttttacacaactacaatgccactcctatgggctgacagctgtaaagagatgcatcccaattctagagatgtt

SEQ ID NO: 24979 - DNA, 80 bp, synthetic construct
  misc_feature 1..80: note = Artificially Synthesized Probe
  source 1..80: mol_type = other DNA
tcacaaaatgcttgaggatggcactgcgtcctgggtctgtacagtatggtttgcaataaaactcaaaatcttccagccga

SEQ ID NO: 24980 - DNA, 80 bp, synthetic construct
  misc_feature 1..80: note = Artificially Synthesized Probe
  source 1..80: mol_type = other DNA
gtaacttttaggaatgaagttcatgcagtgttctaatttataaaacaaacattagttttcagtcaaccattggcatatga

SEQ ID NO: 24981 - DNA, 80 bp, synthetic construct
  misc_feature 1..80: note = Artificially Synthesized Probe
  source 1..80: mol_type = other DNA
cctggtgactgtagagcctttactttttccccagcaggtgtgttttcttataccatgaccaaatatgaagaattagaaag

SEQ ID NO: 24982 - DNA, 80 bp, synthetic construct
  misc_feature 1..80: note = Artificially Synthesized Probe
  source 1..80: mol_type = other DNA
gtctttctgattgcctgcttggcacaaggttcaagagggaagcacatactcggaagaaaaaaaaaaaatccttccattca

SEQ ID NO: 24983 - DNA, 80 bp, synthetic construct
  misc_feature 1..80: note = Artificially Synthesized Probe
  source 1..80: mol_type = other DNA
gttggtgtgctgcacccattaactcatcatttacattaggtatttctcctaatgctatccctccccgctctccccacccc

SEQ ID NO: 24984 - DNA, 80 bp, synthetic construct
  misc_feature 1..80: note = Artificially Synthesized Probe
  source 1..80: mol_type = other DNA
gccaccaagcacagctatcaatactatttttatcaataaataagtatagattttgctttaattcagatgttacattaatt

SEQ ID NO: 24985 - DNA, 80 bp, synthetic construct
  misc_feature 1..80: note = Artificially Synthesized Probe
  source 1..80: mol_type = other DNA
gagccaccgcacccggcgaccttttctactatatcaggtgatgttccaggctgtagcacattgatataatcttattttct

SEQ ID NO: 24986 - DNA, 80 bp, synthetic construct
  misc_feature 1..80: note = Artificially Synthesized Probe
  source 1..80: mol_type = other DNA
atttgaaaagagttgacatatttccactaaggattcttcttttccaggaacaggaataaggacaacttgacactttgatc

SEQ ID NO: 24987 - DNA, 80 bp, synthetic construct
  misc_feature 1..80: note = Artificially Synthesized Probe
  source 1..80: mol_type = other DNA
ttttgctcatttgttttttcaatgaaaatctactgagggcatagcaagtttctaggtactgttccaatatttagtatata

SEQ ID NO: 24988 - DNA, 80 bp, synthetic construct
  misc_feature 1..80: note = Artificially Synthesized Probe
  source 1..80: mol_type = other DNA
ctctcttgaatccaatctaattaagccccctttcccatcaccccaccaaaatggctcttgtcaaaattactgatgacttc

SEQ ID NO: 24989 - DNA, 80 bp, synthetic construct
  misc_feature 1..80: note = Artificially Synthesized Probe
  source 1..80: mol_type = other DNA
attttatgtatcccccaactagaacacaagcatcatgaggagctctgtttattttattcgttgctgaattctttgtggct

SEQ ID NO: 24990 - DNA, 80 bp, synthetic construct
  misc_feature 1..80: note = Artificially Synthesized Probe
  source 1..80: mol_type = other DNA
tcaaaactgagaaagaagagtgtgtagaagggactaatggatggtgagtaaagtgctggaatcaatctaaaggtcttatt

SEQ ID NO: 24991 - DNA, 80 bp, synthetic construct
  misc_feature 1..80: note = Artificially Synthesized Probe
  source 1..80: mol_type = other DNA
gcctcttcttctgctggtagtattaatctcaaggacaaagtcaaaagtatttataaggattcaaagaggtgctcatagag

SEQ ID NO: 24992 - DNA, 80 bp, synthetic construct
  misc_feature 1..80: note = Artificially Synthesized Probe
  source 1..80: mol_type = other DNA
ctggcaccgtggtctctccaacgtgggagcaagccagagtggaaggaagcccaggcctcagccccccacacccgacatgg

SEQ ID NO: 24993 - DNA, 80 bp, synthetic construct
  misc_feature 1..80: note = Artificially Synthesized Probe
  source 1..80: mol_type = other DNA
gtgaaaacattcctccagacctcttcctttggatttgggagtgtctgcctttcaaaaggccccagggggctctgtggcag

SEQ ID NO: 24994 - DNA, 80 bp, synthetic construct
  misc_feature 1..80: note = Artificially Synthesized Probe
  source 1..80: mol_type = other DNA
agtcagcagcaccctgggggccaggcaggggctcttagctcgggtgactgtgaccaaggccaagaagggaagtggctccc

SEQ ID NO: 24995 - DNA, 80 bp, synthetic construct
  misc_feature 1..80: note = Artificially Synthesized Probe
  source 1..80: mol_type = other DNA
ccacgtcttctgggacggggatggggtgggaggacaaagagccagctttgagaacgcccccgagagccggaagtgggccg

SEQ ID NO: 24996 - DNA, 80 bp, synthetic construct
  misc_feature 1..80: note = Artificially Synthesized Probe
  source 1..80: mol_type = other DNA
gaggggactcaggtcctgctggccgaggaccaagaaccccagggaaggtggccatggtttggaggctgctgccgctgcct

SEQ ID NO: 24997 - DNA, 80 bp, synthetic construct
  misc_feature 1..80: note = Artificially Synthesized Probe
  source 1..80: mol_type = other DNA
agggtcctggaagcctcccaccctgcccaccccaactcagcatcttcctctgtagcccctgtcactgggacgatgcagac

SEQ ID NO: 24998 - DNA, 80 bp, synthetic construct
  misc_feature 1..80: note = Artificially Synthesized Probe
  source 1..80: mol_type = other DNA
gcatttttaaaaccagaaaattcaggatgtgcttttggggtcactacgagtgcccctctccacctggctcttggacttgg

SEQ ID NO: 24999 - DNA, 80 bp, synthetic construct
  misc_feature 1..80: note = Artificially Synthesized Probe
  source 1..80: mol_type = other DNA
ccgctgtatgaattacggatacatctccagctgctcttgatggactggagctgaactctcgcatcccggggttcagttcc

SEQ ID NO: 25000 - DNA, 80 bp, synthetic construct
  misc_feature 1..80: note = Artificially Synthesized Probe
  source 1..80: mol_type = other DNA
cgttaggctgcacgctcgggcgtgatttttgtgtgcgtgttcgccgacgctgagtagatggaggtgaaggtgaactgcct

SEQ ID NO: 25001 - DNA, 80 bp, synthetic construct
  misc_feature 1..80: note = Artificially Synthesized Probe
  source 1..80: mol_type = other DNA
gttatgtgcccatttaactggagggcagacagaggtcccgtggaggagcggcttggttctgccagggaggagcatgctgc

SEQ ID NO: 25002 - DNA, 80 bp, synthetic construct
  misc_feature 1..80: note = Artificially Synthesized Probe
  source 1..80: mol_type = other DNA
cgtgcctgtggtcccagctgcttggaaggctgaggtgggaggatcccccgagaggtcgacactgccgtgcgccgtgattg

SEQ ID NO: 25003 - DNA, 80 bp, synthetic construct
  misc_feature 1..80: note = Artificially Synthesized Probe
  source 1..80: mol_type = other DNA
caggaagcaaaatttccttttatttgccccaaatcctcctttagactttgagaaccagtccttgtatcccttacatcaaa

SEQ ID NO: 25004 - DNA, 80 bp, synthetic construct
  misc_feature 1..80: note = Artificially Synthesized Probe
  source 1..80: mol_type = other DNA
ttcaaacccaaaaatctgagcctgggagtggaggtttttcaggggtcttgttctcccccaaaagcaaatgacttctccct

SEQ ID NO: 25005 - DNA, 80 bp, synthetic construct
  misc_feature 1..80: note = Artificially Synthesized Probe
  source 1..80: mol_type = other DNA
cccgcgcatcctctgttttatcctgcccttgcatcctctgtcttatcctgtccgtgcgtcctctgttttatccttcccct

SEQ ID NO: 25006 - DNA, 80 bp, synthetic construct
  misc_feature 1..80: note = Artificially Synthesized Probe
  source 1..80: mol_type = other DNA
ccccagggcagggacccaagctcactggtgtgctaggtgcccagcacagagtaggtgctctgtaaatgcttacccagcgc

SEQ ID NO: 25007 - DNA, 80 bp, synthetic construct
  misc_feature 1..80: note = Artificially Synthesized Probe
  source 1..80: mol_type = other DNA
taggtgctctgtaaaagctcacccagcgcacagaaggtgctctgtaaacgcttacccagagcacagtaggtgctctgtaa

SEQ ID NO: 25008 - DNA, 80 bp, synthetic construct
  misc_feature 1..80: note = Artificially Synthesized Probe
  source 1..80: mol_type = other DNA
tcgcggtgtacaatctgaccctgcaggtggcggacatgtctggagacggcctcacagccactgcctcagccatcatcacc

SEQ ID NO: 25009 - DNA, 80 bp, synthetic construct
  misc_feature 1..80: note = Artificially Synthesized Probe
  source 1..80: mol_type = other DNA
ggcacacacacatgccggcacacacagatgcccacacacagatgccggcacacacacatgccggcacacacagatgccca

SEQ ID NO: 25010 - DNA, 80 bp, synthetic construct
  misc_feature 1..80: note = Artificially Synthesized Probe
  source 1..80: mol_type = other DNA
caccactttgctctgtccagccttcctcctttcatatggaatccatgtacaaaatcacagctgcacacctgtgtcagtcc

SEQ ID NO: 25011 - DNA, 80 bp, synthetic construct
  misc_feature 1..80: note = Artificially Synthesized Probe
  source 1..80: mol_type = other DNA
tcgggtgcccctgatccctgggctctgagggtcagagggtgtaggggccatttgctgtgtgggttcctgaaggtctggag

SEQ ID NO: 25012 - DNA, 80 bp, synthetic construct
  misc_feature 1..80: note = Artificially Synthesized Probe
  source 1..80: mol_type = other DNA
tgtgctgtgcatgcccatgtatgtgtatgtggtgtgtgcatgcatgtggcatgtaaggctgtgtgtgcgtgtgtatatgt

SEQ ID NO: 25013 - DNA, 80 bp, synthetic construct
  misc_feature 1..80: note = Artificially Synthesized Probe
  source 1..80: mol_type = other DNA
ccagaggacggtgggggtgggggggacccaggcccaggatctcgggatccccaccctgtctcggcgcgaggagggcaggc

SEQ ID NO: 25014 - DNA, 80 bp, synthetic construct
  misc_feature 1..80: note = Artificially Synthesized Probe
  source 1..80: mol_type = other DNA
ccctaacctcgcggcttcctccccaaccccggctcctccatgccagacacgccctttccccaactgccgccccctcaacc

SEQ ID NO: 25015 - DNA, 80 bp, synthetic construct
  misc_feature 1..80: note = Artificially Synthesized Probe
  source 1..80: mol_type = other DNA
ggctgtcagcggaatcagggcctccatagaagaccctctggacacagcgttaatgattccctgccatccacaggatgaat

SEQ ID NO: 25016 - DNA, 80 bp, synthetic construct
  misc_feature 1..80: note = Artificially Synthesized Probe
  source 1..80: mol_type = other DNA
ctcatctatgactacgagggtgacggctcggtggcggggacgctgagctccatcctgtccagccagggcgatgaggacca

SEQ ID NO: 25017 - DNA, 80 bp, synthetic construct
  misc_feature 1..80: note = Artificially Synthesized Probe
  source 1..80: mol_type = other DNA
aggttgtgtttgaacaccttctgtgggtctgtgtcatttccaagttgaagaatttcagccaaagagcaacatgtcacatt

SEQ ID NO: 25018 - DNA, 80 bp, synthetic construct
  misc_feature 1..80: note = Artificially Synthesized Probe
  source 1..80: mol_type = other DNA
aagggactctagtcgttggccttcttggagaaatgagcttatcatttatcctgttgtatgtatgtatcaagtcccaaatc

SEQ ID NO: 25019 - DNA, 80 bp, synthetic construct
  misc_feature 1..80: note = Artificially Synthesized Probe
  source 1..80: mol_type = other DNA
tgtaaattcaaaaatcctttcaaggtgggagggcaaatagaataagaaaaggcacagaggcagaagggacctatgtaagt

SEQ ID NO: 25020 - DNA, 80 bp, synthetic construct
  misc_feature 1..80: note = Artificially Synthesized Probe
  source 1..80: mol_type = other DNA
gcaaggggctatggcagaggctgtggtcatgatgcaatgggttattctgggtagtaaagaatcagggttctatgcatagg

SEQ ID NO: 25021 - DNA, 80 bp, synthetic construct
  misc_feature 1..80: note = Artificially Synthesized Probe
  source 1..80: mol_type = other DNA
aaaaaaaatgaaaatacaacttcagaccctggattagcaggaataaagctcattttgtatcacatactaaggttgactgg

SEQ ID NO: 25022 - DNA, 80 bp, synthetic construct
  misc_feature 1..80: note = Artificially Synthesized Probe
  source 1..80: mol_type = other DNA
ctcattgttcaattcccacctatgagtgagaacatgcagtgtttggtgttatgtccttgtgatagtttgctgagaatgat

SEQ ID NO: 25023 - DNA, 80 bp, synthetic construct
  misc_feature 1..80: note = Artificially Synthesized Probe
  source 1..80: mol_type = other DNA
ggtgtaaggaatggatccagtttcagctttctacatatgcctagccagttttcccagcaccatttattaaatagggaatc

SEQ ID NO: 25024 - DNA, 80 bp, synthetic construct
  misc_feature 1..80: note = Artificially Synthesized Probe
  source 1..80: mol_type = other DNA
ttcagtttgccagtattttactgaggattttcacatcgatgttcatcaaggatactggtctaaaattctctgtttttgtt

SEQ ID NO: 25025 - DNA, 80 bp, synthetic construct
  misc_feature 1..80: note = Artificially Synthesized Probe
  source 1..80: mol_type = other DNA
cactgtggtctgagagacagtttgttgtgatttctgttcttttacatttgctgaggagtgcttaacttccaattatatgg

SEQ ID NO: 25026 - DNA, 80 bp, synthetic construct
  misc_feature 1..80: note = Artificially Synthesized Probe
  source 1..80: mol_type = other DNA
cgttgaatattggcccccactctcttctggcttgtagggtttctgtagagagatccactgttagtctgatgggcttccct

SEQ ID NO: 25027 - DNA, 80 bp, synthetic construct
  misc_feature 1..80: note = Artificially Synthesized Probe
  source 1..80: mol_type = other DNA
gcaaggagctgcaatcctttggaggagaagaggcattctggtttttagaattttcagcttttctgctctggtttctctcc

SEQ ID NO: 25028 - DNA, 80 bp, synthetic construct
  misc_feature 1..80: note = Artificially Synthesized Probe
  source 1..80: mol_type = other DNA
tatgtgtcagaagattggagagtacctgggactgagcttctgtagacctgattctgggtttcaaatctgctgcttgttag

SEQ ID NO: 25029 - DNA, 80 bp, synthetic construct
  misc_feature 1..80: note = Artificially Synthesized Probe
  source 1..80: mol_type = other DNA
ctttagctgagtactgatcagtgtatttatatgaaggaactactcaaggctggggaaagaaccacctaaaaagattagag

SEQ ID NO: 25030 - DNA, 80 bp, synthetic construct
  misc_feature 1..80: note = Artificially Synthesized Probe
  source 1..80: mol_type = other DNA
aaattacttaaaagtaataagagaatatcttaaaagcacccagagaaaaaagaatacaaacattcaatggaacaaggaag

SEQ ID NO: 25031 - DNA, 80 bp, synthetic construct
  misc_feature 1..80: note = Artificially Synthesized Probe
  source 1..80: mol_type = other DNA
taacaaaaagatctcaaattaatggcatcagcttccaccttaatgaaaacagaacacgaacaaaaacacagtgtaggaag

SEQ ID NO: 25032 - DNA, 80 bp, synthetic construct
  misc_feature 1..80: note = Artificially Synthesized Probe
  source 1..80: mol_type = other DNA
atatcaaaaatatgaaatgcttagggaaaattttgtaagaactatacactgaaaactaaaacacattgctgaacgaaatt

SEQ ID NO: 25033 - DNA, 80 bp, synthetic construct
  misc_feature 1..80: note = Artificially Synthesized Probe
  source 1..80: mol_type = other DNA
ctctcaaaaattggagtaagtcttctcaaacactgccactgttttatcaactatgtttatggaatattctaaatccttgc

SEQ ID NO: 25034 - DNA, 80 bp, synthetic construct
  misc_feature 1..80: note = Artificially Synthesized Probe
  source 1..80: mol_type = other DNA
tgtctcccaaaagaaggctgtttcatctacattgaaaagtttgtttagtgtagccactttcattaaggatctcagatctt

SEQ ID NO: 25035 - DNA, 80 bp, synthetic construct
  misc_feature 1..80: note = Artificially Synthesized Probe
  source 1..80: mol_type = other DNA
ttaccttaaaaaggcatagagctaaatgcaaaagctaaaactataaaatttgggaaatgaaaaaaacagaaaactttagg

SEQ ID NO: 25036 - DNA, 80 bp, synthetic construct
  misc_feature 1..80: note = Artificially Synthesized Probe
  source 1..80: mol_type = other DNA
aattattgaaaatgaaaactatagtaatggaaagcacttcaatggttgcctggggagaggggatgggtgggaagcagaga

SEQ ID NO: 25037 - DNA, 80 bp, synthetic construct
  misc_feature 1..80: note = Artificially Synthesized Probe
  source 1..80: mol_type = other DNA
gatcaggtggaactctgacacagagctcaaggaagacccccctaaggaattgaatgattgaaacatgggatcagttcact

SEQ ID NO: 25038 - DNA, 80 bp, synthetic construct
  misc_feature 1..80: note = Artificially Synthesized Probe
  source 1..80: mol_type = other DNA
cctgctgcttcactgggaggttttaaatcaagagttaaatgtatacaatgtgatagtggaatgtgctgcactcaagcaag

SEQ ID NO: 25039 - DNA, 80 bp, synthetic construct
  misc_feature 1..80: note = Artificially Synthesized Probe
  source 1..80: mol_type = other DNA
ggtggactcctagtgttattcaacaagctccccggggattctcacacacatcaaagtagagaacatttcataaaacattt

SEQ ID NO: 25040 - DNA, 80 bp, synthetic construct
  misc_feature 1..80: note = Artificially Synthesized Probe
  source 1..80: mol_type = other DNA
acctcttgtgtctcccctcagtgaatagcttcatcaaatgaaaagagcaaaagaaagcctgcattactttgcatgaaaat

SEQ ID NO: 25041 - DNA, 80 bp, synthetic construct
  misc_feature 1..80: note = Artificially Synthesized Probe
  source 1..80: mol_type = other DNA
tgacctggccatatttgtgctttcaacggagctcattggtaggtgtttggaagatgaagttgagacagacaagactagaa

SEQ ID NO: 25042 - DNA, 80 bp, synthetic construct
  misc_feature 1..80: note = Artificially Synthesized Probe
  source 1..80: mol_type = other DNA
tatcccctactgttctttcttctctgtaaaactacagaagtagttagagtaaaactgcaggtggtaactttgcttctcaa

SEQ ID NO: 25043 - DNA, 80 bp, synthetic construct
  misc_feature 1..80: note = Artificially Synthesized Probe
  source 1..80: mol_type = other DNA
gcctagataacaggcttagacacagggcctggttattctagtctctcagaggtgaacctcacttcctgaaccatccagct

SEQ ID NO: 25044 - DNA, 80 bp, synthetic construct
  misc_feature 1..80: note = Artificially Synthesized Probe
  source 1..80: mol_type = other DNA
tagaggctggaaagcctaagaacatggcaccagcatctgttgaggactttgtgctgtgttatcctatgacagaagggcaa

SEQ ID NO: 25045 - DNA, 80 bp, synthetic construct
  misc_feature 1..80: note = Artificially Synthesized Probe
  source 1..80: mol_type = other DNA
tacacacacacaatgaaatactgttcagctttaaaaaggaaggaagttccatcatttgtgataacacggatgaacctaga

SEQ ID NO: 25046 - DNA, 80 bp, synthetic construct
  misc_feature 1..80: note = Artificially Synthesized Probe
  source 1..80: mol_type = other DNA
agaaaccaattttggtttaatatgaggcagaatttaacagggctacccaagagtactccccctcttcaggagtgggctta

SEQ ID NO: 25047 - DNA, 80 bp, synthetic construct
  misc_feature 1..80: note = Artificially Synthesized Probe
  source 1..80: mol_type = other DNA
gtccaatacacgtcacgtggtccacggttcaattagggcttctccccctgaagtagaggtggggagaacaagctggagtt

SEQ ID NO: 25048 - DNA, 80 bp, synthetic construct
  misc_feature 1..80: note = Artificially Synthesized Probe
  source 1..80: mol_type = other DNA
cagtcccatctggcaagacatattcaagttaactgaaaaaacctgctcataccacgattccttttgtgcacaaaaccgcc

SEQ ID NO: 25049 - DNA, 80 bp, synthetic construct
  misc_feature 1..80: note = Artificially Synthesized Probe
  source 1..80: mol_type = other DNA
gtggttcagaacagtggtagtcccttgatggcttaataggcaaggacttagaagacaaagccatacataaaaaaccaaat

SEQ ID NO: 25050 - DNA, 80 bp, synthetic construct
  misc_feature 1..80: note = Artificially Synthesized Probe
  source 1..80: mol_type = other DNA
acagagagctgggatgtcacaggcctaaagcacaggttcgatgatcacttatgtgtctgcttgttcataattgtatatgg

SEQ ID NO: 25051 - DNA, 80 bp, synthetic construct
  misc_feature 1..80: note = Artificially Synthesized Probe
  source 1..80: mol_type = other DNA
aaggctctgtcctagggcttgcttcagcactagtgcttttttctctgtgcttctgtccattttctgtgaaattattctat

SEQ ID NO: 25052 - DNA, 80 bp, synthetic construct
  misc_feature 1..80: note = Artificially Synthesized Probe
  source 1..80: mol_type = other DNA
atatgacgttacctccctgcaaaagttacttggctagctagcaacagagccaggtctagaatcctgacttcccgtctgtc

SEQ ID NO: 25053 - DNA, 80 bp, synthetic construct
  misc_feature 1..80: note = Artificially Synthesized Probe
  source 1..80: mol_type = other DNA
gcttgcttcttattagttgagtggcttgaagcaagttacttcacttctttaagtgtcagtttcatcatctgtccaatgga

SEQ ID NO: 25054 - DNA, 80 bp, synthetic construct
  misc_feature 1..80: note = Artificially Synthesized Probe
  source 1..80: mol_type = other DNA
tataatgacaaactgtaagccgccattcaccttttttcaatttgacaaagattgtggttgttgtttttaagcagcccttg

SEQ ID NO: 25055 - DNA, 80 bp, synthetic construct
  misc_feature 1..80: note = Artificially Synthesized Probe
  source 1..80: mol_type = other DNA
ctgagcaggatggcttccttttgtgaagcagtctttttctgactagtgaaacttatgtaatcttcaaagtccagagcaaa

SEQ ID NO: 25056 - DNA, 80 bp, synthetic construct
  misc_feature 1..80: note = Artificially Synthesized Probe
  source 1..80: mol_type = other DNA
tgaggggagtctccacttcctgctgggatcctgactaatattcccaggtagtttaactctagagctggtgctcaatgcac

SEQ ID NO: 25057 - DNA, 80 bp, synthetic construct
  misc_feature 1..80: note = Artificially Synthesized Probe
  source 1..80: mol_type = other DNA
acagaatcatctatgtctccccagtaccttgcatggtgcctcaaataggtaaatgcagaataactgctgaaagaatggac

SEQ ID NO: 25058 - DNA, 80 bp, synthetic construct
  misc_feature 1..80: note = Artificially Synthesized Probe
  source 1..80: mol_type = other DNA
gccagtgactgagaaaagcagcaattgtaaagctcattttcaaagacaatgaattcctctgacagccccctttagactcc

SEQ ID NO: 25059 - DNA, 80 bp, synthetic construct
  misc_feature 1..80: note = Artificially Synthesized Probe
  source 1..80: mol_type = other DNA
tcctatcatgtaatgggttgaatagtgtatttgtcagccagggctgtcattaagtatcatggattaaacaacagagactt

SEQ ID NO: 25060 - DNA, 80 bp, synthetic construct
  misc_feature 1..80: note = Artificially Synthesized Probe
  source 1..80: mol_type = other DNA
aaagagaagccaaccctagattgcatctaagcaacttcatggaacaattgcagaaactgactctactccaaagataacac

SEQ ID NO: 25061 - DNA, 80 bp, synthetic construct
  misc_feature 1..80: note = Artificially Synthesized Probe
  source 1..80: mol_type = other DNA
gtgggattcaagaataaatgttagtgttgctaagacttggggacacgagttccacaagataccaaacaggagaatgtaaa

SEQ ID NO: 25062 - DNA, 80 bp, synthetic construct
  misc_feature 1..80: note = Artificially Synthesized Probe
  source 1..80: mol_type = other DNA
gactatatgattggcccaatgtaaaagaggcttgaagtgtcatgtccgggtcaagaaagttgtcaaagattttccacctt

SEQ ID NO: 25063 - DNA, 80 bp, synthetic construct
  misc_feature 1..80: note = Artificially Synthesized Probe
  source 1..80: mol_type = other DNA
gaagtcaaataacgtatggggaaatcctgcaaatgagatatccctatatacatgtatataagatactagtgtaggtggct

SEQ ID NO: 25064 - DNA, 80 bp, synthetic construct
  misc_feature 1..80: note = Artificially Synthesized Probe
  source 1..80: mol_type = other DNA
ctttaaagtaaaatccattttgctctcaactgtagatgggcataggactttgtcttgtcgcctgtgaaactcttctcttt

SEQ ID NO: 25065 - DNA, 80 bp, synthetic construct
  misc_feature 1..80: note = Artificially Synthesized Probe
  source 1..80: mol_type = other DNA
tgtccctgcagactaccttcttggttctaaagtgggctcctcttgtgttctaaaaattcagtctgagttcctcttcccat

SEQ ID NO: 25066 - DNA, 80 bp, synthetic construct
  misc_feature 1..80: note = Artificially Synthesized Probe
  source 1..80: mol_type = other DNA
tgacttgtttatgatcagtcattcaagtgatggaacaggaatatgattttgttcatctgcttccaaatccagggatctcc

SEQ ID NO: 25067 - DNA, 80 bp, synthetic construct
  misc_feature 1..80: note = Artificially Synthesized Probe
  source 1..80: mol_type = other DNA
tttatagcaatacaaaaacggcctaacataatatctgcatccaagttgcctgcccatgatgcatggtcaagtccagtgac

SEQ ID NO: 25068 - DNA, 80 bp, synthetic construct
  misc_feature 1..80: note = Artificially Synthesized Probe
  source 1..80: mol_type = other DNA
ggtccaagaacctctaagggtccctgaaactgttcaagtgctctgtaaagctaaaggtcatgtttctgtaaaagatccat

SEQ ID NO: 25069 - DNA, 80 bp, synthetic construct
  misc_feature 1..80: note = Artificially Synthesized Probe
  source 1..80: mol_type = other DNA
ggacatcactccacataataaactgaagtgaattttttcctggaattctcggaggcaggcattgaagaaagagaaggaag

SEQ ID NO: 25070 - DNA, 80 bp, synthetic construct
  misc_feature 1..80: note = Artificially Synthesized Probe
  source 1..80: mol_type = other DNA
atcatcctacaaggcacagaatagcctctgaccaaaaaaagaattatcagacccaagatgtcaatacatagtgctgcatt

SEQ ID NO: 25071 - DNA, 80 bp, synthetic construct
  misc_feature 1..80: note = Artificially Synthesized Probe
  source 1..80: mol_type = other DNA
atgcaacagccacaggcagataccattgaagtatcagagatgtgctgacttttgatccaagtacctaagcatggtcttac

SEQ ID NO: 25072 - DNA, 80 bp, synthetic construct
  misc_feature 1..80: note = Artificially Synthesized Probe
  source 1..80: mol_type = other DNA
gctatatgataatctattactttttcagaagtggagaaaataccgaccaccatattcatagatatggctatatcactttt

SEQ ID NO: 25073 - DNA, 80 bp, synthetic construct
  misc_feature 1..80: note = Artificially Synthesized Probe
  source 1..80: mol_type = other DNA
gtgagaagcgtttgtagcttcccaaaagctccatcaccagagaactatcattatctatcctgttggcatttccctgggaa

SEQ ID NO: 25074 - DNA, 80 bp, synthetic construct
  misc_feature 1..80: note = Artificially Synthesized Probe
  source 1..80: mol_type = other DNA
agttgacaaggatgataactgaaaggaaaaattcataagagggtgttcaaaagcagatttgagctagcaaaagaaagaat

SEQ ID NO: 25075 - DNA, 80 bp, synthetic construct
  misc_feature 1..80: note = Artificially Synthesized Probe
  source 1..80: mol_type = other DNA
gaagctaacaaacacccaacactccatccaacaaaagccagtcacatggaacattctccaggagaggttatatgttagac

SEQ ID NO: 25076 - DNA, 80 bp, synthetic construct
  misc_feature 1..80: note = Artificially Synthesized Probe
  source 1..80: mol_type = other DNA
agagtaaggaacacttattcaattcattctatgaggccaatatcctgatacccaaaccagaaaaaagtcaatgcaagaaa

SEQ ID NO: 25077 - DNA, 80 bp, synthetic construct
  misc_feature 1..80: note = Artificially Synthesized Probe
  source 1..80: mol_type = other DNA
atccctatcaaaattacagctgccttgtttgtagaatttccaggctgatcctaaaattcatatggaactacaggggactc

SEQ ID NO: 25078 - DNA, 80 bp, synthetic construct
  misc_feature 1..80: note = Artificially Synthesized Probe
  source 1..80: mol_type = other DNA
ttcagctgctttggagaacagtttgtggtttctcaaaagtttaaacagaattaactttgacccagcagtcctgctactga

SEQ ID NO: 25079 - DNA, 80 bp, synthetic construct
  misc_feature 1..80: note = Artificially Synthesized Probe
  source 1..80: mol_type = other DNA
aaagatggagagagcaaaatgtgcttgactagaagtcaggagacctgtgttctattgttggctctgccattaactaactt

SEQ ID NO: 25080 - DNA, 80 bp, synthetic construct
  misc_feature 1..80: note = Artificially Synthesized Probe
  source 1..80: mol_type = other DNA
ctaactcgtgaaaatcgtctggagctaaattaagcctatccccttttgacttactttcagtttgccacagtccccactac

SEQ ID NO: 25081 - DNA, 80 bp, synthetic construct
  misc_feature 1..80: note = Artificially Synthesized Probe
  source 1..80: mol_type = other DNA
tcctgactgtgagcacctgctcgtttttgagtactcagtttaggagtcaatgaaacctcttctgttcgctcactaccatc

SEQ ID NO: 25082 - DNA, 80 bp, synthetic construct
  misc_feature 1..80: note = Artificially Synthesized Probe
  source 1..80: mol_type = other DNA
ttagtttgtagccagagtgaccttttctcaatggagtcttgattcagatccattgcttttgagaaaaactcaagatcctt

SEQ ID NO: 25083 - DNA, 80 bp, synthetic construct
  misc_feature 1..80: note = Artificially Synthesized Probe
  source 1..80: mol_type = other DNA
ctcaggggatgtctggtaaatacagtagtgttttccccttctccactacatttccaggattatttctgtgtctttaatag

SEQ ID NO: 25084 - DNA, 80 bp, synthetic construct
  misc_feature 1..80: note = Artificially Synthesized Probe
  source 1..80: mol_type = other DNA
acgtcaaagtagcttgttacaaacctttccattgcttttcttaaacatctgagcagaatgtgagatgagaagaatcactc

SEQ ID NO: 25085 - DNA, 80 bp, synthetic construct
  misc_feature 1..80: note = Artificially Synthesized Probe
  source 1..80: mol_type = other DNA
gatgtggcaagccaatggtttttggagctagacaataaaaataaaagagtaaaaagtcttctcactccctgaactgggta

SEQ ID NO: 25086 - DNA, 80 bp, synthetic construct
  misc_feature 1..80: note = Artificially Synthesized Probe
  source 1..80: mol_type = other DNA
tcagcctcctgaatagctggcattacaggcacccccccaccatgcccgactaattttttatatttttagtagaaatgggg

SEQ ID NO: 25087 - DNA, 80 bp, synthetic construct
  misc_feature 1..80: note = Artificially Synthesized Probe
  source 1..80: mol_type = other DNA
caacaaatctctcttcctgccaataaacatgactattggggctataaagatttcaaagtgcatgtggacactgtgaatca

SEQ ID NO: 25088 - DNA, 80 bp, synthetic construct
  misc_feature 1..80: note = Artificially Synthesized Probe
  source 1..80: mol_type = other DNA
tttcactctagatagaaatcccactggggtgagagtagagagaaggaaaccttattttcacctttcatccaggaataaaa

SEQ ID NO: 25089 - DNA, 80 bp, synthetic construct
  misc_feature 1..80: note = Artificially Synthesized Probe
  source 1..80: mol_type = other DNA
tcctctaaatcttataatctcgtttcataatgcagcaattttgggggcaacctttatgaacctcagcagtcacgtagatt

SEQ ID NO: 25090 - DNA, 80 bp, synthetic construct
  misc_feature 1..80: note = Artificially Synthesized Probe
  source 1..80: mol_type = other DNA
gagcagcccagtcttccagaagcttcatgcacatcatccatagcaatatgcaagccaacatctcaaaacatgctcacaat

SEQ ID NO: 25091 - DNA, 80 bp, synthetic construct
  misc_feature 1..80: note = Artificially Synthesized Probe
  source 1..80: mol_type = other DNA
accacacctggctgagtcaagaaaattttttcaatgtatttatttcacgaaaattccaatcactttattatctctagaga

SEQ ID NO: 25092 - DNA, 80 bp, synthetic construct
  misc_feature 1..80: note = Artificially Synthesized Probe
  source 1..80: mol_type = other DNA
caaccaatctctccggccctgtgtaaatcagataccgcctcctcaagttcatatataaaaccctgtgccatttcaccaca

SEQ ID NO: 25093 - DNA, 80 bp, synthetic construct
  misc_feature 1..80: note = Artificially Synthesized Probe
  source 1..80: mol_type = other DNA
gagaaaattgaggttaaaagtcaagcaatttgcctaaagacatacagctaggaagtgacattaccttgcctccaaccaga

SEQ ID NO: 25094 - DNA, 80 bp, synthetic construct
  misc_feature 1..80: note = Artificially Synthesized Probe
  source 1..80: mol_type = other DNA
ttgggagatctttctccttaaactcctcagcattcaagatctttcaaatgctgctcccaactcttccagccttatctgcc

SEQ ID NO: 25095 - DNA, 80 bp, synthetic construct
  misc_feature 1..80: note = Artificially Synthesized Probe
  source 1..80: mol_type = other DNA
gaaggagaaatgtacttatcctttattttgtcatttacatttaggcctgcccctcaccgagggtttccagtgggaagtag

SEQ ID NO: 25096 - DNA, 80 bp, synthetic construct
  misc_feature 1..80: note = Artificially Synthesized Probe
  source 1..80: mol_type = other DNA
aaagaattgaaatagatttccagaggattctgtggcattttatctgaactacctgtaataattggccaaccgtctgcgtg

SEQ ID NO: 25097 - DNA, 80 bp, synthetic construct
  misc_feature 1..80: note = Artificially Synthesized Probe
  source 1..80: mol_type = other DNA
tccttctaagaagagatttggagacaggctcatccacaaagaaagaacactgtgtgaatgtacagacagccatctacaag

SEQ ID NO: 25098 - DNA, 80 bp, synthetic construct
  misc_feature 1..80: note = Artificially Synthesized Probe
  source 1..80: mol_type = other DNA
caccctcctactgactaggcttccacaactgcttcttaaagtaggcattggtaagatgttttgggtttctcacactgctg

SEQ ID NO: 25099 - DNA, 80 bp, synthetic construct
  misc_feature 1..80: note = Artificially Synthesized Probe
  source 1..80: mol_type = other DNA
caccatcttgcaagatgggaaggtgatgtttagacgctcttgtcatttacccatttatttgagtaaggacaaggagtttc

SEQ ID NO: 25100 - DNA, 80 bp, synthetic construct
  misc_feature 1..80: note = Artificially Synthesized Probe
  source 1..80: mol_type = other DNA
ttagaggtgatgatttgttctaccaataggttcatgatagggaagatgggctcacgggaggctaaatggtcccctggaga

SEQ ID NO: 25101 - DNA, 80 bp, synthetic construct
  misc_feature 1..80: note = Artificially Synthesized Probe
  source 1..80: mol_type = other DNA
tgcagctatatacccgcaaaaaccctagaaggtggcagggggagaccctttctcccccagatctagcagaacaatatcac

SEQ ID NO: 25102 - DNA, 80 bp, synthetic construct
  misc_feature 1..80: note = Artificially Synthesized Probe
  source 1..80: mol_type = other DNA
gaatatttgaagagaaattttctttgtaccacatacacaaaaatcaagcatagcttagcttgttacgtattgcttaagtg

SEQ ID NO: 25103 - DNA, 80 bp, synthetic construct
  misc_feature 1..80: note = Artificially Synthesized Probe
  source 1..80: mol_type = other DNA
aatttttaattttcttgtacagtctggatctccctatgttcagaccttccaggctggtcttgaactccagcacaagcggt

SEQ ID NO: 25104 - DNA, 80 bp, synthetic construct
  misc_feature 1..80: note = Artificially Synthesized Probe
  source 1..80: mol_type = other DNA
gcatctgtccctataaagtcacctgtcataaaagaccaagacagaggcaaatatcggaccattgaagataccaataagct

SEQ ID NO: 25105 - DNA, 80 bp, synthetic construct
  misc_feature 1..80: note = Artificially Synthesized Probe
  source 1..80: mol_type = other DNA
gagtgtgaggttcatgacatcaaagactttccatattttgtacccccaacacttagcacaggagacttgatcagcaaata

SEQ ID NO: 25106 - DNA, 80 bp, synthetic construct
  misc_feature 1..80: note = Artificially Synthesized Probe
  source 1..80: mol_type = other DNA
catgtttcagttcctggaatcaagggcaagcatctcatcacacagcattgttcataaagaagtttgggtcttctttgaaa

SEQ ID NO: 25107 - DNA, 80 bp, synthetic construct
  misc_feature 1..80: note = Artificially Synthesized Probe
  source 1..80: mol_type = other DNA
cgtttcaggtagccaccactgcattttaggaactcattttcatgaaaagtgagacattgctggttcaatagacttgctaa

SEQ ID NO: 25108 - DNA, 80 bp, synthetic construct
  misc_feature 1..80: note = Artificially Synthesized Probe
  source 1..80: mol_type = other DNA
tatcatgagtccatcaacacacaaccctcacctaacagaagtgtaaaataatattttaattacttaatatctgtcttgct

SEQ ID NO: 25109 - DNA, 80 bp, synthetic construct
  misc_feature 1..80: note = Artificially Synthesized Probe
  source 1..80: mol_type = other DNA
aggttagtaaagattttcttccccactatctactctgacagaagtggacccactttgtactttgtttattccaggaagat

SEQ ID NO: 25110 - DNA, 80 bp, synthetic construct
  misc_feature 1..80: note = Artificially Synthesized Probe
  source 1..80: mol_type = other DNA
agcaaagcctattctgaattgagattaattaccccaccatgtagaacccatttctgcaggaatgtctgagataatgatgc

SEQ ID NO: 25111 - DNA, 80 bp, synthetic construct
  misc_feature 1..80: note = Artificially Synthesized Probe
  source 1..80: mol_type = other DNA
ccttctgtgcctgtgggtctctcattagacaccaaaacaggattgcctctggaaattctgcccttaagagaagtatttcc

SEQ ID NO: 25112 - DNA, 80 bp, synthetic construct
  misc_feature 1..80: note = Artificially Synthesized Probe
  source 1..80: mol_type = other DNA
gggcagagggggaatttagagctgagagctaaaagacatggggctgcttttgaaagtgatgaacattttctaagttttat

SEQ ID NO: 25113 - DNA, 80 bp, synthetic construct
  misc_feature 1..80: note = Artificially Synthesized Probe
  source 1..80: mol_type = other DNA
tttttttttttttaattctcagatcttcccaagtctgctctcctaagtatgagaaacaaagggaattgcctagaaccagg

SEQ ID NO: 25114 - DNA, 80 bp, synthetic construct
  misc_feature 1..80: note = Artificially Synthesized Probe
  source 1..80: mol_type = other DNA
gccccaatcagacaagcgggggtggggggactcaagtccactaagcagattgatcaactcagatccacagccaaaatatc

SEQ ID NO: 25115 - DNA, 80 bp, synthetic construct
  misc_feature 1..80: note = Artificially Synthesized Probe
  source 1..80: mol_type = other DNA
caaatgtaactgggcctcttgaatttacatttgctaatcctggtgattccacctctctgttgttcccattttacagaagg

SEQ ID NO: 25116 - DNA, 80 bp, synthetic construct
  misc_feature 1..80: note = Artificially Synthesized Probe
  source 1..80: mol_type = other DNA
agctgctgcccaagatggacaggaggtggcactggggcagacagctgcttctcaacagggtgacttcaagcccaaaagct

SEQ ID NO: 25117 - DNA, 80 bp, synthetic construct
  misc_feature 1..80: note = Artificially Synthesized Probe
  source 1..80: mol_type = other DNA
aagcaaggtctgcctcccctctactccccaagggaccctcccatgcagccactgccccgggtctactcctggcttgagtc

SEQ ID NO: 25118 - DNA, 80 bp, synthetic construct
  misc_feature 1..80: note = Artificially Synthesized Probe
  source 1..80: mol_type = other DNA
cactttaggaggcccacacaggtgggtcacttgagcgcagaagttcaagaccagcctgaaaatcactgggagacccccat

SEQ ID NO: 25119 - DNA, 80 bp, synthetic construct
  misc_feature 1..80: note = Artificially Synthesized Probe
  source 1..80: mol_type = other DNA
cagcttcttagggacccaccatttgccaactggggctctgccatggccccaactctgttgagggcatttccaccccacct

SEQ ID NO: 25120 - DNA, 80 bp, synthetic construct
  misc_feature 1..80: note = Artificially Synthesized Probe
  source 1..80: mol_type = other DNA
ataatttttctgtgtgtttagtagggatggagtttcatcgtgttagctaggatgatctcggtcttgggacctcatgatct

SEQ ID NO: 25121 - DNA, 80 bp, synthetic construct
  misc_feature 1..80: note = Artificially Synthesized Probe
  source 1..80: mol_type = other DNA
accatttttggctgatggactggaacccagccctgagagagggagctccttctccatcagttccctcagtggcttctaag

SEQ ID NO: 25122 - DNA, 80 bp, synthetic construct
  misc_feature 1..80: note = Artificially Synthesized Probe
  source 1..80: mol_type = other DNA
cctgatccactttgctgaggcctggcaagacttgagggcctctttttacctcccagcctacagggctttacaaaccctat

SEQ ID NO: 25123 - DNA, 80 bp, synthetic construct
  misc_feature 1..80: note = Artificially Synthesized Probe
  source 1..80: mol_type = other DNA
ctttcagtcaaggcaaaaagggaaacagttgagggcctataccttgtccaatctaattgaagaatgcacattcacttgga

SEQ ID NO: 25124 - DNA, 80 bp, synthetic construct
  misc_feature 1..80: note = Artificially Synthesized Probe
  source 1..80: mol_type = other DNA
accaagaagatgggcagcagctccatgaagcggagcctgagaaccaacttcctgcgctactggaccctcacctatctggc

SEQ ID NO: 25125 - DNA, 80 bp, synthetic construct
  misc_feature 1..80: note = Artificially Synthesized Probe
  source 1..80: mol_type = other DNA
atgctctccttggattttatcctgaatttatcctacatattctcaggtcctaaactctgagtccgcagactgagatgacg

SEQ ID NO: 25126 - DNA, 80 bp, synthetic construct
  misc_feature 1..80: note = Artificially Synthesized Probe
  source 1..80: mol_type = other DNA
ggtgtctgggagaagccaagcaagagtccgctgttatcttggcttgggatatttattttcaacacatttaaatcacagtt

SEQ ID NO: 25127 - DNA, 80 bp, synthetic construct
  misc_feature 1..80: note = Artificially Synthesized Probe
  source 1..80: mol_type = other DNA
cccaatgaatgcgactttcttcaatgatgaatcgatctactttgctaaatgctatgtggcctggcactggaagatgcact

SEQ ID NO: 25128 - DNA, 80 bp, synthetic construct
  misc_feature 1..80: note = Artificially Synthesized Probe
  source 1..80: mol_type = other DNA
tcatgattttacattcttggaaacatccagtgctgggactgctatttgccaaggacaatgataatggctctgaaaatgtg

SEQ ID NO: 25129 - DNA, 80 bp, synthetic construct
  misc_feature 1..80: note = Artificially Synthesized Probe
  source 1..80: mol_type = other DNA
gtgcagtggtgcaatcatagctcactgtaacctcacactcctaggctcaagtgatccttttgcctctcagcctcccaagt

SEQ ID NO: 25130 - DNA, 80 bp, synthetic construct
  misc_feature 1..80: note = Artificially Synthesized Probe
  source 1..80: mol_type = other DNA
ctgcaggtgttcatctgcatcattccttgttaatttccagtttcatgctcatgccaggttcccaagtccagaggacatct

SEQ ID NO: 25131 - DNA, 80 bp, synthetic construct
  misc_feature 1..80: note = Artificially Synthesized Probe
  source 1..80: mol_type = other DNA
ttcgggtctggaaaaacagagaaaccggagatgtatgaaataaagtgttccggctcggtttgagagagtgcaatagaaac

SEQ ID NO: 25132 - DNA, 80 bp, synthetic construct
  misc_feature 1..80: note = Artificially Synthesized Probe
  source 1..80: mol_type = other DNA
ccaggtgggcggatcacgaggtcaggagatcgagaccatcctggctaacacggtgaaaccccgtctctactaaaaataca

SEQ ID NO: 25133 - DNA, 80 bp, synthetic construct
  misc_feature 1..80: note = Artificially Synthesized Probe
  source 1..80: mol_type = other DNA
tcagcttacggtaaactaaacacatctattatttacaacatagaaaattaaaggcgatgcccaagtcccggccttccgca

SEQ ID NO: 25134 - DNA, 80 bp, synthetic construct
  misc_feature 1..80: note = Artificially Synthesized Probe
  source 1..80: mol_type = other DNA
tctagtggtgctggttgccatgcctgcaaggttgtccgcttcacatggcaaccaccacccagggcattagccaagaccct

SEQ ID NO: 25135 - DNA, 80 bp, synthetic construct
  misc_feature 1..80: note = Artificially Synthesized Probe
  source 1..80: mol_type = other DNA
ccacagactctgaattttagagtagtaaactgtctcttgatgcttgtgaaaactgatacttgatgctttagggccacagt

SEQ ID NO: 25136 - DNA, 80 bp, synthetic construct
  misc_feature 1..80: note = Artificially Synthesized Probe
  source 1..80: mol_type = other DNA
agacacagagagatcaactcctacagatagtaaacagggtctgattctttaccttgtgccattcctgtagtctttttttt

SEQ ID NO: 25137 - DNA, 80 bp, synthetic construct
  misc_feature 1..80: note = Artificially Synthesized Probe
  source 1..80: mol_type = other DNA
tcttgctcttggaggcccacaatggaggagtacacaatgcatgcttagctctccttcaccttcctgtcctctcttctctc

SEQ ID NO: 25138 - DNA, 80 bp, synthetic construct
  misc_feature 1..80: note = Artificially Synthesized Probe
  source 1..80: mol_type = other DNA
ggtccaggctccgtgctccagggcgccgcattcactgagaagacggggacctgcatcaatgcggtggcccgcgcgcccct

SEQ ID NO: 25139 - DNA, 80 bp, synthetic construct; identical to SEQ ID NO: 25125
  misc_feature 1..80: note = Artificially Synthesized Probe
  source 1..80: mol_type = other DNA

SEQ ID NO: 25140 - DNA, 80 bp, synthetic construct
  misc_feature 1..80: note = Artificially Synthesized Probe
  source 1..80: mol_type = other DNA
ctagggtcgggggcgcagtgacaggcaggcccctccgagcctgaagaacaattccctctatgagacctggctggggggtg

SEQ ID NO: 25141 - DNA, 80 bp, synthetic construct
  misc_feature 1..80: note = Artificially Synthesized Probe
  source 1..80: mol_type = other DNA
aaaattcagattggaaatcggaactttctggagtcagcttttcttgcagacagagtctgaacgtctgcgtggaaaacttc

SEQ ID NO: 25142 - DNA, 80 bp, synthetic construct
  misc_feature 1..80: note = Artificially Synthesized Probe
  source 1..80: mol_type = other DNA
cagggccgacgggaaggtgcaggttctcctgggcgcgcactccctgtcgcagccggagccctccaagcgcctgtacgacg

SEQ ID NO: 25143 - DNA, 80 bp, synthetic construct
  misc_feature 1..80: note = Artificially Synthesized Probe
  source 1..80: mol_type = other DNA
tggggcatagtcaaccacgcgggccgccgcccggacagcctgcagcacgtgctcttgccagtgctggaccgcgccacctg

SEQ ID NO: 25144 - DNA, 80 bp, synthetic construct
  misc_feature 1..80: note = Artificially Synthesized Probe
  source 1..80: mol_type = other DNA
cgttagggcagaagtgggatccacggcaagtcaaagcttggaagagcaggaatgaggtgtgggacccccatactggaaag

SEQ ID NO: 25145 - DNA, 80 bp, synthetic construct
  misc_feature 1..80: note = Artificially Synthesized Probe
  source 1..80: mol_type = other DNA
caaaacaaaaacagaaacattaaaaaaagaggaacgcgggaagctacagataaaagcgcaagaacggagaatacagcgaa

SEQ ID NO: 25146 - DNA, 80 bp, synthetic construct
  misc_feature 1..80: note = Artificially Synthesized Probe
  source 1..80: mol_type = other DNA
aaagtgactgatgggccgggtgccggtggctcacgcctgtcatcccagcactttgggaggctgaggcgggcagatcatga

SEQ ID NO: 25147 - DNA, 80 bp, synthetic construct
  misc_feature 1..80: note = Artificially Synthesized Probe
  source 1..80: mol_type = other DNA
gagatgaggtctcgccatgttgccccaggttggtcttgaactcccaggctcaagtgatcctcctgcctgggtctcttatg

SEQ ID NO: 25148 - DNA, 80 bp, synthetic construct
  misc_feature 1..80: note = Artificially Synthesized Probe
  source 1..80: mol_type = other DNA
acttctgagtcgggcactgggtgactctgatctcccggcccctgaagctgcccacgagcctgcgtcccacaacgcatggg

SEQ ID NO: 25149 - DNA, 80 bp, synthetic construct
  misc_feature 1..80: note = Artificially Synthesized Probe
  source 1..80: mol_type = other DNA
gctggagaaacataacagggacagagtcaggcagagacacagaaacagcatgcagagacacagagaccatacacagagaa

SEQ ID NO: 25150 - DNA, 80 bp, synthetic construct
  misc_feature 1..80: note = Artificially Synthesized Probe
  source 1..80: mol_type = other DNA
tagtgtaattctgcatacactctgcaatgccactaactagaacaatcaatctcaaaaagatttggccaccttcaaaatgc

SEQ ID NO: 25151 - DNA, 80 bp, synthetic construct
  misc_feature 1..80: note = Artificially Synthesized Probe
  source 1..80: mol_type = other DNA
ctggagtgcaatggtgtgatttcggctcaccacaacttccatctcctgggttcaagcaattctcctgcgtcagcctccca

SEQ ID NO: 25152 - DNA, 80 bp, synthetic construct
  misc_feature 1..80: note = Artificially Synthesized Probe
  source 1..80: mol_type = other DNA
gcgtccttaggcgatttccttcttattcaaacattatagagtggacttacacaaacctaggttttatagcctactaggta

SEQ ID NO: 25153 - DNA, 80 bp, synthetic construct
  misc_feature 1..80: note = Artificially Synthesized Probe
  source 1..80: mol_type = other DNA
cgatggctattaggtgataggaatttttcagctacactataatcttatgggtccactgtcatataagtgatcagtcattg

SEQ ID NO: 25154 - DNA, 80 bp, synthetic construct
  misc_feature 1..80: note = Artificially Synthesized Probe
  source 1..80: mol_type = other DNA
tattgacagtgagggagcttatgcatgtggtagggaagaggaagtggtatataggaaatctctaccttccactcaatctt

SEQ ID NO: 25155 - DNA, 80 bp, synthetic construct
  misc_feature 1..80: note = Artificially Synthesized Probe
  source 1..80: mol_type = other DNA
tccaacatctttactgcaccagaaaaaaaaataggacagagtttctggcagagacacctatggcagtcaatgagaataga

SEQ ID NO: 25156 - DNA, 80 bp, synthetic construct
  misc_feature 1..80: note = Artificially Synthesized Probe
  source 1..80: mol_type = other DNA
aaaattgggagacagatacatgaggcaacaaaggagatagcaatgatctttctcctaagaaacatttatgagagttaaga

SEQ ID NO: 25157 - DNA, 80 bp, synthetic construct
  misc_feature 1..80: note = Artificially Synthesized Probe
  source 1..80: mol_type = other DNA
cacatacttttatctttattcatttgattttcagttccaattgtgtccaagtggatgttgaataacatagtttgcctacc

SEQ ID NO: 25158 - DNA, 80 bp, synthetic construct
  misc_feature 1..80: note = Artificially Synthesized Probe
  source 1..80: mol_type = other DNA
agatatccaggaaaactttcgtttacactggcttccagaagggaaaaataaaggtctatcagtgttctagcgaaggatga

SEQ ID NO: 25159 - DNA, 80 bp, synthetic construct
  misc_feature 1..80: note = Artificially Synthesized Probe
  source 1..80: mol_type = other DNA
tcatggcctgttaactggtgcacttggaccaattacacttaacataattattgatatataggacttaaacctctgtcatt

SEQ ID NO: 25160 - DNA, 80 bp, synthetic construct
  misc_feature 1..80: note = Artificially Synthesized Probe
  source 1..80: mol_type = other DNA
ggaagttttcaggtatccttttatttattcatttttccagcccaatatcctttctcttctttttctgcatctgcattatt

SEQ ID NO: 25161 - DNA, 80 bp, synthetic construct
  misc_feature 1..80: note = Artificially Synthesized Probe
  source 1..80: mol_type = other DNA
accattctgctgaatgcctgcctaccaaaaatttcttttagaaagtaaagtttagaaattttctctttagggctgggtgt

SEQ ID NO: 25162 - DNA, 80 bp, synthetic construct
  misc_feature 1..80: note = Artificially Synthesized Probe
  source 1..80: mol_type = other DNA
tcacacattgcgaacaacatgttgggatgggaaactggagtatccaacttgtgcaaaaagatagaatcaatcataaaatg

SEQ ID NO: 25163 - DNA, 80 bp, synthetic construct
  misc_feature 1..80: note = Artificially Synthesized Probe
  source 1..80: mol_type = other DNA
ttgcatgcactcacttgcaaacatagaaacatgatacttttgccctgatttaatgtttatagaaaaaatattgccaggaa

SEQ ID NO: 25164 - DNA, 80 bp, synthetic construct
  misc_feature 1..80: note = Artificially Synthesized Probe
  source 1..80: mol_type = other DNA
tatgtccttacaatgtggaaggggcaagggagttccatgactcttctttgtaaaaagactaatccaatgtattagggtgg

SEQ ID NO: 25165 - DNA, 80 bp, synthetic construct
  misc_feature 1..80: note = Artificially Synthesized Probe
  source 1..80: mol_type = other DNA
tgtatctcaggaaactagaaaatgaagaaaaaaattaacccaaagctactggaaagaaaaaaatagtaaggtacagaaca

SEQ ID NO: 25166 - DNA, 80 bp, synthetic construct
  misc_feature 1..80: note = Artificially Synthesized Probe
  source 1..80: mol_type = other DNA
tctcattatatacatggaaaacccaaggacttcaccaaactttgctaaaagtaataaccaattcagtaaagttgcagggt

SEQ ID NO: 25167 - DNA, 80 bp, synthetic construct
  misc_feature 1..80: note = Artificially Synthesized Probe
  source 1..80: mol_type = other DNA
tttgtctgttgagaggaatgagcaggagcattgttctggtggaggaggactctctgatgaagttttcctgggcatttttc

SEQ ID NO: 25168 - DNA, 80 bp, synthetic construct
  misc_feature 1..80: note = Artificially Synthesized Probe
  source 1..80: mol_type = other DNA
aaaatgttcagaattttcctatacgtaatacaaggggaacattgggagtgactgatgttttcataatcttacatatggtg

SEQ ID NO: 25169 - DNA, 80 bp, synthetic construct
  misc_feature 1..80: note = Artificially Synthesized Probe
  source 1..80: mol_type = other DNA
aaagcactatagaaaagaatgatgacaaattctttcttatctgatattccagtggaaaacttgcctcctccaatgaactc

SEQ ID NO: 25170 - DNA, 80 bp, synthetic construct
  misc_feature 1..80: note = Artificially Synthesized Probe
  source 1..80: mol_type = other DNA
atctactagagttgccataacaaagtgtcaagggtgacaattagtaatgtagagtagggttgcctctaaattccttttaa

SEQ ID NO: 25171 - DNA, 80 bp, synthetic construct
  misc_feature 1..80: note = Artificially Synthesized Probe
  source 1..80: mol_type = other DNA
atatgtccctttcttcttcagactaaatagcctgcaatcataagaaaatgtaagagtatctcaggaggttacacagtgca

SEQ ID NO: 25172 - DNA, 80 bp, synthetic construct
  misc_feature 1..80: note = Artificially Synthesized Probe
  source 1..80: mol_type = other DNA
ttatacagatgagaggtcaggatcaggaaactagttatggttgctgtaattccacaagaaaatgtttgagagaaggtgat

SEQ ID NO: 25173 - DNA, 80 bp, synthetic construct
  misc_feature 1..80: note = Artificially Synthesized Probe
  source 1..80: mol_type = other DNA
ctgagatcccagcatgttcatgtctttctaagtaacacggacgacagtctcagacttgtctatattaactgtggcaaaat

SEQ ID NO: 25174 - DNA, 80 bp, synthetic construct
  misc_feature 1..80: note = Artificially Synthesized Probe
  source 1..80: mol_type = other DNA
atcatttagcattaggtatatctcctaatactatccctcccccctccccccaccccacaacagtccccagagtgtgatgt

SEQ ID NO: 25175 - DNA, 80 bp, synthetic construct
  misc_feature 1..80: note = Artificially Synthesized Probe
  source 1..80: mol_type = other DNA
tgccattgcttttggtgttttagacatgaagtccttgcccatgcctatgtcctgaatggtaatgcctaggttttctttta

SEQ ID NO: 25176 - DNA, 80 bp, synthetic construct
  misc_feature 1..80: note = Artificially Synthesized Probe
  source 1..80: mol_type = other DNA
aattgaataccctttatttctttctcctgaaggagatccctggccagaacttccaacactatgttgaataggagtggtga

SEQ ID NO: 25177 - DNA, 80 bp, synthetic construct
  misc_feature 1..80: note = Artificially Synthesized Probe
  source 1..80: mol_type = other DNA
ctcttgctagcagtctatcgattttgttgatcctttcaaaaaaccagctcctggattcattaattttttgacaggctttt

SEQ ID NO: 25178 - DNA, 80 bp, synthetic construct
  misc_feature 1..80: note = Artificially Synthesized Probe
  source 1..80: mol_type = other DNA
ggttattttgcttgttagttgatgcagtttcttcctagtctcgatggtctttacattttggcatgattttgcagtggctg

SEQ ID NO: 25179 - DNA, 80 bp, synthetic construct
  misc_feature 1..80: note = Artificially Synthesized Probe
  source 1..80: mol_type = other DNA
tttccttctaacagacaggaccctcagctgcaggtctgttggagtttgctagaggtccactctagaccctgtttgcctgg

SEQ ID NO: 25180 - DNA, 80 bp, synthetic construct
  misc_feature 1..80: note = Artificially Synthesized Probe
  source 1..80: mol_type = other DNA
gccatcttggctgccctctatgatatctattttttagttagtgctctgttgctttaaattaaggctcatcttcagttaca

SEQ ID NO: 25181 - DNA, 80 bp, synthetic construct
  misc_feature 1..80: note = Artificially Synthesized Probe
  source 1..80: mol_type = other DNA
ccccttaatagtaccaaaaatactcaggttgttgcaaagtagccagaaagtcttccaaaatttcattagggactggagag

SEQ ID NO: 25182 - DNA, 80 bp, synthetic construct
  misc_feature 1..80: note = Artificially Synthesized Probe
  source 1..80: mol_type = other DNA
agtcttttgcatgtttagagtaatggctacttgggaagatgatcatttcatctcttacaactcaatctgcctttacataa

SEQ ID NO: 25183 - DNA, 80 bp, synthetic construct
  misc_feature 1..80: note = Artificially Synthesized Probe
  source 1..80: mol_type = other DNA
aacaccacaggttccatagtgtgtggtgaagatgggtagtcccatttcccaacatgttatagtaagtattttattcaagt

SEQ ID NO: 25184 - DNA, 80 bp, synthetic construct
  misc_feature 1..80: note = Artificially Synthesized Probe
  source 1..80: mol_type = other DNA
tacaatgagtcttcaagaatgacaaccatttattgcgcacatatgaaatatggcatctcagcttaacaccagtaatcatt

SEQ ID NO: 25185 - DNA, 80 bp, synthetic construct
  misc_feature 1..80: note = Artificially Synthesized Probe
  source 1..80: mol_type = other DNA
gctatgctaccttttacctttcatattgactgatgacgctgatattttggctgatcttacaatgggctaaaccttaatta

SEQ ID NO: 25186 - DNA, 80 bp, synthetic construct
  misc_feature 1..80: note = Artificially Synthesized Probe
  source 1..80: mol_type = other DNA
gaaaatgaagatgacagggatagatgatgttgatagagagagagataactgatagatattgaggtatatttatgtatgta

SEQ ID NO: 25187 - DNA, 80 bp, synthetic construct
  misc_feature 1..80: note = Artificially Synthesized Probe
  source 1..80: mol_type = other DNA
aattgggatataatgcaaatacatcaattctatcatttcaagcagtgtgtcgggaagggatagtggaataccccagatgc

SEQ ID NO: 25188 - DNA, 80 bp, synthetic construct
  misc_feature 1..80: note = Artificially Synthesized Probe
  source 1..80: mol_type = other DNA
tgcttcagatttttttttgtcttttctcctgttaattgccttcactctctttctgttctgtacttttctttgtatataag

SEQ ID NO: 25189 - DNA, 80 bp, synthetic construct
  misc_feature 1..80: note = Artificially Synthesized Probe
  source 1..80: mol_type = other DNA
ttgctactcattcaccttctgtcatgatggtgaggccttcccagcaatgtggaactgtgagtccattaaacctctttcct

SEQ ID NO: 25190 - DNA, 80 bp, synthetic construct
  misc_feature 1..80: note = Artificially Synthesized Probe
  source 1..80: mol_type = other DNA
acccaggaagggagcagaggcgagagccagcctccggcaggagggcgtagaccccggtgccagccagaacggctccagcc

SEQ ID NO: 25191 - DNA, 80 bp, synthetic construct
  misc_feature 1..80: note = Artificially Synthesized Probe
  source 1..80: mol_type = other DNA
aaagccagcccctccgttcccactctccgggctcgctgcgagccacagtgtctcagccaggggcagggccggggaactcc

SEQ ID NO: 25192 - DNA, 80 bp, synthetic construct
  misc_feature 1..80: note = Artificially Synthesized Probe
  source 1..80: mol_type = other DNA
atcaactgccgatgaagttggcttttcagtatattgatggagagagaagcttaggaagctctttggggaaacttttggtg

SEQ ID NO: 25193 - DNA, 80 bp, synthetic construct
  misc_feature 1..80: note = Artificially Synthesized Probe
  source 1..80: mol_type = other DNA
taccttgaggaattagtgtgacagcttctctgaaattcatgtgatcatttacatattgtttcccaggagctttggcatta

SEQ ID NO: 25194 - DNA, 80 bp, synthetic construct
  misc_feature 1..80: note = Artificially Synthesized Probe
  source 1..80: mol_type = other DNA
acatgcctttcctctcaccccttgggggagactggaaacaattctcaatttaattagatatgctgctttcttttttctgt

SEQ ID NO: 25195 - DNA, 80 bp, synthetic construct
  misc_feature 1..80: note = Artificially Synthesized Probe
  source 1..80: mol_type = other DNA
ttcacctcttcctaactccagggactacaattgtgccattttcctatacaacctatgaattttagtgtgcatcacaattt

SEQ ID NO: 25196 - DNA, 80 bp, synthetic construct
  misc_feature 1..80: note = Artificially Synthesized Probe
  source 1..80: mol_type = other DNA
aatcgtctggagagttctgtaaagctaccaacccaaatcaattcaattacagtctctgtggatggtgactagaaatctgg

SEQ ID NO: 25197 - DNA, 80 bp, synthetic construct
  misc_feature 1..80: note = Artificially Synthesized Probe
  source 1..80: mol_type = other DNA
acctatggcttttggtagaggaacataactactgtcaaatcacaagacagtgctctgcttctaccccaagatttccagtt

SEQ ID NO: 25198 - DNA, 80 bp, synthetic construct
  misc_feature 1..80: note = Artificially Synthesized Probe
  source 1..80: mol_type = other DNA
agttgtatcagaacaaggacgatgaaggaatagaccagaatgcactggttgcatcttaatgtgaggaatttttatttcca

SEQ ID NO: 25199 - DNA, 80 bp, synthetic construct
  misc_feature 1..80: note = Artificially Synthesized Probe
  source 1..80: mol_type = other DNA
gccaaagatagggagatagacttttccaaagcatcctgaattctataatacatgttcttatgtttgtgtgtgtctgtgtg

SEQ ID NO: 25200 - DNA, 80 bp, synthetic construct
  misc_feature 1..80: note = Artificially Synthesized Probe
  source 1..80: mol_type = other DNA
aagaccagcaacacagcaagactccatgtctacaaaaaatatataaataaataaaaataaaaattagccaggtgtggtcg

SEQ ID NO: 25201 - DNA, 80 bp, synthetic construct
  misc_feature 1..80: note = Artificially Synthesized Probe
  source 1..80: mol_type = other DNA
agcattctcagatgctgagtggctccaaaaggctcctttttgtgtactagaaagtggcaagaataagtttgtttcctgct

SEQ ID NO: 25202 - DNA, 80 bp, synthetic construct
  misc_feature 1..80: note = Artificially Synthesized Probe
  source 1..80: mol_type = other DNA
gacagaaaggagtgtgtcatcatttcccaagttcattgaaatattaggtttgggttgtttgattgtctcggcagaaagct

SEQ ID NO: 25203 - DNA, 80 bp, synthetic construct
  misc_feature 1..80: note = Artificially Synthesized Probe
  source 1..80: mol_type = other DNA
catttaatatatttcttccgcaagagagagggatagaaagactagaaaaagacaactcagaaatgactatatgggtgatc

SEQ ID NO: 25204 - DNA, 80 bp, synthetic construct
  misc_feature 1..80: note = Artificially Synthesized Probe
  source 1..80: mol_type = other DNA
aacagacattttatgaaatctcatgaattgtaggtgaggaatttaggcagggctccgctgggtgatttcttctgccccat

SEQ ID NO: 25205 - DNA, 80 bp, synthetic construct
  misc_feature 1..80: note = Artificially Synthesized Probe
  source 1..80: mol_type = other DNA
gagggagagaaaagagctcctgcatttccttctatttattgattacagccacaaatggaaaaggaagcaggctttctgcc

SEQ ID NO: 25206 - DNA, 80 bp, synthetic construct
  misc_feature 1..80: note = Artificially Synthesized Probe
  source 1..80: mol_type = other DNA
tgttaaattctgccgttttagatttcaggaaaacaaatgcagagtggtagaggctggtggtgagaatgagctgagaaggg

SEQ ID NO: 25207 - DNA, 80 bp, synthetic construct
  misc_feature 1..80: note = Artificially Synthesized Probe
  source 1..80: mol_type = other DNA
caaagctcctgtcttttcacacacagttcctgctgtcttttcttcttaaaacaaccagccattcgacagtctccaattct

SEQ ID NO: 25208 - DNA, 80 bp, synthetic construct
  misc_feature 1..80: note = Artificially Synthesized Probe
  source 1..80: mol_type = other DNA
gttctgaaaggcttcctcacatattataaaacaggagccctccctaatttgagtcaggttagagaaagccaaacataggt

SEQ ID NO: 25209 - DNA, 80 bp, synthetic construct
  misc_feature 1..80: note = Artificially Synthesized Probe
  source 1..80: mol_type = other DNA
gataacagtgacaaggtataatttagagattataaagctgagaattgaaatgcctagcatgtgcacgtgcacacacacac

SEQ ID NO: 25210 - DNA, 80 bp, synthetic construct
  misc_feature 1..80: note = Artificially Synthesized Probe
  source 1..80: mol_type = other DNA
tttccaaataactagaagagaggatcctgagttctcaccacaaagaaataatgtttcaggagacggatatgcgaaagcca

SEQ ID NO: 25211 - DNA, 80 bp, synthetic construct
  misc_feature 1..80: note = Artificially Synthesized Probe
  source 1..80: mol_type = other DNA
gatgccatggccaaagtgaactctacatttttaagagaggctgctaaatatggccaatcacaacagaaaactagcatttc

SEQ ID NO: 25212 - DNA, 80 bp, synthetic construct
  misc_feature 1..80: note = Artificially Synthesized Probe
  source 1..80: mol_type = other DNA
ctgtgaggaagacagatttcctgccctcccagagttgccattactaagaatgttagccaataaataaatctttacgggaa

SEQ ID NO: 25213 - DNA, 80 bp, synthetic construct
  misc_feature 1..80: note = Artificially Synthesized Probe
  source 1..80: mol_type = other DNA
tgagcttctggattggatgagggtgtgctcttgcagaaagaattcctgaatactttctgcactgacagaacctgcttatt

SEQ ID NO: 25214 - DNA, 80 bp, synthetic construct
  misc_feature 1..80: note = Artificially Synthesized Probe
  source 1..80: mol_type = other DNA
taaaagatgcaggtgaggttgtgtggagaaaaaggaagagaaagtacactgttagcgggggtgtaaattaggtcaaccgt

SEQ ID NO: 25215 - DNA, 80 bp, synthetic construct
  misc_feature 1..80: note = Artificially Synthesized Probe
  source 1..80: mol_type = other DNA
tatacgatattttggaaaaggtgaaattgaagggatagcaatagaatcattgtttttaaagactggggagggtggttgac

SEQ ID NO: 25216 - DNA, 80 bp, synthetic construct
  misc_feature 1..80: note = Artificially Synthesized Probe
  source 1..80: mol_type = other DNA
ccaattagaaaatctttgaatccacctatgacctgaaatcccacactcacccactttgagttgtctcacctttccagaat

SEQ ID NO: 25217 - DNA, 80 bp, synthetic construct
  misc_feature 1..80: note = Artificially Synthesized Probe
  source 1..80: mol_type = other DNA
cctaaaatcaaggtggcagcagggctgtacctttctagaagctctaggggagaatctgtttacttgccttttttttagct

SEQ ID NO: 25218 - DNA, 80 bp, synthetic construct
  misc_feature 1..80: note = Artificially Synthesized Probe
  source 1..80: mol_type = other DNA
tgccatccttcatttttatagccagcagtatagcatcttccaattttcctttctttctgggctctgtcctcaaaacatct

SEQ ID NO: 25219 - DNA, 80 bp, synthetic construct
  misc_feature 1..80: note = Artificially Synthesized Probe
  source 1..80: mol_type = other DNA
aaatcttgtaacctctggcacaatggctggttattgtttaactgtacctacatcctaatagagttcaggcccctcccata

SEQ ID NO: 25220 - DNA, 80 bp, synthetic construct
  misc_feature 1..80: note = Artificially Synthesized Probe
  source 1..80: mol_type = other DNA
tttgcaaacgtagcttccctgttggctacatcaaattgagggtttgctaggatagaaaagtggaaaatatcaattaaaca

SEQ ID NO: 25221 - DNA, 80 bp, synthetic construct
  misc_feature 1..80: note = Artificially Synthesized Probe
  source 1..80: mol_type = other DNA
acgtatacacacacttatagtcacacacacacacaaaaccaccactgtccaggaactaaacaataattgtactcttctag

SEQ ID NO: 25222 - DNA, 80 bp, synthetic construct
  misc_feature 1..80: note = Artificially Synthesized Probe
  source 1..80: mol_type = other DNA
gttgcctttcttctcaatgcttagcagacaatttgataaacaaggatccttttctaagtagacttcatataggagagttt

SEQ ID NO: 25223 - DNA, 80 bp, synthetic construct
  misc_feature 1..80: note = Artificially Synthesized Probe
  source 1..80: mol_type = other DNA
tttctactccttgagatacctgcactcattgcttgcacttctgttagtgattttgttacagtattgtgctgtgtgtttcc

SEQ ID NO: 25224 - DNA, 80 bp, synthetic construct
  misc_feature 1..80: note = Artificially Synthesized Probe
  source 1..80: mol_type = other DNA
cgcagcaattttataatggctcattaacccctgtgagaggccagtaatatgggatagcaacggatttctatcaactccat

SEQ ID NO: 25225 - DNA, 80 bp, synthetic construct
  misc_feature 1..80: note = Artificially Synthesized Probe
  source 1..80: mol_type = other DNA
ttcacagaaggttctctgaccagccagtttccccatgcccccgttgataagttgccacaaatcttttgctaaaatacaga

SEQ ID NO: 25226 - DNA, 80 bp, synthetic construct
  misc_feature 1..80: note = Artificially Synthesized Probe
  source 1..80: mol_type = other DNA
gtgtcattcacattaaacaggaatagatgaaagcaaaggcttaacactgacaaaatcccaagtaggcaggctctgcatcc

SEQ ID NO: 25227 - DNA, 80 bp, synthetic construct
  misc_feature 1..80: note = Artificially Synthesized Probe
  source 1..80: mol_type = other DNA
ccccttgaacagagtagataattgcatatgtacaatttcctagagaactgaagcaggcttagcccatagttgaactaagt

SEQ ID NO: 25228 - DNA, 80 bp, synthetic construct
  misc_feature 1..80: note = Artificially Synthesized Probe
  source 1..80: mol_type = other DNA
ctctggatttccttatatttgatttctgtacttatcagtatttggcaggaagacaagtcatggcaacaactgatggctga

SEQ ID NO: 25229 - DNA, 80 bp, synthetic construct
  misc_feature 1..80: note = Artificially Synthesized Probe
  source 1..80: mol_type = other DNA
taaagtttaattatctgagcatgacacctagggctcttcacattctgtgcgatccaacttttcagcctcgtctcttttta

SEQ ID NO: 25230 - DNA, 80 bp, synthetic construct
  misc_feature 1..80: note = Artificially Synthesized Probe
  source 1..80: mol_type = other DNA
aatgtattcatacacatatctgtatgtgtgtatatgagtgtagctatagcactgggtgaatattaatatatcaattgagg

SEQ ID NO: 25231 - DNA, 80 bp, synthetic construct
  misc_feature 1..80: note = Artificially Synthesized Probe
  source 1..80: mol_type = other DNA
tccccattcatgggtgtgccttgagtgcagtgccagacacagaatagtcaagtaatatgttcttggatgaataaacaaag

SEQ ID NO: 25232 - DNA, 80 bp, synthetic construct
  misc_feature 1..80: note = Artificially Synthesized Probe
  source 1..80: mol_type = other DNA
tttggtattggtgctgggatctgagttttcaggtttgactatgcaacatgcttgaaacatggcctcaaggattgtttggc

SEQ ID NO: 25233 - DNA, 80 bp, synthetic construct
  misc_feature 1..80: note = Artificially Synthesized Probe
  source 1..80: mol_type = other DNA
caaaaaaaaaaaccttgtaaatagcattcagttgaaattctcatgtcgtggataaggattctgaggccccagttagttag

SEQ ID NO: 25234 - DNA, 80 bp, synthetic construct
  misc_feature 1..80: note = Artificially Synthesized Probe
  source 1..80: mol_type = other DNA
tactgtagataaaggcacaggccttgaggttacacacattaggttcgtatcttggtgttgacatttattgtcattgtaac

SEQ ID NO: 25235 - DNA, 80 bp, synthetic construct
  misc_feature 1..80: note = Artificially Synthesized Probe
  source 1..80: mol_type = other DNA
gacagcaattgtgcttgagtactaggaaggcaaaaattaataagatcatttttccccgacctggacttaaggaactcaaa

SEQ ID NO: 25236 - DNA, 80 bp, synthetic construct
  misc_feature 1..80: note = Artificially Synthesized Probe
  source 1..80: mol_type = other DNA
gtggtggtaatgtgctccctcctgctccatgaagctatgacattcatacttgtgactgtaaggtgaaggaactatgaata

SEQ ID NO: 25237 - DNA, 80 bp, synthetic construct
  misc_feature 1..80: note = Artificially Synthesized Probe
  source 1..80: mol_type = other DNA
acctatttatctttgtttttgttgcatttgcttttgaattcttggtcttgaagcctttgcctaagccaatgtctagaaga

SEQ ID NO: 25238 - DNA, 80 bp, synthetic construct
  misc_feature 1..80: note = Artificially Synthesized Probe
  source 1..80: mol_type = other DNA
ttttcttccagcatggcaagcaatcaccatttctcttgctgagcatctaatgaagtcataggtttgatgtagagggtatg

SEQ ID NO: 25239 - DNA, 80 bp, synthetic construct
  misc_feature 1..80: note = Artificially Synthesized Probe
  source 1..80: mol_type = other DNA
atctctttccagagatcatgcacctacaacatgaaggaatgaaagaaaacctaataatacagagactggctgagcgcggt

SEQ ID NO: 25240 - DNA, 80 bp, synthetic construct
  misc_feature 1..80: note = Artificially Synthesized Probe
  source 1..80: mol_type = other DNA
gcggtcagaagtaggccttgtggggctgaaaagaggttactaaacaaaagtattaaggacacagtctgtgcagtgtgtca

SEQ ID NO: 25241 - DNA, 80 bp, synthetic construct
  misc_feature 1..80: note = Artificially Synthesized Probe
  source 1..80: mol_type = other DNA
tcctgacgaagctctcctcgttttggtccatatcgttttattttgaaagattagtcacagcatcagacagatgcaagtag

SEQ ID NO: 25242 - DNA, 80 bp, synthetic construct
  misc_feature 1..80: note = Artificially Synthesized Probe
  source 1..80: mol_type = other DNA
aacgacttacagcttcagtcactgttccttgaatttgaatccgtttgaaatctgacctgaatccttgattggagtttttt

SEQ ID NO: 25243 - DNA, 80 bp, synthetic construct
  misc_feature 1..80: note = Artificially Synthesized Probe
  source 1..80: mol_type = other DNA
gtgtcatgatgatgtattaataattatttctcttgacattatgaaaatggatggtaacccgcaaaacacccttcttgctc

SEQ ID NO: 25244 - DNA, 80 bp, synthetic construct
  misc_feature 1..80: note = Artificially Synthesized Probe
  source 1..80: mol_type = other DNA
ttttccaatgacacacaaatctactgctagagaccattcaaatgcttagttacaccagggcttggctcctgtaccctgag

SEQ ID NO: 25245 - DNA, 80 bp, synthetic construct
  misc_feature 1..80: note = Artificially Synthesized Probe
  source 1..80: mol_type = other DNA
gccaaacaccccattcccttcatcctctctcagctgttctttggattacctccaaattgcatacataattttggtattga

SEQ ID NO: 25246 - DNA, 80 bp, synthetic construct
  misc_feature 1..80: note = Artificially Synthesized Probe
  source 1..80: mol_type = other DNA
ccatgtaaaacattgacacaaatcacagacatctcttctaaacagtggattttattggactgcacacgcgtgcagagatt

SEQ ID NO: 25247 - DNA, 80 bp, synthetic construct
  misc_feature 1..80: note = Artificially Synthesized Probe
  source 1..80: mol_type = other DNA
agcatactttttttttttgagacatgtctcactctgtcacccaggttggaatgtagtggtgcaatcatagctcattgcag

SEQ ID NO: 25248 - DNA, 80 bp, synthetic construct
  misc_feature 1..80: note = Artificially Synthesized Probe
  source 1..80: mol_type = other DNA
tggctgttaagagccacagggttgaagatacagtcgcaaagagagacacagttcttatcctcatgaagcttataatctta

SEQ ID NO: 25249 - DNA, 80 bp, synthetic construct
  misc_feature 1..80: note = Artificially Synthesized Probe
  source 1..80: mol_type = other DNA
gctctacatttccatgattttgcaagcaaatgtaaagctggaaatttctgtctagatatcatgggaagcctatatcctgg

SEQ ID NO: 25250 - DNA, 80 bp, synthetic construct
  misc_feature 1..80: note = Artificially Synthesized Probe
  source 1..80: mol_type = other DNA
gctattgtccttacgttataggttagaaaactgggccattgatttattcaagttcgattgtatatttatcgagtgaaaat

SEQ ID NO: 25251 - DNA, 80 bp, synthetic construct
  misc_feature 1..80: note = Artificially Synthesized Probe
  source 1..80: mol_type = other DNA
cttgcagtactctttcttcagctgttggaaaacctctaccacctactaggttctcagtaaatattggacgaataaatgga

SEQ ID NO: 25252 - DNA, 80 bp, synthetic construct
  misc_feature 1..80: note = Artificially Synthesized Probe
  source 1..80: mol_type = other DNA
tctgagaaagggctaggtattttctagggtcttaaagataggttttttagctgggatacagggagcttgtgatgagatga

SEQ ID NO: 25253 - DNA, 80 bp, synthetic construct
  misc_feature 1..80: note = Artificially Synthesized Probe
  source 1..80: mol_type = other DNA
tagagatcattcaagtaacttagaattcagtaacttctaggtcacagagaggctcagatacacactgttgacagcctttt

SEQ ID NO: 25254 - DNA, 80 bp, synthetic construct
  misc_feature 1..80: note = Artificially Synthesized Probe
  source 1..80: mol_type = other DNA
gtagaggccaaagatgctgctacatgttctgcaacactcaggacaactgaatgcccaaaaagaattatcttgccccaaat

SEQ ID NO: 25255 - DNA, 80 bp, synthetic construct
  misc_feature 1..80: note = Artificially Synthesized Probe
  source 1..80: mol_type = other DNA
tcccttaattctttcaatatttcaggtagagtcaaaggctggttttgtgctatcatgattttataactaatttttaacac

SEQ ID NO: 25256 - DNA, 80 bp, synthetic construct
  misc_feature 1..80: note = Artificially Synthesized Probe
  source 1..80: mol_type = other DNA
ggctttcaagtccaagcttggagtcatgtttgtaggagcctcaaatctctctctcaagaattttcatttgttttccccag

SEQ ID NO: 25257 - DNA, 80 bp, synthetic construct
  misc_feature 1..80: note = Artificially Synthesized Probe
  source 1..80: mol_type = other DNA
gtgtgtgtgtgatatagtgggggtggggcaggagataggaattgcagagaaatacgaacagttaaacataaagagaaact

SEQ ID NO: 25258 - DNA, 80 bp, synthetic construct
  misc_feature 1..80: note = Artificially Synthesized Probe
  source 1..80: mol_type = other DNA
ctgtgttctaaaattttagcaagactgaaagtgcacacaatctcagtgcactaaacactgaaaataaagtgtaatgagta

SEQ ID NO: 25259 - DNA, 80 bp, synthetic construct
  misc_feature 1..80: note = Artificially Synthesized Probe
  source 1..80: mol_type = other DNA
taaaccttataataacatcactagtcactacttctgcctctcagctagtcagaagggcacaccctatggctttacccttg

SEQ ID NO: 25260 - DNA, 80 bp, synthetic construct
  misc_feature 1..80: note = Artificially Synthesized Probe
  source 1..80: mol_type = other DNA
gagtatttagaaacataagccacagacttaacaaccagctctcaaaatcctctcctcagtatttataaagagaaataaat

SEQ ID NO: 25261 - DNA, 80 bp, synthetic construct
  misc_feature 1..80: note = Artificially Synthesized Probe
  source 1..80: mol_type = other DNA
acagtactcacagggcaggattcacacatttaaatgctaagggatgaggtatcaggagaggtataagacaacagggagtg

SEQ ID NO: 25262 - DNA, 80 bp, synthetic construct
  misc_feature 1..80: note = Artificially Synthesized Probe
  source 1..80: mol_type = other DNA
gatgtggtgcataagacatcataaaatatccctcatttccatttgcatttgtcactgctccaaatcattcacgtatctct

SEQ ID NO: 25263 - DNA, 80 bp, synthetic construct
  misc_feature 1..80: note = Artificially Synthesized Probe
  source 1..80: mol_type = other DNA
aatgagaatacttgctgggaattcgcctctttaagaaatagcagaggactgccaaattaacaaaatgcccctggtctgta

SEQ ID NO: 25264 - DNA, 80 bp, synthetic construct
  misc_feature 1..80: note = Artificially Synthesized Probe
  source 1..80: mol_type = other DNA
gatcctcatattcattcaaaacctatgggtgggagatgtggggaatgggtgggagatgtcagaatttgtatttacagtga

SEQ ID NO: 25265 - DNA, 80 bp, synthetic construct
  misc_feature 1..80: note = Artificially Synthesized Probe
  source 1..80: mol_type = other DNA
ttttggtgctagcaacaacaggacagaggcttactttgcaatatgtctgatagtgattgtgtggttttcctgcatcaaag

SEQ ID NO: 25266 - DNA, 80 bp, synthetic construct
  misc_feature 1..80: note = Artificially Synthesized Probe
  source 1..80: mol_type = other DNA
ttgttaagcagctttacttggaagcaagacttctgttcaaaattatgctaagatgaagagtctcaccatcatttccctgg

SEQ ID NO: 25267 - DNA, 80 bp, synthetic construct
  misc_feature 1..80: note = Artificially Synthesized Probe
  source 1..80: mol_type = other DNA
tgaaagtagatttctaaaactctgtagtatatttacatcaaactgtgggtaaaataatttggaataataaagtgttttag

SEQ ID NO: 25268 - DNA, 80 bp, synthetic construct
  misc_feature 1..80: note = Artificially Synthesized Probe
  source 1..80: mol_type = other DNA
tctcaggagcttcttaagagttgaaagaaaaaactcaatttccccaaccatcaaccagctgctcggcttgtgcacaaaaa

SEQ ID NO: 25269 - DNA, 80 bp, synthetic construct
  misc_feature 1..80: note = Artificially Synthesized Probe
  source 1..80: mol_type = other DNA
ggaagggggaatcaaaaaagagacaacgctcttttattttcatttcagctccttccagccatagttctggccagaaatgg

SEQ ID NO: 25270 - DNA, 80 bp, synthetic construct
  misc_feature 1..80: note = Artificially Synthesized Probe
  source 1..80: mol_type = other DNA
aaatgaaagcaaaaatgcctactttattgtgctattgtttaatggggtgaggttggtggctcatgcctgtagttccaggt

SEQ ID NO: 25271 - DNA, 80 bp, synthetic construct
  misc_feature 1..80: note = Artificially Synthesized Probe
  source 1..80: mol_type = other DNA
gtataagcacatgtagcaatgccaaaaatattggggtgcctactctgtgcaggggtttacattagttgttgcatatttcc

SEQ ID NO: 25272 - DNA, 80 bp, synthetic construct
  misc_feature 1..80: note = Artificially Synthesized Probe
  source 1..80: mol_type = other DNA
ttatgagagcaacagtctaatctagggagatgacagacagcaaaatcaatgaagagataatgaagggccacctagggatc

SEQ ID NO: 25273 - DNA, 80 bp, synthetic construct
  misc_feature 1..80: note = Artificially Synthesized Probe
  source 1..80: mol_type = other DNA
tcaccagtttccattcactgaccttttcctccttagtttctgttctccatgccagtctgaaaacagagaatttgcatgta

SEQ ID NO: 25274 - DNA, 80 bp, synthetic construct
  misc_feature 1..80: note = Artificially Synthesized Probe
  source 1..80: mol_type = other DNA
gtgatcttggtggcatcttcatttattattctggtggacgcatgtagcttactatcagtgtttttatgagacaagaagca

SEQ ID NO: 25275 - DNA, 80 bp, synthetic construct
  misc_feature 1..80: note = Artificially Synthesized Probe
  source 1..80: mol_type = other DNA
ctgctttgttgcagagaaagctagcagatggttttcatgacatcataggcagggaagagtagacatgtagggtccacatg

SEQ ID NO: 25276 - DNA, 80 bp, synthetic construct
  misc_feature 1..80: note = Artificially Synthesized Probe
  source 1..80: mol_type = other DNA
cctgattaaaagagtcgtacactgatctcaaaaagacttcaatggcagcatggcatggagttcaagagtatgggctctgg

SEQ ID NO: 25277 - DNA, 80 bp, synthetic construct
  misc_feature 1..80: note = Artificially Synthesized Probe
  source 1..80: mol_type = other DNA
tcttttccatatttccccctttccctgtctttggcatgacatttggaattgttattggaaagagaatcaactcagaaatc

SEQ ID NO: 25278 - DNA, 80 bp, synthetic construct
  misc_feature 1..80: note = Artificially Synthesized Probe
  source 1..80: mol_type = other DNA
cggctaatgtgggagctgtcatgtttggaaaataccatgatgccatgagttaatttcatacctgtcacaagatcttgcat

SEQ ID NO: 25279 - DNA, 80 bp, synthetic construct
  misc_feature 1..80: note = Artificially Synthesized Probe
  source 1..80: mol_type = other DNA
gcaaagaacaaagataaatttagcagtcttttccctttatgtcactaccaagtctagggaacaaatggtgctgttcttcc

SEQ ID NO: 25280 - DNA, 80 bp, synthetic construct
  misc_feature 1..80: note = Artificially Synthesized Probe
  source 1..80: mol_type = other DNA
tcaggagactgtggcactgtcatggatggtagctataccattttctaacaaagtatgtcaagaaaattgaacatcagtct

SEQ ID NO: 25281 - DNA, 80 bp, synthetic construct
  misc_feature 1..80: note = Artificially Synthesized Probe
  source 1..80: mol_type = other DNA
ttggaaatttcaagggccctcaggttgataagccctgtaattgcttgaagtaacttaatctccctagtaattgtgcagta

SEQ ID NO: 25282 - DNA, 80 bp, synthetic construct
  misc_feature 1..80: note = Artificially Synthesized Probe
  source 1..80: mol_type = other DNA
ccatgcccagcctatttctttttcctatatttttgcttttgctttgtaaatacctttgaatatacagtttatctcttcta

SEQ ID NO: 25283 - DNA, 80 bp, synthetic construct
  misc_feature 1..80: note = Artificially Synthesized Probe
  source 1..80: mol_type = other DNA
gcccaaggaccatagtaaccttccctgtatcattcaagttttagatgggtcaccaaagcaagcactctggatctttccat

SEQ ID NO: 25284 - DNA, 80 bp, synthetic construct
  misc_feature 1..80: note = Artificially Synthesized Probe
  source 1..80: mol_type = other DNA
tgggtaactaccccatgggtacatacattggatgtttagaaccatcatccccggcatctcaatataagccagtattattc

SEQ ID NO: 25285 - DNA, 80 bp, synthetic construct
  misc_feature 1..80: note = Artificially Synthesized Probe
  source 1..80: mol_type = other DNA
ttttagttctatcttcatgacattatatgttgctggggagatggtggtgaccagggaaaactgttcagaggaaaatcctg

SEQ ID NO: 25286 - DNA, 80 bp, synthetic construct
  misc_feature 1..80: note = Artificially Synthesized Probe
  source 1..80: mol_type = other DNA
atgtgcctgccttgatgcttaggaaagaaaaatggttgcaatgagagagaaagcagtgtttccagacttgtgatgacttt

SEQ ID NO: 25287 - DNA, 80 bp, synthetic construct
  misc_feature 1..80: note = Artificially Synthesized Probe
  source 1..80: mol_type = other DNA
aagcggtaggcaattcccagaactgagggttctttccctttttagaccatataaggtaactttctgacgttgccatggca

SEQ ID NO: 25288 - DNA, 80 bp, synthetic construct
  misc_feature 1..80: note = Artificially Synthesized Probe
  source 1..80: mol_type = other DNA
agacacgcaagccatttgatgttgtagttattttttacagtagaggtgctttgggaaagatgattgagatacctccttat

SEQ ID NO: 25289 - DNA, 80 bp, synthetic construct
  misc_feature 1..80: note = Artificially Synthesized Probe
  source 1..80: mol_type = other DNA
ctctactggtcaaggatctcagcatttttctgacgaatggcatgggcgggatgcgctccatctttgcattctctatgtgt

SEQ ID NO: 25290 - DNA, 80 bp, synthetic construct
  misc_feature 1..80: note = Artificially Synthesized Probe
  source 1..80: mol_type = other DNA
gtaaataagagcttggttcctgcacgactctggccacatttttgtcaatctatcaatacataatcttattttatatgtat

SEQ ID NO: 25291 - DNA, 80 bp, synthetic construct
  misc_feature 1..80: note = Artificially Synthesized Probe
  source 1..80: mol_type = other DNA
aaaaccacttgtttatagtaagagaactgaaacatgaaggcagagtttcactttgttcaacctcagctggcaacatgtgt

SEQ ID NO: 25292 - DNA, 80 bp, synthetic construct
  misc_feature 1..80: note = Artificially Synthesized Probe
  source 1..80: mol_type = other DNA
cttttttgctgtaaaccagggttgcctgtttaatatttgtatttcattatgagtagtgaactagtatctcttgtaatgca

SEQ ID NO: 25293 - DNA, 80 bp, synthetic construct
  misc_feature 1..80: note = Artificially Synthesized Probe
  source 1..80: mol_type = other DNA
tcaccctgaaattcaaatgttcattttgatgtcagcactaaccaggagaaagaaaaggtggaaacgattcctcttgcacg

SEQ ID NO: 25294 - DNA, 80 bp, synthetic construct
  misc_feature 1..80: note = Artificially Synthesized Probe
  source 1..80: mol_type = other DNA
tttcaacaggagatgtggttgagacagatatccaagctgtatcaccaagtgaactaccgaagctttttattgatttgtat

SEQ ID NO: 25295 - DNA, 80 bp, synthetic construct
  misc_feature 1..80: note = Artificially Synthesized Probe
  source 1..80: mol_type = other DNA
gcaggcagatcggttgagcctaggagttcaagaccagactgggcaacatgacgaaaccctgtctctatacaaaattcaaa

SEQ ID NO: 25296 - DNA, 80 bp, synthetic construct
  misc_feature 1..80: note = Artificially Synthesized Probe
  source 1..80: mol_type = other DNA
ttagtaagtttgattcatcacatcccagggtagaatacctcttgaccttcaaaactgcggtcgaccacaattcagatttt

SEQ ID NO: 25297 - DNA, 80 bp, synthetic construct
  misc_feature 1..80: note = Artificially Synthesized Probe
  source 1..80: mol_type = other DNA
ttgaattcggaagagagaaccttggtgccccttcttcctgaggaaatttgggaactatagtacaactccctctcaaaaaa

SEQ ID NO: 25298 - DNA, 80 bp, synthetic construct
  misc_feature 1..80: note = Artificially Synthesized Probe
  source 1..80: mol_type = other DNA
tatggatgccccagcttaggtcatgagcctgcacttgggaaaaatgaggggaagttatttttaaaatggaaagaagtgga

SEQ ID NO: 25299 - DNA, 80 bp, synthetic construct
  misc_feature 1..80: note = Artificially Synthesized Probe
  source 1..80: mol_type = other DNA
ggagatgatctgagcttaagcttttgttagcttcaaagagagctccgttcttgcctcatctctgcagtattgaaaaaaca

SEQ ID NO: 25300 - DNA, 80 bp, synthetic construct
  misc_feature 1..80: note = Artificially Synthesized Probe
  source 1..80: mol_type = other DNA
gtctctaaatgccattaacttgcttgccaggagggtctctcattcatgagtcaaatctcatgtttaataggagatttgac

SEQ ID NO: 25301 - DNA, 80 bp, synthetic construct
  misc_feature 1..80: note = Artificially Synthesized Probe
  source 1..80: mol_type = other DNA
aacactaggaggacaattagtcatcattcagagtgtatatcagtgtgcctctgcgaacacccacaggaaaaaataaatct

SEQ ID NO: 25302 - DNA, 80 bp, synthetic construct
  misc_feature 1..80: note = Artificially Synthesized Probe
  source 1..80: mol_type = other DNA
ctgatgcaaacagaggtgatgggatagaagacatggatttgggttctgatgactttgtgagagtgaatgggaaagcacat

SEQ ID NO: 25303 - DNA, 80 bp, synthetic construct
  misc_feature 1..80: note = Artificially Synthesized Probe
  source 1..80: mol_type = other DNA
attcattgccaacctcctactggctgttctgacccaataaacaagcaaaagtgacttgttagagccagcagctatatttt

SEQ ID NO: 25304 - DNA, 80 bp, synthetic construct
  misc_feature 1..80: note = Artificially Synthesized Probe
  source 1..80: mol_type = other DNA
taaaagcattcctatttttccacaaactctccagcatctgttgtttcctgactttttaaagatggcaattctaactggca

SEQ ID NO: 25305 - DNA, 80 bp, synthetic construct
  misc_feature 1..80: note = Artificially Synthesized Probe
  source 1..80: mol_type = other DNA
ttgagcagtatggccattttcacaatattgattcttcctatccatgagcatggaatgcttttctatttgtgtcttctctt

SEQ ID NO: 25306 - DNA, 80 bp, synthetic construct
  misc_feature 1..80: note = Artificially Synthesized Probe
  source 1..80: mol_type = other DNA
accagccttgcatcccaggtacgaagccaacttcgtacctggtggtaagctttttgatgtgctgctttttgatgtgctgc

SEQ ID NO: 25307 - DNA, 80 bp, synthetic construct
  misc_feature 1..80: note = Artificially Synthesized Probe
  source 1..80: mol_type = other DNA
aacactttgtctttgtcacctgctagtcattcagtatatttcaatgacgacagtattatctttggaatcacaaaaatatg

SEQ ID NO: 25308 - DNA, 80 bp, synthetic construct
  misc_feature 1..80: note = Artificially Synthesized Probe
  source 1..80: mol_type = other DNA
ctaatgccatcgttggagcagaagatgagccaaaggaaattatgagtttcttataaatgtgtcttaagtatctggaaatc

SEQ ID NO: 25309 - DNA, 80 bp, synthetic construct
  misc_feature 1..80: note = Artificially Synthesized Probe
  source 1..80: mol_type = other DNA
tgagagttttaattttctcttataacctagctaccagatgctatgtggcaaggacagtcttaggatgaaattgtccagac

SEQ ID NO: 25310 - DNA, 80 bp, synthetic construct
  misc_feature 1..80: note = Artificially Synthesized Probe
  source 1..80: mol_type = other DNA
aatgaggttgagagatattcatttaaagttctattagcctttatggaattattgtgagaagcccagcaatgttcagctca

SEQ ID NO: 25311 - DNA, 80 bp, synthetic construct
  misc_feature 1..80: note = Artificially Synthesized Probe
  source 1..80: mol_type = other DNA
atataatatatatactagaatgataaacaccgttattaggtgagctgagacaggaaggaggcgcgttggtttgcctctcc

SEQ ID NO: 25312 - DNA, 80 bp, synthetic construct
  misc_feature 1..80: note = Artificially Synthesized Probe
  source 1..80: mol_type = other DNA
cttccttcctttttttgaaacggtctcactctgttgcccaggcagaatcatagctcactctagcccgaaactctggggct

SEQ ID NO: 25313 - DNA, 80 bp, synthetic construct
  misc_feature 1..80: note = Artificially Synthesized Probe
  source 1..80: mol_type = other DNA
ttgacatatcaataacgccccaaatctatagtttacattcgggtttcttttggtgtatacattctacgggttttgacaaa

SEQ ID NO: 25314 - DNA, 80 bp, synthetic construct
  misc_feature 1..80: note = Artificially Synthesized Probe
  source 1..80: mol_type = other DNA
agctggccatgtgggatgctccaggagtgaagctagtggaatgtttttagtgactgaaagtccttaagaaatgtgaaaag

SEQ ID NO: 25315 - DNA, 80 bp, synthetic construct
  misc_feature 1..80: note = Artificially Synthesized Probe
  source 1..80: mol_type = other DNA
ggaaatttgctggacctcctccccataagaactgattccaaaccaggggaatagtttaacctagcctgataatcacataa

SEQ ID NO: 25316 - DNA, 80 bp, synthetic construct
  misc_feature 1..80: note = Artificially Synthesized Probe
  source 1..80: mol_type = other DNA
ctattcattagagccattagagaaccatagtgccaaaggttttgtgtaaacatgacatcatgactgttaggtgaaaaaaa

SEQ ID NO: 25317 - DNA, 80 bp, synthetic construct
  misc_feature 1..80: note = Artificially Synthesized Probe
  source 1..80: mol_type = other DNA
aaaccatcccaaaacactgattcaataaaggaaacatttattattgttcctaagtctactgtttctttgggagattctgc

SEQ ID NO: 25318 - DNA, 80 bp, synthetic construct
  misc_feature 1..80: note = Artificially Synthesized Probe
  source 1..80: mol_type = other DNA
tatttttctctgctaatgacacattacctcacttaaatctcataagtgtgctatacagcagcaactatcaccccagtttg

SEQ ID NO: 25319 - DNA, 80 bp, synthetic construct
  misc_feature 1..80: note = Artificially Synthesized Probe
  source 1..80: mol_type = other DNA
ttcttcttaactcctatgtcagtaagatgtgacagtaagatatgtattatgttggtgcaaaagttattgtggcttttgat

SEQ ID NO: 25320 - DNA, 80 bp, synthetic construct
  misc_feature 1..80: note = Artificially Synthesized Probe
  source 1..80: mol_type = other DNA
tggagtcttacttgaacggggtcacatttaaacttctaataatttttatgttgtagcctgtgaacatacaaatttcaggt

SEQ ID NO: 25321 - DNA, 80 bp, synthetic construct
  misc_feature 1..80: note = Artificially Synthesized Probe
  source 1..80: mol_type = other DNA
aatattctgaagcatacatgagtcattttttccaattcccattttaagatgggtcagttgaggtcagccagagtagaata

SEQ ID NO: 25322 - DNA, 80 bp, synthetic construct
  misc_feature 1..80: note = Artificially Synthesized Probe
  source 1..80: mol_type = other DNA
cttagccattaacactcatcagtcatatacaccatggaatactacacagccatataaagaacaaaattgtgtccttgcag

SEQ ID NO: 25323 - DNA, 80 bp, synthetic construct
  misc_feature 1..80: note = Artificially Synthesized Probe
  source 1..80: mol_type = other DNA
tgaagagcaatggagccgcttttacttggaagaggactaatcgtatatctaatgttcctcctgttaaaattctcaaaagc

SEQ ID NO: 25324 - DNA, 80 bp, synthetic construct
  misc_feature 1..80: note = Artificially Synthesized Probe
  source 1..80: mol_type = other DNA
aaacagaacatatgtaatagtatatcaagtctgccatgtatagatcttgcagatttttcttgtattacatgcatatgggt

SEQ ID NO: 25325 - DNA, 80 bp, synthetic construct
  misc_feature 1..80: note = Artificially Synthesized Probe
  source 1..80: mol_type = other DNA
tattaattcctggcccacatttttattctggttgtctcagttacttatgcattttcatgctgtaaggtccttagacaaca

SEQ ID NO: 25326 - DNA, 80 bp, synthetic construct
  misc_feature 1..80: note = Artificially Synthesized Probe
  source 1..80: mol_type = other DNA
cattccagcctggcactggcatcaaatttactggtagtcaggtgatatttaatgtccatatactcagagtaaaaaactct

SEQ ID NO: 25327 - DNA, 80 bp, synthetic construct
  misc_feature 1..80: note = Artificially Synthesized Probe
  source 1..80: mol_type = other DNA
cagaagcagataaaagaatccatctgccttctcaagaaattgcagagatggcctttagttctagccactcgaaaggctga

SEQ ID NO: 25328 - DNA, 80 bp, synthetic construct
  misc_feature 1..80: note = Artificially Synthesized Probe
  source 1..80: mol_type = other DNA
tttacttttatgaaagagtctcactctgtcacccaggctcaagcgcagtggcttgatcacacctcacaacagcttcaacc

SEQ ID NO: 25329 - DNA, 80 bp, synthetic construct
  misc_feature 1..80: note = Artificially Synthesized Probe
  source 1..80: mol_type = other DNA
aacacggaagattacaaacagaactttcaaagtgactgaactaagtaaaaatgcatatgcatgctaacatagattgaatg

SEQ ID NO: 25330 - DNA, 80 bp, synthetic construct
  misc_feature 1..80: note = Artificially Synthesized Probe
  source 1..80: mol_type = other DNA
cacttgaatttattttgaccataaactaagggctgttattaaaatacttagagtagtctttggtacagcagaaatactcc

SEQ ID NO: 25331 - DNA, 80 bp, synthetic construct
  misc_feature 1..80: note = Artificially Synthesized Probe
  source 1..80: mol_type = other DNA
gaagtaaaataagtcaggagggtggctgggtaggcctactcctaatgagaatacatgtccattgaaggtttgttattcct

SEQ ID NO: 25332 - DNA, 80 bp, synthetic construct
  misc_feature 1..80: note = Artificially Synthesized Probe
  source 1..80: mol_type = other DNA
gatcccaaacgaggggcacatatctcactttcaagggaaataccgctgctttgcttcaaataaactgggaatcgctatgt

SEQ ID NO: 25333 - DNA, 80 bp, synthetic construct
  misc_feature 1..80: note = Artificially Synthesized Probe
  source 1..80: mol_type = other DNA
tgcaggcaactcctactcatgttttgttaggtggggcaaagcaagttgcatagtcccatctaacatcaatagtatgatgc

SEQ ID NO: 25334 - DNA, 80 bp, synthetic construct
  misc_feature 1..80: note = Artificially Synthesized Probe
  source 1..80: mol_type = other DNA
cccagacaaatgctttccaaatgaaggtaggtatgaccatattaatgtcagtcataacagactttatttgtaaaagcctt

SEQ ID NO: 25335 - DNA, 80 bp, synthetic construct
  misc_feature 1..80: note = Artificially Synthesized Probe
  source 1..80: mol_type = other DNA
agtaaacccagaaacagaccatcacatgtgtaaaaatagttgagggaattggcatgttagcatggatctctctctctctc

SEQ ID NO: 25336 - DNA, 80 bp, synthetic construct
  misc_feature 1..80: note = Artificially Synthesized Probe
  source 1..80: mol_type = other DNA
caccatgcccagtgtgggatgatttctttagtcatattaaagcctcatgaaggaaatcatcaagaatacattctcctaca

SEQ ID NO: 25337 - DNA, 80 bp, synthetic construct
  misc_feature 1..80: note = Artificially Synthesized Probe
  source 1..80: mol_type = other DNA
tggaaaatggaagtgggggttgagatcagcacctgacaaaaaggtgatgacgatattcctattttgtaaaatgggtagta

SEQ ID NO: 25338 - DNA, 80 bp, synthetic construct
  misc_feature 1..80: note = Artificially Synthesized Probe
  source 1..80: mol_type = other DNA
tttgtcagtgagttattcaacaatcttcctgaaactcccataatacaccagccactttctagtaatttgggatttaacag

SEQ ID NO: 25339 - DNA, 80 bp, synthetic construct
  misc_feature 1..80: note = Artificially Synthesized Probe
  source 1..80: mol_type = other DNA
catgttttggaggttcatccatgtagtagcatatatcagtagtttatttctctatattgctgaagagtatttcactgcat

SEQ ID NO: 25340 - DNA, 80 bp, synthetic construct
  misc_feature 1..80: note = Artificially Synthesized Probe
  source 1..80: mol_type = other DNA
gtgataaagtatgtgcactcagtagcatgcagttgtgacaatgatggcagactgtgagcaattcgccaagcatatttaag

SEQ ID NO: 25341 - DNA, 80 bp, synthetic construct
  misc_feature 1..80: note = Artificially Synthesized Probe
  source 1..80: mol_type = other DNA
cttctattttgttcctagagtgccggagaatctgtagtgttgcataacatggtagcggttaagatgccagtgttttttgg

SEQ ID NO: 25342 - DNA, 80 bp, synthetic construct
  misc_feature 1..80: note = Artificially Synthesized Probe
  source 1..80: mol_type = other DNA
tagaaatctgtctatgacactgaataataaatgtgaaagcctaatggagaagagtgaaaagatagatgctgtgatatgct

SEQ ID NO: 25343 - DNA, 80 bp, synthetic construct
  misc_feature 1..80: note = Artificially Synthesized Probe
  source 1..80: mol_type = other DNA
tgcaagttgattctgatccctttgcagagaggccattcaggatcaagtccagtcttgttgaaacaaagttaagtgatttt

SEQ ID NO: 25344 - DNA, 80 bp, synthetic construct
  misc_feature 1..80: note = Artificially Synthesized Probe
  source 1..80: mol_type = other DNA
atgcaaggatgataatgcttcagtggcagtactatctgttcgaattgctaggttttttttaacgctctcagggagcagct

SEQ ID NO: 25345 - DNA, 80 bp, synthetic construct
  misc_feature 1..80: note = Artificially Synthesized Probe
  source 1..80: mol_type = other DNA
cctccacaagagactgtgtaattctataatgcaaattcccccaccaaaagttgaaagatatcaatgtaatgctcaggaag

SEQ ID NO: 25346 - DNA, 80 bp, synthetic construct
  misc_feature 1..80: note = Artificially Synthesized Probe
  source 1..80: mol_type = other DNA
atccaattgtcctcccatgcaatcctcccaaaggcctcccacctttacacatttattggatgaatattggtaagtaatgc

SEQ ID NO: 25347 - DNA, 80 bp, synthetic construct
  misc_feature 1..80: note = Artificially Synthesized Probe
  source 1..80: mol_type = other DNA
taattaggtcattgtctgcattgatcagttttcagttcagccaattcagattcatagggcagaggtggagacaaagatgg

SEQ ID NO: 25348 - DNA, 80 bp, synthetic construct
  misc_feature 1..80: note = Artificially Synthesized Probe
  source 1..80: mol_type = other DNA
cactataacattcttctagtagcctcagttctcttcagtggagctataacttgaatcttctccacctggattcaagatta

SEQ ID NO: 25349 - DNA, 80 bp, synthetic construct
  misc_feature 1..80: note = Artificially Synthesized Probe
  source 1..80: mol_type = other DNA
ataacttagataccttgcatacttgcaagttcagtggaggaggatgtaagctccttttgaagaaccgtcagttttaaggt

SEQ ID NO: 25350 - DNA, 80 bp, synthetic construct
  misc_feature 1..80: note = Artificially Synthesized Probe
  source 1..80: mol_type = other DNA
cttttcttttctattttgtagcaaattccatcaagcaaagaaaacccaaactgctgttgcctcccactgagagtggcagt

SEQ ID NO: 25351 - DNA, 80 bp, synthetic construct
  misc_feature 1..80: note = Artificially Synthesized Probe
  source 1..80: mol_type = other DNA
aatctgctgctttgcaggttccaaggagccctatttatatctatttttactctgctgccctttgcacacatggaggtcca

SEQ ID NO: 25352 - DNA, 80 bp, synthetic construct
  misc_feature 1..80: note = Artificially Synthesized Probe
  source 1..80: mol_type = other DNA
tttacagcccctaagctttgtaagtttctctttccaaccaccaaaaatatcaaagttgcttgtctgtcttcaactcccaa

SEQ ID NO: 25353 - DNA, 80 bp, synthetic construct
  misc_feature 1..80: note = Artificially Synthesized Probe
  source 1..80: mol_type = other DNA
agtatctgaacaaatgtgttttgagggaaaacttataaaatggccatagatggactcatgtgcactgctcaaatagtttt

SEQ ID NO: 25354 - DNA, 80 bp, synthetic construct
  misc_feature 1..80: note = Artificially Synthesized Probe
  source 1..80: mol_type = other DNA
ggggtatatcatttattgctccagtgaccttaagaaattaatttattggagcttcagactccttactgttaaatgatcac

SEQ ID NO: 25355 - DNA, 80 bp, synthetic construct
  misc_feature 1..80: note = Artificially Synthesized Probe
  source 1..80: mol_type = other DNA
aggattaaaagggaaacttctctctgctgactgttaagtcccactttactgtgttttacacaaacagggaatagggctgt

SEQ ID NO: 25356 - DNA, 80 bp, synthetic construct
  misc_feature 1..80: note = Artificially Synthesized Probe
  source 1..80: mol_type = other DNA
aggcaggcaaattgttgtgtcagctctttcctgcatataacacttttgtaatccatatcttgggttcagatgataaattc

SEQ ID NO: 25357 - DNA, 80 bp, synthetic construct
  misc_feature 1..80: note = Artificially Synthesized Probe
  source 1..80: mol_type = other DNA
atttgatgtttctatataatttggctacatcgtgcaacaggggtatttttctgtaaccccctcctcccctccctggcaca

SEQ ID NO: 25358 - DNA, 80 bp, synthetic construct
  misc_feature 1..80: note = Artificially Synthesized Probe
  source 1..80: mol_type = other DNA
actccattctgaaaacacccattgtgcttaagtaaaatcatggattcgattggattctttctgtatgtgcaatgtctttc

SEQ ID NO: 25359 - DNA, 80 bp, synthetic construct
  misc_feature 1..80: note = Artificially Synthesized Probe
  source 1..80: mol_type = other DNA
gaacttcttgagtcagttgataaatattgggggagcttggatttggaagcataaattgggctggccttctttcctgtctt

SEQ ID NO: 25360 - DNA, 80 bp, synthetic construct
  misc_feature 1..80: note = Artificially Synthesized Probe
  source 1..80: mol_type = other DNA
gtccacaccctgtggagtaattacaaaggcacttatctcacttggacttgaacttgaacttgccaaggctagttgtgtac

SEQ ID NO: 25361 - DNA, 80 bp, synthetic construct
  misc_feature 1..80: note = Artificially Synthesized Probe
  source 1..80: mol_type = other DNA
tcaacccacaatcaagtggagagtcaatggctccccagttgacagtaagtttaaaaaccaattgcaatgcaatgctgaag

SEQ ID NO: 25362 - DNA, 80 bp, synthetic construct
  misc_feature 1..80: note = Artificially Synthesized Probe
  source 1..80: mol_type = other DNA
tcttgaggtgttttctgaatctccccaagcttacgttttttaaactgcaaaatggagatagtggcggttggttgtgcttg

SEQ ID NO: 25363 - DNA, 80 bp, synthetic construct
  misc_feature 1..80: note = Artificially Synthesized Probe
  source 1..80: mol_type = other DNA
aagatcataatagtaagacccctgtggtaatttacctttgagtggagatgggaaggaagtgaggaagtcagccacctaaa

SEQ ID NO: 25364 - DNA, 80 bp, synthetic construct
  misc_feature 1..80: note = Artificially Synthesized Probe
  source 1..80: mol_type = other DNA
gttacattacttactggagaatgcaacccaggtacatttaaaaccaggaactaaacccaggaaggattaactccagagct

SEQ ID NO: 25365 - DNA, 80 bp, synthetic construct
  misc_feature 1..80: note = Artificially Synthesized Probe
  source 1..80: mol_type = other DNA
acatttctgtaaaagtccaacacgagtcttggctaaaatcaaaatgtcagcagtgccatgtcctggaagtgcttggagag

SEQ ID NO: 25366 - DNA, 80 bp, synthetic construct
  misc_feature 1..80: note = Artificially Synthesized Probe
  source 1..80: mol_type = other DNA
cttttttttcttccttttctttttcttcacttttattttaaagtctctctccatcacccagtctggagtgcagtggcgag

SEQ ID NO: 25367 - DNA, 80 bp, synthetic construct
  misc_feature 1..80: note = Artificially Synthesized Probe
  source 1..80: mol_type = other DNA
ttccttatcaaactgacattctttaatctctttcagatcatccatttgctggtgatgttgtcttccccagggaaatcagt

SEQ ID NO: 25368 - DNA, 80 bp, synthetic construct
  misc_feature 1..80: note = Artificially Synthesized Probe
  source 1..80: mol_type = other DNA
cattttcttaatccagtctatcatagatggacatttgggttggttccaagtctttgctattgtgaataatgccgcaaaaa

SEQ ID NO: 25369 - DNA, 80 bp, synthetic construct
  misc_feature 1..80: note = Artificially Synthesized Probe
  source 1..80: mol_type = other DNA
aggctgtattgtgtctatattgttacatgtacccagtacctctgagacataaggtaacaaacttaccggtccaggaaatt

SEQ ID NO: 25370 - DNA, 80 bp, synthetic construct
  misc_feature 1..80: note = Artificially Synthesized Probe
  source 1..80: mol_type = other DNA
aatgttctcccaggacagcaggaggtttgaaaggttcattatctctttcaattactagctttcccatttagtaccctgga

SEQ ID NO: 25371 - DNA, 80 bp, synthetic construct
  misc_feature 1..80: note = Artificially Synthesized Probe
  source 1..80: mol_type = other DNA
tgcttctcacttccacctagataagggagagcatatttgtttgatcatctgttttcactgatgccacttttcctcataca

SEQ ID NO: 25372 - DNA, 80 bp, synthetic construct
  misc_feature 1..80: note = Artificially Synthesized Probe
  source 1..80: mol_type = other DNA
acatatacaaaaggcatgttgagaatggagttaagtgagagcctatatagtatagtgattgagagcatgagctttagtct

SEQ ID NO: 25373 - DNA, 80 bp, synthetic construct
  misc_feature 1..80: note = Artificially Synthesized Probe
  source 1..80: mol_type = other DNA
atgttaggaaattacagtgggacaaaccctgcatgaggattggacagttatggtgacaatttgggttacttaacttgcag

SEQ ID NO: 25374 - DNA, 80 bp, synthetic construct
  misc_feature 1..80: note = Artificially Synthesized Probe
  source 1..80: mol_type = other DNA
aaaaaaaaaaaaaaactggaggagctaggcctagaagaggctgcatactagtcttctaggttcttgatcacaaagcactg

SEQ ID NO: 25375 - DNA, 80 bp, synthetic construct
  misc_feature 1..80: note = Artificially Synthesized Probe
  source 1..80: mol_type = other DNA
actctgaagctcaatggctcagattcaaatctcagctcagtcacttattagatctttgaacttagacaagctgcttaaca

SEQ ID NO: 25376 - DNA, 80 bp, synthetic construct
  misc_feature 1..80: note = Artificially Synthesized Probe
  source 1..80: mol_type = other DNA
ttttgctgtgcagaagtgctttagtttgattagatcccatttgtaaattctggcttttgtttcaattgcttttgccattt

SEQ ID NO: 25377 - DNA, 80 bp, synthetic construct
  misc_feature 1..80: note = Artificially Synthesized Probe
  source 1..80: mol_type = other DNA
gtagttctccttgaagaggtcctttgcatcccttgttagctgtattcctaggtatttgattctctttgtagcaattgtga

SEQ ID NO: 25378 - DNA, 80 bp, synthetic construct
  misc_feature 1..80: note = Artificially Synthesized Probe
  source 1..80: mol_type = other DNA
ctattaattactgcctcaatttcagaatttgttattgctctattcagggattcaacttcttctggatttagtattgggag

SEQ ID NO: 25379 - DNA, 80 bp, synthetic construct
  misc_feature 1..80: note = Artificially Synthesized Probe
  source 1..80: mol_type = other DNA
aagtctcccactattattgtgtgggagtctcagtgtctttgtatgtgtctctaagaacttgttttatgaatctgggtgct

SEQ ID NO: 25380 - DNA, 80 bp, synthetic construct
  misc_feature 1..80: note = Artificially Synthesized Probe
  source 1..80: mol_type = other DNA
ggaagttctcctggataatatccggaagtgtgtttttcagcttgtttccattctacccatctccttcaggtactccaacc

SEQ ID NO: 25381 - DNA, 80 bp, synthetic construct
  misc_feature 1..80: note = Artificially Synthesized Probe
  source 1..80: mol_type = other DNA
aaaggcactcagggtcaggcctgaagaggcattgattctgccacagtgggtgtgttgggctgtgggggacgtgtcttggg

SEQ ID NO: 25382 - DNA, 80 bp, synthetic construct
  misc_feature 1..80: note = Artificially Synthesized Probe
  source 1..80: mol_type = other DNA
gccttcatttcttcatctgcttgtctcatttctgttgcttgcttggtctatgttggtatttatgtgtgagccgcctctat

SEQ ID NO: 25383 - DNA, 80 bp, synthetic construct
  misc_feature 1..80: note = Artificially Synthesized Probe
  source 1..80: mol_type = other DNA
actgccactctgaaccattagacctacggggcttcatgttatgttagtacttcccatacatgctttctctctttaggcct

SEQ ID NO: 25384 - DNA, 80 bp, synthetic construct
  misc_feature 1..80: note = Artificially Synthesized Probe
  source 1..80: mol_type = other DNA
acaactttttaaagcagaatcccagctgacctatgatgggaacataatgtgagggaggaataagtgactgttttcttggg

SEQ ID NO: 25385 - DNA, 80 bp, synthetic construct
  misc_feature 1..80: note = Artificially Synthesized Probe
  source 1..80: mol_type = other DNA
ggttggcaaatctttctattattggtgtaggaataagggctgattctgtctataatcaaaataactatgtttcattacac

SEQ ID NO: 25386 - DNA, 80 bp, synthetic construct
  misc_feature 1..80: note = Artificially Synthesized Probe
  source 1..80: mol_type = other DNA
tcagctcatactgctctagacagtgctgccgatataactcaagtaactgttcttggtaagtgcactaactaatgagaaat

SEQ ID NO: 25387 - DNA, 80 bp, synthetic construct
  misc_feature 1..80: note = Artificially Synthesized Probe
  source 1..80: mol_type = other DNA
atcccaccaccaatatttcaagtctctctcacacccaacctactgaacatcctgcccacatctttttaaagacgttttat

SEQ ID NO: 25388 - DNA, 80 bp, synthetic construct
  misc_feature 1..80: note = Artificially Synthesized Probe
  source 1..80: mol_type = other DNA
caataattcatcagataaagtagtcgagcttcagataaactggaattcatcccaggcctagtgagtagaggggtaagtgt

SEQ ID NO: 25389 - DNA, 80 bp, synthetic construct
  misc_feature 1..80: note = Artificially Synthesized Probe
  source 1..80: mol_type = other DNA
ttaacaatgccaaatctccctgttctgatataaactgccttcctactctttttgagaactccaggttaagacggtatcaa

SEQ ID NO: 25390 - DNA, 80 bp, synthetic construct
  misc_feature 1..80: note = Artificially Synthesized Probe
  source 1..80: mol_type = other DNA
aaattagtacattgaggttacacattgctttatgcctaaaagggtgaggtatcttgaactggagttggggcatggcttac

SEQ ID NO: 25391 - DNA, 80 bp, synthetic construct
  misc_feature 1..80: note = Artificially Synthesized Probe
  source 1..80: mol_type = other DNA
aagctggagctgaccacaacagcaatattagcggtaggaagacttgggataactgttttcattactctagatagtcaaaa

SEQ ID NO: 25392 - DNA, 80 bp, synthetic construct
  misc_feature 1..80: note = Artificially Synthesized Probe
  source 1..80: mol_type = other DNA
tattcatgactactgtacaggttttattcattttgatgtccttaaaacttggctgctgatattaatacatggtgtttact

SEQ ID NO: 25393 - DNA, 80 bp, synthetic construct
  misc_feature 1..80: note = Artificially Synthesized Probe
  source 1..80: mol_type = other DNA
aaacaccagtagacattttgtattctcctttctagtaattctgaggatggtcttgtgaagaaagcatcatgaacgcctta

SEQ ID NO: 25394 - DNA, 80 bp, synthetic construct
  misc_feature 1..80: note = Artificially Synthesized Probe
  source 1..80: mol_type = other DNA
tagatatcagtaatactgtgtatttgccagtcagttcctcagagaagcacatcatgttccagtaacattagctcattaat

SEQ ID NO: 25395 - DNA, 80 bp, synthetic construct
  misc_feature 1..80: note = Artificially Synthesized Probe
  source 1..80: mol_type = other DNA
gaatgaattaccagaccccctccagagatgtactagaaataattcctatctacatgataatggtcagagggacataattt

SEQ ID NO: 25396 - DNA, 80 bp, synthetic construct
  misc_feature 1..80: note = Artificially Synthesized Probe
  source 1..80: mol_type = other DNA
tctgttttctagattaatagttataaccttgcttgggtcatagatctctttgaaactatgttggacgtgcaagctctttt

SEQ ID NO: 25397 - DNA, 80 bp, synthetic construct
  misc_feature 1..80: note = Artificially Synthesized Probe
  source 1..80: mol_type = other DNA
acacatctgtgatcagactaaatgagtcttgccttctgttttagcctttgaaatccatggagcagaatggaccaggccta

SEQ ID NO: 25398 - DNA, 80 bp, synthetic construct
  misc_feature 1..80: note = Artificially Synthesized Probe
  source 1..80: mol_type = other DNA
ctcatgccctgggcttcagtggcatgtctggagctttcctaatactgatgagatatatacccagatttatatgtagaatt

SEQ ID NO: 25399 - DNA, 80 bp, synthetic construct
  misc_feature 1..80: note = Artificially Synthesized Probe
  source 1..80: mol_type = other DNA
gggtggacgttataaacagtacattagttaaagttacctggtcaacagttccaaaggacagagtacatggacgtctgaaa

SEQ ID NO: 25400 - DNA, 80 bp, synthetic construct
  misc_feature 1..80: note = Artificially Synthesized Probe
  source 1..80: mol_type = other DNA
ttgaatattctctgtgctatgttgggagtctaatgatcacttaaggccatggtttgtaagctgccgttcttccttgtagc

SEQ ID NO: 25401 - DNA, 80 bp, synthetic construct
  misc_feature 1..80: note = Artificially Synthesized Probe
  source 1..80: mol_type = other DNA
tttctgctgaaattagcacgtatgtttaaatacatacaggcataatcccaacggaagtagactttagcacttttacgtgc

SEQ ID NO: 25402 - DNA, 80 bp, synthetic construct
  misc_feature 1..80: note = Artificially Synthesized Probe
  source 1..80: mol_type = other DNA
gtttttcaattgactttgtggtcattcacaattatgtgttcaaaaaatctaaaaaagtgatgatttcacctccttctttc

SEQ ID NO: 25403 - DNA, 80 bp, synthetic construct
  misc_feature 1..80: note = Artificially Synthesized Probe
  source 1..80: mol_type = other DNA
gaaagctccaccttaggagaagggagtaagtacatgaggcttctctttttaatagaggctttaaaaagagactgcatctt

SEQ ID NO: 25404 - DNA, 80 bp, synthetic construct
  misc_feature 1..80: note = Artificially Synthesized Probe
  source 1..80: mol_type = other DNA
ctttgcagagaaatcaggtcagaggaactgatgtacacacgaagtgaaacagagagagatttatgtagggcttaggctgt

SEQ ID NO: 25405 - DNA, 80 bp, synthetic construct
  misc_feature 1..80: note = Artificially Synthesized Probe
  source 1..80: mol_type = other DNA
cagtattccagctaactgcccccttcccgagttgacactgatttctattctataggcatgtcttgctataagtacaggga

SEQ ID NO: 25406 - DNA, 80 bp, synthetic construct
  misc_feature 1..80: note = Artificially Synthesized Probe
  source 1..80: mol_type = other DNA
gaaaagtattaacttctcacaccactttcaaaatgtcagtaaaaccattccattggtatgtacctgcaagcctgcatttc

SEQ ID NO: 25407 - DNA, 80 bp, synthetic construct
  misc_feature 1..80: note = Artificially Synthesized Probe
  source 1..80: mol_type = other DNA
aagaattggggcgataatgatagcatttttcaagatgtaattgagacaagagggagaggtgagaaatgagattatatttg

SEQ ID NO: 25408 - DNA, 80 bp, synthetic construct
  misc_feature 1..80: note = Artificially Synthesized Probe
  source 1..80: mol_type = other DNA
aaaaacgtattgctaaattaaccaaagaaaatatgtatgttctagtttctagcacttaaaatgggctctaactgccgggc

SEQ ID NO: 25409 - DNA, 80 bp, synthetic construct
  misc_feature 1..80: note = Artificially Synthesized Probe
  source 1..80: mol_type = other DNA
aaaattagcatttcatattgtagagcaactaagagaatctactaggtctctgcatgtagtcgtaaaatgttccaggaaga

SEQ ID NO: 25410 - DNA, 80 bp, synthetic construct
  misc_feature 1..80: note = Artificially Synthesized Probe
  source 1..80: mol_type = other DNA
tttaaacaaagaagcaactgatgggctgtaggtatagccagaaaaaaatattgcctcactggtatcaaaacatttgagca

SEQ ID NO: 25411 - DNA, 80 bp, synthetic construct
  misc_feature 1..80: note = Artificially Synthesized Probe
  source 1..80: mol_type = other DNA
ctttctccaccttcccctttctgctactctctcaacttcttagttcttttttgttgtaatgtcatcatttttctcaggtc

SEQ ID NO: 25412 - DNA, 80 bp, synthetic construct
  misc_feature 1..80: note = Artificially Synthesized Probe
  source 1..80: mol_type = other DNA
ttgaactaagggcttctgttcttcacaggccagaggtcattcctaactccataccacgtagatatctccatggggccatt

SEQ ID NO: 25413 - DNA, 80 bp, synthetic construct
  misc_feature 1..80: note = Artificially Synthesized Probe
  source 1..80: mol_type = other DNA
catggtggcatataacacagagtaggcaaagaagtgccatcctgctttattcctagaaacctgacatacttgatgaacag

SEQ ID NO: 25414 - DNA, 80 bp, synthetic construct
  misc_feature 1..80: note = Artificially Synthesized Probe
  source 1..80: mol_type = other DNA
ccaaagactccacctctaacaccctcacattggttatcaggttttaacataggaagcttgggaggacacagatattcaga

SEQ ID NO: 25415 - DNA, 80 bp, synthetic construct
  misc_feature 1..80: note = Artificially Synthesized Probe
  source 1..80: mol_type = other DNA
catatttgcctgattttactattcggtgtgtttgcatagatgttgctacttggtgggtttttctccgtatgcacattggt

SEQ ID NO: 25416 - DNA, 80 bp, synthetic construct
  misc_feature 1..80: note = Artificially Synthesized Probe
  source 1..80: mol_type = other DNA
tattgttgaatgtacatctaccccagcccctcaaaagaaaaactgtttacatagaaattcctacacatacgtttgcgtat

SEQ ID NO: 25417 - DNA, 80 bp, synthetic construct
  misc_feature 1..80: note = Artificially Synthesized Probe
  source 1..80: mol_type = other DNA
atttctaaggttccagttttctggagggacagtcatcatgttttgatttatctgggagaaaactgtggtgcacagcttgt

SEQ ID NO: 25418 - DNA, 80 bp, synthetic construct
  misc_feature 1..80: note = Artificially Synthesized Probe
  source 1..80: mol_type = other DNA
ctgtttagtgagcagtatgatttgtacatgccattgaaaattattaatcagaagaaaattaagcagggtctttgctatac

SEQ ID NO: 25419 - DNA, 80 bp, synthetic construct
  misc_feature 1..80: note = Artificially Synthesized Probe
  source 1..80: mol_type = other DNA
tgcttatgactatgtatggtttgaaaatattttcattatacatgaaattcaactttccaaataaaagttctacttcatgt

SEQ ID NO: 25420 - DNA, 80 bp, synthetic construct
  misc_feature 1..80: note = Artificially Synthesized Probe
  source 1..80: mol_type = other DNA
tctgaaaataatcctaactgcattaaattcacaccaaagtgtccagaaagacggcaccttaactggcatcccaggaatgc

SEQ ID NO: 25421 - DNA, 80 bp, synthetic construct
  misc_feature 1..80: note = Artificially Synthesized Probe
  source 1..80: mol_type = other DNA
tcacccccaaaaaataatgaagacctatcaggatggcggcaccttaattactactggaattaaaaacagtggctctacca

SEQ ID NO: 25422 - DNA, 80 bp, synthetic construct
  misc_feature 1..80: note = Artificially Synthesized Probe
  source 1..80: mol_type = other DNA
acaccacctgagccacaaagtcagcaacagcaaccattgtagcccacgcaataaacaaacaggtccagactgatagaaat

SEQ ID NO: 25423 - DNA, 80 bp, synthetic construct
  misc_feature 1..80: note = Artificially Synthesized Probe
  source 1..80: mol_type = other DNA
ttggccgaggtgcacagagaccatgtactgtgcaactgttaggcaagttttaaattatttcaaagtaagcagagaactga

SEQ ID NO: 25424 - DNA, 80 bp, synthetic construct
  misc_feature 1..80: note = Artificially Synthesized Probe
  source 1..80: mol_type = other DNA
aaacaaaaacaaaacctggaagcctcaagacaatgaagtaaactttaggaaatggaaaagacagcaggctgtgcccaaag

SEQ ID NO: 25425 - DNA, 80 bp, synthetic construct
  misc_feature 1..80: note = Artificially Synthesized Probe
  source 1..80: mol_type = other DNA
ccccgctgtgggcccagagtcacagaaatcacccccagaaatttgcagaaactcaacaccaggacacagacccaccgccc

SEQ ID NO: 25426 - DNA, 80 bp, synthetic construct
  misc_feature 1..80: note = Artificially Synthesized Probe
  source 1..80: mol_type = other DNA
gctctggacaacaggtggggccaggcccatggggccccactcagcttcacaagggtacgactgcacttttcgttccctca

SEQ ID NO: 25427 - DNA, 80 bp, synthetic construct
  misc_feature 1..80: note = Artificially Synthesized Probe
  source 1..80: mol_type = other DNA
gacccagcgcggggtcggtggagaaaaggccgccgacgtggagacccagcgcggggtcggtggagaaaaggccgccgacg

SEQ ID NO: 25428 - DNA, 80 bp, synthetic construct
  misc_feature 1..80: note = Artificially Synthesized Probe
  source 1..80: mol_type = other DNA
ggatcgcttgagcccaggaggttgagaccagagtggccaacatagacaccctgtctctacttaaaaatgaaaagatcagc

SEQ ID NO: 25429 - DNA, 80 bp, synthetic construct
  misc_feature 1..80: note = Artificially Synthesized Probe
  source 1..80: mol_type = other DNA
gaagggcctgaaacccgcgggggaaagcagctggaagagcttggtggtgtgtgtgccccctgctaggagcccagtttttg

SEQ ID NO: 25430 - DNA, 80 bp, synthetic construct
  misc_feature 1..80: note = Artificially Synthesized Probe
  source 1..80: mol_type = other DNA
taagcctccagccccatcccaccccatggggcaggggcatcatgactctgcccagaccctgatgccctagacaccagctc

SEQ ID NO: 25431 - DNA, 80 bp, synthetic construct
  misc_feature 1..80: note = Artificially Synthesized Probe
  source 1..80: mol_type = other DNA
ggtctcaccttcttcactttggcctgctccgccttggagtccttctccgccttcttggccagcttctccagctgcttcgc

SEQ ID NO: 25432 - DNA, 80 bp, synthetic construct
  misc_feature 1..80: note = Artificially Synthesized Probe
  source 1..80: mol_type = other DNA
taccaggtggccctggccaccagcacctcgaggaaacagggcctctggcaacccatctggaaccacagacgccctggtac

SEQ ID NO: 25433 - DNA, 80 bp, synthetic construct
  misc_feature 1..80: note = Artificially Synthesized Probe
  source 1..80: mol_type = other DNA
gagatcgagaccatcctggccaacgtggtgaaaccccgtctctattaaaaatgtaaaaaaaaattagctgggcatggtgg

SEQ ID NO: 25434 - DNA, 80 bp, synthetic construct
  misc_feature 1..80: note = Artificially Synthesized Probe
  source 1..80: mol_type = other DNA
tccctccctgtttccttgttgggaacatgagggtggtaccagccaatctcaaagggttagtgtgaggacagaagaggtca

SEQ ID NO: 25435 - DNA, 80 bp, synthetic construct
  misc_feature 1..80: note = Artificially Synthesized Probe
  source 1..80: mol_type = other DNA
tgtaaaagaatgaggttactgagtgttcacaaatgcacaccaaggctccaagatgagatctcccggggttccagaaagct

SEQ ID NO: 25436 - DNA, 80 bp, synthetic construct
  misc_feature 1..80: note = Artificially Synthesized Probe
  source 1..80: mol_type = other DNA
gcctggccagcatattttttgtggcgggaggtagatgttatctttcatcttctctcagggcagaaaatctctacacattt

SEQ ID NO: 25437 - DNA, 80 bp, synthetic construct
  misc_feature 1..80: note = Artificially Synthesized Probe
  source 1..80: mol_type = other DNA
cgggagtctaggtcccgggtccatggttgggggtcagaggtcgaggccccggggaaggcataccgggttgagatttgggg

SEQ ID NO: 25438 - DNA, 80 bp, synthetic construct
  misc_feature 1..80: note = Artificially Synthesized Probe
  source 1..80: mol_type = other DNA
cgggaactaactggccctaggaggagcagtcctgggtctgaaagatgttaaaacattaacagatgcagaaaataaacatg

SEQ ID NO: 25439 - DNA, 80 bp, synthetic construct
  misc_feature 1..80: note = Artificially Synthesized Probe
  source 1..80: mol_type = other DNA
gccagggggctggggatgcccaggatttggcacgggggtctctgtgtcccacccactcctggcacaaaagccccagcctc

SEQ ID NO: 25440 - DNA, 80 bp, synthetic construct
  misc_feature 1..80: note = Artificially Synthesized Probe
  source 1..80: mol_type = other DNA
tccttaggcacaagacttgagttctcactaacttacccaaaacacaaccaaacacaatccctgcctggaccctctcctag

SEQ ID NO: 25441 - DNA, 80 bp, synthetic construct
  misc_feature 1..80: note = Artificially Synthesized Probe
  source 1..80: mol_type = other DNA
catcaccatggtatggggcaggaggaccttgcaaccctgggaattctggctgggcagacccccttgtggagacaagctct

SEQ ID NO: 25442 - DNA, 80 bp, synthetic construct
  misc_feature 1..80: note = Artificially Synthesized Probe
  source 1..80: mol_type = other DNA
gttccctgggttctgtgtgccgcgttccatccaccctgaagatgaaacgcagccgcagaccaaagccttccctttgtccc

SEQ ID NO: 25443 - DNA, 80 bp, synthetic construct
  misc_feature 1..80: note = Artificially Synthesized Probe
  source 1..80: mol_type = other DNA
acccgtcccgccccattatcctgtccgtggaccctggcccctgtgcctccccccatgtgacaggcagtaaatgtctgcag

SEQ ID NO: 25444 - DNA, 80 bp, synthetic construct
  misc_feature 1..80: note = Artificially Synthesized Probe
  source 1..80: mol_type = other DNA
ctccgagaccggcaccggacgccgccttccaccgcttcgccagggctggacatgtgctggacgctgagggacctggcttt

SEQ ID NO: 25445 - DNA, 80 bp, synthetic construct
  misc_feature 1..80: note = Artificially Synthesized Probe
  source 1..80: mol_type = other DNA
cgtccacgcccacatccacgtccacgcccacatccatgtcccacgcccacatccacacccacgtccacgtccacgcccac

SEQ ID NO: 25446 - DNA, 80 bp, synthetic construct
  misc_feature 1..80: note = Artificially Synthesized Probe
  source 1..80: mol_type = other DNA
acctcctgctccacctctgccaagctgcctggacccctgcccatccctcctctgcctcattccctgagagcctgctcaaa

SEQ ID NO: 25447 - DNA, 80 bp, synthetic construct
  misc_feature 1..80: note = Artificially Synthesized Probe
  source 1..80: mol_type = other DNA
ggcgtgagaccctctgtcccctccaccccgaccccagtccaggtcagggatttctgggcacctgccccaagtggacagca

SEQ ID NO: 25448 - DNA, 80 bp, synthetic construct
  misc_feature 1..80: note = Artificially Synthesized Probe
  source 1..80: mol_type = other DNA
ttgtagtcctagggggctgtggtcaggcaagaactgtgatccttgtgggggctgcagttctgcaggaggcactgtagccc

SEQ ID NO: 25449 - DNA, 80 bp, synthetic construct
  misc_feature 1..80: note = Artificially Synthesized Probe
  source 1..80: mol_type = other DNA
cagagcggcttctctgcccggcccatcctgggcgtttccacttctccctgaaatgtgtccatgcgagtcacacaggcgga

SEQ ID NO: 25450 - DNA, 80 bp, synthetic construct
  misc_feature 1..80: note = Artificially Synthesized Probe
  source 1..80: mol_type = other DNA
ggcagagcgtgagtatgcagagaaagcagaggccctagtggcatgagaaccatctggggcttcctcacccctctccaggg

SEQ ID NO: 25451 - DNA, 80 bp, synthetic construct
  misc_feature 1..80: note = Artificially Synthesized Probe
  source 1..80: mol_type = other DNA
tcgtggtcatcatctggttcttctcatcctagggcaccgagagaggaagggggccagtgaccccttggtgtctttctctg

SEQ ID NO: 25452 - DNA, 80 bp, synthetic construct
  misc_feature 1..80: note = Artificially Synthesized Probe
  source 1..80: mol_type = other DNA
gctcacacgtgcagctcacaagccctcccctccaggacagaccctggtgatggcacctataacaagtatccgagcccgca

SEQ ID NO: 25453 - DNA, 80 bp, synthetic construct
  misc_feature 1..80: note = Artificially Synthesized Probe
  source 1..80: mol_type = other DNA
cgcgggaatgtggctgcagctccccacacctcccaaaagcccctggggtgtggcccactcagcctgggatagtgaagcag

SEQ ID NO: 25454 - DNA, 80 bp, synthetic construct
  misc_feature 1..80: note = Artificially Synthesized Probe
  source 1..80: mol_type = other DNA
cccgccacccccaagcaaggcctttgctgttctttgcttccgaaggtgcctgggctctgtactgagaacctggccacttg

SEQ ID NO: 25455 - DNA, 80 bp, synthetic construct
  misc_feature 1..80: note = Artificially Synthesized Probe
  source 1..80: mol_type = other DNA
cacactgacttccagggaagggctgtgtctctagcagctggcgagtcagaggacactcgggggtaacagcagcaaaggag

SEQ ID NO: 25456 - DNA, 80 bp, synthetic construct
  misc_feature 1..80: note = Artificially Synthesized Probe
  source 1..80: mol_type = other DNA
tgggggtcccaggccatccgaacgcgggcgaaagggggcccatcccgcgccccgtaacttaccgcgcaggaggccggtcc

SEQ ID NO: 25457 - DNA, 80 bp, synthetic construct
  misc_feature 1..80: note = Artificially Synthesized Probe
  source 1..80: mol_type = other DNA
aggggcgccttgtgcggctgaatctcgtgtgcaggaggagagggcgaggctctgcagaaacatcagacccggccatccct

SEQ ID NO: 25458 - DNA, 80 bp, synthetic construct
  misc_feature 1..80: note = Artificially Synthesized Probe
  source 1..80: mol_type = other DNA
tggatggatatttgggctgagcaagcagctggtaaacacagggaggggagaagagcaaagtcccccgaggccccgtgagg

SEQ ID NO: 25459 - DNA, 80 bp, synthetic construct
  misc_feature 1..80: note = Artificially Synthesized Probe
  source 1..80: mol_type = other DNA
agcagaggctctgagactaagccagctttgccttttctgtctcctcctcacttttctaacaaaacaggcccaggcttcca

SEQ ID NO: 25460 - DNA, 80 bp, synthetic construct
  misc_feature 1..80: note = Artificially Synthesized Probe
  source 1..80: mol_type = other DNA
ccctgggagcacggctctgggggtgatttttctctctccctcactgctgtctacctgcccatggtaaccgagggtttgta

SEQ ID NO: 25461 - DNA, 80 bp, synthetic construct
  misc_feature 1..80: note = Artificially Synthesized Probe
  source 1..80: mol_type = other DNA
gcctgggctcagcccctctgtggggccaagtcactcgcaccccttctgtggggcctgagccccatgctttgctgctcacc

SEQ ID NO: 25462 - DNA, 80 bp, synthetic construct
  misc_feature 1..80: note = Artificially Synthesized Probe
  source 1..80: mol_type = other DNA
gctgtctgcaactcccctctcccctgagccctctgagtggggctcctcaagctctcaggggctccgccacacctgggctt

SEQ ID NO: 25463 - DNA, 80 bp, synthetic construct
  misc_feature 1..80: note = Artificially Synthesized Probe
  source 1..80: mol_type = other DNA
cttccaaggccacctctgcatccagaaaggacagtggcggctccagccggggaggaacaagggccacagcttccctgggg

SEQ ID NO: 25464 - DNA, 80 bp, synthetic construct
  misc_feature 1..80: note = Artificially Synthesized Probe
  source 1..80: mol_type = other DNA
gggacccgtgtcccacaaacaccagctggaaaaggcagcaacgtggggtctccctccccctcagccaaagtgaactgtgt

SEQ ID NO: 25465 - DNA, 80 bp, synthetic construct
  misc_feature 1..80: note = Artificially Synthesized Probe
  source 1..80: mol_type = other DNA
ttatggggactcaggtccccaggcccaggggctaatttcagagggagaggtttcctttgccaggcaattggattttcaca

SEQ ID NO: 25466 - DNA, 80 bp, synthetic construct
  misc_feature 1..80: note = Artificially Synthesized Probe
  source 1..80: mol_type = other DNA
agcgtgttctaacatttgtcataccagatggattgtcacgagcatatggggtgacattattattctgttactcccatgat

SEQ ID NO: 25467 - DNA, 80 bp, synthetic construct
  misc_feature 1..80: note = Artificially Synthesized Probe
  source 1..80: mol_type = other DNA
attaccctgacgctcgtttgcagcgtttaatttgcttcctccgcgctggaagcccacgtttggtgatgtatgtgttatga

SEQ ID NO: 25468 - DNA, 80 bp, synthetic construct
  misc_feature 1..80: note = Artificially Synthesized Probe
  source 1..80: mol_type = other DNA
ccagggccactggcctgtccccagccccattaaatgcccagggccactgtcctgtccccagtctcattaaacgcagcaaa

SEQ ID NO: 25469 - DNA, 80 bp, synthetic construct
  misc_feature 1..80: note = Artificially Synthesized Probe
  source 1..80: mol_type = other DNA
atggaggaaccccgctttggttaaggcttaaaggaggcgcacgggactgactcttcctatggaaaatcctgcacagggag

SEQ ID NO: 25470 - DNA, 80 bp, synthetic construct
  misc_feature 1..80: note = Artificially Synthesized Probe
  source 1..80: mol_type = other DNA
cagaggacatttaaccctaagtcaagaggccggcttcttccaggagtcccctccctgggcattgcctggaaatgaggggc

SEQ ID NO: 25471 - DNA, 80 bp, synthetic construct
  misc_feature 1..80: note = Artificially Synthesized Probe
  source 1..80: mol_type = other DNA
ctcgtcttcaaaaaaagtttacatgacagaaccatttagaagaaaaaaagcagagaggccttggttgaggttttggtggc

SEQ ID NO: 25472 - DNA, 80 bp, synthetic construct
  misc_feature 1..80: note = Artificially Synthesized Probe
  source 1..80: mol_type = other DNA
agaaactgcccgctctgctcatgtccgtaactcagatcttttgttaattttctcagcaacaagtgataactcaaccattt

SEQ ID NO: 25473 - DNA, 80 bp, synthetic construct
  misc_feature 1..80: note = Artificially Synthesized Probe
  source 1..80: mol_type = other DNA
agacgtttctaaataaacgagctttgcggggcggcaggttgatgcatctggagtgtggggtctcctccagcttccggagc

SEQ ID NO: 25474 - DNA, 80 bp, synthetic construct
  misc_feature 1..80: note = Artificially Synthesized Probe
  source 1..80: mol_type = other DNA
gtgtgatggcacagctgtggcccagccctgggggcttcatcgctgctgagtacctcgcagtgcgggaatcgaaaaagcct

SEQ ID NO: 25475 - DNA, 80 bp, synthetic construct
  misc_feature 1..80: note = Artificially Synthesized Probe
  source 1..80: mol_type = other DNA
tcctaaccgctgattttatttaaccgaatatatccaaaatatgatcacttccaggtcctcagtacacaaccaccacgagg

SEQ ID NO: 25476 - DNA, 80 bp, synthetic construct
  misc_feature 1..80: note = Artificially Synthesized Probe
  source 1..80: mol_type = other DNA
caggccgtctgctcatggctgaaaatgaggccaagcagctcccaagtctcgaagactccactggtgtggaggcagagggg

SEQ ID NO: 25477 - DNA, 80 bp, synthetic construct
  misc_feature 1..80: note = Artificially Synthesized Probe
  source 1..80: mol_type = other DNA
ccccctgctgttcagtcccaggccccacgcccatgcccatgccctgcacatgcctggggcaccgtgtagggggaggggtt

SEQ ID NO: 25478 - DNA, 80 bp, synthetic construct
  misc_feature 1..80: note = Artificially Synthesized Probe
  source 1..80: mol_type = other DNA
caatggactcgacagaggtcacataggcaggaccctgtctatggggtgcccggtacctgggtgtcatcggcatgctccac

SEQ ID NO: 25479 - DNA, 80 bp, synthetic construct
  misc_feature 1..80: note = Artificially Synthesized Probe
  source 1..80: mol_type = other DNA
ggaagccgtaggtcacgttgctggtggcctccatcatgatgacggtcaggctcagtgtcatccgcacaatcccgcctgcg

SEQ ID NO: 25480 - DNA, 80 bp, synthetic construct
  misc_feature 1..80: note = Artificially Synthesized Probe
  source 1..80: mol_type = other DNA
ttcctgccagggcctcttacaggttttcagtcttatttaagcgactgaaatgagaaacagaagacacataagagaaccca

SEQ ID NO: 25481 - DNA, 80 bp, synthetic construct
  misc_feature 1..80: note = Artificially Synthesized Probe
  source 1..80: mol_type = other DNA
gcgcttccgtgaaacacttgtggtcgagcgaggccaggccgtggtcttggtgtgggagtcaccaggctgggttttctttt

SEQ ID NO: 25482 - DNA, 80 bp, synthetic construct
  misc_feature 1..80: note = Artificially Synthesized Probe
  source 1..80: mol_type = other DNA
cagggccacggtcacagagggcaaggaggacacacaaggcccaagccatggtcacggagggaaaggaggacacacacggc

SEQ ID NO: 25483 - DNA, 80 bp, synthetic construct
  misc_feature 1..80: note = Artificially Synthesized Probe
  source 1..80: mol_type = other DNA
acgaaggcaactgtggccgtgacggcggccaccagcacggcctcaatcacctgcaggcagggccggtggatgtacctgga

SEQ ID NO: 25484 - DNA, 80 bp, synthetic construct
  misc_feature 1..80: note = Artificially Synthesized Probe
  source 1..80: mol_type = other DNA
aagggcctgtgtggccacgcctgccaacgcgatatgcaatgcggtttctcctcacctgattcgaaacatggtcagccagt

SEQ ID NO: 25485 - DNA, 80 bp, synthetic construct
  misc_feature 1..80: note = Artificially Synthesized Probe
  source 1..80: mol_type = other DNA
agcccctcggggccctggagcttacacaagagctctcagctccacagctatcaaccagagttttctaaaggaccaaattc

SEQ ID NO: 25486 - DNA, 80 bp, synthetic construct
  misc_feature 1..80: note = Artificially Synthesized Probe
  source 1..80: mol_type = other DNA
actccggccgcagcccctgcggagacgaagtcccgcttctctgtgtctctgcggaagtactcgaagatctgcaacaggga

SEQ ID NO: 25487 - DNA, 80 bp, synthetic construct
  misc_feature 1..80: note = Artificially Synthesized Probe
  source 1..80: mol_type = other DNA
atcacacacaaatgcagctcaatccccatcaacatgctggggacttttttggggaaaaagtgttccaaagtgtgtcttga

SEQ ID NO: 25488 - DNA, 80 bp, synthetic construct
  misc_feature 1..80: note = Artificially Synthesized Probe
  source 1..80: mol_type = other DNA
gcacacctgcctccgccagcgtggccagcacaggggaggtgttcccgctagccccgcctagcaaggctcctcatacaccc

SEQ ID NO: 25489 - DNA, 80 bp, synthetic construct
  misc_feature 1..80: note = Artificially Synthesized Probe
  source 1..80: mol_type = other DNA
cgtaatttaatatgtgcaaataccagttgttaccactttcagaaaaaaaggtgaccccttcacacccagccagcccatct

SEQ ID NO: 25490 - DNA, 80 bp, synthetic construct
  misc_feature 1..80: note = Artificially Synthesized Probe
  source 1..80: mol_type = other DNA
gggagagcagcgcacacgtcggggccccagggaaggggagctcagcacacacgtcggggcatcagggaaggggagagcag

SEQ ID NO: 25491 - DNA, 80 bp, synthetic construct
  misc_feature 1..80: note = Artificially Synthesized Probe
  source 1..80: mol_type = other DNA
ccttgatgaccctgtacttgaggccagccaggttttccaccacgatgtcaatgaagcaggccacgaggcccgtgaggatc

SEQ ID NO: 25492 - DNA, 80 bp, synthetic construct
  misc_feature 1..80: note = Artificially Synthesized Probe
  source 1..80: mol_type = other DNA
cagctcacacacgaggccattatcatcccgacaccaaggacaaggacacagcaagagaactgcacatggggcgcggtggc

SEQ ID NO: 25493 - DNA, 80 bp, synthetic construct
  misc_feature 1..80: note = Artificially Synthesized Probe
  source 1..80: mol_type = other DNA
actggcatgaagatggccacaaaagaatggaagagaattgagagagtccagaaagaaatccaaaacatgtacgatcaatt

SEQ ID NO: 25494 - DNA, 80 bp, synthetic construct
  misc_feature 1..80: note = Artificially Synthesized Probe
  source 1..80: mol_type = other DNA
caagtagctgggactactggtgcctatcaccaggcccagctaatatttatattttttgtagagacagggtttcaccatgt

SEQ ID NO: 25495 - DNA, 80 bp, synthetic construct
  misc_feature 1..80: note = Artificially Synthesized Probe
  source 1..80: mol_type = other DNA
gcaaggccgaagagcacccggacaggtggactgtgagatgcctcagcctctgacgtggcccagggcagagccaggtgggg

SEQ ID NO: 25496 - DNA, 80 bp, synthetic construct
  misc_feature 1..80: note = Artificially Synthesized Probe
  source 1..80: mol_type = other DNA
acacaaacggctccacagtgttcacgctgccctccccacaggacgcccagctgtcaggcagagctgggtggggtctcagc

SEQ ID NO: 25497 - DNA, 80 bp, synthetic construct
  misc_feature 1..80: note = Artificially Synthesized Probe
  source 1..80: mol_type = other DNA
tcacgattaccacacacaggcaaggacacagaagcagagaaggaaggtttgggatctgaggtcactgcgagccaggggtg

SEQ ID NO: 25498 - DNA, 80 bp, synthetic construct
  misc_feature 1..80: note = Artificially Synthesized Probe
  source 1..80: mol_type = other DNA
ggccaccctctccatcactcaagatgtcagcacttctctctaacgccactcaaggcctgccgtgcttctcaggctattcc

SEQ ID NO: 25499 - DNA, 80 bp, synthetic construct
  misc_feature 1..80: note = Artificially Synthesized Probe
  source 1..80: mol_type = other DNA
aggactttgagaaggtggctttcgtaatggaagaacacgacgtttacttcaagttcagcaatgcattccgtgcggttact

SEQ ID NO: 25500 - DNA, 80 bp, synthetic construct
  misc_feature 1..80: note = Artificially Synthesized Probe
  source 1..80: mol_type = other DNA
gaggtcgtggtaagctgagatcacaccactgcccttcagcctgggcgacagagggagactccgtcaaaaacaaaaacaaa

SEQ ID NO: 25501 - DNA, 80 bp, synthetic construct
  misc_feature 1..80: note = Artificially Synthesized Probe
  source 1..80: mol_type = other DNA
ttttaaaacttaaagcaggattaaagaccatttgctgttctgctcggcctgtgttgcgtcctaacattcagcaggcctct

SEQ ID NO: 25502 - DNA, 80 bp, synthetic construct
  misc_feature 1..80: note = Artificially Synthesized Probe
  source 1..80: mol_type = other DNA
agaccctcccccagaaaagcagcaccaagaaatccagtagctactcaggaagttggacaggaaagtcacaacgaacacga

SEQ ID NO: 25503 - DNA, 80 bp, synthetic construct
  misc_feature 1..80: note = Artificially Synthesized Probe
  source 1..80: mol_type = other DNA
agctttatgcgcctgcgtcccaggcagccacagagcaagtgcacgataaactattttttaaattgcttgtaagcagagta

SEQ ID NO: 25504 - DNA, 80 bp, synthetic construct
  misc_feature 1..80: note = Artificially Synthesized Probe
  source 1..80: mol_type = other DNA
aaataactaatcacccatggccccatcacttcaaattaaccccttcagatcacttttcatgcagactacagcacggagag

SEQ ID NO: 25505 - DNA, 80 bp, synthetic construct
  misc_feature 1..80: note = Artificially Synthesized Probe
  source 1..80: mol_type = other DNA
cttattgtgtttgcctgcacattgcaaattcaactcggtgcgaagggagactgagtacaaatactcgtcactcccaagat

SEQ ID NO: 25506 - DNA, 80 bp, synthetic construct
  misc_feature 1..80: note = Artificially Synthesized Probe
  source 1..80: mol_type = other DNA
tccgcagcagcggcgccgcctcctcgtcgtcccggtcccggccggaccaggacaccttcttagagacgttggccatggcc

SEQ ID NO: 25507 - DNA, 80 bp, synthetic construct
  misc_feature 1..80: note = Artificially Synthesized Probe
  source 1..80: mol_type = other DNA
tgggctcacagagcctggggagcacagcctggtgggcgcggccatgcagcccccatctccaaacctggggtctgggagaa

SEQ ID NO: 25508 - DNA, 80 bp, synthetic construct
  misc_feature 1..80: note = Artificially Synthesized Probe
  source 1..80: mol_type = other DNA
cagaaaaggaggctattgggttagagaaacagcttaggatttaaggaacttagacctgcgttgagcacaggatgcattct

SEQ ID NO: 25509 - DNA, 80 bp, synthetic construct
  misc_feature 1..80: note = Artificially Synthesized Probe
  source 1..80: mol_type = other DNA
tggtcctgcctcccttggtgatagaaaggccatctccccacagccccagttgtccctgctccccacctggcaggcctgcc

SEQ ID NO: 25510 - DNA, 80 bp, synthetic construct
  misc_feature 1..80: note = Artificially Synthesized Probe
  source 1..80: mol_type = other DNA
taataaggttgcctacattttacagataagaatatcctggcacaaagaggtggctgtgtctgcccttgatggatttgcta

SEQ ID NO: 25511 - DNA, 80 bp, synthetic construct
  misc_feature 1..80: note = Artificially Synthesized Probe
  source 1..80: mol_type = other DNA
ggaggctctctcctttcaggacctggagatttgggtccaaccggcagcgtgggactcgggctttttttttgttttttttt

SEQ ID NO: 25512 - DNA, 80 bp, synthetic construct
  misc_feature 1..80: note = Artificially Synthesized Probe
  source 1..80: mol_type = other DNA
ccacaagcttttactaaattgggaagacatccgccctgcttcctgacaatgtaaacaatatcagccctttccagaaacat

SEQ ID NO: 25513 - DNA, 80 bp, synthetic construct
  misc_feature 1..80: note = Artificially Synthesized Probe
  source 1..80: mol_type = other DNA
gtaacgttggatgtctgggttttttgccacctcgtacctttctacttcgctagcctgttcccttttgtaatgtaggctgt

SEQ ID NO: 25514 - DNA, 80 bp, synthetic construct
  misc_feature 1..80: note = Artificially Synthesized Probe
  source 1..80: mol_type = other DNA
gaggtcaggagttcaagaccagtctggccaatgtggtgaaaccctgtttctactaaaaagataaaaaattagccgggtgt

SEQ ID NO: 25515 - DNA, 80 bp, synthetic construct
  misc_feature 1..80: note = Artificially Synthesized Probe
  source 1..80: mol_type = other DNA
tgcttgagctcaggagcttgagaccagcctgggcaacctagcaagggcccatgtctacaaaaaataagaaagaaataact

SEQ ID NO: 25516 - DNA, 80 bp, synthetic construct
  misc_feature 1..80: note = Artificially Synthesized Probe
  source 1..80: mol_type = other DNA
ttttgtatttttagtagagacagggttttgcagtgttggtcaggctggtcttgaactcctgatctcagctgatccaccca

SEQ ID NO: 25517 - DNA, 80 bp, synthetic construct
  misc_feature 1..80: note = Artificially Synthesized Probe
  source 1..80: mol_type = other DNA
gaggctaaggcaggatgatcacttgagcccaggagttggagaccagcctgggcaccttggcaaaaccctgtctctataaa

SEQ ID NO: 25518 - DNA, 80 bp, synthetic construct
  misc_feature 1..80: note = Artificially Synthesized Probe
  source 1..80: mol_type = other DNA
ccaccttttgtagtctccagcgtctattattcccctctgtattttcatgtatacccactgtttagctcccacttagaagt

SEQ ID NO: 25519 - DNA, 80 bp, synthetic construct
  misc_feature 1..80: note = Artificially Synthesized Probe
  source 1..80: mol_type = other DNA
ttctcataaaggttgtactaatttacattcttaccaacagtgtatacgcgttccctttcctccacatcctctccaacatg

SEQ ID NO: 25520 - DNA, 80 bp, synthetic construct
  misc_feature 1..80: note = Artificially Synthesized Probe
  source 1..80: mol_type = other DNA
cttattgactcattctaatggtaatggatgtgtgggttattttcagcgttggacctttttttgtggctggtggttctgag

SEQ ID NO: 25521 - DNA, 80 bp, synthetic construct
  misc_feature 1..80: note = Artificially Synthesized Probe
  source 1..80: mol_type = other DNA
cttcaccactgggtgacctaagtcaaccttctcagattccctgagccttgggcaaatgcaaacaaagctgtgtgggatgg

SEQ ID NO: 25522 - DNA, 80 bp, synthetic construct
  misc_feature 1..80: note = Artificially Synthesized Probe
  source 1..80: mol_type = other DNA
acagagtgagactcggtctcaaaaaaaaaaaaaaaaatagagtcttgctctgtggcccaggatggggttcagtggcagga

SEQ ID NO: 25523 - DNA, 80 bp, synthetic construct
  misc_feature 1..80: note = Artificially Synthesized Probe
  source 1..80: mol_type = other DNA
atggagttcatcctgtgggtggctccagggcaggcaggccaattgccagggaggaccctctaggggaccatccatccctc

SEQ ID NO: 25524 - DNA, 80 bp, synthetic construct
  misc_feature 1..80: note = Artificially Synthesized Probe
  source 1..80: mol_type = other DNA
acatgagtcaccgcacccggtcacattttagggatctgcttccatctcagcagcccccagctggcttctctccctgcacc

SEQ ID NO: 25525 - DNA, 80 bp, synthetic construct
  misc_feature 1..80: note = Artificially Synthesized Probe
  source 1..80: mol_type = other DNA
catcaagtcccagcgttttccaagaatccctctctcttcctctgtcccaccagcacagctgagtcacacgagggcaggtg

SEQ ID NO: 25526 - DNA, 80 bp, synthetic construct
  misc_feature 1..80: note = Artificially Synthesized Probe
  source 1..80: mol_type = other DNA
agatcatggctctgtgccaggcaccatggctcaggctgggttcccagagaggagagactatggccctgcctgaagttgcc

SEQ ID NO: 25527 - DNA, 80 bp, synthetic construct
  misc_feature 1..80: note = Artificially Synthesized Probe
  source 1..80: mol_type = other DNA
gggtctcactctgtcacccaggctggagtgtggtagtgtgatcacagctcactgcagcctcaacctcctgggctgaagca

SEQ ID NO: 25528 - DNA, 80 bp, synthetic construct
  misc_feature 1..80: note = Artificially Synthesized Probe
  source 1..80: mol_type = other DNA
atgttgcacatatcagtagttctttattgctaagaagtattctattatataaatataccactttgggccaggcatggtgg

SEQ ID NO: 25529 - DNA, 80 bp, synthetic construct
  misc_feature 1..80: note = Artificially Synthesized Probe
  source 1..80: mol_type = other DNA
tacaggcactggttgatggagattttacttttgggctgttatgagtaaagctggtatgaacacttgtttataaaactttc

SEQ ID NO: 25530 - DNA, 80 bp, synthetic construct
  misc_feature 1..80: note = Artificially Synthesized Probe
  source 1..80: mol_type = other DNA
gtgaaatgtatattcaaacctttcacccatttttaattgggttgttgtcttcttagcaagttgcagagttcattatgttt

SEQ ID NO: 25531 - DNA, 80 bp, synthetic construct
  misc_feature 1..80: note = Artificially Synthesized Probe
  source 1..80: mol_type = other DNA
atatttactgtcaccagagaccatccccactcacctttgctggcattggaaatgctgacccagcctaaccaagctctcgg

SEQ ID NO: 25532 - DNA, 80 bp, synthetic construct
  misc_feature 1..80: note = Artificially Synthesized Probe
  source 1..80: mol_type = other DNA
aaatgaagagcccaagtggccagcttcaggctcagctggatctaggccctcctcgggactcagctgtgctgtctctgtgt

SEQ ID NO: 25533 - DNA, 80 bp, synthetic construct
  misc_feature 1..80: note = Artificially Synthesized Probe
  source 1..80: mol_type = other DNA
cttcaaaatctgtgaccacagatatggctggacagacaagggcatctcctgtatcagagatttcctgtgtttccgaggtc

SEQ ID NO: 25534 - DNA, 80 bp, synthetic construct
  misc_feature 1..80: note = Artificially Synthesized Probe
  source 1..80: mol_type = other DNA
gtttttattatttgtagagaacagggtctcactatgttgcccaggtgggtcttgagttcctgggctcaagtgatcctcct

SEQ ID NO: 25535 - DNA, 80 bp, synthetic construct
  misc_feature 1..80: note = Artificially Synthesized Probe
  source 1..80: mol_type = other DNA
gtttggttttcttttcctgtgttagtttgctgaggataatggcttccaactccatccatgtccctgcaaaggacatcatc

SEQ ID NO: 25536 - DNA, 80 bp, synthetic construct
  misc_feature 1..80: note = Artificially Synthesized Probe
  source 1..80: mol_type = other DNA
gaaacatctttcaattgtaataaatttctgcaaccaaataaataaagacacaaagctttaatggtgggaaggcaggcaga

SEQ ID NO: 25537 - DNA, 80 bp, synthetic construct
  misc_feature 1..80: note = Artificially Synthesized Probe
  source 1..80: mol_type = other DNA
gtgacttggaggtgtgcggggagtttcattttcatcctaataatgagagctacgggagggtttaaaccaagatgagtatg

SEQ ID NO: 25538 - DNA, 80 bp, synthetic construct
  misc_feature 1..80: note = Artificially Synthesized Probe
  source 1..80: mol_type = other DNA
caaatgggcagcgtgaaagggcgaggaagctgcagggtgaggcccgtcggcagaagcccatgggaaaggcctgcccagtg

SEQ ID NO: 25539 - DNA, 80 bp, synthetic construct
  misc_feature 1..80: note = Artificially Synthesized Probe
  source 1..80: mol_type = other DNA
gtggtgggggctgggcacagtgactcaagtttgtaatcccagctctttgggaggctgaggcgggaggatcacttgaggtt

SEQ ID NO: 25540 - DNA, 80 bp, synthetic construct
  misc_feature 1..80: note = Artificially Synthesized Probe
  source 1..80: mol_type = other DNA
taatgggatcaagcgagttaatgaacatggagtgcctgcaggtagaaaactcattaaagattaatttctttccctttcac

SEQ ID NO: 25541 - DNA, 80 bp, synthetic construct
  misc_feature 1..80: note = Artificially Synthesized Probe
  source 1..80: mol_type = other DNA
ttataaagtctgcagtagtgtacagtcatcagtcatgtcctagaccttcacattcactcactcactcacccagagccgct

SEQ ID NO: 25542 - DNA, 80 bp, synthetic construct
  misc_feature 1..80: note = Artificially Synthesized Probe
  source 1..80: mol_type = other DNA
agccaccgcgcctggcccgtttatcttttaaaacttatttttactgtaccttttctatgtttagctatgttttatttatt

SEQ ID NO: 25543 - DNA, 80 bp, synthetic construct
  misc_feature 1..80: note = Artificially Synthesized Probe
  source 1..80: mol_type = other DNA
aatcgcctaatgatgcatttctcagatggtatccccgtcgttaagtgatgcatgactgtatttccttccagtcttttttc

SEQ ID NO: 25544 - DNA, 80 bp, synthetic construct
  misc_feature 1..80: note = Artificially Synthesized Probe
  source 1..80: mol_type = other DNA
gcaaaaccgagttggctgagacagccaaactccaggagagagaaagggagaattctgctgcttttgttcctgttccaaga

SEQ ID NO: 25545 - DNA, 80 bp, synthetic construct
  misc_feature 1..80: note = Artificially Synthesized Probe
  source 1..80: mol_type = other DNA
attggagcaaggattcaagtgatgagcaggagtcgccccagctgccgttcagggaaaaacatccaggcagagggaacaga

SEQ ID NO: 25546 - DNA, 80 bp, synthetic construct
  misc_feature 1..80: note = Artificially Synthesized Probe
  source 1..80: mol_type = other DNA
aaggcccacctcctatatgctatcctcagctgctctctagtacacacacagggctgggcccagagcattttttttttttt

SEQ ID NO: 25547 - DNA, 80 bp, synthetic construct
  misc_feature 1..80: note = Artificially Synthesized Probe
  source 1..80: mol_type = other DNA
ttccatacatttctaggagccttcccagccccaggagagcaggtaggattgtccccattttaagtgacttgtctgagatg

SEQ ID NO: 25548 - DNA, 80 bp, synthetic construct
  misc_feature 1..80: note = Artificially Synthesized Probe
  source 1..80: mol_type = other DNA
aaggaatgctgtggagaccccattccttccttcgtaacctctgcctttgagcaccttcgggagagaaaaggaggctcagg

SEQ ID NO: 25549 - DNA, 80 bp, synthetic construct
  misc_feature 1..80: note = Artificially Synthesized Probe
  source 1..80: mol_type = other DNA
accacacccggccagcatgatgctatattaagagcacctctcattcccagaagcacccgggtttgaatgttaaatcatgt

SEQ ID NO: 25550 - DNA, 80 bp, synthetic construct
  misc_feature 1..80: note = Artificially Synthesized Probe
  source 1..80: mol_type = other DNA
tcctgcctcagcctcctcagtagctgggactacaggcttgagccactgtgcctagcttcctcttggtgtttcttttcttt

SEQ ID NO: 25551 - DNA, 80 bp, synthetic construct
  misc_feature 1..80: note = Artificially Synthesized Probe
  source 1..80: mol_type = other DNA
tttccttgggaaatagactaaagagtgcattccttattttattttttcttttaaaacatattaagatttctggctgggca

SEQ ID NO: 25552 - DNA, 80 bp, synthetic construct
  misc_feature 1..80: note = Artificially Synthesized Probe
  source 1..80: mol_type = other DNA
tttgtgtcttaaagaaaaaaatgtggtcacatgtaggcagtagctaaagctgtagcagttggtagattattgtggtgggt

SEQ ID NO: 25553 - DNA, 80 bp, synthetic construct
  misc_feature 1..80: note = Artificially Synthesized Probe
  source 1..80: mol_type = other DNA
gcctcttgtccagtgtctgacacagagtctggcacctagtaggtcctcaggaattggggtccctcctgatgagattgagc

SEQ ID NO: 25554 - DNA, 80 bp, synthetic construct
  misc_feature 1..80: note = Artificially Synthesized Probe
  source 1..80: mol_type = other DNA
ggtgcccagcctcatgtgaggtttaagtctgtgttgctgggcccagctggaagtcactagtggctctttgccttcgcggg

SEQ ID NO: 25555 - DNA, 80 bp, synthetic construct
  misc_feature 1..80: note = Artificially Synthesized Probe
  source 1..80: mol_type = other DNA
gttctgttcagttagcagaggtcacagagctctctctgcataggaaagtgccctagaaatggatatggggtaggagctgg

SEQ ID NO: 25556 - DNA, 80 bp, synthetic construct
  misc_feature 1..80: note = Artificially Synthesized Probe
  source 1..80: mol_type = other DNA
cttatttattcatttatttatttatttataagagatgggggtcttgctatgttgtgcaggctgttcttgaactcctgggc

SEQ ID NO: 25557 - DNA, 80 bp, synthetic construct
  misc_feature 1..80: note = Artificially Synthesized Probe
  source 1..80: mol_type = other DNA
actgggtaatttataaaggaaaagaagtttaatggactcacagttccatgtggctggggaggcctcacaatcatggtaga

SEQ ID NO: 25558 - DNA, 80 bp, synthetic construct
  misc_feature 1..80: note = Artificially Synthesized Probe
  source 1..80: mol_type = other DNA
tttcctgtcccaagagagacagaaggggacatctttatgcaagaagtctgtggctgtgtccctctattaggaaataggct

SEQ ID NO: 25559 - DNA, 80 bp, synthetic construct
  misc_feature 1..80: note = Artificially Synthesized Probe
  source 1..80: mol_type = other DNA
gtttccatggcaagaccatgtctctacaaaaaaatacaaaaattagcccagtgtagtggcaggtgtctgtggtttcagct

SEQ ID NO: 25560 - DNA, 80 bp, synthetic construct
  misc_feature 1..80: note = Artificially Synthesized Probe
  source 1..80: mol_type = other DNA
gtgtgaccttgggcaagtgtcctaaactttctgggcctcgctctttctatcggtaaaatgggatatttatttatttactt

SEQ ID NO: 25561 - DNA, 80 bp, synthetic construct
  misc_feature 1..80: note = Artificially Synthesized Probe
  source 1..80: mol_type = other DNA
aatacaaacaaaattagccaggcatggtggcatgaccctgtactcccagctactcaggaggctgtggtgggaggatggct

SEQ ID NO: 25562 - DNA, 80 bp, synthetic construct
  misc_feature 1..80: note = Artificially Synthesized Probe
  source 1..80: mol_type = other DNA
ggcttggagctccaaagccgagtggagaagggcagggggtctggggacccagagcagggatccccaaagcatattgctgc

SEQ ID NO: 25563 - DNA, 80 bp, synthetic construct
  misc_feature 1..80: note = Artificially Synthesized Probe
  source 1..80: mol_type = other DNA
tccagcttacaggagagagaccacgaggccagtgatcgcagacatcagtgtctccctacagagtctgccaagtgtgctgt

SEQ ID NO: 25564 - DNA, 80 bp, synthetic construct
  misc_feature 1..80: note = Artificially Synthesized Probe
  source 1..80: mol_type = other DNA
ctgaggcaggcggatcacgacgtcaggagatcgagaccatggtgaaaccccgtctctactaaaaatacaaaaaattagcc

SEQ ID NO: 25565 - DNA, 80 bp, synthetic construct
  misc_feature 1..80: note = Artificially Synthesized Probe
  source 1..80: mol_type = other DNA
tgggcctgtgaccctgttggggtgggaagtggaggctctgggggttactgaccagcccagattgctccctggattgggga

SEQ ID NO: 25566 - DNA, 80 bp, synthetic construct
  misc_feature 1..80: note = Artificially Synthesized Probe
  source 1..80: mol_type = other DNA
agaaggccacagagtgtagtaagaagaggtccacctgtctctttcactccctggctactctgaacttcagtctcttcttc

SEQ ID NO: 25567 - DNA, 80 bp, synthetic construct
  misc_feature 1..80: note = Artificially Synthesized Probe
  source 1..80: mol_type = other DNA
taggttcagataaacatggtaaataaacatacacatttattttcaatctctcctgaatttgcactagaacaacactgaag

SEQ ID NO: 25568 - DNA, 80 bp, synthetic construct
  misc_feature 1..80: note = Artificially Synthesized Probe
  source 1..80: mol_type = other DNA
aaaaaaaaaaacaaaacactggccatgcacagtggctcacacttgtaatccaagcactttgggaagctgaggtgggagga

SEQ ID NO: 25569 - DNA, 80 bp, synthetic construct
  misc_feature 1..80: note = Artificially Synthesized Probe
  source 1..80: mol_type = other DNA
gaaataagagaaggtgatacaggcattaaatatgaacaaaaacgccactgaatatgtgactatgaatattcatgagcatg

SEQ ID NO: 25570 - DNA, 80 bp, synthetic construct
  misc_feature 1..80: note = Artificially Synthesized Probe
  source 1..80: mol_type = other DNA
gaaaatcaaataattaattcaagaaaattccccagattgataagggtgtttcttgattgaaagggcccctaggagcccag

SEQ ID NO: 25571 - DNA, 80 bp, synthetic construct
  misc_feature 1..80: note = Artificially Synthesized Probe
  source 1..80: mol_type = other DNA
cacaaggtcaagagaccgagaccatcttggccaacatggaaaaaccccgtctctactaaaaatacaaaaattagctgggc

SEQ ID NO: 25572 - DNA, 80 bp, synthetic construct
  misc_feature 1..80: note = Artificially Synthesized Probe
  source 1..80: mol_type = other DNA
ctcctgagtagctgggattataggcgcccaccaccacgcccagctaatttttatatttttagtagagatggggtttcacc

SEQ ID NO: 25573 - DNA, 80 bp, synthetic construct
  misc_feature 1..80: note = Artificially Synthesized Probe
  source 1..80: mol_type = other DNA
aaagagagagagagagagagaaagaaagagaataaaatattttggccaggcacggtggctcacgcctataatctgaggca

SEQ ID NO: 25574 - DNA, 80 bp, synthetic construct
  misc_feature 1..80: note = Artificially Synthesized Probe
  source 1..80: mol_type = other DNA
atttagactattgaaagagttggggttgaattagtattgagactattaaaactaggcagacaggccaggtgcagtggctc

SEQ ID NO: 25575 - DNA, 80 bp, synthetic construct
  misc_feature 1..80: note = Artificially Synthesized Probe
  source 1..80: mol_type = other DNA
actgcttttagggttaccatttattgaagctctagtatatactagacaccgtatatacagtacttaattctcacgaaaac

SEQ ID NO: 25576 - DNA, 80 bp, synthetic construct
  misc_feature 1..80: note = Artificially Synthesized Probe
  source 1..80: mol_type = other DNA
cgagtgtccagcatgtagtgtcagacaccataagtcctttcccattccctccttcccaacagcccactaagctgggtagt

SEQ ID NO: 25577 - DNA, 80 bp, synthetic construct
  misc_feature 1..80: note = Artificially Synthesized Probe
  source 1..80: mol_type = other DNA
aggcagcagtccctgtcatctggcattggggtcccctgaatgacacatgaaataatcagacaatgcccagcgctatatgg

SEQ ID NO: 25578 - DNA, 80 bp, synthetic construct
  misc_feature 1..80: note = Artificially Synthesized Probe
  source 1..80: mol_type = other DNA
agaatccagggtttccataacaatgctttgccttcctgtttgcaagatgaatgtttcttttgactcacttttgctttcag

SEQ ID NO: 25579 - DNA, 80 bp, synthetic construct
  misc_feature 1..80: note = Artificially Synthesized Probe
  source 1..80: mol_type = other DNA
aggtgttctggtctgcccctgacttactctagttccagtttgggatttttgaacaaagaagaaagtgcatatcttttaat

SEQ ID NO: 25580 - DNA, 80 bp, synthetic construct
  misc_feature 1..80: note = Artificially Synthesized Probe
  source 1..80: mol_type = other DNA
tttccagagataagcctcagtgacctggtgaatttccttccagtcttttctgcctatgtataaggatacatacacctact

SEQ ID NO: 25581 - DNA, 80 bp, synthetic construct
  misc_feature 1..80: note = Artificially Synthesized Probe
  source 1..80: mol_type = other DNA
gcctaatctgcttttcttccccggctacttattatactgcaagcattttctaggtcctggcaaattcctcatcattcttt

SEQ ID NO: 25582 - DNA, 80 bp, synthetic construct
  misc_feature 1..80: note = Artificially Synthesized Probe
  source 1..80: mol_type = other DNA
cccaaagtgctgagattacaggcaggagccactgcacccggcccatttcagattatttttttgagcagattctagggttg

SEQ ID NO: 25583 - DNA, 80 bp, synthetic construct
  misc_feature 1..80: note = Artificially Synthesized Probe
  source 1..80: mol_type = other DNA
actcttcatataactggagtaaagcacccagcacggtgccgggcacagagggacaccacatttttaaaaatttttttgaa

SEQ ID NO: 25584 - DNA, 80 bp, synthetic construct
  misc_feature 1..80: note = Artificially Synthesized Probe
  source 1..80: mol_type = other DNA
cctccctccctttttctttctttttttcagagtcttgctcttgttgcccaggctggagtacaatggtgcgatctcggctc

SEQ ID NO: 25585 - DNA, 80 bp, synthetic construct
  misc_feature 1..80: note = Artificially Synthesized Probe
  source 1..80: mol_type = other DNA
tggcacctgcgctccataagctgttgttactgtcggattcagggagatgagggtgtatttatatttgcctgagacagcca

SEQ ID NO: 25586 - DNA, 80 bp, synthetic construct
  misc_feature 1..80: note = Artificially Synthesized Probe
  source 1..80: mol_type = other DNA
gcaactggcccagccttgagttcctatgtgtggctgtaaggtggggtgggcctgtgtctctcccctgcgctgtcttgaca

SEQ ID NO: 25587 - DNA, 80 bp, synthetic construct
  misc_feature 1..80: note = Artificially Synthesized Probe
  source 1..80: mol_type = other DNA
acatccccgggccaccctgccctttattttatttcccaccaccctggggaggaagggtgttgccttaaacactgccattc

SEQ ID NO: 25588 - DNA, 80 bp, synthetic construct
  misc_feature 1..80: note = Artificially Synthesized Probe
  source 1..80: mol_type = other DNA
tttccctcttggccaaggggcaggccatgtggttgctcctggctgacttttccattggcagttgctctcctgcaggggtt

SEQ ID NO: 25589 - DNA, 80 bp, synthetic construct
  misc_feature 1..80: note = Artificially Synthesized Probe
  source 1..80: mol_type = other DNA
aagtcagaaataaaagccagagcccctccttgacctcctggccccctccgctttatcaccccacctctctgcctgtcttt

SEQ ID NO: 25590 - DNA, 80 bp, synthetic construct
  misc_feature 1..80: note = Artificially Synthesized Probe
  source 1..80: mol_type = other DNA
tccttggcctgtataactgcatcaggccagtccctgcctcctgtcactttgctgccttgcctgtgtggcactttacttga

SEQ ID NO: 25591 - DNA, 80 bp, synthetic construct
  misc_feature 1..80: note = Artificially Synthesized Probe
  source 1..80: mol_type = other DNA
agcccaaattgaacatgtcctaaccacatctatccaggcctcccctaacaccaccccccttacggttcccatctcagata

SEQ ID NO: 25592 - DNA, 80 bp, synthetic construct
  misc_feature 1..80: note = Artificially Synthesized Probe
  source 1..80: mol_type = other DNA
atgccatggatagccctctccttcgtcttctgttcctccaaagtccattctccacactgaatctagtcttttttaaaaat

SEQ ID NO: 25593 - DNA, 80 bp, synthetic construct
  misc_feature 1..80: note = Artificially Synthesized Probe
  source 1..80: mol_type = other DNA
tatggctgggtgcggtggctcacacctgtaatcccagcactttgggaagccaaggccagcggatcattcgaggtcaggag

SEQ ID NO: 25594 - DNA, 80 bp, synthetic construct
  misc_feature 1..80: note = Artificially Synthesized Probe
  source 1..80: mol_type = other DNA
tgccttgtacaaggagtccttcttatccttcagaactcactgtaaattacatgtttcctctatttcacgttcattccagt

SEQ ID NO: 25595 - DNA, 80 bp, synthetic construct
  misc_feature 1..80: note = Artificially Synthesized Probe
  source 1..80: mol_type = other DNA
agaaagaagagagagaaagtgggaaggagaggggagagagaaagggaaggacaaagagggagagggaggagaaggagaga

SEQ ID NO: 25596 - DNA, 80 bp, synthetic construct
  misc_feature 1..80: note = Artificially Synthesized Probe
  source 1..80: mol_type = other DNA
tcgtgaggggtcgggtatattttggaaacatcttgcgtgttatgggttcttgcacttttagcacaggccttggggggggg

SEQ ID NO: 25597 - DNA, 80 bp, synthetic construct
  misc_feature 1..80: note = Artificially Synthesized Probe
  source 1..80: mol_type = other DNA
cgcctcaaaaacaaaacaaaaagaaatgtgcttatgttccctggctcagtgttgcttattggggtggagttgggggtggg

SEQ ID NO: 25598 - DNA, 80 bp, synthetic construct
  misc_feature 1..80: note = Artificially Synthesized Probe
  source 1..80: mol_type = other DNA
gcaagtgatgactggaaaagcaccccataaacagtatgtagatgtagaaggagcagtggtcagtttctgcatgttggtct

SEQ ID NO: 25599 - DNA, 80 bp, synthetic construct
  misc_feature 1..80: note = Artificially Synthesized Probe
  source 1..80: mol_type = other DNA
tgaggctaggagttcgagaccagcctaggcaaaagagtgacaccccatctttactaaaaaaacacaaaaattccccaggc

SEQ ID NO: 25600 - DNA, 80 bp, synthetic construct
  misc_feature 1..80: note = Artificially Synthesized Probe
  source 1..80: mol_type = other DNA
gaggtggcgggcctgaaggacaaggttcagcaggccaccagcgagaacatggggctaatggacaactggaaatccaagct

SEQ ID NO: 25601 - DNA, 80 bp, synthetic construct
  misc_feature 1..80: note = Artificially Synthesized Probe
  source 1..80: mol_type = other DNA
tgttctgcagcccaggaagcatttcccttgtccccgagagcatgcctggggcagtcaaggaaggggtcacctggcttaga

SEQ ID NO: 25602 - DNA, 80 bp, synthetic construct
  misc_feature 1..80: note = Artificially Synthesized Probe
  source 1..80: mol_type = other DNA
caggaattaattcataggagggatggctagcaacggactcttgcctgtatacaaattgtactcagagattcttgagtttc

SEQ ID NO: 25603 - DNA, 80 bp, synthetic construct
  misc_feature 1..80: note = Artificially Synthesized Probe
  source 1..80: mol_type = other DNA
ccaggaagggattttgttttttagcaagtgctcttccaggatcctgggctgaaagaaaaggaagaaacccaaattagctt

SEQ ID NO: 25604 - DNA, 80 bp, synthetic construct
  misc_feature 1..80: note = Artificially Synthesized Probe
  source 1..80: mol_type = other DNA
ctccagcctgggcgacggagtgagactccatctcaaaaaataataataaaaaaaccccaaaattagctgggcgtggtggt

SEQ ID NO: 25605 - DNA, 80 bp, synthetic construct
  misc_feature 1..80: note = Artificially Synthesized Probe
  source 1..80: mol_type = other DNA
tgggagacagagaaacaaattcccaggacaaatttctgtaggcattgcagggaaggagccatctgtttaatataataaac

SEQ ID NO: 25606 - DNA, 80 bp, synthetic construct
  misc_feature 1..80: note = Artificially Synthesized Probe
  source 1..80: mol_type = other DNA
gcatatggcaaactaactcttcactgttctctattcttccctccctgaaggcgcagtgttagcttctttatatccccttt

SEQ ID NO: 25607 - DNA, 80 bp, synthetic construct
  misc_feature 1..80: note = Artificially Synthesized Probe
  source 1..80: mol_type = other DNA
atgccaccatgccctgctaattttttttttttttttttttttagtagagatggagtttcactatgttggccaggctggtc

SEQ ID NO: 25608 - DNA, 80 bp, synthetic construct
  misc_feature 1..80: note = Artificially Synthesized Probe
  source 1..80: mol_type = other DNA
cagtggtttcttctggtacttttctgtcctattttctatgctgaaatctctgatccatctagaattcatccttatataag

SEQ ID NO: 25609 - DNA, 80 bp, synthetic construct
  misc_feature 1..80: note = Artificially Synthesized Probe
  source 1..80: mol_type = other DNA
gctattgtgaatgatgctgctaagaacatagatatgcatgtacttgttaagtacctgttttcagtgctttggggtatata

SEQ ID NO: 25610 - DNA, 80 bp, synthetic construct
  misc_feature 1..80: note = Artificially Synthesized Probe
  source 1..80: mol_type = other DNA
gccactgcactccagcctgggtgacagagcgagactctgtctccaaaaatataaaaaataaaaaattagccagatgtggt

SEQ ID NO: 25611 - DNA, 80 bp, synthetic construct
  misc_feature 1..80: note = Artificially Synthesized Probe
  source 1..80: mol_type = other DNA
taatttttgtatttttagtagagactcggtttcaccatgtttgtcttgaaccccctgacctcaggtgatccgccggcctc

SEQ ID NO: 25612 - DNA, 80 bp, synthetic construct
  misc_feature 1..80: note = Artificially Synthesized Probe
  source 1..80: mol_type = other DNA
gccagcttctgtccccagagccagctctgtgttctctgtgtcctgaaattctatccattctatcccaggttccctctttc

SEQ ID NO: 25613 - DNA, 80 bp, synthetic construct
  misc_feature 1..80: note = Artificially Synthesized Probe
  source 1..80: mol_type = other DNA
ttgatctgtttattgtacctgttctctcaggccccttgccacctggcttgtagggacaactgagaccaatggtgctttta

SEQ ID NO: 25614 - DNA, 80 bp, synthetic construct
  misc_feature 1..80: note = Artificially Synthesized Probe
  source 1..80: mol_type = other DNA
tcacatctgtatcccagcacttttgaagccaagttgggtggattgtttgaggtcaggagttcgagatcagtctggccaac

SEQ ID NO: 25615 - DNA, 80 bp, synthetic construct
  misc_feature 1..80: note = Artificially Synthesized Probe
  source 1..80: mol_type = other DNA
catgcctgtaatcccagcactttgggaggctgaggcaggaggattgagcccaggagttcaagaccagcctgggcaacata

SEQ ID NO: 25616 - DNA, 80 bp, synthetic construct
  misc_feature 1..80: note = Artificially Synthesized Probe
  source 1..80: mol_type = other DNA
ttgcatgtaacataagtagcatgcttttgataaaaagtaactattttctggcggggtggggggggtgggtgggggactgg

SEQ ID NO: 25617 - DNA, 80 bp, synthetic construct
  misc_feature 1..80: note = Artificially Synthesized Probe
  source 1..80: mol_type = other DNA
atagttttgagccatagatcccttgaaaaggttttaagggacccactgggatttcctcagaacacactttagcatccaat

SEQ ID NO: 25618 - DNA, 80 bp, synthetic construct
  misc_feature 1..80: note = Artificially Synthesized Probe
  source 1..80: mol_type = other DNA
cagagtgagactccatctcaaaaaaaaaaaaaagaaaaggaaagaaaagaaaatagctgggcgtggagcacacgcctgtg

SEQ ID NO: 25619 - DNA, 80 bp, synthetic construct
  misc_feature 1..80: note = Artificially Synthesized Probe
  source 1..80: mol_type = other DNA
atgcccggctaattttgtatttttagtagagatggggtttctccatgttggtcatgctggtctcgaactcccgacctcag

SEQ ID NO: 25620 - DNA, 80 bp, synthetic construct
  misc_feature 1..80: note = Artificially Synthesized Probe
  source 1..80: mol_type = other DNA
cagcctccttccatccttcagctctcatcagttatgagattcctcccttctgggataccttctttttcttcttatttttt

SEQ ID NO: 25621 - DNA, 80 bp, synthetic construct
  misc_feature 1..80: note = Artificially Synthesized Probe
  source 1..80: mol_type = other DNA
tatttttagtagagatggggtttcaccatgttgacaggctggtcttgactcatgacctcaagtaatctgcccgccttggc

SEQ ID NO: 25622 - DNA, 80 bp, synthetic construct
  misc_feature 1..80: note = Artificially Synthesized Probe
  source 1..80: mol_type = other DNA
cctcagaaccattatcatcatagtactccaggtagatcctgtcagttgattaagaggtgacatgggagataaaacccatt

SEQ ID NO: 25623 - DNA, 80 bp, synthetic construct
  misc_feature 1..80: note = Artificially Synthesized Probe
  source 1..80: mol_type = other DNA
tgctctgcactccccccacaacaactttaaaaagtactctaggaaaggtcaagtcctcaggaccatcccagccccaaatc

SEQ ID NO: 25624 - DNA, 80 bp, synthetic construct
  misc_feature 1..80: note = Artificially Synthesized Probe
  source 1..80: mol_type = other DNA
ttcttttctattatgaataggaacctgacttcactgagtctgcagagacgggttggggtaggcaggtgatgctggtagca

SEQ ID NO: 25625 - DNA, 80 bp, synthetic construct
  misc_feature 1..80: note = Artificially Synthesized Probe
  source 1..80: mol_type = other DNA
aatacccccaggggcttccctagagccttgtaggagtgcgcagtgctgagctcagactggtgcccatggggcacagattg

SEQ ID NO: 25626 - DNA, 80 bp, synthetic construct
  misc_feature 1..80: note = Artificially Synthesized Probe
  source 1..80: mol_type = other DNA
ttacaggcgtgagccaccaggctcggtctctgtctctttttttaattatttttaaaggcaaggctgggcgcagtggctca

SEQ ID NO: 25627 - DNA, 80 bp, synthetic construct
  misc_feature 1..80: note = Artificially Synthesized Probe
  source 1..80: mol_type = other DNA
gggggaggcagccctgtctcaggaacccgggtctgaatggggaggtagctctgtcccgggaacccctggtctgaaggggg

SEQ ID NO: 25628 - DNA, 80 bp, synthetic construct
  misc_feature 1..80: note = Artificially Synthesized Probe
  source 1..80: mol_type = other DNA
cctcagggagggtgctgttgcaggcaaacttgattccagattcaccctgctctttttgatttgtgttttcttcccttctt

SEQ ID NO: 25629 - DNA, 80 bp, synthetic construct
  misc_feature 1..80: note = Artificially Synthesized Probe
  source 1..80: mol_type = other DNA
actgcactccagccttggtgataaagtgagaccctgtctctaagaagaacacagaaagagagagaacctagttctgactg

SEQ ID NO: 25630 - DNA, 80 bp, synthetic construct
  misc_feature 1..80: note = Artificially Synthesized Probe
  source 1..80: mol_type = other DNA
caaacaaacacacaaacaaacaaaaaacctgcttcttcccctcggctccgcttcccatcagcacctcccaccccacctgc

SEQ ID NO: 25631 - DNA, 80 bp, synthetic construct
  misc_feature 1..80: note = Artificially Synthesized Probe
  source 1..80: mol_type = other DNA
cctctaagctgctggccgaagatgtcaccaaggccaaagacacagtattatgaaggtttggaaacccctctcctcacctc

SEQ ID NO: 25632 - DNA, 80 bp, synthetic construct
  misc_feature 1..80: note = Artificially Synthesized Probe
  source 1..80: mol_type = other DNA
cccgtaacgcacaggacacgtgtgcaattcataggaacggcccagatcgccctcatgagtgccacctggtacaggtaggt

SEQ ID NO: 25633 - DNA, 80 bp, synthetic construct
  misc_feature 1..80: note = Artificially Synthesized Probe
  source 1..80: mol_type = other DNA
ttccaaaacatacgtcagagcttttcagaaacagttcagttccacacatattgaccagatcccttcagatgctctgctgg

SEQ ID NO: 25634 - DNA, 80 bp, synthetic construct
  misc_feature 1..80: note = Artificially Synthesized Probe
  source 1..80: mol_type = other DNA
aatctgtgaatgtgaccttatttggaaacagggtctctacagatataattggttaaattaagatgaagtcatactattag

SEQ ID NO: 25635 - DNA, 80 bp, synthetic construct
  misc_feature 1..80: note = Artificially Synthesized Probe
  source 1..80: mol_type = other DNA
aattatcttctttattgacttattggctgtcttgcaagcaggatatagactgtaagccccatgagacaggggcacagtct

SEQ ID NO: 25636 - DNA, 80 bp, synthetic construct
  misc_feature 1..80: note = Artificially Synthesized Probe
  source 1..80: mol_type = other DNA
gatttatacaatctttgtgaatatcttcctttttttcttcgagttaggttagactaggacattgcctgcttccagcagca

SEQ ID NO: 25637 - DNA, 80 bp, synthetic construct
  misc_feature 1..80: note = Artificially Synthesized Probe
  source 1..80: mol_type = other DNA
ggtttaagtaagaagagagtgccaagacccctctctctcttccagggagtgaactgatttctgacttgagttgtttaaat

SEQ ID NO: 25638 - DNA, 80 bp, synthetic construct
  misc_feature 1..80: note = Artificially Synthesized Probe
  source 1..80: mol_type = other DNA
ctgagcttgtctagaaggctttgctgcagtacaatgagaagaagaaaataatctttttcagtaagcacaagaatgacctc

SEQ ID NO: 25639 - DNA, 80 bp, synthetic construct
  misc_feature 1..80: note = Artificially Synthesized Probe
  source 1..80: mol_type = other DNA
gcacggtggttcacgcctgtaatcccaacacttggggaggctaaggaaggcggatcatgaggtcaggagatcgagaacat

SEQ ID NO: 25640 - DNA, 80 bp, synthetic construct
  misc_feature 1..80: note = Artificially Synthesized Probe
  source 1..80: mol_type = other DNA
agagatccttaagggatgagttaaagagcaaaacagaacaactgaaaagcattgatctagaacgtagatctggtggccgg

SEQ ID NO: 25641 - DNA, 80 bp, synthetic construct
  misc_feature 1..80: note = Artificially Synthesized Probe
  source 1..80: mol_type = other DNA
gtgattctccagcttcagcctcctgacatagctgagactacaggtgtgcaccaccatgcccagctaatttttgtattttt

SEQ ID NO: 25642 - DNA, 80 bp, synthetic construct
  misc_feature 1..80: note = Artificially Synthesized Probe
  source 1..80: mol_type = other DNA
agcccaggagttcaagaccagcctaagcaacatggtgaaacccatctctacaagacataaaaatttagccaggcgtggtg

SEQ ID NO: 25643 - DNA, 80 bp, synthetic construct
  misc_feature 1..80: note = Artificially Synthesized Probe
  source 1..80: mol_type = other DNA
tggcttgctctcaccttgtttaagtctttgcccagatcttactttttcaatgacacctaccctgactaccccatgtaata

SEQ ID NO: 25644 - DNA, 80 bp, synthetic construct
  misc_feature 1..80: note = Artificially Synthesized Probe
  source 1..80: mol_type = other DNA
aatatatgtaataataataattttaaaaaattactggttgggcatggtggctcatgcctataatcccaacactttgagag

SEQ ID NO: 25645 - DNA, 80 bp, synthetic construct
  misc_feature 1..80: note = Artificially Synthesized Probe
  source 1..80: mol_type = other DNA
aaaacacacttcgggatcccttcgtagttcataagcgtgatgactggttttcacgctcacgtgtgagatgttcctcaaac

SEQ ID NO: 25646 - DNA, 80 bp, synthetic construct
  misc_feature 1..80: note = Artificially Synthesized Probe
  source 1..80: mol_type = other DNA
gaccacaggcaagattactaaaggaaaaaggagagcaaccacaatgaagaaaaatacagggcatgagagagaaatggtca

SEQ ID NO: 25647 - DNA, 80 bp, synthetic construct
  misc_feature 1..80: note = Artificially Synthesized Probe
  source 1..80: mol_type = other DNA
gaggatttatgagtagataaaagtgaagagaacttgcaggcaggaatataacattttagagaatctggagggattttccc

SEQ ID NO: 25648 - DNA, 80 bp, synthetic construct
  misc_feature 1..80: note = Artificially Synthesized Probe
  source 1..80: mol_type = other DNA
ttagagttatgcttattgctatttcacagataataaaaggtcggcaatgttaaagcattgggctgaggccacacggctgg

SEQ ID NO: 25649 - DNA, 80 bp, synthetic construct
  misc_feature 1..80: note = Artificially Synthesized Probe
  source 1..80: mol_type = other DNA
attattattattcttaggcacatcttcaaatggggttagttcacctactctgtgaggttgctaagaatgatatgcctggg

SEQ ID NO: 25650 - DNA, 80 bp, synthetic construct
  misc_feature 1..80: note = Artificially Synthesized Probe
  source 1..80: mol_type = other DNA
cgttggcttgttaagacctgcatccaaatgcccatatttcctgcccttacctactttggttaataaccacgcatgttggt

SEQ ID NO: 25651 - DNA, 80 bp, synthetic construct
  misc_feature 1..80: note = Artificially Synthesized Probe
  source 1..80: mol_type = other DNA
actgtcttccctttggacagctataaatcccttttggagtcagaatctctggcttctagacagggcctttttccagggtg

SEQ ID NO: 25652 - DNA, 80 bp, synthetic construct
  misc_feature 1..80: note = Artificially Synthesized Probe
  source 1..80: mol_type = other DNA
cttcaacattctgagccccttttcttttctcatttgtaaaatgacagtaacaatacctatgccattctccttgagatgcc

SEQ ID NO: 25653 - DNA, 80 bp, synthetic construct
  misc_feature 1..80: note = Artificially Synthesized Probe
  source 1..80: mol_type = other DNA
agggaagcctaggttctagtccttgtcctgctactgagtgactttaggcaggtcccttttcctatctaaggcctttcttt

SEQ ID NO: 25654 - DNA, 80 bp, synthetic construct
  misc_feature 1..80: note = Artificially Synthesized Probe
  source 1..80: mol_type = other DNA
aatccctacttactctcagctgacactttgccaccactgaggacaaaccaccacattttggaaaacttgttcaacctgca

SEQ ID NO: 25655 - DNA, 80 bp, synthetic construct
  misc_feature 1..80: note = Artificially Synthesized Probe
  source 1..80: mol_type = other DNA
agcccttgattgcagttgtaataaagttttctgggatttggggctgtagactgtggggttttttgaccaaatcttttgtg

SEQ ID NO: 25656 - DNA, 80 bp, synthetic construct
  misc_feature 1..80: note = Artificially Synthesized Probe
  source 1..80: mol_type = other DNA
ctttgtatctcacttgctcaaaaaagtgtctcctagcacaatggtatccccacagtagactcttggtggaggtcttttga

SEQ ID NO: 25657 - DNA, 80 bp, synthetic construct
  misc_feature 1..80: note = Artificially Synthesized Probe
  source 1..80: mol_type = other DNA
taatgtataggttaagagcaaaggattgttattaaggtcttctatctatagtccctttctctaatgtctacgggttatca

SEQ ID NO: 25658 - DNA, 80 bp, synthetic construct
  misc_feature 1..80: note = Artificially Synthesized Probe
  source 1..80: mol_type = other DNA
gtaaagaagattgggggataacgatgagtgcttggcactgtgctagcactttctacacattatctcatttaaatctcaaa

SEQ ID NO: 25659 - DNA, 80 bp, synthetic construct
  misc_feature 1..80: note = Artificially Synthesized Probe
  source 1..80: mol_type = other DNA
ttgaaaactaggatcccatccagttgctttgcattctcccctcccatctccaaacaaatacttggtaaattaactgacta

SEQ ID NO: 25660 - DNA, 80 bp, synthetic construct
  misc_feature 1..80: note = Artificially Synthesized Probe
  source 1..80: mol_type = other DNA
ccaggacttaagtccttgtgtcatgacaaggtcagattggtaaagaggcaggatggaatgcatgactctgcatagggtga

SEQ ID NO: 25661 - DNA, 80 bp, synthetic construct
  misc_feature 1..80: note = Artificially Synthesized Probe
  source 1..80: mol_type = other DNA
gaatggcagcttatatagatgctatatatgtgaacacattagagctttctcctcactttctcaagttctttgctagttgg

SEQ ID NO: 25662 - DNA, 80 bp, synthetic construct
  misc_feature 1..80: note = Artificially Synthesized Probe
  source 1..80: mol_type = other DNA
tacacctattagtacttgctgtattagagactaaaactgagaacttaaaaaaaattaataatcctattgcatgttaatag

SEQ ID NO: 25663 - DNA, 80 bp, synthetic construct
  misc_feature 1..80: note = Artificially Synthesized Probe
  source 1..80: mol_type = other DNA
gagatggagtcttgttctgttgcccaggctggagtgcagtggtatgatctcagctcactgcaagctccgccttccaggtt

SEQ ID NO: 25664 - DNA, 80 bp, synthetic construct
  misc_feature 1..80: note = Artificially Synthesized Probe
  source 1..80: mol_type = other DNA
tagattgcctttgtaggactaatattaggcacaagattagaaattatggtttagggtctggtgtggtagttcacgcctgt

SEQ ID NO: 25665 - DNA, 80 bp, synthetic construct
  misc_feature 1..80: note = Artificially Synthesized Probe
  source 1..80: mol_type = other DNA
gcttatagacggaggggcatggggtctctcttatacttctgggcaaccatctcttccctgatctcttttttttttttttt

SEQ ID NO: 25666 - DNA, 80 bp, synthetic construct
  misc_feature 1..80: note = Artificially Synthesized Probe
  source 1..80: mol_type = other DNA
aaaggtgcctacttcacagaatcaagcttcagttgactacatgccaaagagagacaaggttaagtgtggcctttcatggt

SEQ ID NO: 25667 - DNA, 80 bp, synthetic construct
  misc_feature 1..80: note = Artificially Synthesized Probe
  source 1..80: mol_type = other DNA
gtgtgggtctcctccagagtcaggatgtctggatgtctgactgggcagcgccgttggcaaactcctctagggtcatggtt

SEQ ID NO: 25668 - DNA, 80 bp, synthetic construct
  misc_feature 1..80: note = Artificially Synthesized Probe
  source 1..80: mol_type = other DNA
taactgctttttaatggattggttggaggtattctctctgacacatgccagcatcctcaaggagggtaacctgctttcta

SEQ ID NO: 25669 - DNA, 80 bp, synthetic construct
  misc_feature 1..80: note = Artificially Synthesized Probe
  source 1..80: mol_type = other DNA
ctgcctgaagacaggaatcttagctttgccccactagggagctcctttgtgatccaggtgatgtcactcagaactctggt

SEQ ID NO: 25670 - DNA, 80 bp, synthetic construct
  misc_feature 1..80: note = Artificially Synthesized Probe
  source 1..80: mol_type = other DNA
ttgtgaagcgatgtggagagccatggaggctcagctcttgaaacactctggtgattatgacaatagtagcaactaatact

SEQ ID NO: 25671 - DNA, 80 bp, synthetic construct
  misc_feature 1..80: note = Artificially Synthesized Probe
  source 1..80: mol_type = other DNA
aaaagagattctcagttggttctgaacacagattctcagttggtcctgaacttaccctcggaaccaactgagaataagga

SEQ ID NO: 25672 - DNA, 80 bp, synthetic construct
  misc_feature 1..80: note = Artificially Synthesized Probe
  source 1..80: mol_type = other DNA
caggcccctatttgcatgcctctctgtatatgccttgcaggtgtagatctcttttatacccagtacaggaaaagacagaa

SEQ ID NO: 25673 - DNA, 80 bp, synthetic construct
  misc_feature 1..80: note = Artificially Synthesized Probe
  source 1..80: mol_type = other DNA
aaaaacgatgtaaagccatatatcagccaaagctgtagctgaatgattaattgcctggttgtgagtcatgagctagtttg

SEQ ID NO: 25674 - DNA, 80 bp, synthetic construct
  misc_feature 1..80: note = Artificially Synthesized Probe
  source 1..80: mol_type = other DNA
agctccatcagattttccaggacccaaacagacccagggagagacacagaggacgaactcaatgaatttgggctgaggca

SEQ ID NO: 25675 - DNA, 80 bp, synthetic construct
  misc_feature 1..80: note = Artificially Synthesized Probe
  source 1..80: mol_type = other DNA
cttggttctggatccagattgacctggacttgagtctcagctttgccattaccaccagttatgggactgtggacaagtct

SEQ ID NO: 25676 - DNA, 80 bp, synthetic construct
  misc_feature 1..80: note = Artificially Synthesized Probe
  source 1..80: mol_type = other DNA
gagggagacttgggtttccatgtgattccatgtgattgatagcacaagctctgaacccacagcgcaggactctctgctca

SEQ ID NO: 25677 - DNA, 80 bp, synthetic construct
  misc_feature 1..80: note = Artificially Synthesized Probe
  source 1..80: mol_type = other DNA
gcccagtaggatgaggctcagggtcctattgaatgtgacttcaactgaataaagaaaagatcaatttatgcacacccgag

SEQ ID NO: 25678 - DNA, 80 bp, synthetic construct
  misc_feature 1..80: note = Artificially Synthesized Probe
  source 1..80: mol_type = other DNA
attcaatgcccgcatgatttcaggtgggtcacctagcccccacctatcaagtggacaacagtgatagctcctactgcata

SEQ ID NO: 25679 - DNA, 80 bp, synthetic construct
  misc_feature 1..80: note = Artificially Synthesized Probe
  source 1..80: mol_type = other DNA
tctccgcgtttccaacctgttgaggctcctcgccgcgggccgggccttgtgcgcctctgtccccgccgccctcaggcctc

SEQ ID NO: 25680 - DNA, 80 bp, synthetic construct
  misc_feature 1..80: note = Artificially Synthesized Probe
  source 1..80: mol_type = other DNA
tgaatagaaaaaacaaaaactgttaacgcgagctttggtgagatgcaatcttgagatctaagagtggggtgtaaagtcag

SEQ ID NO: 25681 - DNA, 80 bp, synthetic construct
  misc_feature 1..80: note = Artificially Synthesized Probe
  source 1..80: mol_type = other DNA
actggggagtcttcaggattcagatgcaaggactttggaagatagttttgaatttcagcaaaacttgtttttcagggcac

SEQ ID NO: 25682 - DNA, 80 bp, synthetic construct
  misc_feature 1..80: note = Artificially Synthesized Probe
  source 1..80: mol_type = other DNA
ggatccaaagaacctcacagctgtgggggatggagtggggcaacacctgaaacctccagcaagtctcttcctctctcagc

SEQ ID NO: 25683 - DNA, 80 bp, synthetic construct
  misc_feature 1..80: note = Artificially Synthesized Probe
  source 1..80: mol_type = other DNA
aaaagccacataccacacactggatctttgtgccagatcccgtgtcacgtgaggagacagccagcccaggcagggagctg

SEQ ID NO: 25684 - DNA, 80 bp, synthetic construct
  misc_feature 1..80: note = Artificially Synthesized Probe
  source 1..80: mol_type = other DNA
cggaactcgcacccacccccgcagccgtttgttcgtttgctcatttatttttggtctgaagtccatgcttttgtatttcc

SEQ ID NO: 25685 - DNA, 80 bp, synthetic construct
  misc_feature 1..80: note = Artificially Synthesized Probe
  source 1..80: mol_type = other DNA
gtgagcagtcatagggaacagtgcacccttatcgctgacacaggcgagggcttcgtcttctcacagctcttatcttgggt

SEQ ID NO: 25686 - DNA, 80 bp, synthetic construct
  misc_feature 1..80: note = Artificially Synthesized Probe
  source 1..80: mol_type = other DNA
ctgtgcccagccatggggtatatttcttaatgtgtggagttgtttttcctcatttttctggtccctttagagatggcacc

SEQ ID NO: 25687 - DNA, 80 bp, synthetic construct
  misc_feature 1..80: note = Artificially Synthesized Probe
  source 1..80: mol_type = other DNA
ccccgtgagcagacacagcttttgtgctgcttcttactgagccccgcgctgtgcctgctgaactgaaagatgtgtattag

SEQ ID NO: 25688 - DNA, 80 bp, synthetic construct
  misc_feature 1..80: note = Artificially Synthesized Probe
  source 1..80: mol_type = other DNA
ttgttagtcacacgtttctattgtgaaaatgactgagaatgttgtgggaggtttggaaaccaggaagaccacctgtccca

SEQ ID NO: 25689 - DNA, 80 bp, synthetic construct
  misc_feature 1..80: note = Artificially Synthesized Probe
  source 1..80: mol_type = other DNA
ttccagtctcctgagctctgagggatgcctgtgttgctttaagacactgactgacttgtcccagcagccagaggtgacag

SEQ ID NO: 25690 - DNA, 80 bp, synthetic construct
  misc_feature 1..80: note = Artificially Synthesized Probe
  source 1..80: mol_type = other DNA
tccctagacccggctttttaaacctattcttggggaatggggaccttctctgaggtccatcttggtcaggagcagtaggg

SEQ ID NO: 25691 - DNA, 80 bp, synthetic construct
  misc_feature 1..80: note = Artificially Synthesized Probe
  source 1..80: mol_type = other DNA
ttttcagcagaaataattctagttccctaagttatttttgttaaagggcttttctgactgtcggtgttcttggttgcttt

SEQ ID NO: 25692 - DNA, 80 bp, synthetic construct
  misc_feature 1..80: note = Artificially Synthesized Probe
  source 1..80: mol_type = other DNA
tctgtgtctccggcctcttccatctccccagacacgtctttcctgggaggtggccttggcatggccagtcctgctgccgc

SEQ ID NO: 25693 - DNA, 80 bp, synthetic construct
  misc_feature 1..80: note = Artificially Synthesized Probe
  source 1..80: mol_type = other DNA
ccctgacacacgatgccgtgtgtagtgacatgcaattccatgtagtgacgtgattccgtgtagtaaggcgatgccgtgtg

SEQ ID NO: 25694 - DNA, 80 bp, synthetic construct
  misc_feature 1..80: note = Artificially Synthesized Probe
  source 1..80: mol_type = other DNA
tttattttttaaaattactgaagtccaacaggagcattattcagcatttgaggccccagccagtacagcgctgcctggaa

SEQ ID NO: 25695 - DNA, 80 bp, synthetic construct
  misc_feature 1..80: note = Artificially Synthesized Probe
  source 1..80: mol_type = other DNA
gggtcccaattatatctagagaaccaggggaaaggtcacgttgtctagacattaatccagcactgtggcattttttcctg

SEQ ID NO: 25696 - DNA, 80 bp, synthetic construct
  misc_feature 1..80: note = Artificially Synthesized Probe
  source 1..80: mol_type = other DNA
gcttgtcatgctgttaattagattggaaaacctcggccttccatttcttaaattgctcactcctgcagtcctcttctctt

SEQ ID NO: 25697 - DNA, 80 bp, synthetic construct
  misc_feature 1..80: note = Artificially Synthesized Probe
  source 1..80: mol_type = other DNA
gggtggaggggcctgttctttgggagaccacctggtgggtggtgtcaggaaggtccaagtggcttttttttttttgagat

SEQ ID NO: 25698 - DNA, 80 bp, synthetic construct
  misc_feature 1..80: note = Artificially Synthesized Probe
  source 1..80: mol_type = other DNA
agttactgcggaaccaaggggctcatggccattgagtgactccagttaatgctgaattaggtacctcaggcttgagtcaa

SEQ ID NO: 25699 - DNA, 80 bp, synthetic construct
  misc_feature 1..80: note = Artificially Synthesized Probe
  source 1..80: mol_type = other DNA
accagtggagaactcgcgagcactcggccagtggtgcctccaatttgcagcctccaatccctggtcagaggtgtgacctg

SEQ ID NO: 25700 - DNA, 80 bp, synthetic construct
  misc_feature 1..80: note = Artificially Synthesized Probe
  source 1..80: mol_type = other DNA
ctgcatgaacactgcacagctacctcccgtgggctgccctgtgaggtgtggagctgggctgcagacttgcacaaggtggg

SEQ ID NO: 25701 - DNA, 80 bp, synthetic construct
  misc_feature 1..80: note = Artificially Synthesized Probe
  source 1..80: mol_type = other DNA
gccgagatggagaagcccaaacccctgcagcgctcccccatcacgtccggccctggaagcccccggaaaccctgccacgc

SEQ ID NO: 25702 - DNA, 80 bp, synthetic construct
  misc_feature 1..80: note = Artificially Synthesized Probe
  source 1..80: mol_type = other DNA
ccatatccacctccatcgcagccctttctctctcgaccttttaaatcacagtgtcacctccccctgctgtcctgccagtg

SEQ ID NO: 25703 - DNA, 80 bp, synthetic construct
  misc_feature 1..80: note = Artificially Synthesized Probe
  source 1..80: mol_type = other DNA
ccaccctggcattttccatcttttgaaggactggaaacgattggattctttaacttttttaagttgaggtgaaattcaca

SEQ ID NO: 25704 - DNA, 80 bp, synthetic construct
  misc_feature 1..80: note = Artificially Synthesized Probe
  source 1..80: mol_type = other DNA
gctttctttaactgcatccctggagggatctgagagtctctttccctgtctcctttcctttggaaaacatttcagccagg

SEQ ID NO: 25705 - DNA, 80 bp, synthetic construct
  misc_feature 1..80: note = Artificially Synthesized Probe
  source 1..80: mol_type = other DNA
aagtggggtcatggtttgggggccccctatctttctagcaccctctcgccctctcctgtatgtgaagtggggtcatggtt

SEQ ID NO: 25706 - DNA, 80 bp, synthetic construct
  misc_feature 1..80: note = Artificially Synthesized Probe
  source 1..80: mol_type = other DNA
ggatcagatggaacagaacacgtagaccacctcgcccgcccttagtcagctgggccattgaaaatcaagtccgtagaaag

SEQ ID NO: 25707 - DNA, 80 bp, synthetic construct
  misc_feature 1..80: note = Artificially Synthesized Probe
  source 1..80: mol_type = other DNA
cttccagcactttagagcagacacaggttggagataaggaaagttccagagcacagactggaacaagccccaggcctctc

SEQ ID NO: 25708 - DNA, 80 bp, synthetic construct
  misc_feature 1..80: note = Artificially Synthesized Probe
  source 1..80: mol_type = other DNA
ggtgcctcctgcatctacttttcctagaataagtatgagaaaccccaaataggttctagaaaaaacagcagtgtacacag

SEQ ID NO: 25709 - DNA, 80 bp, synthetic construct
  misc_feature 1..80: note = Artificially Synthesized Probe
  source 1..80: mol_type = other DNA
agctcttggtcccatgtgggattcgataattttctttacactgacaggcagcatctctttggccagccgtgtgactgttg

SEQ ID NO: 25710 - DNA, 80 bp, synthetic construct
  misc_feature 1..80: note = Artificially Synthesized Probe
  source 1..80: mol_type = other DNA
atttgcatctggacgttccacttccacctccttcctaaccaaagactgtatatgcaggtggttcgtggatgtatctgggc

SEQ ID NO: 25711 - DNA, 80 bp, synthetic construct
  misc_feature 1..80: note = Artificially Synthesized Probe
  source 1..80: mol_type = other DNA
tcaattgggacacctatgaacaaatgctcttcccatcagtaactccgtgtgcccctctcttgagcccctgtgagatgcac

SEQ ID NO: 25712 - DNA, 80 bp, synthetic construct
  misc_feature 1..80: note = Artificially Synthesized Probe
  source 1..80: mol_type = other DNA
tgtgggcgcctgtgcctcaggccacgtggaggccacatggaactcccattggggaggggaccatgggactggatggcggg

SEQ ID NO: 25713 - DNA, 80 bp, synthetic construct
  misc_feature 1..80: note = Artificially Synthesized Probe
  source 1..80: mol_type = other DNA
actcacacacaggcactctcctgcacacacacactcagacacacaggcactctcctgcacacacacacacacagacacag

SEQ ID NO: 25714 - DNA, 80 bp, synthetic construct
  misc_feature 1..80: note = Artificially Synthesized Probe
  source 1..80: mol_type = other DNA
tccctgggtgcctgggcacggagtgccggtcacactgtgcacccatccttgttttctcgatgttgggtttacttttcctg

SEQ ID NO: 25715 - DNA, 80 bp, synthetic construct
  misc_feature 1..80: note = Artificially Synthesized Probe
  source 1..80: mol_type = other DNA
tcatgaccttttactttctaggcctttacgtatcgcaacgtgtgcgttacgttcatcataaaaacgtccgacgaaaccaa

SEQ ID NO: 25716 - DNA, 80 bp, synthetic construct
  misc_feature 1..80: note = Artificially Synthesized Probe
  source 1..80: mol_type = other DNA
ctgccccttgctgtctgtgaggaaagcgggtgcttcaggcctgccaggggtccactgggagttgctgggtgggctcctca

SEQ ID NO: 25717 - DNA, 80 bp, synthetic construct
  misc_feature 1..80: note = Artificially Synthesized Probe
  source 1..80: mol_type = other DNA
gtcttattttggttctgtactgggagagggggaagcaatggggcaagacgctgcccctactgtccccagaagatgaggga

SEQ ID NO: 25718 - DNA, 80 bp, synthetic construct
  misc_feature 1..80: note = Artificially Synthesized Probe
  source 1..80: mol_type = other DNA
gtgcccgtgccttgctttttctcctttaaatcccacctgtgagttttatttttgtaactgcagagcatgatgaaaaccgt

SEQ ID NO: 25719 - DNA, 80 bp, synthetic construct
  misc_feature 1..80: note = Artificially Synthesized Probe
  source 1..80: mol_type = other DNA
ggtcctggtgcctgggaggtgcttaccccatggccccaaccggcacaagtgtggctgtcacagctggggtctgggtaggt

SEQ ID NO: 25720 - DNA, 80 bp, synthetic construct
  misc_feature 1..80: note = Artificially Synthesized Probe
  source 1..80: mol_type = other DNA
tggtacctcctgcctcccgaaatcacctctaagttcactttgtgccaggttttgttctccagcgcatcttcagtgctgcg

SEQ ID NO: 25721 - DNA, 80 bp, synthetic construct
  misc_feature 1..80: note = Artificially Synthesized Probe
  source 1..80: mol_type = other DNA
tctgagcggtgtccaccttttagctgtgatgaacggtgctgttgtgaacacttgtgtacaagtttcagtgtggacgtgtg

SEQ ID NO: 25722 - DNA, 80 bp, synthetic construct
  misc_feature 1..80: note = Artificially Synthesized Probe
  source 1..80: mol_type = other DNA
tgtccttgcgccactcccacactgtcctgttaccatcgcattgtaagtcttaaaactgggaatgtaagtcctttgacttt

SEQ ID NO: 25723 - DNA, 80 bp, synthetic construct
  misc_feature 1..80: note = Artificially Synthesized Probe
  source 1..80: mol_type = other DNA
ttggacaaaattcaacaccattcatgaaaaacacttaacaagctggtaaagagcatctgtgacagagcccacagctgaca

SEQ ID NO: 25724 - DNA, 80 bp, synthetic construct
  misc_feature 1..80: note = Artificially Synthesized Probe
  source 1..80: mol_type = other DNA
tcttagagtctttgaaaatatctgctttgttttgggtagagcatggatggttcccttagagcctatagagcacattgagg

SEQ ID NO: 25725 - DNA, 80 bp, synthetic construct
  misc_feature 1..80: note = Artificially Synthesized Probe
  source 1..80: mol_type = other DNA
tctcccacagagccacagtgtcattgtcacgcctgagaagtttacaatcattctgtccgtcctcctgtgaacaggtcgtc

SEQ ID NO: 25726 - DNA, 80 bp, synthetic construct
  misc_feature 1..80: note = Artificially Synthesized Probe
  source 1..80: mol_type = other DNA
cagcagagatgtcagggggcactctggaagtgccatgataaagctgcctttatcatcgtggtttgaaaaagtagccacaa

SEQ ID NO: 25727 - DNA, 80 bp, synthetic construct
  misc_feature 1..80: note = Artificially Synthesized Probe
  source 1..80: mol_type = other DNA
gagcccccctctttgccccctgatgaaccagtttcccctgttcacgtgtggatgtttgtacctttttaaaaaaagaaaat

SEQ ID NO: 25728 - DNA, 80 bp, synthetic construct
  misc_feature 1..80: note = Artificially Synthesized Probe
  source 1..80: mol_type = other DNA
cctctatgaagtcagactgggaaggtcgatctcaggcctcaaggcaatagggtgggggcacttcagactggggcactctc

SEQ ID NO: 25729 - DNA, 80 bp, synthetic construct
  misc_feature 1..80: note = Artificially Synthesized Probe
  source 1..80: mol_type = other DNA
tgagcatttgtatctgacatgtaagcatgtgtgtgtgagcttgtgtatgcatgtattcatgtgtgacatgtgtgagcatg

SEQ ID NO: 25730 - DNA, 80 bp, synthetic construct
  misc_feature 1..80: note = Artificially Synthesized Probe
  source 1..80: mol_type = other DNA
catagctaagcatgcatgtgcatgtgttcatgcatgagcaggagtgagcatacatatatgtgtgcatatgtgggtgttcg

SEQ ID NO: 25731 - DNA, 80 bp, synthetic construct
  misc_feature 1..80: note = Artificially Synthesized Probe
  source 1..80: mol_type = other DNA
agtgagcacgcctgtgtaaactgcctggctccacctctgatgggctccgtgatcttgagcggggtcaccaggctcatgcc

SEQ ID NO: 25732 - DNA, 80 bp, synthetic construct
  misc_feature 1..80: note = Artificially Synthesized Probe
  source 1..80: mol_type = other DNA
ggacactgcacacagcaccctctgtcctcacggagcctggggctgctgcagggccgtgggaaagaagttataaatccttg

SEQ ID NO: 25733 - DNA, 80 bp, synthetic construct
  misc_feature 1..80: note = Artificially Synthesized Probe
  source 1..80: mol_type = other DNA
gtcaccactttaaccagggacagcggtgcttgggtctcccacgtggctaactctgtggggccgggtcttgctaataactc

SEQ ID NO: 25734 - DNA, 80 bp, synthetic construct
  misc_feature 1..80: note = Artificially Synthesized Probe
  source 1..80: mol_type = other DNA
ccctgagcattttagcgcatttagtcctcagcacggtcccgagataccctgccatgccccgagtcacagaggggaaactg

SEQ ID NO: 25735 - DNA, 80 bp, synthetic construct
  misc_feature 1..80: note = Artificially Synthesized Probe
  source 1..80: mol_type = other DNA
ggaatggaggggcagggagggagggagggagggagggctgcagcggggcctggctgagcctgaggggggcacaggaactg

SEQ ID NO: 25736 - DNA, 80 bp, synthetic construct
  misc_feature 1..80: note = Artificially Synthesized Probe
  source 1..80: mol_type = other DNA
cgtgtcccgtgcagggtcctgggggactccatcagcgttcctggcctgcattgcctctggccaggggtgggcctcaagct

SEQ ID NO: 25737 - DNA, 80 bp, synthetic construct
  misc_feature 1..80: note = Artificially Synthesized Probe
  source 1..80: mol_type = other DNA
caggcaagcatcctctgacctgggagctgcgtattgttcccgtttacaggtgagaaactgaggcctaggaaggacagaca

SEQ ID NO: 25738 - DNA, 80 bp, synthetic construct
  misc_feature 1..80: note = Artificially Synthesized Probe
  source 1..80: mol_type = other DNA
cagacagaatgaaaagcacagcactccaaacagggcttcctgcaggtccttttacgtatatttgggtttttgtatatatc

SEQ ID NO: 25739 - DNA, 80 bp, synthetic construct
  misc_feature 1..80: note = Artificially Synthesized Probe
  source 1..80: mol_type = other DNA
ccactgccttttggcttccaaagtttctgtgacaaatctgctgataatcttattaagaagcccttggatgtgatcagttg

SEQ ID NO: 25740 - DNA, 80 bp, synthetic construct
  misc_feature 1..80: note = Artificially Synthesized Probe
  source 1..80: mol_type = other DNA
gtcccgttctttcatgtttggctcccaaaggaggaataagataaaaatgagggagaaaaaacagtgccagccctctaaat

SEQ ID NO: 25741 - DNA, 80 bp, synthetic construct
  misc_feature 1..80: note = Artificially Synthesized Probe
  source 1..80: mol_type = other DNA
ccctatgggcactgtggctgggtccagagctcagaggctggagctttgagaactgggctggagccaaaccatgatggaag

SEQ ID NO: 25742 - DNA, 80 bp, synthetic construct
  misc_feature 1..80: note = Artificially Synthesized Probe
  source 1..80: mol_type = other DNA
tgtacatatgcatgggagtcttactttgcattaatgggattgccctgtgtctgaaagttcctctttcctttatcctgcat

SEQ ID NO: 25743 - DNA, 80 bp, synthetic construct
  misc_feature 1..80: note = Artificially Synthesized Probe
  source 1..80: mol_type = other DNA
tggatcttgtcctcaggagcccttcaaaggggcagcagagactccaggccctgtgccccgaggagtcaggctgggctggt

SEQ ID NO: 25744 - DNA, 80 bp, synthetic construct
  misc_feature 1..80: note = Artificially Synthesized Probe
  source 1..80: mol_type = other DNA
ctgtttcctgatcttatcacagccccagcttggacatgtgggaccaggcacttcttatgagaaaaaggatcattgtaaca

SEQ ID NO: 25745 - DNA, 80 bp, synthetic construct
  misc_feature 1..80: note = Artificially Synthesized Probe
  source 1..80: mol_type = other DNA
gtcccttctccccactggctctgcccatcaatgctcaaagcatggaaggggaagcctgtggacaccatgtctgctgtgcc

SEQ ID NO: 25746 - DNA, 80 bp, synthetic construct
  misc_feature 1..80: note = Artificially Synthesized Probe
  source 1..80: mol_type = other DNA
ccagacccacacagccgccagcttccggctccccgccttcgtcggccagtggacacacttagccctcagtgtggcaggtg

SEQ ID NO: 25747 - DNA, 80 bp, synthetic construct
  misc_feature 1..80: note = Artificially Synthesized Probe
  source 1..80: mol_type = other DNA
agacaagggctgtttgtttgaagttgttctaagtcctggtgtctgggggttctgaaagctgacttttcacctttggcagg

SEQ ID NO: 25748 - DNA, 80 bp, synthetic construct
  misc_feature 1..80: note = Artificially Synthesized Probe
  source 1..80: mol_type = other DNA
gcctttttaccttgtctttttttttttttttttttttgactattgggattggatgtgtggtttttttgtgggtttttttt

SEQ ID NO: 25749 - DNA, 80 bp, synthetic construct
  misc_feature 1..80: note = Artificially Synthesized Probe
  source 1..80: mol_type = other DNA
ctgaattgagatacttgggaaagaaacattcaagttgtgtgactcataatttttggcagaaacaagcacagagctttggg

SEQ ID NO: 25750 - DNA, 80 bp, synthetic construct
  misc_feature 1..80: note = Artificially Synthesized Probe
  source 1..80: mol_type = other DNA
ttcaaccccagctcctccctgggcctgacctgggggctcctgaatgtgaaggctcagctgctgggctgctgccccacccc

SEQ ID NO: 25751 - DNA, 80 bp, synthetic construct
  misc_feature 1..80: note = Artificially Synthesized Probe
  source 1..80: mol_type = other DNA
ctacatctgcggcgtttctgtccttggcttctgggttttgtttttgatgaaaaggtgaagttcaaagaaagcaaagccat

SEQ ID NO: 25752 - DNA, 80 bp, synthetic construct
  misc_feature 1..80: note = Artificially Synthesized Probe
  source 1..80: mol_type = other DNA
gttgtgtgtggatgtgtgtgtgtctgtgtggtgtgtctgtcttgtgtgttgtgtgtgttgtatgtgtgtctctggtgtgt

SEQ ID NO: 25753 - DNA, 80 bp, synthetic construct
  misc_feature 1..80: note = Artificially Synthesized Probe
  source 1..80: mol_type = other DNA
tcctcgacccgattggacacgacttactgaagctcagatggtgcctgggcagggaaggccagcgtgcccaccccagcggc

SEQ ID NO: 25754 - DNA, 80 bp, synthetic construct
  misc_feature 1..80: note = Artificially Synthesized Probe
  source 1..80: mol_type = other DNA
cggccctggagcaccctcctgtttcagaggatttttctttatctttcttgcgatcttaagtatttcatttcacaaaccaa
